United States Patent Application Publication US 2014/0057251 A1 - sequence listing, part 36

SEQ ID NO: 38355 - DNA, 2359 bp, Cannabis sativa
  modified_base (2079)..(2083): a, c, t, g, unknown or other
  modified_base (2180)..(2180): a, c, t, g, unknown or other
ctctatgtatgcatagttatgttagtgaaatcctggctgtattgtatatctgtttccaatcaaatttaaccatgaaaattagcaaaatgcttgaaacatgagacttactcaattgaaatatcacctaaatacatctcctatactttattagatatactgatgatgatgatgctcctgatgaaaaaatatcgcatgcattacttattttaggatttgggtatgaaattaatgatcatggagtaaagtgaaaatattgaatcgttgaaaacttgtatggagagcagataattattttagaattaaatatacaaggagaaacgattgggaatactatgttccaattcttagtgataaaacaatcttttgctaagtaaattaagctactaattaactgcatcctttgctcggtgtggtctctcatttactataatgttggattttggtattgttatgaattatattctaagtttttgtaatggaatggattgctaaagttgtatttgagtaaaagagatgttattttaatgctaaagacctatatttgagtaaaacatatactttactagatagatattttctgtttcatagttcacccaattatgaacttcagaatcagcaggttatgacattggtttaaataccaaatatgtaagtactgtcattagttcttttctgtacaattgagccatttatacataatctataacagcatatgttgattggaacaggtctagctggtgggttagcttattctaataatctgttaccagctgcacctgttggtctccttggtgcactcttactgttccaggtacaagaaaccaatgactaatataacattactgatttcagcaaacatgtctcatgatatatgatgattgttaatgtctttcttgtatgaagttttaatgttaaaaaactatggtgaagttagataaattaatctagcaaagacttcaattatattcttctgcctaatctgttttcattttatttgtatttgttgcatgctctagaaaatggtgaatgaattgtatattgtattttatataatagtatatatttgtatacaaagttagaagactaaataggaaactactaaatgcaatttaccttaatttttataactaatatacaattaatattctaacactcccctcaagctggagcatagatattaatcatgcccagtttgttacaaagataatcaacatgcaccccattcaaagcctttgtaaaaatatttcttaattattctctattcttcacatatcctgtggagatcaggtcttgttgatttttttcacaaaaaaaatgataatcaatctcaatgtgcttagttcgctcgtgaaacacaggatttgaggaaatatgaaaagcagcttgattatcatacccacaattttactggaatagaagtcttaaacccggattgataaatccatattacctcacacatagactgtgtcatagctctatattttgattcagcactggatctaggcacaatattttgtttcttactcttccaagtgatcagattgtccccaacaagtacacaatatcctaaagtggatcatctatctaccttggagcctgcccaatctgcatcagagaaacactcaatctgagtatgtccatgatccttgtaaactatacctcgtcctggtgctctcttcaagtaacataaaatttgctctaatgctacccaatgatgaattgttagagaagacataaactaactaacgatactaactgggaatgcaatatctggacgagtcacagttagataattcaactttccaaccaatctgcgatatttctcaggattttcaaatggttccccatcacgtgtaagatgcacatctggactcattggatcattacaaggttctgctcccaattttcctgtctcaattaacaaatcaagtacataattcctttgagacagaaaaatatcttgtttactccgagcaacttcaacacccaagaaatactaaagcacccctaaatccttcgtgtgaaattgggtatgaatgaaagacttaagggatgagatgccttcagtatcatttccannnnnaacgatgtcttcaacatacaccactaacaaaatgataccaggagttgaccttttatagaacatggaatgatgtgacttacttttcaacaaaccaacnttctcaatagcctgactaaatttaccaaaccaagcacgaggactttgtttcaatccatataaggatttgcgaagatgacaaacacgctctaactccccctgagcaaaaaacccaagaggttgctccatatacacttcttcctcaagatctccatgaagaaaagtatttttaatatcaag

SEQ ID NO: 38356 - DNA, 2694 bp, Cannabis sativa
aaaaaactgttttaaaatgtaaaataatgaaaaaactccttttaaaaattagtacaattatatcatcatatagaaaaaattgatgatttataaattttaaattttttcaaattccaaaaataaaataaaaaatgataaggtaaaaattaaaagtgatttacattatttgttaattaatttataacacttttatattatagtaatataagaattaatttgtgaattgatgaatatattatggttaattacaaggttccaagagggttgattagcttggaaacaggagaaggacataacaaaaggaatatatatattacaaaaacaagtcctgatgtggttgccaaagcctacttaactcaatttcaacaggatttcacaacctttttaaggtttcgttcacaagaaattgtgagtgggggatgtatggtactaacaatgatgggcagtattataagcaatgatcctaaacataagatggaaatattaggaagggctttggacgacatggtctcccaggtatatacatatcttttatctaacaatttttacaaaatatttttaaaatataacaataattgttaataaagttagtttttttaaaatatatatataaatattaatataatttattttagattaatttaaatatataaaaatattaatatattatttgtaatcttatttttaatataaggatgtatgttcaattttaatatttttaaattttatttatttttcttaaattttaaaaaatttaaatattgttttttgaaaaaatataaaaaataaaatactaataagtggtttctattttatttataacattttaaaaatatacataacaaaaataaaattaaaaatataactaagtgtacttgtaatattgcacctaacaataacttaatatatatagtataagattggatttgtttatttttttcttataaagtatagtactatcatatatatataatgaattaattaattaataatctgttatatattttagggcataattgaagcgaaatgtttggctaattttaacataccagtgtattgtcctactgcgaaggaggtgagagaagtgattgaagaagaaggatcttttgagttacgaaagcttgaagctttccaggttgattgggatgctgggttcatagaagaaaaagaaaaaattaacaacaacaataatatcaatgattgggatgatattgataaatacaatagagggaagtatatttcagactacataagagcaatttttgagcctatgctcgaaaaacaatttggaaaaactgtcatggatgatttatttgagaggttcactcacaggatcatcgaatcaatggccaatgaaaattggcactacataaacttggttatgtctttgacaaagaatcaattatcagcttaaatatcaaattatataagtactcatacatgcatgggaaagcatgtatatattaatataattctaaaagaccatatgtttttgcatatgtcaataaatttccttgataataataaagaaaattgtggccgtaaagattttgcggttacagaatgaaatcttcatacagcataacacaaatttgcagaagcaaaagagaaacagaaataaatagtgtggaattaattaaaaacttgacacaagaaaattatatgtagtattagtgttttttcagacactctcttagtctacgaggccacgcccagtgaataaaatcaattagtaaatctcaaataattacagatataattgacttataaataagtttagactccctcttataaagttttgtcgcaatctgtaatttactttgccaatctaatttctgaacaccaccaaatagcaaaatcccttcgtcttttaatgtgtaagtgcttacttcctcccgaagtaagtctttgacaagtcttctcccaaaaatctttttcttgttcaatcaagttcttcaactcattctaagaatataagaacaaaaaaacaaagactaaaaccaggcttgaacactctaggttttcacaaaagaaactctctcctcacaaagatgaaaatatgaaaaatgaagttgaaagaggtgaaaaacgtttggatgctcaccaggtcctatttatagaacatagaaactttagagacagacacaaacacgtttataaagctgtacaagactttactaaaacaatccctcatttgcagcatcaaaatcatattttgctgcagtagatcaagaccacaaaggaaactttccgaaaagaccaagatcacaaattggtcttcaatacctaccaaataaagtttatttgatcttttacaatcatggcaaaactgaattcatcaattagaaaaagaaaaattcaagtttcccaaaagtagacaactttccataagagaattccttctcttataagacaagtttcctaaacaaatgaaatcagctgagaataaaaattttcttagaagaaaagagcaattagaagcacgaaatcaacacaataagatcaatttaattgcacaataaaaacacacattaattaaaaaatattttgacaactattttgccaaaaaagactttacaatctccccctttgacactttagataatcaaaatatttttaattaacaaacaactacaaaacaaagttagcaaaaatatacaaataaactcaccctgagaagcacaacattaaacc

SEQ ID NO: 38357 - DNA, 7424 bp, Cannabis sativa
aggagacggtaatacaatatgattttattttctctctagtaaatctcgttagactggaacgggctattcttactggttcgtataaactctccccatttcggataaaagaagaaaaagtctgccgagacacgatctaaatttgacacaatattatatcttgtatcaaatttagcacaacctttagtatgtgctaaatttgacacaacttagagcatctccaaatatgaatggtataaagaaggtgtagatatattccttagcatatgttcataaaattgaactacatagtgtataagatgatttaaatttgatacatgttaaaaattgtgccaaatttaacacaaaatataacatgcactgaatcttacaccaagataaatatcactattttgtttactcttttgccacgcattaatgcctttattaactttttacattttattgatatgtttactaaaattttatacattttcaatcaaattttaatgtatttattgactttcttacaactttttattaaaaaaaaagttaatttaccactacatcggagcacgataataaaatttgggtccaatataggattgacttattttttgagtcaaatttagtgcaaaatttacaccacccattaaagatggtcttatgatacagaattggagaagtcttttgttaaaaaagagttcttttaaaagtgtttgggtaataaatgagaagtcttttttcttaatttaaaagttcttcgggagaacttatgatttgtaatttctcttaaaatgacttttgagaagttattcttaaaattgaaataatttacataatctttaatttactcaaaaaaaaaaaattccaatgacatttgaacactttgaaaaatattttttattaaaaaaaaatcttcatataatagttatctaaatgttttaaataagtcaaaatttataattatctcatacttctagttataagtaaaagtaaatacttactcaaataagtatccagtctagcataattttaaattaataacttcctaaaattcaaatatttttggatactaactaaaagcaattcaaagtatttggataaatttaaaagaaagtaaatatagtaattattatttttgtgtaaaagtaagtgttaacacaaattttcgttgactaaatatataactttacataataaatttactacagaatttaataataataatgagcacaagatattttacgtgattttgtagtttaaatctacatactccacgagtccgtattattagggatatttatttaaatgcatagtataaatctcagtattaataaataatagaattctctctctattttgtcgtccctcttcccatagaatctgctcctatttataggtgtataggctggcaattatttttattgggatcgattcatttacaaatgctaatgaaacgtggatatttcccactttttatttatttgtatatgggataatatctaataactacctaactgctccttgtctttatcctttaaacggttatgctgactaatgaatttatttctcgctgagtatgaattatccttcttatttgtcttgagaggaaagaatgctaagtgtagacattctttttctcgcaacactctcatattgtagtgatgatgcgagatgactactacgtcgcatagaaagcgagatggttgagtgcagttattttcaccctgttcatgtatgtgggtcgatgagttacaagcttcttgatgtctcgtcttgtaagcttctatcatatactttgtttatcttgagattgacatattgccttgtcaattatattagtttaatattattattcttatctcgcatatgatttaggtcgtcagcaagtttgaacatttctaccaactttaattaattagaacaaattatttgaatcgtatttactaatacaatttaattattatattcttcaagttgatttatattctttttgtaggacacgtgtcggtctctgatgaacagtcaaattttcgagtataacaattgccccctaaaaagtactttttaattaaaaataaatttttaaatgctcttaggggtataatcgtatttaatcggttttgaaaaattgtatgctttgagttttggcggttcaaaaaaattcgaggtacatcattgatcctttaatgccctgattattcctcttttacaacgttcccagccgttagaacagattttcttcaatcgaacggtaatcacctattaggtataaaatcaaaactgcacttcacatttgacatttccttctttcaaaccttcaagctttttgcaaaaacttcaaccgtttccttcctaaacttgcatgccctcattatcattcacatttttctatgtatttcattcaattgtacctcccattctagacattatcacgacccaacttttcaaccttcgaagtttcaatcacgaagttttcctctgtccaaaatttttcgtcaaaatagtaagtgacatattcctttttccttattgatatttcatctgtcttcataatttctattccttggttagtgtttctctatctgcattattttgttgtttgggtaattttaattttgtttgtctgaataattctaggtctagaaaatttttttaggttatatgatttgtagattttttgggctgagcttgtgttctatttttatagtaattgggatattattagttatgaatatgtctcaattttttctagaaatcataatcccagaatccctagaatcagtttgtcctcaaatttctaccatcaaattcagacccgaaacacataaatccccaaccattcttgaagtaaataatgcaaaaattaggggttatctctagaactagccaagatgaaacctctagtcgttataggcaattcttacaagagataattaagggtaggctccccctgaacacaacttacaactttcatcgaactctgctctccaaagagcaactcttctcaaaatctcaaaaggtgctgagttggaatcccattctaactaaggattcttgtggtttcgaaggatctagctacaagataaccaggaatagagcgagaagctgcttaactgaacctctaaattcaatttatattctcttagcgagaccaatgtttttacctgaagtcagtgttacttttttaccaggtaacttagattttgaaattatggccaaaaaagcacacaaaatcaaagacccctcaagaccctatagtcacctttgaggctgaactgatagagtctaaagttagattaataggatcttatgttggggaagtattaaaatcatgtggcatcaaatatgagcaaggatgtcgggttaggtctatcactgagggggagttcaattgttatcctcctgaacgtgtattttgagaagaagggtgtaatactagcgagccatctaagataggcgcttggagcctcgaacatataagagctggagtagtacgccctgttaatgattatttcaaggatttctgtaattacctcgatattgccccattccagttggcaccaaattcatataggatattcacttgtttaaagtctttataccatattttgaagtgggagtgcccgaccccacttgaaattctttaattttattctgtgaagacctttcctgcaaggaagcgaggagcatgtagtttttactacctcggaacccatactaattatcataggatcattgtaagtctacccaataaaaaagaattcaaggatgaattcttttggacttcatgtctctttcccatcaacacaaccaaattctaaatcatacgtaagtattgtcttttctcaaaaatttggttttgagttttaatccattaaatgtagactttatcttactaattttgtttatatgttgtattgacagcgatcaccaagaggcctattccaactcctaaaattgaaaaaaggcataggattcttcttggcctttcttttgggttacgagcagctgatttcttgttgcacgagaacaacttgaaggcttgtgctctccttggcagcaaataatctactggagacttcaaggtcccaaaattctcaaactagcaatactttccagttcctactaacgaataggatagagactatgtggcttgcacccacaatttgaagagcacaaccccttgggaagctaaagatgatgcctcccaaggtaataacgtttgtacttgtggatggtcctcgactgtacttagagttgagcgtactactttagttaaatttaaggatagtcagtacaacttgtacatttggaattgtgtagatcgcattcctgattggtttgacagttggtatcctaagcatcatgtccaattaagttgaaatagttcttactttgggactgccaaacaatatggtactaacttcgatagggcaagccatccagattgggacatgtctcctctaaaccactttggttttttcatgattattggttataggaagtttagtaattattttagttcttcatcctcgtctgatgactatggtaattttctttagtgggagattatctcaccgcatttttcttgtttattttgtacaagtgttgatattttatcttttgtctcgcagacatggatctagatttcaaagatgtgttgtgcagtcctactggccccatcaagaaatccaagaagcgcacaaattcaataggatatgcctctggatcaacttagaagcctttgaaaggatcaaaaagattgccaacaagaagcgtgcctcgaaccaactcaccattgaactagaaaagtccctagacaatttactgccccaactgttgtaagctctggtgaacaagccctagggtctgttcatcaagtcaaattctcgagatctccacccgagatggcactgctagagccctcttgcccctacctatctatgctggcacagagggttcgtagatatgctcgatgcatgctaccaataattggtgccattataagaccttcgagcaaggtgattgggatttaattaacaacgacaaactttcaaagtcttatgacaaggagttatgatctcatgcagtcagttagtttgtctctttttttttactcattttacttctctcctgtacgtcttcctctgactttacttttcacagccatctcttctatcatctgtggctcaacaaagaggtctccaaaacatcgagatgcttaatgcctagctttgcaaatctagggaacattgcaaagtttttggctaagcaatggactgattcatagtcagagatctcaagagtcaagaaagattccaaggagcaataaaaaaccctcaaagcaaaccttgaggctgcccagataaagatcaaggaacttgaagaggcgaaccaaaaagctcaagttgatgctgagaaaaagcttgaatatcccaacgttgatgccaaagctagggttaatatgatcgataagcgatctatttattgagcttggttggccaacccttggatggatttgagttttctgggagccaagactaaagagatgcgagcattctgcgaacaaaccaagaaggatgagccaagaaatgttgaggaagaggtcgaggaagaagaagaagaagaagacccaaccaagtctccaaccatgtagacttagtcatctttatttttattttcaagcaatagcctttatgccgagacaatagtttgccccttgtggtatttttttgtaaaacttttactttgttggatggccaacaatgctaatttatatatatatacttttataccttttatcctgcatttttcgagttatgttttttgcgagcaatttgtaatctgttatgtttagagtaagcttcaattattttgaatagttcttttaagaactattttaatactttttgattacttgtatgaatagttaattctttaatcatactttagcttgcgtattatttttcaagacacatttgtgtcttgtttataatacatgatataatcatgcgagccgttatttactcagatcgcatataggttcttgttgtttcatgagaaagaatctcacttacaactgctaatttaatttccacttgaagaaaaggttttttaattcttgattttgtactgtcctaagacaatttttaattaattatccttttttttgtgaaaaaaaattaaattttaggttttcagcattttcctatatatttttaggtagaatctagttattatacacatatatgcccccaagtaattttcaagaaattgagattttataattacttgaaaaaatcaacttttattcagaataatgaacgattatgacaaagattagtacaatatttaaataataaactactggtaataaggccgtagatgctccttattccagtgaagctaatttataaaccattgttccaactacaacttcaatgatgtacggtccttctcagttcgggttgaacaccccagctgctagatctcgcgtgtttgtaaatacgcatcttaagaccaaatctcctaattcaaatagccttttttgaactcttttgttaaagtacttcgtgatacggtgttgataagcagtattggttatttgtgactcattgtatttttcatcaagtagatccaattacatatttaaaagttcttggttttgttcctgattgtagaattcacgcctgtgggttacaatgttcacctctacaggtaacattgctttcgagacaaatttcaatgaaaatagagtgtgtcccattgcggttttctctgtggttctgtgggccagagcacttgtggatgctcgtgaacccatcttcctttagcggcgtctaacttcttcttaatagtatccttcaaagttttattaatagcttctacttgccaatttgcttgaggactcgctgctgacgagaagctctcaattattttatttctttcatagaactcagtaaataattcaccatcaaactgagttccattatcatatactatcttaattacaatgccaaacctaaatatgatgttcttaatgacaaaatcaagaaccttcttgcatgtgatggaaactagaggtttggcttctatccattttgtgaagaatttgactaccacaacaacatactttgtaccacctcgccctgtgggtaaagccccaacaaggtcaattccccaaattacaaatgggtatggcgaggtcatcattcttaactcggtgggtggtactcaaggtatatgtgagaacctttgccatttgtcacatttcttgacaaatctgtgtgtgtccttattgatacttggctagtagtatccttgacggattatcttattggacaaggtttgccaatctacatgatctccacagaaaccttcatgaatttctctgattatttcattagcttccgctagtaacacactgttggaattattttacc

SEQ ID NO: 38358 - DNA, 2420 bp, Cannabis sativa
cctaaagtgagcgatgagctgttccggggacaatgagctgtctttggaactagtattgggaggagtcttgaaggaagctgtacgggtaaatatttccttctttgtttttattctcttttttgtagcttgaattttaacattttctcgtgtaggtcaatctgaagatggcttacgcctattcccgagccaagtgcactgctaccaagaaccttgccaccaccaacacattgcagagagaggtggatgcagctaaaaagaaagttcaggacgtgaggaaggagctcagggaagtgaacaaaaatctccttactgctaacatccccgttgaggagctgactaaggaaatgcaagagatgccctcgcccgagcagttggaggcaaataatgataccttgtctagggaggtcaatgagcttaaagacaagagggagaatctccacactcttctctcaaagttggagagggacgtctagactaagcagactagagaggaagagcttgagaaggaggtggaaagcctggaaacggccgccattaaggtcttctatgaattttggaaggctaaccccacataaagttttgattaccttggtgattgcaaatggatgtatcttgattactttgcgggtcaaacatcctaagaaaacctcgaggcaaccacttctacttgttccaaccgactagagcaacaaaactcgtgctactcagagtgttgaacctccggcccccacaaaccaaattgatcagtacaaagagcccaggacccctgccatctaaacatttttcttctcttttttatatttatcagttcggcctacaggccttttttagggacaaaaatgaccggccaaacggtttttaaacttgggttatatttttcattttaagacaattgacggaccgggaagcttttaacctcgggtataccgtgctttattatctttttcaatgattattgtcccttgttttggtaattatctgtgcaactgtgtttgattttagcttgttatttacttttaccaatgctttgtatgggtatagttgcccccaagtgaccgagcacactattgactcttggtcacttgtatttcacaattataatttttgtttgttcggttctttggattcgagaagacttttctacgcatttagtggtaaatttataacttgctaatagaattgacacaatcataatttataacttacataaaagccattatacgatctagtccgatctttagctaaatttaaacaaagaaaattgcacttaaaaggaaattgtactttcaaaggtggtcatccgacctgagtacttagtcatttcatctgaaccctttggcgggatccgcccagaaggtcatttacttaagagtaaatgttctttggttttgtacttaaagtggtcatccgacctggtacgtttactgatagtactttcttaaacgttccccattccaataccttggcactagaacgagttccatattttcgtcataccgcccaagtttgtatgatcctcattttagaacttcgaccacctaatatggtccttctcagtttggtccaagcacaccattcgtgctgtcttttgtattcagaaatagtctcttgaggaccatatcacccacaaaaaatatatgtgcctttaattgcttgttgaagtatcgagccactttttattgatgggctaccaactttaggtttgatgaagcttgcttttcttcaattttgtcaagtgattctgctaggagggcatgattagcctcttgatcataggtcaatcttctgtgggacggaggttctagttttacgggaaacatagcttcatagccataggccatagcaaatggaatttttccagttgctattttttcagttgtgcggtgtgactatagtacttctggtagttcctctgaccagttctcggtagcttcttcaagtccttttttcaaagtatctttaagtgtcttactaagtgctttgacttgaccatttgctagagggtgtgccactacggagaaactttttacaattccatggttcatgcaaaaatcagtgaacaattgggtgtcaaactacgtgccattgtctgtgactattttgtgcgagagtctgaactgacatattatgtctttcactacaaagtccaatactttctgaaatttaattatttccactggctcggcttcggtccactttgtaaaataatccactgcgaccactggatattatactccccctttacctttaggttattgttcaattaggtcaattccccaaatagcaataggacaaggactttgcatctgagttagctcattgggcagtgcatgtggtaccttggaaaatctctagcatttatcacatttcttaacataggcctctaaatcttccatcatggtcagccagaaatatccttg

SEQ ID NO: 38359 - DNA, 3443 bp, Cannabis sativa
aaaaaaaaaaagtaaaatttttgtgaggtatttcataaaatagagtaaagaaagtaaaatttgtatgaagtcttttaaattagaatttgtgtgagtgctcttagttttttagaataatgaataggagatatatatatagtcttaatatttttttatccaaacatgctataccaagcttggtagctagtaaatgtagcaatattctagttttgatagcactagctctgtgattctgtagtgcaaaggggaaagtgccgtttaatattagattttggtaatgatgactcagcaatttgataataatatcaatcactgctataactgaaaacacaaaagttaatattattctcaaaagttaatccttagattttgtgtttacacttaacacaaaatcatcaccaaaatcacatttgggcactgcagaatcccacttttcatatcaccccaagaaagaaaagaaaataaaaaatctgaactatcctctttttgcctcaaaaaaaaaaaatcataatttttttaaacaagtgtccaagttcaaaagatttggtttgatcattgttttaacttttaagcattataagacagagtctcatttgggttctccaccaaagttcatattattgtttaatgtaatgggcactcttttactttacttagtattgtcagttttgttgtaccaatctactactaatggggaagatcatcatcatgatcatcatcatcagctggagtttctgagtggggagttgctggaatcggcgaaggaggcggagttctttgaatggatgataaagataaggaggcaaattcacaagtaccctgaactgggttttgaggaggagaggacgagtcaactcataaggactgagcttgagtcaatggggattgagtataaatggcctgttgccaagactggagtggttgcctatattggctctggttctaaaccagtttttggtctcagagctgacatggatgctctccctttacaggtttctgaaaatcatatacaaatttatatattcatgttttattgcaaaaggttgccatgtgatttcatttccaattggattatgaaaattgatttttacaagaatctaaaattattttaaaaataccttcagccaactaatttataataatgtcaatatgaacttccagaattagaaaaaataaaatagttatgctttccgaaagttaaacttttatttctctaggtaaaaaattgaccaaattataaattttatgagtttttataattttttttaataaaaatatagttttttttttaaaaaaaaaagattattttatggaaaattaataaaaagaaaaaattgaaaaaatatgagaaaatcatgtaaaagtaaccaggtacccttatggtaaccagaagggtaaccaattatcataaaggagtaaccagttagcttatgttgtttttttatatatatatttttttaactttttcctaaatttttccaataaaattatttttttgagaaaaattatattttttcaaacttatactttaaaaattataaaaataaatattatcttaaaaaataatgttttagtttcttattatgccaataagatcctataattcaatttaattttttttatatgactatatacaatgtaattaatttttttaaaaaaaatttaaaatatttgcaatgttaaaaacaagatttaaacatttagttttacctatatttattttttagtatcataaattatttaaaaattttcaaaaaatcaataacaaacatactataactgtaatgtaaatcatcatataaaaaaattaatttcttaaaataccaaaattatagatgttcctatcaattgggagaaattaacaccctactataattgcctcctaaatatacataagaattttgaagattactccataatagtcacatttccaaaaaaaattgtctataaaatttgaagttcattttgtttggcaggaattggtagattgggattacaagagcaagattgatggaaaaatgcatgcatgtggtcatgatactcatgtagctatgctacttggagcagcaaagttactccaagcaagaaaacattccctaaaggtaaatataaaaactatatttatgtccaattataatgtcttaactactactcttatttacttatttaattcctataacatatcatcagggaacagtaaagctagtttttcagccaggagaagaaggttatgctggtgcttaccacatgttaaaagacagtattttggataacattgatgccattttgagtatacatgtttttccatcactaccatctggtgtcatagcatcaaggcctggtccaatccttgctggtgcaggtcagttctcagccactatacaaggattgggtggtcatggatctactcctcatcacaccagagaccccattattgtagcggcctctgcaattctttctctccaacaaattgtatctcgcgaaaccaatccgcttgaaggcaatgtaatgtttttagtgttccttttcttatttttagaattttatttcatgttaatttgtttcagcacttgagctctatatatcattattattgcctttgcttgatatagcttctaaacatttcaattgcaacttggtgataggactagttctaaatacatacatgaaatcttaaattactataagatagagaatttatctgattttatgatgtttaatatgagaagggattatcctctttgatcttccacaaactaatcttttctttatcctttctccctcaattgatgggaatggagaaaaagtgtggttagagattaactttagcgaccaaaccctgtagtgttaagctcatatcggtataaggtattaattgagctcatttaatttgacttatttagctcaaatataattgtcttaatttgtgagctgattattaaaaataacccaccacttgcttctaaacaattatcactagatgttagaatttgggataagatgcaaagggttttatctcgaaaccaattgactataggagaagtagcgtatttatgtttgttgggattaaactcacttaatctgtgagagagtccaagatcacagtgagtgtgtgtggaagaatgtaaaatggagtatcactcttaattcaagttttagttttataattggtttttgttttgaattgggttttttggacattgttactgctgtaataacctgttttgagggtgaggattcaccacaatgttatatatgacaatttattcatacacacattagcaatgtgagactaactctaatactaaaactatttagaaaaacaaaactttcaaataattttcatctaaaactcacacgtttaaatccattttattgaatcatatacaggttgtgacagtcggattcataaagggaggagaagcaagaaatgtgatcccaga

SEQ ID NO: 38360 - DNA, 3793 bp, Cannabis sativa
ttgtggtgtaaatgggcttgggctgattttgagatttgggtttagaggaaataggctcttcagtgtcagtttataaaagttgaaagaagtattgtgagtgcttataaatggcggtacagtaatactcaacttttaaaaacagatgcaaataaacatcattaaatttttaatttttcttctcgtcggttatgttattagcgtctaatatataaccattcacaaataatatttttttagtgtcacttccaaacactcgcataaatacatgacctactattcacgtcggtcaaaaaaataaatagtagcgttgaccgacgtgaatagtgtaatttgtagtagtgatagtaatataaaaaataaatgtaataggaaatattcaacaattctaatattgattattaattacacaataaaataagcacttttttttaaaaaaaaaatatcaaggaatagaagtagaaacaaaatgtgttttgcctattttatattgtgtgaattgtgttcttcaatactattttattttgtgttaagttctgttcatgtattgttgcgttatattattaagttatgttgtgagtttttgaagatgtggagacttcggaagatttttaaaagatgattaaatctcactgccaaatttttcttcttcgttcgattcttattttaacattttactttttaattttatttatttattattatttagaaataagatgtattcttacctttatttatttttttgcgtgtgatttttaggttgtccatcatgttgtagtttgctaatgttggagttggaggaaaatttgttgggggcgcacactatctttgagcagaatttgtggttgcatctttgtctctattttcttttgaagtctttgcttgtttagcgttgaatgttttctccaaccattttatatgttatttttttaagtttgctattcaattttcctaaaccatgtcatcttatggattagttgtacatacattaagggtgaattagaaacttatttgaatgggtttggtccatcttttttgtacactctatttatttattttaatgatatgtttattattaaaaaaaaagtgtgttttgcttaatcaacaagttaattatctagttaaaaaatatacaaaattaatataatatatatgagtcattaatcgaccaaacaattaatacaaaattaatttacatcaaaaagaaattagacaaaataatttgaaattgttcaattgagctacccaaagtgaaacaaaatacttgaggaaaaaagaaaggagaaccacctactaaaaagtagagataaattaaactaaagtgaattagtctactaaataataataataatttgaaaactttttgatattgagaaaatatatatcatcctattaggaataggatagtattttcagtttgtatatagagttagttatttacctaacaaattttattagctgagagttatttatgactgttagctgagagttagttgtgagtgacatctatatatagtgatgtaccttatctttattttttttatctcaatcacattaataagatgatgttacattctctttccatttcgtaatatagtatcagagtaggaaagataggctttcctgtccgatccagttatccagccagccgcatctgtcttctccgacgaagctgcatctgctctgatcttcctccgatgcactcttctttttgttgaatctcaattgctttcccctcattgagattctgcaatgtctattgataacaaccaaacgaatcaagagactcatgaataagccaagattcaaaccactgttggtgatccttagaattcttctcttcaaatctcgacttcaaagaatccactcgaagatcctgcaaatccttatcaccatggagacaatccatgacatactttagtttctcaacctctcacgggacaagataactatgtgtcttggagcagggccatgcaactcgccatctcagtcaaaaataagattgatttctcggacggttcaatctttaaaccctcaccttctgatcaaattctttataatgcatggataagaaataataacattgttatttcttagattttaaattctatttctaaagaaatttcatctagcatcctctatgatgaatccgcctctgctatttggaatgaccttaaggttcggttctaccaaagaaatggcccccatatatacatcttaagaaaatattttatgaatcttaaacaagataatcaaactgtttgcatgtactttactaagcttaaaactatatgagaagaattaactaatttcaggccattttgcacttgtaatgggtggacatgtggtggagttaagagactccaagatcactatcacatggaacatattatgtcatttctgataggaatttttgatttgtattctcaagttcgtggtagcatcctccttatggatcctctaactgtgtgtttcatcttgttacacaagaagaacaccaaagaggtactgtatctaacaccaataattctaactctactatggcttttgcttttcaagaaaataagaatacaggacaaaagagtgataaccagaattccaagacttaacctcccaaaaggaacaggccattttgtactcactgtaacattcttggacacacaattgagagatgttacaaaatacatgggtatccacctggtttcaacaagaataaacctaaagaagccagtgcaaatcaggtccaagagactgatgaaagtggtagccgtcaacaagagaatcatgcacttcttccaccactgaccacaactcaatatcagcaattactcaacttgcttgcatctcaacagtctggtacgaataactcagaaccaagcacctcatcaggtaacacatgtatcattttgtcccataattctgaatctcctttacataattcttggatcatagattctggagcaacaagacatatttgctctaacacgagtctcttccaatgcatatgtaagatacctgcaactaaactaattctacctaatagtgaccctaaaccaagagcccacacttcttttgttcatcgcactcgccttgctcattgcaaggggagatcttttcctgtatccatcggcttgtccagtcggctatcgcagtcaaaaaagcgtgtgtgttcccttcagataatacgaaccatgggccctcctcgaccttcttcattttcgatgaaaaacaaataaaatctcgatctccgaaagcattttccttcccctgctgcatctccctcccttcatcgagcctttcctttaatggttggggaaaacattccctgatctaagcttggcgggcactctttccagccttattcaaagaggtggggaggattggtttgaacataggctaaaacatgatttgaaggtcgtagctatgccatgcgttcaatacaaaatatggtgcagggatgacaaaaagaaggcactttcctgcgttgcattgaaaaaaaggacctaagagaagagcgtcttctattaggtttcttcctcctaagcctgctgctgcccagcccgcattagaggggaaattagcaaagtgagaaaagatagagggagggggagcagcatcttattatcttcatgagaacttctagatcggagaagcatttgaaacgggcgtagcacacctttggtacatcagtagggcgagctatttggcttctttcgtttggtagggcgaggaaaggctacttcaatttgggaaacatttagaaactcgagagggtcgcctttggaagcgttcgccg

SEQ ID NO: 38361 - DNA, 2874 bp, Cannabis sativa
taatatatatacatattaaaaaaatgtaataaaaaattgtataaaatctctattcatgtatattatatagaaaatataaatagttgtatcttacctatgttaataataccttattatcctcaataataaatggatggaattctaattaaaaaaatatcataaataatcacaaattgtattttaaacatttcattataagattacaagttagatatttaggcattaatcatagtaaaataacgttgtgttatttagtattctctattatatacgaggttttggttttggatattgaaacaaataaataaacaacccacgttactattgtaaatatatatatatcactttcattattatagtatattctattatattttgtcgtatgggagacatataataatatacataacactaacataagcttttgtttttattttaagaatctaaaatatgaaaatgtgggaataattaataagagaagggaaggctcatctaggcaggcatgatttgattttgaaactttggcaactatctattatctaatataagttataactaagctagctagctcccttttatggctcaaacatatatactatatagtatattgatttgatctctatttagatctcatctaacttttctcatttattcctttgtaaaagaaaaaaaaaaaaaagaaagaaagaacttttctcatttatttatttaatttaatttttaaacccagctcactttccccaataccagcaagataaatttatatattgccaaaatgatcatgataataaaaatggaggaaattatattatatacctatgatattctattataaattatgtactagacttaagtggaaggtgaagatatattgggcaaatcacttataaaaataagtacattttaatgaaatataatttgagagtattttttattaaagtatacaaaaaaaaaaaattattttcaatttatccccaataaatataaacaatatattataaattgcaaccttatcaatccaagtcaaattcatatcgttttatatcttgctccaataatttcctttcactccaaataaataaatttctttatttttccttaaattccctacaaaatttagtctaaacaaattaaaaaagttgaacaattcaaacagcatggacttagttgggcctgtttcctaaaaccaacaaaagaaagcccaacaataagcccactttttatacttttatattcttcaaaatgggcaaagtcgaagtgactagttttctttggtttgacaatatttggtgattggtatggttgtttacttatttattagctttaccttaatagtgcattaattaataaatgaaattcagtttaattttgtaatataaaaagtggttggaatatttcaatacgaaaggaccaaagtctaaacaaattagtgtgggttggtaggaataaatatgaagtaaattaggccaaagtctgaatttttttactgcataatttatttacataaaaatttgaaaatagttggagactgtggtgatagtctaacaacaactcttgatagcattccccaacttttatttgtatgatatgtgagttattaagagtagagtcaagtaagtaagcaacataacaagttaccccaattgcaattattgctctagttacatgttacaagttacaagtaagcaacataacaagttactctttccaaaaaaattattgctctagtaagcatggtatggtatcaccgtgacaatatgagatatttttgtatgcatatttagggtgggtatcgtctaatccaatctaattgaaccaaaccgaaccgatcaaatctaatccaatcataaaaagttggatatccaattacaattggattggattagatgctaaaagttagattttaattgaattagatcggttattggatgtcaatctcaaaatctaattaaaaaccgatccagtccaattacatcggtatatgttataaaaattatttatataacaaaaaatattgaaagatataatatatatttattggatttttttgtgtgttgaatttataatacttggttgttttgttctattttattacttataaatattgttgttttaattattttaaacttttgattacattacacttataacgatagtatgtttcagacgtattaaacttaaataaaaggtgatatttaacttttacgtatttttcttcatatttttaagttaatattgaaatttaggtgtgtaattggattggatcggatgatgatttttcaaatccaattttactgattggattggattagatcggatgaggaaaaaattgttggattgaatcggatgtccacccctatgcatattcatccaaaaatattttaaaatagaataaagatatgctaatagcttgatgataaataaatttgtatttggttaacgttatttaggatttttaccttaaattatactggttaaattttttaatatattttgatttttttttgaattattgagatttttttatttaattaaggatttttgtctaattttactaataaatttggttcatgttaggactgcgtttggtagatatcaaagttggaggacacaatttagtacatagacaatcatcgcattagtaaaaatgaataaaattgaaaattcaacaatcttaatagtttatgaaatatttttaagagtaatttgcgtcataacctccttaagtggttaggtttttgcaactaaccctcaattctaaaattttggtgtaaaacctcttaaactcatgttaacacttccatccatttttaactgttaactgccatggtggaatgtctacgtgtacataatatacacgtggcacaattttat

SEQ ID NO: 38362 - DNA, 1282 bp, Cannabis sativa
ttttttctttagaggaaccaaaaatggattcttacacacaaaatactgaaagtgtacattttttacataattactgctatgcggaaattttaacatatagacgattaaagtttgtatttttcttcttttattactttattcatgtctgacacattttctttttttgagaaaaaatggcctcactaaaatctcaaaagtaaattgagtaggatgatagacctgatgaagaaaaaaatatcaaacaatatcattaatcataaaagttagacagcaaagcatcagtgatacaattagggtgatctcgtcaccaaacataataataagataatgactgagctaactttgctaaaatgtgagtcactaactaggacaatacacgaaagtaatatcaataaaattattacaatatgcaagaatatctctaattatacaacctaagtaaggctaatcaatcttattattaagaatgatattaacaacagtaacaatcagactccagtaccaccctggttgtgatagtcaacgcagcaaacaaaatatcccaaaataaatacccaaagatttagcaacatcacgagagaaacaaccattccaagtccaagtaccaaaaaccaggaccaaaccattgcttttcaccacctcaaagagcagtttagtccatcttatagccggttgctcaccaaaattatcacctgcttgagaattattagcagaactgaattgctttaagaatactccaatcaaacaaaaagttaccatctattgatgcagttttttgtcatctgatctaagaagatcgtaaaaagtaagagaagtactgtgctgaattaatttggctaaataaaccgcaaaaaatagaaaaggacgccaagtatttatagtagttcacccctatatcacgatggtaatagggctacatctactttatttttattaattgatcgcagcagactagagttatattctcaagagtgtatggataatagtacaaaatgagatttctaggcaaaacctatatagaagcttatgaataaaaggctcatggaaaacctaatacccataaacttcatagcaatggtggttaaaatgttcttggaaacaataaaccaatgaaagtaagaaaattaaatagcagtgaatttgtaaagctcagctcatcgaatagaggctagcatgaattgtatttatacataaatgattggtacagaatattctagatttggtacagctgtacagagaaggattacaatgaaatcagtaaaaggaatattctaacaacctc

SEQ ID NO: 38363 - DNA, 2446 bp, Cannabis sativa
agtagtcaataggtgtcaaagtcacagacaaggaagatttggtacgtggactaaagaaaagtaattatggacttaagcaggcattacgacaatggtacaagaagtttgcttattcatggttgagcatggatatcgaaggacaacttctggtaaatgtgttttcatcaaaaaacattcatgagggtgagttcataatactacttttgtatgttgatgatatgttgatcaactactaaaaatgttgatttcccaattgttttaaacagttgggtaaaggtattattgtggggccacgaaactgacgcatattaaactatcgtaaaaatggaatgaaaaacatattggttaaaaatagtggagtatgcctatgtcccaaacactcacaaagttaaaaaaaaaatttacagacctgaaataatatgtcaccgctggaaccagatgtacaccaccaaaactagatctcactacatttcaggtcaatacaataaatatatatatatatattcattacaaatatattaacttttgcacccatccattgacggtgaaggaaatcccgacaattgttctcctaagtagtcaaccatatcgttcctctctgtcatggaaattcaagagattagtaggattttcacaacgaaaatactaaagcaaaatgaaaggatatatcaaactctcacctctgctttattgagaaacaagacatcaatattaagatccctttggaggtggaggtgggtggtgatggtggtatgattgggtctttggatcaaaggtgggtggcggtggtggtgcgattgggaccgagaacaagaagagacgaggaggagcaagagaaagagaggtggaggtggacgtcgaggtggagctagagcaataacaaaagcgaggtagagcaagagtgaggttgagcgagtgacagaggctcggtggaggagatgacggtggttgtgggtgttgctcgtcgttcgaacgagcgagtcgagagaggagaaaggaggttacatgtggttgagagagcgagatctgagataagaaaaatgagatctcaaataattgggtttttgtatatttaaatgggaatcctcaacaatttaaaatcgtccgggattccctttacaccccatttttcaatattggtctcgtgaccattttaagccatcgggaatggtaaatgactgtttaaaactgtcagaaatacttaactatgaccgacggttttaaaaagtaaggaaattttattagtgatggtccaaaaaaaacctaatttaaggactgatgggaatattaatttttctaatagtgatcgtaggacaaaacaacgacaatattagcaggttaatgaaagaattgagtaattcctatgccatgaaagacttagaacctgcaaaatagattcttggtatgaccaattctcgcgatcaaaaaatttgaaagttgtggttatcgcaagaatattatattgagaaggtattgacatgatttaatatggagatgtccaaaacaattgttgaacacttgctaatcacttcatgcttagctcaaagaaaagtcctacaagtcaaaagagaaaaagaggagatgaacaaggtgtcatatgcttcagtaattagaagtttgatgtatgtaatggtgtgtacaaggccagatagttggtgttgttagcagattcttgtataaaccaggtaaaaagcatcgggatacaacaaagtgaattttaagatatcataaggaaacttccaaagtaagtttatgcttcaaaagtaaaagacttgaactgatcaactacacagacactgttatgggtagagatattaattctaaaaagtctacttctttatacctaattacattttcagggggatcagtctcgtagcagttaaagctacaaaagtctgttgctttatctaccatggagacagaattcattgcaacaacgatagcttggaaagaaatgatatggatggaaaagttcatgcacgaatttgaacaggaacaacaaaagtacattgtattttgtgacagctatagtgcgattcacttaagtaattaaagtaaattatttaatgaatatttgctaataataattagtatatagatatacatattgattgataggttatatacattaatcaaggaggagccatcattttaatagcatggataggctatatataaatgattcgatgttattcattattattatcttaaagagagaagaagacaatctttgctatggagacaaagcaagagagacaagaaaatctctagagagggagagagagatactcactcttatgagatttatgtatgcaatctcattattttcatagtggtggaattctattgtatatttatttcattatattcgttttatgctatttgaaaatgttaatcccactttacaatattttatgctatcatgatattttaaatgacatgttac

SEQ ID NO: 38364 - DNA, 1960 bp, Cannabis sativa
ataggcaaattatcatgaatttctatttcaaccaaaactcaggcatattttatgagggaccgttcattggttactctatctaccacaattggtttccaaattgtgctcaccaatgctccccaatattgaagaccaaggtcataaagccttacccaaattggaacatatcgaactaacttgaaggtagataaataaggagaccaaggacgcataataaccagtttattatcaaaatttaacactcctccttggactaaatctctagttgcttaatcattgaatttaaccaatgaaaggccattactcatacaaaccaccttctcaagacctaagttcccccaaacccattttgcaaatccctcaaacacaaaaagtggtggattcgcacccatcaccatataagccttcatcgacttccagtaatctgtttctaattcaacttcgtggagaccaaattgagcaattacctgacccttgtcgaaggtggaggagtgtagtggagttttgaaccctcataactagccttcgcttgcaattttgaccaaaactgttttgatttctcttgaatttgttgcgctgattctgtctctttagcccaagatttgcaggaatttaacaacttcgtagctggtgttgaaacctttgggttagcctcttgttcctcttcaattagggggaaatcaccataagtatctaattctagtgtattttggattgaagggagctccatcttagccgtagttttaatacttttattagtactgtataaatttaatttatatggtcttcaactatctctctagtgtgagtgttcccttcatttcgtgtgtgtcttgtgtctcactcttttgccctatattttcctctccttctttactgtgtgtttaggttagtcttgctgtggtgtgctttactggtttttagtgagttccttcttgtcttaagtgttgcgtctttttgtttgtctgttttctggtttgtggccctttatcatctttgtgtctgagttggttttgtcagcttttggagaggttggtaagattccttttggtgagtttggtttgtctcttaaaagctttgtttggtcttctttgtcgggtatttatggagccaataattgcttccaactccactcttaaaggcaaatgcttttcatgccttgaaacctcggtcaagcttactccttgtgacgcttctattaaagctttgtcctcttgctgtttggttgggaaagtatttgcaccaatggtggttgaggatataaatgttactgattttgttgcaaaaagctggaagataccagtttcggttgtggctttggaggatgtcgagaagcaagctaatgttttcaagtttggatttgagagtgccgttcaaagggactgggcacttcataacggtccttggtgcattcgtggatacactctggtccttcatgcctggtctccgacttttgatattccgacagccttcaatgtcctgcgtgtttggattcaaatccatcaccttccccatgagtatttttcgcagtcaaatggcagtatgttggggggtttggctgggaaagtagtgcaagttcagatcgatgaaggaaagcctgcttcatggagcaaatatcttagagttcaagtggatcttgaggttgataaacctctgttttcaggttgctttttcgacctagaatcgggtgtgaagaaatgggtccaaatgaaatatgaaaaaattggaattttttgttatttctgtggttgtctggggcatcaacgaaggggctgctctctttcgacgccggtgacggtggcgaatcttgatggtattccgtttccaatgtatggcccatggctctctgttttgtctgcatatccgagtgttttcgctggccctttatctggtagtgcccgaaagtccatgttatcggctgaggcaaaggagggtggttctgtgttgttgctgccggcgg

SEQ ID NO: 38365 - DNA, 2789 bp, Cannabis sativa
cgacaaccaacgcacacatgtagaaggataacaacattttttttttggagataaaatgctattatatttaaagagttaaaatacaatagacattagaggaggtggaaattcccccaaccataaacattccatgttcaccgaaaaagcatactttgctaaagaatcagtaacagtattagtagatctataaacatgtgagatctgaactccatggaaattggacataagaatagaaatgtcatgaagcaaactatgaaaatcagaaacactaggagaactagtatgcaatccttttaccaccaacagtgagtctatctcaatgtagtgaataggtagattcaaatctttaagtcattgcagactaaacataattgctagcgcttccattacttcttgtttaaaacatccttgataaggttttgacatagcagccgaaatttctcccaaggaattccttaaaacggctccaaaaccatatttttgattcatagtattgcaagcggcatcaatgttgagtttcatttttcctgacggaggattcagccattttggtgtatccatagctcttaaagatgatacaccttctttattactgttggtgactgagaatttagcagaatgaaaatcctccaaaaaagaaatggccgaatgttgaatgagctctgctggtttaggtttggtgccatgagtttctttgtttctttcattccacaaactccaaaggatgcaagagaatttttctacttcaacttgagaccagatgcccgatatgtgagcgaagaattcttgaaaattgctgctgctagaggagagctggtcgacatggaaggctgagttttgccaaactgttttaggcctcttacaatgaaagagagcatgaagaactgtatcccaatcaccattgcagagaacacatcttggagagttactaatatgccttttaaatagcaaagctgctacaggaagacaattgtggatagccttccataaaaaaatcttgactttcgaaggcagagagaaagcccagaaaaacttccacatttgatcagtttgctatgatcctgacgaaagtgtttgatctgcaattttagaagccaaccaataacctgatttcattgtatataaaccagaaaactcatgatgccaaatcaactgatcttcatttggaaagattgataaaggaatactctgaatcttctcaatgtcgatatccaggaaataattctgaagtatagatgtgtcccagaatcgagtagcagtgataagtgcagaaactttcagatttgtgtcaacacctttgaaagccaaaggtttaaaataggaatgacttggaagccatgggtctgtagcacatttgatgttcattccatttccaaccttccaatgagttcctttatgaagaagttcttttctccaaataatacctctccatgtcatggatggatatgagccagtgtttgcatccataaaagatgagtttttaaagtagagatgctttaatagtctgctaagaagtgaggatgggttagacagcacacggcaagcttgctttgctagcaaagcttggttataacaaataaagcttttgaaccccatgccaccctcccctttggatttgcaaagtgcattccaagttttccaatgaacacctgtgccagtagcgttcgaaccccaccaaaacttattcatcattttctcaatttgatcaatagtctttttagtgagacaaaaacaactcatcacatatgttggaattgattgtgcaactgctttaagtagtacttctttttctccagcagaaaataatttctcttgccatgctgaaagaagactccacaacttgtctttaatttcaccaaaaaggatttttttgtctcttcctgaataggaaggcaacccaagataccgttcatggcatggttttgttggcacgtttagtaattgctgaaacacatctttcttgttttgcaccgtgtttggtgagaaggagagaaccgatttatcttcatttaaattctgacctgaagcaagacagtagctagtcagtgaattttaaattgcaattacagagcttcggtttgctttacatagaatcaagctgtcatccgcgaagaataaatgtgagactgatggagcacccctagcaatctgtaaaccatgtagagaacctatgttttcctcatgttgtagcaacctcgataaaccttctgcacaaataatgaaaaggtaaggagataatggatcccctagtctcagccctcgctgaggtatactatttccttggacagaaccattcaattgaaaagagtaagtcatagtcgagatacatctgatgatgaaagccactagagaaggagcaaaacccaaagtcagcaacatacctcgtacaaaatgccattctacattatcgaaggctttactcatgtcgagttttatagcagcatatccttgtttaccgcgtttaagatgcttcagtgagtgaataagttcaaaagtaatcagtatgttatcgatgataaggcgagattgcaagaaagcactttgggattctgaaattacatctgagaggaaaggcttcattctgaggacaatggatttggacaccaatttatagagcacattgcacaagctaatgggacgaagatgtgatattgaattaggctttttgatctttggaatgagggtgatgagagtatggttaaatgaggaagggtctccaccatcattgagaactttcagaacagcttgtgaaataactttaccaacaatgtgttggaattaattttacc

SEQ ID NO: 38366 - DNA, 5107 bp, Cannabis sativa
  modified_base (50)..(55): a, c, t, g, unknown or other
  modified_base (785)..(785): a, c, t, g, unknown or other
atatatttaattattaattttataaattttaattgtatgatatattattnnnnnnaaataatatttaattagtttctaatttattatatacaatgatggtatataatttttttgtcgtgatatatatattttaattatggtatataagttggttagtatagtatacatatacattagcaatatattttttttaattattattgttatatatgttttgatgtaatggtatatgtattttttgttatacggtaaattattttttaaaaataatatttaagttctattttttattgtacttttataaacatgacatataattttattagcatgttgtatattttatttttacttcttgttattatttatatatatttatattgtaaggtatatattttttgttatatagtaaatgaattttattttatagtatatcattttattttagatcattcatgtttagtttttattttattatatataaaagtgatatataattttgtaagtatggtataattattttatagctgtaaataattttttaatatggaatatataatttttttaataatatatattattttgttttatttttgttgtaagtatacatattttgttgtatggtatatggtatttgttatgtataatatatcatttatttaagatgatatttagtttctattttattatatataatgattaagtataaatattttggtatgtatatatattttaatagttgtatatataattttgttagtacgatatatatatattttgagtattantttagtattattataattttttttgtggtacataattttattactatagtatattaattttcagtaatacgatatatcaagtactattttatatatttaatgatttaatatatttatttgtatttgttacaatatattaatatataatactaaaaatattatatgacttaatttaattattatatatatttttccaaaaaattaatacatagtaaatgtatttttataatttttattagctaattaattatatttagttaataaaaatattcaagtatacacttaaaaccatttttcgtaataaacaacaaataaataaaaaaattaggagagataagtcttgtctctgtgacatggtgagaatattttgttgtttttagtttgttttctattttgagagaatatttgttttagtatgtctacgtcgtataaccctgttgaccgtgttggggatcaactttcaatcattccattggaagaggaagaagagccatcatttcaatatgactagccacttgttgaagatgcagagattgatacaaggtggagtattgttgggcaatttttgacagacactcctatagacttcatggctatgcagaatctaatggaagtgctctggaaaccaggaatgggaatgtatgtgaagggtttgggggaaaataaatatatcttccaattctatcatgagattgatgttcagagagtaatcgacaggagtccttggacattcaaaaatgctcctatgattttcgagagactgaagccaggagatgttccaagggctgtgagattgtatcatcttgaaatttgggtgcaattgcatgataatcgttcgggtttcaagactgaaagaatggtgaaggatgctgggaattacattaggagctttgttaagtttgatgagaacaactttaatggggtgtggagggattatatacgggtaagggtttagattgatattgagaaacctttgaaatagagaatgaagttgcagcaaatcggaggagactagttttgaatcaattttaggtatgagtttgtgcctacattttgttttatttgtgggattacaggccatacagatcaatattgctctggtttgtttattcaaccaattttccaccattgttaaaccttatggtacgttcatgaaggcggtgcctagaagaacgcagtacgctttgggttcgaagtggttatgatcgagtttgtctaattctgaaagttacgatggtccgctgggggctgatctcaggagtgatgggaggactgatatccctgatgtttggggatttcatggaggctctatctcgagttccaaagggttaaggagtgattcgtggctctaatgtttcggtggaagttaccaggggaatctgaggaatcagaatgtagatattggtgggagtaatggggaagataatttaggaagtttgagggatttccatgtgtcatctaattcaaatatggatgaggagggaatggttttcttggattctaagcgtaaaaggataggtaaagaagctgttattgggcctgctggacctaaagaaaacttggatgtggatatgggtaatgataaaagtgctcactcaaaaatgttttaatggcaggctcaatcgatcgggctcgccaatcatcatgagtattttaagttggaattgccatgagcttgggaacccagggacttttcaattccttaaagatatggtttatcaaaagaggcccacttttatttttctatgtgaaaccttatgttcgaaaccaagactggagattttattgactcggcttggttatgagagaatgttttctgttgatgcacagggcagggaaggaggtttaactatgttatggaaagataaaaatgatgctgaaattagagacttttcccaaagtcacattgatttggtggttcataattacaggattggaggctcacaggtatgtatggtgaacctaatcgtgttcttagaaggaacacttggaatcttatgagattgttaaaggaagaatcgactctcccttggtgcattattggggatttgaacaatgttatgagttaggtggataaaagaggtgcaaatccctatcctaattggcttattgagatatttcaacaagttgttttcgattgtgatttagtggatttggatcttttgggtcaccaatttacttaggatcaaggtaggggctctgatagttggattgaggttcggttggatagggctcttgccaactcggcttgggtgaagttattcctgaattcctggctggtcaatcttgttttcaccacctctaatcattgtcctttgtttttaggccataatttttggcttcattcaggctcttcgaaatcgttttgttttgagaattcctggctccgagaagagtcttgcttttctatttttcaggagcagtgggcaggttgtgggtctagcaacattattgataaactagtggctcttcaagaacctcttagcttgtggggaaaacatttgactggtaattttaaagagaggatttaaagttgcaaaagaagaattggtgttcttaaaggttgtactgatactgagtttgtttctcagtaccatgaggcaaaaagattgcttgctgagatttatcaccaaaaggaaattttttggagacaacgttcgaagcaattttggttaaaaggagggtgaccgaaacactaaatattttcatactgcagccagctctcgtagaagaaataattttattcaccagttgaagaatgaggtgggcaattgggttatgtgggaaactggtttaccctaggtaatggttaattattttactgatatcttccattccttggggtctcatggtgatgatattcttgataagattcagccctcgataagttatgaggataatgttgctctgcttcagcctcttttggaggaggaagttcgttcgactatttttcagatgcacctggataagtctccgggccccgatggtatgaaaccaacgttctattataaatgttggcatattgttggtcaaggtgtggttagacttgtccaagacttttttcaggataaggtaatgcctaaagatcttaatgctactaatcttgtgcttattcctaagaagaaatctccctgtgttatgaaggatttgaggcccatttctctttgtaatgttctttataaggtcatctcgaaagtgttggctaacagacttacactactacaatttggtcttttagtgacactatttagtgacacgtaaaaaagtgcgggtcactaaagagttgggagtgatttttagtgacatacacaattagactctaaatattcggtgttagactcttataatatgggtcactaaaaatatggagtgtcactaaagattaaaacctaaaattttcttatttttattaatttaaaaaatatttgtataccgtgacgcgagcgtgaatggataaatatattttcatatggcgcgtcactatatcataatcctatttttttatacaaaaaaaaaagtatagctcaattaataaataaataaatatatgtatttaataatggttaaaccctagtaaatctcgtcttattctctctcttaatcattaaaaatctcaatcaattaaaataaagtattaactcatttatcagccaatacaaaaaattaaataataaagtataaaataaatataataataataaaaaaaagaattaaaaggggtaacattttaaaaaaccctaaaaatttctctttctctcaaacttaatttatctctcttctcgtttcttctttgccatctgaagattcaatactaatgcaaggcttcggcgtttgtcaccgccagccgaggatgaagtagctttaccagaagacgacgaacgagctccaccagcagaggatgcacccttcagaacctcaagccagacttttctctcacaaataggcctagcttttctcagtcttttccatctttctctcgcctctccgacgaaaaataatctctggttggggatgaaggctaatggattggttcgaatagaatgaggcaggcacctagtactctggggacgacaggtttaggtcatggaagacaacggcgaggggtttgtgccatgggtgcgatggcgaagctagcacactgggcaggtgcgactgtaactattttttattttattttatttttgggttttgaagattgtatagctttcttttttcgggttcaatggcagtggtattgttattttgtgttcatgataattctatgtatgtgttttttttttagatttcctattagtaataatattttgggaaaaaaacaggaa

SEQ ID NO: 38367 - DNA, 4038 bp, Cannabis sativa
atagtaacttacctgaagctttacaacagcttgttgtgccttcactttgaaatcagcatcatcatcaaatctctgtttggaagccttatagaaagcctgcaacaaagaaaaacaaacaaaaatcataaaaaataataataataaaaaattatataattattgtttagtgttagtttcacaaacctgcaagtctccaatagcagtttcactaacatcttccagatttggatagttctcaaagaggaattcaatcaacataccaaactgaaaaacacagaaaaaatgaaagaaaaagtgaatgatgactactaaatccattctttgattaatgttataaaagttccatacttttcaaagagaaaaatacaaagttcaaaacttttcgagacagtttacaagaaaactaccatctacttacctgtgttccccaatcaccaacatggttccgccttaggacattgacattggagaactcgagcaaacgggctagggcgtctccaataatggtagaccttaagtggccaacatgcatttctttggctatattcggagatgaaaaatcgagcacagcttttttcactgaaagctttggtgcccaagtttcaataccatcaagcaacatgttttgtatggtctgcagcaccagacattttacagttaataatactaatccacctcatgacagaattgtaatcagttgtaaaataccttaaaatacaaaaaagtataccttagctatccaactctttgataatacaacattcacaaatactcttttaggttgtttagagcctatttcagctatagagcatgattccacaatttctgatggtggaagatttttgatgatggcctatacaaaaccaaacagaattaatcgagttcaaaagaacaaaaaaagagagacatataaataaggctaattgggatttttaccccagaacttttcaagacgatttggtacatgtctaactaataatttgttttttatttctactttcgaattaaaaataagttaggccaataggaatttgccacgtagattattggttgacatgtaaaggtatctaactgccacatcatacgactgttaatatagttggacggaagttttaaaatttcaaactttcaatagttcagggagaatttttaatgtcttgaaaagcttaggggacacgatttagtacatttcatagtataatcttaaaaagatacacataaaaataaaaacagaatctttacctgtccaacagatgaaggatccttaaagtcagtccctttgttttttatttttgaccacaggctcatggtattattacttcacccgaaaaaagaaatgtcaacatagaattcaaaacatacagatattaaaatcgaaatccaatgaagaatgttcatatgcttaccactgataatcgccaccaatttttcctgtgcaaggagcgatcaacggctctacatctaactcctcatcttgaacaatcactctaagcgatgttttaaacagtttggccaactgtctcttcacatttccaactctttctgctccatcatcctatatcaagaaatattcaaatgaatttcacaatgatcaacaacaaattgaatggtaaatactaaattgtaagaacttacagttgccatagtggaaagtggttgttatgtctttgttgcaaatctgtagacaataaaagctccaaagtcaacacaaattgggaatatatatacacaaccaatttcatatcaagaccaagataatcataatgataaagaaaatcatcaacaagaagagatcaaaacggtgcgttttactcgtgttaagctacttcgtccaacagagactcttgctcttggccatgcttatcgactactcactactcaaggtaatgtattgttgttattattgttgttgttgtacttaaatttgggtaaatcctaagtgggttttgattgtttttctctgtaaattcttaaagttgtgaacttttttcgtttttgttgttgcagaaaaaatacactgaaaaaatgtaccattgcagctagcttgaattagctcaaccttcttttatctttcttcaagaacaattacacaactcattattatgtcaaatatgatttaacccccttttgttacttctactaaatgcatttgtctcattcaaatttcactaagcacaacacaatattcttagtagtaaacaaaataagctgataagaatctactaagtcaaacaccaatctaagtgagatcatgggcatatgacataaaaacagaacaaggccaaatcaactttgtcttggacaaaccttaacagatgaaaatataagccaaacaaaataacattttacaaataagtaaatgaatgaataaaagaatcttacaatgaaaaggttagtaactatttcaatgaagtattattgtccattttggttcaaaacttttctaaaaaaggttattaatttgtaactattcaatgacagcaagcattgactattgactattgactattttgcttctcttattaaaataatggagaataaaatctgaaacaacttcaaattatctctccaatccaatcaaatcaaatcaacaacaacacaacattgttccattccacattggatgcaaaggtaacttattgttgggaaaattaatcaacttcaggaacatcgaaataataaagaaactaagcaaagtaaaacaatttactcgttttggtaaaattaccaagcccacaaatagacatatttcatttataacttcaaaattacacactcacactatctcaatctttccaccgaaaaactaatagaccctttgcttcttcctcactctcgccacactacaaactcatactcacttctcttttcacaactcactcttcatctcacacacacaacacacacaacacacacatatataaatacttaagaataggaataaaacttgggcattaagatactctaaacttggccaccaagactcattttcacacaattattaattacctaaaaaaaattaataaataaataatttaagtcaaacaaaaataatagattttttttttctcaatgtaaccaacgaaacacttcctaaacaccattatacagaattatcctaaaacttaaatacagtactaaatagcaaatggagtctatagtgattaaggaagcaaaaatcacaaatttatggaagtttctttatctcagaatgaatcttagaacaaagcaaatatataaattaattatgcctaaatgaagatgattactttgataattataatgcctaaatcaactctcagaacaaaacaacaaaagagtgaaatagatgaaaggaatgaacccgtccgtaccttttgccagtgaactcctcctctcctctccgatctgatggttggtatttaacagtgatgagtgagagagagaaagagagaagggttactcaccaaacaagaaataccaaaactttggcttccctttacataatcgtgcatggaaaaggaaataaaaatgtcatctttattataaaaatcgattctttattaaaaaaccaaaaaacaaacaattttttttaaataataataaaaatcgtttgtttaaaataatttacaacataaatatttatattttaacactcaattgaagataaatattaagtttaattttcttaccattataattatatttttgaaacttttgttagtacctgattattaagtgtgaagtcagtagtgatgtacctgattagtctaaattattagattcttaatttttatataaaaatttatttaaatatatcaataaaaaatgacacgtaaataatgtgttcgcacttaacggttaggtagctacgaaaatttcaaaaatataacttaaatattattatcattgaaaaattaaacctaagtattcatctgcaactgagaattaaacttaagtatttatgtcgcaagttactctttattatattactatgcatgcaagatatgtcataggtacgtaattcctgtcaaaagttgtgaattataatcatatatt

SEQ ID NO: 38368 - DNA, 2173 bp, Cannabis sativa
ttaagaaatgtttcatatatatatatatattaggttcccatactcttatattttatattatgtatttaaaaatgtagtattgaaattgttcaaaaaatagatatactattgaaatctaattattttgataaatattttttcataatccaaggatgttttattttaccggttataactcgaataaatggaattatatagttgttgagtttagcaactatatatatgtaaatcattaattttatttttatcttttaaacgcgtatttaagtttgatacatagaacttttagacaaaatctatatatatctggctagtcgatcattaactaactaattttgtaggaactttataataagttttcatcattcattattaattttaaataagttttactattgtgatcctaattaatgttaatttatctatcaaaatttttaatttgtacgaacacacatctatatgtatgtatataattcctaaacagtccaaaatgtataaaacaagatatgttttaattccttgaatgtataaataaataatttgtatgaaaaaatatatcttttgtaggtttgtaatagccagaaaagaataagaatattagtattattactccaacttgaggtgtaattgggtcataaccacttccagctgaggcgaagctcactccggtcattaactcttccatactgaggctcgggtccaaatatggaggcacataatctttaagaccaacgtacgaagctgctcacacacgacatatatatatatatatatatatatatataaacatatctttataaaaaatatatatgaaaacaaaaataactaataggccatattatatatgaccatgcatcacccatatgatacttaattacgtacctaaaaagtcagttgtgaggcgcccattgcaaaaccttccggtgggttttttattggctaagtctctgccgtacggcagaaaattgctcttgaaaattgtgggtaagtagttattgtttcccggatccaccgtggagtcgccaaagaccagaacggcggaggctgcagtagtatttgttgggcttgcatttgacttgtttagagcttgagcttgggagataaaccatatggtcttggggttttgaacaaagatgagtagaattagtactactagtagttggcgatgtttattaattagatgatctaccatgatattgattgagagataagatagtgggatttgtgcaaattgaattagagactataatttgtctcccacacttggacttagatttctctttcttgtttctcatattgtcttgtttgtttatatatagttggaaatgtcacaatatttatcatgacgaaaatgccctttgttaagaaatatacttgtttgtattattgtgttttgttttgcttgtttatattatttcagaaaaaaaaaaatgtctatattattaagtgtaaatgtcctatttccatggggttgatgtggtttggaaaccaaactttacttattaaactgaaggcttgtgtagtctcaaactctcaactaacttttgcatggaagtactccctgacattgacagctgatagtttttgataaagtcttaattttttttaataaataatagaattttattaatagtaatcaactaaaataacagcctacaatacctatttctattagaaacacaactatagaatcggaattagaaaaacaaactacataatcaaccgcctaattctcaaattgtttgacaaaaaaataaaaaataaaatcagatagaaaagattgcatcatcacaattaatcttaaagaaaattatattctgtttcatcgactgctcaaaagatacaagagtagaaattgtttcaacacgtccattcaacctcgtagcttacacaactcaactattatgtatggtacgtaattgcattactaataactcagtcacaaaatacttattgttattcctaacctttaacaaggatttgatggtgagtgatcaaagaacaatgaagaatcaacaacaaaataaaacaaaacaaaatcatgtcacagatacaagactaattccaaattatatcacagagataagacgaaaatgctcaaaactatgtcacataaacaagactaaaatactcaaaaccatgtcatagagacaagactaatctcagtagcaaa

SEQ ID NO: 38369 - DNA, 1524 bp, Cannabis sativa
taagatcaaaattattattttttatttacattatatatataaaaaagaatttcattcgatactctatttaataaattatatgttgttataatagcacttaagacttcatgcaaaaaaattcctaaccataacgtggaaaacaagggtcatcttcataaatatacagatatatattccctttttttgcttttactttttactagttctcttttttattccaaagtttagtccaatttttcttttctttttccacaatatcatgtatgaaagtctaacgatatcgtcatttaaaaataaaattagatcagagctgatgaaacactaaaaataagattagtgtacaatattaattaattgcatcgatcggaagttagaaggaaattaatcagaaatttctacagtacttaattctcatgctttgggaaaatatatattacatatattttagtgtggtaagtaggtaggtaagcatgtaccttggttttgtagagcacattccaaagccaagtcgatagcagatttcttaaagccaataacagaaacttttttatccttaatgagatcagaagtggcatctttgtcaagtttgcagtaatcaattgtatgcaaaacttttcctccaaatatctcaggtcccttcttctctggaaactctggcattctcgctacatctccgtaccttccaatgcacaccaccacaaactcgaaattgtacagctgtcaacatccaattattatcatattagttaccttataatcatcatcagtgaatttattaattatttcttagttcaatatatgtgacatatacataattcagtgtgtgtatatatatgtacgtaatttagtttgtgtgacatgatatggcgcaggctgcgcctcccgcacgtacggtttgtagtacgtaccacgatattagtgtaatataaaagcaaggttggttatatatttgaccaattcttaatttcgcgccatctcttaacatcttttctacatcaataaattaaaaagacataatattattggaaaattttatggttcactccaaaatcgggtgtaccaaggcgtactttgtatttctaatatcgatttaatcaagatatctttgaaaaaaaatttcttctaaaaatttaaaataatttaacaccacgaaaataaaatttaactaattttttttttgacaagaaattatatatagctcaaacaaatcatttcaatctcaacttgagatcttaaaaaaaaactaattacaatgaccaaaactttctttactttatacatatgtatatgaaataaattttgtattataatattttagaatttgtatgataacaaataattatactctatatataaaaaattataattataattatttggataccaacatccacttttacgggtgcaactagtctctaacttattataaaaaaaattatgatgtaacttggaaaatgtgtgtattgatgcactttctttttatgtttttaatatgtaaatcgttgtaatatattgtttaagaca

SEQ ID NO: 38370 - DNA, 3646 bp, Cannabis sativa
aaaaaaatttaacatggataaaagttcagggagcataatttagtaaatgtcaaagtttaaggaatcaaagtataaggagcatagtttagtacataaacaatcacagttttggggaaaaaattctaattagccatatatatatatataccaaatcaattaaagaatggttaatactgcatttttattgataaaaattgttagcctaatattttaacaatttacattattttttttctcattgttttaagtttactaaagctaattaaattagtattgtttagaaatgggtgttttacttagttctacactgtaaataaagtcttcattctcttaattttgttacatttataattttatagattcatccagaggcaaatgaattcagaaataaaccatttccattttatgaggagttgaaagagctatactctttaactgtggaggatcaaaaaatcatcaaaaaatcgattgagattgagaataaagaccaagcttctacctcgtcttcatcgtcatcctctccagaagctccaaaaaccatgagtgatgatgaaactgaagaaggtaagagagaggacctcattccacagccgatggatcttgtgccttcgataacatcatctgatattagtttgtcaaaaaagaatgaaaatgtttctggctttggtgagattggagaggcaatcaaagaagcagctcgtattattgctggagaaatgaaagatctttatggtggaattgacgcaaaaattgagaaacttaacaatgaattgacgaagaacactaccctaacgatgacagagagacataaagctaccaatctcatcagccaaaacaatggttttcttagcattctattcagtcttcctgaccaggagaaagaagaatgggttaggactctcctcaaggactttacttagtatctaatctattaataatggcatatatctatgcatgtcatcgtttaagattatgaatttgacatttttttggttattttaaaagactttttattaagaggtgaagaagaagaactgtgttatctaatgtataataatgggagcttaatctaagttgttttgtaatgtttataaataatcaatttggcttcaagttgagtttgcttacatatctgagattaatatgatacaactacttgggtagaacgaactcactcccaaaagttagactaagagagaagattgtcctagtagttatatactaccaaccaattctatacttggtgttgaacaaaaaaaaaaaagaataaataaaattattattatttctttaaaaaaagaataattggttttaaaataataatccgtcaaaaatcaggagactctctttactctttaactgcacattttcctattttatctcacttattaccttacatgggtggtgaggttgatataaaaaaaaaattacaaatagagtagttgagaatgggatgacacttgaaaaaataaaaaatatataagggtacctattcatgaatgaatttatttctatttattttttttatgtgtattttgttcctctctcattcctatttttctatattcatttatggaatgccctcattttataaatgaaattagatgtcatcatctaagaattgctcattccaccataatttagatgctctcatccatagaatgccttcattctactaaaatttggatgctctcattcatagaacgttcccattccacaaatgaatttactgtcaaaattatttgcagtcaaatataaattttgattaaatgataatgaattaatttaatcgacaccttatttatgctatatatatatatacaaaaatagatttctgtacaccgaaaaacatgagttagtagtggtttaaaaggttgaaaaagaaagtgattccaagggataaattattcctttcaaaactcaaatcgtatactatatatatatacatgccaaattttaatctttgtgaattggtatgaattcaatgatgagaccaaagttatgaaaataggagtttgaatgatgagaccaaaagaatatttgagatacacaagcagatggacccactcataataatgtggggagctatagactccactaacaaaaatattactttttaagaaatcaaatgtaaattttttattttaataattatagaccaaaataatataaaagccccacaaaattaaataaatttagtaatagtgattacaatgtagatataaatatttttttataataaataaatcccgcagagtaaaaattctttttctgtatatgtgctttaagtatatagatatgcaaattctcctattgtaaatatatgtgtacgtgtcatatgaaggattaagaaattttgtaaaaatttagtgacaaacatgcccactttaaataagcacatatattatatatcatcatttaacgttttcaaatttgaataggaaactcaatttcgattataaaataatgatattattttttatctcataatttaaaatatctcagatattattttaaacattatcaaatatcaaatgttattctttaaatgtggggaataataactaagaaaatcagtcaaataattcatttatttattatttaaataataataataaatagaatttgaagacataaatctatcacgataaaaaagtgataaaattttaaaaccatacaaaatggtatcaaattctaaatgagctcttgaaatattaaagagatcattcacttcacaaaatttaaaaaaatttctaaagtgtactaaatttcaaagacataacaaattaaatggcattccaaaaaaagaggtgactcacctcataaaaaaaatttgacttgattcctataaaaagatacataggaaatttagttgctaggactgagtgcagtcgccgataccacaaaatgatataaaatataaatttcaaaattccataaaaagtcatacacttaggaatttttccaaattttcaaatagcaaaggattcccgaaagtggtcatctactggatccttatattcaatttctaaaacagtgtattcttcactacaagtagtttgatccttctacacataatgtatgtatgcaattccaaatttaccccaatgtaattaagagattatttttataatcttgcatgggttgaacttaaaattaacaaatcttattctatgaatttagcatagataaaattgtgttttgcattattttatagtctaaatgtaaaatttttgcttaacacttggtcaatgcgggatcctatctcacaaaggctcaatttttgggccggaataaatggggttgccatcgacggttgggaatggcatatttattcggtagagcatatctacggtcataaatgagctctttgatttatgatcaaagacagctcgtatgtggttaaggaagactgacatatgcacctaaatatgcactcaaacattatcactacaattttttcaacttaaacaaccaaatagaaagagaacacaacctaatagaaccagtagagcagcaaacatatactagtagaaatattaaaaaagaaaaaaaaaaatagagcagtaaaagacaacaagtattttctattggttcaaagacaaaccaataaaaaaaccatctagtgttgtcaactatataagca

SEQ ID NO: 38371 - DNA, 2082 bp, Cannabis sativa
  modified_base (1805)..(1806): a, c, t, g, unknown or other
cctcttttgaatagggtcttgaatgttgatcccttgatgaactttttgctcttgatatgcttgttgaatccatttagggtcactttatgaagtttggtaaaattaccaatttgtcttgaaaaaaattattttctcttttaattttgctacaaaattaacaaatcattagtaagaaataataatcaaatattttataatcatcaaaataaggagacctaaaaatttgagttaacagaacatttccctcataagtcagtttctcatgatcggtactgtacttgttgtgtacttccttctagttgtcactagcgtagactaaacaatcatacatatgtcttatctcatcattgaatgaagcaatcaagacaaacatgttgggatttatactctaaaagtaagtaattaatggataatatattagagaatataggaaacgcaactacaagataaatgtcaaggatcatcagacactaatcatctccacgcgaggtatgatattgtccgctttgggcctaatccctcacggttttgttcttgggcaccttcccaaaaggtctcataccaatggagatatgtccatccttatgtacccatgatccttcccatttctagctaatgtgggattttatttgcattctcgaaaatcctcccctcaaaaacggactacatagccttccctcaaataatctttcatcttgaaacgctcctatcaccaaatggaaaatgccacttgaccttcatttttaggaagactttcgacataagacaccaaacaagatctccaatccgtccactctttacaaactagtgtactttccttcaatgcattggaatgcacaccttacatggagccccaccactacctcaagagtttcttactcattacaaggccaaatttggatagaattagagtacactacctaactgaacacatccacggacatcatgagagtacaccgaggcacatcacctttagaggattcagaggatttactcgcatggatattgttgggatctagctctgataccaatttgtcaaggatcatcggacaccaatcatctccattctaagaatgatattgttcactttaggcctaagctctcacagttttatccttagacaccttcctaaaaggcctcataccaatggagatatatccatccttgtatacccatgatccttcctatttatagcaatgtgggactttataattattagatatttgaaaatttcttattcatatggagaaggtataatcttgtaaggacatacaagagaattaagattatatgatatgaacaaaacaagtcggtaatgtattaaagtaatgggaatttttaatatagaagtgctaagtatggtttactatacactatacttctagtttgtgtataattttaattcgaaacacatatgtggatagacatatagtaaaggtgtcatgtatatttcgattatgcatgactggactgataataataaacatctttcattaacgtgtcatttaccatgaaagagttattcatatcacaatgataatcatagtagatcagcctgaatcttgagtatacatgaactcttatttgtgttcgttgagttttttgattcactcatcaaagtttctcagtgaagatcattcttaaaacttctattttaggaacttaataacatgagtggtgaagaacatgctatacaatagtagaatctaagcttttcaaatggttgaatacaattggatccaaatctataataagttatagattaattgttcacattgaattaatggtacataaggaatcaaganntaattagaagggtaaaatagtattttgaccaactctagttatgaactaataattggagggcaaactgcttatattgattatatcaatggactataagtaagaattctgtaaatataattcaataatgtcaaagattgtaattctatatttatagtggagttataatggaattaataaatcagattattcaattgatgagatcgataataattaagtatttattggagcttcaaaatatggatccattgtccttgagtcacatctataaaatattgt

SEQ ID NO: 38372 - DNA, 5636 bp, Cannabis sativa
tcaataaaatatttatctttatataattgtatttccaatcaagagaatgaggtatggagtctttagagttggcacgtgatcctaattttttttttaatcaataaaattaactttcattaaatcaaatcagctaccaaaatgatccaaatttatttaaaattgaagaggggtgaagaatgaatgagcattcacgtgatcccctttatattcaagacaaaaaaaaaaaacatgtcactttttttttttttaattttgatatgtgttaaatcatgtcttttgaactttgaagactgttaaaaattcttcctgaactattgaatgaaattggacaaaaatctttaaatctaacaatcttaatatttgcatttgttaacattaagaaaacaaagattgtaatgaaaagaatacatgcttatatatggccatgctatttttgcttttctttcttgtgcccaaaggtgagtggatttttgatgtgtagcgcatgcaacaactacaaacaacactgctaaaagcaaaagtttcttatcaatattcttggagattgggactttggaattatcttatatttcttcccattccatctttttcttttctataaaagtgaaaaagctgatatttagaaaagctttttttttttttttcttttaatggaaagaaagccataataaaactattttaaagtaatacgaacattgaatgaatttataaatcaatgttgacaatttttctgcttatatctttatcttaattacctttaagttttgtaatttaaactatgttgggtagaggggagggtaagtgagagggagagggatagaggaattgatgaatttttggaagagagagaaggaaagggagtaattgataggttcttttccttcaaatacataatttctacccctttcaaaaatgaaggaattgaaggaaaaaaaatgtataaaataacttttttaccctttaaaataaaatatataattgtattaaaaataataaaataataattttaatatttgttttactatccattttttttttccaacgttacttcttatatcaaacaacacgaacgagagtaactatcttctctatcctttcaaaactctccatctattctagtctttctcattcttaccaaacataatcttaattaagaaaaaaaaaactctttacatttctatagactgtatttgttttttctttttctgaaagactatatatttgctttttttttttctttaaatgaaagaaaataatcattaagccaacgctaaaataaatctaaagacttacataaactcaaataaacccgaccaccaaactcttgcatcatcaagagaaagagcaagtttgctaaggttatgagctatagagttcgcataacaattacaaaacaaaaacttagaaatattaagcttatcacaaactaaataaatatcttgtaaaaccaaaccataatctgccagacaagcctctattttatttacgagttttgtaacaatttgacaatccgtctccacctcaatattatgatctctaagacgagagtacaattgcaatccaaccagcatagacatagcttcagcgacagatagagctaaaagacccaccactagggtcgttgcagacaccacacaacgtcttataaaatcccgaataattgctccaaaacctatacaacagtcagaaggtcgctacccaacatcaatattaagtttgaaccacccttcagttggaggagattacattgcttccgggggccgaccaatcgaactaacagccgaaacatgaccagaagtcacacatccaattctcatttaagcttcttcataggttcaagcaaacaaaaaggcccagcccaacacgccttcgatatcaagaaacttttggtcacgaacccagacgataccaaatgtaccaaagaagaactaggagtcgctctatctcatctatacgaagaataaattcatgttctcagaggaaagagaaaaggtcaacccgaggcaactctttagatgtaagagcaaaatccattagcttaactatggaaacaaaacttgtacaacctcaaagtacatgaaatgaagcttcgttttctatcgtgcaaactgaaaaaaaactaaactatatatttatttttcataagcattgttattatatatatataatataaatataacatgaataagaaaaattataaaaattatcgcataattttgcaatatcatattattttaataaataataaaacaaaggtagtatacaatttgaagtgcttgtaagcatttgcagctggtcaaaggaacttggtccttggataactctactgatttttggagagatctttggaacattaaaataccacgtaaggttcgaaacttcctgtggagagctgcatcaggttcttttccaatatgcgttaaattaaaaaaacgacatgttcccattggtacacactaccctttgtgtctttcacatgacgagactatttaccacgctttagttggctgttcatttaaagtaggtctatggtggatatcgatagcagcatggatgaagaattctgtaattggctactggttttgcagaatagggacagaggtggtgaaatggagcaagcaaccgtggtgagttgggcgatttggagggcaccgcaatgatttcatttggtaacagaaaagttggattgctaccaacatcgttgcttcagcaagaatttcacttgatgaatagaattttgctcaagagagaaaagactaaagtttctaaaaattttacataaaaaaagtaatttctcatcaagaaattagtttttttatcataaaattggtttcatttatatatgagtttttaaattttttatttaggatgatttatcctatatttttttatttttatcttaaaaataatatattttgtgcaattaagtttgcatgctatatattttttttttcctaaatagcccaatacatttgctataaggacaactgtcaaaatataattggttcagacgaaacaacatgttacagctgattatttccagataataaaatataagaaatatatccaagctggaattctcttgcactttttgcgacaagcttttacacggttatatataaatacttcccactcacactctctctgcccagaccgttactcttctttctctctctttcactctcactctcacaaacaccaaccaaacgaagcaacctctgccatggagatcaacgctttcagcaacctgttttgccctaattctccttccgtacgtatcttctcttctattttcctgtttttcattttcatttttcccgctttatttctctgcaaaattttctctttatttctctgtccatggagatgaacgctatattttctcctttgaaagcagagaaaactctaaagaacgcttttcatactgtttcttgtacttgtctctgttcaactgctctattccttacactacacatgaagaagtaagacatttatgtatgaacgagagttacgagatcacacaaaataattttctatgattgcagagattatggagtttctgtttctgtttttttttcctgatgttagattgatgctttgttgtgtaattttggatttcaggtgtggaataaggccggattcttctccaaatgtttcgaacatatatatccttttgggtttgacattgtatagatacgtagtaaattgtgtaagttcatagaaaactacattcattttcagtatgatttggttttcctatgcaatccatactgttttaggatttggggcaaactttgttaccgtcgttttgctcgctgtgcttgggataacgcaaaggaacggcagaagacgttggagggtgtgtttgtagtatgatatttgaagacataatatatatttacatgtacttgtataggcattgctcagtataataatggacttttaaatttctcagatgaacctttcagagaagcttttattgtacttacttcctgccattgaagtatctttgacctttctggacatagttttactttcaaagaaagcaattcagggagagtttatagcatatcatgaatggtttttcagatgttctcattttgcagtgtgggtaagcttttaacaccacagcttatttctttgacgttataatatgtgttgcgtggtgatacatacgagtaagtcttgactcttgattttgcatatgtaggcaactatcatactgttatcaaagtgtgccaactactgctgcatctttagtaaccaaatcttgtgtttctggtggattgttaaactggtgcttgggattccctatttactaacaacatataatataatcgaggtattctttcttttttctttcttctactttagtttttcctggccattagatggttaatgaggtttgagtatacagtttcagcacaatataggatactgtcattgaacagtaatcttcgattaaaggctgtttctggcgtttggtctcactcttccttttacattcttcatctttgttttaatcaaaacattttttcagatttttttctttggaaagtttaaaatactaactcactgtaagtttttcttcatagttattgatatgtctcaaggaaagctgtgttgttctgttggatattgtgtttggattgtccattaacatcatcagagtaaaaaaggggtctaccatgagcaggtgttacttggtgaatcattctttgtaatgtttagaagtaattgtatgattcactgtttatgatatatccatgtctaatttgcagttcaatggaagatccactactttcagctgatatgaaccttgaggaagattgccatatggactctgtaagttgcaggagccatctctttttccttcttcccctgtcccctctccactttttattgggtgggagttgaggtgggattgatttattactaacgttagttatgtagattgtacaataaattgtgtaggaagtaaacacaaacgaagaccctctaatctttctgttcttatggaactttggtttttgaagggaaatactgagagttattgggatctattgacattcaaattgattgcatctgtaatgagtcatggtgcagtaaagcagcttgactttgttgatttgcttccacttcctgctgatatggatcctatttcctgtcatgctacattgttaacctcttggcaatcacagtttagtaatgggcgctctagtccatccctgttgagggcaatctgttctgcatatggatggccatatcttcgtttgggcttgttaaaggtatctcaatgtatttgggcacctctgccttctataatttagacacgttatcaacaaatgaaaacttaatagttctctggaatagttggttcttgactgctgcttttagttactacttattttactttagcatgtacagaatgattagatttatattggttcgcctatctctcacttcttgttgtaaatgttttatagattccctgcaattctctattttctcactctaccaaatttagcttcctaacgtcttatgccaaaaaagttatagaaccatttacatgtatgaaatctcaaaatactaaggttgagttgcatgcttcctctgtgtaggttgatggtcgtcta

SEQ ID NO: 38373 - DNA, 3133 bp, Cannabis sativa
  modified_base (1108)..(1113): a, c, t, g, unknown or other
tgctttatgaatccacttgagtagctgagagaggtcgctggttggtgctccccatgacaaccatccttttacctgttgtaaacaatattcagtaaaggaacaactgaaaaataagtgctcatgtgtctcagcctgcatcatacaaaggctgcaagtcggatcatcaagcatcctgaactgctgcagtcttattccttagtcttgaggcggttttgcatagccaaccaaagataaaactatgctttggtgtgttgaaactatgctatgttttgcacagccatcagaaatcttgtattgttttttttttttttttgagcaagctattgtacatccgtgaggcatttgatttggttcttggctgcaactatttgcttccaataccaacttccttggcttggtgcttgatactcccaccaattctcttctttagtatacaatgcatgtacccatttaacccgaaagttatcctccttgtttgttaaagcccatacatacttgaaaaatgctgttgaattccatttgagcagttctcttaatacccgagccacctgcaatctttggttgacatatattttcccatgccactaatcatgctccctgcatcatatattgccctttccaaagaaagactctataaacaaattcaagctcacggattaccttcttgggaagtttgaaaatctggcactaataagaatatatttttttatttgttattttttgacaaattgggactatgaatatattttatatatagatacatatatatacaactggattaagacaataagatagtatgtcacacagcgccagatcagaaactgaatggttgagagagaggagaggataacctaaggatcctttagtaaaggtgataatgctagctatagctagttggtatatggaaaatgatcgaaagatagataatataattggtatgtttcttgttgattctttaagaatactattattaaaaacttgtacatcatctaaaaatataatattttatttcttttatattatttttaacattttttattctaaaatatttcaatattattatagtaggcacatctaaaattgattaaaataatattatattattatnnnnnntatattaaataattaaattttcttcctttataacaaaataataagaaagaaataataaagaaaagatataaagaatgctatataatgacattttttgatattcttttttactctattattagtaagcattcattaaaagatgtcaacaatatattcatgtcatcaaatatttttcaaaacattcttattggagttgttctaaattttgctgttataatttattttttggggagagaattttttcatattgggagttgtgacattgatttattatatttgatccactaagtttgaagggttactgacagggcaaagctacatgcagatttagtggggcgaccgccccacgtcaaatttgactaaattcaaaattacttgtggcttaaacttaaatgatttattgaagtccacataatatataagagtaagctattacgcaccataatttttagtaccaccatgaagtcacgccctacaaatagttattagtttcctataatcattattaaaggtaaaataagtgagatttaatattaaattgcaccaatagcttatgacacttcataaagggtgctagacaccatagatgacccacttaaattttatttctagcttcgtccctggttagtgatacacaatttttactgcaatcgtacaatattattatagcaaagtttcaattctaaaaggattgtcgaacccatagagattaattattaaattttacaaattactatattttttttttggtttatgctttaattagacaattaaaagtaaataataattaagaatggaataataaaataactaaaaagtaaacagacatacaatgattttaatcagaaaataaaaacttagagcaatgatttttctatttcaaactatgaatatcaggttaccaattattttaatttattctataatttttagtttcaagaatcttaatgtaatctattaacctctctcgagtgatgaaagaactaacttaattaattaacacaatatctcttcaatattaaatcaatcagacaataatcaagcaatataattctttttaaatgaaactcataaaattagtggaatatctcaatctcacatttttcctatgtcatgcaattctaagtctgattttagattacctctctcaagtgtagaacctaaaatctctatactaattaatagtgatcaaacgttaacgagatgataattagcacaaaattgcataaataaattgcaagaacaaatacgaaaataatctaaaaactttaattcataatctgaaatagttccatcaacactttagaaaaagtgtttagttcataacgacaaacagaatcccaacaataatcatgttcataatcaaacaactaaacagaagaataaagaagaagaagaataaaggactctaataaaagttgatgatgcttaagcttgaaatctctttctcttactcttcaatatattttctaatatctaagtttctttctgtttcttttttctcgtccaaagttgatttacatcattctttatataggcttaaaaagatagaaaagatgtcatttagaattaagatttaaatttgaaaacagcaccaggtgttatgtcgtctaaggccaagcgacatgttgcctggaccttatcttcgggacctcctatcttttctatccaacacgtgcaaatattacttcatttcgtaaaagtggtgacatgtcgcctaaggactaggcgacatgtaacctaaatctcgtcatcagaatttcactatcttttttcatccgcatgtgctgaaatattcacttttgataagtgagacgccatgtcgctccacacttaggcaacatgtcgcctaaaataatattttctattctaacttctttcgatcacgttttgcttcctgacttttacatatatccagattattgttttgtgcaccaaattcatattattattgtctttaaagcactaaactatacaactacaaaaaacacattaaatttatacaaaacttaaaaaataa

SEQ ID NO: 38374 - DNA, 2726 bp, Cannabis sativa
ggtctaaactctgggagctcaggcgatttttcctttttgaaccttttgtttcttttgttcaactgtatgcgattattctcatcaccttcatcttcctcactagagtcatcacatgcaacttgttaacaatcagattctaccatgtcctcatcttctacatctatttctatatgtttttttcctttccttaacaaatggtgttctccttcttcatcaattaatatgccatcgtcttcttgtgcatactctggatcttcttcataatcatcctcactttcatcttcattttcagcctcattaaccaaatcagccctaacatccttagtttgtgccacattatgctgaaaattcctgaaaaacacagcgtacattaggagattttttattgaaataaaatacaaatatagcacaaaacttatggaaaagaacacaagtgtgactgtagagaaacacttaaatatatatcctaaacaacccactgtaagagaaaaaaaaatcccaagtttaacgttcagttctaccagttattctcttaaagtatccatgttcagttcattgcaaaatcaaatctaaactagaagttatgttttacttgggaagtatcgatggaaaaattacacacaaacaagtagcaaaaataatagactaaataattaggttaaatttttggttggagcaggtaatttgttatttattggcacattctcttttacatacacactaaataattatagctatattcatgcatatatacacatcaatttccctttttcatattacctacttattattctaaaagaaagttctaacttttaacagtagtttaggacatatatatggtttttaaaagtatagtgtctgagactgagagtgaactcaatccattaattcaactcagttactaatgtaaattaatagaaaatcttattccactatctctattaacaccctcatcacccaacacacacataaaaagacaaaaaccaaaagcaaaagcaaattcacaacccatataattatcatatatcattattatcaattacattaattgatttaaaatatcaacaacacaaatataaaccatacaatataacttataggacataaccattatgtgtgccttgtaagttatatactaatcaatgaatattatgcatcaaataaaaacccctaaaaaaagatgatctcaaacatatccacttggaacaaaatcaatgtttagccgaatcatcactacaaactacaaactttacaacaatcaaaattgaataaaatacttttcttataaaattaagaaaattagttatcaatttaagaaagtgatattataattagtatatatatgagaagattacaatatagtaatttacacacctcttctcttgtgaattctctccggtttccagcccactttgtagatgggatgtctacaaactaggtccaacttcttctattggggtcacattttcatcatccaaagtaggcccagcatccttagccacatcacccaactcaaccacattaggaaaagaggcttgactttcataagctacattttcatttaattgtgaatgactaaaaaagcactcaatcacatgatcattaaccttcaaagcagctgcaatgttctcagttaacacaaagtctgtggtcacacactccaatgtcacacattctggccacttgaaataaaaagtaattgaagtagtatctttcacataatctaaatcccttgctatcagctctaactcaaacatagtcatatgtttcaaatctacccaacgaacatactcaactaccccaccattgtaactagtaggaatattaagtgtgtaatcaattgtccctttgtgatgcacttttagagtaaaaaggtgctagtgggctctacaaagacaataatagaatataatataagcatttgtcatgaactaaacaatcaagggtccctacaagttttaacttattcaattcaatacaaagaatcaaataacaaagctaaagctaggctcaaacacacacatccataccagatacatgtgcaattactacaaaaagataaagttaaaccacaccaacatcaccaaaatgaccaaaaacacctctctttagtgtaaagaaacaatattttaaactaaatagagacataaaggaatttaaaaaaaaaactgaccataaaatagaatttcattctcatcattcttaggaataggccaactcttccttccaacatattgcttcttcctccccatttaggggtgttcaaagatcaaaaaacactacctgaacaaagatctccgtatacttattatgaaagcactatatgaaagatctccactaaacttagaaataaacagaacacaaaataaatacgaaaaatctcacctttggccttcgattttcagcaactgcttcgaaggagaagacccaaaaaaaaaatggcaagggctgttcttctcgtcgatgtgggtgaccggctggtgcgtctcgtcgcatccagaaccggtggtggttgggggtgtgcgtctcgtgaggctgggtgggggtcgtgtggctgggtggtgcgtctcgtgtggctggtgggtggtggaggaattgggtttgaaaaccctagagtaatctgaacaaaaaaataaaaaataaataaaaaaatatacatgtgtaaaatgacgtggactgcctaatggcagccacgtcatcactctgttactaaaatgaacggaaca

SEQ ID NO: 38375 - DNA, 2620 bp, Cannabis sativa
attgtaaaaatacctatttttgtaattttttttttattgtttttgtgtatttttgaaataatcacttttttaaagtgcaatacagttatataatgtctatttttttatggatataatgaatatttttatgggaaaagaaaagctattttacatatttatggtcataaaacctagtgaacaaaatatggtaattttagagaaaaatatataaaaatacgagaacctcaacaaaatatcataaataaatttaataagattttaaataacaatgatcatcgaaaaagtcgttggacttagcatcggtgtcggacaatttgtcgtagttgacatcgacaccaaaaaagtcgctaaaaattttgctaaacttggaattattactagaaaaagtcatcagaaagtggttggagttgtcgtcgtcactggagttagatgtcagaatcgtcatcggagttgaacgtctgaatcttacacacagatatcagtttcattaatcatctagtgaaaattctacctaaggaaaaacagactaaacaactagtaaagcaaaaatcaatttcttgaaataaccaaataaagaaaattaaaacttaaaactcaattatatatatattaaaatactaattataaaaactagttacttaaaaagaattatgaaagataataaaataataaaacatactataattttttttttacaaatgtatataaaattaaattatagaaaccaactatatcaaacaactaattaaatctaacacggaaaaccaattccaaacatgtaaataaaataataaaaagaaacttaaaataaaaaatatacaataatatcataaaatgaaacaactccattacagaatcttcaaaacttacaaaactagtttcgaacttatgaaccttgtgaaatcagttttaaccttataaaaaatcataataaaacagaaatgataaacatgaagaaaaatgaaactgattttattagtcaacctaatgaaaaaaaacacacacgcataaaaataaataataataaaaaaactcacaaatataattaaaacaacacacaatgcataacaatattctgcaaacaaaatataagtgcgaaaactaattttgaaccttaaaacaaaataataaaaaataaaataaaataaaaaatatgcaataacatcatataatggagcaaccccgttacagtaccctaaaatcctgtgaaatcagttgaaccctatgaaactaatttcaaccttataaaaaatcacaataaaatttgtgaaaccattgcaaaatttgtgaactgtaaaactaagtacaaccatataaaaaataataagacaaactcaaaattaaaaaatagacaaaatacaaaaaaaaaaaaatccaaataataattgagctacaattaacgatcagagcagtcgcgcaaggaactcaatcgttcgctgtagctatcaacaatttatttgttagagctagcaacgatcagagcaaggatcagtcataggagagagagacaaaaaagagagtcaacaactcagagataaaatgtttggaacaattagggtttgacttagaaataacatgagaagataaaatataatatttaaaattaataataacataaatataaatatggcatagtatataccatataaaagtctaaataaataaaaaaaatgtataaaaaacattaccatatttaagtaaaaagttcttaaaatttcatattaagtataatttttgctttacatctaagaatttggtaatgtaattaagtggaagaatctgacttatcttaagctagtcttgagcaaaaaaatcgtatttttagtgattatttcaaaaattacaaaaataaaaaataacaaaaaaaaaaaaaatttacaaaaatacagttatacataattttaaatatttttatgattttaaaattttatttatataaaatacagtcatttgatgtatttttatattgtactcttattatttttttgttaatttcttattatttatatatattattatttatgttactttggtgttattttcttgttactttcatatgattttcttatgtttctatatagaaaactgtaaaaatattaaaaaaaactttgaaggtaaaagtgtaaatattttactaaaaataacagtttacttaatttaattttatatatatgaaaaaatttatatttttttttaacatatagtggtaaaacttaaaatataatattttgaatatatataattgagtctttttttttagtaaaatattaaatgtagtatttttaaaaaagtaaattaggtattttttcaaaaaataattatatttttaataaataataacaaaaatataaaatacaaaatacaaattttttaataaataaatttagaacttttttattaaatgattttttttgaacctcaatggggaccttttacatggaccctcatacctcacccttgacccggccttggaagtagccgtaaccatacatttgaatatttatagcttctctctaagaagtgaaataataatttgagttaagttggaaaataccactttcattaatcaattaattaaatttacttttaattttatatttaattgaaacatacctctttt

SEQ ID NO: 38376 - DNA, 2667 bp, Cannabis sativa
  modified_base (33)..(51): a, c, t, g, unknown or other
atatatatatctatctatctatctctctctctnnnnnnnnnnnnnnnnnnntctctctctctctctctcctacatgccacatgcactctataagacactaagtttatttcccatttcactcagtagagatcttcttaaaattgttctcactgttgtactattcatagagagccactctagaaattataaggtaaaagcctgtaatctgagtggtattatctcttaaatcaatataacaaaaagaggagtagctcattacctgttaaccaaaagggctgaacctctataaatattattgtgctattctctttacttgctttagttgtttacacgtagtgattccgatcataaataaggctctgttgtcaatagaccaaatctgaggtcaacaccaagaatagacacaagacagttgtccttggttatctaggtgacaaggttcagaaaaggcttcagaattgggaaggaacactcttatctacagctagaaaagaaatttatgccatgggagtctttttgttgcccttagacattaaccgtgacatggagcggatgatggcctttttttggtggaaatcttctaaaaatacatctaaagacattcattggatgtcttgggaaagactatgtcatcataaaagttggggtggtatgggtttcatgagcttgaggattttaaccttgcccttttaggcaagtaggggtggaagcttctcactagacctctctctttggcttcttgaatctttgaattgagatattttctgaatgttaattttgcttcaactcaacttggtcacaacccaagttttatgtggtgaagtattatggatcgcaagagttggttaagcacggagtttgttggtatattggtgatggttgtaacatctctatcttaggtgaaccttggctccctgaccaggttaatccttttttggtttcaaaccaccctgctcttcttaatgctacggttcactccattatgaacattggtggcttgggtttggatatagatcttattgctaatctttttgaggtgcgtgagtaagctttgattactaatctttccttacaaattactcaagtaactggccattacgtgtgattaaaggagacttcgagtatatactcagtaagaagtgcctacaatttactctagcaatctcaaggtcactggtttgagaatgatgcttattctttatggacaagatgtggagtttgagacttccaccaaggataaaatattttctatggcgtgcaacgtcggggtgtcttccaacaaacttacaattgcgtaccaagtatgtagaggtgagtcctttctgtcctttgtgcaatgagtttgatgaaacaattttccattatctagtaacttgcaaggcagtagaaacatgttggaataaggtcgacatagggatagtggttgagcatgttgcaagtttctttgattggtgtgctaatgcctttcaacgtacaaagaagaaaaaaaaataccttttgccagtcatttcttgggctatttggggagcatgaaatgatttgtatggaatggtaaactagtgagagcataaataattgttgtctttgtaaaaggttactttgattaatggaataatgctcagaaatctaaaatagattcaccatggcctgattttcaggagggtgatggtagcgagagtattggacacctccacaagaaaatagtattaaggtcaatatagatgtaataactttatttgatgggagtcaaagttacggtgcctcaagactcagatgactttcttatagagggatgtactattttttcttttggtttggttgagcctgaacttgccgaggctatgagtgttcgggaagctcttagctggattaaagatcaaaattggtagcgggttgtggtggagaccaattgccttggtctgctgtagacattaaggagctagctttatcgatatgaattttttgtttgatttagtcgtccaagattgtaaaagtttgcttgcaattttaaaaaagtctcactttgtttcataaaacgccagtttatgtggtggctcatagtttggctcgagttgcaatattgtatcctagtggtcatttcaattcagaacctgtttaaattgagttgttaccatatttgctaactgaaatcgatagttaaataaaattgattttccattgaaaaaaaaaaatactataattgagaaaaaagttataataaaaggtcatagaaggactctcacttcaatattacttgcttatagacttgcaatgtatatagaagaattcataattaatatacattaaaagaaagagaaaatacaaagttatcatgaagttggcattcatacatataaatataatagctctttcactcatacattattttttgtagtattaatgagtaagaataagctgtttttcgaacaaataaatacacaatgatttttatttctggtagcatatatatagatgaccatgcctactgaatgccaccacctctatagttactttcatattcatctttagcagtatatacccactagactactgctgccgcgtccaccgccatctcttcctcgatcctctagctagcttgtcctccagtttcaccaccatatcctcctccactaccaccaccatcagcttgtccaccagtttcaccac

SEQ ID NO: 38377 - DNA, 2055 bp, Cannabis sativa
aatttattacacatttacatagcatattattgacattaacaaatctcaaccttttttttaaaaaaaaaaaatcaattattttttaagaaggttgtgatttaaactcataccataaaaattttcccataatctccacaaaacaacaacaacaataataatttatataatttattacacattcataccccctactcacacaaaaaggaaacaatatacaatttatgagttttttttatttatttattatttaaaaatgaaaaacaaaattacttcacatactattttttaattttttttttaaatttataatttaagttacttcggtgatttctatgtgggttaatatataatttttttttttttacatttttacgtaaatctacatagcaacctaaatcgcaatcaaatttcacatagaaattacaagagtaacccaaatcataaaaaaaaatgttaaaagataccagtagtgcctagcaacctcatacgtattaatattgctattgattcaactaagtttgagttttatatatttatgtaataacttttagagaaaatcgttagctaattacaagatgatacatttacaaggtgctcaaccgtaaattttaaaaaaaaaataaacaaaataatatatggaattattaaaaaaaattaattaaataagacaaaaaaaaatatatattttaagggtgaaaattgaaaaataagacaaaaaattaaataaaaagtaaaaaaaaaaaaaaaattaggcaaagccggcaagaacaaagattttgtaacgatataaaacggctccctggttctctctcttcaccttcacaacaactttctctctctataaatatacatatacatatatatatatgcaccagcttctctgtatctgcttaaccaagcttctccaatggcgggtctgcattcatcgaccagaccttcctcatcatcatcatcatcatcttcttccctttcttcattttcatcttcttcccaatcattcgcttctcgtattctcttgctcttaactgttcttcccttcactctcgcttgcttcgccttcgtcctccaatggcgtggaggcctcaacgatccggtcacccgatggtctcctgaccaactccagtttcccggtatggaatcgtcggaatcagtgtctaggaattcgcattcttcaggttctaattgtgtcgatcctttgaggcccaaagattctccctcgtttccgtactataaggattggaaattcgattatggctcggatctgaggcctaaggttagtctttttattttattttattttttctcctgtgctattggattattgatcgttttgatttgaattgggtttcagtttgggaatttgggatcttgctgtgttatttgtgcttgtttgattgggatttatatgagaattatcgtctgaggagaaattttgctcagttaatcaattttgttttttttcgaattttgaccaatgagccatgtattgatcttatctgcattggagaagatgatatgtttaatcatattttgtctgttattttactaaattaaatattagatatcaaacttatttcccaactctttttcttaagattaccaagaaaaaaagaagaaactagattatattgaaacattaaggctatgtttggaagttagattttggcgaggaaggaaaaatgtagggagaaaaagtgtggacaacaaaaatgaaaaataaatcaatttttaatgtttgttgtcgaattttgttgaattgagtgtttttctgaggctgctaatgacttagctgtttgggctagacaatttgattttactggttttcataatgggagttaacaccaaatgttgttaagactatctagtggtttttttgttttgaataaagtctcctttcttagcaaaaaaaaatatgacaattcacatttttctttttccaccaaaatccaacttccaaacataaccttaaagtttcaatatggtctagtttcttcttttttcttggttgttattgttttacctttttttttgtttgtactatgacttgttaaatta

SEQ ID NO: 38378 - DNA, 3949 bp, Cannabis sativa
  modified_base (102)..(109): a, c, t, g, unknown or other
  modified_base (3402)..(3403): a, c, t, g, unknown or other
ttagctgtagctttttcataaattcttcaataagctgttttttaacggtttaccaaacacctttttgtcacagcttttttgaaaagcagcttttagcttttnnnnnnnntgtgccaaacgggcccttagtctttcagtctttacgtatagttatttgtcgcccccttcacgtatagttatttgtcggggcggacttacataaaagtgagaagaaaccctaaaaaatagaaaatatatatatattttaattagttacaaattacagtatttatttataataaaaaataatatctgtataaataatactttggtgtaataattaaattaagttctatatatataatagagatcaggattcaaatttaattaaaaatatatttcttgtcaaaaaaaaaatccttttattgtttatttctgcccctaccttaaaaaaaaaaaatacgtcacccttactttaaatcctgagtctatctagttactaggccttctggttactataaggtgattaattacctttacgtggttttcccatttattgtaatatttttttctcaattttttaataaaacaaaattttgaaaaacaaaaaactatatttttgcacaaaaaaagtataaaaacccacaatttttttaatttcctctatttaaataattaattttaaccacacattaagaatgatatatataataaaaattacatacataatattatgtatgattatatatgtgtaaaaagtatgtgaaataattttggtagatttctcacattactctctctctctgtctatgtatatttgttaaattgttatccttacattagctatacgtatataaatattctatttttcaattattaaggataattaaaaaaaaaatacacgtcaaaaaaaaaaaatacagaaacaacaaaaaaaactacaaaaatatggttgaacaaaattttaaatatttttaccgtttttaagattttatttacataaaatacggtcttttaatgtatttttatgttgtgtactcttattttattgttgatttttcattatttgtatattatttctgatattattttattgttgtaaaccataaaattataaaagaaaaaaaattaaacataaaagtataaattttttatcaaaaattacagtttatgtaatatttcttaattattattctcaaaaatattattatatttacaaaattaatgttgtatactaccactatacttattatatattaaccataatttaacacatcaaatggaagaatattgatttgatcattttaaatgagatcatttttcatcctcttcgaataacttttacttattcgacttaacaatatattaaaatgtttttactatgataatttacatgtttattattatttttattggacgtaataatatgattatacttatgcttattatgagtatagtttattaaaaagaataagtaccaaacttttggagttaggagctaattattctcaacttattatatattgattttcaaacaaaagttaagaatttatattcattaaaacgtgtgaatattaatgtgtattgttttttcctatttttttattcaaatatagcaaaataaaaagagtattaattaatgtaaataaagggatgttaattaagcatagacatctaacaccagcttctttaacttaaaaaaccccaaaatgaaaattgaataatttttttttgttgaaaataatttaaataaaaacaatggtgcaactccaataaaaaaaaaaaatagcatttttatcaattttggcatttagaagaatttttaagtccatttttttcttcatagtcgtatacatttagttatttaaaacatctatacaaatttttaaaaatttagagaaatttaacatgccgaaaaatatagttcaaacagtttgttgcacatgcaagtactatttaattttttatacgtgtaaaatagactgtttaaacactgctttctataatttaaactattctgaatcttttaaaattttacaaaatatcttaaataactaaatgtttacaataaaaaatttagaccaattttttttctagataccgaaataaatattagagctaggggtggacaacatccattccaattcaattgaatcgaacctatccaattacaattggattggatactaaaagctagattctaattggattagatcggttactggatgtcaatttcaaaatctaattaaaaacatatcaaatccaattacatttatatatattagaaattatttatatttatttatataataaaaaatatttaaatataatatatattaattatattttttgtattaaatttgaaatacttagttattttgtatatttgtttttatgatgttttgttttattttattatttagaaatatgttgttttaattatttgaaagttttagttgtattatgcttgtaaggatgataatttatggagtattaaatttaaataaatgatgatatttaatttttacgtattttttatatttttatgttaatattaaaatttaagggtgtaatttaagaaattaatctaatctaatatgtaatttaattaaattgaattttgaggtcaaatgaaattggattggatcagattggatgatatttttttaaatttaattactaattagattaaataaaaagaaatattaaattaaatggaatactcaattctaaattttttcaatcttttgggtaagaatttgaataaataatagttaattctaataagtttccaccgtaagtaggcatggaaaagttgcaataattatttgcaagtaattaattcaattatatattttgatagaaaaagacaaaagagtcacatcgtcaattggtgtctgtctactgtttggtttgggacaatcaaatgatatatcactttccacgtgtgactttcatataaatctaatttcaaaaaataaaaataaaaacaagaacaaaattagtgaggtacaactcatcaaactccacttataattacttctttttcatttttttactttcaaccatggaaaatgaatacaatccaatcctctttaacaaaaaaaataagagagatttgtaaaactataaagtaaaacatatgaaaatttatgtagcatacctcctaaaacatttggtttattttggcatttaaaaaaaaaaattatttacgttgtgaagccatattcggatattccagtaggaataatttttttttaataaaaaagtatgagtaaatagcggtataagtacccaaaattttatgtttgtaagcggcataaatctaatatttatttttagcgtcataagtattcaatgtatgtaaaactataattttcttccagtttcgttactaaagactctgttttgaatttattaaannaacatttggaagtaactgatactatatatttttatctagacccaatgattaagaatttaggccttatatgtgtcatgtttaagacaataacagagtgtgtactgacaaaattaaagaaaaattacagttttaatttataaacattaagtacttatgccgctaaaaataaacattgagtttatgccacttacaaatataaaactttgagtatttatgccaccatttacccaaagagtatctatgaaaatataattttatagaaataaaaaagagaataaataaaaaaaaaaaaataaaatttttaagtagaaaaaattgaaatacataaaaagagaaataatacatatttaatttggaaaagtatatgtatgaaagtaagtgtaaagttttttttattgatgtttggtgataaatgatggaatagaaaccttgaaatgatgccacatatatatatgtaacactttatagattcaccatcataacactcactcacgtgatatatataactaactaattactgacagatcatcatgtaattaacacttt

SEQ ID NO: 38379 - DNA, 3201 bp, Cannabis sativa
tacggcgttccaaacgagccctgatatgttaatttaaaatattaactcaaataaattgttttaatttgtaaactgccacgaatattggattattagaaaataatcctaccacgaaaggtagcgaaaccaatttcaaatatgtattacatatttcttatcctaatacattaatacattaatcatgttaatttattagaagacaatttcttagtactaattaagtagcatcatatctaacataataatgttataaatataaataagaatatacacatcagccgtcgtcatatttcatgtaacttcatatgtttatctactcttcttctgatggtgatctcgatccatcattttctgatccacaatttacacctacccgatgaaatgacaggtatactgtatactagctaactggccagctgcttcctttttgtttctccaatttataatcatctaagtcaacaagtgttagatgatgaaagatagtgaccgaaaagatattgatcttgcaataattttatcaagatgtatacgttttgttctttttatatatatgtatatataatactaataacaacaacaaatcaagaggtgttgccgagcaaatctttattattattccctaatttctctaaattaaggaagcattaatagctaccccgagaaaatataattccatcatttgatttagtagtatatatttatctaattatgaagtactttgttaataattatctaaaaaggatgagagtcggaaaagtagtgtaaatattattactactaacttccatctccattgagtttaagggctctttattttgtggttcagtctctttaaggggatggtgatcatgatgatgatcattgtgatgagaataaggaaaggcaatggtaagatcaagattaattaggtgtttgcgattgtgattgttatcagaagaggcagctgcagatgtttcatctgagtttgaggcatgggcgttgattgagccagaaataatattatggctgttgtgaggatgagtggttgtagcactatgatcataattttggttttggttgaccttatgattatttggatcaattcccaaatttatgagcttctttcgtaagtgagaattccaatagttcttcacctcgttatccgttctccctggtaaccttccagcaattagagaccacctaccaatccaccacatacaaacttttattttatttttttaccaaataatatatgtaaactcaattgaaacaaattaagtaatatgtacgtaataataatttacataacaacctagctaataattcgtgtaatgtttttttatatataaaatgtataatgtatgatttacaagtaatttatacatatatattatgtgtaaataatattaattattattaccgattgccaaggagggcatgaagcttgataatgagatcctcttcgtcctctccaaagtttccccttttgatgtctggtctaagatagttaatccatctaagcctgcaacttttgccacatcggtgcagacctatatatatattgtatatatccaacatatatattattatacacgcattcaattgattaataagtatacactacataaagtttcttctctttatttttactttttgtaaaattaggtgacatgacaaaatcaacttgaacgtacatcccaaatgatcttcatatattattataacccttgaacaatttcaaatatttatgtagatatatatatatatatatattaggagttatcatatggtgtgtatgtgtgattattatacgtacgtacgtacctgcagccttggggagtgagcgccaacatccttcgccgtgagttgtgatataatcaatcagcttttggtcttcgtgcttcgaccatgctcccttgttcgttccatctttatcacagcaaggttttctcattctttatgtgtgtgtatatacaatatgtatctacctcagttttaattttctgtaattgttcagcagaaagtctggcagaggcgaaatatgctcttctacatatatgataggtatttctatatatatatatatatatatataacagggaaagagaaagagaaggagagagagagagaaattgtgagaatggactagcataagtggtgcatatactggtgatcgtgttagcatatagcactgattagtaggaatagagaatagtaatggttgactttgaccggttgttttagccatgcatgcatgcatacatttatattttattaggtgggtctcactcacgatacttacgaaatactattttagatcgttaggtcttgtaatgtgtggtgtggtttaccgttaagtatgcatccttttcctagttctcatcacatacataccaatatcttatcttatttcgttcttctagttatcttattactctctctctttctcgcttacttttcacactattcttttgttgggcgttgccacaaacaaaattttgatcaccaacaccaaccaccatatatattatatattatagtaaaaacaaaaataaagatgaatatatataaaggcgtcggctacagtacacatatggctaaatacgtcatccaacatgcataggcggacctaaaattagagatagaaataatacataattgttagttagtgtaggtatttgttctttacttagtagatttggtcttgaatatgagttctatcttttatttttatttatatataaatctaatgttttgaaaaattaagctacaaaatattaacttaaagcattcaaactacaaataatttcttttttgttgaaaaaagaacttattatgttaatgaattaattgtttgaattatatatttaatctataagtaatacaagttcttacataaaaaaataaaataaaaattataaaatctcatgttattatttagatttgttccaatttatataataatttcatttcaaatttaagtaaaaaaatgtattatagatttttcttttttgcttcaaaaaatattattttaaattctagtgcaaattttaattacctcaccctaaaattatattctagatcggctactaccaacatgacacctggtttttttttctagctttagaaaatattttattgcatttataaattactttttaactggttattataggttacatttatggttaaatatttaatcaatttttttattatgatgtt

SEQ ID NO: 38380 - DNA, 7242 bp, Cannabis sativa
  modified_base (69)..(69): a, c, t, g, unknown or other
  modified_base (7212)..(7216): a, c, t, g, unknown or other
atgcaacataaaatgcgatttctgatctttatcaattagtaaatatgattatattgaaatgggttttanttagggcacaaaactcaacataatgttcgatcgatgacacatgacctgcggtgatattccgaccatgtcggagtgtttccatgagaaaacatctaaattttgtttgagaaaagtgacaagcttttgtcgttgttgaaaggttagttcagaactaattttcaaaactttattatgattaaaagaatcgattggtaccttaattgtatcctccgcggcttgtgcgttattggtataatcgaggatccttggatccagatcgggcttttctacatgcggtatctcctcaattctaaaaacttcttgtagaggaggcggtgcttccaataaatatatcacatttaccgacttcttcttttctacgagttttagtgtcgtattataacactctctcgaatccgattggactccttgcaccaatcctacacccgtgggggtagggaatttcatcgtgagaagatagatagaggttactatcttcatcttcttcaaaatggggtgacctatcactgcgttgtacgccgaatactgatcaatgactgcaaagtctgccatcaatttggcagtgacataagctgttcccagggtgattggtagcttaatcattcctttcagtgcaatcgtatctccattgaacccgtagatacttcagactataggtcgtaaatccttctattgtaatcccatttgcttaaaagcttggaagttgagaaggttgactgaactcccattgtccagtaggattcggtggacattatctcctccaatattagcgacgattacaagtgcgtctacgtgtgggtgatgaacccatctggcgtcactttccatgaaagttatgccgtcgcattctttcttgaaaagctttttaggtcgctcacttagattgttcacgttggcgagtggtttctcttttacctccttagcatattgctcttgtgatttcttggaatctctagagacatggggtcctccaataatcatcaaaatattgcgaggcgttcgtgaagcactcgcattatttgtgtcgtcattatcatccacttggggatgattttctccatttttcttgtatttgccaaaaaatttctcgtctaattaattccttgatctcgtcctgtaagaaccaacattctagggtggtatggccgatgtctttatgatacttgcaaaacttcttcggatctcttttatcgcgatttcctctaatcgggggaggctttctgaagactccattcttctcctcagtcgcgtaaatatgattgtgagggactgctagttcagtatagttgacaaagcgtggtcctccttttctctttggagatgtttcattctttgagggagacttggcgagcttcggacttcgctgcctatgagggctacatcttctcaggcttcttcctctggaattatttcctctaggacttcgagatctagaccatggtacaggtgactcgcatttatactttcccctttttagctcggccagagaatttttgattctcttatgcagctcagccatggcgaagaattccaccaacgattctagtcttcaagcctgtaactctttcaagaaattggttcttggcaagaaacctgtaatcaacatacaaaccaacgaagatttgagggccttctcgaccttagttacttcagcattaaaacgtttaaagtaatcgtgcaacgactcatcgacttcctgcttgatgttaaccagggttgtgtaaggcggtttagacatcattgtggcttggaagtgtgtcaggaataagtccacaaaggtttcccaagttgatatagacgcctcaggcaactggctgaaccaatcgtgagcattatcctccaaggtttctataaggacgctaagtgaggtacctgggctacttccataattgtatttaacttttctaagtagtctataggattagtagtacctttatattttagcgattcggatagtctgaatcccttggacaatagagcttgtcgcacttcggcagtgaagggagaagtcccatgtagcttgcaaatgagctttctttgctgctcgataattttcaatgcttgcaataagatgctctgatcaacaccctcggtacaacagtggtgttctgagttgtcgtaggtgcagtgacaatcgcagctatgttcgctgggatcactattccgataattgcagttggtgagttaggcgagttgacaatattttttgggttattgtcgttgtttgtgccttgatcgcccaattggggatcacggggctcatcgtggttatggggcgtgttagatcgtgccctaaaaattgcgttgaggtgatcacgtagatcacctctgtgaatttggtatcttcctcctcgtggtgtttccacagagccagacctcgtatagacactaggagtacaactttgtgaggatgaagaatgagattcaacattgtttacctcattatgcggttgggctttgctgtgtgggttacatcacttaggatcctcctcttgtggcacttcacagttggagtttcgtgcgacttgttccctctgtgttggttgattcaagtcaagtccctcttgtccagtcatgcattctctgcaagtgcgattagtttgtcgcctagtattcgtcaccttggggttatctgaacatgtgtttggtagtcttggaggacgtcgggtcctgacccttccattgatttcagcctgcaaagcctgcgtttggtcttgtaaggtcgtatactgggccgtggtcaattggatgataccttcaaacaccacagtaggtgtgatatgcgagaactgcccccacagtggtcgccggtgaagatgtttccccagcatgagcgacagtttcagggaataagttgaggggagtaatggttgtccatcccactcccccgttgatggtgtcgatgggtgtcgtttcattacctgggagtggaacattcattattccaacattgattgatccattgttgtcatctccattcgcctggtttccagccatgacaattttcctccaaaatcaacagaatatttctttcccacaaacgacgccaagtgttgttggaggaatttagaaaacaccaaaataaataataaattaagaatataaaaaaaatgtgcgagtactcaacctagaataagtatagtggttcactcagatcatggtcttcttagtccactgttgcaagggttttttccatcttgtccatttcatgttggatcactcatttatatacaaagcaagtgtcctttgattacagattgaatttaatatcaatccatttgtatatagaatataacatttaaatcaataaaaaacgtaaatacaataaatgaagaacagtttcggcccaattcactaaatacagcaatttatgcgacttctacaatacgagttgtttgttcatattcttgcataagctcgaaggcttaagatgcgtgcaagaccagtcgagtctgagatgtctgcgtcctgtctgagtcgcatatacgaacatcctgcaataactcgacaacttaagacatgcaagtccttatcgggttgtcgaggttgttgggtcatccggaccagctcgcaaagtaaagaattgatctttagaacctcgcaggaagatctttgtagtccttgcatatatctcgatatacgtgactcttgaaccaatcttcggtcctacttcgtccgaactatacgaatgcgactagactctgtcaaggtcacatcatcctgcttagtctggttcaggcgaggttttcactcaagaggtctcctactgacatctcagccctcctcgaggagagtgagtccacaagtcatttttataggatcctggtctcgagtttctaggtgaaaaattctcactataacaataattaattatatgagattatttgagaattattgcatttaagatcacatttatgagttaggggtatttttgtaattttgacctaagaatggtaaaactataatgttaacatttattgtgctaatggactatattattatatagtatgtttatattatcttactgcaggttatttttgacaagttggcacggtttagtcacaactgggtattttgggctcaaaccgggtttggggtccaccattattttatggtctgattgtgttataacataatttatttgagaatatctgaatgtatatgtggaaatgaaaaatctaaatttcccttgaaagatttaatatgtggattttatgccttaggggaaaaatagtcatttgaccaattttaccaaaatgagtaaattcattttgttggcagaaatagaaagtgaaatagcctttatttttttggtttttggaacctctccaccaacctcgctttttctctagcccctcttggcaaagttttaattttgtgttggatttagcttgatttgaggagggattggtgttagagcttggaagaactattgaggtagtaaactattcctttatttttgtgttaattctgaatttaagttttgaaagtttagtgatgattttttcgttgcatgtatccttgatttatgatcttgagattaggttttgtgtgttgaacttgttttgagtttgagaactctaagcttgttacttgttttgatttaatttgaatgttaggtcaagttttaagagttaattttgttgccaattttttgagtttgagtaaaaaggttttactttgtttttttttttttttggatattttggcacgagttgtatgattttgggatttcaaagcttgaattatgtgatttgagttcaaatgtttatatttttaagcatgagtattttgatgtagctggcacctattatgctctattatatacttgtaaaacaatttgatgaatttggtgaagttgggtttgagtttgggcatttttggacctttaaaattggatttctgggttttttgaacctagttgtcgcggccagacttatggttgccgcgaccaagtctggcagagagcattcccaatttttcccgatattgttttggccgtaacttttgattcataactctgttttggacgttctttatattattggaaagctctttttgagctctattacttggtttagtattggagtcttaaaggtgaatattataaaatgtaattttgggattaacctattgtgtgaaacctaaggattgtgactacggatactgacacttggtcagaatcacctgtggatcgagatttctcctcagacattggaaatcaagcaagacagtgaactaagcacatagagtatagcatagtggcacatttatatgatttgattgttattgtgaattcgcgacctaggattactaccctaagtgcgtattattataagtgtgcaataatctgttaattgaatatttttatagagttatgcgggtaaggcataatcatgttagactcgatgattataaccgagacaaaccctagtaaggccttaaatataaaatgacgtgtgagcgtaacacatatgtctatgctacatagacctttattataatgacattattatatagaataatgtaatataaagtgcggtgacatagtattgatatgcggtggcatactgtatgaagtgtaattattattttaattataatattatattttttttctatcttgccgagccttagctcacgggtgctctattgtccaaccatgagattgagaattttgaggatgacttgtacatgttccagccatgctgaaccacgagggttgggtctaacaggaatagtatagaaaattctattttgttgcttaggtcagcctatacaaaacaacttgtaatattttaaaaagaaaatttttatgggatcccaaatatgtaactttaaattgttttagtttatactaaaacatcgatgtttattgcaagttatttatttaaccaaattttatattagttttaaatcacatggcttatggaccccgattaacgagaagagttgcttgtaacatgacacgtggcattcctctaagtagactgttacataaatgaatcacttcgtctcctccaacattcatctcctctcaaaatacccagccaaaaccctcacttaccatcgccgattcagccccaaaatctcatttctccaccatttttgtaatatcttgagtttagtaaatggattaggaatgcttattaaattaattaagtttaaatgagggattatattattatataatcaattatgtgaaattatttgagattatcgcatttaagactccatttatgagttagggacatttttataattttgaccagagaagggtaacattgtaattttattatattttgcgtaaaaggactatattattatatagtatgttaattttatcttatggcgagtgatttttgataagttagagctgtatagtcacaatcaggtattttaagttcaaactgggttcggggtcaaaaattatttaattatgtggttatgataaatatttgagatatgcttgaaattattaaattcgagtgtgatattaaatgcctaaattgcccatgtatgttgtatatgtgatttactagcctgcagggcaaaacagtcattttcccactttttactaattttaatatatatcatcattttggctaagtgtaaataagaaaaatcattttttttgttttcaatctcatcatttttggctaagtgaaatcaacttgatgacttaggtgaagtttgggttaagtttgtacatttcaaagctttaaaattagatttttaggtttttcaaacccagtcgtcgcggccaaaccttacagggagcatttctaattttctcgaatttgttttggccataacttttgactccaaactctaattgggacgttctttatatcattataaagctcgtttcgagctatattatttggtctagtgttggagtcttaaatgtgaataatatgaaatgtgatttttgggattaacctattgtgtgaaacttgggaattgtgactcagaatactgacacttggtcaggatcacctgtggatcgagatttcttcacatacattgggaattaggtaagacactgaatcaagcacaaagaatatagcgcagtggcattgtaatatgatatttaattgttattgtggattcgagacctaggtgttaggttttatgccctannnnnaactccatttcaatgtaatctatttt

SEQ ID NO: 38381 - DNA, 1283 bp, Cannabis sativa
gagtagtatttattatcttttaaagattgcattatataaataaacaaccatattttataataattataaaatttaatacttaattacaataataataatatgatacttctaagtggtgttaaatattactgtaccttttagcatttttcatataaagagtgtctcgatacaaatcgttctttttctttatttgtatcaatacacattcttagcttttttttttttttttttgaaatgaaatataaacttcattaaaatttagcatttagaatacaaaaggtcctaaagatcaggtggtaagttctgaacatgaatgctacaaccagaaaaaaatcgagagtgcctagccacatagtggacaactcgattagctgatcgtttaataaaattaacggaaacatgtagaagataagaaagtaaatgtttacaatcattaacaaccaactcaaaaacagaggacacacattcttaactaatatgcgcttattgtggaacatttaatctcaattttttaggatgttatttattatagtaataatgaatttcctatcaagggagaaaataaaaaaataagtatacgaagtgtcgcctctgagtctccttccctctgaccaaggcttgtcggtcgttcttggcatgggcgtggctctagttgggcagtgatgatggtcacgctttcttagggctccgggggtgaaggttctatatctattcctttgaggttttctctctttctttgacatttttctatgtggtcacgggtttaatggggtcgattaggtggccaggggttggcttgcattttataagataaattatagagaaaattaaattgtatatccactttactttatacgttttaatttttaccctcattttcatattttttgaaatatacccacttttatagaggatatccctattatacccttaagttaatgaaaattatgtgctagatttaagtggaggataagggtatattgggcaacccactcacaaaagtgggtatattttaatgaaatataatatgagggtatttttgattaatggatacaaaaaagagatattccttaacttatccctaaattatatattagtagcatttaggtgatatgctttataattaataatactgaatcaacgaatattaaattataacaaaaaatatttgcgataataatacttaaatgttttattattttacaatgtataataataaccatataaaaatatattctaattaggatttttttcggcatgaactttttatgccgttaaaaatt

SEQ ID NO: 38382 - DNA, 3814 bp, Cannabis sativa
caattgtttcgccactactatttcgaagtatgacaccaaatccagaagtttatttgtatgcatcgactgccgcatcaatatttagttttagccgacctgatggtggatttaaccatcatggagtatgatttacactgcggttttgagtctgccattgagaagtgctcgaggcaggtgagtgacgggcttaataaaactcatccaagtatgagagagctgaatacagtagcagctcatatagctttggttttgtgccatggcgttctttgtttagttctgtccaaatactccacaagatacaagcaaattgctcaattttctagtcatcccagactttggatacatgcagtatcaactctttgagtgacatatcacttgagagaaaagtactgatgtagaaatttgaggttgtccaaacctgcttaggccttttacacaagaacaaagcatgaataattgtttccgttgcaccattgcatagagaacatctagcagtgtcgctgatatgtcgagtgtgtaacgtgtctaaaaccggtaaacaatcatgaattgctcgccataagaagattcaaactttggatggtatggatagggaccaaaactttttccatctggttatagcttcagtgtttctagtattcggttgttgttcctcgaggagtacaagaagtttgtatcttgatttaattgaatataatccattggattcatggtgccaaacttgttggtcatgctgggaaaacagagtgaggtggtaggcttagtatcttctcaatattcgaatctatgaagagtgatttgagtagaggaatatcccattgtcttgtatctgttatgagatttgacactcgcatttctctgtcatggccattgaacagcagtggtttcagatatgtaagtctaggtagccatgaatcggttgcacatttgatatttccaccattcccaactttccatcttaaaccttttaacaaaagttctttcccccatatgattcctctccaagtgagtgatgggtatatgcatgtgtctgcatccaaaaaggaattattcttgaagtatctttgctttagtacacggctaaggagtgaatttggttttaaaaaaatctaccatgcttgtttagcgagtaatgcttgattgaaatggacaaaacttttgaaatcaattccaccttcaacttttgattggcataaagctttccaagtcttccagttgattccgattccagatgaattagagccccaccaaaatttgttcatcatagtctcaatttgattgatgagagattttgagagtcgaaagcaactcattgcatatgttgggatagattgtggcaccgctttgaggagtacctcttttcctttaatagaaaataattgctcttgccaagaagaaagaaattttcataatttgttcttgatttcagcaaagtgaatttttttatccttaccagaatatgaaggcagtccgagtggcatttgcaaaatctgttggacattggtttgattttgcattgtagtgtttggagagcaagagagtactgatttttcagcatttaacttctgtcctgaagcacgacaataaaggtttagtgaacgttttgttgcttcagtagactgtgaatttgcttgaaaaagtaccaagctatcgtccacaaaaaataaatgagaaattgttggtgctcctcgtgaaacacgtagaccagtaagcatcccattcatttcttcatactgaaatagtgtcgagagtgcttctgcacatataatgaacaaatatggtgacaagggatcaccttgtcttaagccacgagtaggaaccaaaagtccatgaactgaaccattgacaaggaaggagtaagacacactgggtaaacatcggagaataagctctactacagattgatgaaatcccatagcatacatcagtccttggatgaaatgccattcgactctatcgaatgctttactcatgttaagcttcattgcggcaaatccttctttacctctctttaaatgtttaagagattgtattaattcaaatgccataagcacattgtcagttattagccttgaagataaaaaagcactttgtgattcggatatgacatgagacttcaatctcaaaacaattgatttggacaccaacttatagagaacattgcaaaggcttattggtctcagttgtgacatgttggttggctttttaatttttggaatgagtgtaattaaggtgttattgaagattgagggatctgcaccttcatttagcactttaagaactgatgtagtgactaaatctccaacaatatcccaataattcaagtaaaagcgcacattcatgccatcaattcccagacttccgtctgcattcatggttgagagagtttcaaatacctttgctgtagtgtatggccgtgtgagtgcattgttattttcagctgagattgtacaaggaattttcggcataatatactgcatagcttcagtatccataccaccagtggtataaatttcttgaaaataactttgaactacattagcaattcctggttgggttatgtgcttggcaccttggtcatcgattaacttggtaatcgtgttattcttctttctgttggttgctttctgatgaaagaatctgatgttagagtcgcctgatttaagccaattcattcgtgacctttgtttccaataatcctcctcttgccaagagttcatcaaggatgttctcacagttttggatgtgttcaaagtgttggaaagtggtatcattagagttatgtaaagctgcaacttgtgcttctacaacttttatttttctaggcagttcaccaaacttatgtttatgccaagattgaagttgttgagagcaggaagacagattgttgacaacttgtgtgattggatcagatgaagaattgttccagttattgttgatgatgtctaaagcaacttcttcatttaaccaaatgttttcaaaatgaaatcttaacttgtgtcttttggcagggctttgagcactcaacttgagaggtactagtagagcaagcacgatggtctgatttaaaaaaaaaaaaaaaaaccaagatgttccacttcagtagcaacgaaaatgctaggccatgcattattaactaaggcatagttaagtctttccttcacattcgttccattgacatgattattgtgccaagtgaatctcggactagtataagacagctcatgtaatccacaataatcaattgtgtttcaaaatccattaatttgaccatcattatgcagaggaactccaagcttatcagattgagataagatttcattaaagtcgcccatgacaagccatggcatcaatggagcaatatcttttagtctttttaaaatttgccaagtgagtggcctttgagaagttattggtgccccatagaaaccaaagaaatgaaaatgaggaccatcaggaaacacaatgtatcaatcaataaagtttataccataattaagaactgttacatttacatcagctttccaaagtaagagtaaacccccactaagacctaccctaggaacttctatccattaggaaaattaaatacagtacaaaatttagaaatagcacctatactaagtttggactccataataaataaaacatcagggacatgttttgaaatgagcagacaaagttgtcgaatagcacgtgggctgcccaacccacgcgcattccaactaatcagattcatggtgattggcgaggctacgattcaacctttgccaaagaagcttcacatccttcctctgttgggttttgtgcccta

SEQ ID NO: 38383 - DNA, 1787 bp, Cannabis sativa
aattatatgtagaaaaaaattatatataagaatggaatatacatttaatatattaagttttaaaatatatgcgtattatatgtattagatttttcaattatcattttctttacattaaaattttaattgtacatataattttttaaaaaattttataaatatgtgtggattggatttacatatcaatcaacatccaatccgcacaagtgcagattttaaattttctaatccaatcaaatacgtacaagtgcggatattgttactttacggattagattggattggattagatcagttattttatgaatactcttagtttcaagagaaaaacaacttgaaaacaatgtttctttctggaaacaaaacaaggaaaaatctgtacaaccaacaaaatttataaaatgtaaaatatatataaagtctgatcttaagtatattgtataaatttttaaataaaaatgtgtttataacttttatttttacgttatagtttttttaagtaaaaatagtgaaaataatataatagaaaatgagagagaaaatgatgagataaatgaagtaaattttaataaaagaaagtacaaaatagactatgattaaaaaaaaattgtttatatagatttttaaagtaatttattttattttcgaaattttcaaccctgtgttttataaaaattatcaattggatctttttaaatgacaactaaaactatatgttttcaaaatggatgattataatatcttcggctcaattttagttaaaaatataaaaatacattaaggtggaggctattttattttttttgcctgtatttgtactaaaattggcttcaaatatattaaataaaagtatgaccaaattttggctcaaggtattattatatttcatttaaaaaaaatagagggtcatcattgttgttgtctctatttttgtcaaataaggacaaatgatggtgcacccactaggtatcaaaactcctaataaagttgatgtaatatgttaggaagtcttttcaataaagttgtagagacaagacaagacaagcgcgtatacaagcaattaatgttttatttatgtttatcaatgtattttcttctatctttttttttttttttgaaatgaaaacgttgattgaaatcataagattagacctcacggtcattacacaggatagtgctaggtatagcagagggttctacaatacttgagatattatgagcataagcccatctagcgacattgtgagccgcaaagttacaacttctagaaataaaagaaaaattacaagataaagaattcttagagagttgattacaagcaaacaaatagttaataatgttccaattggactggacacctttaatcacatttataacaacttctgaaccactctcaacaaggataaaatcacgcttcctgtaagcagcagtttccaaagcaagctgacacgccgctccctcgccaatcaaaggatctgtgaagttgaggaagttggccgcaccccacaaaactgtccccaaatgatctctagccaaagcaactatgcacattgactcaccaccaacctgaacatcacagttaattttgatcaaagcaagtaggcagcataatttgtaaaacaattagagatagagtcaatagcagttttaatgttactcggagaatagttatgaactttatcattttgggttctccatatagtatccacaacgatcgaggcataaagaaactgttgggaagtattttaccaggatcttagatctactcataagtatgttgtttaaca

SEQ ID NO: 38384 - DNA, 2149 bp, Cannabis sativa
ggcaatggttcgccgttctctgactgtcgtcgatgtttctaaatgtttttttttcttgaacaattgtttctgaatgtttgatctagtgttcgtatcttacaacgttacattgcgctattagtgagcaaaaatctatgcagaaagtttttttttcttaatttaatccaagagcttgcgttaatccaaattttaaaatacaatcaaggtgttaaagagtggcagcaagttatgtttgagggtttgcattgatattaggttgaaactaaataccacacataaaatgtatgaattacttcttttattgtcaattggttttgagatagactccttgcaccttatcaaattctaatatgatatcaaatctaaaataaactctaatgagtattcgatcaaaatttaaaaaccggtctaaaaagacgagccaaagaaccgcttgtgattcggagatgttactccggtcaaatgaatcacttgtgatcgagccatgcaagattagtgaggaaaaaaatagctattttgaagggggtgttagagagtctcacattgataatgtattgaaataaataacatacataagatgcatgagctactcatctcattgccaattaattttaagaaagaaccctatacaccttatcaaattatatgcggtattgacttttataaacacctaaacctaaataaatatatatatataattataatattttaatataattataatttaaatttaacatcatattatataaaaatataatatatactctgttggaaaaagttgactttattaacattatttttggataaaattgaagtggatttcaatcccgcatcatttaaattaaaaatgataaacttcttatgttatagatatagtttaagactttgagtgtaatttacaccaaaacttactcatgaacaagtttatatcattaatcaattaagtattattttgaagataagttgttaatgttataaatttcttaaaatactcttcagagtaattaggttatcacagtgtcatataattcaaacatatttagtttgccaaagtaaaaagtggtgtgccttattacttttttagttgtatcttggaagacagacgcttttgagagaagattagtttgtcaaagtaaaaggtggtgtgtcttgttactttttcagttgtatcttggaagacagacgcttttgaaaacgagagaagaaaaaatcattttaagaaaactgcttgctacacaggccttggacattcaccaatagaaattgcaatcacagttaatttttctttatcttattataaaactagagaactaagtcgcgcatgtgttgccaaacttttgtaattttttttttaaatttgatttttttactaattgtgatataatcgaaaatataacattttgatgtgtatttttaaacaaagtaacatttttcaagttattagaaacataatttggtaattttaaaataccaaattataagtttataagtttaagaaactgagtttgtgattgatggtgtagttttttttatttaaaagattatttttttttcctaaaaaaagaaaaaataaataaataaagtagttgagaggcgactcaaaaaaaaaactatgaagctttaatatataaagatatatatgaatagttgaataatttattaaatttttatataaaattacagtttgataaaaattaacaatataaaagaattttaatgaaagattagaagtacaaaatagtaaaaccgataaaatataaaatataaatagaaaaaataaacaataatataaaggaaatataaatattattgctacctgatctctttttattaaaacaaatatagtctacactttgagtatttatttaagaacattataattaaaatttatatgaaaaaaataaaattatatctatttcaataaaaaataattaataactataaatattaaattttagccttttatatttataagtatgatgaatatataatttcatgcatcataattttatttactacctactattatttgtgcaattaacaatttaataactcttttaattttttatgaatcatttgatttataggatgtcgtctcaccttcgtttaaactttcttttatatctatttctatatatatatttatttt

SEQ ID NO: 38385 - DNA, 1940 bp, Cannabis sativa
aaaagagggagggtaaaaatgtaaaaataaaaaaataaaagaggacaatctaaaaagggtatagagtgtaatttcctccaataagtttctagactggctttgccattggcccattgtgtaaattaaaaagtaatatttttctaaaatgaataaaagaaaatgatatttctaaaaaactttggggccctaagccagctactaacttgttgtcatttgtagcaacttaatttttttttttagggtgttgtgttaataaaattatgatttaatgatagattaaattttggataattacatgatatactatttttctgtaaattttttatatttttaggttaaagttctttttttttatatatttaatgatatgctataaaaatacaaaaaaaaaataacatcaaaataataacaaataaataataatagcaaaataacatcaaaacaacgtaaaaaataatatataaataacaaaaaatcaacaacaaaataataagaatttaatataaaaatacatcaaaaactgtattttatgtaaataaaatctaaaaaatcgtaaaaatattaaaaactccgtacaggcggtatttttataaattttttttttttgaaattatccctaaattttatcacacatataaacttagatgatatgaagcaaagtttgttaatgatttgaaataaatttggcttgaaatggatatgaatagattttagagcaagataagaaaataacactttaaaatgaggaatatgatgatcctctaaagtagttataaattgtcaaataatgcatgaaaaaatagcactaatttatgagcatttagaatgcttttatgcttccttttgcttgaagaagcaattgaccaagcattggagtttctttactgttcaaaattaccactttttggttacaaaaataccatttattttactagtgttagttaaattgattttcattaacagtgttgctatttaaaatagaaaacattataattgtctgcaaaaatggagattctatttaattttgttttggtagttggttttgtcaccaaattatagatttttctttatgggaatctttaaaaataccatttttatgttttatttacaattttaagagtactctaatagagtgctaaaaatgtggtctattattttagcagatttaagaaaaactaatattctaatagtgttctaaaaagtgtgctaaatttgacacatagtaatagttgtgccaaagacacgcgatatagtattgtgtcaaatttagcctacaataaatactacttttttatttactataatatcactagttattatgattcattgactttttctttacatttgataaatcataatataaaagtactataaattatttttatcaaatgtacataaatttatatttaaaaaaaaaattaaaaatatatataaaaaataaagtattatataaaataagttcttacatatcattatcattatcattatagtagatcttaataactcacagttctttaaaatttataatttacccaacacttagcttagttttttttttacaattatgttgcaattactttttctcacagcacaactacaacagttttttcctacaacacagttgtgccaaactggcccataaaagaagatgtagttgcttagcaaagcttaaaaatatctaagcttaatattatatatttatgaatgataaacaataataataatagagattttaaaaattgagaagtaagtctcatacttttcatagttaagcaaaagataaaaaaaaataccatatatttcatgagtagaaaaaacaacatattttttaaaagcgctctttcttttcatagttatgtggagtctgattgtttagctttggtttctgcttttcaaaagtgctctttcttttgtattgagctagatttttttagattttt

SEQ ID NO: 38386 - DNA, 2466 bp, Cannabis sativa
  modified_base (1256)..(1275): a, c, t, g, unknown or other
  modified_base (1381)..(1382): a, c, t, g, unknown or other
ataatcatttcgtatgtttttgcctctgtaatacttcgtaagagtcggattaagaacatcaccaacagctgacacaatgaccacactactcgtctccacccgtatctgtgacgcaaacgatttgacttttcctatgatgtccttcataaccaaataccaaagtcagatagagaagtagtactcttaattgttcatcttctctatttcatattttaaatttaatgaattaaaatgcatgcttacttctccttttccaacgttaataacaccataagaaggaccctcctgatcaacacctgtcacgccacacataatctcatcatctaacataaaaagataatatgtaaagcaaatgaacattattagcggagcaagaaaatcaagattttggtacatgatgatactaactaacgtttgaaaattatattaaattatagtatatacgtacactctgatttttgtttactcgcattagcacaaacttttgggaatcctgttctagcgcgcttgcgggatactggggcttctatttgtgttaatttccttgaaggctcactagaaaaagaaaaagaagacagctgtagtattactgattcctccattttagattggtccattgctgctaattccatattattgggttgttcttgggctcgtaatttcattgcaggattactaggaaaagaggaagaagatagccgcagtgctgttaattcctccatatcaagttggtcttgtgctgttgatgatgattccatattgggttgttgttcttgcgctattgatcttttaaacaaatcttcaacaatgaaagacaaacctgtagttcttgtgggaatagatgaattggataatgtttccctatcatcatcatcatcaccaccacgtccatttgcatccatgttgctttgaaaagctagcttataattacaaagaatgttttccaaagtagaaaagctatctttgcaaagataaaaattagtgtttttcaaaggaatgtgggttggtgggggtagcgttatatatatagtaatcaagatatagttcgtcacgggttcaagattcaagaacgataaaacagaggaataaaaatatatatcatttattcctttaattccattatctactcatttcaaggctaaattacttgcgcaagattgtaaacaattagtagtaagtgaaattaacatatcatgtatgtgatagtgctacttatagttataaaacatgggccgtttggtaacacttttgttttnnnnnnnnnnnnnnnnnnnntgaaagtaaaatttttgttttttacttttaaaaattttgcttttgaaagataaaaatactttctgtaacaacttttgttttttaattttaaaaacagaaaacaaanntgtgttctgtaaagtttattttcatttttcattttttgattttatttacgtcgagtctaggtccggggtcgggtttgggttcaaattagagatcgggttcagcgccagggccgtgagaggatttggatccggatcatgatcgaagtccaagatattgattaagaaaaaaaaatctgtttaaaaaaatattaaaagtaattttttttttgtttttaaaattttgattctcacttaaaaaaataaaaagtaaaaacagttttatagaatatgtttttgaaaaatattttcattttttcaattttaaaaacagaaaattgattaaaaaagtgttatcaaacggcacaactttaaaacttatatttgaataacataaattaggagtcattaatataccggcatttcagtacccacaactttggctggctattgttctacttactgaatatcttgcagaggaatgaattatttccatcaccataaaacacatgctctaatccacagagatttaacaccaaggtactccaacatgatctttacactaagaataataaattgtttgtttctatttctaccaaaattctccctttgagaaatggtagaaggcccttttgacttatagaaatgtgttacaagatgaagctgagaatggttataagactgcaaaagaaagttggtgtaatataaggtataattagatggttcaaaaaagaccatcacctgtagaagaggatacacaacaaattgcagaatgcagaggatatgcaaatggtgtagtttccttcctggctctactttgtgatattacttggcttctaagagattgctggcacgagaagccaacattcgactatttgagaacataatttctcagcttgaaatcatccatgcaaaactctgagataggaaaatagttcatgtggctttccaaaaaaaaaaatggtttagttcatgtgtggtaatgtgaatctcagattttcataagcatattgtttagtttgtttgtcaaaaatttattcaatgactacgtaggcgtataaatgttctaccgaacacgtatatatttcgctaattgatatgcaaatgt

SEQ ID NO: 38387 - DNA, 1536 bp, Cannabis sativa
tataccacgcacaccctgtacttttccgcacttgtgctggtaacatcgtaatgtactctttaaaccacatacactataccaatgcactctatattatttttcagtataagtgttggtagtgtactaaccatttaagcatgcatatacattaacacatacatacattcgcatagtcatatcacatattatacgctgtccttatctcttttccaaattcaagttagttggctgactgaacggaaagtctcgtgctagatggatgccctcatcacataacataaccgggtaaatcacacgctaaaactctaatccaaaaaactcgaacctacatcttaaggttctactattactaaaaggaaccacaataccctaaaaaactggaaatcacccaaacgaggcattgaattggatgcgaatcgaggaaatgagttgttcagggaatctgccaaaaccggttaaccgtttttacaggtcctggcaaatcggttaaccggtttgcaccaaggttcccccaacaattcataacctgctcaaaacatgtccaaatgctaccaaaacttccaaaacacctataataagcttacacaatataatccaagcaataaaacccaaaaaaacactctgaaacaaaacatgccattgatgacccaagtttgagttttcaaactcaaacatggtcatccaccacaacaatcgtcaaatacagtaacaagaacttaaaatcaactcaatttaagcttagaaatcgaattataacataacataacctaaccctaacagcccctatatctcaaaattgcatactcaaccaaaatcaaagcttcaaaaacaagagattaagaattctagggttacctttgcttagaacctacttgaattcagctaagtctccttcaattacaccaaaaaacaatcccaagctggctgttcttgttgggttcgaagagagagaagggaaagagagagtgttctttgatttttttttttttggctttttccttatttttctcttattttcctaaatgaataaatattaactaaattaatctttgccgatataacaaaatctaggtgtcaactccctaggctgccaccaaattcccacttgccaaattactaaaatacccctttttgcttaacttaggcaaattcaagcctagggataaaatggtaaaaaaccgtaatcccgatcaaactcgatattctatttttctccaacatatatcctgctaagaaaaagggtctagacttaaccatgtgattaaactagcaatccatcacattttccgttgtcgccgagcaaaaatcgtaaaaatagcataatccaaatataatacaaataatagtcctagagtttaataaaatctccagaattaagaaattataactctaatgcccacctttaataatgagactcacaattaaataaattaacaaataattattaaatataaataattagtgctaattgcctttactaatccatattataaatagggatgtaaacggggtgggcgggtgcggggattgctcccc

SEQ ID NO: 38388 - DNA, 2968 bp, Cannabis sativa
ttaaggcataaaacccaacaaaagatgggatatcaaacttcaaaggtggataaaatcatgaggtttgtcacttctgttagtttttcttttctaattaatggcaaggttcaaggggaagtcatactacaacagagtttgaggtaaggagaccccctttcccctttcccctttttgttttgtgctgaagcattttctaatttaattcaacgagaagaaattgtaggtaatcttcatggcttcattttggtaggcaacgtgtcattgtatcccatctactttttcttttgtagatgatagtctaattttctttgatggagtaaggggtgattgtcagaggtttcaagaactattgggtaaatatacatttacttctagtcaggttgtaaactttcataaatttgagattggcttcgggaaataggtgggagacgacatcaaggaggatatggctgatattatgggtgtgaaagtggtagaaaatcatgaaaactatcttggtttaccatcatttgtagggaggaataagaagcaaatgtttgattttattaaaaatagagtatgcagaaagttaagagattaaagaaattccttattttctatgacttggaaggaagtactcataaaggttgttatacaagaaattcccacttatacaatgagtaatttttgactaccaaagaatacaattaataatctctataaaacagtagcaagattttagtggggttctttggtaaaagagaaagatttattagtgtaggtggtctcatctatgcaagcctaaagagaaaaggagggttaggctttcgagatctgaatttattcaatcagacactccttgctaaataaatttgaagatgcataagatatccatcaacactttgctgaaaggtcttgaaagtaaagttttttttaaagcaaattaccatccaaatagggggtatttgaggctagatatggaaatcatgcttcttttgtctggcataatctggtgtggggaaaggatattattcttaataggattaaaaaatggtaatagtttgagaatcttagaagatccgtggctacctaggcaattaccttcaaggtttttgataagccagttgtatgctattgatattaaactctggaatggcatgtgggatgaataatttattcaagctacatttaatgaggatgatgctgaactgatcttgaaaatttcataagagaggtgggagaaggaagataaaatactttggtattatagcaaaaatgaataatactcaattaaaagtgggaatcgaatggcgtctaaactaaggcgcgagaagcaccaatctgatgatagtcaagaagtagcatggtggaggagattatagaagttaaaaatatcaccaaaggtcacacactttgtgtagaagatcactcactcttgtttacctactcattcaaaattagcttttagaggggttgaaattgatacacgttgtaacagatattctgctggtgcaataggactgttttacatgctttatgggaatgtaatcaatcaaacctatgtgaaaattatgtggttggcagcaacatgtgaaaggtgagaagaaaaagatgttctaatcttttaatgaagctatcaaagagatggtagcaagatgtgtttgagatttttctggtgctatcatagaatttatggtacatcaagaatagtactaagcatggagagaaagtgtgaaaagatagggaagtcaatgactggcgtcaccgtgatattcaagagtatagggggtcgacactgaatttaagagaagacaatcaacgtcaacaaggccaaatggagaccaccagtggaagaatccctggagataaatgttgatgctagtgtgtgaggaaggatcgaggttgttccgatcttagttgtgagactcgggactttcatggtaaagtggtgtttgtggcaactactactctacaacaaaaatacacaccattacaagcagaaccggccctgagcgataataggcccaagaaaaaaaaaagtgttatatataaagaggaatgtaagtattattaggcctatttttacaaaattttacgaaaaatactattttttcaatgcataaaagtatattacataaatattttgggccctaagcacaaacttagcccaccttaacctaggatcaggcctgattacaagcagaattcacagctattcaaactagtttacaatttggagttcaacgacatttacaaagttttattagtgttaatggagtagcgcatgtattagtcaattaagctttagcatacaaagttactgttgtatggatagggttaatctctctcttgtgtgagttttattttgcaacggaactagcctaatcctttatataattgtattttaatgaatggacatggatttcaaaaaaagaaaagaaagctctcctttttttttttttctactattttagagagctatattgttttagttggagttcaatttaaaaatctactcctataggagcaatgtgtttagagagaataattaaagaccactctagagctttaagaaaaagggtaaattgcggcataaatacctaatgttttagattttttacacttaaatacctaatgtttatttttggaggcaaaaatacttaatgttacaattcttttacaccgaactaccacttccgttaactcataaatatggacacgtggagggttcaaatacattacatttattttttattttattttaaaacttaatatttttaatatcagaaactaaatgctacttgtttcagaaaaaaaacttgttctcataacaattttcacatgatattggcacttcaattcgataatcatgttccatatactacactggttcattcagctatggtaatttagcactgcatttctcttattttttttttaaaaaaaaacaagtagtatttagtttttgatattaagaatattaaatttt

SEQ ID NO: 38389 - DNA, 1710 bp, Cannabis sativa
atgtcgagaaggtgctaggcactaatagtgcctaataacaatgctctattatattaatctgacttaaaaaaaaaaatcttatttttgttatgtaggttgacacttgacactcctttctctctcaaaaacacaaaatggtcatgaaatttttattaattttttattttacgagtaaataaataaattagatatacaataatgtaattttgacatggagcattaaaagaattattaaagttttatttgttacaacttgcaagagctaagtcattgatttttttaaggttgtaataaaagaattagtattaattattaagattaattacgacataaatataaattttttgagtttataacacataaacataattgtattataaaactattatgtaggggaaactatgcgttttggggatctactagtgatcttcatgtatgtgaaatgtaataatctcaaatctaaatatacataattttttattggggccatccattcaactaaaaagagaaatttgctaattttttcataaaactaattaaatgagaaggaaattacacagcttcgtaaccctaaacaataaccctaacagcgccgtaacagaggatgtagcttcaccagcgccgccgtatcaaagccgccttattagtgttgccggagtaggtcgatcatttttctcaggtcttgttgcaggtacagtcgcacagtgtttctcccagtaggcagtcgcactttgtccctccagcagccgcacgaaccatcgtgctcctccaatagctgcacgtccgacttggtccctagtagtcgccggtgtctctggtcgtctgaacgtcccagcagtcggcgttgtcaagtgatctacatgtcgtcaacaaccagtgggggttggtagaattttttcaacagtcggaaagttgtatcgcaggttaggtcttgtcgtatgacatggtttctttgtttctctagttctatgttgttttgttaatgttcaggtgttaaggttgtgtggtgacagttcggatgtttcttggttgtcgggtgtcttcattgctgggtttcttagttgacaggttgcttggttgacgggttcttgattgtcgggtttctcggttgacgggttcttggttgtcaggtttcgtggttgttggttctttgtgtttttggcgttgtgggggctgttgtgtttggccgggtcttgtggtggctgggtggttcgggtttctttcttgatagttatggcttcgacaagttggcacaatggggatactaaggatgaaatattgcggtttcaaattgaggaggaggatcttgaagaagttacagttatcacagggggaggtgatgatggaattgatgatagatggtgtttggttggaagattcttgttcatagctcaaagaataccctggttgttactgataacaaaaaaaggaaagtaagtgagggtagtagagacagtgctgaggtggtacagcataatagttcaaaaaattcatctttggcgggccttggcaatggggctcgccaatcattatgaaaatactgtcttggaactaccgtgggcttgggccgccacggaatgttcagttaaagaacttgtggttcaaaaaaggcctagtgttgtgtttttgtgtgagacattgagtaatcagatgaagatggatcgggtttgtatgagtttgggctttgaggggtgttttgttgttgcggcc

SEQ ID NO: 38390 - DNA, 1583 bp, Cannabis sativa
  modified_base (1410)..(1412): a, c, t, g, unknown or other
tatttaagcataaaacccaacataataaaccatctcttacagaataatcttcattattaattgtgccctcttttagcttagcatgtagacggcacaattatggcaagtggtattttctcatctcaattcctccaaaaattcaaagcaagtgaaagaaatagcagtagtgagtaaggaaaatgagcctttattttgcatggacaatgcatcaactgctgaattggttttccctactttatattctatgaaaaaattgaattcgatgacctttctagggaatcgttgtttttttggggtctgaatcacttgagtgagtagttccttcaaactctttcgatccgttcaaataaaaaaatgacatcccaacaagtattattcccatttggtgactgcctcgacaacttctcgcaactctctaagatatgatgaagtgtcaataaacttaggatccaacttcttgctgacaaaatctataggatgaacttcctgcattaggacagcttctatgcctacattagatgtatcaaattctatgacaaacaacttcgagaagtctagcaaagtaagaactgggttctctgtcatggcttgttttagttgcttaaaggctgctagagcttccaaataaaattatctttttacaataactctgtaagaggagccataatggtggcataatgatctgtaaagcgatggtaatacactgttattcctagaaatcctcttagttgctttagattacgcggttgagcccaaccgttgttgcaatcctggaaaggtctgcctgaaccccttgagaagataccaagtgccccaagtactcaatcataggatgaaataattttcatttgttgcttttttcctaaaacggtggtcccttaatagttgcaacaccactctcaggtggtgagcctgctcttctaatgacttcgttgtttactttcttctctacgcaagtatacgtatcaattgtaagtatatactcacacaggtgaggctgaaccacagggaattgaaaattgagtaccacgaaattagattagttcttctatttggttgaaataattgtcaaagaagtaaatgaatgacaagaaactaaaaataaaacaattaaagttgattaacaatgggtgaggaattagggatgtgaatcctgttgtaccaattatccaattattaatgctaattactattcttctttctttatgtgatgagagattataagattaaccaatactcttttcaaattattgaggtcctaaactatatgttatctattacttctctgagatagactaacatacaatttgtattaagcaataatataaaagtcacaaaggctatgtaaatactctcgttttatattaaaatttatgtttattcaattagagcattctcaatactcacttnnnagattttgtattgagatcatgaatcatgcctaaggttttcaatcttaaacatgtattaaacatatatatgaataaatgcacaatcaagaatgatgaaataaagaatactaataaggcttgcgtctcctttctcctctcttccatggaaaagaagaagagaatctttcataa

SEQ ID NO: 38391 - DNA, 3396 bp, Cannabis sativa
agtatttatatacaactaaaaaaatccttcataatcttttattcacgttttctttttaaattataaatctatacatctatgatattttagatgtggctatataacaaaaattggcattcttttttaaaacattaaaatttaaatttactatacatctctttggtctttcatcttttattttatattttatatatattaaatgtggctatataatatgaagtactttttttaacattgcatttaaaatttaaacttattatacattttaaaaaaatatctttctatattatttttttatccaatccacacatctaaaaaaatatatatttctaataataaaaacaaatgtttatatttcttaaaaatcataattgtaatgtcgttatcttttgtcgttaccaaaaaaatattgattattattatttttataaagaaaaatagaaaaagtgtgatatttctaataaaaataaaaagtattataaaattaaaaatattataattaaattaaaattataattaataataaattttgattttattatgtttttcttttttaatataaatatcacttaaattaaatatttttttaataaaattgatgtcgtttattaaataatatataaaaaaaactaattatacaactaaaataaaaattaaaactataactaagtatatcttgcatgtagtattaactcattatttatataaaaatatataaagagagatataagatgataacatgacacttttaaatttaattaatattaattttaaaacattataattcaaatataaataccaaatagctctcttatctttaatctcttatattaattgtatttttttaacgttacattgtaaatttaaattcattgcacatacttaaaaaatgacattctattatcaattctttacttcatccacatatctatgttatattaaatgtgactacataataaaaagtgttgttcctttttaaaacattacaatccaaatttaaactccaaatatctctcttatcttttatctcttatattaattgtctattttaacattgcatttaaaatttaaacttattgcacataaaaaaaaaaaaataggaaaaataccccatgtactattttcttaattttttttaaatttacggttcgggtttctaaagtggtttctccggtgatttctatgtagaatgctatacgatttttggttgcaatttaggttgctccgctagttgcaataggagtttttatatagaattccgtaaaaatgcaaaaaaaaaaaaaactgttttgaagtgtaaaaatgaaaaaatttcaaaaatatatttctattattaatttttttacccaatctacatatatatatatataaaaaaaaatatatttctattattgtttgttttatttctaaacaataaaatagagaaaatgtttaagtttcttaaagaatcactgttgtaatgttgctaccttttactggtagcaaaaaaaaaaaatcttattattattaaaaaataaaaaaagtgtatgatattttttaaaaagaataaaaagaattataaaattaaaagtatttatgactaaactaaaattatagtttacaataaattttgaatattattgttttatatacataaatatcacttaaattaaacattttttcatgataaataatattatttattaaataatataaaaaaattaattatacaactaaaaatatacataactaaaataaaaactaaaaaataactaaatttacgtacattgcacaaaatattaaccttgtctctttaaataacactataaattatctctttttttaattttttattaagtttataaatatttatttattaattaaaaatatatatttatttgtgtttctaggagggtaacacatgatatctccgaaataggattaatctagaatggcctggactaaagcccttccacaagggtaggcccagtctagacagaagatgggcccgagccaatccaaagcctagaaggcttgcctcgaagacgaggctgatttggacatcgaaaaacctccagccttcccaagtcggaataaacaaagccttctggatgaatgttagggcacatctagagagggtactccaagaggtgcctcaaaagcctagtataagatgacgtggctgcctcttaatgcctagccccactatatcagatcttgtcgcctacgtagagcatgatagatcacgcaccaccaaaaggaaaacctttcttttgtccaacaacacgtatccaacaccacagttcagaggtacgacacccgtaggacatttgtgccaggccacgtggtcgccagacgtacaaacgccttcgccccacgagccaaaaatctgctagtgggcctaaagtcatgtatttcatgtatttaccctcatagtgggcttatttttacacaaaagccctagcgggtcatgggtgtacccaaatccaaatcctagcctataaatatctctttataccttcatgcaaggagtgagattcaaagagcttgttttaggttttcttcttttagaagtcaaaaatgcctaagttagaaaattagaaggtaaataatagctagaagctagggtttttgaacttgtaagatctcattgtactacattaaagccattcgacataatacattgactcatggagtaggattaattaacacccaaaccacgtaaaaacatttatctccatcctttgtttacttatttaatttcttaagctcttatttaaatcatttttcaaaaatcttggtaaatagtttggtgctttcattcagagttgaaagaagatttgaagctaccttgtatttgcaactgtggtggataccaggaaaaccactgtcacacaacctacttatcctggccatgatcccacaatgaatgatgttgacccaatgacaatagagaaatagaagaggatgatggtgagatcagggatggatactataaagataggtattactctatgaacaagaccctgaagtggttggaatagttggtgagcttgtcgaggctcacaaaagttggcggtgcaagaagaattttcactcaagatacaaaaatgttggcacgtctacaagccaaacttggtgatacaaaggaagattatgaggagaacgctcttgaagagcttgctcataaagagaaaatggcaagcctcgccgacatcaaaccttctgctcgttaaaaggacaaagggaaggggaaggtaggtgagccccaacaaaaaactttccaagttccacttagaaaaaatgtgaatacaaccgaccaacctatgcagagaaagaaggccattgatgcctttgggcttggacacccttctacttagcgaggcagatttgtgcaaaatgataggcccaacactc

SEQ ID NO: 38392 - DNA, 2704 bp, Cannabis sativa
  modified_base (1015)..(1020): a, c, t, g, unknown or other
agacctcttttactccaaagaacctgaaaacatagaaaacaagcgtaattccgtcccaacacagctaaaaatgcacataaattggatccaaaacataggctaaaaatagcctaacacaatgacgtttctcgacttaaagccactggaacgggttgagccatgaattgccacctttgataacagccgtacacttgagccgacaccgctctacttccacaagtagtatcatatctattttgataatctgatctcgattctcttcctataactaacgatgtcgttttaatattaattgagttgatgaattctttgataccatgttgtaattagtattagtaataccaatagcattggtgaggtggaatagaaacgagcataaataaataaaggaatgttggttatttatgttatattactaatttattgatatagtaacatttgatttgcaaatctaaaattattttttatataatggagttatttatgtttttttttctttggatgtatcaacattatctatatagtaattaatggagttatttctgttattaattactaaattatcgatatagttttataaaaaaggttatcgatatagtaacaattcactaacaaatctataattactaattatataatggattactattaagtaattaaattaccaaaactgaatttttttgctgaatatctattatattacacaatgctcttcaataaatatagaaatgtccaaaaagatattattactaaaataaaaagatattattactgtaaaaaagatattattgctaaaataaaaagatattattactataaaaaaatacaatattactaaaaaaataaaaaaagaagaaacaaaacaagtattagaaagtcaactttccaataacatatatactttgacttaggtgtagctgttggtgcagtgaacctcaatgacctcatcattatcctaaaatttattaactatcctttcaacaaaaaattactgattattattattattattatnnnnnntattattattattattatataaccaatttaattaatttattattttgtcaattttttatggtaggaaagtttgttactgaatatactatcgaattttatatatttaatggtcaaaccaaataaaagaaaaatctaataaataagcatttagttaataatattaattaggttattaatggaaagttggagtaagttataatggaaaatatagttatctatattttttatgaaagcaaatgaattatataatgtacaaaaataaattcattttgagtataattaattagaaaataaattactaatttattgatatagtaatatgtgactaataaatatattattaattttatataatggagttatttatgttattaattactaatttattaacatagtaacatttgattcacaaatctataattattttttttatgtaatgaattatattaaattgatcaaattataaaattacttttttatatataattattttcactccttttataacactaaattatattaaattgatttatcttgcgattctcactattttatattttaaaacacaaagtccataaattaagttgtcgtttggtaataattttatttttttaaatttttaatcacaaaaataaaaaaataaaaacttttatttttgataatataacatgtgttttataatcattttagttttttttaattttaaaaacaaaaaaataaaaatatgtttttgtaatttttttaattttgattttatttaaattgggtctagggcaggagtctagatttgaggccaggattgcggtcaagttcaagttccaaagtgtaggttggggtcgcagtctaaaatattgatagaaaaaaatcgtttaaaataattttaaagatttttaaaattttaattctcaattaaaaattaaaaagtaaaaacagtattatagagcacgattttagaaaatatttttacttttctaatttaaaaaataacaaattaattaaaaagtactaacaaacataccctaaatataattaattaattaattattattacactttattaaataaaaataaaattgtaaactattttttttttaagtaatgtaaactattttttttttttttgagataagtaatgtaaactaattaataactcaaaatttgacaaaatcgtgtccattaattaatttgaccttgactaagcaagtcaacaaaaatgctcccatttaatagtaatagtgttaaatgagtcaattttgcatcaaatattaaaaataaaatagtttaattttccataattatactaccttttttttgagtgaaataataatgataatatatttgagacataaatgattactgcatttattctaaatctttaccctaaccatggtaataatcacaatatatatccttgtcattgagatccaaaattaattattaattatttgtgataaaaaagttaaaagtaattcaataatattttttttttttttacacaaatagtagtttcttaattaaacggactttctcaaagtgacaaatttaataatgtcatatcacattaaatcccgtaaatatatatatatatatatatatatttaaattataaataagtgataaatttcataaaacttccattaataatggtatttatatcttatcacattaaatctcatgaataatg

SEQ ID NO: 38393 - DNA, 1604 bp, Cannabis sativa
actaatacccaatatcaatactcttaattatattacttttattaattttctttctatgattttaaatttaataacaaatttttatattttatttttagaacatattataagtcatttatttatttattgaaagtattataagtcattcattagcaggaacattctttgaaaatatatctaacttatttacacaatagtcgagtactcaagctataaagttgaatgaacctgttacaatagtttttactttctactgttgtgtcttttgagcggtggatagaacagaatataagtatttttaaagttaattgtgatgctacactcttcttcatttgattttattttagtgttttgccaaacgattttaaaattagacaactaattatttgactagtttttttaattttaatcttagtcatatctccaagaggaagatgtcccaattagattgcagactattattttaattaattgtcattaataaaatttcattatttattaaaaaaacattaaatgttttaaagatttttatttatttattaatttgtataatccaatgtcaattgtctactagctatccaatttttttttaaagattttaaaactttgcctataatacacggcatgaataataacacacaaaataatacaatcccattacataattaatatcaccattaataattttcatttttctctttttccaaacaattaactattcctctttctttgataacacctcttgaatcctttcaaggtagttttccatagtctccaaactcttctcatctgaaaacccaaaaagaaaaattaataataaataaataaaatagtatcatatatattctaataaatatataagtgtctcatacaattcttgctgagttatcaaaaaataaaaataaataaaaacaatctaatgtattttataaaattattattatattttaaatttttatgatgtatattttttattaaatatattaaaaaaatctcaattaaaattactcctaaaataattgaaatgaccattaaaacaatttaaaattagtaataaaatcatatattataccaagtcttgggacagtgtggcctttggggtgatgaataacatgaggatcaacacagctttctaacaattcaagtccatattgcttcatgaagtcatgctctcctgcaaccaaacattattatttttaaacccattcattaatattacaaaatcaccaattaattatatcctaatttttcaattgcaaaaaaaaaaaaaatactaagacaactaatacaataaaccagcttataaatttgtaatcatatagtgaaattgtttttagagaattgctaaaagatattattagtgtttaacacctttctcggtgaaaaattactattgatataattaaatatcgtctcatataatttaaaaaattaatttttatgaaatatcattagctaatcttagagcgccacctataaaaaaaatgtaaagcactactaatgtctgatagcaatacttttaataatattattcatttcgagccacatgacatacaaatttgggaaacaacaactaatcaataagtgtcatgtggctcgaaaaa

SEQ ID NO: 38394 - DNA, 1867 bp, Cannabis sativa
tgtcttggtaagggataaggagggataatgataatggtggttcttggtttcgctttccaaatggacaaaagataaaaataaagtaattaaaaataaagtaactaaaggatatgctgcaaaaccaaaaataaggggggtgtgaacaattcaggattttggcataagttatggcacctcaaaataccacctaaggtgaagaatttaatgtggagagccgtgacaaacactctacatacatgccttcaactcatagctaaacacattgatatatctcatgtgttctatatgccaccaatgtgcagaatcagcctccacatacttttaagctgcccttttgcaaccagctgctgggacaaagctatgttgttagctcatttcgattccacactcggacattggcttgaccatgtgttcaacaattatgatgatgatgtttcttgccgtactatcataatttgttgggctctatgaaaggcacgaaatactttggtttggaacaaaaaagcttcttctccaatacagattctcacatcagcatggactatacttgaccattagcgcaaagctcaagataaaagttgtttattatcattgtctctcttaccaaatgataattaaattgagtggtggactaaaccagatacaaacacggtcaatattaatgtcgatagagccttttttgagaaagaaaatgcatacggttttgatgtagttgctcgtgactcgaccggtcatcttatcgatctaactgccaaataccaaggtggcacttatgcgattgaagttattgaggctcttaatgttaaggaggcactaagttggctaaaaggcaaaggctagagtaaggtggaagtggagactgatagcatgattacggttcaagcaatctttagtaagcaacaaatgacttctgtttttagattgattattaataattgtaaatttttattatcatctctacacaaatgttagtcttcgtttcattagacgatcaactaactgagtcactcactttgtagctaggtattctcaatttttttttttgattgtagcattcacaggaacgttgttcctgatgatcttccaactctcttgtatgatgaatgctaaattttaatgaagttgatatttcatgtaaaaaaaaaaaagtaactaaaggacaaaaaaaatggcttaactaaaggacaaaagattatctatgtaattccaaccattcatttataatagtgagtgaaaagataaaataaagggcttggattgctagtggaatgtcttctgccttttacacaggcgtgactgaacttaagccctactttttattacaaatatatatcgtaactaattaaattacatatatatttttttcctattttttcaaaaaaggcgactgccccgcctcgcctacatgtgggttcgcccttggttcctgctttttttttttttttaaaaaaaaaaatatgataggcaaatcaaataatagtcgatttgataatctatcattcaaagaacataattaataagatatgtaaatatgtcgtttataaaaatagaaatacaaaccttaataacatctttaactaaaatactaataaattgtcaacattgaagcatcaaagaagcgcaaataatactatattatttaaatgaatttgtgacaaattgtatttattgataattatcttttaataaaaatggagtaataataactctattattcaatataaaataataaaaaaaaattaatcaaactacctactatagcaaaacaaaccattcatatttttttgcttgttggctgtgaaataaatgtgatgggagaaaagttgcctaggggaaaaggagtataaaataaataataaaaaaaaaa

SEQ ID NO: 38395 - DNA, 3841 bp, Cannabis sativa
ggtaaaataatttccaacaggaggggcctcctcttcttcttctttctcaaagcctcctgttcgaatttgacctcttcttcttgggctggcataagctctcttgctacctgtctgaccccttgtccattacatatgggtagagcttgtactcaataaatttggcctcggtggccaagaggaaaatatttcaagcatccgaggggagttggagtatctcttgggctctttctctaagtcccagagtgaacggaggtcggcaataggaaagaatgtgttgaaaactggtatggttggtgtccatgcccttgatgaagtaatagtcctccacataacaccaattttggtcacctcatgcctctttgatctaagagaagtagaaataccaaaatctgttttgcttgggactggacttcaggtcaaacagccagttagtatcatgggcggatggctgaccccatccttgagaagcatacaacacaaaacagagcggataaatatttaatgcccttaggagtgagttgggtcggactgatgttgtagtaattggctatcgccttgaaatatagatgcaatggcagcattgcaccctatttggtgtgaggaactgaccacgtgcagtaaccttctctagggtctgttgctagctacccaggagagggaaggaagcattcgacctgccccaggagaccatcctcaaagagtttggataatctcttgaaagtcaaaatggatggtggagaaacccatcgagctccccttggacccctcctgtttatgggatgagcctcggtatactcctcctctacatagtcttgctagcttccaagacatcaccggtctcagagacaggttcccccttttcattgaagcctccaaagggcagcacccgggctaccccctcttcctctttgcccccagcctcaggaggagtagcaggacggatcttgccctggacaaggcagccaaccgagcaatatgggggtcagaggatgaaggctttctaacaatctacttggtctgcgccatcatttcacgactaagcagagttttgtaagaggtgtgcctccaacaatcataaaaaattcatcaatagagtttcctttggcagttgggattggacggccatcgggcagagtgtcgaccatgcttggatggaccctgtatgtccaattcgtaggaagataatgcctccaatctttcttcagttcccagatgaaacgactgtatccttcaccacgtatttggttgggatacgagtgatgttgcacctcgagctccggggaaggtgtatgcttgttgctcacttcccagtcttcaaaactagaattcaaaagatcatcaccagacgaagatgaattagcacgaagatgagggcgatctttgtacaaaatttgaagcaagtcctggtcaatatgatgcttgcctccctagaaatcaccaggcttcactacaaaaggtgggagacaagagaataagagttggttgggtaacaaatgaaaaatagattttatatgccaaccaggcctaatcaagaatcaaaagaaaagatttcacccagagttggaatttccaatcccagtagttcaaaacttcagttggaatctggtgtttttcagaaccttatgaaccaatgggaatgaacgatttaaggtcaaaattgaatcgcaatcagataattagacgttatagttaaacgttggttaaacttccaaaccctaaaactagttaatctacaattagccaagaacaattcaagaataggcaaaatctatagcaaagaattaaaaaaataatgcatacatgccattgcaattatctaaaaaaaagggatgaatgacttactcactgattcgaatctttcttgacttacttggaatgttatcgtcaaaggttttccagcgaattctttgaaaaatatgagggaaagcttagatgaaaacttttgctctggttctttaagagtgaaaatggctaaaaggattaccaaaagctttgatctccttttataagcaatcagaaaaggaaaaatcatgtttgaaaatttaaatatttgtgtttccccccaaaagtgaactttagtactcattacaagaagtaaaatcatcacgcatgcagtcacccaaccatcaatccgtgatttgaggaacaactttcaagaggtattaaatgcttagacactgaagagaccgtcaatcgaagtcatgtagattagtaccaaccatcaaagacacgcatcacccatccggataagactcctgaccgagtgaagtccacatgcgactagacggtcccgcggagtctggggggaaatgttatcctattttttgcacggtgacgtgacaatgagctggatgacacgtgtcttacgttttcctacttgggcagaaggaagtactcctagcagcccacaaaggttgatataaatgtctgtcgtcagcatatggcaggatgtccgagcagagtaatcaagggacatttgacccaagaacaatatcgtgatcacatgcactgggcaggatatgtgagttggcaatttcagagataagcctcgtcgcttccaagacacaaagataatccttacattcgtgggattaggtcagagaataaaggcaatgcaccttggtttcccattctttgcattgtaattatgaaattaatgcagttttttattttatttattataaattaagtgaaaccactcttcatgtaataagctcctataaatagtggcataattttactattgagggggacgaaaatttagttcagaagaacactcaagagagaaaagttatctaagagagaattactcagagatcaattgtaagagttttagagattcttgttctcaagtcaatacaactgaaaggggagggggctattaccattctcacggggccgaacctctagaaaatgtggtattctttttatcttattctttttgttttttattatttattttatctaatcgctttatcttgactcactgtcgttggctacaagcaaagtcatcaattgggattaaacctttttggtttttcaactgttggatgcaacacaagagcttcaaagaaatggttttggagagctggaatctaaacatcaacaagaaaaatctaacatgtatcatatgtaaactttttaggcttaaacatgtcctaaagaggttttctagagttgaagtggggatactccaacctgttttcataaagccaaggaggagttcaatttagcccaagataatctttccaatgatcctgctaacaaggtgttgcagcgagttgaaaaggaaaaacattctgagtttgcaagtgcccaacaaaggtattctagttttattcagcaattacgtcgcttcaatttgggtatgaaaacccccagtattttcatgccttcttaaaaaacaaaattttcacttgtaaaagaaaataaaaaagtaacagcaatcgatcaaaaatttcacttttttttttatctatggggactagtatggtaggaattgagtattttactatggatagatataacaatttctaatcattgatctaatcaaattgttcaaattaaactttgaaaactataacctaattaatattttttattgataattaattttaaatcctatttattatgttaaagcaataaaatttctaaaattaactccaaacctaatttttattttatttacttatttagtttatgactaactaaacttttatttttctatttaatttcaaatgtataagataataattttttatttaatttttttttcaaaaataataattatatctaaaaaactacaatatttatcaacttatgtttatctatataattttat

SEQ ID NO: 38396 - DNA, 1513 bp, Cannabis sativa
taatttttaaaaaactatcactaaacaggcgacatatctaaaaataataaatactggtacacaattaaaaacttattaaagccaagtgtgcatataaatatatatagtatatatttatatacgtaataacgtttcgatcatttgaatacttgaaatcaaccaatttaatttgccccccagcaaatacgtacagctattgtagtactaattaacaaaagcaatgaatctaatgatgccttataacttatatacatatttatagcttcatgactttacatgattctgatcaatatatatataagagaccacaataaaattaagtcggccaaagcttattattctttacaaaaacaaatgattgaagatgttaaaacatttcctcttcgttgcataccttactgttcttctagcctcaacatttcttgttcaagctcaaactcaatcaggtacaaaattaatgttatgtgcagatatatgcaagccttaaaaatatgctatcagaactgcaaaatatcaatacattctttctttcctttacattatataataatctaaatttttctatttgtatgaattattgtcaggcttcatcagcatagattgtggaataccaaagaactcgacttacacagacaaaacaactggcttaacatatgtatcagagtctgattttattgaaaccaacttaggtgaaaccagttccatatcactcgaatacctttcagatactcttgagcagcaattttcaactttaagaagtttcccacaaggagacaaaaattgttacaccctaaagccattaaatgggaaaggaaacaaatttctagtaaggggaaggttcttgtacggaaattacgatggaaaaatgacagtaccacggtttgatttatacattggagccaacaaatggggaactgtgaaattggataatgcatccatagctgcaacaaaggagatcatacatattccaatttcagagtatatatttgtatgtctagtaaatactggacatggtacaccttttatttcggctttggagcttaggcctttgaagaataatttgtacactcctactacagccgttctctatcgacggttggatgtagggtcgagaagtaatacgtcagtaaggtattgaagtattggattcagtttaattactattctagtgtctaaaagttctctgtgtggattatattacatttagtagctttgcaaatattgtgtttggtgatatttatactaagtcttaacatcatgatagtgttataatgttatagttaatactgctgtgtttgtctatataagcaaaatatataagcaaaaaaaaaaaaaataataaaaataattatctaaaactaattaaagtagatatttatttttcctctggttttaaggtacaaagacgatgtttacgatcgtatatggcagcctttcaatttcccagaacgcaaagtattaagcacatcattaaaaatagacttaaatacgagaaatatttacgagcctccat

SEQ ID NO: 38397 - DNA, 4385 bp, Cannabis sativa
  modified_base (797)..(806): a, c, t, g, unknown or other
agtttagctgccaaaaattcagtttttgtggttaagtgttacaaacgggaaagttcaggtggtttagccaccaatatccatatgagaaaatctctctttctctttagttgaaacttgactctatagaacactaatgagtaaaaattaatggcaccttgggacattcttgttttggtactttcttcaaagttcttgagtcttcccgtaaacaaaaaaattaaaactaaactatcatcaacaaaacatacctatgcaatactatcatcaacaaaacatacctatgcaattataaaacatcaaagtttgaaccaaccatgaacaatattttatattatccctccattcaaattctaataacaaaaaagaaaatcactactaaccaaccaaattactacaatttgatctatacatatataggacataatcaatgattaaaactcacaaagaagaagctagacttatttacagaacatttagaatttgaatggtagaaaattaaagaaataacttggtaatgcaagcatcctattaatggagcttgttgctccaaatacaatgtaatcaaacaaaaactcttctctaataagttacaacagtagctaaagataacattttatgattgacaaaataacacaaacatacaaatttgatttgtattgccaattctaatttgtaaacttagaaaacaaaaaaataatggtaaaataaacttgtgttcaatctgatttgtaaacttagagtactcattgtgttaatatcaataattgaaaagatgttttgagagagagagagagagnnnnnnnnnnagagagagagagagagaaggggagcagtacctctttcttccctatttgtgtgtagacgaaatttagcaaggactgtttggctttcctatataacttgacaatacaccacaaccttaggaatcgtcctccttggagagtaggaaagcgccttaactcatgttagtgacaaacataaaagtgtgaatattctctactaaaacaaaacaataaaaaagctttcctttcactttttatttttcgctaaaggaataaaactgaaattaaccattcattgaacagaatagcaactaattactttccctaaatttacctgagtttcccccacttatttccccacgagttatttcaacacaaagtatagctggttatcaaaaacgccataaattcagccaccaccaggccatttaaatattgaataaaggtaagaaaaaattgttagacaaaattgaaatcacattctcttgaaattttgacttccaaaaaagcactctcaaagactagtgataacataaggtgggaaaatgcagaacaaagtttcaaaatagtgtacaatgaacctaaaacataatgcttttaattaaggacagctacacctgtgaaatattcttattctacgaataatatgaatgaaaaatgaacaactcacccctgcatcaacaacaataggcctaccaagatgatccatctcatattcaagttcttcaatgcttttgttaataaaaaatgtgatgctaagtatcctagctctcattacagactccaaatactaaaaacaaacattacatagtcagcaagaaaacttgtataatggaacaaaaattcagaacgacaacaaaaataatcattaaaagaaaaaaaataataaaaaaaatctaaacctttgagagaagctttgtaagatattttgaacttattttactagcccaatgctcatagtgaggactagttgcaaagtactctcgctccttacgccttgcgatatataatcatgtctacatttttattaaagtcagcttgtgaatgattaacaattcaaaccgaaagatgttgcaacctataagatcttccttcaaaaaccttacttgcagaataaaaataaagtgagacgaacacagataatgttttaattagaattactacttcaaccgttagcacttcctgaatggacgtgggaagacattacaatggactttgtggtcggattgcccagaacaacaggaatgtacgactcagtatgggtcatagtggatccttttacaaattcagcacatttcctgcttgtgaaaataatgtatacagtggatcagtatgttgagttatatgtgaagtaaatagttcatcttcatggggtcctaagtctatcgttttagatagagaccctaaattttacatcgaagttttggatgagtctatagaaagccatgggtactaacctaaagtttagtacggcatatcatcctcaaacggacgggcagtctgtacaacccatttaaatactggaagatttcttacgagctcatgtcatggactttggaggttcgaggaataaagtatttgctctaattgagttcttctacaacaatagttaacaaagtaccataggaatggctccctatgagatgctttatggcagaaaatgtcgtttcccaatctattgggacgaaactggagaacagaaatatttgggccgtgaattaatccagaggaaaaatgaggcaatagacaggatcaaggctcgaatgcttgcttcacaaagcaggcagaaaagttatgcagatcccaagcgtcgagacattgcatttcaggaaagaggacatattttcttacggatgtcaccaatgaaggatattagatgttttggaaagaaaggcaaactaggtcctaggttcataggacctttcgaagtacttaagaaaatcggacaggtggaataacggttagctttgcctccaacattatcagttgtgcataaagtattccatgtctcgatattaagaaagtatgtgtctgatccagtacatatcctaagctatgaagccctagcattataaccggatctgtcttatgatgagaagccagtgtcaatcttggataaaaaggaaaaagttcttcgaaacaaaaccatagtgttggttaaagcgctctagagaaatagtaaagtggaagaggccacttgggaattggagtcggtcatgaggactcaatgtttagagttattcaagttagatttcaaggacaaaatccttttaacggggggataattgtaaagaccgctaaatttcattaccataaataattaaataattagggtttaattatgaaattaattcattagtcattatttatgcatttgtggagattcatttgaatctaaaatatgctaattatattatgcatgaaatttcttgttttcagtatttgtgttcggtagcagtggaacacgaagatggaccattagagagtcacgtcttcatatggtttagaattttattagtagcggggcaacacggttaaatattggaagtgttgggaaattatcgaggttgggtaatgactaaactacccttggttatcatttaacctttgaagtttgactaggggcaaaatggtcattttactaggaaatccttttcatcactttgtggatttatacttatttaggttctgatcatttaagtatgtattattaattaagttatattggtttttaaaagaaagagttagaaaagcctagaacactctctttccaactctctctctctctttcgaattatcaagaaccaacaagaagggaagggtttctgctgcaattcaaatgattccaacaaggtttaggtgttctaatctaaggtataactctctagccttcttccctttgattttccttagctcaagatacattttggttcatgattttgtgaattgaaattctgtggttgtgtaatcagtttaattttgtgttttggagttaggataggattattggagtggttttaagttatgttagtagagtaaggtgttgtttgagaaaaattgaggttagagaactcaacttcgttctttaatggtgttttgaatttctgggtgaattgttgagggttattgcttgttttgggtttattatggtacgtattctgaaagttattatgaagtttggggttcatttgtgatgttgggagcattttttgggttttcctgcactaaaccggtcgaccggttggtccctaggaaaccccaccgaaccgaaatttcggttggggaatcggtctaccggttggggcagttttgcaaatcctagtttttcctatttttgcaatatttagggtatggtcatgttatccatctataggaaaatttctaattttgattctaagtccccgaaaggtattttagcgtgtctctcatcagaattatgaatattatgatatagggcgctgtaaagcgtcgagatgtcatttcactcaggctgaccgacacgtttgaactcagaaacaaggtaagattagcatagaacatattatatgtgcatgctatgttcatgattgtatatgttttgggtggtatcatagcgacacaacc

SEQ ID NO: 38398 - DNA, 2744 bp, Cannabis sativa
  modified_base (2694)..(2694): a, c, t, g, unknown or other
gcgggcgtgcggggcgcgtgagagtgcggggaacgcagggcgtgggcgagtgagtgcgggcgggggcatgcaggcacagtgtgggtctgcgagcacgacacgagcgagcataagcagtgtgtggggcgcggcgcgtgcgagggacgtacgggcgctgatgcaagcacggagcgcgagggcgctggtggggcacacgggcgtgggtgctttcaaaggataatttgatgtgactaaagaggattcaaggataaaagaggcgggggtcgtcctttgtcctttcttatctgtatggagaatcttgagctattcacctttccatttcctatttataggaatactttacttcttaaatttttgtggttaacacttgctccccaatttaaaagattacttttaagtgatctctttttgactgtaagtgagttgccttcttcattttcacggtgtacctcatctgacattatgtctataacaacgcaccgcaacattgatgagactcttcaataggttaggtgggcacatgtgattttccatgggtacgcgtgtttgatcttaatcgtcgatcctattttaattctacggcgatgaatcactcccttctcttataaatagccttctcttctttcataacttgacttcaccttcatccttttgtatttgcttccactttctagtttttacctcctttaagtttcacttatgcttttagacttccgacacttgctctccttgtgaatttagatgcaacgggcttaccttggcttatgcttatcccgacaggtaccttctctacccatacaccttattttctctcttatatttgcgtttctactatgcttgcaggtactcatttatctcataatagtctacgctcgagtcttgccagttgttacttcttcactggagcattttttcctttttcacctacttatggaaaaccgtagatcaccttacgtcctcgaaggggttccctatgttgaacttttgtccgactcagacgaggaggttcctaatccttgggtacgatactaccagtcattgtcggagcgtctaaaatgcttggaagcaatttgtgaatcccaagaacgtctatccagactcaagggtcgagactgagtttttggagggtcaagggcatgcccacatggatgcccatatttcccacctcaagcagctttacgctgatatcgcggggaagcttgctcacttagagcgcatattccctctcgagccatctacccccagttgtttacccatgcctttggctgtggagttgcccatttatcggccgaaggggggaggtagctcttctcacgatccttcgacactagtcaccactcagaccctcctgggagtggagctttcactggacctaaattgagtaggaaagctcccgcccgttggatgaaaacatgaagtgcattgtgtcccgttctaactttccttgcacttttgcatatatgggcaaactacgacactcgagcaagtccagtgcgcctcttccaacttgtgacccttcactcctgtacgggatggccgatgtcaagagtatcataacgcaatctaatattaggaggatagtcaatgagtatgtcgtggagcggggtttcaaacccctatcgaatgatcatgccaacttgccacccaaggacatggtggctttcagtgagtctattcttaaggcggacgtggcctggccactcaaccctttcttcgtagaggttttggactaaaatataaccgcatgcgaagcgcgatttgtttcttagtttataataattaaagaccattaaaaatatatttttttaaaatgaattaaatattttaatggttaatttttttacgcaattaaaaaattatgaacttttatttattcatttgctgcagtaaaaaaatttaattctttatatatatatttaaattaaatatttgtatatgactttaaattaaattttttatactttaattttatttatatgaaaatattaattattaataattttatctcaaaaaagttgttaataatttacattataactttaaaaaatatatattacgtggaagatacattataaaataaataaatagtacaaaataattataagatgactctcatttgatttgtatttttctttatatatagagagaaaaagtaatttattttgtttcatttaaaataacttagtttgaagatttatttgagctaatagaaattattatagggaaaaattaataaaataaaaaattaagataaagaaattctttaaaaaaaatataatttataataaattgtatattattatatattagatgaagaatattaaaaaacttgcagactaagacattaaaagtaaaaaaaaaaacttataaggtaagacattgatcaaccgcccataataaaagaaaatactctataagacaaatcaatatgacataataaaaataatatttgtagcctatatggataatatctacataaattataaacaatgtgttacatttagttctaatgtatttgaggaagaaattttgtgcatggttttgtttgtgtagttctttttcaaacaaaattgaaaatttttacaaaattttaaaaattgaatgcaaaaaatctaagatgccacctaaagatattttgtgctttcttttataatatatataggctaattaggattttttttcccccgaactttnacatgtaccaaatcatgccccctgcacttttaagatcattgaaaatgcgc

SEQ ID NO: 38399 - DNA, 3127 bp, Cannabis sativa
ttttaaaaaaataataaaattaataagctacaaacaaatacatattaaacaacgttgacttttaaaaattatatagatgaatggttaaaaaaatgtatatatagtatagggacaaaaatatagtcaccactataaaattattctatacatatataaaaatttaactttttttcttttcaaattacgatttgagttgctcctagttcttgtagtttttatgtagattactatataaattttagttgatatttaagttgctctattggttgctatgtggatgcccataaaaatgaaaaagaaactttgaattaaagtgtaaaaatgaaaaaaaaaatctaaaaaatatattaatgcttttaaaagggaaaaacaaataaattaatgtatatatatgaatatttttatatatattatttattaaattaaaatatgtgaaatttgatattgttgtactaatacagtgtaatattattaatgcgctttaacatttaatattggctaattaggatttttgtccatcaaattttgatatttaccaaatcttgctttctaaattgttcagattgttaaaaaatggacaatttttattaatatacctaaattgtaacaaatttatggatatattgtgaagcatttaattgtaataaatattgtttctgcccctactgaaaatgaaaagtaatatatatacctaacttgttcctgaagcattttagaaaaccactgtcttctccggttccggaaaccagtgccttttcaatagtaatagctcgctttttttttttttttagaaaagtatgtatccattaaaatcagaagagcaaaatagtccaggatacaaattacaattgtaaagaataactcatccacaaagcttcctgatctaggcctaaagctttcttagctaagcaatgggaaacttcatttgcccctcttgggatgtagctaataagagcttagggaaataagatagcaagctgttaatttcagtaacaaagttgttgagatgcagattgtgagtatcattattacaaatataatccactaaaaccttacaatccgaaacaatactatccggataaagtgaatgattatgacaccaagaaagagcaaaatataaggcatgtgcttccattaacaaaggtgggtgagttcctcgccaaggcattgccaaatttaagagtacctcccctttgtttgtttgaatagtcataccgaaaccattttgtttagttgtgcatcttgagcggcatctactgaaagctgcaggttgtaactaggggcaggtggtgcgcttcctttggacagcaaagaaacatcttgaggctgtctaatagaggaagctttttatggcagctttggtattggtccatgtagtttgttaccctgtgcagcacctgagcaggaggtggagataaaccagcatgtagccaactattcctgcagttccaaatcttccacaacaaacacacaaagtaatgataatttccagcagtaaaagtggtggcagcaaggtgtaataaacccaaacaagttagagaaaaatttttagcaataaaatcgtgaaaactagttcattcccatacctcttggacagcggggcatctgaaaagagcgtgctctaaggtctcatcatgataataacatcaacaacaatgtggagaaggaaaagtttttcatttaaagaggttgtgactggtaggaaggatatcatgataagcacaccaaagaaagtgtttcagtttgggaggtaaaggaagtgtccacatctgtttccaccatgtttgagaggttttgttatccgaagatgttgggtcattttggtggatctgactatgggcttgatggtaacctgagttgacggtataggtgccatgaggtgtaagggaccaataatatgcgttaggtgtggtgatgttggtaagagggagggtcaggatggcttaataaacatcctcaggaaaggtggcttggagatgggcaaggttccattccttggtaggtgttaaaagatctgacactatcatatttgcatctgaatggtgtctaaggtaatgaagtttaccatatcctggaatccaggcatcattgaagatggagattgtggtaccatcaccaattgatcttcgaagacctgactggagaagttctttgccccaaagatactagtccaaacaagagaaggtctatggccctttccagaatcaaggaagctagtgtgtggaaagtaacgggatttgagtaaggtggcaacaagtgatcgaggagactgaagaagccgccaagcttgtttggccaacatcgcctgattgaaagctttcattgaacgaaatccaagacctccatggaattttgaaaagcaaaggaaagaccaggttttctagtgaattttatggttttgctccgttcctccccaccaaaaatgagcgatcatggattcaagcttagaatgaaaggaggccgggagtctgaagcaagccatagcataggaggggatggcttcgacaacagattttaaaaggacttctttacccccctttagaaaaaagcttggaattccatttatttagatgagaccaaacctgatctttaatgtaattgaaggcatccttgtttgttcttccaaatgtttgaggaagccccaagtatttgtcaaaggtatctctaacaggtatgccaaggattgtagcgacgcattttttgatctcagtagtggtattcggcgaaaagaacaaggccgatttggtaaaatttaccaattggccagaggctaggctatgatcatttagaatttgtttgatgattgtcgcagcatcgaggaagcggagctaaaaagaaggctatcatcagcaaagaagaggtgagaaatagtcggggtttgcctggtaattttaattccaagtgaatgtctccggggttggggctgttgagttttgaggtgaatgagagataatagaccttcagagcataaaagaaataagtacggggatagcggatccccttggcgaattcctcgggaaggcttaacatccccaagaacctgttggttaatggagaaagagaaggttgcagtagagacacaagccatgacaaggttaatgaagcgctgaggaaaagaaaatttctc

SEQ ID NO: 38400 - DNA, 3442 bp, Cannabis sativa
cccaaacacttataggattcttgcctgtctaaagtttatctaccacatcttgaaatgggagtgtccaacacccctagagattctttattttcttcaaagcctgtcctgtgaggaagcttagagtaggaggcttttactatttggggactcataccaatgatcgcaagatcatagtaaggcttcctaacaaataggagtttaaggaagactttttttggataaccgggttccacctaatcaacaccaccaaatttagaattttacgtaaatattaatcattcccaaaatcttagttttgagctaagtcttttttatgatttcatacttatactaaatttgatctttctttcacatttttagctgttctaaggagaccaatccctacacctaaaatccaaaggagacacaagatcctaataaaccttccatatggttttcgagctactggctttctattacacgacaataatttaaagtcaggcgctcttctcggcaaggaccaatgtacaaatgactacaagacccccaagttccctacttggcaacaagttccagtgcctgacgatgaagagtgtagcaactatgtcacttgtatccactatgttaaaaatgtaaccacttaagaaaccaccaaggttaaagatcgggctcctcgaggtaataattcttgcatctacagatggtctcctacagtccttagggtcaagcatacatctttagttcaatttaaagatagccaatataactttgtcgtctagaactgcatcgatttaattgcccatagcttcgatagttggtatcagtgcgatttgaataaataattgcttgcataacatcaaatatactataaacgagataacatagtgtgtcttgataaatagtatgcaagctaaagtgtgaataaaggatcgattgtttgcacgagaaatcaagaaatatttaaacaagttctaagtactgtgcaaagtatttaaagtttgctcttaaattattattaattacttgcacgcaagcgatcaaaaagtgttcagaaacattcaattgtacaagaacatttatgttcgtcgtttaccctaagtctaaatttgagataagtattttgtcaaaattgtgtaaataaagcttactcatgagcaaaaaaatataacattcaaaacattaataaccctgttgaattatctttttaaaaagactttaccatcctgtatgatctttgcaaaagtcctcgtgaatttctctaataatctctttatcttctgtagggagtacacatcccaataagggcatggaatatcctcttctacaaagttttccatcaactagtgtgtatcgtgggattacatataagtgtttgtgtgcctcagttttttctattggaagctctccattttgcaaatatttgatgataggggtcatccacgtgaagctcatatctatcattttcacatcttacttttcagtctcgtagatacgtggctcgcttaatacctccactgaaactagattcaatttgtctaagtcaaattttgatgccagttttgctaaggcattagcattagagtttcattctcttaggacttgttaaattttaaagtaatcaaacttttccatgctcttccaaatttctttagatacttggccatctttgtgccttttgctgggtattcccccaaaacttgatttacgacctactgtgaatcactgaaacaatgaatagacttgtctcttaaggtttttgtaattcataacccaactaacaaagcttcatattctgcctcgttgttcgaagcattaaattggaatcttagtgcatagtgaaactttaaatttttaagcgataccataattactcttgccccgagccattctcatttgaacccaattaacgaacagttttcacacatcattattatttcttgttttggagtcttctcctaagtttattccttccaccaagaagttagctaaggcctaaactttgatgaagacccttgtatcacaggttatttcaaatcgtcccaacttaatcaacaattttaccaaccttcctgatgtagtaagttttgatagcacttgtttcaatggctggtctgtgagaaatttgatgggaagaacctgaaaataaggtcataattttctagaggcatgtaccagactaagtgcaagtttttgagtggagggtatctcggttctaccccaagtaaccttttgcttatataataatctagttgctagtttttaccctcttcttgcaccaatgcagcactaatagcattttgtaagatggctaactaaatgtatgacgtctctctattgattggtttggccatcactagtggtgtggaaagatgcttctttatttcttgaaaagcctgcttacactcttcatttcatttgaatttgttattgcctcaaaaaatgttgaaaaatgggaggcattatcagttgattttgaaataaatctactcagtgctgccattcttcaaatcaaggactgaacctcttttggtttacttggcaagggcattttgagcagtgcctttattttctcgtggttagattcaatttcttttccatttataataaaacccaggaatttccctgaggataccccaaatgaacattttttttgggtttagtttcttattatattttcttagtatggcgaagcattctacgaggtcttctggatggtcctcacttttaacaaacttcaccaacatgtcgtccacataaatttccacattctaacctatctggttttcaaacatgtctttcacaagtcattagtatgtcgctccaacattttttagtctaaatggcatgaccttgtaacattaaagccctatgttagtgacaaagcttgtatgttccgtatatagaatgtgcattttaatctggttctatctagagtatgcatccataaaagtcatcagctcgtgccctgctatcgtatctaccaattggtcaatttgtggtaatggaaagtagtctttaagaaaagccctatttaagtcagagaagtctatgcaagttctccatgtcccatttggtttgggaacaagaacaatattagatatccacgagggataaaatgcttctcttatgaagttattggttgacagtttatcaacctctccctttaaagcatttgtctcttgggatctaatggtcatcgtttctgacgctttgaggggtaagaaggatcaatgttgatgtgatgtcatatcatattcaggtcaatcctgaccatatctgaatgtctccaagcaaactgatcttggtttgctttcaaaaatgcgattaattgctattttagttcttccccaaactttttctaatgttgacacacttggttgggtcgtttgggtctaaattcacctcttctaattctttaattagcttgagttggttgtaatcttaatggatcctaggatccaag

SEQ ID NO: 38401 - DNA, 3669 bp, Cannabis sativa
  modified_base (36)..(45): a, c, t, g, unknown or other
ttaacatgagatacacaaacagaggagagataggannnnnnnnnnttaatatccaaaactaaatcaccaaaatatgaaatagcagcagatctactgttaattgagttaactaaaaccagggaatcagattcaaagtgattgatagacaaattgtgaagagtagcccaatctaatcccgttagtaattattttgcttccatttcttgcggattgtatctacctgtgagaggctttgagcaagctgcaacaacttggcgagaagaatttcgaatgataatgccaacaccaatcttgttacgggaaacatcacaagctgcatcaacattcatctcaaaatcgtgcaaaggtgggtgttgccatttaggatttgcagccgcacctgtggaagccttgattgagttatgtggaggagatgaatgctgctgataattgcagaaataagctgctgattttgcccagatctgtgatggagaaaggactggtttgccatgtatgaagttgttcccatcgttccataaaaaccacatagtacatagcatttgttccatttcagaagtggttttaagggtagatagcaaaactagacagtcattgaatttcatttttgaaaccatatcgtaatcaaaagaaatgcctgcggattgccaaacttttttggcatgtttgcagagaaacatggcatgttctacaaactcataggcattcgagcatagactacatgctgcagaatctatgatttttcgattgcacaaagaagcagcagtaggaatcgcctgatgaaaagccttccaagcaaatattttaactttggatggaagtttcaagttccaaaagtatttccaccatgtgtgctggttagtggaaggagtagaaagctcagagtcttcaagatcagtagcaaagtgatatcttgtttgaacactgtactcacttgtaccagtgaaatgccatatccaacggcctgtaacatttgatgtagatagagggattgaaagaatataatcaatgtctacagctgagaaatctcatgtgagtagttgaaggttccattctttatcatcagtaatgtaaaaagaaaccaaattctagggatctcctgaatatcgtagaggtgtgaactcagaatgtcgaggaatccatggatctgaaatgcatttgataccaaaaccatcaccaatttttaaccttaagcccttcacaagaagatcgtgaccctaacaaatacctgcctagttaatgatgaacaaccagttttttgagcttgcaaaaagtcattatgtgaaaagtacctgccctttaagacacggccgagaagagaattgggaaattgaatgatcctccaagcttatttagctagtaaagcttggttgaaatgtataaaagatcgaaaccccattcctccgtccattttggttttgcaaagaagtttctattttctccagtgagtcttttcttatctttgtctgaaccccaccaaaagttagccatcattttctctagttggtgactgaaagtagagggcaacttaaaacaactcataacataagtaaggatcgataggacaaccacttttaaaagaacttctttcccaccaatagaaaaaaagtttatcattctaagagttcataaatttccagatgcgttcttcaatgtcactaaacagttgtttcttttctctttcagagtaacctggcaatcctaagtatttttcatggcactcactaataggcattccaagaatattctgaaaagagctttggacagtggcgggtgtattgggtgaaaaagacataaccgatttgtctaagttgagttcttgtccagaagcacgatgatagatgtctaaggcacgtttaataaccccacaagatcgatcatcagcttgacaaaagaggaggctatcatccgcaaagaacaaatgagatatcattggggctcttctagagacaacatatccttttagacggccaatattttcctcatattgtaataagcgtgataaaccttctgaacaaatgagaaagagatatggggaaagtggatcaccttggcgaagaccacgctgaggagtaatggaacctaccaccgaaccattgatattgaaagaaaatgaggttgtgtgcagacatctcatgataagggaaatccatcgaatattgaaacccatttacccattaccgcaaccaaaaaagaccattcgacacggtcaaaggctctgctcatgtctaacttgatagtagcatagcccttagaacccttcttgcgatgtttgagtgaatgaatcatttcaaaagcaattagaacattatctgtgatcaaacgattttgaagaaaagcactctgcgttttggagaggacatgggggagaacatccttaaatctgaaaacaatcattttagagatgagcttgtatacaacattgcagagactaatagggcgaaagtccttcatagagttcggctttttgacttttgggataaaagtgagaagagttttgttgaagacagtaggatctccattttcattaagaagatgtagtaccaccgaagagacaaggtccccaacaatatgccaatgatgatggtaaaacataaccgacataccatctaaccccggacttttatcagaagccatagatttcaaagcaaaaaagacatcctccttagtaaagtcacgaagatgaaactcattgtgatcatcattgattgtagtaggaatggtagacagtacatgagagagtgcccaatgatcttcctcttgtgcagtgaaaagttcttgaaaatagtgagaaatgatgttagaaataccatttcgatcagtaacaatattgccattagtatccttcaatgatttaattttattagtggagttccagcacttgctttggcatagaaaaatttggtgttacggtcacccgactgtagccaatcaatacgagacctttgctgccagtattgttcttcttttgctagaagatcatcaagaatcgattcggcagtgtgtagattgtgagaatgagacaaagctgtggtagttgatgagttgagacgattcacacatgattgagcttgtgaaatatcattttttaacttcccaaactttcgggagtgccaactctgcaagtgatctgcaacattctgcagattggagtgaaggttggttgtaatgtcaccattatgatgtagcagtcagttattagagataatatcaacacactcagaatatgataaccacattttttcaaatcggaaacgagatcttcgaggttgaataaagtcggctgaggtagagaaaagaatattgaccaatagtgcacggtgatcagaaccaaaatattcaagatgagtaagcttagggagaaatagactatcagaccatttcttgtttataaggcaccaatccaacctttcctttcaagctgaaggatttttcctattctttgcccaagtaaattcatcaccatcaaaaggaaaatcattcaaaaaacatctatccaaagtagttctaaaagcagccatttggttatcatgtcttaaagggcctccattcttatgagtgtgggaaaaaaatttcatttaaatggccaattagtaaccatgggtccaagggagagacatcatcaagtctattgataagttcccaagtaaacttttgttggaaattatttta

SEQ ID NO: 38402 - DNA, 2873 bp, Cannabis sativa
tcgggtcaaggctctgataccactttgtaacgctcccacttcaagcctctattggatgcttacatccacgaaatgatgactcgtatacatgagtacgccactctagctgcttcatggactaatgcctggtcctacagatcaacacgagtatttcaagcgtactttgtcctcactcacatgtttcctagaaatgcttcccatgagtcacccatcttgaaattactctaggtcaagcacgcttaacatggagttcttttgtgatggactaccgaaaaacaagatgcaccttgttgatataggtagtactaatcaatcaatttaagctctcttcaactatgtagtcccatacctacacagtctcagaatcatcatacttgacctttcccaggcgatgtgagattgctctgcctacccggtatttccccttacaaatcacaggactattaactgtcacaaggcaaccctaggtgagaacttggatctgccttgtgataatgtgcaagcataagcctgacatccaaaggctttaaggtgttcataagctggtggttttgaatgaatttttccaaaaggtgttttgaacttcaaattggggattcgtgttcaattaatgagataagtggcagtagcaatgcactcatcccaataaaccaaaggtatgtaagattgaaacaataaggctctagcaacatttaagagaagttaatattttctttcaacaacagagttttgttagggtctttggacacatgaatgatagtgaaccacacctaaagaaacaaaaagttctttaaaatctaattctttagcattatcagatcttacccctttgattttggcaccaaattgagtattgatcatgttaaaaatattaggtagaactgtttgttttgtacttcaaatttattcttgataaaatgtgtccaagtgtatctactatgatcatcaataatagttataaagtattggcatccatatgtggttaaggtattaaaaggaccccatatatttatatgaataagatcaaatggtgcagctaatatattatgtttggaaatgaacggtagctttttctgcttagcataatgacacactgggcaataaaaatcactaaaagaacttgaatgaaaatgtaaagctttattaatgatttttgatacaagaggaatgtccaagcctgtaatgccagactgtgtcaagtgttattttcgaatcagaaacagcataaaaagcaaaaggaatattattttacactagaattcaaatagtacaatcttactatcctttcacccaccccaatcatttatttcttcaaattgtcctatatttcacaatgtttagaatgaaaatggaaagagtaattaccaaggttagtcaaggtagatacaaaaagtaaattgcaatgaaactttggtacataaaggacattacataataaaagattttgtgaaacattgattgtaccaatgcaaacaactttagcaaaatttccatcaggcaatttgatagagggtgtagagtgatcacagtgtgtgtttttgagtaaagaaatgtcattgcacacatggtgtgtagaaccagtgtcaatgatccatttagaatggggaatgagataactcttaccagaaaaatgagataccataagaggttcagtaggtacactagttgctggttcagaatttctttaagatagcaatgccatgaatctttgacacaacacattagtcaagctagcaaccgagtcttgatcccccatagtattatctccatgatttccttcattgccttctaagctagtagaaaaatttgctgcagaaggttttcccgagttacttgtgtttcgattgtcattcttattaggaaatttaccatgtaatttgtgtccaggaggatacccatgaatcctaaagcactttgccatggtgtggccagtaattccacagtgagtacagaccattttaggacgatgaggctcgacatttctagcaaattatcctaaattcgaacctgctccagattcagatccagatccacttttatcacttttagctggaactatcgaaaggcacctttaactctgttcttgaatgacagaggcatagtctttattgatgttatgcaaaggatcttgcattaagatctgagattgagtgccactgtaggattcatttaagccaactaagaattcaaggactttgtcttcttcttgatatccctgaattgtctttatagctccacaggtatatataggttgtggtcaatactcttggataagatcccaaagagatttgagtctactgaagtagctggtaacacttttagaaccttatgcaagagactgttttgtagaatagcttcaaagacttgaggagcattcttttaattgaatcgttcctcaagattcaaccagatctatgtggcatcatccatgtacatgacactttcaactatttcgttggagattgcatgaaggatccatgaaataacagtgctattgtaacgattccaaagcttgaaatcttcatcatcttcatcacgaggaggaagttttctattgacaaacttaagttttttttcttgaaacaagtgccactgtcatagctcgacgccatgagctataattttcacaacccgtaaggatctttggaactaggctagctccaggatgatcactattaaaaaggtaataaggatttcgagcttcatctgaatatgacctgacattggcatccaaaacagagtatcgattggagttttcagatgagcttcgagtctgagttcctttacgagccatggaagtaaggaatgtaatggattttactcagagacctgctctgataccatattagttgcgggagagagagagagagaga

SEQ ID NO: 38403 - DNA, 1997 bp, Cannabis sativa
cctcgaatcttgaggtttacttcagggtattgcttctaccttggtcccaacattgtatcttggtcctctaagaagcaaactacaatgtctcagtctagtactgaggttgaatatcgaagcttggctctgactgctgctgatttggtttggattgactctttactcactgaagttggaattcaatttaagaggccacctacaatatggtgtgacaatcaaagtactgtactcatgttcgctaatccaatctccattccaggactaaacatattgagttggatttatattttgttcaatagagagtcctcaacaaccaactacttgtgcaacatactcctgcttgtgaccaaattggagacaccttaactaagatattatctagtaccgggtttaagcttttacgtgacaaactcaatttggtttcactatctatgttgagtttgagggtggtgctagtgatgttattagttaaaattgttttgggtagataaagtctgttagcttaattagtttttccctactgtacactctgttaattagttacattaactaacttctcttgtacctataaattgagctaacagctccatactcaataatattctcagattgatatttcatatttgttatgtctctctgaatctaacacctttatcattttgattaactaactttgatagtcttcgatagtggatatttttgttttctctatttttttttaatcttttgcaggtttcaagctttggtttgaaggtgttcgtccatggaagttgagggcttttgaagataaatggtgttctttacaatcatgcaagattcctaaataaattttgaatatatattttttttatcaaatttttttaatatatatatttttttgtattgagtttttaaaataatttaaaatcatacaacttggtaaataatctagtaattaaccattatcaaaagggagtaagagaattcaatccgtgaaccaatccttgaagtagaaaaataaaatccaataaattttatatttattgattccaaagattttgttgccatggtcaattcaattagtcatgactcatgaatcaagattattaattgcattgcaattaacaggagaatagaatatctagtacatagtgattcagtctgaaaattcctagcgacacttaccaaaccaatattatattaataaattaataatgacaaaaaaaagcttaaataggggtccaaagagttggtaaattttgtatgtcagaagaaaatgtgtgaggttatattcagaggttgtagggagcagctgcggcaaacaaatccattgggatccccctaacgagtcaggtaatgttttcctctatgccatttttgtatttattgcttttaattttccaaaagattctctcactttttgtttttgttttgtgcttcaaaatcaaaagcatatatagtcaccatttaaagactaaccacgccttattgtcatccttttcttgggaaacctcattttcaccttttaggttttgttggaatttattgatacttgtttacattatacatgagcattaatcagtgatatgatttaaattatggaaaaataatttaatggataattgcggttatgtagatgtagagtagtatgccaaaagtatcccatatgtacttctttttgtcgttagatctcaatgtaatttttttcagtgtataagttttgtaagtattaaattttgttgagttaaagttaactacaaaaataaaaataatttaaatctaaagttgattaaaaatacttataggttcttcaagagttagatcatctccaattaaaaatgtaaaattgtattatatttaacataaaaataattttgtaatatatttatatcaatttttagtattgtaggctaatattgtacaattataaagcttgatgcttaatgtttttattaaaaatgtaaaaaatgtttttatgattaattttagggattatttttttcatttttatatttcaa

SEQ ID NO: 38404 - DNA, 1967 bp, Cannabis sativa
cgacccgtacggagaacaatcaatgatcctgagccctatgtcacaacaacaaaagtacggttaaccaccattctaggtcgttaattcattcccaaaagttcccctataggtcactagggtactcacaccctaagcatcaagaaaacatgaaaaatggggcaccaaaaatttcaagctatttttttttgtagtttctggcagggaaaacagtagatagtttttccaaaagcagtctgtcattttctacaggatacgtgaaacccgatttttctacttctcaaaactccaacaaaacctaaccaatccattccaaacttcaaagaacaatcatataacacccatacattaatctcaacgtaacaaaataaaaatcaagccttaatatgaaaaatgtcattaaatatatttttttacggcgtatatatatatgttaattctgttgagttctatatatactatttcttagtatttaagtatgttaaggaaaagttatgattttaatttaatgagtgatgaatttgttgagcaactatttatgtgttataaaacaaacgagaagaattttcatcttgaccttaataacgaaacaattaggatattctctcttctaatttttcttatactttcgtcgtattcaccttagtggtgattgtatatagtagttagtttaagacaatgaatgttatattatttttgaagtacatatttaatctaacattaactaatgattaaattatcatttaattattttaaaaatattttgaaataatttttaaatgttttaactattagcatcatttattagaagcgaatcctactgctaataatatttctatttcgagactgagataaatatggcggatgtttagtttgccgctaataattattaatagtgaccaactattagtagcgggctattagcaatgagatctcattgtctttaaccgcgattttttgagttataggcaacgaatttttccgctgctaattatgttaaatgttgtagtgatacatgggtacccccataaggtaagttaaattagtttatcttaataaatatacatattatcttctcaagaaaattaaactctgtgataaaattaaaaaaaaggacttgaggttgttggtgtgtgtggtctctctttttgacaagtgagttaaaaagaggtagtttgtttgtttttcttttttcaaagaaaacatagggtgcatcactgggtggtgccgaaattttaatggaaaactggactcactggttagttttggaaaatgacagccacatggcccacattattattaccataagccattatttcagacatctcaatctcacaattatgaatatgatatagtcaaattaatattagggatctaaagagggggggactggggtggttgccttttgctcttccctcacctgaattgaatgagaaatgctaaagggcaccagtggtgcctagtacactcttatgtgtcagtatcgggtcctacatagtttaatataatagcttttaaggagtattgctagccaatcgcaacgtgacatatggagaaggccggtagcaatgctcgaattgaattgaagattgttactgagcaccagtaatatctagcatttctaaatatgtcattttgcgattggctaacaaacctacttaaaaattattacattaaattatatggactcaatacttagttggaccaataacaatattgatacataggaaggtgctagacactactggtgcattttagtatttctctttaaatatagagaaatgctaaagggcattagtggtgtctagcatcctctgacgtgtcaatatcgttattggtctaactaagtatcgggtcttatgtagtttattgtaataacttttaaggagtattggtagccaatcacaagataatacgcctaaaaaatattaaatactactggtacctgctcttaaatataattacaactc

SEQ ID NO: 38405 - DNA, 4878 bp, Cannabis sativa
ttttagtaaaaatctatgaatcttttgaagcgattgaaatctgcaaaagtggcgaagcttttttgctgtcttgcaacatttaggccttatgacggcccactttagaagatttgccatggcccacttcatgatcagtaatattaatatttagttcatccattacagtaccaaaatttacaaaatattggagaggaagataaattgcggatttgaaagttaacagagacgttaatcttttgttagtttttatttttaaaaaataaaacgttaaaaaaaatgttaaaccaagaattcgattacatagccacattttatgtaaagaagatatatagagagagagggaggggagtgaaggagagagaagcctgaccttcatggagtaagagaagttgttgcagagaagaagaaacaacaaatcaaacaagaatagaagaaaatggccaccaaattacaattaaagagagctccaacgaaaaggcgcgaatgatggaaaggaggaaagtaaaaattaaaataaaataaaatattaatataagatatgaagaatctacaattggtctaaataatttacacaataaaggagctgttctttatattctacaaatttctcaattttacaacagctgttgagactgctcttagatgaagccatcatcatattctcgaaaagtaagccttggtgctactaaaagagaagatacttatgcatgacaagttgtcaaaagcactctgttactaagaaaagtatacattgataattgctcatacttctcagcattcataaaacaaaggattttataattcccacaactcgaaatgctgagaaaaagcaggtaatggaacttttaaatagaaaaacagtaatacatgtactaagatcatggtttcatccatctagtatatctttctaatttgctgccaatgcagaatctcctttccttcaacagttttaaattgaaaagattcttcatttcgtagtcatgtatgctctgtacagcaaataaacaatacaaaaaaaaaaaaaaaaatttaggaaatacactacaggtacaaacaatcttataacaaagtgaacttacaaatgagaagtaaaactacactccccccctccccctctcctctctctcctttctcaacttggtttgaaataaggaaaagaggaactaaaacactactcattagctatcatccaatgtccagcgtcggctgcgccttgctctactgaaaatggtactagaaagactccttcgagacagatttggtgcagcaccagaccgagaggatgaccttctgagcctcccaaaaaatgagaaaaaattgtgaaatgctcgccccactcggcccctctcccttgacatacttccactagactgaaatgcaatcctcattggagcaccagaggtattgaaaccaccatccatttcagtgtaaacgataggaagctcgcgctcagcggctcgcctaccacctgtaaatctcccaacagcaaaaccaccacccggaagcctccatattattaaatccatagtttcttcatctccaaccccatcagcagactctggggagtttctaggacacccatgcacatcagtaggcagttgatggcgacacacagggcaagaattacggagtgaaagccatggaaggatacagtctgtgtggtagatatgcttgcagggcatctctcgagcttctgaattgagttcaaattcctccttacaaacagcacagtgtagttctgtggatatatggtttgccacaatctttataatgggcatggactcaatggcagctttggatgctggaggatgatccattctccccaccccattgatctctaactgtgacaattgatccaaaagacggtcaaatcctgaacccataaaaaattcagaaatgctgggaggtaggggccgaagactcgttccaacaccatcatcgtaatacagctcaaagttacttcgatcagtaccattgctttgttctctgtcgtcgcctccggccccaccaccctcagcagtgccacgaaggacaataacagggttaaaaggcgagcggtcacggctacttctttggctacggcgaagcctttggccatatctacgactctctggattgggggcgtgatcggggtacatagcagccgccagaaaccgattatggttaggagatctagttggggttgggttctgcatttcttcaacgaatccgccaccgcaatggggacaaagtacggtatcttggaccgaaacctgaattcctacgctaatgaattgactgcatctatagcaccaatatgatgttcgtgccaaatccatataccaaaaattccaacccaatcggaaatatgaaacctacataaaaaaataaataaaagttcgttaaattcataaaataagtttttacaaacttttaactactttaaatctttgataccattttctcaaaataaataaataactttgatacctgatgtatattggcaaatcaaaatttataatcaaaccatacaaacaagcacagcacagtttgtgaatttaacaataaaaatacataattctagataaaatcagataacatttcccctatatagtgacctaatcatctatcaacaagccaaacaattaaacaacacacaagaagcttcttctttatatctccacagcatgcaacacaaacaaatttcccaaaatctacttcactaacaaacacaagttttcaactttccattatcacaaaaacacacttgtatcctcaaaacctttaatgaatatttaagatattcaatttcaaactccttgaacatttatataactacattaaataataaataagagagcgtacctcttccaatcaacaagaatgaagcgaattgattaactatgcaatactccttgccacaacctacaaagttaaatttagtacattatgaattgttaaacaaataaaaaattcaataaacttcactttataactcatttcacataagagtcattagtcgtacagcattgctcatttatataattcagtattggctacttaattgtaccaatcaaaataagttagtatggttagtaccaacacctaagtctcaagtccttaaaaaaagagatgtagtctaaattccatctatttgtcttaatgtaaatatacatcaggatattatacataccgtgtcatcaattatatgtaaatgtgggttcaaatatttgataatgctagaaactcaagtcagatatcaatgggaatgtacagtcacaaatgataagaccgcagcccacctaaataattcatatatataaatatatatatatatatatcagatagatagttgagaattgagatggtcgttgaaaaaattggatctaagagagagattcagattatgcacaattgcacatgatacatagactacacatttatgttttcaattttataatgtttatgagataaatgaattacagttaacagacaaatacatttagtaaattgaaatgtatatcatatgctaccaatactattgtatgaaatgacagaacagaaaatgagaagaaacactaatgaaagacatctatgattgtgtattatacaaacaaaatatttgaaagatcaacggaatgattcttagtctatcaaaattacaaagaaaaatcattttaaaatgttaaagcattgccttataattaagtacagttctattgtttgtcactacaattatttattctaaatataaataaagtaagaatctttagaaaccgacattgaccctaatttgaaagtaaaactagcattacacagattaatacataagcttaatcataatcagcacgaaccctaccaagtggagcaacaattactcaaatcgaattttatcaattaatttccctcagataattgtttgtatacctctctgcatatccatgaaaaaacatttataaattaaatctaaaattaaaattactattaatatctttttttataaataatcaaataccagatcggtgaccaagagaaagaaatggtgaattctacatagataaaatatacacagagatttagagagaacgtattcagaatttaagaaatcaaaaacaccttgagcgacggaggtctgagactgagaagacttcgggaggatcgcctgcgacggagaaggtgggattggagggaggctcggatggctgggaggctgaatgaagagaaagagaagagaataatttagggcgagagtccagacaatgttttttcttttcttttcttttttttttttttttttttgtctgaaaattttaagaatttttttaagagaaatttaggggaggagacgagaatctcaatttaattacaaaaataacatctggtattttattattcaaaatacggtggtttgttttgtttggattattttgaaaagctgtaatcaatttcattctcttttatctctacaagtgacaaccaactttttttttcttctttttttgttctttaatctttaaatataaaacgtccagattcattattcttaagagataaaaactttgtcctttcttttatgaatagtttaaagaactcattacatccctaattatttgagctcaatagtatcattttcatatgtgaaaaatatatatttatgtaattttttaatttttttttgttaactcaaaatttttttttgctaacgtggatattaatgtttgacatgtggtaaaaataatgttgtcatagagttgaatagactagagtcatagcagtaacctgggatgggaccctagccctaagcccaagttgattttgggagctacaggatggaagttcagactttaatgacttgaatccaactcactatctttcagtattctgtaccatgaagacatg

SEQ ID NO: 38406 - DNA, 2096 bp, Cannabis sativa
taagtaaagcatattcaacaattgaaggctccttgtttttcgaaaagagaattgatctgtcaataaagaatacttagtgaacttaggtagatcagattcccaatttctttcccaaaagtttgtaaatctgtctcaatacttgtttttgagtcttgccctttattcctccaatcaataaaatgtaaaaagttatcatcttgagctttagtcaagcacaagtttcacatcagatattgaaggaacaatagtgggttaatattaaaagaccaccatactaaaaataaatggaaaaataaattacatttttcatggttttgtaggagaaatttagaaattgacgaagctagctagctagcttacaaaaatatgacatagcttacaaaaacaattacaaaacatcaacagaagtacagaaaaacaaaagatatccaggaaacatctttaagagtgagctgaaacattttgcacaggagctcttgtcaatttacagaaaacatcatgattccaaatattaattattgaataaacagacactggtgattggcagtggcaaacacatcctccaaatgttaatatgatattctcccactttaattcattcatatatagcttactcatcctctcaatctgaatctgcatttattcattcattcatagtaataacatgtttagacattagacatgtcaaattacggttgctttgacaccatttaagatatatgtaatctaataagtcatgagaaaatagatatattttacatactgtataaatattattcttcacaatatatattcaaagtaatcctcaactaaaaataaatagtcaaaaactaatggataagtctatattaataaaaacaaatggtgtgtttttgtaatcctaataaccaaatggtgtgtttgtgtaaaaacaaataatatttatagggagtgtggacaaataatataattaaaaattactcatcaaaaattttgattgcttaacgatttatagggtatacaatttaattaattagtcctattatctatatatatatattttaaaaaaagtaatttgttcttcaattcactacaaaagaaaataataaaattacatagataaatagtttataaaataatatgataaaagagcataataaccgtattaacttgaggaattttagtaattttaaataatgatagaaaaatataaaggatggaattaataacaaaagatagatagatagatagatatgattaaacatgtaccttcaccacatttgatgaatacaagtgacggtacgtgcttgactttgtggaaatcgtctcctccttgctccattctttctttgaatttctcaggcatataagatatgagcatctcattgagtgtaacaatgtttcttactccatctggaactctcctcaattccctgcaatcgcaaatacgcaaatagacaagtgtaggcaatgcactctcctccactttccactctttcaagctatatagatcattaagctcaagagattcaagtcgaggaaaacctcctcttgagcacaccatctcttctcctaaaaagctaattttaccaatgacaaggactcttaattttggtagcttttctaatgttggcattggatcatcctcaagtttgagaaatctcaactctaacttaatgagatttggggagaattggttcacttctggtaatcttactatacgcgagtacactctcagcttataaatgtgaggacaagttagtatcaaaggaacaatatctatcttgattgtataagaattcgtcacttgtaacgaaaattagatgagtgaatgtgagagtttgaggattgtgtaagaatgtctcaaaatttccatccacttcaactcctaatttcttgagactctccaacagtagaagatcactcagtagaagattcttggtaccaatacctaccaatgtttgtaaatttttaaacttaattgacgtcaagaaattaccaaatttcatgccaacatcaaatagagggataaaatatagatgcctcagttgctccaacttgcacattgaacttggtattatgacatcactctgggtccttactctcaaagtctgcag

SEQ ID NO: 38407 - DNA, 3185 bp, Cannabis sativa
gattctgtaaattctgttacttgattttggggttacatgattgctggggtagcaattggaataaacttcattgtttcaattgatgtaacctaactgtgtaatttacacccagagtttgattgatcacttatttgttaaggggtttgacatatatcattcatgatggcccatggttaattttgtgtttattcattattctcatatttaggatttaaaacttgatttctgacaaaagatgctcttcatctgcttaattttaattgaaaattttaatactctataaacttcatcgtttcaattgatgtagactaactgtgtaatttacaccagagtttgattgatcacttatttgttaaggggtttggcatatcattcatgatggtccatggttaattttgtgtttattgatattcattgttcctcatatttaggatttaaaaaacttgatttctgacaaaagatgctcttaatctgcggtggaagtaaacatatatattttaactgaaatttttaatatactatgtgtaggtctgcaaatactttttggatgctgtggaaaagaaacagtatggttggttctggtcttgtccaaatggtggcaaagagtgtcactacaggcatgcccttcctcctggctatgtcttgaaatctcaaatgaaggcacttcttgaggaagaggctgacaaaatgccgatcgaggaagaaattgaaaatcaggtgaaaattagaatatgtttcctcatgagatttcttctggcgatccaaacttcaagtaatatatcttgttttacactctgtcttgtgttttaaattctaaactcttaatctactggttgcatcagcgctccaaattaacagcctgcactcccatgacacctgacttgttcttccaatggaagaagaaaaaggtggacgagagagatgctggcttagctgctctccgagctgatagggcaaagaatgaccgaatgaggttttgtatcacactattaaactataaaatattttttcttggtctatttagctataaaatatacttgatatgatagggatttcatctttttgttcttttcagtggtcgtgagctgtttctttcagatgccagcttgtttgtggatgatgctgaggcatatgaaaaatacaatagagaagagcctaacaatgtcgaagaaagggtaatcctgctttcttccttgactgttaaccggataaaaatctgacattcaacacttaaggcttgcttttggaaacaaaatgttacttaaattgtattttctataagttgtgtttgttttgactatatcattgttagttgaaaagatgattccttgattgttataatgctactaattggatctcgtgtgcctgtaactgctggcatttgcactgctgtccttataagcttcttcatcttacatttggatttatgcataatctgcactcaattatatcgtaatggttgactttacatatggtgtttcttattgtcaggacaacaagaatgccgccacagagggtccaagcacctctaatgatgctgtttccaactctgaagaattccctgatattgacgatgatgacgatgatgagctggacttagatgagttgaatgagcttgaagcaagtctgtctaaaacctctattcaaatctgtgagccaggtattgagacatcttgaatgagagggttttcaattagtgctctgtcattttggctgtagaattaatgagggacaaaggggacctccaagtcccacaatttttaatgaacttcatgggagttataatctgctctggggtattgtgaaattatgggtactactagttcttgctggtgataggattgtggtttacggtttaatgttatcgaagtaccaaattttgatcaaactttcttttactctttatatatatatatatatatatatatatatttaggacattgttacaaattaccccaatcttatgtttcgtatggtactatcatcaatattctcccactccattgtggacaataatttcctccatgataacatcctcttttttatgattcttctttatatactccccccatccttccctcgtctctttactatcatcaatattgcccattgggttgtgattatcaacttctgctacgagtcttatttgtgcttgatggtaattggaaaagcgtgcaattgctcgattcagtttcattcttagaggaacttgatgcgtggtatactatcaaatttaataattattttcttcagtattaccattaaatttatcaatttattatttttttgaggaaaggtattttcagtaatcaacaatgatcaaccatacaagctgaatacacattcaatgagcaatacaattcgcactgtaaatgaacatagggcagaagcaacttaaactttcagtcttcaataagacattttcatagtgttgagcaccgcgtggactactaccaaactccattgccaccacgactcattttatcaagcgagtgcttctgtaatttcaggtgtttttttttttgcaaagtttgtcaggtgttgtttcacgcctccacaatctgcctattgcaatctcgaactacgcactcaaaggcataccaagacttatctaaacaatttgttggatcaccatttagttttgacattgaaattctagtggagtccaaagctcaaacataggaacccatctctatcaaaaatagggttcctaagatgtaaaagtaggcatgtcaaaaaggtcctttcagttaaagtgggtcggagtttcgatttgacatatcacttttgattcgaaatatttggatactgatttgatctcgaatcagattcgctttacctcgcttaatttttttttttttgaatcagatttgatctgatcagttttaatatattaaaaaaattaattcaagacccggacctaggctctcggactcgagacccgagactggactcagacatgggactactcagctcggacttgggacccagaccttaaaccaaatccgagaccaaattcgagttttgggacccagacccgaactcgggaccatatctgaatccgggacccagacctaaacccaagacccggactgaaaatcgaacttggacccgaaccccgacctgggacccgagacttggaccagacccaggacccagcccgtggacctagacccagacccaga

SEQ ID NO: 38408 - DNA, 2328 bp, Cannabis sativa
aatgtaaccattgaatagtcacacccataaatatatatatatatttatataataattagttaaaataaataatcttatacgtacaagttgatcataacgtttacttttcatgggatctatacaaagattttattaaatctatatatatatgtatatatattatatattatgggcatgcaaaaatattattttactttaaatatatccatgtcaaaaggattgtcgttctcacaccatgaattaattaaaagataataataacaatacaaaataaatataaaataacgatcgatgaaatggaaggagttgtcaatttattataaggagctatataatatatattaagattcagattcgatttattttgtctttttaatgttcgatcaaaattattcaatgtatataaatttatagttttcactccaagttgctttaaattatattgtcactttctttttttgttgatagaaatatatatatagaagtggtgaaggttttttttaagcattgtataaaatattttgttatttttaaatatatttatgaatgtaagagcatgtttatatttatatatcttcaaattaagtaattttattaacaaaaaaagaaaaaagaaaaaaggcctgccaaagataaatgtagcccaataaattcttttttttttgttgatacaaagcccaataaattcttagttgaccttaaccatgatgaggagttattatgggctgagcccattattattagggaacattcaaaaaatacctaagattttgatacatttttattattaccaaatataccttttaagtaatgtaatttttatagttttatgaatatgatatggtttaagattttagatactttataattttcttcttacataaggtatgacatcttttatgttaggtagggccgtcaaatttagtgggctattgaaaaaaaatatttttgcacccttaattatttagaaaaaaaatatattattttttaaaatcagtaaaaaaaattatgaaagaggataatttttttttggctcctgagctaggtgggccatatgcacacgtctagctcgcctatgcctagggtcgggccaagatttagtccgacattatgaaaagaataattctaggtctaattgcatgatcaagcttgatttgaggaaatatgacacggtggagtaggactttatttaagaaatgttagatgctctctagtttcccgctaagatcattaagttgattgtggtatgtatttcaactctcagattctctttgatgtttaatgaatcaatgcatgggtactttgatgccaaaaggggtttgagacaagatgattccatgtccctcctactatttgttcttagaatggaatatttatcgaaaatcttaaaaaaagttgagaaaaatagagaatttaaatttcatgatagatgtaaagatttagaactcaatcacttatgttttgccaataatgttctattattttgcaaagaggagtatatttccatctacctcacgcttcaaggtttgaagcttttttctaaaacatcaagtttgcatccaaataaaggaaaatctattgtataatgttgtaagatgaaagatcaagaagtgcaaagagttctggactatttaggcttgtttgtactaaacgcctgttttgagctgattatgcaatataaaatgagtaagaggatcagaatatgaagctctcagaacctctcttggaagagctaccttaatcaatttaattttggtagccattcatacttattggccttgtatcatgatcctacaaaagaagctattattacatgaaatacaattgcattaggcaaaaacatttagactattgcaacaacataagacaattttaaaatgcctagctacttgggtaattcaaactggtgggattacaatgttcagacttctagtattgatgaaggatcaattttaaaattatattgatgttcatactctcacctccaaaattgtatcacataagctaaggctatgagaagttgatgttgaatcaaagtaagtgaattggaggaatgaataagtttgggtcagacttagtattttgaagcacaaatttatgctttggttaatagtgctttacataaggcacaaaagaaaagcttcctaggataaatatagtggacaattgaccacttattcttcaagtgcactgctagcattaggtgctttgaaaaaaaatcaagtcttggctccaatggaagataaagctatgacaaacaagggaatgttaaaggccatcagaagaagcaaaacctcaaagaccaagaaacatgtgtctatgcaattg

SEQ ID NO: 38409 - DNA, 3038 bp, Cannabis sativa
actcgaaaaaaggaagggttctatcacttccatcaattcagttcatacattgagaatgtaaccaagagtaattgcagcctctaccatcaggaatacttctagctataccccttgtcttccattgaggcatattacctttcattaggttggccctttcaagagacctgctctgttgattgacatgaagaggaaagcatatgccatgctcaatgacatcaaagtgtgggtaagatatgggaggactttttttaccactaaaaatctctgcaaagttggtttgataatgacatgttactgagtttttttagattctcgtttgccgatgaatcttggactatgcctcttaaagatgaagaagacagtcaaagtgaaaccttcatttgatctagagcgacgttagaagataggaatttatctaaaggggaggattccattcgaaattatctagactattcaggaagaatatttgtgtttcttgatcgaggtgatgaagatgttaactttggtagtagtgtgccagagagaattagggaatcagcaggtcattgatgctccatttgttgtagtcatagcatattaccttgccttttatatttcttctgttgtactaaccactttccttttcctttatgcaaacaacataagtttccttgttgttatggcaaactgttcaatgagaaagacagtcgtaccgaagggggctaaacctttagttgggcaagttgtgcaagctatccatgcttctttttctgttcctacaaagaagaagtctaggaaaataggcaaagcatttgtgactgaagctacttcccatatcaaggattctagcaaagggaagtcgaaagttattgaacttgacgaggagtcaactgcttctctaatcaaaatttgtccacatgaggctaatactggtaatttgaaccgaaacagctcgaagttgttggatagggtgcgtgcacaaggaacatggctcctttctggtggtaatgctttgatatgatctaagactaagaacattcctttaaggaagttggttacttccaagcctatgtacatcattgccaaaagatgtttcactgatatcatcagggtaaataattttttgttgtcttcttttgagcttccttccttacatttatagtcgtctgacttacttcttttactttcatgcttgtgtcagtgatgcttacaccatggacaatgagcacaagaaagttgtcaaacttgctaagaaactttcagctgaagagaagcttgccattgatgtggagagctaggtggctgacttagagaaagctattagtgacttggagagtaatgtgtctaaccttcaacaatcattgataatgctaaggcttaaaaggataacttgaacaaagatcttgtagctgcatggaaagaaacttctaaagttgaaaactctcattgtcagtagcttgatgagaagacccttagaattgctgagctagaaggtcaagttcaacatcctgatagccaagtgacaaacttagaacagaaagtggttgaagatgttgccttctatgatggcatatgtttcgatgccatctactatgcttgattggccaatggaggagcacattcattccattaggcgaccatccttaagaactaagttccattcttgtgaagcactgtgagcaatgtcttaatgttgaacctcttcagaggatcgatttcaacttgaatggtgatgattaatggtcaaataagctacgataataaggctacaaccctaagcatcccaattttcctccctttgttgagtgtcaccaacaaagaattaagaacaaatagaagccattgttaacttagatacatggcttcgtaggacactattttagtccttttcttttctagcttttagctttagtgtgttagttggtcattctggacgaccttttattgtggataagccttagtaaaaaattatcagatttgctttaattaaattagaaattaatccaattccataaaacctttattccgatgtttgtttttttactttatctgttactacttgacattttaacacttgctcagtattccatgtcttaagaaacttggtcactgggagtaatgtcaatgtttcttaaagtttcttaaccatgaaggtactactcaggtgtacacaattttttgaatgcccgtgtaacatatgactctcgtgtaccataacctatgacctatgtgtccccaagccccaagtgatcaaggatcaaggaagtgccttcattggtcacttgccataaaaaatctcatcggtctttcttaatcgtgaatcttagggagctattacatgtgtgagcactcatccacttatttgaagattcatgggttggcagtattgaactcactaaagaaataaccgaagttattccaagagcaactccacaagctatactcagtgcttgagagtgtcgttaggcctgtgagttgtaattgcttaatattaatgaagtaccaaaaaaattttgttcaacgttttttttcatcaaaaattaaatataattacattttcgtggctaaattgaaaaaataaacattcatgaagaattagctgagttgatccccactatgctaatgccctatttggctagtagtgtaagagccataacatggccatggacctctcaacccgaagatgacttcactgcatcttgtcagtttgagaggtgatcaattcacttgcacgttgtaaagtgaatctcattgtgaagcgagctattataaagataattgttgtattggtagcattgtcttagatgcactatgttccaataccttgatacaggcattcaagttgtaatcatagctttcttaatataataataaaaaggctattctattttataaaaataaataatatataataaaaaaatattatttttagtgtaatttttggtgttttggttaaagtaaaaagagtttttgatactagatctctctatatatatataaaggagaaatatgagtcggtgacgtggcggtctaaaatctctccaaagctatttttcttt

SEQ ID NO: 38410 - DNA, 1998 bp, Cannabis sativa
gtggcagccgttgctatgatgtattggcgtggcccgcggtcgagtggagtggagaggattccgagtattggtgctgccagaactaggccgatggcccaagagattgatgtccattctagtggggagtacttggagctttgtactgttattgttttgtttgtgagtctggtgtacctgcaaatatttttatagaaaataacatagttaaaattgtctcacttaatataattgtgaagatttaataatgataattacgtaaagaaaatttacagggaaatttcatacatgtattccatggctgatcattcgtccaataacattcgtagcacttgcatatatataaatatatatatatatatatatatatatgcatataccctagatatatagtcacatttgaacgatcatgaacacgtcaacttttaattttatttactaaattttgagaaaaatcgtgatgtggaaacataatttactaataatatatcttattcaattctatcatcacaatctcatttctcggtcatgccctcatataatcaacattctttacttgtttctggcattctgatcaaaacatttgtggaggccttttttttgtatgtataaaagattactaattattgttgaataaattaattaatttccgcatagtatatagttattcatgaggactaaagggagtgaaaagtaattataagtaataataatgaaaaaaactcacagtagcatttccttgtaagtacaaatgcttcccttgtcatttaaaacttgcaaattggccttatcattaatattttgcggcatgggggaagcgatgccgctaataatgagtgggaaaacaataggaatgagaacagtatgaatgaagtaggagcaaaggccatagaaacaccacccaaacacctccaacttccctggcttctcttcatgccccgcgtatgcctcatacgcacttctggccctctccatcttcatcccggcatcatgcacgtcattattaataacattaccaatagtagtagtagtaccactacccccatgaaatggtggctggcctctttccaccacagcttgatctcgatgatcatcactacttattgcactattgatctcttggtctgccatactaaattattgtatatataattaataatatggctgaagtgtagcttgttttgatctcaagggagatagataaatcaagtattatacaaagtaagctatagataggatagtcatagagaatattggtagagcaaataatgattaagaggaaagcttggtaactatatggagtgatggtagtgatgggggaaggttgaggaccgcatggcctattaccagctgtgcgaagacaccaaagaagggttcatgacaagcctcatcggtaattccatttattggtgagttatgtatatagaataatgggcttgatgggtatatatgttggcatcattctttttaacttgtgtattgttgttttcttcttttaatttacggctcgtttgtaacgactaattaacgagggttgcttagtcttgtttactggaaaaaaatatatagtttattttgttgctgttctctttgatttttgatttttttacaataaacattcaatcattcactcattgtttatatatttatgtactttattaattgccagaataccatgcatgcacatgaaataccgttgaattttcttgttttgtcaatattatatataattatatatatatttagtttagtttttcttgtaagttatgtatatgcttcgtatgttgaattttgatttagttattgaagtgaataaaacataatagtattttgaaaaaagaaaataaatgaaaattttaccaaaataaagaaaagaaaattaaatgaaaatgcattaaaaataataggttaattagtaatttttcccccgaattttcacatgtactaaatcatgccccctgaacttttttagctataaaaaattccccctaaactattaag

SEQ ID NO: 38411 - DNA, 1664 bp, Cannabis sativa
tatttattttataaaatgattaatggttgagttgtaacaatgaaatctgaagcacatatcatcgatcctctcattaaaagttgtttctcttaaacattgttgctcactccctaattataactcccaaagatacataagctcatatcatagaaaaacagtaaaaaaaaagaactaggaaacccaagaaatatgagaaaaatagagaaatggtctttgacaagtttgattaaattttaatgctttaattaagtaccactgacttaccatgcatgcagaagtcattaaaagtcaagactaatcccagcaaaaagaataagcctgctatgttgcttgaacataataaagtgtatatatatatataggtgattatgttcccataatccacatccattgactattaattctactcttaactataaatattttttctttctagcaatccaaatagatgactatatccaaataagaaaaacgctatacccaaataagaaaaataagaaaattaaatgtggtagtagccaacaaccacatcaaaatattggaactcaacttttcttagaaaactgagactaggctaatccttaggctcaattatcacgtgttgcatccactaaacattagactgatggagtattttcacaaatggataaaaaccattttttatcatataatacctacaaatcaacttggttggtaggtgggtcatgtttacagaaaacacaaaactatatatttgtaaagattaattacatatcctaatatgtaattcccatttcataaaaaaaaaattatttttctaattgcaagctgcaacaattcatgaacttgttacaattctatcctcaccaagagctttcatgtatacccaaagaaaaaaaaaaaatccatgaaacagtaaaacaaagactatacaaaattctcaaagctaaaagagatgtcaaaatgaaagtgattcttctatttaaatgatgaaaggcttaaatacctcaaggactcaagttttttcagcttcaaaagatattgtcttcttaaaaaggagtcttacagaattgaattgaagcaatgtctcattaaaagctttcacttctttctatccatgactcactatacttagtcaaattctttgctcaccaaaagctccacaaaccaccacaaccatttaatgcttcacactttacattactccttttctttacttttaaaatttacccatttctttggttttattattttcttttctaagtttttatgaaaggtgtaaaatgcttctcacaaaagggcatattgcattttctgagaaaagaaactaaaaggttaaaccgatacagacccaaaacatatcaactttcccaaaatgattttaatttcttgattaagaaagtaagaaaaattaaaaatccacatgaaaccaacatagagaacttgattctgcgtttatatatacatatatatacatatgtatcaacttccccaaattgaatcatacactaattcaaatcaaaacacttaataattcttagcacatgaaaaaagactcaccttaggactcatgagaacaagttgcctcctttttcaaaggtccagggaagaagatgaaatcgatctcggaagagggcctaacgaagagaaatctgacagagagacaaaaaatccatgagattcat

SEQ ID NO: 38412 - DNA, 4167 bp, Cannabis sativa
  modified_base (3390)..(3391): a, c, t, g, unknown or other
ttttattttcaatttacaagtaatcttaaataacaataacatacacgatcataaaaaagttaaagtaaaaaattcttttggataccgaaacagataaaagatctaccaaaacagcgatatagacttacccaatattattaatattaatggagtaataattttgattataggctgataatttgagacaacaaacacttcatcagttgagaagaacattaacagtgagacaagcagccagatgttttgtagtgattggagaatactatggtcgtttaagggctcttagttctctttgggcttctagaccaagagacaccaacaataatattaatcagtacgttttaattaatcttaatcttaatctttataatcttatataattaacacttaattatatcacaggagcatggtggttaatgatgatacgacgtcgtgtcaaactacaacagatttacaaatggttcatcatcaacatccacatgatccccatcatcatcatcatttctcttccttttaattattattattattattattaattaattagaattatatatatatatataaattaattaatcctacttagccacaccatgcatggagagatttggagataataattaatctctttcatctatattatctctctatttctttacattggctttgcttggattttcttaaatattagtaggacatatatatataaatatttatatatagtagtttagtttttttttaattatgtcattgttaattaatatatatatctctatgtttatcctttttgtaaatgtaaatcaattatgttcaagatccagagaaattaaattagcatttattatatctatttaattaattaattatctcattcttttgtttattaattaaaaaaaaaataagggatttttttttgagttaattattagttaattagtacacatgttgttattatacatatattttctaatcacgatgaaattaattaattaattaattagctagccaacctcaaataatatatatttatgtgtgaatcgacatatatataattgaatgccttttttatttttattttatatatatataaaaacaaaattagagaaagaaattatatatatagatacaaaatgtgtatataatatataaaaatatatataatagctccaaagagagagaggttgaagtgggtatacaaaaaaaaatatatagtatataattctaatgtatagatacgacaagagaagatatatatacattgtatatattaatatttttatatatataagaattattaattaataattatagtggaatatatataatggagaattaatagagagagagtagggttgttgatctccatttatattcaagttgattggaaaaaataagattattttgtaataatatgcacaaaacgacgatcaaaatagttggtacttaattaagatattatacagaatatattaatttttgtttgacttaattaattaaaattaattaattatataatattatttattattaattatatataattaagcaaggtggacaagaaccgacatgtacaataaaacaaataacatgtctttattattatatatatgctaattaattaataatattttttttatataaatttaagaatataataatttttctttttaactattaaaaaaatataatatttaaaaagataaaaattgggataatatttagtgtgaaaccaataccatagtatatatattttaatttaaagcttttacatgatattggtgagtcaatattcgattttgtattttaaaattgggttttaattctttttctcataagttaaagttatctttaactaattaaaccatttttgttttgtttattattaattaatatataacttatccgatatcaattagaattatttaattattaagtgttacttatattatttacacatttaatttgtgtgacatatatattatatttaatttattaaattaattttcatatatttatattgatcaatatatgtttgtaagttttattttcgtctatatatattattaattaataattaatgaagtatattctaactcatgattataatatagtttggtgaactaataaaagagaagttaattaatacatattttaataataacgtaattaattgtattatatatatgagatcatcatcatcagtctggatcaataaataccctaatatatataaatacatatgtccatagtttactcgtgtttcggtaaatttttttatctgtttcgacttttagaagagttgtttagtttaattttttttcatcataatcgcatatattgtagttatttaggatcatcataactttttcaaacattccaagtactttataatatattcaaaataaaatttatatattttgttacactcacgattatttttcttatatgcgtacataataattaataactgtttaaattttatttttagtactgtaaattatttagaattttttaaaattttataagtagtcttaaatatattataaaataaaattaaactaaatttttatcctaaataccaaaacaaataaaaaagtctatcgaaacactttactagctacaatttttttttttatatatatatagttttgtgtgtatacaattttggtagactcgagtttattataaatatttttatatatttaaacatatatatacataatattttatgtatgatgatcccatttgagtattatataatatatagagagatcatgatatacatacaataatatatacaagccatgcatggacaaaagcttgatcgatttattgattatggatttatatttatatatatattttaaaataattgttcgacaatatttacatttttaattaatttatttttaaaaaatattaatttggaaaaaatatgcgccaaaaagaggtaaaaaaatagatatataatcatgaattcatgattagataatgatatcttcaaaggccatataccaattaaattatcgtgatgatgatcatatattttcactttataataataattaatattatataatgaaagatacatatagatttgcaacctttttaagaggttattaattattaggtgcggtaaaatgtgccatcatatcctattagtgttatattttatatcgatttgttttttgattcgtgtttaattttgttaactgtaattcgagtcgtaaaaaattatatttaaattgaaattgtaaaacaaaataataaatttagattctattaaaaaacttatatatttatatatatataattttttatataaataataaaagttaaaaaatttaaaatatttttaatttcacgaaaataaaattatttaattttttnnacttaacaataaatcactaaatatatatttttatataattatatatattattattaataattttttaattttttatttttaaaaaaaattgtgtcgacatacatgcatgtcaaagtgttaaacaggttgtgttgtgtttgactcattttttttttatttcgtgtctattcattttcgacccgcgtttaatttttttgaccctaacccgtcaaattcatgcacatacgtattcgtgtattgtgtcgaaacctattttacaacccttagatattattagaatagagatcaactttacgtgataatattattgattattcaactatattatatatcacattcatataagtgtataaaaataattaaatatatttacaatattttatcatcatgatcattatactttttcatcaatgtcggattattataattattatcattgctttaattagatattgattataattgctttgttatctttttgtaaagtattattacttttctcatgaattcattttggcctcttataattattattaattaatatttttgatccattatgaccaatcatgagaataatttaaaaagcaatattatatattaattaagaggtggtggtaataatatgatcatgtcacaatcagcgtgcctaatttgctaattaatcctccattaattaataattaatactttttttaataaatataattaaattaattacaaaaaagtatatgtacttttaattttatataactatatttttcggtaatattattttg

SEQ ID NO: 38413 - DNA, 1611 bp, Cannabis sativa
acgtacgtggaagatcccaagggttgaattcataaataggaagaagaggaataacccggtttatgacccgattcaaatcctctctttcaccttctagcttgttatgaagatagaatgaaatcaactcttcttcggttgggtagaatctaaaaccaggtattcttgacttattatcattaataatgccattattatcttccattaatatgatcttatcatcacctagctatgaattcattcaaagtctatatataaattaattaatgagattttagacagagagaaattttggagaaatgaaatgacagagttaggcgaagatgcatgcgcatatacatgaatatttatacaagttctaagctatatatatatatatatataaaaggtacaaggtagtttggtaagggaaaagtaggagaaagagatagagagagggagttgtggtgatgtttttataagcgtggaaaggaaagttccacgcgcttatgacgaagaaaagaaaaattactactagtgttatgttacagagaaattatgataattgtacatgtacggtttttcatattatttattaaaataaaatatgtaggataatattaatttatattaatagcaataaatatatatatgccacctgcccctaggaatttttcctactgcacagaaaaattgaatgttagatataaagtagacgaccaaattataatatattaacttagaggagatatattgtataattaggggtgttcatttaattaaatttatactattttactgcatttgatctgcattaagtgtagatttttatattttggatataattcaatctgtacaatagctcaaattcaatccacaatttgatccgtaaaagtgcggatttgattagttactttttaatattaagtgtcatgttggctatccatgtgtacagagagtattgtccacatggagattttgtatacgtgacacaatttaattggctcgcgtaaataaatatttaagtataaaatatatataatttgttgaaaattaaagatttaggaaggcaaatcttatcccaagcttttagatatagaccatagtttcccttttcgaatctccactagaagtcacaaaccattaatcaatcttagcagcaatgcggctggaaagtttagtcgtatgcataacatacatgggcaaagataaacccacagactttataagagtggcacgacctgctttaaatagcgtattagctttccaaccctgaaatttaaaagcgaggttatccaaaataaaattgaagtcgacatccttttgtttggatctaaagagaggtaaccaggggcggaggcacatacaagcctacagtggccttggcccccccacccaaaatatgttatatatattcttttcatattcttttttttttttttttttaatgtatgtgagtcttttttattatttgtttgtgacatggtcccttcaatgaaattgaaatcgaaaagtaaaaataatgtcaaagaataagaaaaatgaatttatatatacatattgtactcattcagaatggtcaatataatacattttaacaatactaataatattaaagtgattaattttcatttt

SEQ ID NO: 38414 - DNA, 1594 bp, Cannabis sativa
tcagctcaatcaatgaaatccttaataagattaagagaaatctgaataattgggtgagtaggaatttgtcttttattgggagagctcaacttatccattccgttctgttggacattaggaatttttggatgaacatcttcatccttcctcagaagattgttgctgccatcagcaagtgctgtagagatttcctttggggcactaatggaaatagaagtaaatttcatcttcttttttggaaaaaagtttgtcgaagtttggtggtattggtttttgttaagtttggtgtatagatattcaaacttaatatagcaattaaaatatatctccgacttaataaattaagtgataagttgcttgagaagttaagactaaaattcccacttgcaaacagccaaagcctaaaaaataagaatagaatttgcattctcagttcggtacatgaaaggacaatgataagtaaacaaaaattgaaaacaaatgaccacccaaatagtgtaactgggtcaaacaactcaaaccattatgttaagcaaatagtaatacatgaaagtgttaagcttttatagattgcagttgcacctagtacatttgagtcatttttatttctagctagaactgtaatacaattaaacaaacaatacttagataagataacagtaaagaaaaggccacagactcacagctatgtcccagcaaggaatttccaattggaaaaagaattaaccaggctcctgcaatgccattggtactgctattttttaacacacataatttttattaatcgttcactttctactttacacataattacttactttggttcaattctattttcatttattaattattaattgattttgagtgacatttcctctatgaactttctcatttcaagtagcaaaagcatggtaagattggagaaagcattaaccagggcgattggaggaaaaatataagaaatgagagaactgagtcgaaattgaagaagaaatccaacaaagcattagaaaaaccaaaactataaatgaagaagaagaaccaaagatcagagaaccaaaacccatcaaactaaaaacgaactcaataaacgagagtgagagctctaacctctcttagattagagaacctactgacttctaggtctggccgaacaagaaaataccatcgtctttattcttagatcgaagagaatcggagaagaacttccaatcaacgggacggggtctcctccattgtaatcgcataagagaaatggggttttgaatttcgatgtaagttattgcataagcggggcgggtcagaccgacccgaaataaaaataaccgggcgggtgcggggacccaaatagagacctggatgagccgtgaaaaaagctccattttgccatgcctacaaatttaaatttacatatacacacattaaatataaattaaatttagtattatttacatttattagtatagatatgtaaactcccctaaatttcgacaacaccaacaaagagacatccgaggtggtctgagtgtgatttacgaggttagttttctcttactatcgaagagttgtgtttttaactttttcaaaaggggaa

SEQ ID NO: 38415 - DNA, 3072 bp, Cannabis sativa
cttagagcatggccgagtgacatatgcccttggtgcttggccgagtgacatgcctttggtgcatggctgagtgacatgctcttggtcaatgaccgagtgtcatgcccttgtggcatggccgagttatatgcatttggtgcacgaccgagtgacatgcacttagagcaatgctgagtgacatgccctttgtgcatggccgagtggcatgccctttggtgcatgaccgagtaacatgccattggtgcatgcttgccgagaaatatatgtgatcatgtaagattaggtacctctttgagcgcgtcttcgcttatctcccaattaatttttagctaatctcgaggattagccttgctaacttttgagattaacacttgccccctagtctataagaattcttttaaatattcttgtagactacgttcgatgagctttactctcatcttttggttctgtggttgcccctttaggcaattattccttaaggtctttttgtcatgatcctttatgcggcagtgttggctctattcccttcatggtaggtgcttgtcatgtggaggaagtgttagcctcttgagccttctcaagagctatcattttgtttgagagagctttcagccatttggcctttctcactctctttttggtgtaaccttattatggagagagtatagactctttgagcagtctcgacctcttatttgttacttataggatataagggagtttgtggcccttaggctacgctcaaccttttttttttaagatttaagactttattgggggagcttgtgacccttaggctgtgctcgatcccttacattgcatctgtgccacttaaagtgcattttgaatgctagaaaattagtactccttttagagagacgtccctctcagagtcatatctgaattcttttttttttctttttacagtgcttcgttcactttgataattttgattgacaagtatagtgagtaagtcaaaaagacatgtggagagggttgtatgtcatatgtaaagtgaaaacttaatatttcattgataaggtaaatatgtgataggtcgaatacatatgctatgtttggaggtcaacctaggtgccctctttaatttagtacaatgtactaaaggtaaacttgccattgctaagaatgttttcccatatagtgaaacttcactttgaggaacatcttggatatttaatttttgcgagttttagaacagaggcttcacttgaatgtatcaacttatgagtgttggaggtattgtctaatagaccttatagggatatgatgagcttcccgaagaacactcacttgtatccattttcaagactctattaccatcctccacacggatgtacttctttgctctctcatagaagtctcctatgccatccaatttataatccgattctagggcgtactccagcagttatggcaaactagagttcatcttcggacatcctccctactttggcaacttcaacattaaagcactagatgtatcttcacaagctttcttgttccctttacttcatattggtgatacttgttacaggcacaacgtaatcacttgttgtctgatggtgttgaaggaattcctccaaaattgcttcaaggatgtgattattcctgatcttggccttttgaaccacctatatgaaacccctttcagtgtgaccgcaaatcactgtcaccttgccttgcatggcacctctttcatcttcattagctcattaaagctccgagatggtagtttagataagttgtaccatcatagggtgtcatgtgtggctcctcaaaattgggtggaagtggttagacttgaacctccctcaagaaaggggattcttcatcaaactcatcatcctcgaaatttccctttgatgcgatatccatccttcgatgtagattttgcatctctgcttccacctctttcacccttctgctcatcccttctcatgagttagtgagtggaacttgagtcctttttgcggtgtgcatagggcatgtgagatgtactcttctcgttctctcatcatgcgactttccaccatggctgaaggataacatttttcgtttactttgcctttttaagggggcgcaagcatggtgccctcagcgcgagaccctttgggtgaagtcccttcataagatcacgagatgttttctcattgcaatcttactttatggtgggtaggcccaagctatctttaatgacctatagggtccttgtctcgtgacaagtcttttctactttcgtcttttggggtgcttttcgttgatgacgtggagtctcttccaccaacatgtgtggttgggaacctgtgctcttgcaagtggcttttgtattgaaagtgtgaggcttgaatcatacctttgattatgtcattcaacatcttttacatggcaaccatcgtagtctccgacctttggctcttccagtggagatcgtttatctcatcttcatagtggtgatttggagatcttgagctcacaaagtagactctcttctctttttgaagcagtgttgcgaggtactgagatctcgtagtgttagcggtggagggcacctcattggtgatattttttgcctttgtggaccattttcaccagcatgtgtgatggatgcagttactccatcggtgcgtgttcgttgaattctcttcaaggcgatcgccatttgttcttgtctggggttatttgaatgttatggccaacttcttcaactataggtgttggtggctctcttctggaggcgatcagctaagtgttatctagatgaatctcgatgccctaaagacggatggagcgtctaggcatcttacatcaatggtaagtaagggaacaacgtaggttgagcttgtttttcccacagacggtgaaaactcgtcaattaaattacgttcgaaaaatcaaaactcatacaccagacttagagtgaggatgaaaatatgaaaatacaaaaacttgaaaaaatgttcagagcaacaatgaaggaagagaaatgcttgtatttcttagagtgaagtgtttcaatgatttattaacttcctctcacatttgagaaat

SEQ ID NO: 38416 - DNA, 3553 bp, Cannabis sativa
  modified_base (3289)..(3294): a, c, t, g, unknown or other
tggtaaaatattcccaacattccatacttacagagaggcccaaccggtgcgcggaaggaggcttcagtgtatggagttaggcccatatcaagatgggggcacacttgcccctgaggtgctatttttctaaattctgcaccttagctagagtatcacccttccatttcatcccccaagtatattgtcttctagcgggatagtatgttttttttttgtgttaaataaggcaaacatgcgccaatgctgtaagaggtcttatatttttactagatcaaattgtaatcgatgtggggtcacaaggacaaggtgggcttctaccagttgcagagatacagtacgagtgtaccttgcccaactagccatacaaagtacacgtaagacttctgggattattacttcttcacctccggcttcccattgaggagggttcccacccttagtttagacttcagtcttgcaagtaagtcttgtttcctgttttaggtcacaaagttttatttttcctttgtactcattgtattatgattcatcaatgctttttgtatgccagactgccttcctcaatccaccttgactctaaagctggaaaagagagtcaacttctacaaatccttctcacccaaggagttgcaagtggagagtctggtgaccacggagaatctttgggaagtgagtctcattgcccccacactaggatataactcacctctctatgaaggagtcagtctaagagtccttgatgggggactcgaaagaagttatagaagctatcgcggttatttctaccaaagaggctttaaaggcggtgaaggttgatgaacaatggctagaagactagagaagacaattcccataaagcttgagtgaggatgaagaactttccatccgcttctaggatgtgatgcccaatgaaagtgctccaagagcgagcactttcagtagtggtgagacgccttctcgtataattagggctcccactgtgtctgattttgagatggtcaatcaatgtggatttgatccctacttcttaaatttagaccgtcataagtattcttttagtagatatgtagatagggtagactgctttgtccacaatcctaatcactttatccctcctgtgcaccatcatgtccaagtggatgcacttagcaaatccacttctctggattattccaatacaaaaccaatttaggttgagaagacgtctctctatttgctagaggaaaagtcaattatgccaggattaatggtttggaccatcctgaagtcttacatgcttacatgttgtaaaatttatgcatcttgctataatttcttttaatgactgcttcgtgtgatttaagcagatcaaccagccactctccggatagggcttctaaacaagttcttgggcagtgtccaggttcgatctgatgagattagggagattgcccaaagcagtagtgatggcagaaagaaccaggcctccagaagtaaagctcaaaagttagcaccccccgtacccaatctgtaagctgctcctaaggctctgagtacgaaagcagcatctactgccatcgtggacaagacacagcctgccttttttgtggaacctttgaaccaagttcccttagagaattctagggaagacaattctaactgtgatgggcccatcatgcccattaagaagcgtgttagcttgactgatgatggtgctagaaagaaggctagagtagagaccaaagagaaagtcctgcaactggcaacctcgaggaggcaggccacagactctcgatcctagaagggaacatcctcttctgatgacggaaggccaccaagatgaagtactcattcgtcaagggacaagcaagaccttcttccgccacccctagcacctaaagtgattcttgccacatcaacccagttgtccaggcaaaggaccgagtttcctcccttgcctttgacacccttcacacttcctgtcaggcctatacagttgacggaaggggaggaagccagattggaaacggtggataaatgctaccaccaaaggcatagctgtgaggttgaagagatgaagatattgtctaccagcatctcttctaggcgcaatgctgagttcgttgattatgacaaatggaacaaggatgcccctcctatcgtgaacaaggttaaactggcagagagactccgtccacgtgttgggactgatttttcatcactcttggcagatctgttagagcaaagcgctaccacaagttgtaggcttggcactgatagatttgtcatgatcgctagtagggacccgatgtacgtggctgactctgagaggactcaggaaaatgctgtaagttcgatactcttccaactcaaataagattttagtgtttctacattgttttaacttacttatgttccttattttgtaggttggtctgatggcggagaggagctgctccttgatcacctagttagcttacgacctagaggtgccaaaggctgaatatgccaatgttgaacaaaggagagaagaggcaaagagggccttagccaacgctaatgccatatggaggctaccataaagcagagggtgtccgagtttgtggaaaaatctttgtccagggagaagagggctaccaaggtagagagggaatgcggtgacaaatacaaagatatgcattccaaggccctttcccgcattaaagaattagaagttgaagtgcagcaggctaaggaagacgttcagcaagtcaagcttgaggatgaaaaaagagagaaactcaccactttgtctcagaagtatgaatgtaaaccaagatcatcgaagacaagtttatcaatgaatctactttagagaagaaactgaagcttcatcttgaattacagcagaaggaagaggcagctgaaatagaagccattaatagagctcaagaggcaaaggacaaactagctacggagactaaggctcacgaagaatcccgataaagaatcactgacctagagggtgaaagctccactttgaagggatgtcttcaagagcaagaggctcaaaatgtcaaagctttggaggaagcttttgttcactcactctacaccctttggcaacataataaaaccatgatagacctcctagatgctgaagacaaacaggaaatttcgccccaactattggcgctaaagaaggtagacaagtcacggaacgagcctcagggatcggcgatggtctgctgttttgtgctcctaaataaaacactctcatgtcaatataatcagatttacaaattaataaaagatcagaaatcattttatnnnnnntgattcacatgatttatttcatgactatatttaatgtataaattctattaagtccataacatatataactatatatttgttcataataatgtcgtcagcacagtagaatataatcatgattatatgatcaaaagtttaattcgcatgattcatttactggatttagattgacatgataatcggcgataaggtatacttacaccgtggataagtgttatgtccttttcaggatattagtagcagatgtatggagtataca

SEQ ID NO: 38417 - DNA, 1583 bp, Cannabis sativa
atatactaatgagttatcagaaaataggatttattaataatttaatgggattttttggaaaggacgattgtgtccttggagtttttaagtaaggaattattttaagcgggggttgcttagtcgagcccctctatcgtcaccaccgtgtaatttttcttcaatttctttcaatagaagcttcattcttgggaaggttcttgaggtgattagctttagaagtgaagaagtcttagtgggaagattagagattaattgagttaagctccataaattaattttaaattgatgatttaaagctagaaataaggttattttcttgaagtcttgctaagttatgaaaagctaaactttattttggataagaatgagttaaggattaattctattttttttttagtttattttacgtagctaagttatgtttatagttgtagggtttgagaaaccctatgttagcttctttgatggtataattttgagttatggattaatttaatgaatgcatgtatgatgttatactctgtttagaactattttaatgtttaaaaccagttaggaattgtttgggatcatttagaaactaaatgggagagacactttgtgtttgatgttgaacggaaattggtcaaccgattttcccgcaagccattttgacagtttttgtagtttcatatttttgccataactttttgcttggatgtccaatttaaacgttctatacataattagaaaatgtgtgagaagatctaaagtatggtatattaattggatattagaatacatttctatgatagggttgttttttaggaaatatttaggttttactttaaagagtcaaatgctatccttcaaatataaagatcgataagaaaactttagaataaagactagaatttagtagtgttatggataaataatgattttacaactattgtgactaagggaatgagaattccacacaagtcgatttgcactcttgttttggaatctaggtaagaaaagtatacaacttcacttatgcacatgtttaatgtacatattttatgatacaattcatctaatatactagagataacagtatagatgtacttagagattcatttatatctttgatttagttattaccagttaaaaaatttgagaagaaaatattcaaaatattgctttccatactccatttagacacttagaattcttagttatgcattttggacaaactaatgcctttgctgcatttgtggagttaatgaataaagtattcaaagattacttagataattatgtaattaaatttattgacaacattccggcttattcaaaaatagaggcaaaaatgagcaacattttagacatttgctacaacgattgaagtaacataaatttatgctaagtttataaaatgtgagttatgattacctcaagtatcttttttgggtcatattataagtgaagatgacattatggtggatctaactaatatcgagtcaattagattctggtcaaggcctaaaacagaaacaaaagttagaatcttttttggaattattattctcgatttttgaaaggatttcaaagattgtaac

SEQ ID NO: 38418 - DNA, 2466 bp, Cannabis sativa
attgattttattaaatcttcacttaaagtactcaacagcttatcgatatgacaatgttataaataatttataattacttagtatttattaaattaaatcactatgtcatttctttgtagtacttggcatgttcattagcatatttcttggcaagtacatgtgtatatatagggtgcacttttaatgagtattattaatgggtaatattagaaaattttttagtttttattattaatttttttatttaattagaaaaatttcttatttttacattatatgggctgagattggtccatcaactgaaaaaaaaaaataataaaaagaaagttttttggcaaaaaaatgataaaaaaagttgaattcaattttaatattttacatataaacattatatagtgtaaaaaagacatttttttatatatatattttttaattaagtagctaaattaattaagtatagaaattcaaattttttttttattattcgctatcggaccaagatctaatggtttaatatttttaaaattaatatttacagttaaatttatttattacgtacccattaataggtaataccattaatatttatatttataatattttagagggtgcaattttatagtactccttccttattttcgatatttataatagtgtatattttaattatttgagatactctgtaaatagaaaaatttgaaataatttataatgtagaaaataagatttaaattgtatattttgtatataaaataaaaaagacacgcgtataacaaattgtttgaattttacttttcgacacgattaaatttttttaatttttcaaaaatttgcatgatattttaaatatgttgtacaccttcatacaaaatttttaaattaaaagtatctggatatcgaaaactcgaagggatccatcattaaagccccttaacattttccaatattttgttatttgacctatatatgaaagattatatattgacaacatcacataatacagtatgggcaaattttgtatggttgcatatgtaacataataacaaagaataaaaaataaaatatatatgcatgactaataattcttaacgtgatgttttgttagatgaagtgggtaattaattggcttggtacatgataatgagatagttttttttttttaaataattatttttaaagacaaaaaaatgaaaaaggagatgtaatgttgtaatgtaatgtaagctatgaataggagttagccatctgcttgctaaaagtttgtccgtttgggtattttgggtagagaaaggccccactaatcacgtgggagggagatgcctaaatggcagtcctataagacagaaatggtaatttacaaatctcctctaatcccttctcaaccaattatcatctatctcccacgtgggaacttggccccaccataccaccttctcttctcccttttatatgtctttttttgcttatactattccccttttatatatctcaatcttgttcctcttcaaatcccacaacgaaaatttcatttctcttcttcttcttcttcttcctcactttttatttttctttgaagttaaagttaaagagctagagataaaaaaaataagaaagaaagaagaatattaatactacttaagatcacagacaaatatatagagtggtcatgggagattcttcagcttcatacatacacatggtaagttaattaatagttttatcaataaaaactttcattatatgtatatatataggtaataaaatacgtgattactttgttgatatattgactgtgatcacttggtatatatatatacgtacataaaattatgctatgcatgcaattatgtatgtggttatatatatatacttaaatatgcatgtacaggtgcaacacctaatagagaagtgcctgatttttcatatgagtaaagaggaatgcatggaagccctgtccaaacatgcaaatatcaagcctgtcatcacatccacaggtaattagtttctttcctcaatgctcaaatcatctatttttctaattatgagttgtgcatgcatgcaactcaacgtaataattaagaaaatataatttgacaagcacaaaggcaactcaaactgctctatgaacagagaaataaaaagtactccatatcaagccaacctagctggctatatatcttatattgggttaagatcagaggtcaattttcaaacatctttatagagaaaattatctcacatgccatttcataagctcagttaaaaatataccaactgaataactaagctgttattgatcacaagtttttcagttggtgaagaagaacacatcaagtatgtagctaatttattataaaatataatagcaccaagctgatcttgaacgaacctttaattaactaattttcagtacgtaaccatgttaatatataagtgagcaaaaagcataattgtttaattaatata

SEQ ID NO: 38419 - DNA, 2067 bp, Cannabis sativa
aacttaatctaaaattaatactaaaaataacctaacacagacggtcgtgggctcggcaaggactgctaaggccttggcgggagacctataagaagcaaaaaatttatattttaaagccttcaactcggagtatttttcttggactcgaagagttacgttttgggacatatataagtcaattttaaggccaaataatacaggggaattcattattttctattaaggtttcataagagatcaagtcaaaacacaagaaacacattcttggagagaaaatcaccattcaagcttggaatttgaagatagaagatagagcatcataatagttttatcttttctcatttttttatttcatctttgtcttgtgaatatcatgcataccatggattattattattgtttgagattttgttttatgatggtgaactaatttatttttctagaattttaatggaactctaagtttataaataagtaatcttcctaattcttcatattgatattcatattaattatttatattaatttgtgcttaatgcttttcaaagagtaattaattttagaaatttaattagtaatttgaatggaacttgagaaagaataactaaattagatctcatcaatataactaattagcattaacatcttgtgtttgggataggaatatactttaactttatcatcctaggtaatcaaattagacttgagaattaatgctattgatagatttaaattcaagataggaatattagaattaatctattggttagattcacttgtgatttagaaaaaccttgtgaataattaagaaccctaggctagcaattagaacattaataggaagatgatgaaagttgtttattgaagaacataggggggaagttaagaaccttgattttcccattcttaattttcttgattttatattgcattatttttctttaattttcttgtttcttgatttttttttactttaacttggattgaatgaaaagaaaaaagtattttgtaattaacacttgaaaattagtcttaggggatcgatatttttatgtactacttgttacgatacatgctcttacgtgagtgattgtaataaaatccataacacataacataatatttaattttatttttgacattgtaaacgatttagaattttttaaaaatttacagtagtcttaaataactacaacatatacaattatgaaaaaaaaaaaattaagtaatttttttttatatgcctaaatggataaaaaatctacagaaatgtctctttaagagtatactacttaacaataatatacatttaaatattattaaatatactataataaaaaaaaaaacagttatagtgcaacatgttgattttggcattatatttaatgcacgttggagatggtcttaggtcatctccaatcgcgaacattaaaaatttaaatttaatgttatttttcaatctaattgaatatcttaagctttcttgtatatccgatcgtttgcaataccccactataattagtggaacactatagaccatgctaaaattgtttttttaatttttttttagtttttgataattaaataatgattaaataattaatttttatatgtattatttatatttatatacaaaaacaataaagaatacacttttttttttataacttttagttttgtaaatggaataaaattgtgttaaaattatacttttttttagtgttgcttcaatactaaatttagtttttatcattggagttggccttagatgatgtgagatggatggtaaattaatgacttccgctaacagccagaaaaataaaaagatcaaagcaatatgtcatgtcacataccttagggtgagtgatcaccatttccagagtttcaattttactatttaatcttccttttacagattttcccctaaccgaacgaattatattgtaaaccaaggtaactaataattaaggattgtctgcttagtacacttcaatttggcaccaaactagttaaagctttctatcaataatcaaaacttggagctggagatgtcaattgtcaaatgag

SEQ ID NO: 38420 - DNA, 3310 bp, Cannabis sativa
atttcttaagtgttttataaaccctaacatgttgagcataaattatgaggagatacattgttgagcatgtataacaagaaacgaggagatacattattgagcatgtataacgaggagatatattgttgagtgtgtactacgggaaaatacattgagactgtattgaattttttttctcatttgcaaataagaaaatcatttaatttcaatattttaaaaatgcaagaaaataaaaattgatacatttatattttattacctctaagttctaaccaaacataccttaagagaatttgacttgtatgtagatagatttaggggacacaaaagagagaacaaaaatatgtacataaaatctcaattcttagatagatggcttctatgggaattgaattagactcaattcttataaaatctcttgaagagcataaaagtgatcatgagaacaaaaatatgtacacaaaccatatataatactagtttaaagacatggatattatctagtgaaagtaaatatatttacttacacagatgagaaaaagaaataataagtgtagatttttatccctccttgattattatataaagatctcaatgggtttattggcccaaaaattccacattatttaaaattttctaaataatattgctttctcatctaaaaaatcatttatataaaagcaactttattacaatggaaaaaaggtacattactagaacataatattgacaactaaaaattgaagaaatgatgatcttcattttgttgtgattgtgtgaagctattgaaattagaatactcctcttgaaaatggggttctcgtacaatctcaagataatcactaaaattaggattaggataagaagaacaagaagttgaagaaaacaaggcaatctcagctcttgtaatagccaattgagtctcaacatttagtatttgttgttgtaactgagaaataattccaacacatccataaactcgattatccattctacattttgcctcgaaatgcatagtatctgctgcttcactgcgcaatttcaccggtaatcgctataaaagaaaaaaaagacttgttatttttgtcattataacagcaatgaaactgaaaacttactagttatagtaagcaccttgagcattttcccgacattgctggccccgaaaattttatgaacgaaagaaaatcgttgaggattgttggaaggaaaatatggagagaaaatacaatctaaagggcaactctttctcaaatacttacaagcagcacaacgagtatgatgagatgatgatgatgatgatgaactcatatttataaacaaaatctatgctaaagatataatatgttattgttagcctaaatctttttgaaaaaaatctaataaaagatttgagaatctacttagtttgatttgatttacaacatatagtttatatatagattatatacatctaagtaacggctagtaaagtaaaatgggattttgactaaaattcttgtgtttaaaaaggaaagtttacatataatgaatgtaaatggcaaaataattagcaaaaaaacatgagagatgtcatttttgtttgaaatgacagcaaataattttaaaaggatttgaaaattattcagcatagaagttggaacatttgttttctttgtcaaaataacatcaaataatagtgacataatcatatttctaaatagattaaatttttttaagaaaaaataaaacaaagtcacaaagagtaataaatttcatttgatcaatgacaagtcaaatctttgttcatttgtaataatcaaacatgagaaaaatgcccattaaaaaaaaatataaacttgaactctttttcaatcttattccactataacagatcatttcttcaacagaaaagagaaagaactacttacaaaatcttcaagggtatagaatttggccggccaatgcattattgacaagcccaatcgatcatcgtcattgctccataatcagacttgtctgcatagttttgttgtaaattaatcatctccaataatgtgatggttttcaccaaataagagggctaatacaaaatttggtttaggtttaaaatgcatttattgagcttgaaaccaatgttgggatagataagattacaacgagaatacatcttgtgccctaaataaatgttagacaagataatgtaagcgtataatggtttcggttccaagctaaacatcttctttgcgaccctctcgccgagtttcatgtccatccaaaactaacaagccttgagtaaagctccccatacaacaacatttggtttaataggcatctctttaatgaactttgaggcttcttgtagacggccggccagactgcccgagtaggtcaactacacaagtgtagtgttctaaagtcgggtttaatccatagtctttcctcatggaatggttaactctcatccgggttaaaccagcataacgacaagcacacataatagctcaacaaaagactaagttaacatttactcgccctcgaaaaaagactaagttaaactaacgaaaaagaaaataaacaacgaacacataaaataaattactattgtaatctatactacattatttttttttcatgaaatcttaattacaaatttttaaccaaattttcagcttaactgtttcaacgttaaatcttaaatttaaattagaaaaataaataatatgactcactttccaacccatgcatgaattgttcaaaaagtaacattaaattattaaatagcaaccgatgttgattgttcattaaattatatattcttttatatagaataattagcaacttttacttttaaactctcgacaatactgattttgcctcctaaaatatacgacttgttattaattcttcctacaaacttttacatctacagaaataaaacaggcaaactttaagcaaacttataatataataagaacacacacataccttggaagttttttcagcaagaagaataccagagttagaggaacgatttcggccgaaaatggcgaagaggaattagggtttgaatttgaagagaaaagatgggagaatgaggaaagtgggtctgatggggtatatatatagaggcattagcggctgactattcgcggcggaatctccgccgctaatagttaataattttttttattttttttattattagcgacggactgtgtaaggaatgagtcgattcctatgcaatccaacacactgatctaagaacaattacaaaccaatttgaacacttagaaaaaccgtgagttgtagtgctcttttattgaatcaa

SEQ ID NO: 38421 - DNA, 4451 bp, Cannabis sativa
ataatacagttgcttctttcctcttgttctttctcttttctttctttcactatcgtttacatggtatcagagccttttctttggcatcaatggaagttctttcagataatggcaatggaggttcatctcaaacaaatccaccaaatgctaacaccactcgtcctaaaacctcccctgtaacattcagtcactccctctctatttgtttagatgagcacaattatcttccatggaagcaccaagtttttgccgccattaaaagaagcaagttgcagagatttcttgaaccagatcgcgctcctcctcaattcctcgctgatgaagacaaagttgtgaatcgtgtaagtgctgaatacgaagattgggatcagcaagatagtatcttggtttcatggcttttatcttcaatgtcagagaaaattttaacaagaatggtaggatgtgaaacagctgctcagatctggaatactctcaaagtgtattacacaaccctaaatcgtgccaatatcagtcaatatcgaacattgctctgaaacacgaagatgcagaaatctcttggtattttatcctcaagatcaaacggattgttgacacccttgcctccattggacaccaatgactcctcaagatcacattgaagttatcttcaatggtctcccaagtgactatgatgttttcattacctctatgaacacaagattggataattactctgtggctgaaatcgaagctctcttgattgctcaagaagttcgattggagaaaggatccaaagaattggatgtcaacaaataagaagctaatatggctcacactaaaccctttcatcacagtcgaggtactttttcttcttctcatatccctcaaaattcatctaattaccccactgttatgactaggaatgcaaacagcagctcccaacatcctcctctataatttgcaagccatgctccgccaggttttgcttcctatccgagttctgcaaatggacgtgcctccacaccaggcagagggcaatctcccataaatcgtggtagaggccaatattctgcttagggacagaaagtacagtgtcaattatgccataaacttggtcatactgtcactcaatgcttctatagattcaataaattgttcacaggacctgctacttttcaaaactttgctggaagtgcacagttagctgaaatgcctcctctatatgctagccctgaaactgttggtgatgcttcatggtatcttgactctggagccactcatcaccttactccccatgctcaaaacctgcaatacagtcaagattacaatggtgatcaccaaatccacatgggagatggatcaggtttggctatcaacaatcttggtcagtcttttttcaattcccctttcattcacagcagcttgttttacaaaatttacttcatgttcctcacataacaaagaatttgctaaatgtttctcgatttgcataagataataatgtgttttttgagtttcatccctttcattgttgtgtcaaagcacaggactccatgaagaccttactggttgggaagcttgacaagggcctataccattttgattcaatccaacttgcccatctcaacaacaaaccaatactgcctccccctgctccatctatctccccactctcaaggcctacaattgaatgtcataatcaccaaactcatgtacataattctcaattttctatttggcataatagactaggtcatcctagtgctaaaattgtacaacatgccttgaaatcttgtaatatccatttaagcaataaaattgagactggtttttcagatttatgtgccgcttgttatttagggaagcatcacaaacttccctttcttatttctaaaactgtctataatgaaccattacagttgcttcattctaatttgtgaggtgctggacctgttaactcatctagtggttacaggtactacattagttttgtcgatgccttttcacgacacacttggatttacatgcttagaaccaagtgtgaggctttacaaaccttcattacattcaaagctcaagttgagcttcaacttggtttcaaaataaagcaaattcagtctgattggggggagaataccaagcttttactaatcttttacaagaacatggtatagttcatagagtttcttgtcctcacacccatgaacaaaatggtgttgctgagagaaaacatagacatattgtcgaaagtggcttagctttacttgcacatgcatccttacctctcaaatattgggatgaagcctatagggctgctgtctttttaataaataggatgcctactcctcaattaaatctaaagtctcctcttgaagtcttgttcaatacacaacctgattactctactcttagagtctttggatgtctatgctatccaaatcttaaaccttacaatcgggttaaacttcaatatcgatctataccatgtgtctttcttggctatagcatatcccataaaagggtataaatgcttgtccaaagatggcagactttacatctcaagggatgttctctttgatgagacattttttccctttagtcaagctgccttcttggctcaaccagcttcgggtatggcatctgggcactctttttcatctgcaaacatccccaataccttttccgcacccaactttgtcccaccttgtcatgcatctactgtcagccctccaattaacccatcttctactcttcctaccagtcagccaacactcatcagcacccaccctttgcccactgctgctactacagcagtaacatctgctgctgctgtcactacaggagcaacatctactgttgccacaatagccgtaacacctacttccccatcacccaatgtgccatctacatcaccaccctctcaacccatccctccatctgataacactcttccacaactatctatccctaccattcccccaccaaccaacacaagtaaacaccccataaaaacccggtccaagtcaggcatcaccaagccaaaagttctcatggcatccttgtaccccacttcgattaaggctgctcttcttgacagtaaatggtttgctgttatggggactgaaataaaagccttggtaagaaatgatacttggactcttgtgatacttcctgatggtgttactcctattgggtgtaagtgggtttataggatcaaggaaaatgctgatggctctgtttctaagctaaaggctcggctggtaaccaagggatatcaccaacaaactggttttgactttaatgaaacattcagccctgtgatcaagcctattactattagagtggtgctcactattgctgtcacaaacaattggccaattcagtaacttgatgttaacaatgctttcttgaatggagacttacaagaagacatatacatggtgcaaccaccaggttttattgaccaagaacaccctgaaatggtgtgcaaactcaacaaagctctctatggattaaagcaagctccaagagcttagtttgagaaaatgtcttggtcactcttggtttttcttcagcaaagtcagatcagtctttgtttgtcaaaacctctactaatctcatcttgtatgttcttgtatacgttgatgatatcttaatcatgggcaatgacaacaatgttgtctcatcacttatcacagctttgagcaacaccttctccctcaaagatcttggcaatctatcctattttctaggcattcaatctatctacaatgagaagggtatcttattatcacagtagaaatacattcaagatctcctttgcaaagcccaaatgcaaggagtcaagactcaaaagctccccaacaaacagtggcctaaggttatctcactttggtagtgaccctgttgaagatcccacactctacagatccattgttggggcccttcaatatgcttgcataaccaggcccgaaatagcattcagcgtgaataaggtctgccaatttatgcaacaccctctacaagcacattggattgctgtgaagcgcatcgtcagatatttggcaggtaccttggactatggtcttcaaataccaaaggttacttcttttcatcatattcaagcatattgcgatgcagatgattgggctaccgccgatccggatgatcgacgatcaaccacgggttattgtgtctttttgggggagagtcttgttgctttgcaatcaaaaaaacaacacacaatttcttgatcatccacagaagctgaatttcgcagcttcacaactgttgtcactgagattacatggctccaatctttgctgtctaaactgaatatgaagaacactctaacaccatctgtgtggtgtaacaatttgagctctatagtgcttgctgccaaaccggtattacacgcccgaaccaagcacattgagatagatctttacttcgttgaggataaagttctcaac

SEQ ID NO: 38422 - DNA, 3096 bp, Cannabis sativa
gagaaaatgtatgaaagcctcagttaatattttctgaggagaagcctctttatttatatagagaattatacaaaagctttaaccaacataacagaacagttggcaaaataacagaataacagaaaactaaagaacaatacaaaacagttttaactaactgtatcatcccccctcaaacgaaaaggggtttgaacaactttgagtttgcttttgagatattgaaatctgtctttagggagaggctttgtaagaatatcagctacttgatcaacacttggcacatatcgaacagagatttcatggttgaggatttgatcacgaacaaaatggagatcgatttcgatgtgtttgcagcgagcatgaaaaatgggattagctgcaagggctgctgctccttgattgtcaacccaaataatgggaatgtcttgtaaggaaacatgaagttcagacagcaaagagagaagccatttcacttcggctgctgcattagctaatgcacgaaactctgattctgttgaagatcgagcaacaacctgttgctttttagctgaccaggagattaaattggagccaagaaacactgcatacccccctgtggatcgtctgtcatcaatacaactcgcccagtcagcatcagaataggcttcaagagagagtctagaaactggtttcagcaaaagaccttcagagattgtgcctttgagatatcttagaagccttttacaagcttcccaatgaatatttgtaggggcatgtataaattgggaaagtttgtttatgataaaggaaacatccggccttgtgagagtcatgtattgtagagcacctaaggtactcctataaagagtaggattgtcaaaagctgtaccttcggatagagagagcttttgagagctgctggtgggactggtatatggtttggcaccctctagttgaactcaaactagtaaatctttgatgtatttactttgggacaaatacataccatccgaatttctatgaattttaaccccaaggaagtagtgtatttggcctaagtcttttagttcaaagatcttgttcaaatcagaaatgagcttggtgattagtgaagtgttgggaccagtaaccaagatatcgtcaacatagacaagaaagataatcaagttctgtccagtaccaaaaatgaagagggaagagttggccttggaagcttgaaatccccagtcaagcagagtatttctgagcttatcattccaggctctaggtgcctgcttaagtccgtatatagctttgtggagatggcatacatgatgaggtttggatggatcctcaaacccttgaggttgtgtcatataaacagtttcttgaagagcaccattgagaaaagcatttgacacatctagttgccgaacttcccaattaaaactgacagctagagtaagaaccatccggactgttacaggcttaactacagggctaaacgtttcatcatagtctattccaggtgcttgtaagtaccccttagcaactagcctcgatttcagcctgtcaacactaccatctgactttaacttgatccgatgtacccatttatttcctatgagatgcatatgagactcatagggaacaagtgtccaagtaccattggatttaagagcagtgacttcattgttcatagctttattccaagctggatcagcaagatcagctttcaaggtttttggctcactaggcaagagagattcaggtagttgatgtcgagtggccaagtaagcttttggttttcggataccattttgagaccttgtggtcattcgatgtgtcctttgttgagcaacaacttgagtgatttcaggatgagaatcactaggagcaacactgctgtcatgagtttcagcagcaacactgctgtcatgaatttcagcagcaacagtagaggctgtagactgaggagcaggcaagattgaaggtgcagcagttgcaccagatgctgcagcagtgtgcattccagcaactggaatgtgttctggtgcaggagcagggacagcagtagtgttgatttcctcagtcacagtaacagggacagtagacacagcagaagcatggtcagtggtgttggtaaaaaactgagcagtgggaaatttaatagaatcattagatggtacctgtgtagtgctggagatggaaagtgcaggaaaatgtgtttcattaaacactacatttcgagcaacatatatacggccagcagcattttcacaaagatatcctttgtgctttggagaataacaagaaagatgcattcttcagatcgataatccattttatgatgagaatagggtctcagatgaggaaaacttgcacatccaaagggctttaggatcttgtattctggttgttgatgaaagagactttcataggggctgatatgattaagcacaacagtaggaagacgatttattgagtatacagcacattgaaaagcatgccaccagtagctcatatccaaccctgagtgagcaagcatagttaaaccggtttctgttacatgtctatgtttcctctcaacccgtccattttgctcatgtgtatggggacatgagagttgaaatttgatcccttgatccctgagaaatgtttcaaaaggcctatactcacccccttcatcagcttgcacacttttaataggtagattaaattgtttctcaaccaaacttttgaacctaataaagacttcaaaagcttgggatttgagagtaagtgggaagatccaagaaaacctgctatagtcatcaagaaacaagatatgatatttgtaattttccttagatacaacatgagatggcccccataggtcagtgtgtatgagttcaaggggttgggaagctctttttgaggataaagaaaatggaagtttatgactttttcccatttggcaggcattgcaaaattttagatttttgagggaatgagaaatattgttttgggaaagaaccttggataggatagcaggggcagggtgacccagtttacagtgccacacattgatgtcattagccaaagtagtgttgaaaactgtaggacacaaattagtaaagaaatgctcatttttattga

SEQ ID NO: 38423 - DNA, 4315 bp, Cannabis sativa
  modified_base (2572)..(2612): a, c, t, g, unknown or other
  modified_base (3949)..(3952): a, c, t, g, unknown or other
  modified_base (4263)..(4263): a, c, t, g, unknown or other
ggctcacgggtgctctactgtgcaggaaagggtaaggctattgctgatcagccatgagtgtaggagctggacgaagaatgtacatattcgggtcatactagactaagtgggttggggtctaccagtgatgtattttgttctctgttttgccgcttaggtcggatagagaaagcaaacttataataacattttttaaaatacttccgggatcccaatacatgtatctattattttgtgcagaaaaaaaaagtattacaagtttattttaattccaattgttattaaagtttaaattccgcgctatttacattagtaatcctgtttaggggattaggatttttaatgtatcttgggtagcgtgtctaattatttagggtgttacacgtgccttagcattagggcgttacagttttgatgttctacagctcacacttatgagtcatttagttgaagatgataagattttcatctttattacaaacgtcttggattgtttatttttattaattatacttaatgagtattatctgtaattgtaaataccgcttaagttttatatgtcagattattaaataattagggttaatttatgagatttaattattatttatgatttgcatgtttgtagaaaattatttaattttaacatgtattaattatgctatacatgggaattactcgtttttggtggttgtgatcggttactgtggaaagcgacgtggggccattagagagtcatgcttttatttggtttagaatgtttgtaatagcgggagatcattgttagatgttgggaatgttgggaagtgttgagatttttaaatgaccaaattacccttttatgttattagtttttatccttttgttaagggcaaaatagtcactttgttagaaactcttctttttgtcccttgtgaatattagtgcctgaataatgggatagaatttaattaaaaatagaaattatattttacttaggttggaaggaaagaattttgaaaaaggagcatttttctctctcttcacaactctctttctctctttcgattcttcaaggcaacagctagggttggaattgttcgagtgatctcaaggatttctggtagaatttgtgtgttgtgattcaaggtatctctccctagcctttctttccttgattttccttaagcctaagttaggtttaatgtgtgaacttgggttttatgttgttgtatgaattaaggtagcttgttttggtattctagagttaggttaggtttatttaagttgttttaagctaggttggttgttagttatggtgtttggttgagattggagttttggagctcaagctttgagctccaatggtgattttatttctggaaagtttgtggtgttttattatttgaatttggttcattatagtgtatacatgtattctcaagattattggaaagcttagagttatttgtgtttagggggtcaatttttaggtttccctgcactaaaccgattaaccggttttgtgggacctgagaaatcggtaaactagttttgtccctcaagaaacccagtgaattggttaaccggttgggaaatcggtttaccagttggggtttttccaggaaccctagttttcccgaaattattaatttttagggtatggtcatgtctttcatcgatagggttattcctagtttgattttagagtccccaaaagtattttagtgtgtctctcaccaaaattacaaatgatgtgatttagggtcctgtgaaacgtcgagctgcaattttacttaggctgaccagcacacctgagcacggaaacgaagtaagatagcataaagtatatatgtgaatgtataaatgttattaattgtttacactactaacactaacgaagatgtagttttaagggtgttagtacagtgtagagttttagggcaggtgttaccaacacgagtaccagagggtacatcgtgcatgtggtacaatacttagtaactcccaagagtacaataatggccctaccaacacgagtacggagttggaactctagtgcatatggtacagtagtcgtactttcgttgagaacgttcttaatcatttggtaagctcagttgttgggctgaggacgacttaaacattaagtcggtataacactgcttatttacacgttatgcatattttactgtgtctattgactcatcagtttgttaccctgtgtaggtaaggaaaaagctaagctggaggagcagtgagttacagctttgtaaggattgtacatatcgcggcagtgcaacctggagggtttcggtcttatagaattttgaaccgccctgtattttgtaataaaaaaaatattgcgtaactttatatatttaaatgtattttgtaaatgtgttttatattcgggatcctgtcttataaactatatctgatttattataaaaaaatttattttttttttttataattacatcttttcataaaaacatgatctaattaaaaatcaatttttttttcaaaaaggaactaacatattttcacgtgaagcaagacaatcaatgactataataataataataataannnnnnnnnnnnnnnnnnnnnnnnnnnnnnnnnnnnnnnnnataataataataataacatattttattatatatgtgaaaataatttaaaaatccatagccaaactagaatcagaatgggatctgataagtagtaaatagctagtttgattttatataaagtaaataaatagtagttttcaaagagagaggtagtggtgcttatatcctcaaataataataataataaaaaaaaagtctgtaaagtcatgtgaacttaactgaaaaactgtgagatttaattggttccaagtaccatgtgctgtgcttcattattcatggcatctctgacttttgctttagttttaaataattaatattacttaattaataaatataaataatatttatggtacaatattatacattataaattaggtgtttttaattgatattactagtcttataattatatatttgagtttttattttatacttaattttattatctaattaattttttttttctttttgcattgtaaagtgagttaagaaaagttaaatttgaattagagaaaaataaaaataatagtaaatgtaaatatatagtgctaagagaatttttcttaattaaataataaaattaagttcaacaactttaatttttttaactattggtcattgaactaaaattaagattaattataatatttttttttaatcgaaatatatataatcatagcactagcccccatatacccaccaactaattagatcgatccatgtgatagtgtgatactgtgatacagctgatgctttaaattaaactaaatatttgcaaatttttttataagctgactaaagattctcctatgtgaaaaaaattaaataggtaagattgaattggattaaatatgttaattagtttggataattaatccaattaattttatttagttgcgattatttattctattcaacagtgtgggataaataattctatatataagtgagattttttttaatggttttcttaattttaattttgttaacatattcaaaaattaataagaatttaaaaaaaagaattattataaatgttttttatcaaaatatattcattaaaatgagaaaaaatatataattttaaattatcatacataagttttcaaaatttaaaataatattaattaaataataattacttaaattaattctagaaaaataatatgataaacaaattatatatatattttaaattactataaatttatattaatattttagaaaaataatatttatattaaattagtgattaaattagtatttagcataaataattttatattattttagtattttattttaatatttgaattatttattaaataaaaatatannnnattattttattatatatttatgatatatatttgattatagatgatacattattttattttattttataatttaattatttttaatatttatttatttttttgtgaattattcatttttttattttatttaaatttaatttttattaaaaaaagaaagaaataaaatagttcagtccattaatcttaaaccaaacatagaattattttctgttttatcttaaatctaattcaatccaatcttctgtacatacccttgatatatatatatgtttcaaaaagggataattacataaggcactattttttgtaanaaaaattatatttttattttacgtttaattttttttttttgacatttttaca

SEQ ID NO: 38424 - DNA, 4999 bp, Cannabis sativa
ctagccagtctttaattgtggcagattcaccagcttcacatgtcttgatttttgatagaaattatcatttcaccatcgatatatgatctagtagcctgagctttgaccgatacatatacttgactattatcagaattccttttcgaagaagtttggtttcgattgaaagttgcatacattcattataaaacacaagtctatatgattactgcaagtgctagacttttcaaacttcccaatgaaagaaaaaactttgactttccttgtcaaagtttcacttgttgttgggtgtgaactatctaagaacattttagggaagttggcactttattttcgagaaaacattttctaattggtttccatgttctctgcagattgctttcacttccattgtttatccggctttagttcttgcatacatgggtcaagctgcatatctgtctcagcaccattttagcgaaaatggttcccaaatcgggttttatgtgtctgtaccaggtaagaagtttaccttgttctttttaaaatattgagtttttatataatactatactaaaagcactgaattttatattccagaaaatataagatggccagtgctcataatagctgtacttgctgccatagtaggaagccaggccattataactggaacattttcaatcattaaacaatgttcagctttgggttgcttcccaagggttaaaatagtccacacctcatccaaattccatggtcagatctatataccagagatcaattggatattaatgatactatgtttggctgttacaattggttttagagacactaagcggttgggaaatgcatcaggtatgatgattttcgacgtattggattagttgaataattattctttatgtttggttctttactcactgatctgcatgaaacaggcttggctgtaattacggttatgctggtcacgacgtgcttaatgtctctagtgattgttttatgctggaaccgaagtgtcttctttgcaattgcctttgtagtcttcttcggtgcaattgaagctctgtacttctctgcttctcttatcaagtttcttgaaggagcttgggtacctgttgccctttctttcatattcttaatcatcatgtatacttggcactatggcactataaaaaaatatgagtttgaaatacataacaaagtttcactcaattggttacttagccttggtcctagcctaggcattgtcagagttcgcgggattggaatcatacaaactgagcttgtttcgggaattccagcaatcttttcccactttgtaaccaatgttccagccttccaccaagtcctggttttcctctgcataaaatctgtacctgtcccacatgtcaaacccgaggagcggtttctcgtggggcaaatcggcccaaaagaatacaggctatacaggtgcattgttagatacgggtatcgtgacattcacaaggatgatgtggaattcgaaaatgatctcatctgtagtatagctgagttcattcgcgagaacagtactactaacagcctttcaaacgaatttatcgaaaaagaagatgagaaaatgacagttgttggaacaaggtcaactgccaaggcgggtgggattcaaataagggaagacaacgaagaacaagaatgtacagttggaacatcaaatcatagagagataacatcaccatcaccaccagctattccaagaaaaaagaaggtgaggtttgttttgccggagagtcccaagattgacacgagtatgagggcagaactcgcagagttgatggaagctaaggaaaccggaatagcttacatattagggaacacttacatgagagcaaatcccggatcaggtataacgaagaggattgcaatcgattatggatacgagttcttgagaagaaacagcagaggagccacttatgatctaaacgtgccccgagcttccactctcgaggtggggatgatctaccatgtttagttttggcctaaaaataaaggaaaaagaagaagaagaaaaaagatagaaacttatagcacaaactgtacatgttgtaatattgtgcaaaatagtgaaaaacccaccaaagtgtgttgatttcaaggtggttgaaagagattgtgcacaggaattgtgggagtcattttggtggttggtgcagggctctctttcttttttgtgtttaatggaagagggaatattttcttaaccagcagccacagacagccatgtaaaaatttagtaatattctattaatttccttagaaaagctgagtcaaactaatatgtttatttgtttattttattcattcattgtggttattgagatttgagagtgttctttccaattttttggagcatatcaaattcaattcaactgtgtcaccaatggacacattagtgaaattatatgagtttgaactcaagacaagacaagatggccaccttagaagaacatgttagaaaacaaagaagctgtgttaatttgttagttttaagtaatgatatgtgtatcaaaatatatactaaagtattggttaaaaaatttgtcacattattactctgataaaattaaaatatattaatagcgcttagcattactacgaagtattatattattattaatgtaattaagtattatattttataaattgtagtgtaataactattatagaatattgctaatgtttagagaatggacaacttgttttatattttggattttttagttcttgtagtttattaagttgttttaatattggtttattaattgaatgatgtattcattgcttataaaaaatgctaagttgacattttcttttgtttaaaaacataagtaaattttctttttaataaattatacaattttattgataagaattagctaaaataataacctgaaattcaattgggatatctcttttattggagacatgaccaagattatatttataaaaacgagtcgtttaattcccagattgtttaacaaaaaaattcaaaaaatcagatgaaaaagattacaacatcacagttaactttaagaatacctatattcagtttcatttaccacttagaagatacaacaatagaaattattgtagcaggtttcttcaatctcgtaacttgagcacttaactattgtgcaaggtacgtaactgcacagtctgcactactaacaactcctttagtcatagagaacttgttattggcgagccatcgaagaacaaagaagaaccaacaacaaaataaaatcaaagtcacatagacaagacacataaaacaatatcatagagataaatattaaaccctaaaaactatgtcacaaagacaagactaatcacggtagtaaaaattgaatcgcaatagcaaaatacaacctcgaccaagttgcacatatgcccaaaaaagacaaataagtcttatcagagagaaaagacaacttcctataattataaatttaggaaggagaatctctatttttttttttttttaatttagttgatgttaaaacataaataaattgatcataactattgtataaataagttatgattagaaaatacatgactatctaaaaatagttattaatataattattgtatattaatatatgtgaaaggttaacataaaaggaaatataaaaaagttcttcaacatagaaaatacaatctatggagtagtaagaacattcataaccactcttaccttcatataattcatatgtattattgaaaaacacaaatattgtataataatttattcttatttcttcttaggttaggctttaatctttatcatgaataaaacgatactcagcaaactcagcaagcttaagtgtatcaggtacatgaggagagacaagagggtgttgctcgaacctctcagcccaatgggctaacaatggtgcagttattgggtcaaataactgcagcccatgtcgaagttgtgaaaccttaatccagcccaataagcttccaaatacaatgtcaataaacccaatttcatttccaccaaagaaagcctttcctttttctttgctacgttcattgaaagttctttctagtagcattatccctctcttgaattgctcaattgtggcttcttttccatccttacctggttttattgcaagacctccaatgattgaactcatctgcatgaactcatttttaattagaaattatttcataaatatttaaaaatggtaaaaactttacgtttagttatttttttaaaaaatatattattttcatattgctgcaatattatactatgttttcatggcaagaaaacaatttccggaaaaaagatgaaagacaacaattcataaaaatatttggttagttgtgaaaaaattaattaacaaatcatatatacatgacatcaattcaatactattattttttacaatttatttgttacaaaatatttgacaattaatttgaaaattaccacttttattaatcaattaatcaaatttaccattaattttatatttaattgaaatatacctatttttatatgtattgtacccaaaatatcctgacgtaagagagtcacatggagagtatcttgaagtgatagggacaaaattagtacaatatttaaaaaaaaaggtaaaaataacagactttaaaaaagatggtaaaaataaaataggacaatataaaatattataaagtataattttctcaatatttgatggcaatcgattaacacagatgactaataaatatttgtagaagttgtaaaagtaaataataactagtacaatataacaaatatgtttgctttttcaatcacacaaagaaacaatttatctaattaccaaatccacgcggttaaatagatatagcaaatattacttgtctcttaattaatttttttttataatatataaaaaataaaaattattaattcaaataatattgatatttgaaaattttgtataacattattaaattttttttttatatgtcaaaatatatatac

SEQ ID NO: 38425 - DNA, 2093 bp, Cannabis sativa
ataacaaatggtcagtattagcttgtattagaatatttataaaggattcaggatcaacaccaatctccgatccgaacccagactcgggactttggacccgaacttgaacccaaacttgggacccaaacccagacccagacctagacccgcacccgaacccgtgacccgaacccagactcggacccaaacctagacccagacccagacctcgaacccagacccggacccggatgccagacctagaccccagacttagacccaaatccaaatttggacccgggtctgggagccaaacttggacccggacccgggaccagacccagacttagaccgggaccgggacttgggacctaggacccaaatctgggatcttgggacaaggactcggacccgaacccggacccgaacccagacccagactcggaccccgacttaggattgaatctatttttagttaaattttgagattgacattcaataagtgattcaattcaattagaatctaacttttatcattcaaatctaattcaattcgattgtaattgaatatcaaattttttataattagattgaatttaataagtttggtaattggaagttgtctatctttacgagtacacattccaaaatataaaaattaattaataaaaaagtgaagagcaattcaattaatgaaaaatggcgggcattgtgatttgggaagatgaatgaaataaaggatagtttggtatattattatttaagcaaaataaagaaggtcccctcttctcttgtattcccaggtgggggtggtcactagtactcaatactcatctccctctctctctctctctctcccaagtcgctttctccttttctctctttttttttttcactgcagagtgttcaattcagttttaaccagaaaagtcagcattgagtgaaactcagtaatacaacaataacacaaattaagaaaaagaattttaaaaaaaatcccaaatcctaaattccaaatgcatgtattgtatattattattgtgatgcataataatactcagacgaatcctcctttgtttatctccttattcttttattcttcttctttttttgtctattaaatctcttttttacaatctctctctctctctctctctgtatcttcaatactttaatccgtcttttctcatcaacttctacccattcttccaaattttgtaactttttgatttcatcaagctattcagctagttccatggaatacccacaaaaaatttcatcgttttgagttaactcagttcactaataaagtcttcgatttcagagcacccatttggtgtttttaaggggcttcactgtagtttttgctggaaccatgaatctgggtttagctccatttgggattctaacatgcattcttctgcttctattgctccaagctcgacctttgttttcgtaccccacaccaatgaactgtacggacacaactaggctatgtacctctttcttggcctttaaaccgatggagaatcaaaccctttccgtgatccagagcatgttcgacgttttgcccggcgacgtgactgttgaaggaaccggcggccggggatacgtgttcattaaaaagaactgttcttgcgcctctactatcaagaagtatgtgactaataccacttttacggtcaaatccagtaatgggttggtgcacgacatggttatggaggcctacaatggcttggctatagtgcccaatacgactaggccggccaagtacggtgctgttgtttcgttgactctgttctgtgggtgttcgagtgggctgtggaactatctgatgagctatgtcatggaaagtggagataccattgaatcgttggcgagtcgattcggtgttagtatggataatattgagaaagttaatgggattgttaatcctaataatgtcactgctggttctcttttttacattcctctggattcaggtcagtttttttttttttttttacttcttctttgttagtactttaaaatttgaatgacaagatttggttttgatgtgagttgtgggttttgagttttgtttatcattgttttacttttgaattggcatgaat

SEQ ID NO: 38426 - DNA, 2562 bp, Cannabis sativa
gttagggattttagaggccgaaggccaacttagggattttgcatgtatttccttttctgtcatttgtattaagtctaatatcagtgtaagtggaggtttactccaacacaaatgtctattaatgatagttaaatattcaaatattaagtacaaaaatctcagaatttgtaactagatcaatttaaattttttttttaaaaaaaacatttataactttattatgagtagaaactaacattgcatgaaaaaacttaatattcaacgcaaatggcaaaatgggtttaggggttgagggttctgttcaaatctcaacaattaaaaatcaaaacataaaattagtattggaaataaaataaaatgtatatataagaaagtgaaaatggctttgatgattctgtgcaaaaatgaaaatggttgatttggtcaatgaccaagaagagaagactttaactaatggttagttaactcgaaagacgaagagtcttaaagaaacgacatccatttccgactcaaacagcaaagatgaaacgtctgaaaaccgtacggagaaattcgccaaaaattcacctaactttttaggtcttgggattcgtatgtggtagaaaaccgtacagagaaattcgccaaaatttcgcctcactttttaccatcttggaatccgtatatagttctattatggacaaaaatcagccttttgttaaaattttccatttttgttaaatttatattccgttttataacatatcaactacatgaaaaacctacaacattgcatgaaaaaactactatactatgagattttggtgtgataacattccaagacttttgctatttggattcattggcttcacatgttctatctggtttatttaataatggcattctttgtctaccgaaactagaagggaattgtccagaagaatcagctagccacaagtgaaaatagcttttttctttcttaatattttggtgtgcatattcacacctttgtaaaaactgtagtcatcattaagttgagttaatgtgcttgtgaaattcttagacacaaaaacctattgaaactgcttaggatatcttagttaaaaggttctgagtttttggagagacaatacttgttgttctgaaaattcattattgaatccagcaggagctgtggtttaaaatggctgcttgtaactctatgacttcatgggtttttaaacaaaaatcaaatcaacaaggccagtcctgatagatgttgtgctgtttactaactttcagtgcatatttcgttttccatgcagataagtaaaaaaagttgttcaaaaccaatagctagtatgataatagtttttatcaacttctccataacattaacctaacatttttcaaacccaatggcaaaactgttatggttatttttctccctaaccattcagcaccaaatattgatatttgtttcgagaattaatgtttggaccggtctttcttccaattactagtgtttatttaggcccttaacgagatgcgtttgacctcctcaatgactacaagcttgggatttagaaacaataacaatattccgactcttgtaagttataaatttaatcaacctcaaggaagaagaataacttaccttgttcaaggttccattctcaagtttcagagaaaaaccaaataagaataataaaaacctagatcaatttaaataaataaaaaatcatttataactttttgaacaatgaactttcataaaccagtaagatggttcaaatctcagccattaaaaaacaaaacacaaaacatgaaatttgtattggaaataaaaccaaattgttttttcagactttgaatcagagctgatctgctttaatattgagcaattttgaaggaaaacacaaaacaataaattaccgtatatataactaatagagaaaaaatttaggtcgtaaccaggccctctaatcaatagccgaagcatcaaagagtgcagacatgcggaccttagtttaatttccgtgcacactaccatgcttccttcatcctttatcaagttccagagcatcggcttattgtgcacggttccattcactaatcgaaaactataactaaaatgttaagacagaatcaaagactaaatgataaacaagaaatgaaatctaaattgaagaacagtaacaaaagaagaatgaaaatctggctggctgctgcttttctcagcaccgtccgccaccgtaatatttctgaactttctccaatcctttatttatacacgaaaagggagtggtcgactagggtttcagtccatagcaaatacgtttcgaaattaccgaaaacccattttcttctctcctaaataatagaactaccaaacatttgtaatgggctttttatttcgggcctaagcccacaatgggctctatctccagttttgtacaagtagaaattagagaaaattacctctacaagcgaactttttaaaatatttacaaaaatacaccctaatgtcttaactaaccttataacgaatttcttgtcaataaaatggcacacctgtaccgagaatcttcttactcttttctt

SEQ ID NO: 38427 - DNA, 2582 bp, Cannabis sativa
tacccggtgtttccccttacagatcacgggactactgactgtcacagtttcctccgctcactgctaacatggctactctcggtaacaacagctccattcctgcacctaacaacaccagaacaattcccctagagctcaagccaaaaacagagctcgatagaattaagaactagtcttcttcaaccataatctttcagtttgtctcaatgatgataacttccttttgtggaagcagtaggttcttgcagtaatcagaggaaatagattgctaagattcatcaaggagccacctccggaagaatttctgaacaatgaagatcgtctgcagaatggagtctatttagtctatggcgattgggaagtacaagatcagttactcgtctcctgggttctatcttcgatgactgaaagcctccccactcgcatggttggctgcaactcagctcgacaaatttggaaatctctggaaaaaaacacttaacattacaagtttcttccatgatccttgagtttcgtatgaagctgtagaatttgaagaaaggaaatttgagccttaatgattatcagctgaacgttaaacaggttgttaatctgctggcatccgtaggagaagttataagcgatcatgatcatgttgcttctatcttctaaggccacctgagtgaatacgatacctttgttatttcttcaaacactcgaattgagaactacacggttggtgaaatcaaggctttgctattggcatctgaatcaagaatcgagaatcagggaaggagcttgaagctagtgccaacttaactgtgaaagatcaagatccattattgcaggctaatattgcttttagaagattcagacaacaatagatgcttggcagaggaaattttcagttcaatgcaagtcagtttggctatagatttccaaattgaggtaatgaattctctcagaattttcattcaaagtttggagctagaggcaactttaatagtgctagaggtggtaaatctggtatgtatgtgaataatagagttcaatgtcaactttgccttcgatttggacatactgcattcgactgtttctatcgatttgataaagcattcacatgacctgctcaaggtgcaagcagtggcacacagtcatctcaacaatcacaacaacctcaggctaatctcactacgatagaaggattcaatgacaacaattggtatccagattctggagccaccaactgtactttacaggctcaaaacttagctaactgctatgactatgctggacaagatcaaatgcatgttgggaatggttcaagtttgtctataaaatatattggtcaatcttttatctttccaaggcattcatctcacccacttgtgctcaataatctccttcatgtacctaaaattacaaaaaaccttattagtgtgtcaaattttgcaaaagataataatgtatattttgaatttcatgttgatatgtgttttgtcaaagatgagatgattcatactactttgttgatggggagacacaagaatggcctatatacttttgatgtctcacatgttggacctgtctcaccaagtcttgatcctgatcaaagtatcaaagacaaaaaatctctctccccaaaaaccagcaactcaagttgtcagtctgaaatagagagcacatacattgctatactacacaattccacaatcagtgtttcgagttgtatcaagtgtaattatagtgttcaaaatgattttactttgtggcataatagattaggacattcatctgagaaaattgtacaaactgtcctacaatcatgtaacatgcctgtaagcaataaaatttctcatttttctgtatgtttagcttgttgtcttggtaagattcacaagtttccctttcctagagcctcagctactgtcatttcagaaccctcacagttggttgtgtctgatctttggggtccatctcatgtaaattcatttaatagctacaaatactacattcactttgttgatgtctattctaggtttacatggatctatctcttgaaacaaaaatcagatgcctttaaaaccttcttgcacttcaagtctgaagctgaacttcaacttggtaggtctcttaaaaccctacagacagagtggggtggggaatttagatcattcactaaatccctgacagaaaatggtgtgcatcacagacactcttgcctaacaacccatcaacaaaatggcctagctgaaaggaagcataggcacattgttgaaaatggcctaacccaccttgatcaagcctcactcccacttaagttttgggatgaagctgttaggactgcagtgtatattcacaacaggctccctacaccattacttaaccacaagtcacctctggaagtgttgcttaacaccaaacctcactattcaactttcaaaacccttggttgtaagtgcttccctaatatcagaccatataatataacaagcataagcttgaattcaggtctgccccttgcatatttttaggctatagcctaaatcacaaatgatataagtgccttgacaccaatgggagactctatatttcgagggatg

SEQ ID NO: 38428 - DNA, 2443 bp, Cannabis sativa
tgatataaagttatgatgtgagaatgagtaaagagtattataggatgaaattaaggaaaggaagattttagacttttgatatttgatatgtatcattaataatattaataaaggtagatttatattacgaaaataaatcatcatttttattcatgtattagtgcacaaatgtatgatcatccaagctgtactatcttgtatatctattatctaccccttcttatatataaaatgtatcttttttatttaaaaaaatcgtcctccttgtaataaataatagaggaattattttatacactgtttttttaattttttttttttcaaattttcgatttggttttctcccgttgtttctatatgtgttgttatataatttttttgttgccatttaatttactgtcctaattgcaataaagtttctatataattgtttggaagtataaaaataaagaaacctctaaataatatatatcaatgtttgagatctctgagtggacaataaaactagaatttaatcacagaaattatacttgtgaacatgttatttatttaggtaatcattataattgagtttgtgatattatgttctatttgatcaattgattatatttcattggtttagctcaggaatgtataaaactcgaaccatgtatagtttagtgtgtaggacccaaatttggtaggccaattttgttctatttgtattatatatcattcatccaatcaatgagttggtagattgattggacaatagaatcaaatctataaataaatacaaattacaaactggtcaaccagatcaataggatcagaaatctttgtgtctaaattgtatgtttcatctttccttccactctttgatatttgacaaactatcaaggtatatatttttaatatttttggtggtgttttgataaattgcaatttattattattatttatttatttttagaataaacatatcttatagaacgcttgcaataatcaatttgaattcctattttgtcatcgtaaattatcaaaatatttttaactttttggagagatttctcatataactatatattatataccatcgtataaaataataaaaataaattatatctatatctactaaaaatactaaaaaatattaatagttagtcatgaaattaatacatacagtcattaaaaaaaaaatacatacagtcattacccaatgattaaatagaaaccaaataatttgatcaaagtcacataccatgtcttaagaaaattaaatctaatggaaaaaaaaaaaaaagaccatagtttaaattaacctatgtgttagtgtgacatagctatataccctatggtagctagacaactacgtactcacttaccctagaataagaatgatatggtagctagctaatgttggaatttgaccataattaaaactcaattttgtttctattctatattttgtcaggtgaatatttgtggggtttgactcttaattaatatagttatatttagtatatgaagctagagttatatatagatacaagttcgaatacattaattagtaacttctaattgattaatttattttatatatgaaagaatttattgataaataatatatgcaggtgttttaattaggtgtgaacaactgaaaaaaaaaatatttataaataatatataatccagctctatatattcttcaaccacacctattatgtacaccacctttctctaatttattaatatttaaattcactaatcactcttttaaattttctcactaaccacatttttcttttctataagtatccacttactataatataaacgacaaatataatatttttaagtggattataacttcattattctatttatttgtttccaacctatagtataagaaaaaagaaattgtgcttacttcgtggtattattgaatgggttcactttgatttgttaaattaattggggagtactacatatgctaatctatatggatgatatgatcattaaacatgcatcttttatctaacttttctttgaaaacaaaataaattaatgatgcatttactgattaattttggtaagaagattaagtaaattattggcaggatatccatgaagcaagtcttatcttatattattattttttaaattaaattttagcataaattaaatcatgatttttttttttcactatacatatattattctcttattacttgaaccaaataaaattgcattctcaagaaagagaacaaaatttgattagtaatatttttaagtgttgtttgttaattataagtaaagcttaattactctttcttcaatgaaattttcattttattcaaaaaaaaaaaatatattaaccaaaataaagcttaattactcttttttcaataaaattttcattttatccaaaaataaataaataaataaataaaatacacacaat

SEQ ID NO: 38429 - DNA, 4977 bp, Cannabis sativa
ataaatatttttatatacacttaagtggattctgaacccttaataatatctccaaatatcactaaaaatatctgttactgtccttttactgtcatttttaccgttgaaatattttattttattttattaacaaaaacctcaccattttcggaacaaggttagagttgtaatagcttagattaaataagtattttcttcgatctcacgcaattcccgtgagttcgacctcgttcttcacaatctccatactacaataaagattcgtgctcttgcgagttgataaatgtaaaacgtaccgctttcggtacccaacaaatttttggcgctgttgccggggaactgtaagaagaaaaactactttaatccagattggtataattcttctactagttattatattatacatattatattacgtttcttaataatgaagtaaaatttatatatatatacagttatatattattattataattataaaaaaaataaaaaaataaaaactataaagaaagtgtaacttatatatatatataaagttattatatattattattattaataaaacttttttttttttgaaaaagaggaatctttattcaaaacaagcaagatacacacaaaggcaagaggccacaacaacaaaccagcggcagctactacaaccagcagccccacaacaaaagctaccacctattaattacattaagtaaataattgttcttttggaaagctttaaaaggccccttgctcaagattctcaaccgaacctcctttctaatattcaacctcaaatgacttggagcagtacaatacaaataaaaaatgtatctatttctattcttccacaagttatacaaagtcgtagccaagattgcattaatgattcgattttggagattcttcctcccttttctacacatttccaacacatcctcaatagaattaggccattgatactctccaagccaagaagtgtttgcatccattacctgtttagcaaaggaacaagtaaaaaatagatggtcatgagtttcgaactctacctcacaaactgggcataaagttcttgagatggtcataatctgagaaaggaaatctctaggaagaagctgggtgttagctatttgcgaggataggaacctgtgtttaggcacaatacgtttatcccaaactgctctagcataatcaaccttgtccacctccaccaacaagtcatagtacattttagctctaagcttattcccttttaccgcaagacacattctagcttcatccattgtttctcgaaggctaagaatctttttgaagtaccagctgtcatccatcttctgtgggtaactccaaatgtcatactctttcagataacctgagttgatccgtttaacccataggcaatcctatttactagcaagagcccaaaataatttagccaagagagccttgttctattttttacattctcgaaacccaacccctccaagtttttagggagacaacccttttcccaagaagctcggtaaagcttactcctattccagttattccccaaagataatcccgacagctcttatctatggcagccgtaatctttgaaggaatgatgaagatactcatccagaagttccttattctcaggagcactgagtgaatcaattgagcatgacctggaaaggataaatttatgctagcccagtagttaagattcttatttactttatccaggataataccacaatcagttaccttccactttgttggccgaagattcaccccaaggtatttgagcggaaagctaccttcttcaatttgaactaaatcaaggatcttggatttgacttcctcactaacccctccaaagtaaatatgacactttgaagtattagctgacaaacctgtagcatcacaaaacttatggaaagcttcaaaagtaagcctcaccgaattgtagttccctttgcagaagataacaagatcatcagcgaagcacaagttagtcgatctcagatgcttacataatggatggaagccataacccttcttatctgcatgaaaacttagcaaccttgtgaggtagtccataatcaaaataaagagtaacagtgacattggatctccttgacgaagcccctttttccctttgaagctgccttggattcttccatttatcagtagatggtaagtggttccccttagacacatcattatccacaggatgaatctagaggggaaacaaagcatccgaagtaaatcttctacaaactcctagtcaaccgtatcttaagccttgctgagatcaatttttatgatgcatctagtagagacattctttcttgtataaccctttagcagatcctggaaaatcatgatgttatgcgccaacaccctattctttatgaacacacctttattatcactaactatcgaggggagtacttctgatagtctagaatacatcatcttcaaaatgcacttgtagacagtgttacagtaagcaatcgatctgtaatcctttgttgaagaaggattttcaattttggggatcaaagaaaatacagtctcattcaatgaatttggcaacttaccattaacaaagaaatctaacaccgctttagacacatcattaccaattttatcccataagtctttgtagaaaccatacccgaacccatccaatcctgggctctttgttgagtgaatgctgaaaagagctttgttgacatcccccttgttaaaaggcttaatcaagtttttttttttgctccaaatccaggcatttactccgctataaacaagccccatcaatcaagctagaagctgaacttttgctgcccataaagttttcaaagttcttgacaaagtgtttaaccacttcctcaaaatcatcaatgatagtgtccccctccatgtacgttgtgatctcgttttcaagtcttcttttcctcataaccgcatgaaaataaattgtattctcatcactaaatttaatccaattaaccttgctttgctgtctaaggttctgctgaaatttgtcctttgctgcctgaaacctctgttgtttgaccgaaacttcaagttgctgctgtctgtcatttggattcaaagctgctgcttcctggattttacaataatcctctttagccttcctgtaatctgttataacatcccccacctcctttctgttgaaattttttagagcatgtttcactctaaaaagtctctgcatcaaactatcaagaccacaaccagccacttttttgttccattgttccataacagtgctagcaaagccattataagaaagacaatcgtttccaaatcgaaagggtttaacccctatattacatttcacttcatttcggattaagcgaagacaatgatccacaatgacctcccacttaaagcaagcatctgagttaggaaaattattcaaccagatactatttataaacactctatctagtttagaatatatcctgtcccccacctcatgctttttagtccaagtgtagaaagagctcgagcttttaaattcctcaacttgacccaaggcaagccaagattgagcatccacaatgtcattattgcggataggtcttccaccgcatatgtcatgaaaactaaacattgcattaaagtcaccaaaaatgatccacgaatctttcatcgtcccaatactagcaaggctctcccagaggcttttacgatcctccatagagttacttctatagacaaccgtgaccataaatccatgtttctgcccagtaaactttactttgcaatgcaccatctgagcattttcacttattatatccacccccacaagcttatccttccatattaacaaaatcctactagaaataagactgctagagtaacaattccaattcagaaaattatctagcatcatttcatttattttctcatgtttaactttagtctcaaacaaagcaccaaagcctattttattcaatctacaaacatcaagaatagctttttgattgtccttcttattcatgcctcttacattccacctaatcatgttattttcttccaccattcatagattttgaatttggaccctcttcaactgctgcagcaagcacaacagcatacccattattagtgctctttactttttgatcaacctttgtcacctttgtttccacttgtctccaagcaattcttttaggagtaatccaactaccaccagtagcattagtagtcgacctcccctccatttctcaattggtctagcttgtaatacctgaacagcaacaacttttgcgacctcttccctgttttcctgttctgaattattccctggattgtccactaatggatgatcaatgttcatggtctcctttgtctcttttccagtagctggtttcttcttccaaactactctcttctctttattgcaattagccactatatggcctagattcgcacaagctgaacactttgatgggagccattcgtattcaattatttgctccaccaattgctttctttcattaatgaatgaaatggtttaaggaggagcatccaaaatctcactttccacaagtatacgagaaaatttcaccattgaacgttcttgagtcaccttatcgatcatgatcagttttcaaatagtgctaattaaagcacttagattattcttgccccaatattgtaaccccaatccattcaaccgaatccaaaccatcataaaattaatcatcctcatcgaatcaatatctgtagtccaaggcctaagaacaaccggctttttaccaaaatttataacccccagcctccagaataagatctcgtgtggcctcatccccgaaattcaccaaagtacatccagaatgcattctaacaactttctcaatgcctaaatttcctcaaattctcttaacaaaaccctcaaatactttaaacgaagggttggctcccaaaacaaagctgttggaagttattttaccaggaact

SEQ ID NO: 38430 - DNA, 2236 bp, Cannabis sativa
  modified_base (1188)..(1192): a, c, t, g, unknown or other
tctcgatcatagtgccagcaccactcatcttctgcctctcgcctcgctaatggaatagacagaattatgtccacatccattagccaaaaaacctgttgaagcttcctcacatcccaagtaccagagggaataataaattcattcacccgatagtcattattaatcctcttcgtaacaggttgaaaagaccttgaacgagagagccatgtgtccttgaaagctctaacttgcgatccatctctaatggtcctccgaagaccgcatttaagcaaattcattcctcagatcaaactcgaccaaagatccatataaatgatttaattttgttttttaatctaaatgttcatttaaattataaataaaaattattcatatttcataattaataataataacatattatattttaaaaaaacattttaagtgatctacaacacaacaaaacattttaaaagtaccattacgaatgatgtagaatataatttataatactaaatatatctttttctaccaaatataatataacaatttaaacttaaataaaaaaaacttattattaattattaataataatatcatacaccccaaatcttaaaaaatctcaatctgtccaacactttttcttctctccgacaaaaaatacagtaattatctatgagtttaattatgtttattgtttaacaaacatgtattgattcttgttttagtcactagaccacgttaataaataatttaattcattaaaaaaatatattaaataaagtattcaaaaacatttggctaagtaggaccaaatggcaccactaatgattaatgtctttaataacagcccttctggaagggcattatagtaaaaccaagttgtgggcttgactgggccagtagtgtgtgtgactactagtattaggcgttaggggtattttcgtacttttaatcttacgaatagactagctagcgaaattgatctcaaccaatgattgagacacgtgtaaattttgctgacgtggcggtatctaaaagagattgaagaatctaaaagtgcgctaggctagttttcagtggacaagagaagtgggccaggcccagttaagtatgggccccatcttattgattgaggatctgcgtttactgattcgtccagtgtggggccgaaggcttgtgtcttcattattttattattattattannnnnattattattattattatcagttttgcatttaacaagatataaacttttttcttatctcaaaaaaaaaaaaaaaaaaaaaagatataagtttttttcacattttttttttagttttttctggttggaaatactttatttatggtaattattgtttgtaatttttataatttttagttattgatgtttattttagttatttaaaaaaataaatttacaataatatttatttatttattatttttatgtttcatcccactaatgtaaagtttatttatgtacagttaaaatactaatgtcccttcaagcttttagagaaaggataacaagttttaaaataaattgcgggacgctgatgacattgaattgcaatatgttaccaagattttacaactgtgatttatttttcaatgaagtttccctactctaatgattttaagatcattgttagaagttttgacaagtttgtcattcagatttccaagagtgtccctaatctgtgttgttcatggattagttgtgcatattgttcggatggatgagcaacttgtttagctagatatgatgatccagttttttgttggatgtatagaagtatcctgataatcatgacatgcatagtatttatttgatgaacatgatcataactagcttatataatgttattatatttacaatgaaaatatagtagagtttacttttttctatggcataaataaataatgtaaaaaaatatgagattaaaaaataattaaattttaaaaaatagaaaaaaaaacaataaataaatttgataaaacttgtaataataaggttcgccagaaaagtcgtcgggaaggtcaccggcgacgaaaaagttatctaaaaagttagtgtcgctgaaaaaattaccggaaagtcacaatcactggaaaagtcactatctcctgaaaaagtcattaaaaaagtcaccagaagtaaatgtctcagatataaacaaaaaatagaactggttctaacataatgaataaaaacaaataattcaaccggttctgtaacataatgaat

SEQ ID NO: 38431 - DNA, 5499 bp, Cannabis sativa
gtgaggtcgatcccacgagaattgtagttaagtacattaaaattaaactcttacttcaatttggttgaataaaatttaagagaaaaattaaactaggaaacaataaggaacggtaaaaatcatggaagcaagtaaattaatatgaaaattcacaatgaataaatgttagggctttcaattttaattgtatctactgattaaggcctaatatgattatcttcctattaccaatttctatataatagcaggttttctaaggtaaaccatataagttatctaaaccatataagtactctcgtgctatatcgaaattcagttctatttcactatagcataattgacattcagttatcagatctcgcatcaaaatcataaagcaattaattgatgaccatgcaattaaaagtaattaagtacgaatgaaataaaatacatagaaatttaaggaaaataaagtcatattagaaccataaatcaatattaaaaaatctccatctagaccataattaactatttagctactcatgttcattgttgtaaattcacacatattaattttagagaagagaagaaaatagagaaaaagagaatgttgaaaccctctgaaaaatgcctccactattggcttcggtctccaaaattcgtactcagttgactgcttttatttccttctcaatttcctcttcaacactattgaagtccacttcttttatagccaaagtttttttagagaaataaaaaacgctgaaaaaacctattttggccataactctctcgatattgttcggaattggacaattcaagatgttccagaaagataaaagagagatctagaatcctaaatcctaaaccttaatctgatcaaatcatagtcgaattcaagcttaaagtttcagctttttttttttttgcacaattttcactattttatagttcatctttttgtgagattttttttatcttttcttccatcttattcctatgaaattttctaatcttcttctattttaaatctacaaaaataaaagacaaaaactgtaaaattgctccaaacacaagtgaaattaaattaaaaatacacaaaaattaacctaaaaataatactaaaaacaacctaacacctgttaaaacttaagatagaaaaaacattggttttttctttcaatgaaaataccaaaatgttgaccttgcttttagccaacaacagtgattcaattattaaaccattaatgatataataaaaagagagcaaaaacgataaagtaataaagaacactgaattttgaagaggtttggccccgtgagggtgggaatagcctacaacccttatattgtattaacttgagagatagaaagaagtgttttcctctctaaaagctctttcaactgatctctgaccaattctcttagatcaatattttctctctataatctctctctagcaattctttcgatccccctcatagtgaggctaggccactatttatagggatataatacatgagggatggtttcccatttcttacaatgtataaaatatgaaattacatttattacataatcacgatacacaaaatagaaaactagaacaggtttacatatttctctaactcaatcctacgattatagggattgtcctcgtaccaagactttacaagatcattgaagtaattaagtccttgtaagtagctcggcaagcaagatttctacctggtcggatgctctgtctttcactctggtcaattaatcaataattaaagatgatgattaattatacagaagatgttcgggacatttacctccacttaggtaccaaaaatgcaggacatgtgtcgcttggtccttctaacatgtcaatgtgtaaaaaaatagatcactaacgttgtatatggttgaacctctgcattattgtgcattaaaactaattgagcttgatctaactctgccttagatacaataaccattgttcctttccctcgcaatcctttatcaaactcatctgagcaaatttctgggtttagtgattccaattgtatcaactccagccataacactcaaccataccagtttccggtcgatgatggttacacacatagcttttcagcactttcatattcctttcaaatggatacatccttcttgcccaaactagcccacagagctttgcctctcacactaaatgaatcatcaaatgtaccatgatgtcaaataataatggtggaaaatagctttcaaggtaacataaagtattgactacatcctcaagtaatgcatccaacttgctcatttctaattctttcccgcctagttgattgaagaaaatgcaaaacatgagtcaaacactctcgaacctttttgggtaagaccggtcggatgacgattggaagaaaatattgcattgacgcatggcaatcgtttaatttcatacccattagcttcatttcagctgtattaactaagtttttaatgttagaaaagtatccattaggtactttcatatctaataataatttgcaaataatttctttatctttccttgacaaagtgtaacatacaggaggcaaacaaaagtgtttacctttctgttcaagtgccaaagattgtctaattctcatttcaacaagatctacacgacttgataaaccatctttagttttgccagaaatatgatgcgaggtaccgataatactgtcacacacatttttttctatatgcataacatctaaacaatgtcgaaccattagatctttccagtatggaagacggaaaaaaaatttgactttctttaaaaataattatctgttttccaaataaaaataaattaatgatttggcaaaactaatatatatttagcacaataattttattaactttataaatccaaaagaaacgaattaatgcttaggagttatggaaatcttctctatgttctcatatgtctagcaaaaaagtccttgttgtcaagtgaggataattaatcaaaaaaatcaaatggaaaaaaaaaataaaaataaaatatacttacacccaaaaagtcaataagattctcataataagatctataaaatcttttataataatcttgtctaaaagcagtattaggccaataggtttaagtactaatgttttctaaaaagtaacatcaattgtacgaataaacaagtttaaatagccttttttttttcttatcatcaattatacatgtaatgtgaattagattcatattaaattagtttttaagatttataactactcataagaatcacaaattcaaacaagaacatgaattaaaactttactccaaaaaaatttaccagattaaattccaaaaaggaaaaaaaaggatgctgaagttatgatttcttggtactagatgtataatattgatgctttctacaaagggctgtcatcattgtttgattatattgcatgaatttcggacacttaaaattatgactgtgtccatagtaaaagtaccaatgagctgtattttggtagagctttctcaactactaacagggtaaatattttctcattttatcatatatagttaataaaaataaaaaaaaaataaaataaaataaaaaaaactttacacttatatgatttcttctattatttaaaaaaaaaaaaaaaaaaccttttaccatttttttttttcaaacatcaacctgacttaatttctttatttatttattttattatttttctgttaataacatgacatcaacatatttcttttattttattttatttatttttaaagaactttataataattttcaacttcatatacttatttatctttctttttcttttttcaagtttaaaaagattaatttcactacataaaaaattgtttggttttaagagttacatcattgttattttttttaagatgatcattttaatgtgtgagaagtatatattttattcaccatcaccaaagaagataatgagagtcaaatgtaacaatttagtttcttttatattttcttaacaaataagtaattaatttttaaacttaaacaaaacaaaatttaatgtatcaacaacttgataggttactaaaaagtatttttcttattttatctttagatattaaaagattaaattataaataaactaatttttataacattattttgatagaattatgaaataacttgtaaatacactaaatattatcttgaacatcatataaattatattttttaaaaaaaattatacattaaaagttagataaaattaaatacactaaccaattcaataagttactaaaaaatatttttatatttaataattaaaataactaaattgtagttttcatgtacttattttataaaacacttttaatatattttaaaattagaaattattacatagaaaatataaattgatacttaatttacaaaaatacctctagaaggtaacgacaatatttatacctattatgtgattttactttccaaaatatcacttacactatcacttacacaatcagacgatggttgtatggtggttgctgtgtggttgcagggtggttgcatccgaagaatgtttcaatcagacgatagatgcagggtggttcctgggtggttggccaaaggttgcatcagacgaaggtttcaatcagacaaaagtttctgggtggttgctaggtggttggctgaatgttgcatcaaacgaaggttacattattcagacgagataactgttagcaaaatgtttatgcaactgtaatggaactgtaatgcaactgtttaaaaattagaacaatgttttcatgtacgtaactctttctacatgtctcttaatgatttaatatgaacaaattcaccattagaaatttgcaaaacaacaaaaatacatcaggataaatattttgctatagtattgatataattttttttggattatacttgagttggattgttgggaactccagttcaattatctgcctttcatagatctaaaaattaaagtcaggacattagttttatgcaaaataaactagattttttgttgaattttagtttcgtagtagtttttctacacttttttatgtattcaaaacaacccctgttttgattaattctagtcgtcttctcaggtgaagtcgccgaaattaatggtgattctctttctggttgaattttcgtttcggttgggttgggttgggttgctgtatggttgcgtgatggttgcgcgatagttgcgtaggaagcatggatcctaagttgaaagtgtgtgtaagtggtatttgtgtaattttttttatttgggctatatatttgtttattggctagcagaaagtatttttgtaatattgttactttttttttgttaaaactgaaaaaaacccttaaaattacttataaagaaactaatagtatcttaagtttatatttttaaaaaatttaaaataaaataaaaaattatataaattttgctaataagttatatcataatttaattatactttaatgtaatttatta

SEQ ID NO: 38432 - DNA, 1682 bp, Cannabis sativa
ggcgttgggatgtcaacctgggcattagatatcaacttggcactgagacctaaactgcctttagtaaaacagcgataactcactcaatttttatctgattgatgttattcaacttgcgttttaaagttatttaaacgctttagcaagtcatctctcctaccccagacgtgattatgaagctatcgtcatcaaaattcacctcaagggggttacgaaaataagctctagataacccgcagcgggacctgtcgggcaccaaaaattggccatcactaccagaagctaattatcaccgttaaatcatcatcaacggtagaaaacatttgatttgattttttttttctattttcgtgggcctctttgacctataaaaagaaagctctcttagctcattttttatatttagaaaattacccacaagatcatagcttctctctctagagtttagagtttctaatacttagtctattactgtggttactatttcgtgaaaaataaaaactcgaagtagatgtaggctcgttactatcgcaatataggggtgacctactataaattctccgtatctctctaaattagttacttaaaattattaattatattgccaatctagaaagtttatattatttatttttcagcctcaacaatgtgatatatttccatcgatatccatgggtattttaatgctagtatatttctcaattttttttaatttgtgtcttaaaaaattaacgtaaaaattttgaaagtatcactatcatatttaataaataaattatatatatgtttttttacttgaaataaataaattatattatatgtataaaaaaattaaactttttgtttgttttttattgaactctctactttaataatgctaattttaaaaagaaaataagcaaaataccatatcaatcatgctaaatcaactgttggcatatgatataagaattcatgcctaatagagatgatttggtcagaaaaattaaatgcccaaatgagttgcgggaaaaaaaaaaaaaccttcaaattttgttacaaaatgtattatcactattaagaaagaaaaaatataagataaagatgcaattatggcacaaccacttgggtagaactcactcccaaaagatagcctaagaaaggagagtgtcgaagtagttttatactactaacttagccaatgtaggatcctaacattacacaccccctagagccgacatccacggtgggagcataatccacaaatcatccttttcgcaacgtcagtcccatttacgagtgtattgctctgataccactttgttacataacagatattccacaaaagtaaataagaagaagaagaataagaagaattttattgactcagttaaaaaatctcagttacaggtttccagcagttcgagtcgcttggatcatttcgagagtatcaatattcaatttacaatttatccacacgtaaaaatgaccttaaatttctactcttatacaacaagaaaaatttaaaatttcttcttcctataagtaccacgttaactttttctggcacattaacactatttattaaaaaaaatttaaagtttttaagtagactataataagcggcgtaacaaatcaaaactaatattttaaaaataaaattctcaagtttctaaacaattcacctaaacttcactccaccc

SEQ ID NO: 38433 - DNA, 1717 bp, Cannabis sativa
aaagaggaaaaaaaaatttgggcccctaggctgggtgggccctaggtacaggcctagcccgcctatgcccaatgaccgggcctgtaaatcaatgatgtaaaaagtttaataaaagttaaaaatttataataaatgatattaaagtaaataaaaaaaaattattataaactaaatttgataaaaattttaacatgggacaaatttgacacaagtgtgtagctcatctaatgggattgctacgggatgaggaaaggtagtcattataattccaacgcccgcgtttaatgtccaaaaacttgtcaagtcttatgtccccatccaaatcgccacgttgcccagcggagtccccaatatcagcacacacacaccccatataatatcatagaaaataaatatttcttaaaaaataaaattgtatttcaatacattattttacgaaaaacacaaaacagagctaagtagtacaaatagcaattatttcatcacctgttttcttaccatttctttagtttttagaaaattttataattaaaatattaaacatacaaaaaattattaatagaatatattcacataaagaaacttaataaatatgatgattaagtattgtttatttttagtagacacgagtttgtaataggaacaataagtttatttttatgtcaatctgattcataaaagagcactctcattagtttttttactttattttttaaaatttttcacaaagacttattttttatattacacatttatactaaatcataactcaaattctttatatttatcattatattattaaaatattatatttttaaatatataatattgattgattaaagaaaaatagaaaaaagaataaagaataactaagtataaaataaataaataatgggagagagaatgtcaaaagtgacctaaaaaaactatgagtaaacaacaacacttaaagttttaaatttgtaagtgatataaacttaatatttcttttaagtagcataagtttcaaaaaaaaagtacctaatatttataaaactgaaatttttctttaattttatcagtataagctctgttatggtttttaacaaaacacatataaagtccaaattttatattattggatttagatataaacacgtagtattagttacttttaataaattcaaaacggagtttgtattaataaaattgaaagaaaattaaagttttacaaatattggatacttatgccgctaaaaataaatattaaatttataccacttacaactttaaaatttgaagtatttatgttgctatttacttaaaaactatgaaaaataaaatgaatacatttagcgatacaatttttaaaggtagtgcatatgtactttacatatacatataaaagaagttgatgaaagtaacttttatttttattattgtcttttttagataatattacagaaaaatttaaaaaatttgagataaatattcgtctaaatatactctcttatactagttacaaaaaatgtttttttttttaaggagacaaaaatttgtaaaacggaaaatgtaacgtttaattaagttataagcttttttttgcttttagcaagctacaaatggggatgctatgcgtatatagggtaaatagcggcataagtacccaaaattttatatttataagcggtataaacctaatgtttatttttagtgcataagtacccaatgtttgtaa

SEQ ID NO: 38434 - DNA, 2420 bp, Cannabis sativa
tttatttattattttttttaataatgtgttgtagcacgactctgctattggtatcgtattagagtcatatttgtttatggcgaggtcttttagtcttccctccagtagggtcgtttgtgttctcttttacatggatggctcaagtcgtttccgtatggttgacacagctaccacttaccatattcagatatggggattctcggattgttattgactcatgatttattattcgatctttcatcaaaattatcataggcatggttgattttttattattttagtttaaataatgggattgtcgttatttaattttcattagaagatctttatgtttgatttgtgatgtgttcattcattatagaaatttagcactcactattacaaaggtggtttttaatgtcggttttgacgttagtaaatttgaatagccgacgcaattaatcaggattagaattttgcatcggctgtgcttcgacgcaatgtgtaggtggggaagaccatcatgtgttggaagtttgatgtattgtatggtgtgtatgaaatctaatttggcttatggaataagcatggtaagtaagttcatcttagatcgagggaatgaacactggtctattgttaagtggatcttggggtaccataaaggtacaatggtcttgggactagtgtactacaacaacaaaaatattgagacagaagtcacaaggtttgtggactcgaattatgctaggagcagtgacactaggaggtccatagcaggttatgctggaagtcaaatcttcaaaaggtggttgcactatcctccacagaagttgaatatatggcagccactgagacaataaaagaaacaatctggctaagggattatacaactgaattcggattcaattctgaagacattttagtacattgtgataaccaaattgtactacacttgatgaaaaacccagactcatagtatatagacatcaaggggaggttcaagttaagaagattgagacaaaagaaaatataacaaatatgctccctaggtataaacctctagccaagtttagactaagtctaaacttcctaagcatacttagttgttgctgagattactaagaccaagaacagtcattactcaacagggcaaaagtacttgacatatgaccaaggtggatggttgttgttattggacacatgttaagacaactaactacctagatggaactaacttactgttagttatgacagttagtactcgagttgagccaaatgctattttatacccaagccttagagtcatttgtaacacccaaaaaaatcagattcgagtacgagagagttagagtgagagttgaggagggttgttaatgtcatggtgtgtgtgtctgatcaccattgacacaagtgaggttttgttgtaaagaagctttgcttcttgggtgatatgttgaacaaattgtacaaaagtgtattgggttctctcatctgctattagctcaataaagatcttaaaaccttatttttggccaagaagtaggtaagagtgattcatcaccactccttgttcgaatcttgtaattgttgtgtatttctttttatgttattctatttttgtttgttcattcatttttaaatttgtctacatgttttacttttgatttcttggttgagttttattcttgaagagttgtatttcacaacaattattgtatttaaaagaataaattattattatgttagagaaacactatatatacaacttaaattatatataatttattatacttattatatgtaaattatattttttttagttaaataagacataaatgtattaaattgttcataaatatgtcataataataagattgtaaacatgttatgcttgttataaatatgtaaataagaataagtaaacaaaaattaagcatgatcccttctataaatgggttaaataggtcgggtccggtcaacttgtttattgatttaggttttagttttgacacgattaataaataagttgacatttactcatatacttaagcctcgacatgagatgaacatacctacgaacacgaattgccacccctaattttgtaattaaattgaattggttctaatcatgcccaatcctaatcaaatgcactataaataccaaaaccttataaatgtgattttaattctttttaggtttataaaatatctatagattttcattctatcatataaccgaaggttttatctctcgttctcttccctaaccctagccagtcgtcgtgtcaggttcttctttttctctgaccaaggcgcgtcgaccctccactgggtttggatgtggctctagttggggttattaatttcacacagtaaggcgtttcagattctctgttctcttccttgcttggaatggcttttggttagtgtctctttgcttt

SEQ ID NO: 38435 - DNA, 2614 bp, Cannabis sativa
aaagaaagaaaaaccttatttcgaagtaataggcaagaggagcgacacaaatagcagcgacgacatttcgataagtaatgagagcaaagacaaaagtacccttgacaagaatgattctagacaacaattgcattcctgtgtagactatttgcaccatcaacattgccaaaactacttgtgaccatttgaaccattttctaataaaccctatttccatacacacttgatgatgatgatgatgatctttctaataagacttgatgatgatctttctaataagacttgatgatgattctaaaattttctaatattattccaatataacgtatttataacctaattctagtactttactatatatagattgcaatttataaataataaaataaaagtgcatttatatatttttacttaaaaaaaaattagtaatcttggtggaaagtatggctatggaatgtttgtttattcaacaaaaattagatatagtttcctagtcaattgtaataatgttaggtacgtagtaattaaataaatattcctctttttggacatttaaatttcaaatatatatatatatttaatctattttccaattcattgatattaattttcatgctagctggattaaatataaaatagggaaagaaattaataaaaattatactaatattatatctatcaataaatatttaggagaaaaaaaatatttatgagttaattaataagagacaacctttctttcaccttatctcttttctttacaatatcttcttgatttaaaattcaaatcaaatatatgtatatatacatatatattcaaatctttttgaattgaatgatttaattcctaattaatttattcacattgaaaaatctttgtattattgttaatgcatgcatgcaatttgcaaaccggtggacacactcaatcatttagacagtgattggctattactggatcctcatagtgttatcatgttcgttcgcacactgaaaaatacttaccacacattaatatcttatttattgaaaataaaaaaaaaaattacaaaaaataagtgtaacgtgaaaatgtctccatcattattcataagataataagaataatttaagttttataccattaataaattaattcaacaagtgtgtttaaaaatgaagaaataatagtacaatattcaaaccaattaaaggaaattaaaaaaaaaaaagttcaataatcttagttatgaattatataaacattatttttctactccaaaataaaaaatacatgagatagattgtaacaattttgaatatgtgactcattcaaattttgtgtaataaatgactcaaaatataaggctcctcttattaacaacccttcacaagaattctcagctaaaacattaaaagcttgaacaataaaactagctatatataataagtaaaattcattccatcttggctacagcaattcatgatcatatggatgcaacccaagaaaaagaagaagaagaagaagaagatgatgagaaggcacgggaaatgtcaatgacactgcgaacgagatcaatgacgaaaaggaggacacagaataataagaaagaaagtttctcagcaagattgcctgatgatgtgagcggtgttttttcagagagtacatgtgtggtcaaattaagtacaaatacatctttagatataagagaatcaatacttgaaaaaatgatgatgatgatgaagaaaaatgaagaatttggtagtgaatttgattggaatgatttggaggagttgatttattgttatattgctctcaactcacctgatattcatactattatcattaatgcttttcttgatttgaaacattttctcatcaatgaataagtattgttattatagatacattttaaaatatccaacactatataagtaataatgtacgagtaatgtttagtacttttttatgttactgaaaaactcgataattaaattacatttttctagatatatgaagtagccaaaaagcaaaatttaaaactccaattagctatagctagtaagtgattaagatcacattttatctaacataatttgttttttcaatattatttttgttgtattatttgttttggtgaagtagttggcacaacattaatggtagtgagctccaacccagttggaatgatgtgatgattaatagtaacattattattattattattattctttattaacatctttgttgctccttctccttctaagttgttctcatcatgaactaagcttttgttctcctttttatttcccaacaaaaaggaatacaatccaaatatgatcaacatcatcccaatcaaactgcaaaaatatacatgcatatatacacttagtgtttaatttggtatatatatatatatatttatggataaaaaatgaagaagaaaaattgattttttgcaaatagtgctattttgataaaatagtgtaaccctgtaaatatataaaaaaaaaattgataaaaaaaattataaatttgttctcactttgtattagaatagtttttctttttatttgaaaataaaataatcattgcactaaaatggtagaaaaattcattccattggaatgacat

SEQ ID NO: 38436 - DNA, 3209 bp, Cannabis sativa
  modified_base (223)..(228): a, c, t, g, unknown or other
  modified_base (2512)..(2514): a, c, t, g, unknown or other
  modified_base (2691)..(2696): a, c, t, g, unknown or other
taattctggatattgttctcgcatatcagactctagctcccaagtagcttcctcaaccacactgtttctccataggactttcaccaaggtaattgtcttaaatctcaaaattctatctttttgttcaagaatctttaccaggcgttcattgtaagacaagtcttcctataaacccagtgtttcatagctcgaaacatgtgatgggtctgacacatattttcgnnnnnnagattcatgaaatacattgtgcactctagataatgatggtggtaaagctattctataagctacactgcctactctgtccaatatctaaaacagaccaacatacatgggacttagtttccctctcttgccaaatcttttcactgagagtccttttcgtggtgtcactcgaagaaacacatggtcacccacttcgaacaaaatgtctctccgctttaggtctgcataagatttctgtctactctgagttgtgatcattttagccttgatcttctgaatagcttcaaccttgggggatggacccagaagctctaccacgaaaatggggagtatgagatttggagggtgaggacgaacgaactactccacactcagaaatatttccgtgatgtacagggtgcttggtgtaggtacattacccgaggtcttgatggcccacagtacgaatacttcctgtgggagcatgaaggtgttaaacttgagaaatcagttcaatttcctctacacatgtcactctgaggaagattatttcgaaggaaatagtctatatagtactacaagcaacaattcatgtagaaaacgcttgagagattactctattgttatacgggataaatctccacagttgccaataaggcacatgaccaagcaacaaccacatggcccaagtcgataaacttcttgattgactcggatgaattgagttacaaaaatctaagtgcaactcgcccaattaaaaaaaaattagtaacctgcccaatgaattgatcgatttggttgggttaatctacccaaaccgagcactaatatatatagattgaatttaaattttaaatcaaccaccatgaaagaaatatagtagtttgaacttaattttttttaatatgtatataaattatattatatataaatatatatataaaccctcttaatcggattggtcagcttagttcgggttgattgggaaggttgatattttttcaaccagtccaatataaagattgggcgagttatattttcattgaatttttcgatttttatttttttttgtggggctatctcagtttgatttgggcggattattcgagttgagcgatttataaaagtttatgtacacccctacacccatagtttcaatcacaagactaaaattcaaacttcaaataatagaaaggggttttgaaattaagcctgaaatcagtgtccatgtagtttttgttccttcttgcccttgtgatactatcttttccttcaaattttctctcttctttttcttcattttcttgtgtaaactatcttataattgctacttagtgtgtagaatactcccctttgaatggcttgattgtcttcatataaagctagggtacacactagaaagtgaaactactcttttttgtctctcttcttctcatttcaatgtgcaggtctttggatccatctttgcataaattaagagaaatatgtagtggctaccaactaggggtgttcatctaatctaatccactctattttacttacagtgcactaagtgcgaattttatattttagattcaatctgcataataactcaaattcaatataatccaattcgtaaaaatggagatttgatcggttattttggattgattacttttaaaatatagaattatttaatatttattttgaattgagtattttaggaacacccctagccaacactacttagatgtgttatataatttttggtaaattttatatcaaattagagcatctctaaccatgctctctaaacacacatgttagctaaaatagggagtgagacttaaaaaaagtgaactctaactatacaaaaaatagttctctacaatggagaatggatagggagctctctacttttttgctaaattattttaatagtattttaaccaaaaacactattactttttaatttattttataaaattaattaatacttaaaaattttaaattataaaatattattaaaataatcaaatactagctataatatagagcatggttggagcaaaaaaaaataaaaatagctctttattattacttcttagctattttagctaaaaatatagagtacaagatgctcttaaagactacttcatgatggtgttaaacaccgctagtgtttaatatcaatacttacaaattaaatgaaggctaattaagaattttttcccctaaacttcgacatgtaccaaatcatgctccctgaacttttttagccgttaaaaattctccttgaactattgaaattgttagatttaaggacttnnntccaattttagtaaaaaaattctaacatggatgaaagtttaggggacatgatttagcatatatcaaagttcgaggagtatgatttggttgatatcaaagtctgcggagcatgatttagtacataaacaatcactaaaacagtaaaattgaatgaaattaaacaaaagtccttaaatnnnnnnatctcaatagttcaggagaatttttaacgaccaaaaaagttcaaggggtatgatttggtacatgtcaaagttcggggaaaaatatcctaattagccttaaatgaatatctccaatggagatgtaaaatggtgctctattactaaaatatacactatcttgtaaaaaatttactccaataattgatccaaaattttcttatagcaaagtctattgaatttggttcacactatgacatgatgcaaattttacatgacgcattaaattataaaccttttacatttattttttattatttaatataaaaaaattaatgataaagttattttaatcaaagagattaaaatatatcataatgtaagtgcacatttgactttcacttctgatgaaaggagcttgatacaataaatgctgagtttattagccttgtgttctctccagcttgtacagaaactgataggccattctccacgggaggtaatggcagctcttgcttctccagacacaggaatagt

SEQ ID NO: 38437 - DNA, 3501 bp, Cannabis sativa
ttaagagtgatattcaccccagaaagtattaattggcgttatcattagcgatacaactattgtgttggttcagcagtacgagcataatattggttaagagtgatatcgtggcaattgtcctttcaagtgctattgatgctatcatagcggtacgaacatagtgtctgtcccatagtgcgatcatagtgctggtagtggaagatatcacagtcagtagcaccaactgctaagaatattcttaatcatttggtaagcctcgtggataggtgtatggctgtctagctagacacaagtctataatatattatttgttatatgctttttttactgagtctgttgactcacagttgctacttttatgtgtaggtaaaagaaaagtgaaggctgaacaagagtgagtttcgagcttggatggtgattgtacatgtcgagacggtacgacctggagtgttcggtctcaggacatcttgggatatattttgtagtcgctgtctgacaagctataaaaatattttgatggtatttgtaaaagtttaattataggatcccgatttatatagataatcatttgtatgtttaaaaagtttaataatttaaattgaaagttttaatttgacatgattttcgagaaaaattctttgattatcaaaggaggcacgttaattaaaaaatcactgtaccgcgcctaagtatcagagcgttacaacaaaggcgtcaactctaagaatggatgaatcaacagatgaaaatcatgagagatcaacaagaagcaattggaaatcattccacgtaggtcaacttgtttatcatatgagcctattagatcactagacaacaaccagtggtaaatacatacatccccactgagccacaatacgagccaagagaaacactcagcaaacccaaagaaatgagccgtccaatccaagattacagagtcaaaagatgggccacacggtagacgagcaagtttttccatctcattacttgggagggaatgatcagcataacatccatccttatacaaataccaaaccaacccattgctgataacatccatacgtgaagacctttacgagaatcagtctttgatcgattaggcatcgtgcataatctcatgaatgatataaattgcagaagaggattagatgggcagacatccctcctactattcagccaaacaatacagataacaatgtacccgaccatgttctaagagatccacacactaagtaatttgatttcaaacaacaattttttatttttgtttaccaatgatcgattttagaacatacttttacccatgaaccatacatctttttgtcagattcacttaaagatttatcattcaattccgattcatcactatcataattttcttcatcttttgaaatattattcaagtaaacaaatttttcattttcaaatttaaaaataggcaaaatagaagtgaatgcaacattacattcctcatcaccactattatcagagtcattgtcactccaagtaacaatcatatatttttcattattcttcaaggtgtttgcacattctgattatgtgaccaaatccctcacattccctacattgaatgacttttttattagtttgaaaatgtttaagagaagaagaataacttttagaaggcttgacattgaactttttggtctcaatctttttcatatatttttgaaacttcttcgcaagcatctccatttcatcatcaccttcatattctacaaagaaagaaatttcacacaaatcaaattaaatggaaaataaccacaaaatcccattaaaagtttagtgaaatgctctaatattaattgaaaatttgtttctacgactaccaagtgttattaataaacagtttaataaatgcacaactattataatatgtttgaaaataattgaaatctgttctatcagaatctgaacttgatagatcagaaatacaatgcagaaaataaaatgacacacgatattttatacatggtagcaacagtccttgcatattgctactagtcaacgaagtcacgcctagagataagaatcattagtcaaattttaacaagtacaaagtagtaattgacttaaacaaaagatagactccctctaatgattttgtcgcaagcttgatgtacttctatttgctgaatgaatctccttaagacaccaaggtttgaagtctcttcaaattatttgatgaatgcttgtagaaatattatttcgaagataacagtgcttgcttgtagaaatcttctcccgaagatagcggtgcttacttcctcccgaagtaagacttgtagaaatattctcccaaagaaattggtgcttacttcctcccaagataagacttgtagaaatcttctcccgaaaatagcagtacttacttcctcctgaagttagacttgtagaaatcttttcccaaagatagtggtgcttacttttgcccgaaataagacttgtaaaaatcttctcctaaagatagtggtgcttacttcctcccgaagtaagacttgtagaaatcttttcccgaagatagtagtgcttgcttcctcctggtgtaagactttgatgaattttctcctgaaggttgttctttatgttctctacattgaaatttacttcacataaaaagtaattacaaagacacacaaactcacaaaagaataacagaacaactatctcttacaaaaaaaaaaaaattaaataaataactctcctaaaaatataagaaattaagaagtgaaaaagtttaacattttgctgctagtttaggtcatatttatagtgataaatgacacccaaaaccgagctcaaaaggtttgaatacaaagagaaaatattaattagttttcttacaaaagctcattaaatgatgaaatcatgtcagaagagatatgtgtgcagataaaatcttgatatgtctagtgaatattgtgaatctagactctcaaacccaagttcatcctcacaaaaattttcttaaacatcacaacccaattggagagcaatgagatcatattagaaaatgaataaaataaatcaaatacaaaaaaaatactatatatatataatttattacataataaaatattttattcttaccatataaaaccacaacttgagtaaaaatatattttcaattactacacaacaggtcgtactttataagtaaggaaacattcaaacaataaatgaaaaatatttctaaaaaggaaagcagaatctgttcaaagaaactatcaaaccgttcaaacagattcattatatctggacagatttttagcaaaattttcttatataaataaagaaataaaacatacattaaagacacatctgtacaatgtctcttgactagaaaatcagcttttgaaaaataataaatataaatactttccttaaacataaaaagtcaattatgataatttaaataaacaaactctatatttatttaaccaatataacatgattttgaaaaacttttcacaccaaaat

SEQ ID NO: 38438 - DNA, 2496 bp, Cannabis sativa
  modified_base (1856)..(1862): a, c, t, g, unknown or other
aataatttatataaatttccttttatttaataagtacttttagctcaagtttatttgggttagaaatactcttgattattcaaacgacataataatattttattaatgtgtattgtatatatattacaaaatataataataattataaaatatagaaaaagctgatttaagatataaggtaaaagtttgtaatgtaatgatatagaaaaaataatgtaaaagtttttgataaaaaaaaaaaaaaattaatgaaatatttttaaaatagagtacaaagctgatgtaagcaaatacataatttatttttctacaaacaaaatttttaagtttgtaaaaattatatatatatatttctttattataaacttatataaatgttacataattattatgttatttatatctttgccacttttaaaattttgtattttacaatttttctttaatgaaatttatagtactatgtaattttcctatattaataagcttacatacaacaaaacaaatacaagaacaactgtgtggtagggttgatcttaactaatcacatttattatcaaaatgataggatactttaccatcttaagtgatccatctgtaacctactaactacttgttggggaaaccttactacaaaatcactctcaataaatatatagagatggtatttttatatttagcatattttaaaaaaatatattattctaatagtattctaaaaagtggcacatgataaaaaattattaaaattgacctaaaatataatattgtaccaaatttgatctataataaattttattttttatttacaataatactattaattattatgattcaataataaaattttacatcttttatttactatatcattataattttgacaataaaaataaaaaatacaaattttttgtattttctcaataaaagattaaatgagcatcaataataattgattttttttttacttattataatcttgcattgcaacacaattataaaatttgaatcaaattcattattttagcttatttttgaactaaattttgtgtaaattttacaccatccatctactaataatattttaccatgataacaaagtttgtcactatcagtatatctatgtagtattgatcatagctcagtgataattatgttggtgcctaacaaatggtcaattaaaataacgtgtaaaactcaattaaatggtggtttaaataagctaattaatatgctttaattcaatcattacaaaaaaaaaatgttttaattcattaattaaaaattaaagataatcttatgtgacatttaatggcatgcaaaagtaagtagctcactcttatctttgtgagaagagtttgcagttgcaataaataaatacaagaaaagttttacttttcttgtatttgccctataaccatatgacaaaaggttttcgcaacaaccaaaagtacaagtatcttaatggcaaaaacaagaaagttctggacacacagttatgattatgaattctcaattaatgtacccttcataatacttcagtagtatattgttataagatgttaaggtgtcaagaactattatgaagtggggtcttgaattgattaacaatttttttttttagaaaatactattttgaattctgtgttttgcaaaagttattaattagactttttgttttattaaatgataaaataaaccatatattttctaaaatggtaaaaataagatcctgagctcaattttcaataattttattttttaatattaccaacttcgaagacaaaatttaacaccaacagatacaaaaaatgtaatcagttttgtcataacatctttagattagattattattnnnnnnnattttgacaaaaaatcaattcaaatcctatttgtacaattttaaaaaatataaaatttattttgtcatttaacaaaatagaatctaattagtaatttttataaaatacaaggtccaaaagtatctaccccaatttttctataatttttattaaagtaaaataaattagactcgatattaatttacatcaataacaatattataataataaacttaataaattgttcaaatgttaatatatattattgaaatatattgaggattagtactttttttatacataaattactcttatacttaatatattccatactaatatagttcatatataatacgtacgtttaatattaattaaacccttcttcatattggttttgagtgtggtctgtttttttttttcttcttttggttctttggcagtggtaccatggcaccagacatggctgaagcttcagtcattaaagatgcgttaagttggatcaaggatcatgaatggtataatgttgaactcgaatatgattgtctcttaattgtccaaacttttcgaagtaacatcaccatggtttcgcctggtgatggactatcgaaagcttctatctattttaaataatgtttctttgttttttattaaacga

SEQ ID NO: 38439 - DNA, 2208 bp, Cannabis sativa
  modified_base (1645)..(1648): a, c, t, g, unknown or other
cggactcctccgcctctaataacggtaaatgttgtagtgaatgggccgaagcaaactttgattgtgttcctctttgaccctcgacaccacacagtcaagaaaatctccccatacgccattttcagccttaaaaatttcattaaagtaatccaccataacatcccccaaaccattctcccaagttctcaaagtaccagaagcatctctcaaatgaataattgtggactcttaagcctcatttacaaaaaaaatcttcaaatgtggtgtcttatacaaaaaattttattttattttctaaagaaatacttctacaatatttttcatttgatcaatgtaatacgtatatatgtcactttttctcttttatatgtagatgattaaaggatgagtcataggttattagaattttttaatagcatcttgattggtgaacaatatgtaagttgatacaacataagtaacattcaagtgaagaatatttatatcgaatatttatcgaaagccatactaacagagtcatacaaactgtggtaaaaaaaatattatttgagtaattaattgtacaatcacatatatttaaactttagttttatatgtcaaatgtgttcataatgttcaatcttcaagtttcacaatatatcaaacaaaaacattgcagaagtatttctttaaaaaaaaaattctcatgtaaacacctcatttgaagatcttttaataaattagatttaagagtccacaatattaaatattagtaatttttttattaagggtcactaaattattttaaaaaaaaataaaaaaaatataaaaaaaattaattaactaatagtataaaataatagaatgacacataatgaaaaaaaaaaaatgtctgtatgtagagatatttttcgtgactctatctaagcattttcatataaatgattattgttctttattattgaattaattcttaaaatgagttatgagggattaaaatttatctttttggttcaaaaatattaaatatattaatcttacgtacacactctctcatcactagaatgatgatcttccatctcgcaaataaattgattcccactctctttctcaatcttttatataagatatttttttgttacttttagacgctgtttagaatgggtcaatgctaacaagagaatgataaagtgaaatattaatttatttgttttgagagtttagccttagaatgttattcctttagtaatataactacctttgaggaaggtaatgttgataccttaaaaaattgtaagatttaattattaccttccattatattaatttgaataacatttttgaattaataaataaattttaataccaataatatacatttagtctgtgagatcgatttttttaactgagttatttttatattattagcaataacatatatatatttattatacataaattttatgctgatggtatacataaatgatattgcaaacaaaaataaataacatagtgataaaatacacagaaatgttcatttcaattaataaaaaatacaataaatttaatatttactaattaataaatatatttctttaataaataattattttatttttatatataattaacattaaatatatataataaaaaatatttttatttnnnntttttaaaataatatataagattcatgtacttaaccaaactgtaatttaattaacagaaatatgcttatatattaccctacacaaccaaacgtagtttacacattttcctataattaaattattttgaacaactcgtaccaaacaccccctagtaaacataatatattagtaaataatattcatactttctattttgtttatttatttattgcaatattatttagttaccaatatctaataaatggttttatttttttgctttgtccaaattttaataaatttaatttaattttaatatatatacatttttgtgaagtttgtagttatagttggcttgtaaaaatgaaatagtaagaagtttatacttaatttattaaatgttatcttatctcaccctctcatagcttagtcatgttagaccactaactctatactgcccaaaattaactaccgtattacaatacaattgttcaattagaataaactattgggaaattctataatgcatcatttaaaagggatacactgatacatctttatctgttttagtatccgaaat

SEQ ID NO: 38440 - DNA, 2201 bp, Cannabis sativa
tccctatgaaaaatagtcttttccagcttttatgcttttaagattctgattatgagtaacattagttttcggtttagattgctttttgaaaatttgcctccttgatatcatttataagatataactttattttgtcttttcccatgtgcaagcaatgcttattgagataatttggcaattgtcaatttactttcatgatgtatcaatggatcttaacatttgttctattattgtatttctgtggctacctatgcaggaaggtttagctgctgttttcgggaatggtttatcaacagcatgtgttgtaaacataggttctcaggtgacgtcagttatttgtgttgaggtaatcattgtttctttctcaatttcttttttgtgtataataagatttgcagttacatattataaattgatgtttataagcaaagagaaagaagtcctgaagttcatgcttttaatctcggcttgaataagattttgagataagagatagttatgcaaaattaaatagtgacaattttaatgtctgttccttttacaattgcaataaacgtcattagcactacccactctgtctagcactgtcacatggctatcaattttgcactacccaaatgtcacctaagtactttcccataattgttgttacctaaatcatgagacgttaccagaatatttcctttcttaaacttgcatgccatttatagtttttgcctgaagtaaaataagaggaagggagaaaaaaattcaactgaccactttcttttggtattcaggatggcgtagccttgccgtctactgagaagactttgccttttggcggagaggttcgttttatataataacaataatatagggtgctttcttcttaaccttgtattacttggtggttttatggctccaactttttccatggaattgagtcatgggttcctgtacatgatcacaggatatatcaagatgtttcctttggactcagaggcaccatcagacatggccgcagatacgtacagatgttttatcaaaacctatagacctcttgatgcttaacagtctgagagaatcatattgtgaaatcagagtgagtttctttttgggtctacattcaacataacttttggaactcttgaactccattactgtgattacggatttttcttgaagccttttgcattttaactcgatggtttgtggttcttttctgctaatgatactcaaaggtggggtacaagcaaataaacagttgaagtgattctattatattcatattttgctttaacaacataattatgaaatggtgtgtaggacgtggttagatttgtggtttacctttacgtctaaccaattgtcgagcttcctattgcaggaaggggaacttgatgctgtcgttgtagttcattcttatgaagctgatgcaccagttggatctcataagacaagattaactgctctcaatgtgcgtttattattacaaagtagtcatgcctgtcttcccatatatatactttgtcaaggagaaggttaattcttattgcatatcatgtaggtccctccgatgggtttgttttacccaatgcttttggttccagatgtttatcctccaccaccgcgctcctggttggcaaaaatattgatacagttttctgttttgatgacgagactatcagacaataaatcatgttgatatagggtttgtttcacttgttcaggttcaatgactacgaggatatgctggaagaaacatggcaaatggaatttcccagaagatctgaaatgcaagatggtttttaccctgctgttcacgcgggattaccaatgtgggacaactatccagttttcgccaataaaccaaagaaagaagagaaagttggccttgcagaagctatcacgagtagcattctttcgactggtatgattaagtttgtccaacaacattattttgcatctagatccttaataaccactcagtgctctattgacaggacgtattgaactccagaagaagttgttttctagcatacaattggtaagctatggcaacaagttgaactctggatttcaatttttataaattcctctagagtagaagcatgaaaatttcttcttgctgtagattggtggtgttgctttgactggtggtcttattccagcggtggaggataggtctgtcctactcttgctttatctttaagttgttc

SEQ ID NO: 38441 - DNA, 2693 bp, Cannabis sativa
aagatggacatagggtgagtgatccccatcaggtaactgaagctttcatatcttactataagtcttcactgggctctcaaatgaaaaataggaagtctatctttaccagggtggttaataggggaccaattttgattccactgtaagctgagattttggttcaaagatttaccaaagatgaagttaaacaagctctttttgagatacctggaaacaaatcatcaggcccttatgggtactctactaatttttttaggacaattggaatttaattggtgatgatatatatgtagctgtaatatctttcttggagacaggaaagattctaaaagaaatcaactctattgttctcaccctggttccaaaaatcaaattcctaacacagtaaaggattttaaaacaatagcttgttgcaatgtgatctataagattgaaacaaagttattatgctctaaactcaagaacatacttcttgatctagtggctaagaatcaaggggaatttattaaagggaggttcataggacacaacattatgatatgtcaagaactagtaaggcactatggaaggaaatctaacaaagctagctgcatgatcaagttagatcggcagaaaaaggctttacgataccattgaatgagatttttttagaggaaatgctctatggattataatttcccaatgcattcattcattaaactagtgatgaattgtgttagaactcataaattctcacttatgtttaatggttatatgcatggcttttttgaatctaggagaggcctaaggcaaggtgatcccatggctttatttctctttgtattgggaatggaatacttgtcaaggataattgggaaagtaggagatgaaaaagatttatatttccaagatagatttgaagctcttaagctaaatcatctagcatttgctgatgatattttactattctgcaaagtagacttcaaagtgtgtactacatgttgcaaggcctcaaacttttctctatgacctctggcttacaccctaatcctattaaatttgtaatttattgtagtaatatgccaaaggaagatgtgcagcgcatcctagaggcttctggtttttctaaacaagaaatgccattcacctatctgggggttcctatatgtgcaaagaagatctctggtaaagaatgcagtatactagctgagaacatgactgtaagaatcaagacatggagctccagaaacttgtcatttacaggcacagtggtgttcatcaactctattctgcttggcatacattcttgttggagtcaggtaatgatactgccaaagaaagtgattaagaacatagaatctatctgtagtgcattcttatggaagggccaagaaatgtttcaagggtctggatccatagcatgggatacaatctgtcaatcaaaggctgatggaggcattggttttataaaggtggcagagtggaataagtctgtgatgtgtaagtatgtgtgggtaataacaaataaggaagaaagcctgtggatgagatggatacacaatgtgtgtatattaaggatgagatttggtagagatacaaagctccaattcaagggagctggtactagaagagtcttatctccattataaatcagttcaaatccttactacatggctaacattctttacaaacacaagtacacaatgtctaatggctataaaatgttttgtccatcacaaaacaaagctcactggaggcaggaagtttgggggagactcaataccctaaatacggttttgtattatggatgactgtacaactcaagctaaaaacaaaggatcaacttctcagatttggtatctctattgaagagacatgtatgttgtgtaaccagtacaaagaaataatattgcatttgttctttgaatatcagtgttgtccagtgtttgcaggagattaagaattgtctacaatggagaactgtttctacctatcttcctagtctaattcgatggattggcagagcaaaggctagcaactttcgaaaacttataacggcagcagccttggctagtttggtttacaacatttagaaagctggaaatgataagatatatatggaaggatgagctagagaatcctacaaaacttatatgtgatcagagaattgatttgattttgcctaaaaaggtcaatgagaaagacaaagaataatttaattcgttgtaaagttgttgtaaagttaaaaggaaatgatttgtatagttgatatagatatgccctattgttagcgtgctaatagtttgtaaatgaatatttggagcaatataatcatctgattcatcaaaaaaaattgttcaataatttaattatccctaaaatatagtagaatttacacaaaatgtgaacaaatttaagattttattttttatggcataatttttaatgtatttagattatagggctttggttttctttacattttaaattataattatttcagagttatcatgtgttatttatttttagtcattttattgtgaaaccagttctattttaattatgtctctttttgtttttttatttagttattttagaaaaagattcttaaattatttatttcaaaaatcgatttttgatttaattaatttaagaaattggtttttaatttagttattcaagaacccatttttgtttagttaatttaaagaatt

SEQ ID NO: 38442 - DNA, 2834 bp, Cannabis sativa
agctgaaggcataataaaaacaaattaattctaactaactccaacagttaagtgacaaccataaaatgtatgtattatttttgtgtatctctaaaattactctattagtaattatacattttatctctctaatttgtaggactcctttatctttccccttctcttttcaatttattgagatatataatttcatcttaaaactaattagtgatgagtaaatagctcatactcttatatatgactcaatacttttacatttaatccatctgcgacaatattctccaatacaatcttaccaaacatgcatttctttttcctttctttttcacttttctcttcaaaattttctttccgctcacttttcttccttaccaaacatagagttaagtttaacaattatgtattggatcacaattattcactctagtgcttttaacatttcttgtgataatatgtaacaaatttagtccaaatcatgatatgaaagggttaccaaatttcctcaagtcaaagttgaatgtgtctattgttaaaaaaaagttgaatctgtctaaaacaaggtggtcagtaaactatgaaagattattctaagtaaagaaaaatattacctgcttccatctacatcattaatccaacacctaattttccaaactacactatcttttctccattattgttctctaaatttttggtatacttatctttatgtatcattaatactattagttttgtttattcttaagcaaaatgtaccctttactccattcttcttcttcttcttcaatcttcatcaccatagtaattatatcactaggattctcaaccccattcaaaattctcaaagatgagtcaaagtttgaagcttgtaagctcccattcacttgtggaaacaaatcttttgcataccctttttggggaggtgaaagaattcaagattgtggtcacccagatttcaagctaaattgccataatcacacctaccctgaaattgagattgtttccaaaagtttttatgtattggatatgagagaatgggatgaaaccataacagttgttggtgcagatatggtggatgatggttgccctgacagagttaccagtctcacaattgaagctattgagcaaagtccttttgaatgtgcttcaaataatgctaaattgacttatttgtacaattgctcaaatgggattattccaaatacaacatcatttttgagatgtacaagtaatgttgaaagagtttatgatggttattacctaaagaatccctctgatcatcaaaaccaatcatgtaagagtttgattaacattccacttctgcaaaagtattacacagatttggtgactaataagttgactacaaaagatgctttgagaaaaggttttgatttcaagtacaaatttgattatgggcaaaaaacttgttgggattgccttaaatcttatggccaatgtgggttcagcaaaacttctcatgaatttgtgtgcttctcagtttcaggtatgtattttatgagtacatttttctaatgtataattattattattgttgttttttctatgaaactgcatagtttgcaaggaaatgatccatttgaaatttgaaaagttagaaaaacactgcattttttggacatttgaatttccgaaaacacttctgttgctagttgagtaagctttaagtttcagcttttcgctctaaaaaactctctaagccaaaataagcttttataatcaataattacccgaaaaactaatcataaaaataaaagtaaaagtttaaccaaacagaaccttaaaaaacattcacaagtacaagatgggaataactttacctgggttatgtcattccttcatgaaaaacaggtatagtagaaagcaaagctctttgcataatttttgagtaagatattatatatgtcaacattttagaactttgttttattcaactactcttttgaccttaagagaagagaaccaattaatatggtccatgttgatttttcaaggtcaaagaagaaatttcctttagatataaatattgccaaactctcctttatatgatatcctattcttctctatctatatggcttaggtagttcatttcattactggcttttttttttaagaggtaggcattgaaaatatagattagaagaacttcaagttaaggtgtagaaatttgtagtgaccaaaatttcatagttgtcggtttgaaaattgaaatcatgcataaacccctttaaagggtttgattatgttcaactttgacacatttttatgtgtatgctgtgtatataatatttatataataataataataataagggtcatgagttatgaccatttcttcattagccattaaatatatataaaccaatatatctttctatcaaacctatagttgatatgtggaccaattgcaagtgggcaatagtactcttctttctcactttttctttatagagacaaattgggtaataatgaatttggattcatggaatggaatgaccaaaccacttgagtcaattcttttgtcttttttgcaaaatgaatctatcaactttcaagattacaatttcatatggatatttccatgttttttcttttatctatattcattttcctttcccatatcacacgttgtttttctttatattttgactatggtaaggggtgtttattggatcacatcttgtttttaggcctattcagatccgatccaatcatatattagatgttagattaaaccatctgatccgatctaattaatttcgtcatctaatcgatccaatatccatttgatgttggattggatcggttctatccattgg

SEQ ID NO: 38443 - DNA, 1617 bp, Cannabis sativa
taccgcatagagttttacaaaaaaatattacatacaatacaattcaatataatactatacaatactatacggtgtaatacgatgtaccaaacgaaccctataatttcaagggataattacaccacatactgaaattttttaatttttttccttttatactgtggggtggaatttttttcaaaaatactgtgtactgtattaaattttcactgatattctactattatgttttagttgttcgactactcttatttttagttattttgttttgtattctactgttgttttataaaaatacagtacttttgaaaagatttccgtgtgatagtatttttgtaaaagttatcccaaaatattcatattcccatattacatcttacctatagcgaagtgagctgatgtctttgggccggactagattattgggtggctatgtcccatcctagaggcccactcaaaagagacccaacatttaaaaatataagcccaaaataatcatttaatatgaaactcaaatattataaatattaaaaatttgatgttacccagaatcgaccctcattgctgctaataattgtttttataatcatattgcttgctgtacaatgacaattgacgactcatgactttagttattacaatcacacatttttataataagaattttattattgatcaatacataataaatgatttatattagcttgtattgcaatatttatgaatttagattattattataaatttaaagttaagatctaggtcattgttcgagttaaggttgtggttaggggttctagtcccgatttagggtgatggtctgagatcaaaaggttggggtctcgggtcgaggttgaggtcaagattggggttccggttcaggtataggtttgggtccgcgtccgggtcctgagtccatacatatagttagcgacaagactaaggtcgtagtcaaattggggtcaggatttcgactttgcttggggttaaaattggagtccagggtctagggttggagtttgagattagggtctgagtcctaggttaaggtcaaggtttaggtccagggaaggggtttgaggtcagggtcgaagcctgtggctatacaatccgagtcggggtcggggtctaggtccgtggctactattggggctggggactgggtcttgtgtttctatcccacgtttggtcagggtcaggctttgaggtccgagcccaaggtcaaagttggggttagggccagggtctgggatagggttaggagtaggggttggaggttagggttggagtttggggttgaggtgaaggtcaatgtctgggtcgaggtgaggttgtggtcaagattgaggtctgggtcacagttgaggtttaggtacatggtttgggtctaagatcaaggttggggtctcggtcttggatcccaatctaggttcaggtatcagggtcaggtttaggatccgtgtcacgaggtcggggttgttagggtctatgggcttaggactcgagtttagggtaaggattaagaatcagagccatggtcaagatcgagtggtgtagtgaggttagtatcacatatgatacaattaaaagtatatattttaatttattttttataaa

SEQ ID NO: 38444 - DNA, 2992 bp, Cannabis sativa
  modified_base (160)..(161): a, c, t, g, unknown or other
aaaaaaaaaaaaaatactgtttgaaattctctgcgatgcggttgtggtttgaatttttcttaaactgtgcagtgcggtgtggtttgcaaatttgaattgttaataacggtttaaaccacaccggaccacatattagaaaaatactaatttttatatttanntaggtccaatatgtgaaggcccagcccaaaacccactaattattgtattgttgaaacttgaaaccttttttcatatttaatttcaagttttatggtatttttaacaagtgttgctcaagctttgttgtatttgcaatagtttaattatttggtgatagtccaagccgcaaaaattgctaaaactgcaccgcaccgcaccattttttgtggtgtgatttttgcagttttttagttttgcagtgcgggtacggtttgggaaattggaaaaactgcatgtgctggttagtttgaaaaaatggtcaaaaaccgtaccacccgcaccgcaaacaaccttaggtattattaataaagtaagagtattgagatgagaaccataatttgatatttttatgatatataaaaagatagtgaatttgtgatattaaagatagtaaaattaataaagatattacatgtgagtgataaaataaaaaaaaatattaattgtttcaaaatttaataaactggtcttatgaatcaattttttagttatttttaaaagattataaatactttttttgtttaataaaaagaaacaatttaactactacttatgaaagattttatattttattttgtggtgttgttgatgtcttctccacaaaggtgaaaggagtatgacaactaaaaagaggtcatcacaatattacctgttttttaaaactaaaaattaagagattcatataaaaatattagtgatagaattttctatataaaatgtttagataagagtattgattttaataatttatgtgaatgtgaaatttatatcttaaattgtaatgataaaaatgaaaatcacgatctatatgattaattattttcataataaattttttatttgtcttaatatattacgataattaaaataataggtaccgtagaaattggttgtgtggttgtgcgatcactataaatttatcttctgcctcgcacgattgttataatcattgaaaaataaaatttaatttataattatatttttattttagaaatttatattttaaatagttgttaatatttttacgaaataaatgaaataataaacaaaaatagaataatattaaataatatttttaagtaaaattcatgatcattgattattttttaattatttttaaataaaaatagaataattttttaattcctattctatcattatttttttttattaatttatttaattattattaatgactataaataaattgattacatattctttaaattatattccatcattatgtatattttattattgcatatagtttttcttttagatatgtatatcaatatcacttaataaaatagagaaaatcaaatcaagttatcaatcacctatatatttggacaatcaaagtgattttgaaaatactttatttatatagttggaagtatactaactatgtagttttttaatccatgtgggatttttataaagaatattgacgcgatttttcgtcaactgacctaagaagatcgtaaaataaaagtggatcacggtgaattaatctgactaataaaattgcaaaaaattaaatagacaccagagatttatagtagtttacttccatatcgcgataataaaagggctacgtctacttctagttttattgattagatccgacacactagagttatgttctcaagaatgtgtagataaaaatacagcaaaagattttctaggtgtaatcttaatcgagatttatgaatatatggctaatgagagacttgatattcataaatctgatctaaattaaaggttgtaaagttcttgggaacaataaaccaatcatttgtggaaaaaggtgtgtatcaatggtgttttaaggactgataactactacaaaaagggacatttgcgacggtcctcaaaacacttttttttggggagcatcgctaataaatttaaatgactattttaaaccatcaggaaaaattagatattctcgaaggttcagagcaatcgtaagggaaatttgtgacggttttaagagcataatgcaatttttaataggggtgtacgtgacggtttacaaccgtcgcctatactataaggtacggtttaaaaccatcgcatatagtataggcgacgattttaagtcgtcaagtatacatcgagcataataaaactccacaacaactactctttcgtcatttcacacaataaaagcctaacccatcccaactactctctctcttcgccgaaaacaccaaaccctgaaccccataccccattttctcaacaaaaaccgccacccaccactaatgaaaactccattttctctctcgttctcaccattcttcatctctctctctctctctcaatatatatatttatttatttatttatatattatttatgtaattatttttatattttttttgaatgaatttatttgtttaaatatttagatttaaaataatatatatttataaataaatagataaattaatttataaatatatttttttttaggttttattgtatatttgtagaactttaagtaaatacataaatatgtgtattttattttttagaattaggtaaataaataatttatttaattatttgtggaaagaataattagttttgtaagtgtattttttttaggtttaagtaaaataatttatattatgtgatttagtttaagctaatgtattaatgttaggtgtaaagaaagtttaaatacatatgtgtgcactcttaatgggtactactcatgaatgggtaaaattagaaaattttgaatttttatacttaatttttttatctaattaaaaaaatctct

SEQ ID NO: 38445 - DNA, 3918 bp, Cannabis sativa
ggcataaaacccaacaatcatagcggtacgaatatagtgtcggtcctgcagtacgtttgtaatgttggtagtgggtgatatcatggtcaatagcaccaaccattgagaatgttcttaatcatctagcaagccttgtggataggtgtatgggcacctagacacatgtcgataatatatgatttgttatatgattttcttatggagtcttttagcgcctcacaaattctactttcatgtgtaggtaagatattggcggaagctgaatagaagtgatatctgagctcaggtgatgattgtacatgtcgagacgacgcgacctggagtgttcggtctcgggacatcttgggctatacctagtagtcattgtataacaagttgtaaaagtattttaagaatgtttatattagtttgaacacggaatcctagttatgtatatatatgtttatgaagtttaataattttaattcaagtttttaatttggcacgattttcatgaaaaaccctttaattagcaaaggagacacgttaattggaaaattactgtagcctgcctaagtattagggcattacaaaagatgacctagaagatctagaggatgatcccgaagacaaagatccttaggacgaagatcatgaaggtgttggaaaagaaaaagaagatgagaataaatatgagccagatcctgaagtcattcgaatggtcaaagaactcgctgaaaccaaaaaggagatagcgaatcaagaataattctcccatttgggagaaactctagcaagattggatgttaaaattgaataaggaggagtggctcatgatgaaatattcttgatgagcctcctccttaggaaaataatgctatgaagataaaaaaaaacccaaaagactctagaacctctaatcctgcaagggagaacggaaaaggtgtcatgggagagcctataaaaaatactactccaactactccacaaaataacattaataccaacgaacctttatgaaaacagaaggcaactaatgctccaaagcaacgctgcccgattaatcctcaaggcagagttgtgcggggagataagccgagtactcaagtacaaatgcctactgattagggaaggaaaaaccacactagtgattctatttatcaaagtgaaagagtagaggaggttcacccagtttgagagggtactttgtcaatagtggacctctgggcacgtttagatgcaaagaaagaacgagccaaaggtgaaaaggtaggacattatagaaacaatctcaaaaatcatactaatgatagagttcatgggcgtgagttcaaggatgacaacacaaagtatttggaagattaaatagccgaattgaccaagttcacaaagcgtcttgccacaggcaaagtggggctatatctaatttagaagaagaagatacataaccatatgtaagacaaataatagaggcacccttgccagaatattttagaatgtctcagatggagttgtacgaaggtaggacagaccccaaggtccacatgtctaaatacatctgtttgatgcaagtagcgaaggcaagtgatgatgcaaagtgtctatttttttcattaaatttatcaaaatatgtcgaagattggtggaagagattatctcctagatccatttgtaattggaaagatctgcaaatgatgttcaaaagtagtttatagtcgtaaatgattatgacatggaggtaaccttgttgaccaatataaaaaaaaattgggagaaattctcaaaaattatatccaaatgatgatggatgcaacatccaaaacaaaggtcaacgatgacataaagctggtggccttaatttcaaagatatgtatcagatccctgtttatggggagatttgtaaataaaaagatctgatactttgttagatttctagtccagagctcaaggcttcataaatttggaagaagcttatgttcatgcttatggagtacctccagaatcatcaacaagtgtcagtagttcaactccgactccctaattttctgctctaactaattctcctccaattgtatattcttgactcagcagtgtacggacccaatgtcttaggacaaacttccacacaaactagtttcattggctttgtggttgcacaaacttgatgtagtgttgcctccagacaaatgagtcaaaaaacaggtgttccagaatcaaatgtgagttattttaggaacaaaagaagttcaaagaatctgagtttggttgaagctccaaaaaaggggatgactcatgaaccaagatattctgagtgtactagcttggtggatactcgaaaaaatatttatagagaaacttacaacatggtccattggaagaagccaccgcctatgtacaaaagtggaaggcacaaaaggaatcaaaacaaaagatgtgaataccaacacaatgttgggcacactacaaatgagtatgattacctataagatgaaatcaatggattggtaaggaatgatcatttatccaattggatacggatcctaatcatctatgtaggacaggttttggcttatggtactgacacgtgtaatgaaggtggattatgaaccagttttaattatacgataataaatatatttagacaacttgccttagaaagtaaaattagtagtaatattcaaacaaccttgttctaaagacaacgacaagccataaataataactactgattgatgagaccagcgagatgaacgaaaaacaaagaaggttcatctcacacaagagaatgacaatgtttagaaagagtagataataaattattcaaagagctctcagcttattgacccacatactcgtgagtatgtggaaagactagacaacattctcaccaaggttcatctcgtagttgtcatactgtgataagcatctcgcatattatgcctgactcaatatttatgaaagaacgcgagaagtactacttgaagtatacttaggcgctgataatcctttttttttttttttgataaagcatcctaaggatattggttgcattgcgagaagaataagacatagtcaacataaccgcttatagataaagtttaaagagtggttatgaaaagttatttttcattatcccatgtgatgtaagtgggaaacgtggggattaaccacatttcacgaacgattacaagtgatacgattccaagggaataactgtcatcctaaacttctataaataaggatagaacccagaaaataagggacgaccaatttgagaaaaagagagtgttataccagccttttattgtattttgtatacaatttattaaacatgaaataaaatagactcgtagactatgaaaaattaacttcaaaaccacgttaaaaattatcttgttatttattattattattattattgttgttgttgttgttcatttaattcccgagtacatttattataaaaaaaagtttatttattaattcacaaaattttgcgttaatacaagtattgggtacttatatctataaaaaaattattaaatttatatcgcctataaactcaactttgagtatttataataccatttacccttaattaaacaataagaaaaaaaatagcaagtaattgtgttattttgtctatcttctatacctatataaatttgttttaaattaatttatttttaatctttgttaaaagtaatattttatttttttgtaagtcctccacttaacttatactaatatattgttgtttacactaattaactaaaataaattatatattgatatatattatttgaatcatagtatgtgtataatatattaattaattaatatatagcatatatataagaaggggatggagttggggagccaaggtcacctttggcttagatgtacctctgtccctgaacttattaataccaatgaaaa

SEQ ID NO: 38446 - DNA, 1842 bp, Cannabis sativa
ctctctctctctctctaatttatgatttcaaacacaattcttgggaaaaggcttgaattctagtgttgatattgtgtattttcttacttcgagcttgaagaacataaggtagctatctttaatctcttttacttgatttaatttctggatttaatcttgttaatggtgttttaggtgttcttaagtatcgtggttgcatgttaatgaaaaattatgtgaattttggtatgattttaggttggatttgaatacatgaaaattttgattttgtgtgggttctgggaccatcgccgcggccacatcaaggcttaccacggcgagggcttggagccaccgcagtgagggccctattttttcccaattttttgttttcttatttttgccataacttttgactttaaacttcgttttggtcgtttttgatatcgctgaaaagctcattttggggtctatgtgttagtctataattggagctcaaattatgtatattaatttgggattaatccgtttcgtaaaatctcgagaatttgtgactaggattacaagcgcttgcctaggaacacctaaagatgtgaaatctccacatacttggattaccaggtaagatagtgaggtagcacatagagattagcgtagtggcactcatgtatgttattttgtatttattatatgggaaatcaagattaggattattacccgaagtttagcaattgtgggatctaggattattactctagaatatatgtgaatatgaattcaataatgtcttatgtatgttgatataaggaattatctaataaaggcataattaggttagagtcggtatagagaaataagataaaccattctaggccttattgtaaatagacgtgtgagcgtaacatgtaggtctatgtcaagtagacaatagatgcggtggcatcaacacttaagggattataattgttattcatatcattgtttatactgtctttctgggtcttggctcacgggtgctctattatgcacgaaatagtaagttagtagttcagcatccatgagatcgagggcttttacggtgcattgaacatattcaggccaagctagaccgcgagggttgggtctgccaggggaatagttgtaaatctccacttttgtcgcataggttggtgtgtactaatgacttgtaatgttttgaaaatgttctatggaatccgaaaatgaaatgtactctttttggatttatcataaagtttcattattacaagttattattttgttctatgttttaaagtttaatttcttctcttggctctagtacatctcggattagcgggattagtttatgtttagtcgcgttaggttgcattctatatgttagggcattacaatcaaccgtccattaacctgcagaccagcatggccgaccaggagaatctcgtcggtcatggttggtcatggcccattacttggacaaaggctggatggccatggcccattacttggccaaaggtcaacttgccatggcccattacttggatctcatagtattttatatgtgtgctatgggatctttcaggcaaccctatctgaaatagcctaacagtggtattttaagctggcctcgggaagatttaactctttggatgagttctcccgagagttctacgctcagttctcttcctcaagataaataccttcacaactagaggactttgtcgagacaaagcaaagacaaggcgagcctttgaaagactatgaattcgggtccataaccatgggttccaatgtacgagatcttgtagcacttaccaatgaggccctatcaattagtattacacagaagaaatcaattatagacac

SEQ ID NO: 38447 - DNA, 1716 bp, Cannabis sativa
  modified_base (1644)..(1681): a, c, t, g, unknown or other
tcatttctttttttttttcattatcaccttcatccttaagctcttcatctcattttcatttcttttcacatttttattttttctttttttgtttgaaaaattcagccacgatctaaagaaagataggaacgggttcttatttttgaactccattccaccctgattcaattattttctttcgaaaaaatattttttctttcctttttttatctttctttgatcagcattcccttataaatacttgtccttcccgttaatagatgttacccgttcttgttcttcttccccaatcgtaaaaaaacctcaaaaatctcttaaaaaaagttcgaacaagtcggaaatgggtaagaaaggcattgctaagaaattttttttaaagatgatcttcctagccctacattctctatttcttcaaatagaaagttaagaaagttactaagtgattatgaacgtttgaaagtgtttattgaagattcaaattctaatttttagaaagaagatgaatatgtcgagtttgagatagttccaaaagtatttagctttattttttttttatggttggtgaggtaatggtacttttttaatatgaatgtagttgttttatttgtttagtttgtgtgtgtgttttctgaatgtttttttttttattttatggaatctgttgttttaatgttattttagggtttttgtacgtgattttttttcttactgtttttaatttgtgattttgttaatcattctctatttttaaatttttttattgttttgttgtttagtatttactatttggtgtttagtatgttatatttgattttttatgctttatacggttgttttgttgttgatctgagttgttttttaaaaatatttagggtaaggggaaagtttctaagtcaaaggttttctttgatggtgatgttgaagttcccactggtaaaaaaattattgaggtattgtattttttttttttttggattgtgatttttgttgattacttttctttttgttgtgttgctgttattttcagttgtttaataggatttttattgcaattgttgtagtagtggagtcctaagtacttgcgctctaattattaccattcaaaagttatctattgtggatattataggatcatttaggatactttaagagttcaactcctcgccaagaaacatttatttgatcatttataaactaaatatataagagctttagaaataataaaatacagtaataattaagatagagatttttacgtggttctagtattaattaaccttagtccacgagtcagtctattagcctctaaggacgtatttgatatgttttatagtattttgcaagaaaccctaactttgttgctctgtgtttctcttgaagaagacgaaagcttagagcaatttcaacagagtttcagctatctaggttgtgatccccctttcgtatagaaatagaagggtatctataggtagtgaggtggaatggacatgcccatgacccgcctaaggtttctactcaaagcccactaatggggtaaattacatgcaaaaagagctgactattgggctccttgcaaggaattatgcttgtgcattgcagaagctggacaaaaggggaccattgtgttggattttatgccctaannnnnnnnnnnnnnnnnnnnnnnnnnnnnnnnnnnnnntatagatcagaaataaaatttaatgttgcatgatt

SEQ ID NO: 38448 - DNA, 4525 bp, Cannabis sativa
acagcatctagggttttactccaacaatgtgatatctcacttcgggggagtaacccttattagggaatcccataattgtgcaatgattattgctaggcgccgcatatttcaactttgattccttaattaagtttatttcaaaataggctttaaattcaattgccttagcataaccctgcaagttgcaaggcgcccccgaatcttgcattgttccttattagattatttcatgttatgctttaaattcaattgcttcggtatgtgcttgcaaggtgcagcgttttactttgtttccttattaattttgtcttaacaaaataagctttaaacttgctaggtgccgcataatttactttgattccttgttagtttatttcgatataaggtattaaggtttaagatcttaccgattaagggattgatatgcattgtagataattatagcttagctcgacgaacctatagttcctttactgataattaaagagaaaaagtcttggtagtatgttgttgttttgaattttctccaaatagaagagttgatatggtaaataataattggaactgtgaaccgaaacaggggctgtgaaaaagattcggaaacccaaaccttggaaacacccgcaaccaataacaaagactcagctcatgcagttgcgtgaagagttttgggacaccgctcctcattatggtggcaggaaaggtactgctaactcagaatctatgatcatgcatgatattgaaagttctcttaccttgttctgttattacatagaaatattgtatatcatatcaaagccatgagttttacctaactatataataagaagtactttgttgatgatggaaagtttatgttatgcatttgaattgatgatgagtgttgtgttggtctttctctgctctgcacaacttattttgggaagaagataaaaatagattggtgtgcaggactcgactcgatctgtcagttaaacttactgattagtaaatggcatttcatttcacaggttaaagttaagtatacatataggcccgaattactcaaatcagctgttcatttatattgctatctacagaaatattagttgtacatcatttttttttaagcttgaagaaagttcagatgttgatagattatagtcattgtcattgaaaaacttgaagaaagtggttattgttcttctggtccaatggttggattcgtattgtttactcggtagtttaagttgttctcgagccattcttcaacaccttacgttatgcttgtgtcaaacaattcgaaacctcctcttaaaaatttacttcacttatgttaatgtgagtctttatgacttctaactcgattattcatgtacaaagttttcttggttaagcccccaatttgttcatctatgtttgtttcatgtgtagataattgagctgtggttcatctaattctatattcctaataacatcagaccttcatactgccttgcaaaccaatttctctttggcatccattcttcacttaccgaaattgaatttagttttcagaacttttcttttcttcttctggtgattacttgtttggctttgcattaataaacatgtttgattatttttatgcttctatctgaaatatggttttcatttttcaccacaatagagatttgggatgcgttacgagctgcagcagaagctgatctaactcttgctcaagcaattgtagacagtgctggtgtcatcattcaaagtgccgatttgacaatttgttatgacgaaagaggtatcgaatttcatccacattcttttcattttctacatatgcaatgaaacaccctttaagattatgagaaaaaaataggccatttaagattgtttctttttgatgccaaatcatgcttcccgaaattttagaggctgttaaaaatctcttacgaactattgaaattgttagatttaaagatttgtgtcaaatttcatttaattttactaacaagacgattgcttatatactaaattgtggccctcgaatttttatgtttaccaaatcgtctctcctgaacttttatccatattaggttcccattagtacaattagacaaaagtccttccaacaatctcaatagttcaagagaaatttttaacggcctgaaaagtttaggagacataatttagtacatgttaaagttcgagaagcaaaaatgaaaaactatgttaaagggatacaaattcaaacttacaatttaagatatttctttttcatttgtatatttttcttcatactcaatcctaaactactaagtgttgtgttgtatgtaggtgcaaaatatgagctaccaaagtatgttttgagtgagccaaccaacttgattcgagatggttaaataacaagaatagaggagaggactttactaccaaaatttgggagcaagatttgaatgtaaatccatccaatccaatgtatattatatattctctcattcactttcatatcttttttagtcttttgctttttcatcatgccttatgaactcaaatttttaagaaagtttcttgctactattgctaattaattagacaagaatgttttttcttttacattttgttttggatttgtttctcaagttcttgtttttgttgttaggataaaccattatatcaattaataagaagagattaaattttatatcttcacaacttgccattgatattagttttgatgtgatttatgggcaaggcaagtttcatcatatgtattcatatctttttatctaaggttttatcattgttttccttttaattattagaataaatagcgttataagtacataaaaatttgaatttataagtagtataaatttaatgatttttttagtggcgtaagtacctaatgtttataaaattgtaatttttgtccaatttcgttagtatagactgtgttagtatttcaaacagggtacatataaggttaagattctaaatcattttatttggatagaaacatgcagtatcaatcaattacaattactttcaaatttttttttcataaattcaaaacagttggtactaactaaattgtaacgaaaattacagttttacaaatattaggtacttatgttgtcaaaagaaatcattgagtttatgacgcttacaaactcaaaattttaagtatttatggccacaattattccttattattattgttgttgttgctgcatgtttacttaaaaggaatagaaatattcaactcaaactataaattaaaaaaaaagtttaaaaatggtaaggaaaaacaattaaaatatttgaagtgaaaatgaaaggaaaaacaattaaaaaaattgaaaaacttcacaaacacacgacttaatatacttaaagtgccctaatgcataaaaaaaaacttaaaaacgatagtagtaaaaatttatattcaatgttttgagatggcagataagtacatattagatctatttgaagtaaaaatataagaaaaaaataattaaaatgattatgaaaaaattcacacatggtctagaataccccaaatattctcatgcattaacccaagttaaaaaataagattagtaaaaaaacttaattttaatatcaagggattagtagaaagtatatattggattcctttgaagtaaaaacaaaaggaaaaactactaaaaaaattcaaaatatcacacaccacctaatatacactaaatgcactcatgcatcaaactaaagttgaaaaacttaatttcaatagagagggtggttgtgaattacttataagatctatctataacaaaaacaaaagaaaaaatgattaaaaaatttcgataaatattcacacagcctaatatacacgaaatactctcatatgttaacgaaaaaataaaaataggattaataaaatgaaatttcaatgccagcgattgctaaaacttacatattatatcccttgaagcaaaagcaaaagaaaaaacaattaattttttttttaaaaaaaatcacaaacgacctaatataccctaaaagtcctcaagcatcaactaaagttagaaatggaataagttaaaacttaatttaaattatgaaaaatggctgagaaatacttattagatccatttaaagcaaaaataaaagaaaaaaaaaatattcacacacaacttagtatagcccaaatgccccgatacataacccaaactaaaaaataggagtagtaaaaacttatttttaatatcgatggatgaccgagaagtacatattagattctttttaagaaaaagcaaaagaaaaatgatttaaaaaaattaataaaaattcaacaacgaccatatatacctcaaatgtcatcgaacattaactaaagttaaaattgaaataagttaaaacttaatttcaattgtgaaggatggatgtgaagtactcattggatccatttaaagggaaaataaaagaaaaaaagattaaaaaaatttaaagaaaaatcacaaatggcctaatataccataaatgtcctcgagcatcaacaaaagttaaaaat

SEQ ID NO: 38449 - DNA, 1131 bp, Cannabis sativa
gtacaattcttttaaaatttattaatgttatttagttttttttttcaaaccttttatatgactatatataaatatctaatttaagcttttcatcaaaattaaaaattaaaattgtttcagagaattgagaggaaaggcattacatatattttgctctaatctatatttttagttttcttttctttgatagaaaatataaaataaaaaaattagagaataatatcattcattgaaatttcttgaggcaaatttatcaacgattaatagaaggtatgtgtttaatatttactctttgctcattttatctacgttgtttattatttttaaatctgtatttttgttatatttaatctactagccatcatcaataatattcatatattagtagttagctagtttcttcttccttgtttttttaccttttattttttaaaaaaactaaatgtacctatttatataatgctgaaactaatggagaaaaagaagtatgtactctgtatatgatgtaaattcacccttgtttaataccgccaatcaatcatatttttgtcaacttttttttttaattgagattaattgttaattgttatttagttaattactgtttattaataaatttacttattgcagaaatattattgcataaatcagaaattaatttcaaatgggcattgggcaattggcgactttgaattttctcaatttgacgttttaactttgaagacggaatagcagcaaacatcaggttctttcatccctttttgaacttccaaataataattattactgtcttaattgttctttgaaatattatattagttgttgttgttttttttttactatgtctcttaaaattaaaaaatatgagtctgggtatgaaaaacgtaagaaaaagaaaaaaattgaggagttaactcaatctcaaagaggagctcttgacaaatttattataaaagaaccacaagttttttttgaaaatcataatcataatgttgttgatgttgaaatttctgaaaatatgctgcctattattgagaatcatagtgaaaatgatgatgtggaaaatagaggtgacatgcctattgaaaatgataatgtgaaaaatacaggtgatgtgcctattgaaaatga

SEQ ID NO: 38450 - DNA, 2189 bp, Cannabis sativa
agcccagtagaaaaataactaattagaactagtagtttaaaaaaaatccttacatggttagcttttaataaaataaaacatctcatcatcgttatcatacataagctaaaacaaaaagaccacaaataatcacaagagacaaactatcatgcatatcatatcgttcactagatccctagctcccaacacccatcatagaaaatgacatcctaaactaagtagttgagcctaataactaccataataatgaggctcaaatagttcactccatgtataggccctaggccttaacctataggtgagtgcacatctaatctatctatgatggcattaagactatgtcgtataatagtatgcacaaatcataatcaacatgacccatcaatataagcaaagtatataaccaagaataataaatgaatatattctttctatttgagaaaattcaacaacataatggttgtaattgaataaaacccaaaatcataacatgtataacgaattcaaaaaaatatatttggcactctcagagtccttaaaacagtacacaaaaatgtgcagattgagtgttcaatttttaaaacatttaataaactataaaaattggaatatctcaaactgtatccaacatatataaaaacaagtccaataatcaagttgagtccctaccttcttatgatcgccaaattttctccaaaagggatattcctaagcccctgattcttaagttccatttagcttagtcacttcaaaagtcaatttatcctacactcttaaattgaataaataattgtcaatattgcgatgtactctttaaactgagtctaacgatatatgacatataataccattcaaagatactcaaagatctcacctcaggcgcacacaatgacagttcttgtagtcgatatatataatacgcgatgcttcagaaatagtgatagatttttacatagcatatatcaaaaggacccagttaatgagtagatattactcatgtgaactatttcttaaaacgagatgtgtaattgctaaaaagttgtaaagaagttgcagagctacaaaaatgtcactaagaaaagtggcaaattgggggaatgtctgagtggaggtttttgtcctcgaaaaggtgagtctactagtgaagatggatcgtcaaatggggtcaagttggccaaaaaatgcattcaaaatttgaacaccaaaactttgactcgtgatcttgagcgaataaggaggtttctcttaagagttagggtcatcaagagcgctagtgaattcaatggtctgacacgtgaggtcatacagtaactgaaaaatggtccttagagcttcatcgatggtagtgagtgtttggattagagaaaaataagaaaaaaaataaaaagaagaaaaaagagaagctaatagaatgttatagtggtgagaaagaggagagagagaaaatttaaattaaagtgattgaacaaggtaccactctattattatttatttaatatttttttttctttcggttggtcatcacactcttctctcctttaagaaattttatctaaatatttcattatacaacctcatgttaaaaattaaacaaatagggatgcttctcatacatctgatcaataaattgttgaagacccaataaaatagtaagtgtgaattataccacaatgtaaaatgaaaggtactagccaaatatcgaagaactctcttacaggatgcccaatgatcaataataattagaacttttcaaaattttctaatttgattaataaaagcaaaatactattaaaaaaaggatattttccaacagttgggtaaagtttttccatcaagtcctaaaacggacacccataccaccaacgcaaaacatgatggaataggagttggttccaaacagtcgctaaggaggaataggcaaccattttaaagggttgctaaggaatatgcaactattttgcccatcatttttaactgacaaataaaacaataaacaaaaaaaatagatctaagccactcgagcccaaaattgagaaccatttaaactcaattacaacagctttgaacaatcaccatgacaccactagccacgatgagcccagaccaccacccgccatcgtgagttctgaaaatgagaccacaatcaaatcagagaatgagagaacaagaataagagagagagagagaga

SEQ ID NO: 38451 - DNA, 1598 bp, Cannabis sativa
tgaggaatacagctcacctcattagtcatttaatagttatattatctcaacaagttttatatactttctcattcttaatttagttaggataaaaggctaattataattctcaatcttttaattttaaaatgtactgaattgtatttcaaatttttaatccgttaaaaattctttcgaactagagacagagagagtgtagagtcatgtaggggcctacgactttactcaacttttaataaattatttttttatatatatttcatatttccttacaaaatatttctttttttacatttttattcctgtaaatttgtaattttttagttgattattattattggatattagtggtgcccaacactttttatatattacaccctacaattgattagtaatattccctaaaaaatatttttaaatgttacatgagatttgatatttaattacactaataatagtataacatcgagaaaagtgctagacactagtagtactttttaatatttctctttctagttttatttcacataattttatattaattctatgaaaaaaaaaatcatttttatttgcacctatttttttatgtcctaaaaaagtttatatttttttacttataaaaataataatttgtttattaatagactacttttgtagaattttttttgtccccactaatatttattgctagtttcaccattgtttttaaactagtgagattattaaatgtaaatttttttatttaatttcgttaaattttattaatgcgacgaatgtccatatactaaattgtgttcctgaattttaattcacgtaaaacatccattaataattagacagaaattcttaaatctaactttttcaatatttcaagaaaaataattcatggcttaaaatgttcacatgttgaaatttagaaaacaaaaatcttaattaagtttacaaaattagttaagatatgaagatttattagtaagaaccaaccagttaggattaaaaacacttaaaaataaaaacactctgcaatccaatcaaaatgactgccttgccctgtcccacctttgtttttgttgtttgttttcataacttttttcaaatttggccctttcccaacttttctattcttccttactttctgtgtttgaatataataataataataataataataatgttaataataataagcctaattattaataaatataaactaaaatgtaaaagattagttataaatgaaaagaaaagacaggtcttttttgcttttactaggaaaaacaattactaaggtttgtgctttctctcctcaaggctatatatatatatttctgcaacaacaacagaagaagaaagaaagaaaaagattataaaagactcaatcttttatcattcttttgatttgattggatatcactcttcttcacatccaaaaaaattcaatctcatatgctcattttcattcctgtaagtacttcttctcctctgattctcaatgctgcaaatgctatctcttttagtttctctgttttggtttttactgcatttattaactttgttgtgttttcttgttttttaagctacaaaataccaaaattatc

SEQ ID NO: 38452 - DNA, 3856 bp, Cannabis sativa
  modified_base (1386)..(1393): a, c, t, g, unknown or other
agaaaaagggtcaattttattacattaatttcctcaatgagacgttcactctttttggagctttccctttttctttctttacacctatttttgtttttgtattctttcttttgtgtagacatggagaaggaccatagaaggagcgtccaaggtctttatggagaagcattacaatcgtcacaagcgtctcataaacgacatcgtttaaatcatattattatagtccttaagtgagtagcaaaaaccaaggcttttactcaatttgtataccatctttatattttagtcattctttattattttgtaattttttctacttaataagaaattaatttcctcagtatcatcatattctacattacatgccaatttctaccttgagtattccgcaatataatcttttccttattctacatcttcaattattttaaaaccaaattacttttccaaataacatattattttttttttcagttaacataattactattaacaactttttttagtgatgattttttttggagtacgtcataaaaacatagcttttactttagtgtagaaaaatataaattttatagaaataaaaatgatacctataaattttatagaaagaaaaacaaaaatttgtaaaaagtaaaaacaagtaaaaacataaattaaaaaaaaaataataattttatagaaacaacaataaaaaattcttgttcaatcaataaaatatattgaacaagactcaacaggctccaacctccctccaccccttattacaaccccattaagcaaaaacatatagggtcagtttggtacagctgtgctgtgggaaaaagcagctgtagttgtgctgtggggaaaaacagttgtagcagaactgtgaaaaaaagctgagttgagtgtttggtaaattataatttttaaaatgctgcgagttgttaaaagtctattgtaataatgataatattttaatctagttcattataatcacaaatatatatatatatataaaatatgttatataaattttttattttttatatatttttaattatttttttctatagtataaattatatgcatttgataaaaataatttttattatttttaaattatatttttatcacttgtaaaagataaaattgtagtttataagaaacataaactgatattgtttgttaataataaaaatataaatatataaatataaatatttttttaaaataaaataaaaaattagaaatttaaatattatttatttttaaatattttttcatttaaagaatattttgattttttataatatataataaataattaaataaatttttagtaaaaatattttattatagagtcttttaatcaaaacagttttttttctaaaagttgggttnnnnnnnntttagcttttagctgtagctttttcaaaaaaatttcaataagctgttttttaactgtttaccaaacactcttttgtcacagcttttttgaaaagcagcttttagcttttccaaaaactgtgccaaacgggcccataatccttattccgtaaaaatacaacaaatgttcagaatgattaaaattataagttggaatacagttgaaatcattcggcccgtttattagaccgtaattggaatcataataattaatgagagaaatgaatcgatttaaaatagaaaataatcgaacacaatattttattatgctgtttactaaactgtccggaaaaaaaatcagaatcatattattttgtttacataactaaaaaagataatcgaaatgttttaatttaacaaaattgccattattagaacatacaattattttttatttatagatttttaaaggagatatttttttttatatttaattaataaaattataattataattaaaataaattaacttaggaaaagaaaaagtagcattctatttaaaaatagggagaacattttcttttattttctaccttttgtatgggctctactatttttccttttctaaaatttaataagcaattgtacgagaatcaatacataccattcattcttattccaatatttctaattttaataatataacaaactttttttgttcaagttatattccacctaatattaatatacgtaaaaacacaattatgtcactaattattgaacaatacagtttagccacaccaataaaaattatttttacaattagttatactgccaatgcgtcccatgattaaccacaaatgggctaattttttttttttagagttaggtatgatataaatatttaagcttaatttacaattataaataaatacttaagtttaattttttacagtaataagaaatttcgctacctggcggttaagagttaagtaatttattacctgacaatgcttaattggttcacattattaaaattttatttttttttaaagaaaattaatttcaatataccaataaaaaaataaacatttaatgatgagaaatttacgcttctagaaatataacttagctaaaatttaaatttaaatatttatttacaattaaaaattaaacttaatatttatcgtgtaaattactttttttttataatatatttctatccatttttatattttgaaagtatccctatcaatatttagtttacgcacattgacatgatttatcatatttttgaacctttacatattcttttcttatctttaaaaaaaaaaaaaaaaaaaaaatccatgtcattataatgatcattcatcatccttaacatattatatgcattttcataagaagactaacttgcacaagtggtggcatgcttcttatcacaaaatgttttatccccatctacatattatatatatagagatagatgatcatacatatcatttcaaaagttaactatgagattatctaattcaacatttcaacatatatgtatatatttgaagtaagaatttagtgatgattatagtttataagacaactcatccaactttgacatactaaaattagtgagctaaaaaagaaagatttagttgcacaagtggaaattggaattaagcatgaccatgaacttaacaataaatctcaaccgtctgatgtgatgtgtttggacttggacggtctgattaaatcaggcaccggtggcaacaaactaattttgctttaattattgcaaccgttttacagtgccactccatgaatgcctgtcccttattatgatgtattgttttgttttttttttttttaattttattttcaattagaagacgaagaagaataagaagaagaagaagaagcaggtaaagtgaatagtgaacaatattgtgagttgtgatatgaaaagcttaaaattttcacatgctacttgtgtttgtttctgtggtatcttacactatctttctttctttcttttcctttctatcaagtaggttaattagtatatctacctaaaaagaaaaatttataaaaaagaaataaattatcatattcatagtgatgcaaccacacgtgtcatgaaattgatcaacggttgtgataaaccaatgaaatatgcttagaaataaaatgcaagataagttgtgtaactttattgaggaggaggaggaggaggagaaggagatagacatggccactgctttgtaagagaccctgcacatgcattgtcatgacagagtgatattgcattaaagtttttgagtcttattaaaaaatttaaataataatttattattattaaagaaagtcaaattcacaatctaaagctaaatatatgtatctataaaagataaaagagaaagaaaaatattaaaaggtactaatgtatgtatttaaagtttaatattattattgctataattaagtatcg

SEQ ID NO: 38453 - DNA, 1999 bp, Cannabis sativa
  modified_base (26)..(61): a, c, t, g, unknown or other
ataaaatgatttctgatctttattannnnnnnnnnnnnnnnnnnnnnnnnnnnnnnnnnnntagggcacaaaacccaacaatggtatccttgtttcttttcgcaagttgtatccaagaacggcaatgaaaaactcacatcttgattttctagatcttccaccacacaaggatcagtgtgggttgattaggattgtttacctggaaactgaccctgatcaggtggacgtcaatatttcacacacgacaagaaggaaaacatttttagagttaagtgccccgagtcagacctgtcaactctgggaagggtcccctagtcctgcgcccaggttgacttcgagagctctagaatgggtgtttggatcctaccaagttgtttccaactttccatccttcattattctgaaccaaaaagtcaataataatctaagcacgaagcctgagaattgaaaaagtcaaatcactcccaaaagtcaacccaaaaactaagggtttcacctagcgtcaagttgaccatcctgggctagggtttcaagttttagatctgtcttagtgcaaatggcttaaaatttttacttgcacatgaatgagatctgtcccaaacatgatagaagcactagaattagaatcagaacactttctatttgaggcacctaggcacccgacacccaggttagcctgatgatgcacccagtgccaaggttaacatgttgtcaacctgtggcgcttccgaccaattttttggagatgttttccaataattttcttcctcttcatccaaaatgaggaaacaactgctttcaagaaagaaacggatcagaaggctatactgatgacctagcgccaaggttgagactgggcttggtcactagcgcctacgttgacatattgtcaacctgggctattttcaatgatgattatgaaaaagtcttctgggcatattttctgtttccatcaacaattaatatatgagtgctttcgagtaacaaactgagccatctgggagctagaacagggacttagcgcccaggttgacctagtgctaggtctcagcgcctaggttaacattttgtcaacctaggatacttccaagtacttttccttggaagcctcccaagattttttttccttttttagaaataacaaagatagaagtgttctcgggaagcaaacaagatcaattgagggccgaaacaaggacccaacccccagcttgatatgggtgttacgccctccgcctaggctgacgttcaacatggttcgcatgttttcgctcctcaaacacaaattttgctctaggtattccttttatccaggtccaaaatggggtagacgacctcattcacattcttgaatgctatagaagtaacaaaatgagtccagggaagctcaccaaggaacacccaacgctgaggttgacgtatggcctagtgtgctaggttctgcttatccgattctagttccatctcgagcatctaaatatcttttcatagtaaatgagagctacgacttgtgacaagtcaaattcacaatttgatatttcatcctttcggcaaagtggaatatcgagaaactagtcgtaaatcgagatgtctcgagtctacttgatttcattgaaaagcgacatctctgagagctagtgaaccatttcacttaaactaagaaattgactaagtgatgtcaaaatattacttacgcatcaaaaaatacaagtcttgcacgttttcccactcatacaacgtccaagttgatgtcaaaatgtcaacctgggcagtggatgtcaacttgggtgccggttgctgaatgaccttcagtaaaacaaccataaatcactcaatattgattttattaacatgattccaattgcatttgaaagctcctttaaagctatttttaggcatgtctcatagtaatatcgcaattctgaaggtttcaagtcgaaaaattatccccaagtcaaagtacaaatggttgagtactcatttcacttcgctgaaatat

SEQ ID NO: 38454 - DNA, 2979 bp, Cannabis sativa
ttttttttttcatatagcttttatttatataaatatatataagtggccaacaagtacacctgatgagtggaattcattccccatttattccatctataatggcttccaataagatccatgccatgcacaaaattacacttatcaaaatacatgttaaaattatataaaataaatactattttatatctatatctataaaaattatcatctcagtctctctattttgttaattgcaattcttattctagcttttcaaaataatatttacctaatatattatagatttaattttttttatgcttcatattattttgttatttatatttataaagacttatattgggaaatgaattcatcatatttttttattatattttgttaggcacccacttcttgagcagtgagcaccggcccatattataattataatattaaaattaaaattaaaattaatttttttgtaccataatacatgtttatgttgggatcatgttcattaaaaactttcacatttttgtttttgttttcataatttatcaaatttatatatttaaaaaaacattattgcttgtgaattttggacatattgccctacataatcgctagaaagtataggcaatgtaaatattattataagtataaataaatatatatttatgtcttaataaaaataattaatacacaatttcccattgcatatatttgtacacatatacatataataaattttatatatatatatatatattgctagttgttagtggtacaaatttcataaaaagagaggtatattacgtagtaaatacactattattaattatataaaaaaatgtttatataaatataaatatttatgtaaaagtagatagttggagtgtcattattggatttggaatgtgggaccaaatttatattagtgattaatattaatagcaactttgagaggtctacatgttggcatctatgggtgacataacaaagtgattaatattattagtgataacattaatattaataataataataataacattatatttacattacttaaattaattaattaatggctatttgtaatatgtaatgctcgacaagccctgaccttaacaccttaaacaattatatcaaacatatatattacaaacaagaaattgtactgtgtatattaattgtttctctcttcttcttccatcttcttttttttttctatatatatataaatataaatatagtactatactagatatattatataaaatatgagtttaattcactttggtttgggttagtgctttgagttgtaatacacgagtgtcattgtcttttgtttcattcatttttggaatatatgccttttttttgtgtcgaccttttctattaattggttccttttttatttattatttaattataaattaattaattacctgttcttctaattattatataattataattattccaacaatcactatataacttatcaactacacatacagttaatatgttataaataattctttgattttcactaatatcaaggttaatgtatatcattattggttttatttattatattttaatataaaattaattaattgaaacaaataaaggtaagtagaatcaaagactaaaccaattaataattttgtcaattaaaaaaaaagaacaagttctagctcaaatatatttatatctacatttattacattcaacacaatttcccatatttatagacataaataaataggaattaattaatataattaatgaaagtgtgtattaatttaattaatgtttatatatataagagctctcgtaaactattgttgacttgtagttaatatatatggtatagtagatatatgtctctcaactgccaccatggaccatatagttaacatgttaattatattacaattaacctaataattaggctaatatataaaaaatgagagtgagaaaatacataattacatatatatatatatatagagattatttgttttttaatttttgacactagagaaattgtatcccattttataatatatatatatatatatatatgatatggtatattatgattataatataaaagctctacatttggattgaaatttttggcacagtacgaaattgacacgagtaaaaaatatgaatttgactctaatatgacacgaataatatgaattcttaaacacggcacaataaaaaaagtacgaaagtacaataagaaaacatgaattttttaacacgaatattttagacataaaaaatcaagcaaaactattaatagggggttgaggaagctctgaccaccctaaaaaaaatatttccaatatatatacacataataaattgtacgaaaaaaaatatatgcatttatatataaaaatttaattagtactctttttttcttacatattatagtttaaacaaaaatattacaccttataacaatatatttgttatcatatagagtattgctattttgtattagtggtgctttgctagtactactatggtgacactttgtaaacaactagcaatgttctatactagttattacataaattaatcaagtgagattcaatatttaatttataaataataatataactttttaagtagtagtagatactactgatgccttttaatattgcaattatatataatatatctccacataaaaaaagaaccactactaaaaaaaaaaaatagatttcctgaccattttaaacagtcgactaatgtattgttgtcggtctctataatcgtcccctatttgactgtcgcaaaattggatagaataagcgacgatttaaaacagtcgacaaaaaattttatcgacggtttcaaaccattggcaatagtgaaaactatagccgataattttgtaccgtcacattaaaaaaaaaatagattgcctctcaaaacattcaccatatgtgcaaaccagatgcaaaactagaatcc

SEQ ID NO: 38455 - DNA, 2856 bp, Cannabis sativa
aaaatagtttaaccaaaaaactgttaaaactgccaaaaatcgcccaaaactgccaaaaaccgtacggtcggttttatacggttataattttaaaacggtcggttacggttttcgtaaaataaaaatcgtaaccgaccagtcggttataaaattgtaaaaaccgaccataaccgaccaattttcacccctaactaaaagagacagcatttacccagtacacctaatttttcctaggatccataaatacatggaacgacatgcaaaaaagtctttttggcatagtttgtgagtttaaaaaagaccataagcatccatgatctggtggaaacaaagcaacgagccagtgataatgctaatgaatttataacgagatggataaatcttaatctccaatgtctagaaaggttatcagtacaagttttggttcattgtgtgctcgaaacctcaaccctgaggtagctacttttgtgtgtacaatagagcctaaaactttcaacgagcttgtatcaaaggcatgtagcgttgagatacaaattgctcgaaaaaatggtggcaaacttttattgagatttgaaaataaaaagccattaaagaagggagaatcaatagctacttttatcaataactggcaataaaaaagacaaagagaaggcacgagtgtcgcaaaagaaattaactctccaagaaaagaaagaggtcaaatattcatttgacgatgatgacgttgaccaaatttttgatgagctgttaaaggttaaagcaataagaattcctgagcctaaatgacccaatgagattgatatgaaaaatgacccaaatatttgctggtatcatcgaattgtgagccatccactgatggattgctacatcctcaaaagtattatcgaagacatgatcaagagaaaagaaattgaaattgactcgtctcttgaaaaattggcgacaaatacaacttttttagtagaaaatgaccaaacgccaaacaatcttacgcaaaaggatgcaatttctatggcattcgaagtcgataagaatgttacaatagttcaaaatcacttagacatgtcaaaaccaagaaatttgaatattcctactctgtacgagctcatgacagagtccaatctataaatttagaatgactggtgtgataatgaagaggattctcaaagtactcgaaaaaagcttataaaaatttcaactcgagaaccatttggaaactctcaagtcaaattttggagtagaccagagacaaataatcacaagaagagttatggaaaaaggcagttgtcattgacgataatgtgtcagattgttgcatgatgttattggtagaagaaggtcctgaatctacctcgcccgaaaatgaaaaagaagtagatgaaattaccttgtaagatatgtggtgaaaaaattatctcaaagaaggcaaaaaaaaaaagcgaagaccttgaaaaggctaaacaaggtcttcaaaacccttcatcttcaatcaataaagaatttgttaatgacggttgaagagataaaagcgctggtgaaaactaaatgacacaagcaaaatacgatatattggctcatttaaagtgcatccttactctcttcagcatttatgatgcattgcaaatgtctcatgagcatagaaatgctcttgttgtcgcattaacaagtgttggattctataagaagatacatctaataaaatctacatcactcgagacacatccctgttgtatggcatgcataatctttgatgataaggatcgttagttgggagttgattagcttaatcaacctctctatgtgacaggtatggttgtaaatgttcgcgtgagtcacatcatgttggattgtggatcagctgtgaatgtacttcctttaaaaactttgaaagatgttggtttacacccatatcaattgtctccatcatcattgataatttaaggttttaacagagttggagaaaaagtaaggggaagtatcacattgaaagttgaaatatgcaaactaaattctgaagtcttatttcatgtcattgatccagctcatcctaaagtatgttgttagggcgactttggcttcatgaatatggggttattctttcaaaacttcaccaatgctttaagttttgcaaggaaggaaaagtcaaaagtgttaacgcatacctaaatcccttttatggggaacaggtgaattacactgatggaaaattttacaagtcagctaatgtcacagttttgaaagagaagtttaaggagaccaaatatcatgaaagctcaacctcacaaaattctccacaagttaagcgactatcccttgtgaaatctcctcagcctaaaaaggacttaaaggtatctaataaaaaacaaaccttcaagtacatccctaaaagtaaacaaggaatagggcaaaaagctttgacaccgattgaagattcaatgacaatccttaaaaaaagttttactttactactaataaaaattgatcaattactacccaagagtaaaatgtaaattttaattacttttgatgagaatagcaagcaaaataaaagggttgttactattaatataaatatttcagcttctgtaatttcgaaagccttcaaagtggacaagaaaaagttccatattaagaagcaaaaatgaatcaaaatctatcaaaatagtgattgattaaaagcatcttttgaacaaggcgagttaataaaagaggaacaatttttttattttttttgcaatgatgatacctcgtgggtgtcgatgtttgacagcttgaagcaagcacatccaccccacgagtgtcagcattcaaaaggcttgttttcccaagtgctctaaagccaaagggaactaaaaa

SEQ ID NO: 38456 - DNA, 1800 bp, Cannabis sativa
aaaaaaaaaaagagtcacacttgcaacaaactatttgaaatcctattgttaaccgagatttttgacaaccactaattaaatataagtaatagtaatttggaaaaattgatgaatgattttttacgtggttccaatattaatgaactgtagttcacgagttacttttatttatggtaggaatgttctcttgattagagcatattaaggttggagtctcagaggtcactttgtgcgtgagcttagcgtctctttctcattacagtcctaggtattataggaaaaaaggatggtcagaggagagaaaggtacatctcccttcggtctttaggcactacgtagtctccgggatagaagtttggtgagacaaaatttattccatgtgcgactgatgtgatagtgcaattgatagtggtcactttattttgcttaggtaaatgggttgtcagaatagtatgacttcttaatgatgttaatcatgtgccaaattagtcatttatagtgatccactttagaattcatgttatgcaaatgattaaatcctagatgatttttgatccaggagctcattgcctcctggatggccaaagtcatctctcaattgtttatcttgacattgtaaactcatttacggatgcaccttacactttgcgagtccaagtaagaagttactttataacgagcattaatctcttcgtgagtggggcatcttagccatgtaaggccttttacacttgtcacgtattttggtaaaaaaaaaaaaataagctaaattacttgtattttagtgtgtgaaattttttaaaagatatttaaaataacttttacgtacacgtccataaaaaaaattagactaaaaaaataattatggataccgaaacatataggtgtatatcagtatactcattttaggagggtgcaccatacatttttccaataaaaacaattcataaaattaaatatcattattttgaatattaagtcataaagttgaaggaagaaaaaataatatattgatgtcccaaaaaaaaagtgtttgtttacaagtaattctatgtgcattcaaatataatatttgagaaggaaaaaaaaaagattttaaaaccaattatatttatttaaataattaaattaacccctaactccaacttccaactcatttccatctaaataaatccaaactcacattgtagactagagtgaaattgtaaattattattaattttttatggagctatttgatcaccataacaattaacaatatactaattataagaaataaataattaatatagcaaaaattgtttgaaggatgagaatgattatagcattaagaaaggtcatgtgttaattttactattattattacttttacaaaagaatttttaccattcatttcatggaatggtctcccttgattcaaagaaattaataaaattgaaatcattcccctataaaagggattttaattcaacaaaaaagaagctggtcaatttaaaattggttctttctgattttggtattaaaaaaaaacatacacacaaaaacaataataattacatatttatttatagcctagtgtggtagatagttataataacaatcttaattacttagttagattgattaatcatataatttattttttttaaaaaaaaatggggagatggagatggaaatatataacattattattattagtatcaagtagtgtttggatgaacatggttggaaaattgagcggtgtaacaataacagggccgtcggggccagcagtaggggcggccgcgcccgcagtgccag

SEQ ID NO: 38457 - DNA, 3932 bp, Cannabis sativa
cttagcgaggcccatgtttttaccaccagtcattgttgctttttcaccaggtgacttaaatttttaaataatggctcaaaagttcacaaatccaagacccctcataaccctattgtcactttcaaggctgaactgatagaatccaaggttagatccatcaacccttatgtcggggatgtcctgagatcatgtggcatcaaaactaagaaaggttgtcgcattaggtctattgcgtagggtgaattcagttgttatccccctgaatgcctggtctgagatgaggattgtagcaccagtgagctttcaaggaggcttttattatcttgggacccacataaatgattataagatcgatcattgtgagtgagggaggttattacccaatcaataaaaaggagtttaaagatgacttcttttggacctctggtctttacccaatcatcataataaaattttgaattatacgtaagtaagaactcttctcaaattcttggttttaagttttcttttgagagttttttttatactttgctaattctattctttgctgtgtttccagcaatcactaggagacccatccccagtccagagattgagaagaggcataggattccttttggccttccttatggtctgcgagcgactgagtttttactgcatgataacaacttgaaggcatgcgcccttctcaacaaagatcaactacaaatgacttcacgatccctaaatttttagactgacatcaagttctagtgactcttgacgaggaggatcgagactatgtggctcacatccgttatttaaggaatgtgagccctcgagaagctgaagatgaagcctcccgaggtaataattttggtgcttttggatggtccccaactattcttagggctgagcaaacaacattagttcaatttagagatagccaatataatttctatatttgaaactgggtagacctcatcgctcattgtttgatagttggtaccctaaacacctcgttcagttgcgctataatagttcttattttgggatcgctagtcaatacaacactaactttaatggggctggatgttcagattgggacatgtctccacttaatccttttgacattttcatgattactggcgctagggaatttagtaattattatagcactacttcctcgtctgatgattatggtaatactcttaagtcagagattaactcaccatatttttgctattttatttgtacaagtgttgatgtctcatttatcgtctcgcgggaatggacttctaagatctcttgtgtagcccctctagttctaccaagagaagtaagaagcgtacgactttgttagaaactaccagacgattaagaagtctactaacaagaaatgtgcctcgactcaacttgtaatcgagaaagagaataccccagacacttcctcgacacctgctgctgcgagctctggtgaacaagacttagggtctgttcatcaggttaaattctttggatctcaacctgaaatgctattcttggaggcctcttttccctacccacctttgcaggtattgtgggctcgtaagtatgctcgtagtacgctaccacttgttggcgccactataagtactttcataggatgactaggagctgatcaacaggggaaacttccaaagcttgacggcaaggagtattgatctcttacattctgttagtcaatacatcttcttatatatatatatccttttttttttatataccctctttttcataggcatgtcttctatccttcgtggctcagcaaagggtcttccagagtgttaaccaacttagcaccaaactttgcaagtctaacaaacaacgcaaattcgttgcaaagcaatggaatgactatcagccgaagatatttctgttgaagaagaaggctgaggaacaagagaaagctcataaggctgaactcaatgctacccaaacaaagccaaggatctcctcaaggctaaccagaaggcccaggtagcacttgatgacgctaacaagaaacttgaagaagctaaggctgatgctaaggctagagtaaacttgattgccaaacgatctatttatcaagcttgaatggaaaatcctgatatggaattaagcttcttcggtgttggagccgatgagatgcttgatttttgtgagcaaacaaaaaaggatgaagccaaggataccgaagagggcgaggttgatgaagaagaagaacccactaagtctgccactatgtatacttagtttttattattttaatttacaaacaatggtcattaggccgagataatattttgccccatgtggcatttatgtaatataaattttaacttgctttgttggatgacaaacatagctatattaataaattttttcttatgtcattttaccttgcttttctcgagttgccaacatttatttaatgtgtttttccacaaaaaaacaattttctcaatttagattgggatatatttcaagcttacatgttctcacctaattaaatgcattttggcattttcatgaacagttaatattctgtcattttgtatgcgagcaattaatattctgccatattattgacgagcagttaatattttgccatgttatttgtaagaaattaatatgttttcattattattaagagaaaacttgaaatattttgaacagttattttgaaattactttaaatatttcttgattgctcgtatgaatagttaatcttctattcatactttagcttgcgtactatttttcaagacacactataaaatcttatttatgatacatgctataatatgcgagctgttatgtattcatattgcacttagatttatgttgttttacgagacaaatctcatttacaactgctattttaattttttactttaaggaaggttttaaaaaaaaaattaattttacgctgttccagactagcttttaatcaaacatcctttattttttgtacttttttccaggtctcttagctaagcgagcctagttctcttttgcatatacctctaggtagaatctaggtattgtatatgcccctaagtaattctaaagaaataaattttgtgattacttgaaatactccaaatatttatttaaaataaagtacaacaattataaagatgaaccttaatattacaaaacaaattactggtaatatagccgtaaatgttcgctgttctagtagttttttattagcaagccattaagccatgataatttgtaaactccagttccaactacaacttcgataacatacaaaccttcccaatttaggttgaacactcttgctactggatctcacatattcataaacacatgccttaacaccaaatctcctactttgaagagtcttttttgaactcttttattaaagtacctagtgatatggtgttgataggcagcattggttatctgtgattctgtgcatttttcttcaagcagatccaaggagatacttataagttcttggttttgttctccatctaacagatttttgacaataggtgtcatccatgtagggctcgcatctatcatgttaatattttccttttcacatatactaggctcgtacagtacctccaccaggaccaagttcaatttgtcgaggtcaaattaagatgccaattttgtcaaggcatcagagtttttgttctcttgaaattgttctattttaaaataatcaaacttctccaagttcttttgaacttcctctaaatatatggccattttaagccgttttcttggtcttctcacaagacttgattcacgattaactacgaatcactgaagcattggatgctcttgacttccagtgttacggctatccttaaacctactaacaaggctacatattctgcctcagtatttgaagttttttggcaacgccactattactcttgccctcgacc

SEQ ID NO: 38458 - DNA, 3215 bp, Cannabis sativa
ctccatttcctaattttaataatgcaagtaaacaaatgtaagggaatgattaccttactattgattcccattaattattagtaaacaaagaagaatttttagtgggagaagaaatagatggagggggagaagggaaaggagagatggaacttaactcactggatgacagaagacagtggggtatgtataagaatgagacaggacttgtagtttgagaaatagattgagcaaatagaaaagaaacttcatcaaaaatagcatcttgagatatgtatattatacttttcaactaagcgcttgtaccatttatgcttaagactataccctagaaaagtgcacttagcaaatcttaactcaagcttattacagttataaggtctagtgtttggataacaagcacatccaaaaactttaagagtagaataatctagttattttgaaaatgaaacttgaaaaggggttttattgttaagggcagttgtaggcaacctattaatgacataagttgaggctctagcaactttatcccaataagaaaggggcatggaagcttggacaagtggagtaagagaagactcaactagatgctatgtttcctcttagccacaccattttgttggtatgtagttgggcaagatagtttgtgactaatggcatgtagcaacaaatatggttcaaaactttgatattttcccccaaacttattgaacaacaagaataggacagttagattctatttcaacttgagttctaaagttaatgaatgtgggaagtgcctcaaatttggcttttagcaaaaagatccagttgtatctggaataagtatcaataaatagatttaatacttataactaatagatgatagagaaggagaaggaccccacaaatcattgcacacaagctgtaaagatttggtataaattgtgtcagatttgagaaaaagaaacttatgtattttacccttgcaacaagctttgaaaaaatcaataggcattttattgctatttggaattttacaagagttcattatttgtgttacaattctagcagaggggtgaaaaatccttttatgtcatgaagaaaaattactaaagtgtgaaacaacaaatacatgaggagattctacaatagcagtattgagggaatatactacatgagaggaaaaggatgatatagactcttaaagcttaatctaagagggttgaatgaaatatagtccatggctaagttgaccttccattagtactaccttggaagctttgtctttcacaagacaatgattaggataaaacacaaaataggcattattatttgcaaaaaactgagacacatgtatgagatttgtaatgatattaggaacataaaaaattctatttagggtaaggggtttggaagagaaaggtgtgtgaaaggtagtattaccaacattccatataggaacactagctctatcacccatgtgtacttgattaggaccaagataaggctctttatgtgtaaagttagaaatatcagcagtccaatgagaggtggcactagaatttggataccaagctttatcaagtaagctatcaaaggtggcaatgctgaaagatggagagctgacttaccagcaccatctctggggaactccacattaaaacgttgataacaccttgaggtaatatgatcgattcaagagcacaactgacaaacttgtctagtactaggagagtatacagatgagggattgggagggaatccatgaccagaactagttcaaattggaggggaagtagtgttcacaccaccaaatcaaggaggaacaatatagagattccattgtcctcgatcagcgagactactagaggaaggaatagacttgttatcaaatgtttgagaaaaattggaggaggaattacctctaccacgataaccacgattagtagcaagattgatcgaattaagatctttggtgctactatccatacgatgttcttgagacaagagtagagattcaatctcagcaacagtataatctggatttcttgaagtaaaaaaaaaaaaactaataaaggtatcgtaatcagaggggaacctttgaagaatactgccacatcttttttaatagaaacacgatgactagcgcaactaaggttatcaaccaaagctttagtacaaagagatattcctcaatgaagggacctcatttcttgtagttttgaagttgattagtaaagttatcgatcttagcataagtttgagtaacaaagtatacctccaatgttttccatacctaagcagaggtctctgatccacaaatttgagtaagaatgcattcgaacatggaggataacaaccagaagtagagaagttgatcctaaacttcccattctaagaatcgtggattgatttaacctgttgcacgatcatcatctatgagaaatttagaaggaggctgaacagaatcagagacataactaagaaggcagtgtcttttaatggtagagagaaattgaggctcctataacaagaaattgttatcatcaagcttgatggaaactttatgcgagaaaacaaccagagtaaatataaaaataggcatcgtcgaagttgcagtagaagaattagttgaatcagttgccatggataaaaactcaagaacagcgattttaaacgatcaagaagattagactgaagtgaaagaaaaaatagatcaatggcttgataccatgttaaatcaaacgagagaacaaagagaacgagaaataagagtgaatgtgaatatgtcatttatcatttgagaaattgctctttaaatactatgcaagtattgttgataaatacacagttagctaaaacagaaaatatatacgtataataatagaattaagttaactaataactaaccaactacctaagagtcctaagtcctaacagtatgagcatcatatttgtcatactaatatactgtaaagtcattttttgacaattttagttgtcaaaatattatttaatttagtgtgaattaaatattattttcttgtgtgtaaatttgattttatgactttcatttatgtttgaagaaagttttcataagagagaagaaattatctttatggaaggtttgattaaagtatttatgtatgatataattaatcttaattgatggtaattgatcattttgattttactatgaatatagcaaattttataatccttttatggtaggaaat

SEQ ID NO: 38459 - DNA, 1771 bp, Cannabis sativa
gagagagaggtaataaaggaatacctgatgagagcgaggagcagaggtaggtggggcggtggaggcagaggaaggagaggcctctgtccaggtgagaagatcggaagttgaagagttaggcttcctgaccgtggacacaggtgtagttttctccattatctatctttttcttcttcttcttcttggtgtgtctcgctgcgctgactgttttacagtcttgagttttgtgtttcagtgtgtgagagttcggtaatttgaagagactttttttatatttatttaaattttaaaatttaaaagaaaattttgaatgaagagagagtaaacagtaaatagcaaattgagctttagaatgaaagatgttggattgcgctaggcaagccacttaaaagctcacatgcctacacaatacacataacttccaccactcgctagctactttcttcttttaaaaaagttatcattaaatgggataattatgtcaaaatttatattgtagtttgttttttgaaaggatattgtagttttatttgttgcagtttattggtgtcaaaaatatttaagctctgaattttgttataattaattactttgacattgtttataacgtcgtattaagtcgtattatattattttaggatcatatttttatataatattatgttaaactttaatttatattaaaatattatagatttaaatgtccataaaaattaataataatatcatatataattttacataaaaatattacataaaatacaatacaatttaatatgatctaatacggcgctctaaacaagcccaaataatttgtttgtttgcaattaaatacttatataaaaaaatttaatctctttcaaaaaaaaaataaataaaacaaatttaaattgaaataaaaaataatttacagtataactttcacttacaatttactacttaagtgaaaaatttgagaggaaaaatatcttctggtgacggagctactcacacacatgaggattgtagtcttcccaaaaagaattttttacacaatgttacatatgaaatatagtaaaaaaattattatgtatagttattttatattgaccccttaaataatttttcttgcagtttgcccccaaactttaactttttccttcacccgtgcgtgttacacttttgttgtatctgtatataccttaatgtttactgtcaaataaggtgtcaaatatcacattaattggaccactatattttaaaaataactctaattaccacctcacctaaatattgaatatgtttgcattatatacaaaaatgagaaaaataaattatactattatattatataaaattataaataattaatggggtttaagaaaaaataatacttaatgaaatattattgatgtgtttagtaacactttttaattagtttttttttttaattcaataagtgaaaatattttctaaaaatatattctataaaattttaattttttaattgagaattaaaattttgaaaaaaaaaaacacttttaaaatttttttaaacattttttttcttaatcaatatttggattccaaccctaacctagactttgagacctcgacccgcatcccctacacctggccctagccccagacccggacccaaacccaaacccggatccagaccgaacttgaactcgaactcgaacccaaacccacaacccataacccagaacccaacccgaatccagactcagaccttagccccaaacccgaacccttgttggaaatattttac

SEQ ID NO: 38460 - DNA, 5174 bp, Cannabis sativa
aaacgccacctatatatattctaaaattttcaaaaataaacaaggtggaaataaattatagttcaaacagtcggttttacatatataaaaaagatagaaacaaatgaatgtgattatttgaatcatgtactaacttattatcaagcatttttaataactggcgagatatctgctaaaattttgcacgtgcttaaaataaaaatcgacgacgagtatttttcttctctcttcttcttttttattgactatttctttttttttaaaaaaaaataaatcattatgcatggtttctttagtagatgtacaataaatagtgattgatatatcttatgaattttattgcagaaatttttaatgctttcaaggataagagagggaaatttaaaacatgcttgagtgatgatattatgggagtattgtgtttatatgaagcttcattctatgctatgaaacatgaaaatattttggaggaagcaagaattttttcaactaaatgtcttaaaaaatacatggagaaaatggagaatgaggaagagaaaaaaatattattattagatgataataatattaatagtaatttgctattaattaatcacgctttcgagcttccgcttcattggagaataacaagatcggaagctaggtggttcattgacgaaatatatgagaaaaaacaagacatgaattcgactttgttcgagtttgcgaaattagattttaatatagtgcaatcaacacaccaagaagatttacaacatttatcgaggtaataattataactgtatatattaggtattagtaacatgcaatgaatgtttgctagagatagattatgtatatttattgaataattatatatgctctatttttctaataatatatttgtatatttttaggtggtggagggattgtaaacttggtgggaaattgaattttgctagagatagattgatggaagctttcttatgggatgttggactaaaattcgagggagaattcagctattttagaagaataaatgcaagattatttgtgcttataacaataattgatgatatttatgatgtatatggaactttggaggaattagagcttttcactagtgctgttgaaaggttagtataattatatatatttttaaatattatgtttatatcaaatattatggactcgtttggtacgtcgtgttgtatttgtattgtgttggattatattgtattatttaatacaaactttaacttgtattaatagcttgtgtaaattatattatatttgccataaactcgactccaactcctaaccctgttcggggccagggtctgggattaagggttcaggtcgggggttcaagtctggagtccaagattggggccgaatccgggtctgggccgtctaagtttgagtttgagtcggggtctgggtccgtggtcaaggtccgagtccgggtccagggccagtcctgggatagagtcgggttccgcgtccagggttctagtccagatcgactctgggatttgggtttggctctagggtttgaggttagggccaggtccgagtcttgagtctggggtcaaagatttgggaccggagccacgtctggggttgggatccccaaccccggactttttataaatattataatctaggctaatacgaatcgtttgctatgtgtaaattaaatactacgattcatattgtaataaaatttatagtcataataattaatacaatataatattttatccaaacatagtgatatttgttatttcattatacgacctactaaatgagtcttgtattaatatgccccaaaaaaataagtatataactacaaactgaaaaatattattcatttatgaccctaattattttaaatatatgcaataattaatatatatatatatatatatatttatattggatacttatatcctggctatttagattataagttattgttggatactatatataataaactttttgttcataaatacaaattcctagcatctcaaatgacatacactaatttaatttttgtatgtaattataataattatatttgattttgtagatgggatgtgaaattaatcaatgagttaccagattacatgaagatgcctttctttgttttacacaataccataaatgagatggggttcgatgtattagtacaacaaaactttgtcaacattgaataccttaagaaatcggtatgtaccatatatactaagttaatattacgtgaatgaatttatatttagttatattttttaatttttattttagttgtataattaatttttttaaaattattcaataaacaaaacttattttttattgaaaaatatttaatttaagtgttaattatagaaagaaaacataataatattcaaaatttattattatttataattttagtttaacagcacaaaatgtaattttataattttttaatttaagaactataaacatttttttattttattatttaaaaataaaacaataatagaaatatatttttaaccctatgatagaattttgataactggataaatgttatgtttggtatgattttatcaaaaataaaaaaaaatatatttttagaaatatagtagaaaatatgttttgtgtgataaatgataatagaaagatattttttaaatttgtgaaatgagtttaaattttagtcgtattgttaagaaaatattttatgttattatagttgtatttaatgtaagataaaagattaaaaaaaatgtgtagtatgtttaaatttgaatggtaatgtttaaaaaaagaacaacaatttctgtgaaatttatataaatatttcaaaaagttaaaaagaggttttaaagtacttgcaccccacaaaataataagtacaaccttaatattaaaaaaaagcttaaaataatttttaaaaatcactcttaatattttttttttaaaaaaaaaagttctcacattattttgtgctaacctcaatacttattttaattttattttcatgttttttttttaaaaaaaaatcatgtataatttttttctaataaaatttcatatcatttttatttcattttttgttataatatttaaattaatataatttattttttgtataggaataatttttaagaatatgaaaaaaaaaattagtatgattaaagatatatattttcctatataataaaaatgattaaatagggtgttatataagtttttcgggtgcaaattaagctccccaatactttaattaatacacatataatttttttccaagttaaattaatatatatatttatatatatgtatattacatgtgttaactaaattagtggcaacttatatttaaatactatattgtttagctacaagtaactttttgttgcttaaaagatacatttagtcacaaaatttttatgttgtgactaaaatgttatatttttttgttgtgtttttcgcagttaattaattaatatatatttatataacatgtactgttaacttaattgtatgtaatttttattttattttgtagtgggtagatttatgtaaatgttatttacaagaagcaaaatggtattatagtggataccaaccaacattggaagaatacactgagttgggttggctttcaataggagcatcagtaattcttatgcatgcttatttttgtttcacaaatcctataacaaaacaagacttgaaaagtttgcaattgcaacatcattatcccaacataattaaacaagcatgcttgattacaaggcttgcagatgatttaggaacatcttcggtaagtactcttaattatcacattaattttacgtattagaccttctgttttattaaatagcttcgatcaactcaatttttatcaaaaataaacttaggtgttatgaccagactagttataagtttttcatctgattgtgctagacactgacttcagatttgttattatgttaaaaagaaaaagaaattgatgaaaattgaacttagggtttttttataccattttggataagggacgatccaaattttcatttaatatttactttatagagaagcattgaaaataaatataatgcttctctacatgtagaaaagtaactaatgtaagctgagctttttttctaatgtaaaataaggaaaagcacctattctcatctgatgtaattaagtattctaacattttattcgtactcgcgatagcataatttttcagttgtagttttattcgtactcacaacatttttgtgagtacaaggcttgaagatgatttaggaacatcttcataaagtactcctaacattttatttttacttgcttttatatttttatttactatatatataagtaaaataaaagaaaaacacttatgtacttcatttgatgtaagtgatataaccttttagtcgcactcttgatagcataaacttttagttttaataacaaatatctagttgaagatatgtttttaattaatcacaattttttacctttagttaaaaaaatatttatcctcaacaattaatttgatttaattaaattgaccaggatgaattgaatagaggcgacgttcctaaatcgattcaatgttacatgtacgataataatgctaccgaagacgaagctcgtgaacacatcaagttcttgataagtgaaacatggaaggatatgaataagaaagatgaagatgagagttgtttatcagaaaattttgttgaagtttgcaaaaatatggctagaacagcactattcatatatgagaatggagatggacatggttctcagaatagtttatcaaaagaacgtatttcaaccttgattattactccaattaatattcctaaataatatttaagataagaatatatcataatatttatgagataataagataacatgatataatatgtcataaataactttcttattgtcatgtcactaggtttcgttgtgtacatgttcaatgtaatattttttttttattgtaaaacatgaaattgttatattatttattattttataatatattaaaatataacatagattaaactatgaaatatgtaatatatatttactgtttgagcttgttttcgatcgatacattaaaatttcttgaatttcttaaaattttataaaatgtattaaataactataat

SEQ ID NO: 38461 - DNA, 1678 bp, Cannabis sativa
  modified_base (263)..(266): a, c, t, g, unknown or other
attaatttatatatagagtgtgatatagaaatttgagattcataagtaaatatttaagtaatgaagctaataatttttatatgattatttataaaaatattattaaaaagttatattaatatattaaagttataaaatatagaattttttacggctaaatcttctcaactattatttcacttgctcttaactctctaagctcaaatttgatggaaaaacattccaactatcacttcacttccctttttcccatccctccctcnnnnctaagctagccttagtggcttaaggagcataatcttaaatattacaaatataattattaaattgttaacaacacataaaacattccctaggcttagttgttaataggaataacagaaacctcgtattattgttgctgacacaactaacagaaaataaacagcataacagactaacaagtgtgtgtgtgttaaaactaataatacaattagtttgttaggtagttacaacttagatggctcagtgaatagaagttgtacatttgttttctatttttgtgctataaaactctaaccacattctgttaaatagtcaatttgtaatttgtaagaatttcaaatcaatataaaagctcttcacctctttgtttgtgaggttgagctcattcatcacaattcactctacttcttcattttctctcagctctttcccctgtttcaattcccttgattcactcaccatgactccatgcactttagtttcttcccaaattttacattaatatctactacaaattttgggcaggggctgaaagggaagaaaaaattatctcattttacagattagtgctaagaaagagtcaatcctacaccctaccaaaataagtgactatggtgctaattaaagctctaacaaaacaaacaaactaagtatatggatatgcatattatagggcatgtttagaagtttatgtaactcaggtgtagttaagtgaacgattaaactcttaaagagtggtgaaccaagcttgacagaagaccaccaatcacagcactattgtatgtgtttggctcagtgtgcctgtagtaacctctttgtggtgtaaattgcaagaagttgtccccttaccaacaagaaagctcattttcataggactgtttcccaagaggccaagatacatattcagcctaattaaagaaaaatgaaatagatttggaaagagtatagaagacttcaaaaatagaaaggaattatatgtatgtttgttgggtggaaggtgaaagcaaaccttttgatgttgggccaggactggattaaggcgggctagatctacggtgtttttgggctttcttaaagtaaatgacaaaattatcattgattttcttgattaattactgttaaattcttctattttttatttttttatttttttttttttgagagagagaattaaatccttctatttaatggaatgagaattatagtttctttaaaaatgttttgtttacacaaagagaagaccatagggcatagattaatgagctatattttatcattatctaatagtaatatttttttttaataatatcactttgtaacgtatatatatttcacatttgataatacaaacctatatatatctatttgaagaaaggaattctaaaaaaattgaaatgaaacataatgtatatcc

SEQ ID NO: 38462 - DNA, 1926 bp, Cannabis sativa
  modified_base (1880)..(1891): a, c, t, g, unknown or other
aactttaaattttttaacacttgaatacaaaaatcaattaatttctaaaaaaaaaattacaaaaatcaattttttgggggcaaaacaatggtcatactgctacttgtttggcttaaaaaatattaccattgcgatatattttttaatgtgattattttgaggtatgagaaacacatattttttcgcctatttcaaaataaaagcaactatttagttgcttaccatatcaattatagactcattagttataattacaatgtatacaaataattataaaaataaaattttataaataagtaatatattagtactacgttaatttaccaattaaaatatcattggtcaccataaaaaattttaacatcacaatattttgtattggcatctcaagcaactaaaaagtttttttttttcaataaagtagagtaattaataaagaaatggattatttttgtcctttgtatggaaaagtaacatgataattgtttcattttaagtatcataaataattattttttattatggtaacaatagaaatatatatatagtttacatgtcaaaattaccatattcaaaagtcatttattttctttttaattaaccaaaaaataattaaattttaatgttaaacaaatataatatgccatcaaatttgcgggttactattttgttattatatttaaaagttataatgtataaactaattagtttctacattaaagtataatgttacttaaataatataaagatactacagtataattttaaaataaataattagttattaatttagaagtctaatttttttgctaataaagtatatgatttattttacattattgtaataaattagggctcgttgggtaccctgcattgtattgtattagattgtattgtattatatgggattgtattgtattgtaatagtattatttaatataacactatatttggtattaacttgtattaataggttgtgtaaagttataatatatttttaataaacttgacccgaacctagatcctaaattcagaccaagaccaagacccaggagtcgggttcgggacctagacactgacatggacccgagtctgagtctcgagtgcgggttcgggtctaggtcctagtctcgagtctcgagttccgagtcctagtctgggtgcgggttcgggtctgggtccgagtccaggtctaggtctgagtttgggtcccaggtccgagtctcggtcccagatcaatatctgaaggttttggattagctaggcccttgatgatgtctctcatttggtccaactgggcttgcacaaaaggatccgttattgtagagacttgactgactgaccttccttggaggggctgcaagcttgaaagtgtcaaggtctcgccacccatactctaggagagtgtatggtggagatcggccatccctgtgttgtgttactggccttggccaaccgaccccaagaagggatgtaggctctggctggtcaagctcatactgggcaattatccatggtcagccaactatactaggcaaggcctggccgcccgtgattccctgattggttgatgttgctagtgtgttgacatgaggtagatcacaccagttgctagaattaggtggatctagatacctgaagtgattagtttcacttctcaaattattgctttgggtgtttccacccgctctcgatcctagccaagtgaagattgacctttgagtggctcactccccttggggagggagtgaactcccctggccggccagaggtactcttgcaggtggctggtcgggcaaaggttggttgatgagggttgttgttgagcctgagatccctagctggccccctagaccgttggtgttggaaattattttacnnnnnnnnnnnntctactcacaagtatgtttattagcatcctaaata

SEQ ID NO: 38463 - DNA, 1553 bp, Cannabis sativa
aagtcattgcattattttcacacacaaacttgttgtgacagtcaattttgtatccaatttgcaattgtgaatatcattaattactcttaaaattaaagaaatatccatagttatataaccaagctttcatacctaaaactttcaagttccaaattacaaaaatacagagttcaaattcaaaaatcaatgcacaagacagctgaaaccttttaggcaattatcaagaacaatgtaagttcattacccttttcacagaggcggcaagacataactcgagagcaagaaacaagagcagaaaaccccgaaagccttcaatgtcttagtcgaatcgaacaaacttttcaatatctttgtcaaatccaacaacatgggtgtaattgttgttgttagcaaacttactctcatgttgttggattcgaaaaaagacatttaagagttagtatcccttttggcattgtaacagaatcaatacaatcttcttcgaaaacacaatgtgtttgtcaaacccaacaatcgaatttgatgttgtttgggataaaaatcacaaattttcatctcaagaaatgaattgaaagcaaataatcaaagattcaaaactatgtaatcatattgaattgagttaaagaatcatcagaatgaaaggatatttgtcatcaatgaacaaatctcagatgaccgtcgtgagaatttgacatccataatcatcatttgaaacttaattaaacacaatctaataaaaatcatatgcaattaacaaatgttatagttcaaattatcatcatcagaatggatttttgttctcatccacagctttggcaaactgtgtaggaaggtgtcctaagattattccaaatttcatcacatgataattcattaaaattgaaatcaaaaacaaatatcatcatcaaatatatgcagaatcaaataattaaagaaaaggcctcagagatcttggtggaaaatcatcatcaaataggtgaaaacctatcaagagtagcaaatattttgatacatcactggcctttttcattaaatatttaacaaaaaatgtaaagattgagattaagaatggttatgatgaatggtcagaagtagctggttggaatatcataatagaaaattgatcattgggaatccgaatgatttttttcatcactccaaacatcataaaccctaattcaacaaaatcataatcaaaatagtctaaaaagatatacctgtgagaaaaagaggaaggaaaatcgaagctacagattaaagagatagaaatgtttggaaaatttggattttctgtgtgagcgatgggagtgattgaggaaaccctagtgaagactccacctttgatataggtgtttttggaaccctagcaaactcggaggaagccctaagttggagtattgggctcagcccaacaacccctacaagcccagcccattgggcttttttttttatttagagaaatgctaaaaattagggggtaaattgaaaaatacctcttttatttttcaattaaacaaatttacctctaattcatatttaattgaaacatacct

SEQ ID NO: 38464 - DNA, 3130 bp, Cannabis sativa
  modified_base (27)..(64): a, c, t, g, unknown or other
aatttttttaaaaacaaaaattttacnnnnnnnnnnnnnnnnnnnnnnnnnnnnnnnnnnnnnntaccaaacggcaccttaattttttttttagcgatataaatatttattatttataaaactgtaattttcatctaatttcgttaatttagattttgttttaaatttattaaaaaaatatttaaaagtaaaaatactacatatatttctggttagattatttataatctagaattagagtcttatatgtaatttatttatatgtaatttatttaagataataacataatctaccgacaaaacagtataaaaattacaatttaacataacttacctcctcgcaaacttaaaattttttctaattacgccgctatttgaatatgtttgttccacacattgttgaaataataataatacaagattaaatctaaaaagaaaattactttttttttaccttatgatcagtagacaaggctaaaggaataccatctcttgacaaaacggctctacaatcaccacaattggcaaccaccacctcatcctctcccacaacacccacaaccgccgtcgtccccaccgtcctcgccgccgcattacctctcacctcttcatccattttaccaaaacacccttccaatatcttttcccattcacactcatcatcatcatcatcaccattattattattttcaagctccgaaaccaacacttcgtgtaatctctcccggcacatgccagccacgtgagctccaccgtgaccgtcgtacacaccaaaaaagtcaaacttcttactccctttgactgcaaaatctaactcgactctcacagcgtcttccatctcgctcctccttcctataaccgaaacgacgccgtaatgtttttcctctcttgtctctctcgataaaacgacgccgtcaacgttttctcccaacgatgaagaagaagacgataacgagaccgttatctttaacggatcttcacggcaatgtaactgtttattgttgtcatctccgctattattgctcttcttctgacacgtgtagttgagtgattggagtttcagtactctctttctgttagctctctttcttttaacgatcgataattccaccgaatttaacgtcattctccggtgatccttcgtcggtgacgaaagcggcttcaatcgtttcctcatgaaagaatctcaaaaaaaaaaaaaaatcttcgccagcaaaaagcgtagggcaaagaaaattgattaaagtaaaagcagattttgaaagagaacaaatctgaaccgtcgagggaatttgtatggatggattagcgccgcatggggtcgtatgaaccagtgggttagatttttcaaacagggacgtggacggtcgagattagatcttggacacgtggagcatagatcttgcggttagtgattgggttggaagatttagtttgggtgtggtccccattaaaaattttttcggtgtagaaacaatgacgtggcgggttgtgctgtccatgggttgtttttttaagttggctatttattttgatttgggtgtgagaagaataatgttgttaaagagaggaggacacgtgtcgatgggtttggggtcgcgtgttggtttaggttcacaattttttttttagatattttatggaaagggacactgtgacgatatttagtcatactcacacatttgctttctctcatactttaataattttaggtttgtcttcgtgtcctaattgaatagtcccctatactattcatacttcttttttggaaaaaagtactattcataatttttcacgaaaatattataactatttccccattattaattattattaattttttttgaaaggaacttttattacttaacaactatggggtaggcaaatctggacagttgggaaacccccaaaccaagtttgattacaattagaggggagagccaaattggtagaaaaaaaatgaacaactttgttacaagacttcttaacatgagaaacaaaagagacacttgaaaagtttggacaaatgaaggttgtctaaaaaagactaatggtgaatattgtaaatctaagctcaaatcatgactgagtctatttcactgaatttatagagcagtgactaatacatagggctcatatacagctctcaacaaataattgaattgtaaggaatagtctaacaatgatatcttaatgattgcaaatatttgctcgggtaaatgttggtacagaattcaacacatatctgttatgcagagagaatgtaaagggcgacatcagggcaatccaagtagcagggcattaaagagaaatatttttgtttctcaacatgccccctcaaacgaaatggagaggttctcactccaagtttgttgacaagacaattaaactgtgacatcccctttgtaaggcaatctgttaactgatcatgagaggagatgtatttgatctcaagttccttgttcaaaatcttgtctcagacaaaatgaacattgatctcaatgtgtttagttcgagcatgaaacataggatttgatacaagtgagcttccactgacattgtcacaccaggtgattgccggttgagttagagggaagttcagttctttcagtaacgattctacccaagatatctcagcagcaacatgcgccaaagcacgatattctgactcggtactcgatcttgagacgattgattgtttctttgaagaccaagagatcaatgtttcgcctaagaactcacaataccctgatgttgagcgtctatcatctgggcagtagaccccatctgcatcaaaaaaccatgtcaaacttagtttatcacaataagtgatgtgtagcccaagattcatcgtacccttcaaatatctgagaaccctctttgcaccactccaatgtacttatatgggagctagtaggaattggcttagcttatttacaacataagctatgtttagtcgagtgtggcgcaaattttgcaaatctcctataatactcctatagacagtgggattatacattgattcaccatcagttaaagacataggtttaccagctgtgattggagtggggcatggctttacgtgtgtcaggtcagctttcttcaatggctcttcaatgtatttggtttg

SEQ ID NO: 38465 - DNA, 2072 bp, Cannabis sativa
  modified_base (2023)..(2025): a, c, t, g, unknown or other
taattccatataacccaaagtcgttcaactcccaactgactctaaatggtataatgcaattctatacctacggtttttatgaaaaaaacggcctctaaaggtcaattttcaataaccgggaatttttacaccctttagcttccctttttataaaatgggttgaaaaaagggaagctagaaacccattttttagtagtgacctccctcactgcaaagccaccaccacgacactagcacttcttgagtagcaacgtcaacccctcctaaacggtgccaccactactgcggtccaaccccgttcctagttgttctcgctcgttcctctctcggtcaaacgccaccactgtcaagtccaccaccaacgacacccaccaccaccgaaccgagtgaaaaaggtaccatttttttttaaaaaacaattagtttttttattgttcttttgattttgctagattactttattacttgtgatttgaatgtgaatttttctttgttcttgtggaattactcaaatttttgtgtatcttgttgattttgtggtttgtttctagtgaagttatttttttacagagttattggtagattatcgatggtttatcgataggatatcaatgatatttgataggactactgctatgttgtagcttatttaatttttttgaagttttatgtttatcaatagtttatctataggatatcagttgtattttcatattgtcattatgcatgtttatcgataggatatagatatgttatcaataatttatcggcagaatctggtttgccttaattattttgtacaattattcatttatcactatgatatcgacatttatctatagtttattgatggttttaattagtattgtggctgttatttaacttttgacaagtttgtatttatcgatagtatagagacacattatctatggtttatcaataatttttgtatgtggccacattttttttaattatgcatttatcgataggatatcgacattttatccatggtttattgatggttttgtttagtattgtctctgttaattaatttttgacaagtttgtgtttctcgatggtatatagacacattatctatagtttatcgatgattttgtatgttaccatatttttccaaattatgaatttatggataggatatcaacattttatttatggtttatcgattgtgttattttgtattgtggctgttaattaatttttgacaagtttgtgtttaccaatggtataacgacacattatagtttatgacttttgtatgtagccatatttttctaaattgtgcatttatcgataggatatcaatattttatctattgtttatcgatagttttgtttactattgtggttgttattaatttttgacaattttgtgtttattgatagatgatcgacatattatcgattgtttctcaacgatttatcgatagttttgttgtgctaacttttttttttatttcttttgcagatgcctttgaagcttatagttctattatctaagcattttacatgccatttgacttatagacacagcagtatatttaataagattattaaactaacatttgataaacacagtttgactgataaggcgaaagaaagccctttaggtcaattttagagggcttgtcctctatccttttcttcaatattatttcaccaactgatgcttcataatgaaagttgatgttcaaaagacaggagaaacgcaattttacattggactgaatgagataagattttgtgtggtcgagtttacattgattacaagccgcaactacacataggggccaatagatgaggagaaaagtgcccactcgcgatcagaccggttgataaaactctatttcaactcgcccgataatgtgaacgtgaaactacttctgaataagttcttagcctaagagagtccagaagatgcgtacaagctatggttatgtttatttgtggagacagtcttattgggctgtgttcggttttatgccctaaataaaacttactnnnatataatcagatttatttattaatatagatcacaaataacatttaat

SEQ ID NO: 38466 - DNA, 1790 bp, Cannabis sativa
gggggaattttgaacgttctaggagcacgatgtgacatgtcaaagttcgggggaaaataatcctaattagccttaatttttctatagagaacgaaactagtagtttgtcttcttgaggctatactcaaatttagagtttttaatctgactgttgtttctttaaaattgtatgtttaggtgggaagaaaaagtcatccttctattatgacttgtggaatatcaaatacctaagcaaattcaagtgggatgatctcacagaagaaattggtatatgatctcttattggattgtttttgcattgccctaattttagtttgtacagaatgtgagataaaattgagttattttcttacagcttacaagaaagccgccagggagcagaaactggctttagaaatctctgctgcgaaaagggagcgggacttctatctctctaaggttgatcaagcccgtgcattcagttccatcgaagaacgattaaagaaggtactcagttagtagattggtatgatatttcaagtaacatgttaggtttgttttctctgatcctatatttcgactaatgaaagatcatctaatagtaccatacataacaagccttcaaatgcaacaccataatttattttgtttgttagttaaggcaacaactctgagcatatcctttcttatcttacatgtacagaagcaaaagctcgaacaagaacaagaaccgggtactgatcctgatcttcctgttagcaatcaagcattgaaggttcgaaaattcccacagaaacaacctgttgcgaaaaacgaaacagataataagcctaagctttctaaagatatcctagctggggtaagcatcagttatcaatattcagtaatatatttcattttgaacttctcactgaagcttgtatatgaatatctttataggtgtttggtggttcttgctgatcatgacaattgcagttgatgattaggagccaaaatagctttattttgatgtctataatataatgtagatttttggtgtgagaaagcttattacacccccacagttttgtagccttaagttggatccttggataaattaaattttgatggagttaattcagttaagaattaatttttcattttaaaaaattgccactaacctttaattttgatttaaactatctttagacaattttttatttatttaaatataaattagttttcggattgttttattaatcatgtcatataatagttacatattgtaaaatagtttacatcgaaacataaaaatgtaagtacatagagacagaaaagcattataaaaggtaagttgtaaatatgtgtttttgttaaatatgaacttttgtttttgttttcgttaaaaaaagaaaatataagttctcaaactagattaactgtatcagaatttagattcaatgaatgactattagttaatgatcttgcaataaaattaagacataataatctattatttaaatcataaataaagaaaataacatgttcaatcatgttgtgatgcttaatcataaaagagtagaacacataacaattgaccaatagaaatttgaagatctcctaaatctggcgatcaaggatagagaccaagatattcttgtcaaattaaatatggaataaaccaataaaaaacaacacttacatcttgcaccatgccaaaattaatccatataaaaataaaataaacaaaacataatacataaattatattaatctcaaatttgtttatttgaaaaatattttgtctattatttctaatccgataatacatg

SEQ ID NO: 38467 - DNA, 3136 bp, Cannabis sativa
acagctcctcctcaatccaactccaacatgcacgcgatgatagccacaccagatactgtaggagactcgaattggtatcctgattccggtgcaacaaatcacctaacaccagatgctgaaaatcttatgaccagtactgagtacaatggacaagagcagatcatggtgggcaatggcacaggtttgaacatacatcatattggtcattcatcctttaaatcccctttatcttcaaaactcttatccttaaaaatttactccatgtacctactataaccaaaaacttgcttagtgtctctcaatttgctaatgataactctgtgttttttgaatttcaccctaatctttgttttgtcaaagaccaggcaaccaagaagactcttcttgttggcaaacttgatcgaggcttatatgtgtttgacagtacacaaatcaatggcctgcaatcttgcaaaccagctatttcaccacctctcaagccagctgccttcttgtctctaaatcaagctccttccctttttcaattgtggcacagcaggttgggacatcccactgcaaaaactgtacaaaaaataatgtccaattgtaatatctcttcattcaataaaagtgtctttgatttttgtcatgcttgttgtttggggaaatctcataaattacctttttccaactctctcacagtgtacactcaacccctacaaatgatttacacagatctttggggtccctcacctcaaaaatcatcaaatggatatacttattacataagttttgtagatgcttgcactagatatacatggctttatttgcttaaacaaaaatctgaagcttttcccacctttcagatattcaagaaacaagttgaacttcaatttaatcttcccattaaagctcttcaaagtgactgtgggggtgagtttaagccatttgacaaattttttgatcaatgtggcattgtacacacacaatcttgtccacacacccatgaacaaaatggggttgttgagagaaaacatagacacatagttgagagtggtctctctcttcttgcacatgctcacatgcctctccaatattgggatgaagcatttcgaactgctgtctatcttattaataggcttccttccccaaaattacacaatcaatctccatttcagcttttatatcacaaagagcctaactacacatctcttagagtctttggttgtgcatgttatccaaatttaaggccatacaacaaaaacaagctgcaatttcgatctactcaatgcacatttgttggttatagtttaaatcaaaaggggtataaatgtctcagttctgaagggagaatatatctctctcgagatgttacatttaatgaacattattttccttttttttccaacactgcagcaagctcttcatctactctctttcccaatcctgtctctgccacaccacccaaaataaccacttcagtttccccacactatccctcacccactaccatttcaaatgaccaatttggtgctatgatagacaccacttcttcctctgccaatgttacaccagctaacccatgtttcagtacagattttaatgatacaggtacagctgctggtccaatttttgtccctgctgcttctgatcctgcagtttcagtaccatcagcaccaactccagctgtctctgctccagcaccttgtggtcctactgttccagctacagccacatcaacatcaaataatcagcatcctatgtgcaccagatccaaaaatgggatccacaaacccaaagtttacatcacagtccttatcccatccagcatttatgaagctttaaaggatccaaaatggaatgcagccatgaatgaagagattcgtgcccttgttaaaaataagacatacatattagtccctctcccagctggcagaacacctgttgggtgtaaatgggtctataggataaaggaaaatcctgatggttccacagagagatacaaagcacggcttgtggcaaaaggataccatcaacttccaggttttgatttttctgagacgtttagtccagttgtaaaaccccacactattcgcatagttctcactattgctctttctcgacaatgggctgttcatcaattagatgttaacaacgctttcctcaatggagaattacaagaggaggtgtacatgacacaaccaccagggtttgaagatccctctcaacctaatgctgtgtgcaagctcaacaaagccatttatggcctaaaacaagctccaagagcttggtttgataagcttactgctgtccttctctctcttggttttcttttctcaaaggcagatcaatcactgttttacaaacacaatggagggcacaccacatttattctagtctatgtggatgatattttaatcacaggcagctcttccacttatatctcggctcttattgcagaattaaacaagatttttgctctcaaaaacctaggggaaatcaagtacttccttggtatagaagtgactcacacaacaaatggccttcacttgtctcaaaccaagtatatcaaggatttacttgctcgagcaaaaatgcagtttgctaaaccaaatgccactcctatgacttctggtttaaggttatctgcatatggaagtgacccagtagaaaatgcacagttctacaggtcgatagttggtggattacaatacatcactgttacaagacctgaaatttcttactgtgttaataaagtttgtcaattcatgcacaatccccttcaatctcattggtctgcagttaagagaattctcaagtatttgtcaggaactctcgatcatggtttgcatttaacaaagccaactcaactcgatttagtgggattttgtgatgcagattggggtgctgatcctgatgacaggagatcaacaagtgggttctgcatttattttggttcaaatttagtggcttggcaatccaaaaagcagcagactgtctcacgttcatcaacagaggctgaattcaggagcttggcaaccattacagctgaaattacatggataaaatcacttctctctgagctgcaaatcactctgccatctcgacctgtgatctggtgtgataatctcagcaccattcttctaacagctaatcc

SEQ ID NO: 38468 - DNA, 1699 bp, Cannabis sativa
tctcagtagctacataactttctgttgtctcctgggatctggcattggggcatatgaggtgttccttgcgggattggatagctgggatctggatagggaaatcttttctatattttttttgcattggagagctgttttttttacccctaaatcaatccaactatcctgaaaatgacatttaagtagagaaatcacaagtcacaataaggcttttgttttttttgttgaaaacaataatgctatttttggtctgccacaccagaatctgaggttaccatcaggttcaggtcgtctggatatccaaaagtagccttgaacttgaaagaggagctacaattacaccatttcttgtcgcgttacttgaaactgaaagtagaataaattaatataaattataattgacaattaaagtcaacaaggatttagcatatgtatatttacacaagtctaagaaataattttcacaataacatattaagttgctattatcaattgtttatgggagtaagttgtggtagggagttacaatcaatatgaaatttaatggattgcaggctgaagaatctcaaatagaggagaagctaagggaactcgagtttgagtttgagaatgctgattcatacttcaagaggtttaatgattatataatctgtttacatatttccttttcatttagaaagctttgacttaattctgcttggcctactgatattccagcttgaaggaagaagaggatactttattagaaagattaaacaagatggtgatagacatccggaatatagatgaggaggtacacaggaattagtgtgactgttagataagttgtaattgatactgtcaagtgtaatttgtgttttctctttccttctattttacatgcatccatatttctaattaatctgatttcacacaaagcgtcatttttctttctcagtttgactatatttgtaatcaaatgccttcttagatacacaattgtcagaagcagcacaaagagttgttagataatataagtcagctccagcggaaccagactaataaggtttgatagttgtgcttgtagatgcctgtaagaacaatatatcatttactgcagatagttgtaatgatcaattgtgatatttttaacctacacaggttactgcatttggtggagataaagttattaatctgctgcgtgccattgagagacatcatcggagattcagaaaaccaccaattggtccaattggtgctcatttggtaagattttgtaatgtttcttgatgacaataagttgagtaaatttgtataaatatgaaaaaagctctatatgcaaagccattgatactaattctaattaaattcattgaagcagaacaagcatgttaattaatgttttttcattgcagttgttagggtgggtctctccctttatattgttattatgcaagactagtgtagaataattgggattggtcttatcctatctggattaggagatttgctagtttatttagggtgttttatgttggcaattttttttttggaaattcttgccctatcagctaggtggttgaggctcacatacaaaactattttttttttaattgaatttattttcaagtctattttatttttttggtttagtctttagttgacaggctttagctcctaaagtatttattttgcctacaactattttcattcaaagctt

SEQ ID NO: 38469 - DNA, 2611 bp, Cannabis sativa
ccatggtccccacactagatgagataatatatacctcattataactagctgacactcattgcaatactcccactgagcatgcagtaacttgacatcttttacattcaaatgggattttaagatttatcaattttgaggcctagtccaattttccaatgagagatcgatatgacagaacatattatagtctcatctgataactatgtggtagagattttaggattgcttaaagctaaaaaaatatcttagagtagtgccactatgtgaaaaataaagattatgcaatttgctcattttttagcattctcaatgatctatcaacagaaatgatcatgtcatgctagatttgttgaaacaaaacatatgactcttacacaggtaaagacaactacttcaaatgtcataaccaaattcatttaatctactatcgatcgatagggtagaaaagattgtgtggttcatgacatctaatgtgtttctttcaccatctaagcatctacctaacaataaaatcatcaatagaatgattaaattacatgtatagatctcagtaataattgtgattgatacggagaaaagtattgacatgaatcacaatttttgataatggacatgtaagaacttacgacgagtaagcataagacattcaataaagaattttaatctcataattatctaataaggccaattgcgcattttgaatatctagcaaattttattaccaaaggtatcaattagttattgacaaaaaaaattcataataaatgcgcaaatcgtgatcaatgttttattacatattttttgataatatatgccccaaaagaatttcatgataataataacaacgaaattcaaaaaaaaaaattcttaaaatcaccaaaggcatatatataacaaaattatggaatgataatcaaagaaaaaggaaattgaatgagattaaattaattaatgataaattcatcacaattttatgattaagaaaattaacatgcttagactcacaaaagatgaatacataagcactcaattacttattcactaacacaattatgatatgaatacaattatattttcattcaataaaaaatataaaaagtaaaattgagagaaaaaatatatattttattcaatttagttatgctatcatgtgtcaattattaatttaaattgtccaaactcaaaatataatcacacatttaaatggaaatattaaaatggagtaaaatggtgaaaagttggtccaatttgggcctcccaagtgccctaacacgtcttaaatgttttttttgattttttttttgtctgaccgtaggagatgtcgtttttgaaaaatgacatgtcattcgccgaaaacgatgcacatccgttaacgaaaaacaagacgtcatttgtctgaaggagagccaaaactacatgtcgtttgaggtcatccctgacctttagttgagcacgtgggtcagatcttggccgtgcgatccgacatcgaacctgggtttcagaccgattgaaaacaccacctccggtgctttgtttctgatgccgtttgaggggaattttactatttttcatacacaatccatttccgatacccatttaagccaagaaactctaaaaactcaaaaatatgttgcatattttcatccctttatggtgtaaaaaaaacaaaaaaatttctcttttgtctttaaataacatattagcccaatatatgtttttaagagggggaggggggagtgaattaaaaatttaagcgaattttagtaaattaaaacttttaacacaaaactatgcaattaaatacttaattaaataaatacaagtaatatgaaaaacaatcatgtataacaaataatcaaacttgtaaagtaaagagtttaagggcaagaaattgcaaactctcaatttttacaaggtgcggtagagctaagccacttacgccctcggtcttcaaagctatggacctagctttgagttccagtatcgagctaagttaacaggcttgactaacccttacaactggaaaatttttaccaaggtgtttccaaacctcatacaatagttttgcactgccaatgactattaacctctttctcagatttttgtagtgacaatttcactataaccaggttgtttacaatactggtgccaacctcacctcaatcacaatatagaaatgtatttgaaattacaagaaattaactctagaagtatgatgatacaataaaaacctagagtgataagcaagcacacttgaaatatataaattttttttagcttaaagtgtgtggaaagtgtttgttggattttaaacttttgagctcattaatctcacttaaatacgttaggtatatgatataaatgcttagccaacttttatttttgagtgaaaatcgagtttatatagtgttggggtgaaaaatagtcgtttatagccgttagacgcgaaaaatgagacttccactgggcaaatcgattcaccagtttccaaccgctaaaccagtttcaggtgaactggttaacctttttggaactggttaattggattccaggcagtggcaaaaagttcaatttttcgcactaaaatgaccataactctctactcgattat

SEQ ID NO: 38470 - DNA, 1981 bp, Cannabis sativa
tggaaaggacataacactttccaaggtgtcagaatcctaataaatctttagatccggatgggatgacttcggcattctatcaaaagagttggtctatatttggagaggatgtggtgtctatggtcaaaaattttatttcatctggggttattttgcctggtctaaatgatagaaatttagtctttattccgaagaaaaagaatcctaccgggatggatgatcttcgtccaatcgctttatgtaatgtcctatacaaaattatttctaaagtattggtgagtagattgaaaggtttcttcaccaaattgtttctccataaaagagtgctttcattccaaggcggttcatctcgaataatattttggcctcctttgaagtcttgcattactttaacaggaaatctcaggggaagaaaggtttcatggagcttaagctcgacatgagcaaggcctatgatagaattgaatggacgtttctggaagcaattcttttgaagatgggttttcactggaattgggttgctctgattcttagtagtgtgcaatctgtgcaatatcatattattcatggaggttagcagtttggtcccatcgttccaactcgtggtattcatcaaggcgaccatttatcttagtacttatttattctttgtgtagaaggtttctcggcactattttgatggcatgagagtaacaagttgacttatgggtgtaaaattgctcgaggggcaccctccatctctcatatgttatttcgagatgatagctacttgtattgtcaggctactaagattgaagctttcaatataatgactcttttggggaaatttgagtaggcctccggccaaaaagttaacttggctaaatcttttatcttctttagttctgatactgaagaggttatgagggatagattatgaggatcactagtatggtacaggcagatgataaaagtatgtacttaggacttcctagtactatgggaaggataagtctgccatgttgggttttttgaaggatcgtgtgcagaaaaaggtggatagttgggatggtaagatgttgtctcgggctggcaaagaagtcttgattaaactagttgccaagctttgtctagttatgccatgagtgtttttcttttgcctctagtgtgtcgggagttggagaggatcttaagttcttgtttggggtatgcctcttcttgctaggaaaaggatatctcatgggagtcttgggatagaatggtggtccataaacataatggagggatgggtttttgaagccttcatgatcataatttagccatgttgggtaagcaaggttagcaccttttagttaacaaaacttcattggttggtcgcatttttgaagctcagtactatcctcatggttctttgctttcagcaagcatcatgaataatcctagttatgtctggcgtaacatttttgaaagttagtctttgattaaagcgggtttttggtggagtaaaataagtggctcactagtggatgttttgcatcaaccgtgacttatggacaaagacaacccgtatgtttcttcctctcacctagctttgataggaactaaagtctctcagttaatgcaattgagtttgagacagtgggatgaggagttactaaatgatttatttgatgaaactgataaggagcttatttgttctattgtgattagtgcttcggcaacccatgatactcattattggtactatgaagctttgggactattcggttaaaaatgcatataaacttctccaacttataaatggtcgttgttccagtgtcactaactttagtctatggaggatttggagtttgaaaattccagcgaaggtctctgttttcttgtggcgtccttgttgtaacaacctaccaactacagtcaatctgattgggaaacatgttgatgtccctgctgtgtattccttttttgtcagactgaaagggaagctgtggaccatgttctt

SEQ ID NO: 38471 - DNA, 2905 bp, Cannabis sativa
cacattttttctaacataaagccccaattttttctttttcctgtggcccactttgtttcagggccgaccctgctctttacgcctgagtcttgtaaatgccaaagctgcaaatctgttgaaaatggatagtttggattgtgacatggaagtgtttaatgatctgtttgaaccaagggatatcgtgagtttaatccttcaaattccttcgttaactcaaaactgtcttttttggttcaaagagttgtctggattgtataatgttaagagtgcctactaactaatccaggagattaaaggagatgccaatttggaggagattttgttgaataaattttggaagaacttttggagccttaagttttcccctaaaatgaagaacctggtttggagagctgggagtggttgtctccccacgatgcttcagcttcgctctaagcatgttggggttgcatcactttgtccagcttgctttgtacaggatgaatccattttgcacgcattggtaacatgtccagctgctaaattatgctgagatcgcgttggtattggagccgaagtgcagcaagaggcaagctttagtcttggtgtgttggaaaatttcaaatgctcgatcgggaaagaagagagctgctgatggaaatttgttggtctgttaagaatgcgagaaatgacagggttttgcaaaatataactgttgttgtggatatatcatagtttcgtcagcaaaagaattccttaaccaatggctaaatgctcaaaaaagctggtttcgaggcttcattttttggttttccacctgaggacagctgagcattgggtggctccacaatacagtagtgttaaggttaatgttgacgcatcattgttcagtgagacccgtcaagttgggatttctttggtggctcgtgacgcacagagtttgttgattgaaggctgcacgaagatgtttcatggacagttttctcctacaacagccgaagtcatggggattcgagaagcactaagttggatcaaggtacgaaaatggtcacatgtgacacttgaaacggattgtctctcagttgttcaaagccttacgtagttttattgttatgatttccatgtttggtcaaatgggttaatgtatgtaaggctatgcttaatgatttaaaaaatgttgctatttattttgttagacaattagctaatatggtggctcacaattttgttagagcctctatattgtatcctgattgtagcttcaatttagagtctctgatttgttaccttgtttggtaactgagttggttatctaataaaattattatattcctttcaaaaaataaaactttcatattcaaaaaatcaaatgttgaaaatatttttctttcatgaagatgtttattatagctacaacattgaatttataaatttttgtaaaattttgaataaaattttgatattccaatttattaagcgtgttaaaagatcttaaatttatttttgatacattaaattatttaaaattagaaaataaatcgcactttgtattttatttgtattttatttaataataattaagtctattaattaaaaaaagttaaaaatactaaaaaaatgtgttttcttctttttaaataatttacagttaaaatttacattggtgatattgtaagttagtatgacacctacccgaacaaaattagaaaaatatatttggcatgtgtttttggaggcaaaatttgagaaagagtttgtagttagcattccagtctaaattatatatctaataaaattcaataataaatcaagtttttgcgctaattaaacacagttaagtgttatattccaataatacactccttacaaactgccgaataacgtgcctatccgttcaaaccaaaatgcattctccaatataaaccattacactaaaacaataatcaccacgtaaacgtaattttaatcactagctaaagaaagaattaattaaccagaaaattaagaaaacaaaaatggagtaccacaacgttactactttgtttcttctcttcttggtcaccattattcttttctccattgggccacatccaacaaccgcagccgatccaaaccaacacaaaactggcatcaaaagcgccaccctaatccctaccgcgtgccggtatgccgtgaaaaaaggtttctgcaatgcaatgctcgaagccgatcccaactccaaagatgccgacttacccggcttagggctcatcgctctcagacaagcggcctctaatgcttctgatatcgctgagtactttaagactttgttaaatgattccagcctggaccctgaagtccaggatggtgcatcagaatgtctagaaatgtatctcgacgcggctgaacagcttgatgattcagccgcggcgttgatgtccaaaggttataaggacgttaacgcttgggtcgacgttgccatcaccgactcgaaatcatgtgacgttgcacttgtgggacatgagtccgtgttgggtgggaagagccaagtgtttcgttggttgtgtgagaatgctttggctgttaataaagtgttggtcgatgagaaaaattgaaaaataatattgattgatgtgtgttcgttgtcgtttggtcaaacgggttgtcgtttaaatatgatctttgatcaacaattaacgtagtgattaatcagctctttcattgaaaattggctaaattattgtgtttggttggttgatgtattgatagtgtttgatctggataccgattatacaatattaattcaacgaaatcacggcatgtctaatatagataaacatgtacatttttaatattatatattttctttttagtttttttttttttttcaatgagagatctagtaattagagcacttcattagtttttttactctatttttcaaaat

SEQ ID NO: 38472 - DNA, 2268 bp, Cannabis sativa
gaccgctgtcaggctcgttcttcctggtgaattggccaaacatgcggtttcggaggggaccaaggcggtaaccaaatttaccagctcttgaagccgtaatctttgtgtttagggcagggtttcaatgatttcttgagtaattgtttgaacaaattagggctagggattttgtctttcaatataattatgttattttcaatgatatagaagcgacttgtagttctttcactactgatctttgataaatgattgaaggaaatattaagacaattatattaattggtttctttttgatctgtttctgtggtgatttcaaattttactatgggaagaacttgaatatggttactcattctttttttcctctgatcgaaagtgtttataattaagttattaaacaagttatatatataattgaagcccaagtccaacaacctttgccaaagttgttgggtttcctctttacaacttatttttaaattgccttacgctgttagtgacagattttcttaagaagtttacattataattggctcaccattttttcgattccctctccaacaataaaagcctcaactaggctattaaattcatggcccctaatttattttctttactaaataaatgtaccacattcaaatagtccaaaagaatattttaattttaagcattccaattggctaatgtgttgaatatacctgctcttatttgtgttgtgttgaatcaactttcttctgattcgctaatgtcgaacttatcttgcaagactgcaatttggcttagcgaagctattcgattgttgatgtaacagttttatcttatcaacaaacatataaggctcctttggtaccccttattgtgttgtattgtattatttaatacaatactatgtttagtattgacttgtattaatatattgtattatattttattagtattatttaattcgagtcgcggtcctgggtctaggttcgagtctaggttggggttggggttggtgtctgggtcccagatctggattgaagattgttgttgaccccgaatcttttgtaaatattataatacaagctaatatcgatcatttgttatttattatttaatacaatacgaagcgtgccaaacgagttcatattgtgttaaattattaatatataattgtttcatatacaagctcgattacactttaaaaattactctgagaaaaaatcgttcgtaaggaagaatgcaaatttttttcttgtgttttagaggatgtatctttgattagttgctattactgctttattttaacattataaaataattaataaataaattgaaatatgttgatggaaaacaaaaaactaaaaattaaacaaatcacaaattcttagctcattttttcttcctcatttcttgtttgtttgttacttttttagttacaaaagagggcaattcatctaggtcactattgcatgcacacagccaatcaatatattagaattttttttgccaatttgagttaccaaccgtgtccagcctcttcttcatcataattcattcccaaattccaattcaaactaccaataatcacagggcaatcttggaattttatttctcacatcactacatagccaattcaatttaccaataaaagaaaaaacactgtattacttaaccatgtctagccaaagcttaaaaaaaatgacatattacattttagagaaagagatagaacaaaacaaaagttgctttatttaagaaattttagataagagagcaaaaatgggaattaagaaaatgattatttgaattagtctttatagtactcttacaatgtgcatgtgaaagctgttcaaaactagcttaattatctatagctactactactactctataaatactctcatatatatgtatagttccaactattctactcaaacccttttcttaacttgttaagaaattgaatagttgaagcaaaaagatgatcatgatgagaaacttcctcatcataaaatttagtgcatggattgtgataataataatgtatgtattagttcataagtttattgctactacttctgcaatggaggattgtgcaacactggaagaagggtattatggatcaacatgtccttcagcagaagatatagtgaagaatgctgtggagagagctgtgtgtgaaaatcctggccttgcagctggtctcattagaatgcattttcatgactgttttgttagggtacgtactccctactccctattaacactactctttttcttttt

SEQ ID NO: 38473 - DNA, 1428 bp, Cannabis sativa
tttaatatatattaaataaataatattatttaaataatttttagaggtgcttactaatacaatattttaaaacaataagtactaaaaatgttataaaataaagatacaataaaatattatatttttaagtaatgtagaggttttactcttaaaaaatgctactattggagatgctctaagggatactttatgggttcaacacattttaatttaataaataatataaaaaaaaactactatacaatcacaactcactatattggtgttggacacctttattaacttgcttagtgagagagttagttagtgagttgtcaagtgtgagagagtttgttatattagcaacttgtaacagtcttttacaacttattactgaatcgtatataagctccattgactgagctttgttctaactttagtatcagttcatcattaatgatgttcaatttatcattctctttttacttttactcttttaaaactaaaatggtatcagagccacaataatcttatgttcaatttgctttctctttctgcgttatcttttgtgcttctctattctttgattaatatagccaaaggacttgtagtttagattcatcatggaacaaatcaagaagataatctagaaaattcaaatcactctttcaatctagattataatcctcgttttgatgatctaagaagtccttaatttcattcaaaggcttatcatctgaacactacattagtaccaaaactcctcactgcttgcgagaatgatagctcatggagaaggtctataatggtggctctaatggcgagaaacaaggtagagtttgtcgatggtcaattagcttagcctggtgaagatgatgaagattgtgactcgtggtgttgatgtaacagtttgatcatttcatgtatcatacatgttgtttcgctgaaattgctaacaacattatgtatcttgagaatgcgacctcgatttggtcggagctacaagaaaggtttaaaaaaagaaatgcacatcacgtgtttgaggcaaaatgtactacgaatattcttcattaggggtcgaacaatattattagtgttatactcgattaaaatctttgtgggatttaattcacgaatatagaccacattctgtttagttgtggtgctaggaaaatcatttagtaatatcaagaagaaaatcgtgttcttaaatttttggttggattaaatgactctttttgtctagctagatctcaagttttgatgcaagatcctttgccacgaattaacaaggtttatacctccactattaaagaagaaaagcaaagaggtattatctctattcaggtcccaggagagtttgtagggagtatacaacccttcaaaccagctactgtatgttcatattttggaatttgtgatcatatcatggctgtattatcgtcttca

SEQ ID NO: 38474 - DNA, 1931 bp, Cannabis sativa
tttattttaattttttttagaaagaaataattaaaatagtccggtctattcttaaactaaatacaagattgctttcagcataatccaatcttgtctagttcagttcagtctaattcaattcaatcctttccagtccaatcttgagttccaaacgggtcctaaatgtataactagcaggaaaagctattcaagagggtgtggagtttgtgtaaactaaagttgttcttgtgatgttttccaagtgaggaatacttggaacttgttttgtaatcatatcaataaaagtaacctaccttatagtcttacaagagaataaaaggagaaataatagactgaaatttcattggtagtatattgaatccatatttaaacaatggctgtgtcttccatcaattggaaggacaaggtaatgtggtggtttgggattcaaaaaacacaaaggtatgatacaccaccaattaggttcacttattctaggagacctaagaaataagctttgaataatagcagtaataatagcataaagaatagaaatattagctgaggtggcagtattatgaatgagctgtcaaaatattagttaatagttttgttagtagtgtctataaatattagtgagaattgtaattgagacggaaggaaaagaagaatcactttgtaaacagagtcttgaactcaaggagacccccgggcttctcgaattgcctagcaccattgttacttgctgaaattcaataaaacttcaattctttctaccccattcttgtacctgttctagtgtgtatcaaagtggtatcagagcagttcttctgggaagtaaagaatgttgaagaaaccaggaaaatcagaccaagaacgagcggaggagatgtcggaggaggaggttgtcgactccaagattggtgaagttaaaacggaggttggctctgtacgagcagatatcagggatttcagggaagagatgcggcaactctaggaaatggtcggacgtcttctgggaaaacaaacagagaagtcgggttctatcagaaatcaagaacttggcgttgataagctgacctctcggacgttgaaaagaatggcgaggatgggacagcgactaggccatgagaaatcttcgacgccagatggggaaaacagcagtgccaccttcgaacatcgccgggatgttcgattacgccgtttggaactgccaatatttgacggagttgatcctgatgggtggtttatgcgggttgagaagtactttgcactccaaagatttaacaatgaagaaatggttgaggcagccaccattagcttcgaagggaaggctctaacttgcttttaatgggagcttcgtcggaggccgatcctactttgggaagatcttatgttacttctcttgaataaattctgaaacacaaggatctttacatgaacaatttcttgattttcggcaaatcggcacggttaaggaatattgtgaggagttgctggaaccattagatggggtatccgacgctgtggctttgggtcaattttttttcggtctcaaacggggtttgaaggaggaattgtgattgtttgaactgaggaccttgaataaagcaatggagattgcagccaagatcgagagcaagaaccggtctttatttggaaatcgttctccttggggcaattcccaatacacgagccgccacgaagatcgcagggacaccgaattttcatccaaggatcggaaacccatggccaataccggaggatgatcgactcagaattgcaagagaagtgacgaaagggaatttgttatcggtgtgataacaaatggtcgctgggaatgtgaaaagaaagagctcattgttattgtgactcatgacgatgagggtgaccgaggttgcgaggaggactcaaattctatgcaagaggaggatctcaacctagataatgcg

SEQ ID NO: 38475 - DNA, 2605 bp, Cannabis sativa
agagctaatttctgttgaatatttccaagattaacgataaatttagggacattttgtttgtttgtttgtttgtttttctcgaatgattcagtgttttgctttgtagtttttggttccatgggtttttttgttgatctgatatgtacattgaaggaatatgaatcattgtaggctaagatgactgcgcattgttaacatattgtgaaatttggagtttgtttttttatatgaatgaatgagaatgtggattggtctgttttgctgtttgttgcagttggaattgaggcagatgatgagatgattaacctccttttgtctgaggtcaagggcaaagatctgacagagctaattgcatctggaagggagaagctagcatcagtcccatctggtggtggtgctgttgctttctctgcacccgcaggtggcaccgacgctgccccagctgctgcggcggagtcaaagaaggaagagaaggttgaagagaaggaagaatcagacgaggtaagctcttttcatttattaagctgtttggttttgatggtttagtaatcttttgaattttcactaattgtgtgttatgtattgttttgttcaggatgatatgattttcagtctctttgactagaagctttgattgggagattttgaggttttgctattggactttagtttttttttttatcctatttttatttagatgaggaggaagagaaatttgagacacagtgacttgctagttttccacagtttaacctttaatatgagtacattgtagtattttccttttaatcttgctttggccacctttgttctgtgctcattttataactcttcttagttactcagaattgtctttgttcttgttaactcaattggtttgttatctgatgttgttatctggattcaaattatttctaaacaaaacctcttaactctactgtatttggtcaactatataagataaagaataggtaatagcatgtgctattttcttgaattatctttcatcagcaccaagtcttgtctcatcactataaatacacaatagtgtcagtttagtttaattgtagcaactttgtcaaaatgctgaaaggctcagagtgtccacttcgtccttatcgcatggtgcaatgtaacagccccttgccctcaccctcctgtcacatggtacatagcaccatacacgtacggaacaggttcccagcaacatgaaaatttaggaagagacaccactgtggggtccaaataagatgcaccatgcatgcaaaatttaatgtttcatacataatataaagacagatacttttattatttaattatttttaactgtaaaaagatttataatttagggatatttacagtgaaatttttaatatttgcaattgttaaatatatgatactaatagagaaggtggtgctagaaagattttgccattaatttctttataatttaataatttaatgcaatatttaaatttaatgttaattagaatttttgcttcatatatttttacatgtattaaattacattcttgaactatttttttttcttctaaagtattgagattatttaaagatttttgtttaattttttttctttctattttattaatttggtgattgtttatgtattaaattatgttcttttagattttaatatctattaaatcatgtttttcgaattttgacgtgtaccaaacatgtcctctaaatttttcaatagtttcttttaacgggaacataatttagtatatgttaaagtttgttagtaaaactcataacaagttttttttttttttttttgagataactcataacaagtctttaattataagatattaaaaatgatataaaagtagtgatataaaagcatataggctactgcaaattttgcataagccatattgttgtgatttatattagataaacttttctcatgtcgcaaatttggataacttttggcacaccatcatattttacaatacgagctataataaatcacccattggagactctaagaagctctagactaaggcatctctatttttctagggaacacttaatgagatgtggggtgacttattgggagcaagtaaaagtgtggtgatgatattgatacacacctcaaaacaacatgttcataagaaagacgagtactaagtagtggaggcagaagatagtacgagcagtaatagctccacttccttggcgccctgaccattcatactccaacaccatcaccaccctacgtcctgtcaacaggctttgcttagtacaagccacaaggttgtaagtcaccaataaaattaatgtaaaaaaaaaaatacacatttgacagtaataaaagggcaagactccattttgaatttgcaacccattcttccaagtgctctttaagttttctaactttttattttttattttccaaccataattgattcacaattctcacggccgtgaataataataatttcatgttaaatcgtttaaataattactaatcaagtaatgtttttcaatgaagtgttcaaaaaatatcaattcaattcaatctgtgccattcaatttagtctgcaaagtgtagatacttgtgcagattagattg

SEQ ID NO: 38476 - DNA, 2096 bp, Cannabis sativa
tgtgaggttccataagattcaagccggtattaagagagatagtgcaaacgaaagataaaataaaggttaacttctctcagactgaattttagtaatttaattttttccatttttgcttagtgtaagaagtggcagtagctgatcaaggggaaatggaggtatcatttgatttgggttagattcgttttgcctgaaaacagattcattttgtgattggccttgcttggaagacttctaacaagagacaggctgctctgttttggtagaatacaggattgttgtctcttgtgtaatacggctgctgaaaattattggagttagtctcacatttgttaatgtgtagaaataaattgtcatatataaatgaatgggctactcctctcattgtcaattgcttttgagatggaaccccattcatcttatcctaaattctatcatggttttagagtcgcttatgatccgttgtgagcttaaagtaccgctggtccaaaaagaagagccataaaaagagtcgtttgtgattcgttgtgagcccaaagtgccgccggtccaaaatacgagccaaacttaaaaactttcgctgtctcccatttaacctccatttggcacctttcgtccaatgtgtgccaattttcattgttggggtctttaacctgtttcaaaatccacaaatttccaatgcgtacacccaaaaattttccaaaatttggcatagtcggactctttcaaatatcacattcggtcatgtggtctcttaaaagttgttcgttatacccacattttccagacccaaacatgaagaaggtgtattagagttagtctcacgttattaatgtgtggaaataaattgtcatatataaaatgaatgagctaccccacccattatcaattaattttaagataaaacctcattcatcttatctcaaattctaacaaaaatcattatcattttttttttcttttttgttttgtgtgtgttactacagtaagtaagtttttggggaaattgctaagtggtgtgggatctcctacagaggtgtagagctacagaaaatgatccattgagtgcagaaaaagaagttgtcaaaaaagagaagaagtgtgctactgtctattattgatgcctggtttatggtatacgtcattgtagaaattctatttttggggagcaaaagcttcctatgatacatgttacagtaaaaaaaatataatgcatattgtaagtattcaattcatcaactttaagaagttcaatagagtagacaatgatgggtaggggagcttattagagtgtgtaattaattgtttttggctttttcatttggttgtaattgagttttgtgtgaatatatagattactaattttattttaatttttggttttttaaaaaagaaaaaaaagctgccagagtggtgtaattaactcttggatcatcgtatcatagtctaaagttggttttgccaattattccttgacctaccaatgatataatcaggctattgacttgttacttgttaaagaaaacattattgagtcatccatatcaaaatttaccaataaacaattcacttgttactcgtaaattaactaaatcctatcaaactccactctgtaatttaatttaacgaaacatttttattataatccagtgaaagactgacccttaaatataataaacagatcaatttcagtgcccacctggtattgagattaaccagacagaaaaatgacaacagcctatatatgaaacttgattcttgaagcacaatctgcttacacaaaagatttactctaatttacatttacttatatgccatgagcctaggccatcagctagctaaccaagtatcctaccctgtttatattataattccatttatttcattttaagaaaatccaacattttttaaactgctccaatttaattagtgatcgatgcatatatgcttatttttcatccctagagtaaaaagtgtctggcgactacatttaattaaaaaaagaaaaactagcatcagctaacaaagaataataaggtaatattatatagaaatatatatatacatatatatattgttgtgattggtcactaata

SEQ ID NO: 38477 - DNA, 2066 bp, Cannabis sativa
  modified_base (2016)..(2020): a, c, t, g, unknown or other
acgagatgacacaagtagtcattcacggggctagtttgcatatgcacatgggatggatgtaccatgttggaaagaacagagttcttacatatgctactagtctggttgcttgtcttgagggcctgccaacatgcgtggaagcatggtgcctttgaggattaaatgtatgggtatcattgggccatgagggagactgttcgaacaatattgtatgggtgtcatttggccaaatgcacacttgagagggttgagattcaatctgtagtgtctaagaatgctaaagaactcttccaggtctctctcgtgtacttctatcttcttagacttcactagcatatcatcaatataaacatctatgttgttcccaatgtaaccatgaaacattcatttgactagtctttgatatgtgggcccaacattcttgagaccaaatgacttcaccttgtagcagtagagttcaacatctcatttgaagctagtatgctctttgctaggcaggtgcatgctaatttggttgtagcttgagtaagcatctatgaacgtgggcaactcatggccagtagtggcatctaatagttggtcaatgcttggaagcgataatcaatctttcaagcaatttttattcaggtctgtcaagttgatgcaagttctccatttcatatttggtttaggtacaagcacaaggttggatatccatactgtatagaaagcttacatgatgatttttttctcatgtaatttctcaacttcttccttcaaggcctttaatctcactctataaaaaagtcttctcttctattgaactggcttgaagttttctttgtcaacgttgagtgtatgaatgaagacatcaggcttaaggccaaccatgtctttatgtgaccaggtgaaaatgtctcggttgcatcgaagggaactaagtaagttcatttgggtctcctccaagttctttcaaatcttcaccattttggttgggtccttttcgtctagtggcacttcttctaactcctcagttggaccaactcctgagacattgccccaaaatgaggagctacatcctcaccttagtgttgggtgtccctttattttcgacctaatgcaacttatgaattggatggtgctggtatcattgatgaagctttttgagctaatgcgagagacatgtttttgcatttttgtgcctgcctctggttgcctctcaagaaagctataccaactatagttggaatttcattaccaagtgaaaaatagaggttgttgctggcgagtcatacaatgttggtctcccaagtacaacattatattgagatagtacatcaattacaaaaacagtggctatcactgtgtttgacattgaaacaactcccaatgtcaattccatcttgatcgttccaattggtatggtaccagtaccattgagaccatatgaaaattgaacacctggttctaagtccttcactaaaaattccattctctcctaacatttcttgtagagaatgttaactaatgatctattgttgattagagtcttcgacactatcatattggcagtctgaactttaaccattagaggatcgtcttgtggataagtgacattagttgcatcctcctacctaaacatgatcggtaaaggttcatatcaaggcaactttggaggcctctccttaactactggtacttcagaagttggctcatggcgtagtgagtacatgtaactctcatgagaatttcttgagttgcttgctagatgtggttcttcaaaaatcccatgtaagtggctttctacaggtgcaacttgaagaggcaaagcttgcccctattgcgctttgctaggtttcctatctttaggtaaaatgtatcactgaaatttcacatgcttttgacggatgagaaactcaatctcttctctaagttgattacattttttagtttcatgatctagtctctaagagtttgtaaggtaatgttggaaatattttaccaggatctaaatttactaccaagtatgtttcattnnnnncctaatatgaattctaaaacaacgaaataaacacataagagtttaa

SEQ ID NO: 38478 - DNA, 2742 bp, Cannabis sativa
cttcatctcattgaaggctgacattcgactaggaaaccaaccattagttgttggccgaatccctagatgaaattgaagatatcagagaaaggtttgagcttagaaaggtggcgtatcaacaaagggttgcaaaacactacaaggttaaagatacaaaaatttaagcctggagatatggtgttatgatgagtattcttgtaaatgaaagacgcagtagtaggagtacttgggcctgattgggaaggaccatatgtcatcattgaagtgcttgaacccaaaacttataagttagcagactatgactataacttgaagctagtgccaataccatgataccaaaacgaggggcatctacgatagtactacaaatagaagtattgtcttcaaaacagcttgcttcacagtgagatcactttacctcgtgaaagtgaatcaatcgccttttaaactaacgatatgtgacgaagttgtctctaggttaagaggtacatcattatggtatggctcctatactaataagtcaaacagggcattagtgtagtgcaaatcacatcaactaagcttggatgaagaaggaaacatacaactactaccttaaagtgtacttttttcgttcaacttagttcacatgaatgtgattgtatttactttgatgagagaaagcgttgaacaaagttttttttatacttcatttaaattaatcaattacaattcacagacctaacgacattctcaagtgatgagttaaagcttgtgggctggtcttgagataacttcagttgtttctttagtgagctgaacactacaacctacgactcgttagataagtggagagttctcacacgtgtaaaataactcaagagccatgatcaagaaggcccaagaggatgtgataagtggtaaaaataagaaacaacacattatttcactaagttgaaataatgtcggaaaactccaaatctattgcccgttaatggttttcaattttcgcctaattgtcttttgattttaagcccatctcatctaacctgaccctagtgtgaaggctataaataaaaagagaggataactttggcaatcaaataattcaaagttattcaaccctagagaaagcactcttcttcttcgccttctattcttggattactaaagtctatttctctcttaaaatatgttccaatggttaattgaataccatcatacactaatcaagaaggtaatcaaacctctagattatgaagaactgttgcattttggtttaaggaaggagatcctgactcagtacttggtgatattgtactacagaattgatttgagggttagagtactgagtgaaaggatccattatattctgctaccattaatgtaagtgattataaaattttacatgtttattggtcattttaagtatttcatattttacgatgctagattttatattgtataatcaacatacatgattaataaattaaaatcctggtaaaataagttccaacaatccatatctatagtaatcgtcaatgaaaatgacaaagtacttaaatctacccatgcttgcacatttagtggtctacagacacatgcatgaaccattcgagtggtactatggcatgatttccctgtgcgaagaaagagcgcttagccattttgccttctagacatgacttgcagataggtaattctctaagagtgacatttttcaatagaccacccatggttagtctacgtaatagataatatgaccaagccgtaagttccataaatatatttcttcatcattattaatatttttcttttttatagtttcttggtttagcaacactaagaaagttcgttattaagagcaatatgtttatctgattgtagaatataaagtccactttccaatgaggaaactcataattgaagtcctttatgagaaatatttcaatataaactcaaaaatgtcaatttaaatttaaactcaaaaatgtcaatttaaaatgttgtagttttaatttttaaacagaaattaaatttctactaaattttaaaataaataaaacattgtctaaaaagaaaaatttattcctaaacttgaggaaggcttttcctctagctttgaccgaaaccatttcaccattaccaactcttagattcaactcgctaggactcaaatactcccatgtttcaagaacctataatgaagtacaaacatggttagtagatctataatcaacaatccaaatggatttatcattctttaaaaacgtatgattcaaagaaaaaatcataagaagtattactttcatttttggtagcaagatatttgggacatttagattttaaatgtcccctcttaccactgtaaaaacatcttataggtatcttcaaaatattttgactaggcaattgaaaagaaccgtgatttcatttttttccttgttgttctttttgttggttcaatttttcgatcaagaacaatcgaagaagatgaagagtgccccaaaattctttcaactgagtccaatggtatagcattttcagaaattataagacttttcaaattagatttctctaattttgaatcatcttctttaacaacaatttttccttttcctttagtgtcgggaataatctttgaacctaagttccttacccttactattatctttttataagctcttagttcagctttgggcttgtcaatgtcggatgaattccaattattcatcatgaacaatacaataaattggtggaatt

SEQ ID NO: 38479 - DNA, 1720 bp, Cannabis sativa
aaagtaaccatttccccgatgtccaaccaaacacgccctaaacaaaacccgaaaaaaaaaacccaaatttcacgctcgcaagggaggagtaggacccagggaatcagacggagaggactgcgtggaatcagcgggtggcgtggtcagtaaattcatcggtggaatcaacggccgtgatctaccccgtttcgggccttcgttgatcgaaaggtaattactttgtccctaaatttaactaaaaattaataaaataatcaaccttttgttcaggatatcttgaccttttttgaaaattctttctctgctccttgccttgaccaacgaagagagagggagagtttagagcgaaggagacataaatatgggggtgttgaattcgagcaatgggtatgcgtatctaatggtgattatggttttggtggtattaccttcagacacaacagcgaaagagcaattgactactagagaatgtgaagatctgggtttcacaggccttgctttgtgttctgattgcaattctcttgctgagtatgtcaaggaccaaggttaggtttcccttttctacaattttgaattttctttctttcctactttatttttttttcttcttttcgattcaattacttgtttttgtgattttgaagattaggggttaattgaaatctattgcataaactccttcgagctttgttatgtttagagtatgttaaatttgatgcctaagatttactcatttcataacccaacattgataaaaaatataattgagtgatccaaagcagaaagtattggctttaacataaaaattaaagacaggtgaaacaaggagagcaaatttttgataagacaaacttaaattagtaagaattcatatccttatggtttataaatgttggttttcagcatgagttgtagaacaatggatctgaggtttgagaagttaggtattcaattgcaagaatctttgtctggctttaaaagatattgcagattcctaattgcttcttgagccagtgttttcatcagcatagagacttgtgtaacttgtgtccaatattttgcatatttctaaaaagctcaattttgattgcagaactggtagcagaatgtctgaagtgttgcacggaagattctaatgattcttccagcaaggtatgaatgatgatcttttttcctctattaattattagtttaggtatcaagtgaaactatgtgtttgaagtttccttccttgcaaaactttaaactttagtttataaatgatatggttgcccaacctggttcgtgttttggcttccacacagtatgaactggtgttgtaatatggaaatttggaagttggtagtacttttttagttttaccctgtggataatagggttttcattagcattttacaatacacttggattttatttttctgtgttttacaagaaagaaagaattgcttaaggaactatattgaactacagataacctattctggtgccatattggaagtgtgcatgaggaaactggtgttctatcccgaaattgttggtttcatcgaagaagagaaggaccgctttccctttgttaaagttcaatacattttcaattcaccacccaaactgaacatgcttgatgatgctggccaacaaaaggagaccataaggtaagacccttttccacaagcatcaaagaaacaatcgtattggcttgccagagtcctgccacttttat

SEQ ID NO: 38480 - DNA, 2657 bp, Cannabis sativa
  modified_base (55)..(67): a, c, t, g, unknown or other
atgcaacataaaatgtgatttctgatctttattagtaaatctaattatattgaannnnnnnnnnnnnagggcacaaaacccaacattatttgtaagggtatgagaatggtaagagagttgacaatgagtcgtttggttttgtcgatggggatttgtcagagttgaggaatatagcatttgataaattactgtgggatagaacttttcactacatgaatttggcctttaaggatgacggcaatatctattataagattgagaagaccaaagaagaaaaggataagctctgttcttttaaatttcaagggtttcaatttgctttcctcatttggttgttcgagatacttccaagcctatctcctaattactgcaagaggattgcgaatacatatcctcgaatgctaaattgggagagtacttacaagaaaaaaattgggggttatttggaacttgtttctgaggtttttaacaatgttgaggtaccttttactttttataactggtttccttttttttcatagtttacctataactggttttttaacatgcttgatttcttgccaatttttcaggccactgtgaaggattttaatccagttggtcgtgagctgaagaactctgccatgcaaaaccgaaagttcgaaccggtttatcttccgaagaaacctcgaggtttcgatcggaaggtatgtctttttatgcttttttttcttattaattgtgtttttatattttttttatttagtttgttggttttttttatatgttttttttttatttttgttatgttttattgtttatttttagttttccaatttggagaaggctttggtttgtattcaagaggacgaaaagaaaattttgttgagtataaaaatttgaaggatgagtttagtatgaaatttgatgaagttattgaattgttgaagagcaagaaagggtcatttgtgcccaaagattttgaggagaaggttgaagattcttgttcagagaatctggatgttggtgcgaatgatgatgagttgctcgatccgttgtcacccgaggtattttttcttttattttttttttgtttttctgtttttataattggttatttctttttttactatggtcttttatgttttccttttttattgtcttttataaccggttatttttttgtatgttctttttttttattctttctctgtttagaacccggttatgactatattttttgttctatctttgtaggttgtttcaaaagctaaacttcctgaatatgatgatgaggaaggtgggctgcaattgtcagttgttcgggaagataaggttgtttgtttgttgctttgttattatggatgtttttattataactagttttttatagcttgtaagtttaattgattcgtgtttttttccaaattcaatcttgtttaggtgaggtgaaggatgagggttgtgtgttttcttatgaaaccattaaagtcgaccaatcaattttggattaggttgacagcctcactcgggcatatgcctccccaattagtgcaaagaatgatcaatgggatttaggatcaagacctgattatgcatcccctattgtggatgatgaggttgaggtactagatgtactacctttgcaatccacggttgctgtaaagagacaagcaaaacctggattgcattgtagatctccttttgtcaacgagtttgattcttctgaacaaaaagttcaaaataagaaaaagaatgagccatctagtgaattagactttgaccctaagtagttgtttccttttgttaaagagattgggatgaacactggtgccgaagattgcgaggaataccttaagtggatcgaaggtgcttggttgttgaagaagaagtatgtgttttattgttctgtccttgttttttttaatagttgatgaaatatattttctaactgtttttttttcattttggatttttttcttgtaatttcaggaacaatgaaaaaacagctggcgacattgatcctccctttgattcaagcatagctcaaatcgatgacaagtcttggtttgtgattttacagacttgtggcaaagaattgttcgatttggtacgtaactggttattttttattctgtctatttttattttgtttagtttctttgctttttcaatttttaactggttattgtttttatttatggtgtgcagcatctgaatatggcaatctactatcttaggaagagcatcttattcgatgcgaatgttaataagagagtgatgaccacatggccatattttgatagtgtatgctgattttatcaaggcaaaacgtaatccgagtgtcatcaggtacgataatatggtcaccgattacattctagggcaatataacttttgtttccagccttggattggtgttgacgatattgtcggtccgtgtcatgtcggtcttcgacaactttggatttttcttcactttagcattttaaggaggaagatcatcgtattcaattcaatgatgaatacaaagacaaatcaaaagaagatcttgcctgatctccttgcgtactgtgagttactgccatacttccttgatttttcaaagttttatgatgttagtgttgggttttatgccctaaataaaactcatttcacataatcagatttacttatta

SEQ ID NO: 38481 - DNA, 1433 bp, Cannabis sativa
  modified_base (1334)..(1335): a, c, t, g, unknown or other
ggagaatttttaacggccagaaaagttcaggggacatgatttggtaatgtcaatgttcgggggataaaaatcctaattagccttaataattatacatataaatacatatgtgtagcaattataataacaattattaaaatatcatcttttcctctttactctttcctctttctactaccgtgatcttattatctcttcagatttcaccattcacggtctctcttcttcaacctccacttcaagtatccatttcaaaattaaaaaacttcacttcaagtactaatctttgcatacttcttattctaatggtgaatttctttggtttacaatgttcacttgtatattaaaaatgcatacttgaagtttaataatcctttatattacacacaagataaatagcaatatctgttttataattttttcaaaagccttaaaaacgtataaaaaaagtatctgttttatagtatgacctcaaaaaactaaacggttaaccaacaaaaatttcaaaaacttgacatatcatttagtgggccaatttaaaattacatactaaagaacttactcaggataaacttccttatccccattgtgatattcctttttggcaaattcacctctctctaaaatctttcttatattacagtatcaagccaaaccaactagtagtagtaccccaacaaaaaaaaaatgaaataaattcaagactagtaccggaaaataataatatattgggcaccaatccattccctcctttcctttcttccaaattgaatagaacaatctaaactccacacaaggttagatattgacagaaaggattcttgattctgaccatttcactcatctacaggttgaactagttggtgatcagatagttaacaagctcgggttccattctagcccccaatatagcccagccggtggaggattactgccaagataagcatgactacagccaaaatcataccgggtctacctagaagccaattcttcgtcttcttcacaccttccactcccttttgcatcctttctgcccatcgcatctgtatcaagaaatagtagtaccaagattacctttcgaattcacacaaagataatatacactattggcactggcaccaatatgaagtaaagcttataagtgtctcctaatttgaaaagctcaggggtgatactcttccatatagcagatactttagcaaagtcaaagatagcatggggtaaggaattcatccatatctaagtgaattaaactcacaatctcattaaaatatcaactactttggtatcatgggggtactagcagtaaaaagaatttaggtggcgtttggttnngaggaatgaaaatataagaataaaaatgggaatgaaaataggaataggaataaaatagaataaaatttaaaaaatataaaaaatattgataaaaaaat

SEQ ID NO: 38482 - DNA, 2134 bp, Cannabis sativa
atttattgtattatttttaaattacgtagaaagcacttagtataaaactaagtgttcttcgcacgtaactttcttctattatatatatgtattattattagaatatatatatacggtatatataggattgttttcagatgtgtgtggcatttttttaatagtcaaaaaaaagttaattgcggcataattaaaattttgtgtttataactgatataagctcaataaattttttcagaagtacttactaaaaaaattattaaatttataccacatataaaatatttactaatagacaaaaaaacaacacacaactactatggaagatcagttgtgatatttatcaaaattttatataataagcaatttttctcaattagttacaatctttatctaatatgtgactgttgttaattatacatgcagcattgagtattgagttgcaagcaaattaggaactcaaaaaattcagagaaaaatggtgataatttttcaaactcattaatttgttttgatcttctccttattgagaaataagaaatgatgagatatataagaattagaaattgcttaacttatgatttttataccccacgaatcttttcacagattagaaatttttacaatatacgtaattctctcgttatgattttatttttaaaaaacaacaatgacatggtatgcagtaataagcaaggataaaattaacactcagcaagaaaaaaaaatatcacatcaaaaagagatcagcttaaataatttgagcttaattctcttgaactccctagctagagagtttctcctcagcgttatgataaattaaaatggtagatgagattataaattctagttgcagctgctaaaacgtacagtaaatgagacttgtctaaaagtgaagccttatactgagtacttaaacaaattaaagtttagtctgatcaacaaactattttgtcttaattctaaactctctaatatattatcattattattatcacaagagtagtaatggacttaaatattccacccgatcacttgataatcaactctcagtagtcagtatttaagtgcgcaatattcatattacattaataatgaataatattaagtgttaaataaatatatattgattggtgaaatatatataggggtcccattatatgaatactaataaattaacatatagtaaagtacattcattgttagttagatcctttatataataattaaattatatagatatgcaatgtgacagtaagaataatctatctatatattaattacatagtgagctatagctatgcctgcctgcctggagtagaaaatatatcctgatatggaagtagagtggcggaactatatatgttcatctttgcaggggctatggcccctaataaatgttgctttataaactttgtactatatcctgctatatgggcaaattcactttacatgcttaataaaatacacaaataaaatttagacctttaattaatttatacaattaaacaatattattattttcaatttctatttaaaatactcttccttttactttttgctctgtactctctcttcttctttctcgcactaccaagaccaccaactacaaccattaaatctcctatcctccaccgtgatcgatgtacatgtatttacagaatatgtatttacagtaaaaataattaaagatttttatattattttaaatcgtgtttcattattttaataactttaattttcttagaattatagcggagagttattaaaataataaaacatgtatttacagaatgttcattttaaacaaaaaaaaaaaaaactttttcttttccttctttctttttttctttcctttttttccttcaatattaaactacctccccacatctccctctctaatattcaaagagcattgtcgcccaaaccagaccagaccacagtcggtctcctaacatggaccactgtgagtcttccttgcctcaaaccactgcctctcagtcctcgttctacctcttgttcacccttacctgtttctagtcccctctctcaagcgatcctccactacaaattttttttacttttagtcattacaaaatttgtaactaaaagtaaaaaaattgtgcctaattataaa

SEQ ID NO: 38483 - DNA, 3177 bp, Cannabis sativa
ttcattttcttatggattggttgctgatttttgtggctggattgccacgttttctgatcacaattatacgaaacgaaaccaatcacgttaatattttggatgaatagagcaaataatagtcacctaagcaacgattttgattaaaatctgttacagttacacatttcaatttcaactgagccacctgattaataccgcaggacactatcattatagctactattcttcataaacaaaaaagacgttcatacgtgtattatttatattgtgtctggaagtaataaataacgaaaaataatgatatatatattaaattggtaaaagaaaatacacgcacaaaattacgtaatttggtaattcgtctatactttacggaggcagttgatattattaagctaagtagaaaacaaatagaatacaaatgcatattttctgctaataatatctctcaagtatttttcaaagtgtttctccaaactcactaaagtatttttcaaagtttagctatacaaatgttctctttctcaaaatttcaagtgaacccgattgcaaaatgaattgcactcagttgctaatgcttttcaacgagctccatatttatagaaggaaaatctcacctcctaaccatatgtaataatgtgaggtagctcctcttccaactatatgtaattaatgagagaaaaaaagtcaacaactattgcacagttccattgaaaaatgtgataaataataagttcaaaatctcttgattattgaaccatatatttgcaacttcaagacaatttgatttttgagccaaaactaacaatctccaccttggcgaaaaaatcataattaagctttgcctccacatgcgccttatgcactctaagttcgagagatacagatcaagttcaagttgtgtatttttggccaaccatgaaaaaggactgcattgaatatgtctggaagtgtgaacaatgctagcgctatgccaaggttccacgagctccatcaatttaaatcaccctcatgagctgactatggcccttcgttgtttggggaatcaacctagtaggctctcttccaattgaaaaggaaggagtcaagtatgcaattatcattgttaactacttcaccaaataggtagaatcaaaaccaatgaacacaatcacctttaaaaaggctttggaccttgtcgtcaaaaatatagtatatcattacagccttccgtacaagattgtattagacagtgggaaataatgcgatagtgatcactttactgacttctttgtcaagcatggaatcatcaagagtttcttagttgtggctagaccactggaaaatggccaagtggaagtcttcaacaaaatcttaaagaccacgtcgaaaagtgcaggcatacaaagctcattggccgaaagaacttcctagatttatttgggcataccgaaccatggagagaacttcaacggggcacactccgtactcaatggcatatgaatgcgaagcagtcatccagtggagaaaattgtcccttctcataggtgagaaacttacgaccctactcggaaccattctctacctcaagaatccttaaatttaattgaagaacttcgggagtagtctcatgtccaactgaaaatgtatcaagacaaaattgctaggcactttaactcgaaagtgaaaagctagacatttgaagttggcgatctcgtcctaagaagagtattcccaatgtctcaagaaccgggagtggggttcttaggacctaactaggaaggaccttaaaaatccaacacaaaacgggtaacagaacgtaccagctaaaaagattagatggatcagaaattctaggagcgtggaatgcgtacctcttgcactgatattatctgtaaactgggggtgcctgaatccagatgtctttttctttaaatgtattttttttcctttccattttcctgtaagcctcagggcgaaaaccaatttaaatgaaagcagatgatttatatttggagcataagttatatttgtataaattattttcgataatttttaatacaaaccatagtgtatgaagaaaatggatgtataagcttgtattataatatttatgaacttatgttgtacattggtaaagttggagttagggatcgaggtcgaagggttggggcttgggccgtgacgaggttcgagttgaagaccggggctgtggtttagggtaaggtctgaggcccagggtcaaagacagtgctagggtccaaagtcagggtcgtgttagggctcaagtcagagttagtatacatatgatataactaaaaatatgtattttatttattttcttaaaaaaattaatacaatactattttataccaaacataatataattcaacacaatctgtcaaaactaaatataatattgtattgctacaaaaaaaaaaaatagtattgtattaaaataatacaatataatacaatgtaccaagcacccttataataaactacaatttactgtataaattatgattttattacaaatctcctgttatgactttttaaggtatgaattactaatactttattatgtgttgatgtccataattaaagaacaaatttagaaatagtatttgattttaggttagtaaaatagttttttttgttaatgaaagttagtaaaatggtaatcctcttaagaaatttttctcttactgtggaattcagttgggagacccaatgtcaccatttttatttttattgtgtaatgaagttttatctagactgctttctaagacccagaacaaaaacatcattcatgggatccgtatcttcaagaatgcccctgcgatctctcatcttatgtttgctgatcactattatattcgctagagccaacatctcagaagcagaagcactgattgattgcctttctaaatttgagaggtggtcaaggcaattgtgtagtagacaaaagtgtggtattctcttctctcttaccatgttcttggctaagaagaaggaaattgaaaaaaaaaaaattgttgatggagttgtacaaagactttagagttttgatggaatatgtcagacatagggccctttctatgcgaaccgtggctgacttaatttacttctcttcaaagaagtagaacactcagtttttgatttatgttattagaaaggagttaggcgagaaaatta

SEQ ID NO: 38484 - DNA, 6882 bp, Cannabis sativa
taataagtaaatctgattattttttaaatgagttttatttagggcataaaacccaacatcaacttcttattgtttgatgcagaccaaatcattgggctcgattggtctgtgtcttcattgggagaattggtcatagaatgctttcttgagtgcctcacgggaatcgatagatcccgcgagagcttgagatacaacttctgtgctgcttctgatagcgtggttagaaagactcgacaacgagaattgtctcagatgtcttgtaggttagtttctacttcaacattgtggatgtgagagagagggtcttctttgccaatgtacggatgccacactagaaatttgaattttgaggggatatctaaagccttgattcaatcatagagaggagaacactgctctcgatctaatccatactctattggctatggagtagtgatacccttaaccagagcggtaagggtatcaaatttggtcctacacactatggtgatgtgtgtatcagttggccacttcttgttcatgtcattatgcaggatattttgtcttccaagtcgatcaaaatcattgatcgacctaggccttgtggttgttgcctagtcatgaggcctttttggcaactgtggggatctattccgtatgatgatagaattgtgtcttgagtgtttgttgcatgagcagctgctcgaagtattatactgactattcccttcaaaatagtcttccatagagtgacatgtgtggagggagttggaccaattgctcaagttcaacatgtgtccatgcacccatgggaagtattcgtactgttggacgtcaggacctccggcaaagtacctacaccgaacacctcgttcttcacgaaagtattttcgagtgcgtagttcttcattaatattcaccctttaaatctcatactattcactaggtttacaatatgtcaacatgggcgctacgcccaaccccaattgtcaacctaggaattgggtcccccttttggcccttcgtaaattctgtttcatccttggaaataattttaatctcaatattttctaaaaatgaagaagattctaggaagagttcttgaaaaactccaattaaaatggcctagattgacgaaatgtcaacctagtcatagggccagctccaagtgtcaacttgggcactgggctctatttttattgcctagaaattgttgtttcttctctgagaggacctatatcaccatttttgatgaagatgaaaaagttagatttgtgatcggatacttggaaggcacccagattgacagattgtcaacctatgcgctaggtgctcggggcctcaggtgcttaaacatcaacttgctctgattttgattttgattctgatacctcaaatatgttattcatatgtatagttgatgtcccaatgcatgttttgactctttttcactaagacggtcctcaaaattgaaaccctagttgaggatatcaacttgggcactgggtgaaaccctaggtgcctaggctggcttccgggttgtaggttcatgtaagttcagctcctgaaccttggattaggttgctccatgacttaattgtacagaataatatatgatagtgtgttcgatttgagttattaaagtccaaacatccatcccggagttcccaatgtcaacctgggtggaaggctagggatccctcccaagtcgacctgctatgactaaagacttctcaactccgaaatgtcatctttcttgtcacgtgttaaacattgatgtccacatcatcaaggctactcttggtgtaaacaaaattgactcgatatctatcctaaggtagcaatcaattgtcaaagagttttatcgtggaataacttaaacaagattttatgtgtttttcttgtatgctctcatgcatcatgtttatattaatttcgaaatgatatttattattcatgtataatcttcatgttactttatttattttggtcatgtctaccatgccaaaaactttactactttaccagcccttgaaaaatcgaatggtgataacttttataaaaagaaatcgaatctgaatttaatgctggtttgtgagaatcaaaaatttttccttactaaggaacatcctaaggagcccgctgccaatgatgctactcgtagctacatgaattgtaagataaagaacagtgtccctgttataactcatgtattgcacatgattaagctaatgcatgaggtagagagagacagagctatcattaacaaaaggactcaagggagtatgatacttgagtcactatctcctttatttaaggctttcacaacaaactatgttatgaataagctaaagttcaacatgacttaatttttgaatgagttgatcgtgtttgaaaatcttaacaaggataagtccaaggaaggtgaatcaaacattattgaagaaaaatctatctctccttcttcttttgataagaaaaggatgtgcaacagtaaggaaaacaatggtggcaagcacaaaggcaagaagtcacctaatgccaacaagaacgaagccagccccaagtcgaaagacaaaaaggcaaaagtcaagtgtttctattgtagtgtaatgggatactagaagagaaactgtaacaagtgtctctctaagctgaataaaggtaaatacaatttacttgttcttgagtctaacttagtggaggatgataatccttatggattttggattctagagccactaatcatatttgttattctacgcagatacttaaatcgtcaatggagctggccgatggggaggtgactatgcacgtggggaatggagcacaagtgtttgccaagggtgttggcagaatctgtctaaaatttaataataaattttagttattgaacaaaatttatcttattcctaaatataccaagaacattattttttttttatctcttttgcattaataatttttcaataatgattttattaataatgagattatttttttcgagaatggtacgcctatttgttctgcaaaatagagtaacagactttatgtgctcaagccatgtgagaaattaattataaataatgaattgtttaaagtagttttacctcaacaaaataagaggcaaaatgcttcaaatgattatgaagcatatctatggcatctacatttaggccacatttgccaaaacagaataaatcggttaacaaaggatggtcctttgagagaattaatagttagaactcttcctgtatgtggatcttgtctagaaggcaagatggcaaaagtaccttttttttgtaaaaggcaatagagacaaagaacaaattgagcttattcatactaatgtgtgcggacctattaatattcaagctcgaggtggttatgaatactttatcacttttattcatgattattctagacagagtctactaacctaatggccaagaagtctgaaacttttagaaatttcaaagacttcaaggctatggctgaaaagtaattaggtaatcattaaagacacttcgatcagatcatggtggtgaatattttgattctgaattcaaagactatttgctggaagaagggattttatcataacttacaacacttagaacaccttagcagaacgttgttgcagagaaaaaaaactggaccttgttatagatagtcagattaatgatgtgttactcattactgctactaaacttctagggatacaaatttctagcggctacctacattttgaatgtagtaccctcaaaaagcataagcaacaatctaatagaattatagaataggacaaaacccagtttgaaacattccagtatttggggttgtcctgcttatgttcttcaaccaaagactggaaacatgctcctagatttgaagtgtgtatgcttgtaggatattcagatgaaacttgaggtgcctatttctataggcatcaagataacaaagtatttgtatcgacaaatgctacttttcttgaacatgactatttgaaaagtcagaagccacacagtcaagtggttatcaaggaaatcaaaaaatagtcagatttctgaacaagcgatttcagcaccattagttgaacgactgacaacggttaccatagttcctgaaaaggaaaccctagttcattgttgtagtgggagaattgtgagacagcctgtccacaatgaacatgaagcacttgttcttgtctatgacacagacaaggacaatccattgacatacaaaaaagcaatggaagacctgactcagacaagtggaacaatgccatgggttaagaaatagattccatatggaccaataaagtctaggaatatgaaactctacctgaggatattgcatccattacatgtaaatacattttcaagaagaagagaaatgctgaagggaaggaaaagatatttaaagctaggcttgtagcctacacatagtgagaaagcatcgactatgacaaaaccttctctcctatggcaatgcttaaatccattctcattcttctttccatacctaccacttatgattatgagatatgacaaatggatgtcaagaatgcttttctaaatggcgatcttgatgaagtcatatatatggaacaactagaaagttatgtcttaccaggggaagatcgatatgtgtacaagttgcttaaaaccatctatggattgaagtaagcctctagatctttgaatatcacatttaataaaactattaaagagtatggcttcgaaaaaaataaagatgaagtctgtgtatacaaatacattaaaggtaatgtactggtattcctagttttttatgttgatgacattctacttgttggaaacaaggtaaaaaggttattagatgtaaagaagtggtcagacgaaaaattccaaatgaaagatttgggagaagcaagctatcttctttggataaaaatctatagagatagaaagcagagaacattagtactttctcaagcaacttatattgataaggtgctagaaagattctcaatggagaattccaagaaaggaagattaacgttcagacatggaattactctatgtaaggatcaatgtccaaatacttctcaagaggaagagggcgtgagaaagtactcttatgcatcagcagttgggagcttgatgtatgcaatgttgtgtacaaggctcgaaatatgctacactgtaggattgttagttgttatcaatctagtctaggtttagaacactggatagctgtaaagcacattctcaagtataatcagagaaggagatatctcatgcttctacattccggtggagagttgaatcctactagatatactaattctgattttcagtcagacaaatatagtcgaaagtcaacatctaggtcagtatttactcttagcagaggagttgtagtctagagatgcattacgcaaaacagtattgcatattcaaccatgtaagccgactatatagcaccttgtgaagcaactaaggaagtggtttagttgaagaaattctacactactctagaagtagttccagaagtagtttaaccactggtgctctactgtaacaacaatggagcggtgaccaactccaagaaaccaaggagccacaaaagaggcaagcacattgagaggaagtaccagctactaagaaatatagtagagagaggtgatgtgacggtcttaaagatcatgtcggaacataacctagcagatccattcacaaagatattatctgcaaatattttatggatcatataactaatatgggattaaatgagatgcctaatttacttttacgacaagtgggagattgttagggtttatgccttgaaaagcctataaagacatttttgattattaataaatagttaaatattttgatatatgcttgaatattaaattattaatatttattacttaataatttatatataaatatcaaaaaattctttattcatatatgaggttctggcttgtagctgtacagagaactaaaagcacttagccatgaataaaacagtcagtaatatattaaagttatggatttttttaattaatagttgcaagtatgattcactgatgcccattcttcggtataaagaatctccgttcaaaaaactgatctattaagacatcaaagtgaaggtgttatatataataatgattacatatgatagggaccaatatgaatgaagctatctttatctaacaagtcgtttactataaagatcttattcatattataatgatgatcaatagtagatcggtttaaatcttaagtaatcgtgaatcctgctcatgttagtttcttagagaagatggttcttacaatttttgttttaggaacctaataatgtgaataactgggaacatgctttaaagttatgaaatcctcactttcctaatagatgaaatggtggttccttgtaggttttaattatagaaatagaatgttatgcacaaatttagatgggatctaaattatacttccactagtaaattaatggtactaaaagataaagaagtaattcgaaaggtaaaatagtaatttaatcaaaattaattacgaaccaacacatggagggataatcactggaactgattatatcaatggacactgtagtaaaactcaattagtatatttctatatttactaagagttaaattccatatttatagtggaataatcatgaaattaatatacaaagattgttcgattgataagactcgagaaataatctagtttgatagagcttagaattatatgtccatagtccccaaatagctaccttgaaacactgttaagggaagggataaagagtagtataatgtcgttcgaaaaaatatattttaaattggcaaaatagtaattatttatttttgtaataaataaatagatcgga

SEQ ID NO: 38485 - DNA, 5304 bp, Cannabis sativa
  modified_base (4980)..(4984): a, c, t, g, unknown or other
aaacattattagtagataagcacaagcctgaaaaaattataacatacatagctcttagctttgaagcttttattttttctttaggagaacaaccaaggctacacgcaaagaatatatttcttttttagcctctatttttttttttctattttgcttgatgatctcccatgatattccaactcatgattctatccatgattggttggaggctctctctctccccttccttgtttacctttccatcccgtatctctcaacattctctatgttctcatagcacttcaaaagcatttgtcatttatgtaatgctggttactttcttctcgcttttccatccttttttttttcacagcttataaactatttgcatctatctcaattatttctttctgaacttccattggagctttatgaacatctattggagccttcccaatataaaacttctttggcacccaaacttgtattaaactttccttctttttgcatttgtgagttgtatgtcccaacccttgtttccacaatgaatcggcctccactcatactcaactataactttcacttctttatataatttatttgtgaaagaggtcaccgtaggaaattcttgccctattaaagcttctctcaaaactctggataatttagccattcctctcattgagtaatctggtccttttgcaaaggatcccattttgacacacaatcttgaatattgccttttaccccgagtatttgagatccaagttgtgaagttgaattaaaattggagcagaactgacatcttctttcttaaaatcaataatttgatcctaaggtctcctaatatttgggcttttatgcaaaaaaaaaaaaaagtatcctcaagctaatactggatccttcggttctaatatatgaaaacaaattatgaacattattttttctagtattctaatattctccacttgatctttccacattcattgcaatatttataaaaaaccaatgtgtgggtgttctcctagaacataacacactaaggaggtttggaaagctacttctttatcatagtcaccagcttcaatcttaaccttttatccttcacaatatccccctgtcattttctccaaaactcgagcagagatttttaatgatatgtccatatcacataatatgaggagcatggaccttgttagaaatatattgatccttgtttcgctttctatagccatacagttcaaaaatcttgtatatcttgcattctttgtacactctggagagatgaattcaaagaaagaggctatgcttacaacaactctacatcctcttcactctcctgctcatcctcagtgaaaaccacctcttctaatcctaagaccttctccatagatttaatcttttctagagtctctggagtagaaaggcagtgtctcttcaaaacattgagtttttttccattgtacctcaatcctttagatgccttagaaccagatccttgagatgaattcttctgtggccagctacaacctaccatggctccatctcttgttgaagtctttgtcaaaaactaatagagctcaactttaggtttatctcttctgtgggtactattcttggaggaaaattttcgtgtcctttgttgtggtggtcaaggtcatcttcttctctgcagtttccacctaggtgactttcattgtgcccttaatttaggtttatttacacatggttctctatgacagccggaaatgctagaatcctccttgtgataaccaactagttatgatatatgaggacttcaatgtgttggagacgtgttgaactcctttgcatgtttaagttttaatggatgattttaagagaagaagataggcaggactttattcttcccgtagacaacaccaaaattttgatggtaaggactcgtcaacaaagttaaggattgaaaatcaaagtaatgaactaaagatgatgaagttataagaactttgaacaacttaagaaaatgaataggtctataaggtagagtatgtaccttgtgttgtattggatgttcctcatacaaatgattttctaatccctttacaagtgttagaggggggctatttatacttgggctctaatggctctaggttacatgtggtctcaaaagaaagcaaactcactcattcaaggcttgtcatgtgagagggtacccttgcttatcaagaccacacacgtgagggggtccctcactcatctggggtctgacacaagagggggtcccttatttatctagggtctcacatgcaaggggggtcctcactcggcctcatgcaggagggtgtccctcgctccttctggaatatgcacgcgaggtgggaccccttactctattgtgagtatgcatgtaaggggggtccctcgctcgtctttagtctcacacacaaagggggtctcttgcatgtctggggtctcaaacacgagggggtccctcgctcattcgaggtgccacacatgagagggatcccttgctcctctgaagtctcacacatgaaggggtccctcgctccttttggactatgcacatgaggggggctcgttcgttcaagtccaagcatgtgaggggctcgtcctcatacggtgtacatgcaggtaagccttctcatgtctctatgtatttaacatgtttaattcaagaactgtggccatgtcaacacatcccatccattgattattgagggtgttaatttctcgtatcaaaagttatggttaatattatttaaataataaaagatttttagtgttatattatttaaatatttagtatttttgtgcacctaaatcaatcataaaaatatcataaccttttgcttacccaaaaaggtagcttgctgatgtgaatactgtttttaacatgtgccacgaaggaaacaaccttggagccccacatccttaaagagggtagtgtaacctacacaatgggggcacttatgtaagcaccaagatccagctagggaagtcatttttgagtgttatccttcaacaagtaggtcacaatgacctcaaaaaagatgaattgtgaagctaagaatatcacatggacatccctaagctcaaccttggtccagtacaagtaatgggcacccaagttcacatgttgtgccctgacttcaatcaggtttggttccaaactaactcttatgtgtaatattcttagccattgtactagtacacatgaaaaacatgtccatccatattttagactcaggagatgtgcctggaaaaacccacacctagagacaaaggtgcacttagacacccaagttgacattcagtcacgcaaggtgacataccagttagtgtttaggtttttgggaatttcattggaccccaactcctcaaatacatcaaggaataataccaagacatgattttttatgaaagaaatcctgaaggcaattccccatctttgaatgcccatgttgacactgcatctttggcactggttcaacattgctgagtaatgcctgtgcgaattagacaaagatgaaacctgatgtgcacttttaaccaaaaagaagattggacatcaatgagaaatttttttaagtcttttccctagacctttgcacccattgtgggctccttgggcatttatgggcccccaggttaaagtatgtcaacctagggtgctttcgcacacttttcaaagaattctcccagtttttattttttcttcaatattgtaaatgcaagtactttttggaagaaaataaggtcatctaatgcccaaatgaaaagctaggcacctattgtgacagttgcagagtcattgggatcccaaattgacacattatactcttcatgtggttccgttgcttaaaatgcaatttttttctcaagcatattgcttgtttttctcccaaaacaacatatgagacatggaatctaaataatgtatcatcaaagtggtgattcaacctccacgcttcacattgggctcccaggttgacatttaacctggagctcagtgttccatccgtcaaatggtagctctattccaagcatcgatcttattttccttccaaattaagatttgaacatcttaccaatttaatatatcatgcacatgttttacacgcaagcacggtgacacctatgtgcactagtgattacccagaaatctcctgtgcgcaccgagagaaatccccaaaagacagtcaacaacttcaccataatcatagaatgaactaagaattctttcacatcatttaaccacctcaaaatatggccacaactcaagaaacatagttatgggtttccaggttgaaattttattatgtcaatttgagcacccatacatcaacttgggtgcccactactgcacactgcttagttttttggccgcaactcactcaaatattttcgaaaagatggtattaagttgtcattggaaatatatttagaagactaatataagcttgtgtaatagccttctcacaattttgatatttttgacactaaaatagagtcgtgagtttccttataaattttctcaaaatttcaacgatttttctcattattttattgtaatttatatggatatccttacctacaaaaaaaaggatcctctagttcagttttcacattcaaaactctctctacaaggttaaatttttgtttcctcacatgtttctctctctagaaactgtgaggtgaggcttccattaattaataaaaactcaatataaacatagctccactatcatcgcaatacgggaaatgaacttgtgtaaattttggtattctctctttatttcttattgtttctatcacttatgagacgatacaaaattaactatttttcagcatcatcgcctttcaataaaaatttcatcacaaggtcgcttgacgctaaaagttttccaatagtatctaattctattttaaacttttgattagattcatataatttacacaatttaatatatatgtatatgtatatacatatacatatannnnnatatatatatatatatcacatacttattatgagtggttatcaatataacattacgaataattctaattttttatatatctatttatgcacatactttaagcctaatatatatatatatatatatttttgaaagaaaaattaaaaaaattatttaataggtaaattagacaaagtccattacttgattatatcaatcaaagagcgtactcaataataatagacttgttggattaaaatcttattgtgggcacatatgtataatgtatatgctattataaagtgtgatacaaaattaagtgaccaattatgttataggtatc

SEQ ID NO: 38486 - DNA, 5633 bp, Cannabis sativa
  modified_base (5558)..(5590): a, c, t, g, unknown or other
tttttttttttttttgtaaatggatattttgcatttattaaatttttgaatgttttcacacttaacaaaaaaaaaatctttaatcattcttaccaaaaaaaatatatatttttcttttttcaaaaccgtatagctcattttctctctcatcattatagcaaatcttctctaaaatactcacccaaaaaataaagaaatctcaaagccacaaaaatcaatggtgatgttagggagaaagtagatcatacctcttttaattgatgacttttatttttatttttgagcattggacactaacggtgtttagtgtcttctagatgtgtcattttacaattagatactctttaaagtttattatattaaactatgtgaaacctgatacttaatcggaccaacaacaatattaatacataggagaacaataggcatcactggtaccttttaacatttatctttatttttatactattttttttttaataaaaaaaaccattctactctttttttaaccattctacaaattttgctcatatcaaaacatactttaaaaagtaaacatgagacaatagaatttttagctaaaaatactctatacaataataccttctaatttattatataaaaaaaaaagtcccaattaaagctaattataaataactttttgttgacggtaagaactcgtaaactaaactttagttagaaaatcaaatacaaatgggtgaagatgaaaaacttaagagaaactaaaaaccttaatggagtaaaatgatgttgtattgaatctctaaactcccttataaatgattattttccaacccctttacagtattcaaatggagtttttatgcttgagctctaatgactctgaaatacaagtgatcctaaaagtgaggggacaaaattctgattgtaccatgagggttagagtttcaaatgggtagtgaggagtgttggtcgaatgttgacttgtacctagagtgagacaaataatgtctccactacttgtgcttcttgtatctgttgtaaaaccacctcctctcttcaggcttttttagaggcatgctagcttaacagacctagacttgcccttgttcgtacatccctttggtatcatttttattacaacctatacttataataagggatcaacacttagtgaattggctaagtgtttgggtgagggagaaacacttgatattttagttaagtgttggtagggggagcaacacttggtatttttgcaaagtattgagagtggaaagtagcaaaagagcttgaggagagatcaagggagaggggagcttccttggtgcatgtggggggtgatgggaacgaggagctcccttggtgcatgtgggaagtgatgggagtggggagctcccttggacgagtggggagcaagggggagagagagggagcaaggatcttgggcacgaagagctcctcacacggggagctcaacctgtgccttcgctcctcctcgtgctagctcttcctctcttgtggtgtctcaccttgctagttggccttccattttcttgcccatacatttttatttaattgtattgtgagatctttcctccatttaatcatgtggtctccaaaatttatacttagtaaattttgggggtcaattcttgccccctagtctatgagaattcattcaagggttcttgtagactaagtttggtaagcttcgtctccatcacttattctcttggttactgttatggctatttacgacttgatttttttgggtacttaatgagggatcattactcattgagctttcccaacctcgtttatgagttgtcattttttttgtgggagccttttgccacttaggatatcttaatcttttcactatgtaaccttttcaatgagagagtattgactctttagagcaatctcgacctcttctcaattttcattttgtttgagggatccttttgcaactttgggctttctcaacctcttttatagtgtaatcttattatggagggagtatagactctttgagcaatctcgacctcttatcggttacttatcagatataagggagcttgtggccccttaggtagcgcttaaccttttttaaaattttataattttattgggggaacttgtgccctcttaggcagcgctcgaccccttacattgcactcgtggcacttagagcacattttgaatgctagaaaattagcactccttttagagtccctttcacaaaaaatggaaggaattattgctctattttttattggtcgggactgacggggctcgaacccgcagcttctgccttaatagggcgatgctttgaccaattgaactataatccccaggaaataacattataaaatgtacagtctacaatacataattttatgattttattctttcaatgaaaaaaaaaatctttccttttttccttggactttacatttccagatcttgataggaatctagatcattagcaagattagcaagataagatcaaaacttgttgaaaaaaaataaagaaatagagtaaataaatagcgataacggtaaggataagatatatcagaatagaaaaaaaaaactatttgacttttttgattggtatcgatcatttatggagaagaacaaatgatttatcaattcacggtgtccctcttagtgtcgtatccagtttctcttttattttaatattttaagggaaatgatggttatgtgaaccgactcaatcttttgtattttaagggagatgatggttttgtgaaccgactcgaccttttgcttttgatattttaagggagataatggttacgtgaacccacttgaccttttgcttttgatattttaagagagatgatggctttgtgaatccactcgactttttatacgtatcttttatttgtttctctatgcatgctttatgacttatttgtattttgaggagcatcccccttcttattacaagtgttctttcttatggaactatctttaggcttttactattttcttggaccgttgggggtagccaatccatgtagtcctaagagtttttttttactacttcattcagtttgaaaatttcaattattgacaagtatagtgagcaagtcaaacagacatgtgctgagtgattaatgtcatatgtagagtaaaaacataacacttcattgataaggcaaatatgtgatcgcatgaatacatatgctatgtttggaggtcaacctaagtgctctctttaatttagttcaatgtactaaaggtaaacttgctattgttaggaacactttcccatatggtggaactttactttgaggaacatctttgatgtttgatttttacaggttgtagattggaggcttcacttgaatgtattggcttacaagtgttagagtttctctttctaaattgtgtcaaacacttgctaacaagataatttcttaaagttaatctttcttttttagttcaacatgcgtacaaaaaggtccttccaagaaaatacacaggcaaaggtgtacattacttggtgaattgaaagtgactaagagaccataagtctgctcgatcactttgggggggcacctacatcgtacagcatcgaacaagcacagctaaaattgagcaaaatttaaagctttgttaaacaaaaattgaaacttaagtaagtgcgaatggcatacttcagattagacataaaagtgtaagtccagacacctacatgtctaaaaaagaagttaaagcaatgattaaacaccgtctggtcggtcgtctgttcagaagtaaaaggccctgaggccatacaagaacaaaaatatcatatgttcgaaagtaaaaggcctagaggccatacaagaacaaaagatgaagtatgtgaaataaaagcataaaaacgaacaacaaagtcctcaaatgtttgcagaatataaattgaagtcggcgagttcaaagttgtatcagaaggactggctgtccagactaagtaagtcttcgtcaatccagttgtcacctccccaaaagtcatgtgggttcatccctgcaaaaagataaagggaggtaaacaaccggagaacataaaaagacttagacaaaagacaggttaactgaccaaaacctaaaggtattaaccagacagccttgagatacaaagtcggtaatcaacaaagtataaaagcaagaatcattaaccggatagcctatgaaacaaaggccattgaccgttcaggaaagattcaacctgaaatgtaccgaacattattcctaaaaggggctaagtaccaggcaagggtatacaggatctaagtcatggagagagtccctatataggatctaagtcatggacacagttcctatacgtgatctaagtcatggacagagttcctatacgggatctaagtcatggacagagttcctatacaggatctaagtcttggagagagttcctgtacatggtctgagtcatggataaagatcctatgtaggatctaagtcatatacaaagttcccatacatgatctaagtattagacatagttcctaaacaacatctaagagttggacagggtctctaacaagataccacaagactcgatcttgctatcaaaaagttaaacattatgcatcctaaagctatcaaataaattataatgggaaaagactactctaaaatgtgagaatcaaaaagtttctaaaacctttaagcttgaaactcatcaatggcagattcaaagaaagaaataaatttcaaagaagagaagaggaggcatacatgggcgagagaagaacaaaggtttaaaaagcacatcatttgaaatgtctgatactttgccagacaaggctgctcgataaaggcccctacattcaagacaagaactaaaaagtccctatacatacaacgtccaaacagggacttggagggaaaatgttatcctaaattttgtctacctgatgtggcatgtccacaaagtcaaaactgaggacatgttaaatacaacttatcaataacaagacaaagtcaccttacacgatatgtaaactatcaaggcatctgttttaggaatctaataaagtgaatggctaggaacatgatctacaattatgaaatcattactttcttaacggattgaatgttggtttcctttatgtattaattctggtactggaaagttgcacgcaaacttagatgggatcttcaattatacttccgttagtgaattaatggtactaaaggataaataaataattagaagggtaaaataatattttggctgaaactaattatgaaacaacacatggagggctagtcactagaattgattatatcaatggacactgaagttaaactcagtaaatattattctataattactaagagttcaattacatatttatgatgcagcaatcatggaattaatagacaagagattacttggttgatgagactcaataaataatctagtttattggagcttagaattataggtccatggtccccgaatcgctaccttggaacaatgtcaagggtagggataaagagctgcataaagatgtttgaaaaaatctattttnnnnnnnnnnnnnnnnnnnnnnnnnnnnnnnnnataaataaataatttttttaaattaactaaatagggaaaagac

SEQ ID NO: 38487 - DNA, 3369 bp, Cannabis sativa
tgtttataaataaaataaagtttggaaatatttttttaggaataatttaggtttttaagtaaaattaatttttttttatcattttttataataagttttattaatttgtggtatgtatgttaatgtggtacaatgatatttgtgcaaataatttttttaaaagtatttttgtaaataaaatttatattaggtataatattgaaaaaaaaattaaaaaataattcaatttaaatagttaaattctataaattgtatatacctttttggacatactttgtgtctgtgataattaaacattatcaaatttttaataatacaataagtagtacttgttattcttttatattacaataatttgtaagaaaagtaaaattcaaaaactcattctttgtatttttttttctttttaaaaataaattatatataattacccaatagcagcacatacctcgtatgtgcttgtacaactagtgaactaataatagaaaataatggttgataatttggtatgatgttttaaggtgatgcaatttgacaaaacaaaggtgggcaagttgcaagtatgatatatgtagatgtagtccaagtgaccactttcatgagcacaataatgcatgaactaataataagtgtttgattgtataaccattaatgtatgtaaagcaaaaatcatagaaaggtgtatcggctatagcacaatctcatgtatataaagggcattgctattaggtaccagtggtgcctagtactttctcgacttgtcgcgttatgattggctagcgatactttctaaaaattattatattaaattatatgggacacgatacttaattggaccaataacaatattaacacatagcagagtgttaaacatcactaccacaactggtaccctttagcatttatctgtatgtaaatttactttaaagtggataactacaacgagtcagttgatcaatcaatgtaatggggccatattcatcgaaccactcaaatctttatctatcttttatgtccaacatttattattgtatatccaataaatcaaacttctggcatatttatagattcgaatatttgaacagaattgattaattaaattctttgtttttggcatttcaaaaattctttgttttgctctaaggaaatgaaattaatttaaaaactaattagatcataagtttctattctaaaaaagacaaataagtagttagggggaatatatatagatgctaaaagattttagtcgagttagtagaagaattgtgttgaattttatataatttaattgaaaaattattataaaatactattagttattcataaaatgttacttataatgatatttaatatcaattctattacaattattttgctcttttatgagtgaagatttcgtagagaagggttaaaagaagtggacaacttagtattgatgttatgagaagtgtcagttacaattttttattataatcctttagttaatttttacacttgaaatcacatgtcagaaattttttttttaattttttttcacagtaatatttgttatagttacaatatcattcctgtaaatttttatttaattctgaatagttaatagtaccgaaaataaaatttctgatatttcagtctaccacacatgttcaaaaaacttcaaacatatttttggtactgtaaactattcgaaaatttttaaaaatttacagaaatgatattataactataacgaacaccgctataaaaaaaatgaaaaaaaaatattctagtatgtattttctgacacaaaggttgactttgagattgtaataaaaaattaacgatagcactacaaattataatgatataaatggttgaatagcgaaacaaaatcctaaattatggagtttaaggaaaaaaaaaaaggcacacaatttatttttattaataaaaaatgttttgaactttattaatgaaggtaaaaatatatatacacacatgtatattacaaaagaactcgataaaggaaaaataatagaattagttagaatagctaactacaactaatatggtgaagttgaaataaggcacgacttgttgtcaaagggtattcacaacaacatagtacagattatgctgagatttttgccccagttgctgaactcaatacacttaaactttttctagcacttgctgcaatcaacaactgttccctacaccaaatgaacataacaatgcttttttgcatggtgaccttaaagaacaggtttacatgacactccccaagggatatatacatgaggggagctaccctccaaccatatatgtctattacacaaaagcctttatggccttaaacaaacatcccgtcaatggttttgccaaactttgcattactttaattgaccatggttttcaacaatcagcatttgatcactccttattcatcaaaaaatcaccaacaagctttattgctttattagtctatgtcgatgacataataattgcaagcactaaagactctactacaactgcctttaaaacttttctcaatttcaaattcaaattaaaagaccttggcctctgagagcaggcatctttgtttcacaaagacccttcaccttacaattgcttactgaaacaggtcttctaggatccaaagctatttccacacctatggatgccaacacctcactcagtaaagatgttggacctctcgtgaatgatgctacttcttatcaaagcctcattgaaaaacttcttttcctcaccatttcttgacctgacatagcttatgctgtcaatcgactcaatcagtacatcagtgctcctcgacaacctcttcttaaggttgcttatcaaattttctagtccctcatttcaactcctctcctctcaactctctacagatcaatcatttcaactctaagcattcgttgatgctgattagggcacatgcccagacacaagacgctccatcataggattttacatcttcttaggccagtccctcatttcttggaaatcaaagaaccaatctattatttcaaagtcctctgcagaagctgaatatcgatcccttgccaacaccacctgtgaaatactatggctccacaacattttatttgattttggcatctcacaaactcagccaacagtactctattgtgacaatcaagctgcaatacacatatctaaaaatgttgtcttccatgaatgtaccaaacatgttgatatcgactgtcattgtaacgccctaacaattaggcacgctacaataaccgataatgaaacactaatcccgctaacacgggactactagaaagacaagcgcgggaaatttaaactttatttgcaacggaataaaaaatatacttgtaatagtttcta

SEQ ID NO: 38488 - DNA, 5696 bp, Cannabis sativa
gaaccgacggtggtaaccctgatacaaatagaagtttgaggcttctagatcatcggggagtaatagaaagttttggggaaatagaggtaggcgatagggtcgtggatcctcatttagatcatatccaaaatgtctgaaatgcaagaaacaccatctgggtgagtgtcgagccaagacttgctttcagtgtggcatggtgggccactttatcaaagattgtccacgggctaagaaagagaagccaaagaagaataccaaccagaatctgggacgtctatttactatgagtcaagctgatgctgatgctagtccatcagtggtgacaggtcattatccattaatggttcttattctgtgatatttgattcgagagatactcactcttatgtgtcaagtagaataattgaaatttttcataaatcatgtgatgtgtatgctttggggtttggtaccctgttaccttcgggagacctaattgtatccattcactggattcggtccttgtctttttggattgatggttatgagttaactgccaatctaattgagttacaactatctgcttttgacgtaatcatgggaatggatttcttgtttgagtatgcggcaacaatcgactgccagcaaaagatggtggtgtttgaacccgacagtgctaacccaacaatgtttgtgggtaaagttccggggatgcacatacctagaataacacttttaaaagctaaagatttgatgtgcagaggttgtctgggattcctagtcactgcagtggataccagccaacctgtgtcatctagatctgagaatatgagattggtgtgaaaatttcttgatgtatttgctgaagacctactgggattaccaccttctcgagaaattgaatttttaatttagttagttttgggagcggaaccagtatcaaaggcaccataccgaatggctccattagaattgaaagaattaaagatccaactccaggagttacttaacttggggtttattagaccgatttactctccttggggtgctcctgttttgttcgtgaagaagaaagatgggtcactgcggatgtgtattgactattaggatttgaacaagcttactatcaagaacaagtatcctctaccctgaattcacgacctatttgatcaactaaagggtaagacggtcttttcaaagatcgaccttcactcaggttaccatcaactgagaatttgagaggaaaatatcccgtagactacgttccgtactcggtatggacattatgagtttctggtgatgtctttcgtactcactaatgctccagtggcatttatggaccttatgaatcgggtattcaaggattacttggacaaatgtgtgatcgtttttattgatgatatttttgtttattcagggtcagaacatgaaatacatctcagattagtattacaacggttacgggatcacaagttgtacgctaagttcaaaaagtgtgagttttggttgtcacgtgtctattttctggggcatatagtggataaagatgggatcatggttgatctggccaagatcaaagctattcgaggttggccaacacaaaaatttgctactaaatttagaagctttttgggtttagctggttattatcgtctgtttgttgagggtttctcaaagattgatgtacccttaacggagctgacccttaagaatttgaagtttgtttggactgatcagtgtgaaaaacgtttgcaggagttaaagcagcacttgattaccgctccggtattaacacttccttcagataaggaaaagtttgttgtttattgtgatgcctcaagacaaggtctgggttgtgttctttacaaactaggaaggtagtagcctatgcttctcagcagttaaaggagtacgagcagaggtacccaactcacgacttagaactcgtagcagtagtatttgcgctaatgatttggcgacattacttatatggggagaaatgtgcgatatacactgatcataaaagtctaaaatacttcttcatctagaaagatttgaacatgagacaaagacgttggctagaactggtaaaggattacaactgtgagatttttttatcatcctgggaaggccaacgttgtagctgatgccctgagtagttaagggcagagtcagatgaatactatgaagcaaatctccaagcaattagtagatgagatgacccaagctttgttgtgggccagttggctaacattaccctgcaatctactctcttagaatgaatcaaagaagcacaattaccagatccagagttgggagatagcgtttcggcttgaaagactagtaactttatagtggatgatatgggaatgctatgatttatgaatcatgtttgggtgcctatggatgatgacattaaaagagaaattttgaatgagtctcatacaactccttattcagttcatctgggaacaacaaagatgtaccatgatcttaaggccatgttttggtggcctggaataaaaaatgatatagctgaaaatgttgcaaagtgtttaacttgtcatcaagtgaaggctgaacaccaaggccttcaggtttcctgtagccattgaagcttttgaaatggaaatgggaagacattgccatggacttcgtggttggcaattaagactataggacagtaggactctgtgtgggtcatagttaacaggtttacaaagtgagcacactttttacctgttcggacgaatttctccattgatcagtatgcagaactgtatgttagagaaatactttgtctccatagtgtcccaaagtccattgtttctgatagggatctgaagttcacatcaagattttgggatagcctacatcgagctatgggcactcaattgaaattcaacacaccatttcatcctcagacagatgggcaatccaaaaggaaaattgatgagattttagaggacatgctacgggcatgtgtgttagactttgaatgatcatgggtaaagtaccttcgcttgatcgagtttttgtataacaatagttataaagcaataatcgggatggctccttatgaacttttatatggaagaaaatgcagatcacctattcactgagatgaagtaggtgagagaaagttgttaggtctcgaagctgttcagagaacaagtgaggcagtggataaaatcagagcgcaaatgctcacaactcaaagaaaacagaagagtaacgttgatccaaagcgtcgtgatattgattttaaggtcggggatatggtagttctccgagtattgcctatgaaaggcattaaatgctttggaaagaaaggaaaaattagcccaaggttcattggaccttttgagatccttgagaggatagggcaagtagcatacatgtttgctatgcccccaatgctggcagctgtacatgacatgttccatgtttcgatgctttggaagtatgtcttagacccgtcccatattctgagttatgaagcattggaactttagctagatctatcatacgaggaataaccagtccaagtacttgatatgtagaaaaagtgttaagaaacaagacaattgcactgatcaacgtattgtggagaaacagtaaagtagaagaggcaacctgggaactcgagacggatatgcaacagaaatatctagagttggtcaggcaaattttgggatgaaatttttataaggaggggataattgtaataccctaagataaaagaattggattagcaaactctaactaattaaatttttattaatgtggaattgtattattcaataatttaatatatatataaaaattataccgataaatgacatgttaagaccccgttggtgagctagggtcattttcgtaatttttacaagagaaggttaaaactgtaattttaatgttatagcatgcttatggactatattattatatagtatatttgttttttttccttccgtaggtattttcttacaagttggcgtggtatagtcagaacagggtattttgggtcgaaccgggttcggggcctgaaatacattttgagattttattttggcatttataaataattgaataatctgaaatttatatcagcatggtatgtgatgaaatgataactttacccttgatttatgcatatgtgatataattgccatatgggtattttggtcatttgaccattttgcattatttccaacaaaatgaatttttacaagttagaaaaccaattttctgattccttcaacctataatcgaccccccttttcttcctttctttctctttgaaatataaaagatgttcttgattgtatgagttgtacttgaagttggaaggaaatttagagttggttttggtgattggagcttggaatttgtggtaagctcctaaattttctagttgaatttttattctattatttgaagttgtaaaaggcatgttttgtttaatgatgctcttgaatgcatgtatgtgggaattttttaaatggtgtttgtgtgtatgcatgattgtgttggtaaaattgtggatattgctcttggtatgctttggatgagattttaaagatttgattttgtgcatgaatctgattttggttagtgttgttttcaagcttgaggttttggttttggtgttcaagcttttgatgagggaaattatgttgattttagctcaagtttacagcttaccttgattgttgttgagtttaatctatgatgcatattttgttgttgattaagcttgaattggtgcttttaattccctactgtgatgtctttaatttgtggaatatgaatttggagtttgagcatgttttggttgtgtttgttgtgcaattgggcttgattttgtgtagctgaaaagtggattttttgggtttggaacccaagtgtcacggccccctctttgagcgttgcggcctgccccttgaaaatcctaggttttcaaccaaggtgtcgtggctcgctttgggagtgtcgcggcccacctattgttttctgggcagttttgaatgctaggtttgattgttcataactttttgatccggactccatttcgggtgttccatatatcgttggaaagattatttcgagctctacatttttatctatatttggatgccaattttatgattatgcgaaaattgatttaggaattaatcctatttttaaatctcggaaattgtgactaggattatcggcacttgatcaggagcacctggggatttggaatctccacgtactcgggatatcaggtatgatagtagttagcacgtacagttaagcgcggtggcgctcatgtttgatactatatttttgattaattgagcaccgagattagagttattaccctaaaatgagcggtcatgtggtctaaagttattaccctagtaattatatgattctaaatgcgatggatatatatgtttaaataaagaattatgtgctcaaggaataatttggttggattcggtaattagaaccaagataaactgttctaaggccttacagtaattagacgtgtgagcgtacacgttggtctatgccacatagacataaataggcgtgtggccgtaacacgcaggtttatgtcaaatagacgataaatgtaatagcgttaatttatatgtgatattttttactacatttatggatattaatactgttttgctgggcttggctcacgggtgctctactgt

SEQ ID NO: 38489 - DNA, 2363 bp, Cannabis sativa
gttgaaaaaagttcccacgaatgaggaaatttggagtgtggtggcggcaatgcatcctctcaaggccccggggcccgatgggatgccgggatattttttttagaaggtactgggatatagtgggtaacgaggtaattagcatggtgcaaaaatttttctcttcaggaagcatggaaggccagctgaatcacacattcatttgcttaatcccaaaagaagagaatgcatgctcggtggacaaattcagacctattagcttgtgtaattttgcatacaagatactttcgaagatacttgctaccaagctaagagaggtcattaacaagttaattttcccattccaatcggcttttgtgctggggagatggatagcggaatcgtccattctgactcaggaactagttaataccataaaaaagaagaaaggcaaaggaggtcttatggccttaaagctagacatgttgaaggcctatgataggtttgagtggaattttctgagagaagttctcaaaggcaatggttttgataacaagattataaagctaatgatggagtgtgtctgttctgtatctttctcggtccttattaatggtgtgccccaaaaaaagttctttccaaggagaggtcttaggcagggcgacccattatcacctttcttgttcttgctatgtcatgacatcctctcaaagttgataatgaaaaagcaatctactggcctaatacacgggatttctatttctagatcagcttcggaggtgagtcgtctaatgttcgctgatgatacaattttgtttactcgggcaaatacgaagatggcaacgactatacttgagtgcatcaacaagtatgaaacctggtctagacaaaagtgtagtttactgaagtcaagtgttctcttttcgagaaatatgcctagtaatcttaagagcaaaattctcagaatcctgagtgtaaaggagtgtaacggtcatgagaaacacctaggtaacccgtttgtgttcaaaagaaggaagagggaagagtaccagttcttaaaagagaaggtgcttaagcggatcgaaggttggagacaaaactcctgtcctttgcaggccgtacgactttggtaaaatcagtggcattatctatgtcgttgtacgctttgtcaaccaacaagataccatcatccacttgccgtgagctagatattataatttgtaagttctggtggaccagaggctcagacaaggatcggtttttggctttgatagggtgggatcggttgtgttctcctatgctgtcagggggattgggttttaggaagcttgaagatatgaactaggcgcttttggcaaagctcgcttggcagatggctggtaaactagatagaccttgggttaaatgtctctcggaaaaatattgcaaaaacaagtccttttggagcattaatgcaaagggaaacgactcggccttttggaaaggtgttttaaaatcaagagatattttgtgccaaaatgggatgtcgattgtgggtagaggagactctatagatatatggagacaaccatggattccatggctcgagtacaatgacttcttagcgacaatggagcaagcaagacagaggaacttggaactcagctcttctctctcaagtttttggggagagtttggggggtagaattaaaagtattgccaggcttccgaactctgaagtggatatactggtgtggaaaggagcttcagatggtttgtacactgtgaaaagagggtatgaggctacgactatgcatcgagccacaacggattcgaacctgtggaaaagtatatggaacaatggtatccaatttagactctcgttcatcatttggagagccatatcgggatgccttccaactcgaaatcgtttgggattcgtagccgagaagatgtgtcctctgtgtgacttggaaattgaaaccgctctacacatcttttgggagtgtcactgtgcgcgtgcactttggtttggcagccccttttcatgggttatggggagtgttccttgtagtgctaatactgtcaaagggaggattgagtggatgctctcaagccttccatcggatcttacaagtcattacctgaagttcacaggttgtctttttgatgaagtgtggaaagctagaaatgaggttttatataagagtaaactgatcatcatcactgagatcagatgctccattatgaggaggttttccgaagctagagtagatgtggagactgatgggcaggtctgtaaagtccaagatataagaagggttgggggaaaaattgatgctgcaacggaggtgttatgtgtttcggacgcctcttggaaggacggtgaggcaggtttagctgtgggg

SEQ ID NO: 38490 - DNA, 1714 bp, Cannabis sativa
aattggtttgggtttaattaaataataaaaagtgagtaaattactgatgcattagataagttttaagagtttagatacttcatgcatcttgacaatatattgttaggtgaagaataagtaatccatgcacttgacatgataagaaaaactctataaatagcatgggatattcaagtgaacaaacacaccactacaaaaaacctaattatatatcatttttataggtaactctaactaaatatttcatatgatctaattattttattaacatgtttaatatgtatgaaaatgtaatatattttcttagggctacaacaactaataatgttttttcttgtgtaacagttgtaccatataatggcacctccgaagtaccaaatcggttactggcttgcatccaaagaaaaattattttcatctgaaaataagtctattgtatcctcatttactcacctgtattatgcctttcttcaggttaaaaatgataccggagagctgattatccctcccgaacttgagaatgatatgaagtcttttgtcaagagtgctcatgacaaccaaaagaaagctctagtgtctattggaggcccgaaaacaagcgatgacaatgacccttcctccgctatctctatgatggcaaagagcgctgaaaaacgtaacaagtttgttgaatcgaccttagctttcgctaaagactttagctttgatggttttgagcttgcttgggaatatcctaaaacggcaaatgacatgagaaacctaagcaatctcttcaacagttggaaatcttctttgaattcatgtaatgataatagaaagaacctactactctcaattgcggtttattgcaaacccattattccaaatgctacttcgaaacaagaaatcaaatacccttccgaactcgaaaattatgttgacattttcaatataatcctctacaattattgtccagtcacttgtccacattcccaattcaagcctagcaaccctggccctaataacagcagtgaagactctattaatagttggctcactacaaatgaattttcgacctgtaaactagttatgggcattcccttgtacggaaataaatggacattggctgatgaaaatgattccagcattggggcaccaactattgcctattcgggtcccatcgcgtataaagatattcctgatccagaaggtgggatctatgataaggatgttaccaagtgcatgtacaaggctgataaaaatacttggtatggctacgaagcttcagaatctataaatgaaaaggtcgagtatgctaagaaacatcttggtgggtatttcctatatgccatcggggatgatgatgatggtcaaaccatgtgtattgcagctgcaggtataaaatactatcgtagtcatattattctatttactagaaagtctgcggttaaaagtattaaagattaataatttactaagtattttaaatttgtaatattaattatttgttttttgtgcatgcagagcaaatggcagcaagagaatgaagatcttgttttccaattatgaatgagggtggatttaaatatatttaaataacagcaaagtacacataattaaaaactttaccaccttgatcacttttatctgtttttgtattgtattgtgtaataaattaaaggcctattcgttggtccttttcgtgcaagagaggaatctcgaccaccttatcttg

SEQ ID NO: 38491 - DNA, 4167 bp, Cannabis sativa
ttgtaaccactaagaatcaggaaagaataaaactttacgaggaaacaaataattcagaataacctaattaacatcgtacagaaagtttccaaatatttactgattttgttcagattttaaacaaagcccgaaaccattcgcttactgctaaactcccatacttaacattgtggggaatttatctgggtatcatttgtgctagaaaagtaagtacctttttggttgtccctttttatagctgtttctatttagatatttagatttttattttcctgtatattctaatattatatggcaatgacatctcatatttgtagcaatcgattctttacctttattttttgtttttcttttcttcaaaagttcataatgcccagcataaattggaggcacttatatatatgtgtgtgtgtgtgttttctttcaatgtggataagttttgttctcattgtctttcatagggtgttgatattcaacttggaatggcaattgatagcacgaaagccactctcgccgtgaagcgaaggcttgcatgtgagatggtcaagtattggcagcaggtatttatgccttttaatttatatacatgatatatcatgtgatcagtgtttttgtggatagaaaggtatagaagaatctttatagtttatttatgctattagattatggattgcgtgaactttgaaaaagtgcacaagtgaaaagtttgaacttttcaattgatcttatccacatatcattatgttaagacccaaataaatttacacacaacctagagaaactaccagcatacaagttcacaaaaaagaatagtatactaaatgaacttctttagtgtattgcaaaaatagtatgacaatagtactaggggtttagttcaaggtgtttaagaccaagggtggtttaagacaaagggattagctatcacctttcattttaatgcttgtggtcgacatagtgggaaactagtggataaagcaacataagcatatttacttcaatgctttacactatgtttggtagggaagagagatgggtagatatggagagggggtggagggagagagtagaaggtcgacattgtaggaagacatggccgacatcaaaatgctacaaattccaaccaaagttagttgctaaatacaaaaacactcaaacgtaacatttttgcaattagagcaaatgttctaagagaatctatgtcataggtatgagcttagcctttagctaatcttgctttatacctctctattgtcattagacttgtaatatattcctaacacagagtgtcacccaactgcttttttttttctttcacttcaacaactttaccaaatcacacgtcctgttttttttttcctttcttttgagagctacatctctactttcatgacattcctccagtttttcttccctaatgcttcaaatggtgtcttttgattgttatactaataaaaccagtaaggaaggatcgattgctatgagatagcttttctatgacaagaagagatacaaaaggtgttaagtacaagtcctagttccttccctaagtgctatgggtatgtcaaggtcaccttctttttgggcatctacatccttagagttgagtggagtacttaccttgttatttcattgggagcatgcactggttgggagatttgcccattcttccatgaatacactgaagtggatggatgttatgtatttctgcaatgagtgagggaagattgatttattttctaagtgatgggagaaattgagacaaggccaatgattggtaatgctggaacaacttaggtgacagtttaaatctcaaaagagttcttgcctttgaatttgaaataaacatctatgaaccctcaaatattttttggtaatttttatatctcatggaaagtatatagtagatcttctaaaggaaataggaatgattgggagcaagctgttgacactccaatgaatcctcacttgaaagtaatccaaagtgaggatccaacttcagtagagtgggtgagttatcaaagattagttggaaaaataatgtatctctcatactagaccggatatcaccttccttgttagcgtggtgagtcaacatatgcacaacctttgtgaggagcacttggaagcagtgtatcatattctaaagtatctaaaaatgacaccaagtcttggtttgcacttcagaaaacacaacaattgagactttgaagtttacatagattctagttgggcttaagagttgagtgacaaacgatcaaccagtggttattgctctgatgtatgggataatttagttactaggcgcatcaagaagcaatctgtggtctcaaggagtagtgcagagtcagaatatcgtgctttggccttagatatttgtaaagggatgtggatttgtagtttgaaggaatataatttgcaatattcattgatatgccaattgacacatatatataattacaccagtaacagatgtgggataaaaccacaaaaaaaatgaatatttaacaactaattcctaagactaaggaaacagcctatgacatattttcctaattttatacggtaacttacactccccctcaagtcggtacatacacatcaaacattcccaacttgcatacaagaaaatcaaatgtgggtttaaataactcttttgttagaatgtttgcagtttgatcttcagactgtacaaatgttatacaaatcactcctaattcctagttctcctttataaagtgttggtcaacttctatatgcttagtgcggtcatgttgcacatgattatgtgcggtacttatagcagccttgttgtcacaaaacttcacaggtagactaacttgcatcaactctttaagcacacaatttatcgacaaaagctcacatacaccattagccataactctgtattctactttcgggcaacaccttgcaaccacactctgtttcttgcttctccaggtcactaaatttcccatgcaaatgtgcaatatcccgaagttgacttcctgttcattatagaacctgcccaatctacattagtaaatttttcaacacttctgttaccactcatcttgaaaagaagacctctgcctagactaccttttaaatcttagaatgcgattggcagcttcaagatgtttcttctaaggacgatgcatgaattgactcaccacaatagcaatatcaggcagagtatgagattggtagataagtctcctaacaagtctcttttactgttccacgtctacgaatctcccgtgttgaatatggccaagtttcttgtttgggtcgatagtatattggacaacactcactcatttctgaatctttcaacaagttcagaacatatgttctttgagaaatcgcagtcccttgtttggaccgtgccacctccatagccaaaaaattgtctccaagtcttatttcagatgaagcaaatgagggaaatgtttttattttttgatatctattttattatatacagaggttataatacaatgtgaacacctagtaatactagagtaaatgaaaaaatgcattaaatgttaaatttacaactaatttacaactagcttaattttctacactccccctctagctagatatatactaaatattcttaatttggaaatgagttccctaaagttaggagatggagagctttggttaagatattagctgcctgttgtcttgagggattatggttcaaggtgatgatcttgttttcaatcttctctctgatgaagtgacgatcaatttcaacatgtttggtccgatcacgatgaattggattttttgctattgcaatggttgattgattatcactagaacatctattgggccttcaagtttgattctgaattcatcgagaagacgttttagtcacatttcttcacaaattccatgtgctaaggcacgacattctgcttctacattgctgcgatctgctacttgttgcttcttgttgagagaaccaacccaatctgcatttgtgtatatattaagatctttgttgagagttttccaaaacatttaccatttttctgatgttcccttgaggtacctaagaattcggtagacaacatccatgtgttcctcaaaggaattattgagaaattatctaacaacactcacagtgaagtttatgtcaggctgagtgtgagt

SEQ ID NO: 38492 - DNA, 1425 bp, Cannabis sativa
  modified_base (1186)..(1189): a, c, t, g, unknown or other
aaagttaaaaaaataatatatggaataattctcctattatctatcaaatttattatcttttacatcattcaataaataatatctatatcttttaattactcattgcataataataatttagtcaatattattgagaaaattgtagtatacatttttacggttagagtaattttagattaaattattctaatgattaaattaaaatatgttattcttttatgtgtgtatgtattgtaatttcagtcatgaaataaacttagtctatatttttttttctttctaacattgcataaaaatattataattatgtcaatattaaaaacaaaaaacaattcacacacacactacaaaaatttgtgccaaaccatatatatatggttgctaaatatatatagattaattatgtaatttttaacaattatgtaagtatagttttctgttttttatttatatatttattttacatattaaactatatccttaaaagatagtagcattaaagaatgataaaacttccaaattcaccaagcctaggattccttctaataaaatggcctaaaatttgagaaagaaaaaacaaaaatattaaagaagtaaataaatccaaagatattcattatataataaagtccaaagaaacttaaaaactatttcagagagcaagtaaattgtcttctatcaataaatggattttttttttttaattttcttaaaaatatcatgagacatcactttatataatttttgggtattaatatgtgattatccctcatcttatggaacaactatataataattaatttcatattattattattactcttataatataatgtgaagaaattttgtgttcttatgataatgttgaatttggttatgcatgatggtgtgtcggttgtttgggtagacaatgaagatgtaatttttgatgggatcgatggtccaactatatatggcccactgggctactggcccaacgtatgcccatctaaagcccacctcagtctaacctactaattataggggtaattccatgaataaatataggaaaaataaaactagtttagataaatatggtaaaaaaaattaatataaaaaaatatagtatttaaaataaaaacttaacatatatgagattgaattacagatattaaaattttgttcatatatttttttaaaaaaatannnnaaatgaaactacagtgatcgccggtgccgaaaaaggtaccggagtttgctgtcggcgacggaaaaatcgtcagagttgttgccggcatcgggaaggtcgccaaaattgatgccggccccgaaaaagtcatcggaattagcattatagccaaaaaaaattacggaaaaaataccaaaaaactagtttgttcatcaagaaactagtttctctgtaatttttccggcgacaatgccaat

SEQ ID NO: 38493 - DNA, 1128 bp, Cannabis sativa
agtcctagcaacaaagctagctatatcctgcttcatacctttctatcagtgttacctctttgagtcctggtgcattaagtgactaccacgatgtacaataaacttggaactacatgcctcgatcatagtagagtttctaagatcgtaggtatttgtaacaaccaatctttccttgtggtataagtatcttttagcattcattgtctaaccatctaaatattctccacctcgaattaaactcgaaataagtgttagtttctcgactttctgttggcattacttaattggttgaaataatattagtgtagcctccatgctaaagacacaagcgccacctcttttcctccgtaacactgcaagttataatccccataatgattagtgttttctttcttgttgttagtgtcgtacatgccaaagtatcataacgcttcctacttagtacatctgttaccacttgaccctttctaggatgataccacaaagtaaaatcataatcatcattatacttaagatatattgttcttatcataaggcttcttacttagtacatctgttaccacttgaccctttctaggatgatacaacaaggtaaaatcataatcatcattatactcaagatatatttttctaccttaaattcatgtctcttgagtaaagagatactttaagattttacgattagggtatagctccaacattgcaccaaacaagtaacatctccaatccacacatgataaagattttgctttaactatgatattgagcgtgtggtaattttctcacatagttttaatttttgagaagcatagacaacaaccttgtgatttttatgagaacacttcataaacatatacttggaacattagtagataccatgtatggtcccttactattaagcatagagagaacaaatattatggtcaatctttgctttaattcacataaagcttcttcaccactttcatcccacacaaattttacttccttccatcaccacagtttcaagggcacaaaaatcatagagaaattttctatataaaaataatagtagcctgctaactctacaaaacttgaaacaccagcaacattctttagtattgtccattttataatagagtctactcc

SEQ ID NO: 38494 - DNA, 2230 bp, Cannabis sativa
cattcgtaatcttgtttagattctcaattcgttattatcttcaggctatattttgtgcgagaggaagagacttattgtataaatattgcactgaacataatgttcctcatgaacaaatcggtaagctcatagttgcaacaagttcttcagagattccaaagctgaatgatattatgagccgtggaatccaaaatggggttcccggtttgaagatgatggagggctctgaagccatgagaatggaacctgaattgcagtgttcgaaagcaatactatcacctcttactgggattattgatacacactcattaatgctatctttagtggtatgtattcccttttgaatctaaactagatacgtattttgtaacttaagacatgtttttgtggagagctaatactatgatttaatctatttgtttctatttagagttaaaaaccaattttgacaagggtgtaatctatttatgaagccagggggaggctgaaaacaatggagcaactttctcatataatactactgttattggtggccatgtcgatgaaactcgaattcgccttcacattgctgaaacaaaatctcttgaaaacggtttgaggtctttaattcatccagaattagtacttattcctaatcttgttgtaaactcaacaggcttgagtgcccctgtccttgctaagaagtttgatggcatacacactgcagaaatcccacctgcttattatgctcgtggttgctatttcacattgaataaaatgaagaaccctccttttaaacatttgatataccctattccagtagagggtgggtttggggtgcatgttaccctagatttagatggtcagctgaagtttggtccagacgttgaatggattgatggtttggatgaaatttcaagctttctaaacaagtaaggtttctttgttcttgtttgtcagtctaaccctttcattagtaattgaatgaattattctccaaatgagagaaacaccaatcggctactacaatagcttctggttcacctaagttttagacattttatgagtcaattgatttgtaggaattttatgattagaaagtcacttactgaaatttacatttcattgagttatgctctttccgcgtgttgacaacatgaataggatagtaaagggccaaattattttgtttaattttgatcttgattaacctttgcaatttcttcatcataactatggatcctttgtcctattttgagtgtctgaattcatgtgaatgcatgcaaatcatctaaaactagtaattattaaataatttttcgaactttattatttttatttagataaacttgataagccaataggttaagttagactttaggcttagttgttaactctttttatttttaattaaaagctgatgtctattagttgtgagttgtattagtctaagaggctgatgtggcaattattttagggcaccttagagtatataagggggagggggtctcttagaaaggtcatggagattttcttcttcctttttttttcctgatagaaggtcatagagaaaattgataagagttcggactcattgtggagagccccagttttctaaaagaatattaggagagaactaacctctcgaaagcttgtgatttgtaattttgttcatcaattcaataaagttttgaggaggaatttcagctaacctactctgtaattatagaagttaattctatccaagaaagaacttatcaaatattgtataccaaaattggagaggattttcatatatggggtattaatgaattatggtatgaaaacagattgaactcctcagtgctatctaagggagagattaaggtcattagtgcatttctctttctgactgctgattctttccttttaaaaatgaaaaaagaaaaaagaaaaaggaagcatggaagtgtatctcttactcacaacatacccacatgatcacttggatagacttaaaattagtttttagttactgctgtttcttttttagtgttcctgtacatagtaacatagttgttgcagaaatgcccaaaaactaaaaacaaatgttgatttcaggtttgactacactgtagatgccactcggggggagctattttaccaggatattagaaagtactaccctaatttgaagaatgattctcttcagccaggatatgcaggaattcgaccaaaagtttcaggtcctggacagccaccggttgatttt

SEQ ID NO: 38495 - DNA, 2132 bp, Cannabis sativa
cagtgattattgttgttgattggttttgtttatgcctgctattttatacaactgtggtggcttatacagttagctttttcaattaatggcagggttggcgaatccagcaccgatcattcagacattttatgctgaagataagatttttaatgatgtcaagttagatggtgttgtcactttggtcgatgccaaacacgctggatttcatttggatgaaatcaagccgaaaggagtagttaatgaagcaatagagcaaattgcttatgctgatcgtattattgtgaataaggtagttaaagattattatcattattttcccaagaataagagtgttgtctacttgaaatgagttatcagagctgtccacaatatgttgtgttcttttatggattttaaacccaactgtttcggagacctgttgttgcagcttccaaatgggatagtgctatggtagcaacccaaccagctttctagatatagatgaagaattactatggaggagagatattatgatatttatatatcttctaatgttgctatacccatctgatgcccatatcctgtttttcttgcagactgatcttgtgggagagccagaaattgcatcattggttcaacgagttcgggttggcacctccttctgttgtcccttttctcttcttatgtacatgtttcaatttatttttattaattttttttaactttgattttggacttcaatgtagaaaatcaatagcttggctgaactcaagcgaacaaaatttggacaagtagacttagattatgtacttggtgttgggggttttgatttggagaggtgtgtccttataccctttccttctggtttaatttattcgtggttctggatgtttccgatgatactctgctgacctttgctttgtacttgccaggatagagagtgccattgagactgaaggtgcaaaggaagatcatcatgaacatgggcatgatcatcatcacgagcatgatcatgggcatgatcatcatcaccatgatcatgaacatggtaatttgatctacgtatatggttatacatgaacaataaatattacaatacacgtgcacgggcacatactttctgctgtctttgttagataatggcgtatcttttattcttaactatgctacttttttcttctcctcgtaaaggtataatctaatacctcgcatttaacacttatatgcagaacatcaccatgatcaccacgcccatgaccatactcatgatccaggtgtttcttcggtcagtatagtttgtgaagggagcttagatcttgagaaggtgagttctgtataatgcttaaagaataacacatacactaaccacctagaataattcaataatggaacttgaaggatttatgcctttgatcttaccttgtattttagaagaatgccaaaagtttaaagttacaacagttgtaacaattccattgctgaattattttcaggctaatatgtggcttggtacattattgatggaacgaagcgaagacatataccggatgaaaggtcttctatctgttcagggaatggatgagagatttgttttccaggtgggctatcttcttttgtacatgataactttcctgtgtaatgccaggaagtagcacatacctgaaattctctgtttccgaaattggttataccaataatttgttcttaatatgttgcatgtaattttctgtttgaaacttcagggtgttcacgacatattccaaggttcacctgatcggttatggggcacagatgaaccaagagttaacaagatagtttttataggtaagaacttagatgcaaaagaactagagagtggttttaagagctgtttgctgtgattactaatactaaactaaggtttcagcaacatgtaataccacatttgtcactctcactgtcacatttgagtaatgtaattttgctcatatcttgttttggtttaattcttagtagaaaatctgtcttctggtcttcgagttgtgtatcaaggatccttttttgtataatctataaattaaagttgaataacaggagaaaattattaatgtttcctgttgttattatttatttatttgttggaaagagattgcttgacaccattaacattttac

SEQ ID NO: 38496 - DNA, 836 bp, Cannabis sativa
taattaattaagtaattagagttgtaaagcaacaagttgtttaatatcaatgggataagtatcagaaggaagaaaagcattataggatctatttgcagtgaatccattgacagcttgagttgggtgaatatcatcccaaaacacatataattctctcttttcacaaactttcccatttggtatacattgcccaatattatttgttgggcaacaacttgtgttcaaaaacttgaaccctgcacatgcaataaataatattcagaaaaataaaataattaaattaaaaaaaaaacccaaaaaattaataagcatttgagattaggatataggcaaggtgatgtaattatatactatagactttgttttattgtagttgctcagagatatattgggccttaggaagaaaaattattgggccttatttgaaaaatatgtgttttttatggggtcttgggcttagtgggccttaggtcggtagaaatgttcaaaaggaactagtggtgcctagtgaagccttgaaatttagtagatcgaagtaaataaaataattatagactcttaggaaaaaaaatatgatattttttaaaattagtaaaaaatatgtattataatttgtttggtctccttggccctaagcacaaacctagcctgcctcatgcctggagttgggtctgttagctccttccaacatgtcatatcgttatcgctaactaattataattaaggtgctatttttagatggtattaggcactactaataaacagaggaagttagctctttctatatatatatatatttaaaaatcaattattataattaaattgaaaattaataa

SEQ ID NO: 38497 - DNA, 2880 bp, Cannabis sativa
atacttgtgagtatgttcaaggaatgaaaatgacttcaacattcattcgcctcgctcttgacgtgttgaagtaaccacctcgctaatacctctctcaacgacataggaagactacgagatgtattgtaattcaacatttaacatttttctactaagatggttaagaaagataacattcaaatggcaagacccatctaacacagtcagcataaccctctatagagaaagacaaagagcggttgggcagttatttattattaacccatgtgcacaaagataaaacgtggggagtgttcacgtttcatgaacaattaggaatgattagataccaagagaataactgtcaccatataccctcataaatagagacagaactcaaagaaaaaggaaacgacaaatcttgagagaaaatagataatattgctattgaaaaacaatatcattgtattctgtattcaaacacatctatccttaataagagagactcgtggactatgaagatttaatttcaaaacctcgtaaaaactttcttgttatttattactttctagataattatttattatataattaattttgtagtttatttattacaaaaaatgctaataatttaattaatgaaaatttgcgttaacaatttagtagttttattgagagcttttgtaataagacacagtaaagataccctcctaaaaaatacaacattgaattacactcatggcagatgatactcaacataacaaagagaatcagccagaagagacaacccatcgtccgggaaaggagcctctggctttgcaaagaacgaacactgctaaaactccccatctggaagaaacagtaaagactttaatcaaactagggaatagatcccaaaaaggtgaagtgaagatgtttatgatccaaccagatacgttttactggtggaactagaaaataggcaacttcgacaacacttggctgaatcaaatcaaaggaatgtcgaattagagcgcaaagcagtgacaacaaaggttgcacaatgagaggcccctcaaaatcaacttggtccatctgtaagacgaccacgggagaggccctgaggctttgaaactaggagacaggggaacaaccaagggaatccctcatatactcaggaagaacaacctgggaatgtgagagatatcctaatggatggaaaaaatccacaaaatcctagaaacacaagaaattaggagactcgacatgacaatccaagaacttcccatggatttacaaaccaagggaatgtacaacctaaagtaccagagtcttctcgcatgaatacagatgccaggcaaacatgacttggaaactaagaaattctctagtatgatgcaagaaatgcagaaaatcaacctgtgataggtcgacccccaagacatccacaaaggcctaatcgcaatgatagagacaatacacacacttacttgaagtaggggtcatgtgtcaaatctcttctaaaggagatggccaatgcgagaatagccacaagaaactggctcatgtacagatccaaaatggatcaaggttaaggactcacgggcatagcagatcaactagaactcatgcccatgacaggcgaacacgagatgaaggtggatctcgatgttattatcgagatgacgaggagagtcttagtaactctcaaagctaccaatttaaaagttactcaagaataaggtttatgagtaattatgacaaaaggtatcgtgaccctgatcttcgtgagtagttaaatcgtagacaacctaaactatgcgagcatttaaatcataatgcactagatattcacaatcagttaaattaaaatacaagcaggcaacaaccattggagcaacaacccgtggatccaatccaatagcccgcctaatcccgatattctaacataaaatgtacgattgttcccctaactcaaaggttaacccatatgactctaacgatcatctatcatattttccattgttaccgagcaaaaatcataaaaattataaatttcacatttagcataaataatatacatagagtttaataaaatctctagaattgaaaaattataactctaatgtctattttttaaaaaaataagacccaccacaaatataatcacccataatcataaaatatcaataattaatgataattgccctactaatctataatctaatcctacgatcattacataatttagttgtttgtctttgggcttaaaccaaaaatgaatagaagcatggcaccattgaacttgcaaaagcattccttctagttccatcatgttgaacaattcagtatgacacttgtcaaagtcgatcacagttccatccacatactatttcaaactatttttattgcaccaagaaccctcacaatgcatatttacactaaagttcaaacttgtcagcaaaaaaactacaaaaatttacaataaagtggatgttataaagcttaaaaccatgtgcaatgattctcacatgctagttaaagcctataccccacaaaaaatagaaaaatagtttaaataacaactttatcctgccccaataacctcaacaggtcaaataaatgtgtacacctaacacaatacgttcaacccaatttaaatataaaactccaacaagaaaaccatcttcagtgaatgaaaaagaaaaaaaagagagtaaaaatttaagaaccattttcagtaaaatagaaagaaataaaaaagagtaaaaaccatttcaactcactcagattataaataaactatcataaatcaaggagaagggaaaaggaattgtacctccaccatccttgtcctccattgtccaactaatttctaagcacctatactgtcgtctcttcaagttttatgaatttagctta

SEQ ID NO: 38498 - DNA, 4924 bp, Cannabis sativa
ctcaaatcatccccaaacattcccaaactttctagagcatcaatatatgtcataataaacatattccaatttattatttaataaaacaaaaagtccatctgataacttttgcaaaatacaatacaaaatgatatttaacttttgcaaaccttcaaaagatattatttttattatatttataaaatttatttttattattcattacggtaaaaagagcgaaaaataatataatatgcatttatttattaactatcatccaccacgtcactcattttaataaaaaaaaaaattaaatgaattgtcatggaaagactaccttaatgtaaaaattatattttaataggtattattaacaagttttatatcttaggggcacaacttcatagtataaatatttcaataaaaaatattaattattctatattttaagtaaaataataaaatttaattaatcatttgaattaaataaaaatactaattattatgattagatgttagatgtattaaataagaatattaaatatttacacaccttatagatatttgatttaatctaattgaattttcaaaagtaatatccaatttaaatttgatgataaattttaattaaatttgatcaatttgtacactggattagattggtttccatctcctttatgttcgagaaactaaattggctttagtaaaatcattatttctttaatttcaaggcaattttttttttgacgtgtttctcaagacaaatttagctttagttcattttccaaaagcaagcacctcactgacactttttcaaacaataaaaagtgaaatttgatttaactaaggcttacaacttttgttcaataaaataaagtaataataataaaaaaaattcagcaaggcttatttcaatccagctttgtccaactcaccacttttttcatttctttttttttgttttttttcatctgttgagtgaaaaacatatgtattacgttttaaaataataaaccaaaccatgactttctcaaaattaagagtgggtaaggttagtaactaactccttatttagctacacaactttggggccgctctggctaagcaactcttgtacattaatgtttggggccgcattggctaagcaacagtttctttgaagcttttcaagcgataataaaatgtagttgattgcccgtaaaatcttcaaaaaatttacttccttattaattaactctcaaacatatttttttttgccgcataacctttaaaattagtattctattagaaatttcacaattctatctattttttattattaactgttcaggtaaattgtctacgtggacacagtgtatatatgacataattttattagtccacataatttaatatttataaaaataaattaatttaaaattaaaaaaatattttttttttctttcttattcttcttctttattcccaatttcttcttcttcttcttcattcatcatatcaacactaccgccacacaaccactactcagtaccactgcaacaacaccacttgcaataccactgtaacaccctactaatttaggcgtgttatcgtgattttatattaactgcgtagttcgttgctaatcaatgagtttattaaaaattctgaataattaaaactttctttaaatatttataaacatcaaataaataacatatatataatcagaattccgtgtataaaatatttacaactgttacaaaccacgtaatacaaaagttgttgcccagggactatacaaaatacaaccaactgtcccacaaccaactgtcccaaagatcgtgtcccaaagatcgtatcccaaagatcgtatgctccaggcctaaccgctccgacatgcacaatcttcatctgctcgctctcacggttgctcaaccttagccttgcccttacctacacatacagacaatatctgtgagtcgacactcagtaagaaaagcataatcataatcataaatataactcaaattgtaattaggcacccatacacccaatgataaccctatccccatgtccaacacggtactgagtctagaatgtttctatgacaatattatcgaccataatatcagcctatattcagtactctagtcatactctagccgtactattgtgatagcgtgaatctcatacttgagccaaaaatacatctatcggtatccagtacatctctatgtatactgatatcgctatcaatgtaatccaacaggctccataaatatgcacactaaacatgtaaatatatatgaatatcattatactaatcttacctcatttccgaatttagatgtgccagccaacctgagtggaaccgctgcttaacgatttacaggcccctaaatcacattatttgtgaaactgatgagtgatacgctaaattactttttggggactgacaattgaaactaacagtttcctatcgattgataacatggcaataccctaaatatcgcaaaaatgggaaaaactagtgttataccaaaaattcggctgtactttagaaagtgacacgtgttaatttcgtgtaatatgaattaacaaatataatgataattatgtcattaaatgcaaaatggaataactcattaaatatagaataaatagagtatgttcataactcgttggctgtatagtcttaagcgagacaaggatatagaaactatcaattcatgtattgacgagaaactatcttgcctcgaaaggcataatctcgagggaactacagacaatgcataatgagacatccatctcgctacacataagaaagtatcgacgaggcgaattgattgaagaaacacttggcgtataacccacattataatgactaagtgtaataacttaaggacttgaaggacatgattgtccagtatgcaaggctttatggtcaaagagcagttcttaagtttgctcagtacactggtgctcatgccattgttgaaatacatataaaccaagtcattcacctatgtacaaagcaagatgtctctagcgagactcctctagcgaggtgcttctatcccacgtccgtatccactacttcaaagataagagtaacaaacagttatgcgaacttttagctatacacgtgttaaaatgggacgtagtcaaagcccacgtttcggggaacaattatatattttaattttaaatttaaataactgccaacctatattcctataaataggggcagattatacataaaaagggatggaaaatctttgagagaaaagagatcagtaattgtaaaaccttaatttggtatccagaaatatctgaataagatagactcgtggactatgcagagttaactgcaaaactatgtaaaaaaaacatggtatcattattgctattattattctctcaaatttcatatagtttctatgttaaatttattacgataaaggcttattaattggttaacgaaaatttgcgttaacaatttggtgctttcattgagagcgcgcgtgataaaacctcagaaaattccctcctaaccaaaggaaaaaattttctccatggctgatcatgatgaaaacgatatcagtcgtcctgaagagactaactgtcgtcctggaaaagaactgatgggttcacagagactacccacttcaagagaaacacgttcaacccgtttaacacgtttgagaagaagccaacgtggtcatgatcaaaacccaaaaatagggaatgaggaaaccaatactaatgttggtggttctgtaccaatgagtgaaggtgcctatgatcccactaggtacgtatcgttggttgaattggaaaatcgctaactctagcaacgtttggccgaggccaaccaacgaaacgctgagttggaaagagaggcagccgtagccagggaaacttaggaaaatgctgcacaaaacaaacctaatcctagagtgagaaggccacgaggtagacctcgaggttcaagaaccagaaggcaggagacaactctagaaaacccacgaaaaactcaggatgagcaacctggggaaactagggatgttccagaagatgaacaaccaaataatcaggcacctcgacgagaggtaccttagagaccccagggattcacaacccaagagaattaaaacaacgagattccagaatcttctcgtaggaatgagaacttaacgtagcccagaactagggaacaggaatccctcgtaataatgagagaaatcttgggacacaacctagggcaagtgggttaccaccgaggcatccttagcgtccttctcgcactgatagggaggaggtatacacgcaccccagtagggtgcatgcatctaacctcccccgaaggagaagaaccgtgcaagatgaggcaagttctaggtcaggacgttcaagatcatgagatcacagtcgatctacgcaaggaggggatatacctcggcagcgtagtaatgatcaagaaagtatgagtaatacgaggagcaatcaatctgagagttactcatatacgaggtttatgtgcaaccatgaacgaagacagctagatctttgtgaacatttaaatgggagacatcttgatttgcgcgagagattaaatcagaatgcacctgatttgcgccaacgactcaatgccaatcgaaagcaagaggatccaattcaattgcgaatcagtgagttgaaaagtaaattcaagagatgtaaagatggggaatatggaaaactgcctggttacgactcaaaggaagagctcgagcctttctatcctatcattatgaactttgaatttgccaagggatttaagaaccctcatgtatctccatacgatgggactacggatttggtggctcaccttaacaattttaataccattatgcgagccaacaatgtcacgaataacttacgttgtattttattccccatcttgctgaccggggcagcgagc

SEQ ID NO: 38499 - DNA, 2011 bp, Cannabis sativa
aaatatataaattataatttttttctcaagcatatgaaattataattaagaataaataaaagcatctctttcactatcaattcacgacccttgggaaaaaattaacaattttttttatgtacgttattataataaccacatattttaatatgatgaatatatagaatggtggtgcatggttgtgatttggaatattaattaactaagtagtgaccacattgatgttacaactacaagtattttttgccattataaacacttgttaggtaagtggttggtcaattacacgtatcttcaacagaacgtgcagaaacagtatctatattaattaacgagctatatttgtacatgttgttttgtttttactttcagtacgaacgatctctactcatctctaaccatagaaacaaacaaattttcctgcaatgtccttctgccctaaactctttttattaattaatgatcagatacacactgcatatcacaactagctgctattaatattattattattacaagttattaaatttgttgtattatataatgacacaaacataatgcaaatatatactgcataaacatattttaacctataaatagcatatgtacatgctgttattttataattttttttttaaaaaaaaatagaaggggggagattcgatcttttggacatcatttttatatataaaaaaaagtatgaattaatatatctagatactagtcagtagtcaaagggttgattaattaatatatacaagtaataactaactgataacaagtatgtttgttcaataataattaactatatatagaattgttaaaaagtactacgggtgtttagtatttttttcggtatcatataattattggtgtaattaagtatcgggtttaatataacttaagaaaataactttaaaaaaatatcagtaaccatagagcgctacttatgtggtcaccactagtgcccaataacaaaactttatataatatgggttcttttagtaaatattactaggaaaataataagttttatgcttaattttattatccatttaaaaaattaataaaaaaatctcttatttttaagttatataggctgatgttgggttcagagaaattaaaaatgttgagttttaagctagattttcttaaaataatttttttttgagtgaaaatataaatataaaagtgatatcttttaattaattaagtaattaaattaagtataaaaatttaaatttatcttttatcatatatcaaaatttaatagttcatattttttaaattgatatttatagttatgttttttaataaacttttaaattgttgtataaatatttaaaatattatattatttaaacgatttgattaaaaagttgtaatatttaactcttgaaactaacatgaagaaagcatctattgacgttaattgctaactgtactgcatagaaatactaaaattatcaacacatgagaattcagtattgtcttttatatatagagagaattcagtacttgtatatatacatagttatactaatatttatttagcaagtacttgatatataaaatatgttagattgtaacatttaatattattatactataatattatacattatatttaatattattacaggaccgaccttgagggtagacgagctagacgtgcgcctcgggctcttaaacgctcatagttctgaaattgtgaaaaaaaaagttattaatatatatatattgggattaaactcacttaacctctcaagtcagtatgtccatctatttgcctatcagatgaatctgaagaaagctgctgcaatttatgacagttggctttaataccaacttaaatgggacctaccagcaactatatataggggttcctctattctaaaaagagaggtctgaggggagagttccgatctctaatattctccaatgctcatactttagattcagtttagagagagagagtccaagatcatagtgagtgtgtgtggagggatgt

SEQ ID NO: 38500 - DNA, 2240 bp, Cannabis sativa
gatacaacaatagatttgttgtagaaggttaattcaattcattagtttaagcattttactattatataatgtacgtatctacaccattagcaactcgttcaactacaggagcctgttatcttaactactaacaataattcaatagtgaggcaccgtaaaacaaaaaaacgaaccaataacgaaataaaatgaaataaatcatgttacaaaaacaagactaatcacagtagcacatagatcccgaccaaaccacaccttagcccaaaaaaaattgacgagcttggttggagaaagaaataagttactaacgagtaaaattaataaagaactatatcttatagtgttgttggataccataacacctaataacaatactattttttaaaaaactaccacctacccgaatgctcaatgctttttttttttttatatagttctttctttaatagttttccaaattattatttgggtaggttattcaaccgtgaatataaatatagtttacaagaaagaggttctaagttccaatctacaaaaaagagtaggttatttaacttaattttcaaaagaaatcataacaataaataaaaacctattaaacacacgtgtagacattattatagcaacgtttgaatttcattatgtttgaaatgtgtaaaaatcctctttcaaacaaacaaaaaaaaaaaaagtgtaaaaataactttttaaacaaaagataatctatttttgccatattaattatcattacacttagaacatgactaatcatattattttttaaagagatttttttttatatatatattttcactttaaaagtagttttttttttctgtatttttatagaaatctacataaaaatcaacctaaatcataattaagatttacaattaatgaagtagtctaaactataattttttttaaaataaaaaaaggatacaaaaatagtatatagagtaatttttttttaaaattcctattataatttttttattttaattattaaaatgttctttattaattaataactactttacattaatatataatttttttaatacatactgtcctcttatttatttctttaaataattaaataaataaagtgtgatggagttgtttttaggtaattgaaatttgatagaaacgagtgtaatgatgggttttgcatttgggggagggtggattggatttgtggtgatctgatgagatgtgtgttcaaaaaagccttttccctttttatgtgtggaacacattaattgaacctttctctttgccaatctagtttcttaatagaccatcctcactaacattatcacaacatgaagttttacaaatgaatattgttactaagcatcttaatgtacctaagtattgatgtgacatattatgtatttagagatttttaatattttttaaattaaaatttacgacttaatgggatgtcatattttgtggtacttaacactttaacatttttatttagaaatagttactttttttataataattaggaaaaatttatggtgcatgagtgcactcatgcatttttgatttgtttcggtatttaagaaaaaaaaattaatttattttttatatataattatatacattgtagttattttgagaaattaaaaaaaaaaaatgatgtcaaaagtaaagtttaaataattgcttacgagtgttttcagcgtgctttgttcttactcgcatgctctctaaaaaaatttctcatcacatatcctaaaattaccctagatcaaacatgcttaactgtggaattctttcgtgatgggctaccaaaaaataagatccaccttgttaatataggtagtaccaatcaatctatttaagctatcttcaactgtgtagtctcatacttacacaatctcagaatcatcacacatgccatcttctagtcaatgtggaattgcacaacttatttgctatttttccttacagattataggactactaactgtcacaatcactcccttatgtagtcatatcttgtggtacttaacactttaaagtatcctttaatatttatctttaaaaatagttactttttttatataataattaggaaaattgtatggtgcatggttgtatctatgcattttttttttatttattttagtattcaagaaaaaaaaattaatctatttatatatacagtagaacctctattcaagaatacacttgggaccaagaaaataatattctaattgagaggt

SEQ ID NO: 38501 - DNA, 2441 bp, Cannabis sativa
tcaaaaaatttcaaatatatttttcacactttaaactagtcgaaaatttttaaaaatttacaagaataatgttattagcataacgaataccgtcattcaaaaaattaaaaaaaaaatatttcaacatgtattttcgagcacgaatattgactaaaaaattataataagagattgacgatagtactcctaaaaaaaaatagttgttttgttaaatcaaagtcaacaatgtcaacatctaaccataaacttgttcctttcactgttttttttttcattctttaggtgttgggattgagatggaataatagttcattttttcaacccctaaaccaatagagttggagtattggactgcattgatattgaatgaaagattattcctttgaaactactgttaatatttgggtcaaattaataattatttgattacaattatgatatatataggtaccatatttaattggtatagaaagctcaaaatctcttgatcagccgtgaaagcaacagttagtgtttgtgaaaatgtctaaatgaatagatatatgatgaataaaatgtcatgtctaataagatggcccttcacaccaacaagttcctttcagggatatatcaatggctgccttttcttcctctagatatgcatgcatttcaaaattcacaagcctaagaacctaaattctttgctatagcatatttatgtactacactaatattcttcaaattttaaattttagctacactgttctacgtactataataaaaccaatagtgcaattaacgtgttttgggcaactaaatactctcaactatcatttcaagtgtaattaattatttaaacttaaattttagtggtaaaactattcgaatttctaaatcgttaataaatttaaaatatcatcaattttttttagttaattattgacatgaattgcttatgtgtacaattttatacacgtggaacatatgtattaaaacatgtaatataattatttaaaaattataaaaattattgtaaaattaaaaagaataatataaatttctaaatttattaatataaataattgttatcctttattcttttatataacaaaaagccaaaatcttagttttcgaaaaaaaaaaaaaaaaaactaatctttttccctcttgcctgaatgaattacattcggaccttcatagtcgtcccgctcgaattcaattttgcccagatttttcaatcgccttcccttctctttttccacacccaacactccatccccacctcattccatcttgccaaaccacttcccagctagctcacctccaccacccaatctcacctgagccacgataccctttcaattctagacctccaccactccctcttgcatgaaatcccatcgagccagccaccgtatccttcacaaagcactcccatcatctttctcgctctctttcaccactgactgccagttcatttggtgatatatattataaaagcaagtcccatgccgatcgaaaaaggattgagattcatgactgagaaagtaaagaatgtgaaaaagctcgttagtgaatgagttatgatctgcttgaatctaactggtatggtaaaccgctctaccagagctggagttaggaaccagaaggtctcgtgtgattcaaacattgtcattgttcaaatgggcatctcctaaaagctttaaactactcaaagtcagggtgtcgaagttgaattcagtgatggcgccaatcaaaattgcaaaacatcgatgtaagaaaatgttatatggaagaaaatgtcgttcgcccattcattgaaatgaagtcagagaacgaagatatcttagacccgatgcagtccaaagaattagtgaggccattgagaagattcgttctcgtatgcttgcctcacaaagtagacaaaaaagctatgttgatctgaagcataaggatattgagttccaagttggggacttcgtcttccttcgagtatcaccaatgaaggggattcagagatttggaaagaaaggaaaactaagtgccagatttattggttcgttaaaaaaactagaaagggtaggccagatagcctatcggctagcttaccccttgctttatttggagttcacaacgtattccatatttcaatgctcatattctaagttacgaggacattgaacttcaaacagacttatcatacgaggaacaactagttcagattttggataagaaggagaaagtgttgcggaacaagactatttcgctagttaaagtgttgtggaggaacaacaaggttgaagaagcgacttgagagttagagtcacagatgcgggagcagtatctcgaattattcaggtaaattttgatggtgaaatttttgtaaggaggggatagttgtaatatcccaaaaattataatcatgtgaaattggaaaatttttattaaatatgtaattatat

SEQ ID NO: 38502 - DNA, 3376 bp, Cannabis sativa
  modified_base (2316)..(2318): a, c, t, g, unknown or other
  modified_base (3348)..(3350): a, c, t, g, unknown or other
aacacccctacttgcggtgcagtttggaaaattacaacttgcactactcgcaccgcaaacacccctaattgaaagtttattaaaagacttggccaaagaagatagcaagtagttttttctaattaaattttcactttgcttaagaccaacttaatagtctattaaatgtaattatgaaagtaataatttagttgtgaaagcgttattattacgcacgtgtagtgtccaatactatcgagtttacaaatgattaataatattttaaatatttatttaattaacatatatgacctaatactcaggagcaaggctctaacaccctaacgtctagggaccttatatgtgtgcttttggaacagagccttgtaatagtagattaactatttaatcaaatccgtgataatagtaaatacttcaccaaaacaaattcatagcaataaataggatgacatcgctaaaaatttgtttcagcaatcccctcttacaaaagttttacaaaagccctatatacataagtaagtcaatacacatcaggtgcagcccaaaacatctcttggcaactcgactacacaaaccaaataagtcgatatgtatattattgtagaagactgtcatctcatggttgccctagtttccctttgcccttacttacaccacaaaacacctgtgaatcacaaagactcagcaaaaaaaaaagtaaagaataaatacatgtcaatgagataactaaatcagaataataatataattaaacagtaatacacaaatacttgtcttaaaagacaagctataactgttacttcacaaagtaactatttctattgttgcctaataaaacaatcctgatgccctaagttggcatctactcatctcttgttgcccaataaggcaatgttaatgccctatcttagcatccatatacctttgtcattgtctaataagacaatcgccaggtaagaaacttaataactgtttcaattgacgtcatgactttactttgcttaatggtaatctctatttctttatctcgatcataatcgagtcataacgattataatcatatccttgacatgctatgtggtacgaatgtccttttttacctcaaagttccaattcaagaatgtcggccggcccaaaatagtgacaaatcaacgattccgaaccctatatcacaataacaaaaaagaacaatcaaacacttgacctaacctattccaggtctttaattcatcaccataagttcccctattgatcactagggtaccaataccctaaacattgtgaaaacataaaaaaatggggttcctagcatcaccaaaaaggtaagttatttagaaaattacaagttgttttaagggtttcttgctaaaaacgatctctcagttttccaaaaatggtctaccatttttccaaaaacggtctaccattttctataggaaataaaaaccccgagtttcaacatctccaaactccaccaatacctaattaaataatttcaaacatcacaaaacagttatacaatatcattataacaatctattgatagaaattaaaatcatacccaaacatgaaagatgccataagagctcaagctttgagttcagaaactcaaacttggctctcacctcactacagttgtacacttatcaaaagaacatcaaaaacacttccattccatcctagaaacaaaaccaaaaccctacttatatcacaacagctacagaacaaaagtcaactccccaaagcctaaaggttttcatgaaacttaagtgaaaaaaactaaaacccttaccttatgcttcctcttcaagctaggctcacctactagctgctactagggcttgaggagctggaatggacaaaaaaaaagacaaaaaaaaggtttgttgctttgatttttctttggtcaatagaggggaaaaagacaaggtgttgctttgttttgtttttttttaacttatcaacttatatatacatattagctcaaaaaaaaaaaaaaaagaattaaaagaaaaagagaaaaaaataataataaaaataaaaataattaatttaattaaaaaaatattaattttttccattcttaactattaagaaatctctaaccctagggaattcggtcaacatgaataccaccaaaatacctggtaattctaaaactaccttagctgaacaatctcactaatatgactaactaaaagtgttgtgatatattaggcctccgatctggtctctaaggaagccaaaaaaaaaatattattccacaaataacatacatcatacccacatagtccaataaaatctctgtaattaatnnnttacgcttatttatccacttatggcaaaatttcttaattcacgctgaattagattagtaggataataatcctactcatcataccctaattaacctttgattataataagtcctaattattcataattaggtttttgggatattacaactatcatctccttatcgaaattctgtcctcaaaatttacctgaacaactcaaaacactgcttctgcatctgccactctaactcctaagttgcttctttgaccttgatgtttctccacaatactctaactagtggaattgtcttgttccggagtactttctcttctcagtccaaaacctagacatgttattcctcatatgataagtctatctaaagctcaatatcaccataactcaaaatatgtgtaggatatgacacgtacttcctaagcatagagatattaaataggttatgcactctaaataacgtaggaggtaaggctagccaataacctacctagcctacccattccagtatctcaaaatgaccaattaatctagggcttagttcccctttcatcttgaatctacatatccctttcatatgcaatactcagaaatattgaatatcctagggctccacatttagacccgcgaacccaaaaaacacgaccacccgccccgacccgttgccaaaaaaattgatccccttaaaacccgtgtaattgggtcaggttcaacccaaaaaagactccaaacgggtttcaggttcgggttttgttaattggtttttttttttttttgggttataacccgtaacccgatactgtaatctctttaatatttatctctactttttttttatatatatgatacatatacttaattattaatttaatattatttcaaaaagtaagcctataatattaatgcctaacctattacctattcgtattctttccaagaggcttccatgaccaatcagtgactagtaataatatttaatattactttttgaagttgacgtgagtaaatagtaatactatgttgggttttatgccctannnaaaactctatttcaatgtaatccaga

SEQ ID NO: 38503 - DNA, 2717 bp, Cannabis sativa
ggctgagcttcattctttttgataagatagggacccattttaacagattcatgtagctgcacaccaaacacaatctaagattccagataatgaaatcaaaataaacacatttcaaggatataatgaacaactttgggttaaagctaacctttttagctatggtgtcacgagcagcctcgctgatattttgacccgacaatgaaagagccttctgaattgccttgcaacatttatacctagcttccatacctggttcaatttgaaacaatgcgccaattgaaaatcataacactagcatttcaagacaacacaaggcgaaagaaaatgaccccttacggaaagaaagaaaatacacctatttttatggtctcagtatttgcatctgttactgtatcaattatatcttgttttgagcaaatctccatcaggaaccatggccgaaccacaaacccagtaatcaacctataaacctgtaaaagtttatttacccgcattagattgttacagtactagcacctgtaaaaaggaagtttaagtgagaaaaaacatattatttaaagaatttccatatgcaatgtaagcaatgaaaacattgccaaaagccacggatacacctatataatgtttctgcgctttaactatgttttcacttggtacatttccgtaaggagacatgaatgatgaagggtgtttgaagagctagaagaccgaattttttaacctactcacttttttttagcaatacagccaaattatcaaatagtagtgtgaataattgaggggttcttccaataccactcaagtagagaaaaatgaagaaacgtcaagagcacgcgaaaagtgaatcgtgtcaaatgtagaaatatttcaacaaagtactgatctttgactaggattagtaaaactgaggttggatgaatcaattgtggctgggaaagtgtcccccccacaatcccatgtgtgctgcttaataattagagattcatagatcttgatttgaaatacttacccccagacgaatgtctgaatcttgacgaagaagagatagaagaactccctgccaagaaagtagttgaagtcacatatatttaatagatttttacgaagtgatgaatatgagaagaaacacactcacataatatacacaagtatataaactagaaacgaatgtgtgttaaaagaaaaagataaaaccaaatgtcaaggtatatggcctggagccatcagaataaaactagcataaaatgtaactaaacaatcacattgtaagagctgtatccatttaaattggtgggcgttatggctagaaaggaataaagataatttttcaggatttaaaagcaaatgaagacggtctttgagataaaatcaggcctaatggattgcaatgggttttctctaaccccttttttattgtattacaatttcatataaacactatgttctggttttggttcaaaataaaacttaattatagaatattagcatttattctaatttaatattcagataaaaaacaaaagagataattactcactgataatgtcacttttgtagtcttggatgctgattcataaattaacctccttaggctttcttctgcattgttattcagcaacatagtgttctccgagcgagtttctccagagatgtttccaagggcatgcaaagcagcctatatttgaaagtgataaatcaaccaacatatatatacgcggcctcttttagagttgcaggaaataaacaaaacaaaacaggggagctttcaagcacttacaagctgtttaccatgccctcgccgatcaaaggcagcatcaatgacatgtttagcagcacgtggcgaacttgatagtagcagctctgccccttggattgctaaagaataaaaaacacaaagcagctttataactttttaaatgtaatgacaaattattagttttacattaataactacttataatttctgccaaacaaccttccacttgaaagcatacaacagtttataaagttattaatagtttgatcaacatttgatgaatttgattgagaagtaactgatattaatctccacacacagtgcacacttgttatatgacagtgataaatcaaccaatatatatatatataatggttgatggcaatgaagaagttttattcgataaagtcattccccaggctaagtatgtggcaaacttacaagatcctatttgacctagtgcctcgagagctgcttcaatttcatctgtatcttcagtttcttctgagtcaagtattctttctattgctgatattacagtttggaaacctgaatttatagatagatagatatcacaaatttattcaagaacagcaatcacttccaaaaacaaaatttaaaaacaaaaacccgaactttaacctcggatattacatgaaacattttacttaataaacaaaatttgaaaaacaaatttatttaaagttaaggtacaacaaaattcaaaaggaggatttccataagaattaataagcaatgttggcacagttctgcaagccgcggtattttacagtccaataggaaatatagaatgcaagctatccagaaaggtttagaggaatgtcttcgaggaccgaattggcttaagacagagagaccatttgtcttttacactactgcacgtgtgtagaaatatgctgtatatacacatatagagtttaaaactccggcaattgaatag

SEQ ID NO: 38504 - DNA, 2690 bp, Cannabis sativa
aaaaaataaactaagaaaaataataaagtgaggatggtgaatggaatgttcaacatgtttctaagagcttccacggagatgatgtctcccttgtgctaagggttgcatctagagaggtgagtggggaggacgatatatggcttggcactgtaaaaaatgggtactaggtggagtggagtccctcaaccgcattcaaagtagctgctcctcaaatgaagtgatggagcattggtggtgtactatatggaggttgccactggcccctaaagttattcgcaactttgtttagcgagtgtgtaagggttggttgcttgtgggagcggttgaactctcttgtggtgggtgtggggctagcgtggaaactattattcataggttgtggaaatacccaagtgttaaacaactatggtctagttcttcctttatcatcatttccctaataatcatctcgagccaatatacttcataatggcaattcaagtcagggtagtccccttttgaagtggcaaaggccggaggagggccaaatctgcatcaattgcgacgctgctattccgatacatgggaatatgtgtggccttgagactgttattcatcaccataagtgtgcggtaatagcagctgctgggcgcaatatgcatggcagtttcttagtccttgtggctgaaagtttggctatttatttggggcttgagttatagctaagaaaatgcagctccatccttagtaaagtggagtgcaattttagatgaaattcttctctctaaccttagttctcattgtattgatttctgcatgtaaagaaaacctgtaatacagtggcacattgccttgctactttttctttggtcgaagggtgtaattagtgttgggttggagagattcccatctgtgcatctgttaattcattttcaaaaaataaaataaaatgagcaatatggtatatactttagctgcatactatatttggtacaattattattgttgtaatgaaaataaaaaggttaaatttgtatgatgtacgttggagttggtcttaggaccgaataaatgtataattttattgatgttattaattaatcgtagtgttgatttatagagttaatagttaaataatttaactgtatcatttctcattctggtctttaagaaacaaaacataaaataaattgcaagagaatgtgtctttcattgctaatatgacaaaccattttcagaagatgaagaatagatgaaaacacatccctttcaaaaaaaaaaagatttgcattgggcctgggtgggcctgaaactcctcttttttcaatgttccttggaattgggctttttcggcttttcctgcgcagatcagtggaagggaggcaaaaaggccttctttggagggctggagctgttggtgagctatctcacaatatatgttgtacacacagttaggcactttagtattaacagtatgtatacatttatagctcatgatatgttaattattactaatattctctttacaattattcactttaccagatcatgcctcttgaactattgggattgttagatttaaggatttttgtctaatttcatttaattttactatttgagtgattgtttacatactaaaccatgctcctcagactttgatatctaccaaatcatgatcttcgaattttgacatgtactaaatcatggttattggactttcatatatgttagacttttttactaaaattagaaaaaaagtccttaaatccaacaatctcaatagttcagggggcatttttaacgaccttaaaagttcaggaacattattcggtacatgtcaaagtttagggaacaaaaatactaattagcctactaaaaatacccataaaagtatacaaacttttttttttgcaactgatggtatttgaataataaccatatttacaaagataaattcaatcaccactacacaaatatgagcgatgttctatatatcatcctttggttttgaaggtaaaatttctagttgctattgtaattatatatatgtatatatagagggtaattaagtctatagaacatgttctgtgttccagtagactccttatatatttcagttgagaaaattttttagtctaatttttttaataatagtgtaggttatagctatttaagactattgtaaattttaagaaaatttcgataaatttattacgtcgaaaataaaatttacatattttgtttcacgcacaacaatcttttcatatgcgtgcagtaagtacttgtttaaatacattattttttattaggcatggcaaaatgatccgaattttcggttcagatcggagtcccaatttgacggggcaattccgatcaaaacaaacaaatctcaagtcgaatcaaaccgatccagtagaaatttatccggatcggatcaaatccgacccgcctcagttttttttttttaatgatgtccaacaacctaacattaattataaaaaattaatttcatgtaattgacacactatattatcatttattgatgatgaatttttaaaaagctaacattatatttagaaaattttatatttctttatacaaattttttacttttttctaaaacaaaatctattaggaaaaattgcaaaaaaaaaattataaactcccccaacatcatctcttatattaaattgaataaagactatagtgaa

SEQ ID NO: 38505 - DNA, 1782 bp, Cannabis sativa
  modified_base (1632)..(1634): a, c, t, g, unknown or other
agcatataatcacaattactttcactgtgatgacatcactgtaattgtgagtaactatatgtttcggatttaataaaacttatatattaaaaacatataaacatgagaacaaagcatatcacaaaatgattcttgatctttattgaaattaaatacgattacattaaattagatatttgtttagggcacaaaatctcaacaggcctatcatgacattgaaagcagaatggacgccaatcactaaaagttgggacatcaccatgttgttcatcggagcctttcctaccgtgagtgagagacaaatgtgttctaatgcatggagctatttggccggagaacccactggagtcggtcacccgcaacctgctaacccaccaacttgggtcattacatgggtgggtgctggtgtttttttttttttttagtctgaaactcacgaacccgaaaccccgtgtactagaaacccataacgcacttgatattcagccttaatagatttctcattttcacaaaatattttaatgtaaaccttttgaaactgctgcttaatttctaatattttaagaaaaaaaagactagtttaaacacttatcccaattaaaaataactttgtaacttaaaatattattatttttattttcaaaatcctaaaatatttttaattgtacaactaataatattcttaaaaaaatagtatatataattaatatttaattgaattgtaacatccaaaaaaaaataaatatattacgaaaaattgagttatactgtatataaatctcattctttaattttgtaacgtaaaattgtatttaattatacagctaataatattcatttttttatataatattttattattcattgaaaatatcaaaataacagtcaacattacaaatattgaaactctctcacaacataccattttgtagtttttacctttttcgtatttctccatttttaatgtaaataaatttgtagttatctaaatatttattctttttaattaataattttttattcacctatttattttgattgtttggctaatctgaatgtatatttgtattgcagataaaatcttttgatatagatatgggtatgagggaatttttcatggttgctattgtattgtgtacacttttgtgttattgtgaatctagaaaacaaccagcaatattatcaagagatgaaattcttgaaatagagaatcaacttgagcgattgaataagtcatcaatcaaagctataaaagtattattttctcttttaatattattactttcatcttcattcctcacttatctaacttgttttgtgttatgtacagacacaatttggagatatttatgactgtgttaatttttacgatcaaccagcatttgatcatcctttactaaagaatcacaaatatgattttcaggtacatttttctataataattatttctctaatagttctttatttttttgaaaccatagtgaatttttattataacatacttatatgtatttatggtgtagatgagaccttcttctcgtcccaagtcgattgttagggaaggcaatcctccaaagaatgtggagcaggtaacgataaatagtgggttaaatagtgaaaaatgtccaattnnntatgttccaataagaagaactactaaagaagatcttattagagccaaattatttacaaaatcttataactcaagaattaattcccctcctacttttcatgtaagtatattttacattttttttagttttgacaaattaaataacatat

SEQ ID NO: 38506 - DNA, 2462 bp, Cannabis sativa
tccagttcaaatataatgtcattaggcgaattcaagaaaccttttttacaattaaacttttctttccagtttcttgcctgattatttcatgctatgtaaactactgaacgataatagagctgctaacgtacattaaaatttgtcagctacatgccatagtcaacggtttcctaagttattaaatattaacccagagatatctatctatctattcctgtaaacatagattaaacttgaatggaatagtcaagcactttaactaatgaagaaatcacagacccagttacccagccatatctgtttattccccccttcttctgttctttttattatttaaataattgaatttttcaataatcattcataagagatgatcagaaaagagaatatcataataaaagaaagcttacctttggataatccaccaatgtttaagaagcaagctgcaccatcttttagatagtttggtagctgggcaaatggtatgccccatagttttgataaaaagggtaagagtatacatataaagagtgcctgcaattgacatggacacaggcccattagtttctaatactaagtaaagaaagataatttggaagagtagcttcttccaacaaacaatattatcaaaattaattatgattacttgatacctacttggaaagcagatccaaaagaatttacaacaaatagatcaactgttttcccctgcaccaaagagaaaagttagtttcagtatgtgaaagaaagatttgtttattggtttatcttaataaactgtcaaaacaatatctgcttctgcttgacatatacatataaaaataatcacaaatggtacctttagtcgttgagcagcatcaagaaaaattacttcctgcaaattttcaaaaggatgttgtcacataggcatacaatgttcttaacaggaaaaaaatgattaagcattcagaaattctaacctttaacactgtatcagctgcttggaacaaaaacgaaactatcatcaaaagactccaaaaaatacccgcttctttcaatgaatgtccagcactagacccactgcaaaaataattcagagctaagcacaccaattatgcacagtgctgagacataataaaagttcagaggaactgtaatatggtttttggttcagcttgatcgactacaactttctgtttaattgattgaaataaaactagtaagaaaaccaaatttgcaaaaaaaatcatgttaattgatagatcaactgaactatcaaaacttttatgcacaagaaagctttgtccttttgccttttcataagaaacacaggttgtgaattaataagaaatgttaaggtatcatccaaattgcaacctaataaaacaaattggagtctagttctaaacaaaaagactatcacatattacatgtattccactcactaagtagagcattgaaaagcaaaaagcattaaactcgttacaatgaaaatccacataaccacccaatacttgactctcctaaatattgcctgtacattctcttcacatcgttgaatattctattgtttatggataaatgtgctctccaatttaagatccgataagttaatttccattattattattgactaaaaccactacaaatataaactacaatgcatgttggttcaacgcgaataatatcaccaaagaataagtaaatcttggagaaaactgttatttacaaatatttcccagacaatattgaccgttcttcaaataaatctccatcaaaactccataatctacagaacaatcatatttaccatcctatataaaaattcaaaatcaaaaggatgtgaacaatgtttaccttgctactgttatgattacaccaatagttacaagaaagcaccctaaaagctgatttactctatatctcctcccaaggaaaataactgacaggagaatttgccaaacaagaaaagtctgcaaagttaacataggtctcagtcaattatatttatccaacttccacttcatacataaaaaaatatgagatgaaaaataatctcaaggctacagcctataatgatagtatccatattctataatttctattggtccaaaaaaattaatgttctatcaacatttttaacagcatgtccattctgctcctcccattttctcaatcctgttttagtactctaacagaatctcaccagaacaacttctaagcacaatgctgatgtactttgttatttacaaatctaccttaaatgttttttgcagttattcattctacataatcgaacaggcatacgccaatactttcacatctatgatttcattgaactgacagtttagattatgaacaggatggtcatactggattagttctccaaagttcaacattagagtggtaatcagaccttgtttaaacataaaaataggaaacaaacctgaaccccaaaccctttaacccactcaccaaccact

SEQ ID NO: 38507 - DNA, 2441 bp, Cannabis sativa
aaataagaatattttttattctttggacatcgttagattcttaatttaattaaaattgttctttaggttttctctatatcttttttattagaaaattgaagagatcatacattattgaagaagaatgacaataatcatttgattatgatgctgctctattttcttataagaaaataagtagcgtggatgacttattcaagataatctatccataaaatgatgactatccttattttgttcaataactgaatcttctttctaaatttctaattaacatcgattgaatatatacttttgtaatagttttgaaatcgatattaagtattttgcaagctagacttggagtttaataatatcttagtggcagtccaagctagaatagtaacgaatttctagactgcataaacactgagtttaactttcacaagttttgatatccaattccatggatcaaactaagttttaatgtatgaacatgagtttaatattatgagattgagtatctattaatattaaagtaactctttgtagtaactagacctagaaatcatgtatatatccaagaaatgataatgactatggattatctatggcactctgtttaccaagaattttgaaaactaataaaatagagcttaagaatgatataaaatagtaactaatgtacatgtaatttgtacatagttcgggcattaataacccctagtccatgcatctattgtattagccttgcaggtgagtgtttgaatattacaagtgtttacaatataaaccctagctccgtatttattttgtttctctcttgaagaagaaagttagtaggaattttagtagaggttcggtaagtatgaatttttttttcccatgcacatagaaaatgagggtatttacagacttacatgtgggtaagggcattccctttacacacctagggtttcatactactacctgttgtaagggtaaaagaataccactggaaatctgaccatccgacatcaaagaaacctcttgattgtgcagggtgcagaggaagtggttaataccatttggataaaagacacgtattgcccaaagatttctcctttgtagaatactctctatataggttgttgggcaaaatgcatgtccagaggtgcgtatgcacactaccatggcttgacatggaggacaagatcttatcctatcttagaaaaggtgtaaccatctgtaggtcaattttcatatggagttgacatggccattcaccttgagatatcgattacgatctgagactagtctatagaggtcttcacctggaagccatttactcaaatcgtgctctaggacttctcagagttgggaacgattatggccctgctgcgtcctacagacgatactcgtgttgtggatgggtctccccataaggtacctattaaacccctcctggattattcaaagtttctgcgaggagctttcgttgttatctctactaaccaagaggataacaaatcttattctctaatcatgccacgtgtctgttgctcgaaaacacaaataacatttacccgcaagatctgggagttggcaatctttccccagaactgaccattgacatgtgctgactattaaagtcgcggacgcatctttttggtaagatataatccgttaagggcagatggaacattaaagcctactaacatggcaatcatgcagtacattaaatacgctgcttaattcattatgcatgtgtcaggtcgcgtctatcagaaaaaggtgaaattgacgatgaggtgatttgaaaagacctgtctataaggcttaatggacctgaggaaaatcattaccgataaatgcttttggcccttttaactccccagccattagatctaatgaaatatctagaccattgattttgcaaaaattgattgtcttcttgaagtataaattgacattaacgacgctcttttaactttttccacacaagacatcgaattttttcactataaagtttctctcttgtcgttcttattgcatgcaagaatattgcaagagtttgattcaacaattgctcaactgtaatgacagcatttcataataatatagtagattagaaaaggcaattagcactaattattaatatttttgtagttatttgtgaatttatttaatcgttggccccattattagaaatgggcattagagttataatttatcaattccaaagattttaataaactgtattatttgtgttatatgtgaattgtgcaatttttataatttttcctcgacgacaacggaaaatgcaatagatggctacaatcacatggtaggtttagaactttatttctttgtgcaatatatgttggacgaaattgagtactggggttgagcagggttatgaaatttgacaattacccgtacactttatttttgcctaagttaagcatcaagggatatttttg

SEQ ID NO: 38508 - DNA, 3307 bp, Cannabis sativa
  modified_base (777)..(783): a, c, t, g, unknown or other
atcttttaatttaaaatatgcccaatattaaaatatttaagcttataattaaataatatgtaaatattaaggaaattaataaatttttaaatctacccaaatacgccatggtacatctacaaaaaaaaaaaaaaaaaacaatcccaattcctggatgaaatttattaaactagaagcttaaagaatatactaaacctaaaacatgcctaaaccctaaaattacccaaaaatcatgaaccgtcattgctaaaccgaagggagtgataaaatgcaaggtaatcataaccaagaaactacaaaaaaaaaaaaaaaaagaaagggatgagacaattactatatgaagtcgaatagtcgggtggtgaaaaactctggcgcgatgagttttttgaacacctggagtcaaagagcaagtctcagcaaattcgcaggaagaacgtcaaagataaagagggcatgcacggtctcagggaattggaatgatttttatttttttcaaaaagcttgcttaaggtttttgaaaagatgaaaatggtggaaaaattgattctcaccgttttatactttgaacccagtaaccgttaagatcaaaatattgaagatctaatggctggggatggaggaaaagtggaaaagacgggtcattaatgctaattatgtccctagaaaccacaaaattgccaaaattaatggcatgcatattttcaaaacaaattatgacaaaaataccctccttaatcatttaaaaagcacaatttattaaaaaagaactttttaagnnnnnnntgttatacccaaaattcggctagtactttagaaggagacacatgtcaatttaagggaatatgaactgacaaatataatggtaattatattaacaaatattaaatggaataactcttcaaatacaaaagtcgatagagtatatttataactcgcaaactgcacagtccttagcgagacagggatgtacgaactattgactcaggtattgatgagaaatcatttcgtgttagaagacataatcgcaaagatgacgtctagaatacatagcgaggcatctacctcgcaatatgtagaaaggtgctgaggaggtgaactggctgttaaaaaaattagtgtatgatatacactatactaactaagtgtaatagctagaaggacatggacaacggataatgagacatccatctcgctataggaaggcatactcctggtaaactccagctcactacaaaggttattgttgctattgagaactcccagaacatgattgcccagtctgcaaggccttatggtcaaagagcagttcttaagtttgctcagtacactggtgctcatgccattgctagagaacttataaataaagcaagttgttcatgaaccaggcaagacgtcccagcgagacatgttttgcagcgtgttgtgatccacgacaacattgacccgttaaaagttgtttaaatcacagctgtgtgattttcaaataataactgtatttatctacgtggcgcatgattatagcccataatttcaggaaaatataattgtgggattctaatttaaatgtaattaactgctaagctatattattatatataggggcctaatgtacgaaaaaagagacagaaaaatccttgagagaaaaaaaccttagttctgtattaaaaaagtttgaataagattgactcgtggactatgcagagttaactgcaaaaccacgtaaaaacttggtgttatttttgcttcttttattttctataatttttttgctaaacctatcacgaaaatagactcattatcgttaacaaaaatctacgttaacatcttaatgtgtcccttaatattttgttttaatgtgtacatatctttattaactttaattagaattttaatttttattattacatataagtttgcaagaatatttttaatgagatatgtaaaaattatactttggtaaaaagaaaactttgtgagatttatttacatcaatttttaacattatgctccaaaacacaattacaaaacatgatgcaaattttttttttctttttttttttgttatgaatgatctttgtataaatattttttttttgtaatattattgctatgcgacaccttaaggtgctcaatctccatatcgatgtggtgcctaataattggttagtaattctccaaattatttattaaattaaaatttttgagagctggtattaaaatgaccaaataatagtataataacttttgtggtgcttgatatctctaatgaaagaaataaaaaattgtactatatttgacaaattctttttttattattattttaatctgaattcttttttttttttttttgtttttcaaaaaaatctcaattatatatattgatatatatataaatcttaattttttattactgtcattttttttttaatattaatcctttttttattaatctcaattatatatatttttattttcatcctttcttttaatctcaatataatatatatatatatatatctgtaaaaaaatctcacatttatttatttatttttatttattttttttaaaaagaaatattatttttttaatcttttatgcattttttttatatattttttgtcaagtgttttgttttgtttttttttttaatttggttgaccattttttagttggttttttttttttaaaaaaaaaaacctcacctgttatgtactccatctattaagacacatttactaaattgtatctagaatcagaataattaataagagaaatgaatgagtctcaaatataaaataatcgaaaacaataatttattatgtcatttactaaactgtccagaaagaaaatcataatcattttattttgtttacataaatagagaaggtaatcagaatgttaaaatttaactaaattgacattgttgaaaatgtaatagttttttatttatagttttggaagcgcatatttatctttaaattttgttattaataaaattaaaatataaataaagtaagttatgaaagggaaaaacattccctataaaaatagaaggagaacttttatttttcttttttttcaaatttgagtgggcctactagcttctttaattagaaattttagtaaacaaatgaatgagaatcaatatcatacaattgattatcattcctattaagtaaacatgctattaaaagaaaaaaaaaaatatttttagtcatttgtacattttttgcctattctttttctcttgtatttttttaaaatttttttgtttgctatttttttttttttttggtttttctcactc

SEQ ID NO: 38509 - DNA, 3169 bp, Cannabis sativa
gtaatacatagttacattctacattattactatatataaaaaaaaaaaaattacttttagtcacaaaaattttatgactaaaagtgaaaaaaattgtgactaattataaattatcattccgatattataattgaaatatttgtacttaaatgtattaatcacaaaaatcacaatttattgtgattaaatatatttttaatcacaatatttattgtgactaaaaatgataatttgtatctaaatattatattttagtaacaactaacattttattataactaaaaattacatttaatatcaaaaaatttatattgtaactaaaagattctcattaaatatatatatttttagtatatatagagtaaatgtatacacaattgatataaatatataaacatacattataatttacaatatatatgacacataagtgtttagcaaaatctttctctttggctttagtttttcaacatgttgaaatttttcattagcttgggaatattaactcctttggcaataattataaactttattgacttggtaatagccctatatttatatataataagctactaaaaaagataaaaatgctatatataaatatattaatcattagtcaaaagaaaaattaatcattggggccacttgtagcatctaggattatccgaatataatttatatgattgttatcctaataataataattaataatttatataatacatatatatatggattggactcataataatttttttaatttaatttccattccaaaattttattcacatatacatatatatacaaaaattcaaatcaaccttggttgtatattaaggatatgtaattaatgatattaattattaactcagtccaatttcttttgtatcataataattgaggtgcatgaactatactttctttttctcttaggtttttgctaagaaccaattttctcttattaaaaattatatcttttctccaaacatacaggtttttttttttttggttttattctgtcacaatatgattggttcaattcaataaattattatatataaacaaaattcaaaatatatatgaatatacattttatcatatatttaacatatttcccactatacatttctcaaagatctcatattttggattatattatataattaagttaataagtccaaaattttggtgtatgtacatatatgggtggtttacagaatcttggacttattaatgatcacttttttaattgggattaattaatttagttcatatgtcttatctctctaaatatttatattatatatatttttgctaagaattaatatattatatattaattaaggattatcttcaagtgtatataaacagaacaatatcacatgcatttctgacccaaatgactacaaataaatatataatatataggtcgaattcgttcacaccaaatatgtatatatttgatttttttttttcttttgaaaatgaatataaatatctagaattatttaaggtctttcttagttgaacattatatataattaatttagtaactagtaatcaaaaataattaagtatttgtcaaaaagataataaaaataaataataaaaaaaacgtgagaggcataagagagagatgagtgtatatgtatacatgtggtggtggttgacatatataataagagttaaagagtgttactgctacaaactacaaactctactgatcattcacatgcatatatataaatatcatatatatatataacattttgacttatattattaggtataggtatcagttctatgaagccccacgtatcatgtatgaatatatatatatatatatatatttatatataacagatgtaagaatagtggtagattggtgtgggaagtttgtctatttgtcaatttgtcatgatcattatttcacaaaatgatatgcaaaatttgcatgtcatgatttcacaattatttcataaaataattgaaagtatttacttacacaatctccaatcacaatttgtgattaattaatatttaatattacactaattaattttaaaatatgtgatctgaaattttatttttaacactataaataatttatttttttttgaaaatttataacagtactacaaaatgacgaattacaagtaattaatagtttctagatagcaaataaaactcattcaatgggttcgtaaggatcagttacgcagctgccccatcaaaaatggacaaatgcatatacattaacaaatattagagaaataataataaacaacactaacattggagagaaattaaagaatatttttttttatacattaacaatgtatatacgcgctgggaaaagtcatttttgctagtactttttattttatgatggtaaaagttctaatacgaacattgatttgtcaatcctcttttaccaacacatcacaagtaaattttattttactagcgcaatactaattttttgtgcgggcaaaaatgacatttcttgtagtgtgatccatttaagtattgggttacatatagtttgtaataacttttagagagtatcactagtcaatatttaaagtagatatattagacaccagtggtacctagtttaaatatttatgtactctcatttttattatggcatatgcacacttatttggtttgcattaatgctattaatcttctctcattaaattcgtgataataaatttacaaatcgataaaaattattagttgttatttaccaaagatatttaattgaccacgagctagagcaagaatgcattgaatcattgaaaaatgacacatcacggccatgagagagttctcataaataagaggagaattactattcatataccattttttaattttttttttcaaatttataatttggattgttctaataatttttatataggttgatatataaattttagtcacaatttaaattattccgttaattgttatatatatttatgtaaaaatacaaaaaaaaaattattttaaagtataaaaataaaaataaaaactcttaaatgaaataatgtgaagaagcatttaattaaccatatcttactttagggttagggataggatattgggatatttgcataaggcactattttttgtaaaaaaaattacatttttgcgtttaaag

SEQ ID NO: 38510 - DNA, 1413 bp, Cannabis sativa
ctatgcctgctttgggttatctgcaggaatactgggcctccgttggatgtgccattatgcaatgtagcaacactgaggtaaatatcattcttgtccacattcttggccatctttttttatgtataccctttttaaactgttgacttttttctcagtgttacaacttattacgtgtgtagtgttattgttattttcacttgttgatgcatgttaatgaaactttatcattcatgatactgtttatgctattgtctatgcagaggacctgcattgtgtgtaatttttttttcactgcttatttattgtttttggtagttgaacctgtgaatttctgttttccatctatttatatcagtgctttttactgttcgcttcttaccaagctctggttctattgatcaggttggtgctgggactatgaatcctttgactttcttaagagttcttggtccagaaccgtggaatgttgcgtaagtgtgcgtaagtttataataactagttcattggtaatacaattactaagctgtttagtaataaacctaaaatgaagcaatacacgcttttgcagtgtttgcattttgtcacttataaaccactgctttgaaatttatgtgctaacatttcctgattgttctaagcaaaacaaagttccaagtcgtgtgctgataacgaaagaaaatagaatgataactattgttgttattattattatttatttggaaatttcccttgttcttctgtgtaacatgacatgagcagatcaaagtttaaagctgttgtttcttacaaaaaagaccatacatttataaacatattggaaacgatgcactcaaatcttaattaacatgtttctcttctgacaaattattacatgtgcagtttagtgtcaaataatgcatgtactcaaattatttttattgtggcgatgcatgtactcaaatatgattgccttgcatatgtaaaaaatattaaaaaaaatacttccgggcgctgtaaattatttcaaatgaatggatcttagctttttgcttaatatgtccttcttgggttgtttttgtaatcttctgactattaaaacaaaagttaccttgtacaagcacctcctataaatgacatgaaggtgtttctttcaagtcttggttaatttgttgctttggtctaaattcttcaaacataatttgttgagctaattttagtttgtatttgtcaactttctatgattatggggtttttgttcttgtttcacttttttccattttaatttttgaacttactatggtatttaaattgatggttacattgatggagtagctagactctagaggacttgtttggaacgtcgtattaagtcatattgtattgtattgtattatattgaattggattatatatcgtatttttatataatactat

SEQ ID NO: 38511 - DNA, 1662 bp, Cannabis sativa
atgtgtcttcgtttttgtggggaggtaatgatgttaaaaaaaaagatgcattattgtacttaggataaactgtgtatgcataagagggatggtgggatgggttttcgtgatatgtggttgttctcgactgtggttgctaaacaattgtcatatttacagtgttctcgactccttggctagccctgtgttaaaaggtttatacttttgaaataggctttttgccaaaattacgaaatctaagtgaggattctttgtgtggaagaatatcttatggggtgaggagctttttgattcatgagtgatatgtcgtgttggggatggaaatgacattgctatttacactgataattggattccctctgtgtcgccctttgttttgacaagccgtcagtttgatgagtcaagcaaggtctctttgttgagggatgttttaggagggtggaataaagacttgattcgtttcggtttcttggctaatgaagttgaggctattctttgtattccatagtcttctttcgatgcgccggataagattatttagaattatgagaagtctaggtggttttatgttaagagtggttattagcttactcttcgcaacttggttgtgcttcgtgctcctccttttggaggtttgttgggatggtggaagaaaatttggtctcttaatctccccctaaaggttagacttttttgcttggcaagttttccataattgtcctacacaaatcaatttggctcgacatggtctcttatccgatgggttatgtcctttgtgcgggttggaagatgaaactactcttcacgcactttgggcctgcaactctctactttagtgtaagaaattatgtgagtttttccttgggagatcctggtgttcattgtgtggattttcttgactttattcatcgttttattaatccacttccaaaagatatcattgaattacttatggtgatcttgtggaggttctggttctagcgctataaaaaggtccataatgatgttattttgtctccaactatagctgttcattaggctcataatcttttggggacatttcacaatgggtagggactgaagactgttacccatcttatcccgctgacaatgattgatccttccgggtcacctccattacgacacctttctaagacaactcccaaatggactgccccttattggaaggctcaaagttaacactggcgagactataaactcttcgagtttttgtagtggcttgagtatggttattaaagatgttttgggtgttattcgtgcttcggcgagctgacatttggatggttgtttcgtgcttgaggtggctgaagcgttggctattagaaaggttttgtcccaatatctttcttttgggtatgacaatatcattattgaatttgattgtttgagtgttgtgttgaaaattcaaaacaatgtctcttttattatctttttggatctagtgttggatgatattcgattctaattctttgggagcatttattctttgatttagcagtactttctttcccattctcaacttttaaatttttaagccatacccattgtctcagtcactgaccaccatgggaaagaaactatagtaaaagtgtgattttctccataataattttcctgctattttatcttccaaatttacat

SEQ ID NO: 38512 - DNA, 1147 bp, Cannabis sativa
ccattaacaatcgatcaccaacaacatgggctaacacagcaaagaactatccaatcaacccaagttttaataaaaccaataaaatttaatgtaagcccaaataaaagtctaacatcttaaacaatgtcattatatttgcattataatacttcgtattgatatcatataagcaatccaattacaatagcaaatcataataaataaataaataaaactttaaataaatcctagaaatttgctgtgtattagttaataatgattctaaaacttagactagggtaaaacaatggtttgaactttgaagtttataaaagaatatgtggtaatttgggatgggaggacaaagaatcagagaaaatttctattaataaaaaaagaaagaaagaatgaatgacaaagataattaaaaaaaaaaaaaagaaattacatattgttgaaggatttgagcaaaggaagaaagaagaagaacagactttgttcaaacagagagaaaaatgaaaaaaagctcaactttattaatgaactgaaggtgtttatatacaccaagaattacaacagaaccaaaacaatacaaccagaaatttaacaaacaaagtaacagaaaataacagaactttaactaaccaactgtcaaaacagttagttagttaacattccccctcaaatgaaaagaggaggaaacaactttgagtttggccttcaagtaatgaaatctgtctttgggtaaaattttggtcaaaatatcagcaacttgatcgacagaaggaacataacgaactgagacttcaagattgagaatttgatcacgcacaaagtgttgatcaatctcaatatgtttgcaacgagcatggaagacagggttggcagcaagagcagcagcctcttggttgtccacccaaatgattggaatattagcaagagtcacctgcaattcactaaacagggactgaaaccatttaagttcagctgttgtgttagccaaagcgcgaaactcagattttgtagatgaacgagcaacaacaggctgcttcttagcagaccaagagatgagatttggcccaagaaatacagcatagccacctgtagaacgtcgatcatcaaggcaactcgcccaatcagcatcagaattgttggaaattattttacc

SEQ ID NO: 38513 - DNA, 4037 bp, Cannabis sativa
  modified_base (879)..(885): a, c, t, g, unknown or other
taaataaaataaaaaaaaatcgtaaaaatgtttaaaatttcgtgaaaccgtatttttgttgtttttgtgcatgtgtgaaattaacccaaaaaaaatttcaacttttggtatgataagcacatggagaaagaaatggactttttgaatagaaaggcccatataactattcaagttgtattgattcgataatcttctttacttggataaaaaggcccatataactattcaagtagtcttgattggataatctagttgagtaaaaaggcccatataattaatttggatacatttttttccttttgaaagaaacaaaaattatcattttgtttttcaaaatacaattttcacttcctttgatctaataataatacttcttacaaaagaaaaataaaaaacataaaaacatttttttcagtctaggtaaatatagaatatattttattttttcataatatattttttaaaaaattaatttttgcaaagttagatcaatggtaatgtcgtgttttaataattagaaaaaaaaaattaaagaatacactctaatattttttaaaaaaaaatgaaatgtacaatgataaaaaaaaatacttataaaaatagggcattgtaacaatgtttacaaatttgtaatatttataagacagtaacaaaaattttacaaattttgaaaaaaacaaaaaagaaaaaattattatgttgccactttgtatttacacttctgttgcttaattgaaacatattcgataatttttgttggagataattacataagccaccattttttataaaaaaaaattacaaattatgtttaaagaatttttttttatatttttacggtttttcgtagatacaacacaaaaacaacaagaaaattannnnnnngtaacatgaaaataacatctaaatgacatcaaaataacaacaaaaaatagcatacagataacaaaaaatcaacaacaaataaatatgagtacaacataaaataccgtattctctgtaaataaaattaaaaaaaaatcgtaaaaatattttaaattttatgaaactatatttttgtaagttttttgttgtttttgtgtatttgtaaaataatcccaatttttttctttcttcttagatgggccttatgaccaacaattggacatttggtaatacattttatgggcctaaagattatttaacaagcatagttttatatgccttttttttaatatatatttatattgcaaatatatgcagattatactttctaaaattttatgatatagttcaaatattatagataaaaacaaataattacgaatacataaattaaagttcataacttaagaattttaatgatatacaaaaaaaaaaaaaaagtgatagttatatctttgcacacattatattaattaagctataaaatttgtaatgtttttctaagttatttgattaagatactagtgataacctatgttgacattgacctcgaaatttgggtactaattaattttggaataacaacaaaatgaagaaaaacaaaacaaacaaaattattgggccataattcattgtccaatgtcacctagtgctttgagcacttatattatccattaatatattcaacaatttactttagaaaaggacttagtggggtttttctcttatctcccaaacaattaaaactatgaaaaaaacttgggaaataacaattctagcttgaaattaattaggtcacaaattattgagaatttgctgataaaagtttctaattatgatttgctattcttgttatgttgcttagagtataataataataataataataatttctatggcctatttggtgtagagttgaaatgaagtagaaatatatcaaaagaaggccaattcttatattattattaattattattataaccatgcaaaatattagcttgaacatgattcacatcatttcaaataaaaaatatgtacaacatgccaagagcaagtgaaattttaatattttcatcattaaatattattaataattatcttaatacccattaataatacaaaattataattagttaaagtatgagatttttacacaaagtaattaaaatattttttttttttgaaaggaaatttaaaaaatatatatttatgaactataatttactttttatgaattattttataattatatttttgcagagccccataaagtaatataaaaaacaatataatattatacaaatataaatacaaactaatataatatagttcatattattttcataataattttgtatttttctgtatataaaaaaaaaaaattccaattaattaattaccttgataaatggaatgaatcacctaccactatttctacttaatataaaaaaaatagagcagtcatctagtgcatgacacatttgatttttctccctttgaacagtcatctttattttgttgttattatatttgtccaatcaatctctatatataatccaaaaacaaaaacaaaaaccaaatttgaaataagcataaagataagaaagaagatgggagaatattgtgtaacaggaggaacaggcttcattgcctcttaccttgtcaaaaccttattacacaatggtcattttgttagaactactgttagaaatcctggtactaatcaaaacatatacacatatatatatatgtacatatataactaatgttgttccattttaatgtttttttttttttttgtcttttttggggtaaaagaggatgaaagcaaggtgggatttttgagagaattcaatggagcaaaagagagacttaagattttcaaggcagatttaatggtggaagggagtttcgacgaggccatacaaggcgtcgatggtgtctaccacacagcctcgcctgtgctcgttccctatgatgataatattaaagtataatgatactttttacttttattcctgaatcatataacttgtgatgctgctcgttaaaataattttttatttgtcaggcaaatttggtggatccatgtattaaagggacaaggaatgtgctaagttcatgtgcaaaagcaaatagtgtgaaaagaatagtgcttacttcttcttgctcatcgataagatatcgatatgatgttggagaggtctcacctctcaatgagtcccattggagtgacccagaatattgcaagaactataatgtaagaatatattaattgttcaattattgagacttaattgatactaatttttgtacattaattattaatattgggacaaattatgcagctttggtatgcatatgctaagacaacagctgagaaagatgcttggaaatttgctgaagagactggaaaagatcttgttgttgtgaacccttcttttgtggttggtccattgctagcaccacaacccacaagtactttgtttctcatacttgctataatcaaaggttagagatcaattttctaaacaataattatagaacattgttattatgtcataaaacaatggaagcaatgtatggttattgtcaaattttagccaatcaaaactttaaaataaataaataaataggggtcacaaagtcatttaatttcacaaaatttttactcttctcctccacgtcacccatacttggccttacaccttgacaagcaccctctctaactgatcctattgagcttgtcattagacactagtggtgttcgtgtcttacgaatggttaacagtcttttatttgaacattgctataaggtactaatgatacttgctcgaagtgatgtcttatgattgattactgatattttataaagtcattacattaaatcatgtgagaccagatacttaattgcactaatagcgatatgacactttgaatgattaggcccggttctaagcataggcgagctaggcctcggcctaaggcccacctagctcagggagcccaagaaaaaaatttctcttttaaaatttttttggaaaataacaacacaattttttttttatgatccagtatattttaaggtcggtcctgtgagttccttttagcgt

SEQ ID NO: 38514 - DNA, 2913 bp, Cannabis sativa
  modified_base (1024)..(1056): a, c, t, g, unknown or other
tttggtatttgtcaaagttcgggaagaaaaattactaattagccttattatattttaaataaatatttttaaaaaatgctaaaggaattatttttttttcctgctctcatgaaaacctaaagtttgacaaagttggaaattaaattaaagttttataaatattaaatactttacaaaaaaaaaaaaaaaaattatataagtataactcatataattaatctttagtaataattagataaacatgggttttataatcatttatatttgaccaaaaccatatttaatttgatagataataatactaaaggcaactctattttatttttttggtagatattatccatgagagaacttatgctaatcattaaaaataaagaacgtatgcatataataattataattaaatacaaatttaaagtcatattattataacaatttgcaaattaaaattaattagagtaatctctttgtcgtttcttattgcaacgtcttagaatcagaatgatatagattctattctctttttattataatattgtacatttcatttgcccaaccaaaaggaattaaataaagaaaaaaaaaatgtatattttgttgggaataaaatgtactatttttttttttcattaaattttgctttatatattttattttctcttcttccccatccttattgtcgtttccaatattctaactaatggcccaattattggaccctctcaatgagggtgtggttgtacattcttatttcttatatatccttttatatatagtgaatatatatatataattatcaattattattacctaaacataaaattaaatagtaaaattaattaagtcaacctacccttatttttctcatgatcaaaaaaaattatacattgtttaatttacataattattatgtgtccaaattaacagcctgtgtttattacgataatgaagccattaaagccgtttttaagggtttatgttcaagaagactttaggtccaaataatttattattattattattnnnnnnnnnnnnnnnnnnnnnnnnnnnnnnnnnattattattattattatttggaatgaggccaaaataatattgctatcaaaaaagttattttgaataataaaaccaaacatatcaatagttgttacgttaacatgacttaccctaactattttagcactaaaaaattggaccacaataaagttttttttttctgaaaaaaaaaataaaaatattgcttatagttattattcttgatcaccattttaattgacaaaagagaaagaaaaaaaatgtaccacaaaattaatgctgaagcagagctctaattattattctaagctacacattaatatggaaaataataaaatatttatataatttttctggctttaacaataaaactaatggttaggaattaaagatttggtgaatccaacaccatgccataaaataattctctttttttattagatataatataatatatccacgatcgaagaccaagtcaacatctaatatgcattttatctcttaagaaaaaaatttaattaaatatatgcatatataacaatcatcatatatgactccttataaacatataattaaactaaaatcatttaatttaagattatttgttagattttaacgagacccctatttgtttttaaccgaaacaatacattaattatcaacgcaaatcattacataaagagaggcaaattctctaatatagcggacagtcgttagaggaactaggagtgtcaattgggtcgggtcggatctgatccggctataatctaacctgatcaagattataaaaggatctgccccgccccgctggcgctagtattattttataaaagactatgtttgatattgatatgtattaaagataatatattttcaataaattagacccaacactaactacaggttcggggttcgggtccgcgtctgagtccaagttcaggtttgggttcgggttcgggttccggatccgagtacaagtctgggactgggtcctgagtctgggtttgggtccgagttttgagtttgggtctgggtttgggtcccaggtttcgggtcttgggtccaggtcccgggcctaataagtccgggttcgggtccaagtctcaggtctgggtccagtcccaagtttggatccgggtccgggtctgggtctaagcgggttcgggtctgggtctgggtctaggcgggttcaggtccggtccaagtctaggtccggggtccgagtcttaaattgagtttttttttaatatattgaaaccggatcagatcagatccgatccagaaaaaaattaggcaggacagagcgaatttgatttgagatccaataaatatctgaatgtttcaaatcagaagtgatccgttggatctcggagctccgacccactccaactaaatgaatctttttgacatgccttaaaggaacatctccattctaaaaactagactttttacaataaattatccttaattataaaatgtgtcacttcattcgaacaagaaaaatgcatctatgatactaaattccataatcaatcaatgtatatctgcaacaagtaaatccaattccccaatctactcaaatggccatcccaacagacaatcagaagaaatcatacatattgcttcaaagataaaagaccaaccaactcaatcccatgtttaatagttaataattcagtaataataagagaaaaggaacgaggcccctattaggatagacataattatttaaaaaaaatcacatttttataaatttgtaccttaaaaatcacattcttgaaaattcccttaaaaattcattatcatgtataaagtaaaattttaatataataaatgtgttttagtatgaaagagaggatagattcgttggaatgatat

SEQ ID NO: 38515 - DNA, 3064 bp, Cannabis sativa
agagaaagagagagagagctttttagagttttcagagactgaaaactgatatgtagaaagttctcttacaaccttccttttatagctaaaggaagagctgtttttctcccattaattaaataaaaaagaaaagaaaaaatacaaataagaaagtaattcgttactacctatagaggccaaaattaggctcaggctcaatgtcacatgtgatgttttcaaagaatgctcaaacaagattgggttggactatttgactagttatgacgatacaatcaacataccaagccaagcaggcccaaaacgacacagtcaagttagacattaacattatcaatgatccaacattgagctcacgatgatccgacccatatacgagattgagttttatcactcatctaccaatctctaaagtgatcagtaaaactaacaacgcaaataatgatctccctgattaagtgggagaggaacgcttcacaagggggtgagcggtcatgagtaacgcctttccatggatgcctataagagtcactctcagttactgagagagacaaatcaattttcagtcatctcaatacttcttacttattgttcactctctcattatctcaaaaaccacatacttatttccacagtcaagataggcggtaacttagttcagtcatttactatcatctttttaattacattgttaacaatcttgctgacttgaccgtcagagtcccttcagcttacaccatcttggtgtcccaaggtttctcgattactctcttctttgttctacaggttgtcggtgcccgtgtacgatcatctttgattgattgtggattttagcatctacaatttgtcgccctctgtggggccctgacaagctgtaatcgagcaaagtgtttcgacctttatcattcagtcaacccacactagagcaatggcagagcacatggaggaaggggagatcaatgagaagcaaaccagctttcgagaacaactcgccactctcacggctcaaatgaaagaaaacttggagcgcactcaagcagtggaaagagaaaatgcgtcgttcaagaaggagaatgccgcactaaaggtccagcttgagtcattgaatgcttcaatggcaacatcagacaatagtcaaagaagattccaagttccaattgatccgattcaatcacttgacgatacctaattaggatgatcaagccaagtggccaaacaaccatcaacaatagaggtaactaacgtcgtagttggacaacaaacaaccacagtcaatcagaatatggattcagcagtcaattcatcacccattcctccaatagtcaattcatcagccattcctccagcagttaatttgttagtcattcctccagcagtcatttcattagccattcctccagctgtcaattcgtcagccatccctccagcagtcaacttgaccaacctgattgtccccgaaggttctttaaaccaacaatcccttactagagcaaacaatgcaataattgatttaacaccttccattgtgaatgcaggagtgaatgttgcacctacccacgatgagttgattgaacagataattgcacgaaaattggaaggcatggaggccatgatccaaagaatcccaagagtgccaactccaatcaaaaagatctagaagctttgcagattcaccctttctagatgccatcgccttggtcaaaatgccaaagaagtttccgttcccactgatgaaaatgtatgatggaacgactgatcccaatgaccacatagctagctacaagcagatgatgttcactgccgcaatacctcgcgagttacacgaggcgtgtatgtgtaaagggtttagtctagtctagttggcccagcccttcagtggtatacaaacttgtctaataattctattgcttcttttgctcaattaactgatatttttgtagagcaatttgctagtagcaggaaattggaggagctattagatgatactatagaattagacagagaagggacgaatcactaagagactaggtagtaaggtttaatgccgagaaggtatccattatagcctgcaacgtggaggatgtgcttgcaaaagcatgggctcaaatcaaatgggaggaagatgaatcgaacatgcaatcaatctttaactacttaagttctcgtgagaatctagggccaagacgagtagagcgtaagtcatcttatcatgttgaaccataccccaccaacaattccaaataacttcaaggtagtggaagagctctgtcccaatgatcacgtgattaccaagaaaggggacaatcatcccaaaagtttagaggctatcaagataaaacactaatcccggagtgtactctaacaatagaccctgttgaagtggttgctgtagtgaaaggcatgtgaaataaagttgttgcactaggtttttcctaaaatacgtagccacggctacatatgacacgtggaccaaaaggacacctcacccaagaattagctgagttgtatacaagcaaacaagtgtagtttaggcagtgagccctcggagaagtacaaaaagcatgtccttcctctttgggagctagaaataagataacgcatctccgggaggaggaggacattcgaacaatcacctcgcatttaatacagcatgcgaaaagtgtctgggaacacccataagaggacatgttagacaacgtaagcctcgtttatggttattacacgataatcgaaagggctagcaatagctccattatgaagagtcacatcaaccaaggaaggataaagattaatttcacctaatccctaagatacctacaacataggttaggcatgccctattttgtatctcttgggaacttgtgctcatacattgctggcactcaaagacaagttatcccttttgaactatccccacaaatctctataaatacccctgagaaaaatgggaaaggggatagatggaaagagagagaaaaactcacaaagaacattctctgtataagaactctcattaataacaaagactcgtggactacagctcattaatgcccaaacaacataaaaa

SEQ ID NO: 38516 - DNA, 2055 bp, Cannabis sativa
tttattgcggtttttggcagttttatggtttaatcattttttttatttcaaaaacagaaaccgaccgtcatgttaaaaaaatcgtaaccaaaatgaccgccaaattcggtgatgacgtggaaccgaaaattcggttacggtctggtcagttttaatttttcagtttttataaacacccctagacttgcgtgtctcatgttgccgacacacgagatattcgtcaatgcgactcagatagaacgcaaacatcctaatgagaggctcattagcccttttaagaatataaaatgcacctaaagcctgtgaacatgtgcgataatataaacagaaaactcacaccttataggtcgcatacgttgttgcacttatcagaatagattaaattgttcttcatttattcttttacgtttattctaatttaatatttttatttatttaaaacagttctataaccgattagttatgtataactaaaatgacacttgctttctatataaaggaatgatctaatatgaataaactaagtagatttcatttgcaacagtggactaaacagaccgtgatttgactaaaccacaatattctcatatcttgacagttttctttgaatattccctatactaagtagagtattcactatttctcttttatttatttactgtttgcatatgttttggtgttgtttaaatttcttcgacaatagtggtaccaggcaccactagtatttttttaacatttctctaaaataaaaacttggaataattttatctcatccctcaaaacttaaaaatattccaaatataggttgagactatgttatgggaagaaaataaataacaccaataaactgcaagtattcgagtaaaaacaagaatacacactgaaagtaacgagtattcacctagaatggtgaatacgcaaatgaaaattaacgagtattaaatgtaaacaatgagtatttgaataacgagagagaattatagtggttcagctagagtttagtctgcttagtaaccatttacccaggacctgtctggtgaaatggtgaactgtttcagtgtagaaaacaaaattttgatatttccaaaaccattccaaacctactcaaatccaataaaactttctaaagtatccttattatgagttctaaacatacattacagctcaaaaactaaaattacactaagattctctcaaaaaaaaaattacacttagatcgcaaatcaccattgagtgagctttgagttctaaaactcaaactcacccaactaaagttacaacaaccacaactttctaaaatcaaccacaaactaacataatccaagcctagaaacttattataacatatgtaaacctatacagaaacaaattcccaattcaagcttaaaactaactttttctacagcaattcaaggagaggaagagagataggttaccttgatcctctttcaaaaaaaattctaacttctaacaaaaattcttcgttggattggtgaggaagtttcagaaaaatttagtctttctttagggtttctttgagggccgaatgaagaaagattaggagagatagggtgttttagtttatgtgatgacaatcttaattcttttttatttctaacttatctaacttcgacaataaaatcttcttttcacaaaattccactaaaagacaaattactaaataagttccggtaaaaaaatgactataatactcttgctaagaagtaatctctaaagctagaaataaaatagttataaccaattatcccgtataactccgataattttcacatcaattaaacttcatggtaccacaactgcgcatactaatatcgtcgtgacatttttggcaaatcaatcgggttttcactgttgtcgggcctaaatttattttattttacatatagcatttatattacataaataatccaataaaatctctgtaattaataaattacgctaaattttccaatttctaaacataatcttattttctcatatttaatctagtacgattataaacttactcattctcttaatgcacatattgcttca

SEQ ID NO: 38517 - DNA, 4275 bp, Cannabis sativa
agtatttttgtaaaagttaaccagaatttcagtatttttgtaagtttccctatttttaaagagtgttatacattagagtatttttagaaataaaagtgtcaaaattaatgtagtagagagataaaataaaatattatattttttaaataatgtgtaaatttttaacatatatgattaaaagatgctaccattaccattagaaatgtcaccacagaattacagaaaaagcaattgagtgcaacaagaacacaattgagttacaagaatttctctctaagtcttttcctgacaaatgtttagctttagctctctaattctttcggtaacaataatgaatcaactcactctgtcagcatagttgaaagccgtgaatccaactaacaaaatagaattttaaaatagaagccaatccgagctatcaatgtacgtgacatactgacaaagtgagaagagtggatcaccttaaacagatgagcattgttattggacaccagtagtacctaacacctctaaacatgtcgtcttacgattggctagcgatgctccttaaaaattattatattaaactatatatgggattcgatacttagttaaaccaagtaatattaacacataaaaaagtgttaccttttagcaaaagatgttacaattgagttagtatgattgtcaaacatgaaaattgaaattatgattgtcaaacgtgaagaacaatgcaaccagtgtttgattggttcagataaattggtctactccagttcctacttatgttccactatgagttaagtcgttcaggaacaaccaacatagatattcgcttgagcacgaatgtaggaatacttttactacatctcatcacaacccttctctctctttcatggcacccttatataagatctgcttacagagagaggggtaaaatttgtgttatatttgatataaaaaataaatgtatgatatatttgtattaatttttaatagtgtatttcaatacataattgtaaaatttaatgtaaatattttcatcaaaattattaaaagtattaattttattatgtaaaataataaaaaatgaatattaaatgtttataatttaatgcaataacgaaatttaattaataataaaaatttaaaaaatgacataaaaagaaatataaaaatagtacatttattgcagtataaaatttttatcatgttttaaatttggacaacttttgttatgtgataaatttagattaactttcggcacacaaccatcagagtaaatatttttcaaaatgatctatatttaaatttgtgtttacatataaaattctttattattcaatttcatgactcttaaaattatagaatgatgacacaggtcttgtctattgacatggttggtctttatccttagtatttccagtgacattcttttttggtttgtattaatcttttgctggcagaaggtggtgattgtgtcttattggtggtaattgtgccgtattgggtgatggcttctaatcaatatggcgagaatgagatggaaacagagtatcagaatatgaatatgggtgatgatgaggatggttttctcatgtatgaaggtgagacggaggacttggaggaatttgatgatcgctggtgtttagtgggcagatttctcacagagagaacaatagattttcaagcaatgcaacataaaatggcctctttatggagaccggtgaggggtttatttgtgaaagagcttgatccaaatcgttttttgttccaattttatcatgaaatggacattgagagggtaattgaaggcagcccctggacgtttgatagagttccattagtgtttgagaggttaaaaagtggagataacccaaggatggtggtgcttaatcacctggatttctgggttcagttgcacgaaatgacttcgggatttaaatcagttacggtggtgaaagacattggcaattacataggaaagtttcaaaaaactgatcctaatgatttcaaaggtgtgtggagggattatcttagagtcagagtgtctgtttgtgtggatgccccgttgaagaaacgtatgaggttacagatgaagaatggaccgatttgcaatgttaagtttaagtatgaagacttaaccacgttctgtttcgtctgtggcgttcttggccattcggaacggttttgtgaaaaagcttttgacacgccaccacatctcctaaccaagccatataacatagagttgaaagcggcgccttgtagacggaatcatactattggatcaaaatggttgaaaccaacaatggcgaagagagaggagaatccagcaccgtacgttggaattccgaccagtgtgctccgaccatctatggctggcaatcaaggatctgtaattggaggaaatcatggggaaaattctataatatctgatggtgatagagagattgttgcggaggaaatcaggagggagattgatggtagtaaggagagtcaattgggggtatctaaaaaaggaaaaactattaatgagagttttatggggggcgatatggaagaggatgctgtagtaaatattattgatttaaaaaggaggagatttgagtgtgaaggattaattgggccgaatactgagaatgtcaatgtgggccaaagtagtactgttgctgaggtggaggatagaaatatgctagagcaagaagatggcattttccaaaaaaacttaaatggggcgggtactgtttcacaggcccgccaagaattatgattgttttaagctggaattgccgtgggcttgggaacctatggacttttcaattcctaaaggagattatttctcaaaagaaacccaatgtcatttttctaagtgaaactaaatgtgaaaaaagtagagttgaatgggtgggaaggagtttgggctttgaaggaattttttgtgtggaggcccaaggtagaaaaggtgggctggctttattatggagaaatgaggataatggatgtatcaagggctattctcataatcacattgattttaaagtcacaactgatacccagcagacttggagacttacgggctatggagaaccacgaagacacctgcgatttcacacttggaatttgcttcgaactctccatgactcaactcaagaaccgtggtgtgttattggggatttcaacaacatcatgtgtcaagaagagaagaggggaggtaatccatacccaagaaatctcattgaaggtttcaacaacatcacggctgaatgtgagttgtgtgatattcaattattgggtcatctgtatacttgggagatgcatcgtggggagcccaactggacggaggtccgacttgatcgagcaatggcaaacccggcttggattcaggtatatcctatggcttcactgtataacttacttcattcaacttcggatcatagcccgattttattggagtgtgtaaagcgtcctagtgttgtggagaataagcggtttagatttgaaaatgcttggcttaaagaaccactatgctaccaaattattaatgattgctggaatcgttcggttgaggatgatatttttcaaaaaatcatttgttgctctaaacagttagtagattggggaaaaacaattactgggaactttaaacaaaggattggtatatgtagaagagagcttgatcaattgaagtcaaaaacagatgaggtctcagctcagaggtataaagaagtgaaaggaaaattgcttgtgattttagatcaaagagaggcttattggaagcaacgttcgaagcaacattggctaaaaaatggggatcaaaatagtaaatatttttatgcggcagctagtacgagaagaaggacgaatactattcagaaattacagaatgaccaagggatgtgggtggactgggagtcgggtttgagtgatgtggtcactggttatttcaacaatttgttcacagcgggtcaagtaaatgttgaggaggttattgcttgtgttcagaataaagttacagtggagatgaacgaaaatttacaagcttcagtgagtgcagatgaagtgaagacagctgtgtttgatatgcatcctgataaaagccctgggccggatgggatgactccggctttttaccaaaaatgctgggatatagtggggacggatgtaaccaatatggttcagagattttttcgaacgggtgtttttgaaaataattgtagccttgcaaatgtggtgctcattccgaagaagaaacaaccagaacaaatgggtgacttgagaccgatagcactttgtaat

SEQ ID NO: 38518 - DNA, 2486 bp, Cannabis sativa
  modified_base (28)..(40): a, c, t, g, unknown or other
aatttaattcaatataatacaatacaannnnnnnnnnnnngacgttccaaacgagccctatattcttttcaaataataattaataatttttttaataacaaaaatactaatttttgataaaatagcagaatagtctttaattaattaattaattaattttttcattacgctgtaagataattcctaatatacgagttaaaatagttcaatttttgaattatatagaaaaaaaattacataattaaatttttttataagtgaggtaaattttagctattttacatatattttttttaacttaataaatagtatttagctaaatgcaaagataactatctattgagctaaatatattttagtattgttttttaacttttctatataagtgcgtaaatattatatgaattatttctatgaaattaagaaaatatatttaaatgatatagagaaaaaataaaaaagttaatctatggtgtaatataaaagtttaaggtaaaataaataaagttgaatttttgtgatgtattttaaaaaatagagtagagaagttcttggaagtgttagtgagatagtgttgtattttagcctttttttaaaaaaaaaaataataataattgattagcgttggtttgttatgggcagtgggcgtctatggtgagtggttcgactttgcaggtgtagatctgatggcctctggtagtgtgggggtctgatcttctcctttcaggtctagattttgcattttgggggtccaactatttccttcggggcctaggactttctcagtggttttgggcgtctaggtttgtagcaaaatggtggtcaatggtcggggttctgttatggtcgtggtggaggttgttggctcgggtaggggtttggatctataaattcttaaagaggaaacgtgtgtacggtgaacattggaatgttgtgcggcttgtattgatgttttattgcttttttgttttgttcttattattagtaatagtgttgatacaccaccttattattgttatggtagcaaggctttgtttattcatggtaggagattttagtcttatttttttgagggaacgttggggagaatctcagttgcctcaaagaaatttttgtaagtaacatgactatacttgtccatgtttagatttgagagattctcaagtttttattagcctcatggtttatgatgcagcggtttgttatgattgttatcgctatggttggttgtttggttatttgtttttattctcaattgaataatagaattgttattacctaatttatattagaagatttttagttgatagtcattaataggtatgatttgtcacatgttcatttagattggagatctaacattcttcacacttctttgatgtttcaatgttgaaggcttattggtcttttggttgaaggtgctattatgatttttctttcatgtttttgtaagcgacataatttgccaatcttgttgattctattctttgagtgatttatcatcatgtaatagactattatttaatttccttaagaagaaataactaaaagaaaacactattgaaaaggcccaaaatctttagaaagggcatagttgttttttttttttttttttgaatggggcatatatttgaattaaaaggcatatagttgaagatctctaaataaaaggatacatagaataagcaaagaaacttggatttgagtgtttttttttttgtgaatcagaaattttattgctctaacaaactttcaatacaatcaaaagaccctaaaaggtctgtaaaatgtctatacaattgtatctacatgctaattacaaagaatcaaaccagtcataatttatttgagctactgctttaggcatcacacaagtgatcctagtttttacttgccacttcacttcttgaatcatttgagtattgtttccctgccataaaatgcagttcttggttttccaaatataatagactaaagctatagtagcaaccgcatacacaaccttcctgaacttggatttcttggctctatttatccatctaatgatctcctgcagtgatactcggttgtttcatcagattcattgcagagaatgcattgtccatctgttgcaatctgaaatctgactagtctttgcctggtttttaacgtcttgcacaactagccaaagcacaaagctatgctttggtatgttcatcctcaaccacacctgtttactccagtgacaaacttgatttcctgctgtcatctgattgtatacatcagatattttgtaatttccagcagagtgttgatctgatctttccattcatttttgagctcaactagttttttttcttttttttattaatttaagcgtttatatattacaattatgttactaacgcacaaaaacaataatacaacaacataagtaggaaatttaaatggagcccaattagtagataagtataaattaagaataataaattgttttgtatacctct

SEQ ID NO: 38519 - DNA, 1469 bp, Cannabis sativa
ataataaattatataaatagctataaataatttcataattaaacgtgattaactgctaatttctaaaataaactaagcggtctttacaaaatccctggtgtccatttaacttattgcagttttattagtcaaattaattcaccgtggtcctcttttattttacaatcttcttagatggtgctctcattgagaggattagagagtgctcttaatacagcttggtgctttcattgagagcattgcggtgaaaatttgactatttttcctttggaaaactcattaatttacctttttcacaacaatggtgttgagtaccggaggaccaattttagggaggatgccgaagtcctaagggggaaagttaataaaccccttaatgagggaacctttgtccctcaacaaccgcatggagagggatcttctaggtgccaagaaaagtgtcccatgccacttacgtcagatgatgaggggaaagttcaagactatgaaagttcttcatcccaatctagagagcgcccaagagtcaggtccatacatgtgcatgaagtatcccaagagaatgagacattgcgtgtctagttggtagaaagcctagactacaacaacgagctccaagagcaacgtggggaccaaactcctccactaagagagccttctcccctaggagaagaagaggtcgcccatccaaagagaatgccaccatggcacaccaagggatccaattccatggtgaccttggaagtaccaatccactaaggagaggggccaccaagctttgccaaacattgaagtacatgtcaaacatgcacatgccactcatgcaccattgcatggagatggccatggtgctctggcccaccatggaggtacccataaccaagtaaacaaagccaataatgctcttggcaataccaatttctcaatacccaacattggagtacatacttgacacactcatgccactcatgcaccattgcatggagatgccccacatggtaaaaaaaaaaatctccaaggctactccttagagacatgggcatggacagcgaagaaagaagacaaccttctaatttaaaaagaaagagaggatgtcacatgggtagttgtgccacctatgaccctatgagaaatcgtgatgaacccaatctacataattttcctcctctgcgtgcatctctaggaaatatggaatataacaacctccttagaggtgatatgggagttcgtgccaacaatgatgcaaatcatgcattggataatcaaaactgtgccacacatggcggtcatgacccatctccgcgaccacctcatgtttcaaggaatataggggtcgagattgaggaaaaaggggagaaccctcaccaagaaaggaaaaaaccaactcaagaggagagttacccttcaaggtcacaagctactattgggaatattttactaggatctatatttactaacaagtatgttgatta

SEQ ID NO: 38520 - DNA, 1531 bp, Cannabis sativa
ttatctaaaaaattaattgggcacgatttttaagaaaacccgtttaattaacaaaattaatgacacaataattagtaaattattgtagagcgcctaagtatcatggcgttacaaaaatatattaagattatgtaatcacacgatactatttacatggtcttctccataatgataaagaatataacaatatagagagattgaattataagagagaatatcatatgagaatatatatgagtagaaaaataaaaagaacgaatagattaaggttgggtataaaacatttaaataagttattaattttttagaataaatagattaaataacataaaaaaataaatgaagtagttacacttatgataaatgatttttcatctgatttttttttgaatattttttttgtttaattattataattgctatcccaccgatcatattaattaatttatttaatagaaaattaaaaaagtaaaaaaataaaggagagaacaaatataagtatttgaaatgattttagagtgacacgtcaccactttatatttttcctttatatatactagaaaattaaccgcgcttcgcgtgcggttaatgtattttgtttagtgataattacaaaataaaattatattaaatttgatatttttttaaaagaaaatgcaccaaaaaaatccattagttaataataaaaataaaaatagggttgtattttaatcaaatttaaattcaaataacagtatgttgtagatatatttaattaacttatttaatctttaacttttattttttataaatcatatatggcatagagcgttatacaaaaatttaaaaaataataaataaatttataaaaattatcattgtatctcccttatagtcacatcattgtatttcacttgtagtactcactattatcctcattaaatttgttatacataaaataaattaattaaacaatattgaattaattactcactttatacaaacattataatgaagaaaatatttttaattgaacaattctcgaaaagaaaaagagagatctgacaaaataataattaataaatctatagaaaatttatcatacgattttaaaactattgtcatcagcgtatctcacttgtagtcatcgctatatcttatctatagttgtcattattattcttaattagggttaagtattcacttacctaagtgataaattttttgaaaaaaagataacaatcaccctattaaacattggaataatctttttgtgagtgtctactagttttaacattagaataatctcaaatctatcataaataatgatatatatgcatataattaaataaaatatattattattgctattatgattatacatttacctaggcttaacttttcatgaataaatattaatatgacaaaaagttaaaaaaaaacagtacgtagggtaatttccttttaaataattgtatttatatgttatttttttaccttttaaaacgtgcagtaatatatctttatttatttattttttcatatatacgat

SEQ ID NO: 38521 - DNA, 4361 bp, Cannabis sativa
ggagggcgtgtgacagccatggctgcatacaaagtgaagctaattacaccagaaggggattcggaaatcgagtgccccgacgacacctacgtgctggaccaagccgaggatgcaggagtagacttgccatactcatgccgggccggggcttgctcctcatgcattggaaaagtggttgaaggtaaagtggaccaatcagacaatagcttccttgatgatgatcaaatggctgagggttgggttctcacatgtgttgcttaccctctttctgatgttgtcattgaaactcacaaggaagaagagtttgctgcttaaatgttctgcaacaaaaggattaagacttattaagagttgaatctttaattggatgcaacaccatttgtagtgcttgctagcttattggagttctttttgtatttttgttttagtagtgaaagttctctcatattgaatgtttgctccaatttcttatattattaccttagacaattgggttactaatttacaacatattctaccacaaattactattggaaaaatattcgaatatgtactttgggttgcattaatccatttttttaggaggagtaaaatatataaatttaattttttaaatggaatattagagagaaatatgatttttctaagggtcaatataattttgtaagaggaaaaataagaacatataatttttcctcaaaaccccctttccctctgcctcttattatcctttcatgtatgaaatagacacctttggataaggaaatggtctcaaaaaattgtcttaaaaatctaaggtttccaaacgaataaaattctactccctcaaatgaaacgatccttatctaccacataaaatttgacttcccaccacacaaaatttaacatatcaggtatcagtgtggtgtacatagagttgcactaagataccaacagatatatattaagcatatcagtagccattagattaacatatcgagatattggtaaagtgtacatagagatgcattgagatatcaacatatatatgctatagattttgttgtacgaacgttccatactcagcatgcgtgggacgcgggataagattgtaattgagtactgtatgggcgcctagttataaattataatctagtttatgtttttcttattgagtctatcaactcacagatattgtttatatatctaggtaaagacaaagcaaatactaaatagtagtgagctcaagctaatgaagttgtacatatcgaggtggttagacctggagtgttcagattttcgagacaataggcttcattttgatagtcgctaggaaacaatttttgtaactatagtattttaaaaatggttgtaactttaaaacgggatctcagattatgtaaagtatttatatatttaaaattaaggtctaattataaaatttttaattattcacgttttcaataaaccttttattagcaaaggtaggggtgtgtagaaattcatccgatccaattacaaccgattgatccaatctcaattgatctaatagaattggatcgaatgtaaactttgaaaatctaattggatcgtatcggttgttggatgagatatccaatccaatggataaccaaactgaaccgatccaattatcatccaataatatttatatctttttaaaatacatttataattttatatatttaatatcttttattaaaaatatatattaaatgatttattacatatttaacacatgagactaaagaaaaaaaaatagttataaaatattaattctcatattcctaaatgccaataaaattatcaatgggtattgaataagttttatttttgacagatttattataggatcgtgagaattaggttggactaaactaatgtttattatgtatgttgggttgttaggttttaaattatattttcttatatatatttttctgtttattgaaatcaacttaaatggtagctaaaatagattggatggatccaattcaatctaatagaaaactatttaatgcatccaatggttggaactgatccaatctaatacatccattaaatcggatcagatcggatgactcaattcgattggattagatcaaatgagaaaatctattatccaataaataattagattagatcggttggatccaaattcattggatgtgctccaatgaacacctttaagcaaagaagtgcacagtaaattaaagtcacgataacgtgtctaatctagtagggtgttacaataaatcaatcaggttgtattttggtaacaacatgagctctataaggtaaaatgcacattgactttgagctaattgttattaaaatgatgttcggagatataaagtgtttatagaacaattaagaacgaattccatattttcgtatctggatcattaaggatatatcacttaagactttttttaggagcttgttgcttatatatggatgtggtattatttaagattgtgatggtttagtggaagtttatatttgggatgttctatcaagctgacacatatttatagtttgattctacagataaaatattgacttaagttttgggtactctgaatgtattctttctattgatgtttaagtataaggatagaaagactaaatgattaatctcaattaaggaggaccagttggagataggcatgattatatcacattttcatgtaattttcaggctacgcatccatgattgatctatatcatttgattgtattcatatatgtgactattgatgggtttagccacgctaaatgtggcgaaagccgctttgatcttatgttagtataatcaatagacaaaattattttaaaatacctataattatgatagcaaagttaagcgcttataaggttacacactataaaaaaaaatatatgtagctcaagtgaaagattattggattaaatcctcaatatgggctcatatgtattggcgtattgctatttgaagttttaccaaataaagtgaacatcttagtagttgtgagtcatggctattaaagtgttatggactaaatgtgtagataccttaagtaatatttctaatttattgagggactaaattaaaaatatttaaaattaataacctgcctatgaagttatatattagtagtggtctcaaagaaacaagtgtcactctattctcatcttcctccattaagagagaacataaaagaactattagtattgtattcttggaagattattacctaaaaaattagtctatctagatcatcaccgataatgaattaaggtacgctttttctattcatatttttattctctttgaatcattaaagattttccttatatttatatttatacacttataatatatatgtaatatttttgtaataaaattaattttgatatggtatatgttatgagtaagaagattaacatttatttcttcttaatagttaaagtagtatctaaaattgttggttttctctcttttagattactatttaacaaagatattttttcttcgtggtagtctgttaaatctctctgccattgatgaaccagtaacaagaaaaacagaacagtagagagaagaacaagaaagagagagaaagacagtaaagagaagaaagatagaagaaagacagattgaacaaaaggcaatctcaatattgaaagaatagacattggcattatatagccaatgaattacatgaggagaatcagttaggtacaacagaatcagttagaactaatattgactaataaaccgaaatgaaccaataacagaattaactgattctaatgaacagtaactaactaacactcctaacatagtcaaaacttaaaatagagacttgtaaacaaatgattgatatgttaaaaaaaagggataattttagtgaaactgtacaataaaattatttatggaaagttattagggaaaatatattttatttatttaaaattggttataaataataattattattatgttttgttcaacaaaattgttattagtatagatatgtaaacttccgtaaaactttatttatacaatttgagttgaatatcttttttaactttgtgttattttttataactaaaccagcgtgtctattctaaaattatgattcctatataatctaaaattattatttatgatatttttaaataattaattcatagttggagacttattacttactcatatattttggcttttgtaagaacttttgttattatccaggcagaagttgtatctttagcgccagtttagcacagctgtgctgtgagaaaaagcagctgtagctgtgctgtgagtaaaagcagttgtagctgtgctgtgaaaaaaagctactgagtgtttggtaa

SEQ ID NO: 38522 - DNA, 1034 bp, Cannabis sativa
ccttttttgatattctaagaaatatcactataggcttattggcctaacaagccggtccgatggacctagtgaaactactaggagtgaaataaagcttaatatatataaaccagcttatagttgtcggtgccaccatatgcttctaatatgtaattaataagtgttgataccatcctattatgattatcaaatgtaattcacactacaatcaacaatagtcattataaaattatagattatattagtccacaaaataattttttaacactaattattggcactatgattctctctgtttatccactttctttttttttatatatatatattttttatttacccagggtaaaactacctacctaattaagagttctgaactccagacgtgtggaggcctccaaatgtatatcatgtgtgcttatataaagtttactgataaatcatatgctatatagaagagaattaaaaatgtaatcttaattatgaaaacccaagttatatatggtcaaaagaaaaccgaaaagagtgatgacctacgcattttgaggtatacgtcttcatcgtatcaaaagactagaaatataggttagtggactgatgtaggttaaacatgactgtaatgtagatgaacagatgtactctataagatgagaaccagcccccacttcgcaatttaaataactaaaaaccaaaaagagagacagctgtattagttttgacacgatcgatcccagtagtcttagccaaaacgaaacctattgatgagaaagagaccaaaaataatttacatttgtactttttattctataggaatataatatagttttgcagggtccgcacaattattttagtcatcatgtcaataatctttttattaattttagaaaatattgtttatcaatagtgaaaagtgttaattatagcatgctaattttaaacattttgtcaatctttctttctaaaaatacaatgcatatcagtctactttttgtctttattcaaattttgttctatagtggtgtttgttgtaacgt

SEQ ID NO: 38523 - DNA, 2139 bp, Cannabis sativa
ataatgagcatataaatactctaataatatatagaaaagggaatcggtcaaaaaattcttagtgataaatactattattaatacagtgacttgtaaattaaacttcattaatactcaaactacataaaaatcatctattctaatattcattcattatttcatctactcaaactacgtaaaaaatcatctattcaaaattttgatagaagtacgtactctattattgttttaaaagtaaatttgtggatgagtgtttcatcaaaagcccgagccacataaaaatatatgtttatttatttatttttgcttgaatgattttattatttttattgttgtgatcatattgatttttcgaagtgaagcgatgttgttatttttgtctcattcaacttaacctggacccaaaatttattttaggagaacttattaattactatataaaaaattatgcctagttaaattattataaatatgtgtgtgagggatttttataccatattttgtgtttaattatcaaataaaataaaaatattaaaaacatttaatacaattttacagtcttctattattcattccaattgcaattaggtgggattgtaaataaatttatgaatcattaattatcttgttttgagtattgtctcatcatttgtacgtaatataatgaaatttataaagattaaaaaaaaaagagagagagagagagaaattaaaaattgaaagtaagtagatgagatgggttatcccaaatggggggggaccacatgtgaggtacgtaaatgacatgcaaagtgtgaggtccattgaggatgtatgatgctcatgatgtatatgtattaaatattattggctaacttagaatatatattaagttaaaattattttaatttaataaatattatttttgtgttttgtagtaacacttattttattcatgaataatttgtgttataaatatttaagtttaattcgcagttataaagttttatttttagcggtaataatacttaagttataatttttaaacttctgtaagtatttagtatctagttgttaagtgttaagtaaactaccacgtgataattcttcattagtccaaattattaaatttttagtatttaaaaaaaataatttaaataccaataaaaaaataacacgtagatataatgacttaacatgtaataattaaatagtatagaattctaaaaatatgaattaattattaatgtcaaatattaaatttatttatttatttacaagtaaaatttaatctttctttaaataaataaaaaaaggaaatatacttattattgggtgtgactgtgaacaactctctctttcctgttttttctcttcttttcaattattaaagtttatctcatctcatgtcaaaaaaaaaaacaaacaaaaggtttatctcatctaataataccatctcccctctcgagagattcaaaatggatcttatatcgcgagatactgagtttacttatcgtctcattcaaaatgagatccaggattgggttttacaaaatgattccacgagttgagttgaatcgggacaaattaaatatcatttttaatttttaataatagagaatgattaaataaaatttgcattttttaaataaataaataaaatggtctgtttttggtctgccgactgatattgtggaaagaaggaaagttgagctgtatttagtgggcttggtattatacaatgtttctaccacacactacatagtcttattgttgcataaattatccaattcaataataatcaaatgatataattataatcgacttttaaacattggatatcttatatcctaaatcagattagatattatttttaaatatctaattgtatcgaatattgaatggagtgtccaaaaatttaataaattcaatatccaatgaaactaattaatattatcatttagtttagacgagtaattaaattttatattgttatacgtaaaatatatatataaaaattaacattaaaattaaactcttctttttttaaattggatggatccaatctaattcaatacatactgggtctgctaaaatattggatgaatccgacccgatccaaaaaatacaaaatctaaagtattgaataaacctaaatta

SEQ ID NO: 38524 - DNA, 2964 bp, Cannabis sativa
tggcataaaaagacttagcaaatctttccaagttatatgatccacgtgtcccctcttgactggtccacgtattttgggcaaattttggagcaacaaatataatatcttaaatttgttagttgggtaattttttaaaaaatatatatttagttagatacctattggggtatagctattgattcatatccatataaacatctaaatctttcgttgtagtttttttgagctcctttgttacatccagcacatgacaaatagtagaataattgtgataaatttttcaaaataatcttgccttgtatccagaattttgcagtcttaattagattatgtataatagtcataattttgcaaaattttataaattttggctaaaaataggaaggatcttgaatatattcatctccattagaatgagtcttttatggaaagcaccaaaaaataaatttgtgatggcttaggcctaaagcggacaatatcataccaatgaaaaaataattagtgtctgacaatccttacaaatataatttaattaagaaacttttatttaaatacaagctgaaattttgtttagtttcttaccatttatcaatcagatatattttttggatttattttattacctatgttgttgttactttttttagtagcttgaccagtattgcaaccattgatatataaaggtcaaaatattttagattgaattaggaatatgtttatttaagaaaaatagaagaggaagattattactatatttaaagtaaataacatatttcttctttagaagatgtgtaagagtttaatttgactattttatacattgggtactggtttttatcttattttttgttcgttgttctatttttgttgaagatgtaattattcattgatatggattgtttttatattgaaaatggtcatgtgttttagtaacacatactttacaatgtaatactatgatacatatttaatatctcttcccaagtattaatatcatactcaaaaattgtaacttctactttatttgtcattttcaccaactaaataagaattaagatgtggtcataggcataacttagtggtttaacatttctcctcataaagagaaggtcccaagttcgaatcaccctctcccaatgtcaaaaaataagaattagaataaaaaattgcaattccaacattatcggtaaataaaaattaactctcaattactatatatgtttataattctaaatctgaatttatctttgtaataatataaaataataaattattacatgtcacttgtaataataatctaatatataaatttagcatcaatatataaaaataaaatataaaggttaaagtatattataaatttttattttaaatgaagcatctaggatcacgatgtttgaaatgacagataagcattagaaattttcacaaatacagttgaaaaaaaaaaaacatatctaaatataggggtttcaatatctcatactgtttttttttttttttttaatttcactattgtaaggaaaaaattacttttttactgtttctttttaatactatatattgttttttttttttgtttttttttttgcaacactccacggtttttgtgtttatatatataaaagttttaaaagatttgatttgattgaaaatttgattgctgctatcacttttgtggtagtttttttttccttaaaatattttttttttcattttttttaaaaatttgggcaagcccacgtgatttcccatttcaagaagtgtctatatgtgtttatatatgtatagtcctcttgagtaaatttcaaaacattgacattatttatttattattgtattttagctctctctatctcttatgttcatcttcttcttcatatttttctttttttctccaagtctacaacattactcaaataaaagctaactctctccttttgttgtaggtaaccaaaaaaaaaaaaatatgtgaaggagcaagaagaagaaaaagatttaggaaagataagagtgtggttgtgtgtgagagggagagatggagagcttgatatgtgatgagcttcttgtagaaatctttcaaaaactcccactaataagtttatgttcttcagtctcgttggtctcaaagcattggctccatctttaccgtactttcaagtccacctcctttctccaacttaccattttctgttactggtttattttgttattgttttaaggttcttttaatgaagttttctttttttttttcccctatcatattttttcaaatattattgtattactctatttttatagtaataggaaattaatgaaatttgtaggcaagttattttcttcagtatcttatgctctaacatatgttcagtttttcctccgttgttccacttttgtttttaattttttgcttcttttcatttttgatgcattcccctgtatgttctcttgttgtgccccagcacccccattttcctgcatttgttttattatttagtctttcagatttcactctttcaataggaggtaagactattattgtccatgattctttcattatggttacctcaaataaatattcaatggttggtttagcctgtgtaatttgagaccaacatttgttaaacattcgaaacaacaatggaacaagctaaaaacaacattagagaaaccatgacagccccagtattaatagttttaatgtttatgcttcatctcgctaaaattaatgattgtttttttactgtgatctagtgttattgtggtggttctgtccgtgggtgtggaagatagaggacttttttttttggtacttacagtataaaagaaaaaaaaaaaaggaaaggcattataaatgtaatttctaccgtgtaacagtaaaattataaatttttaataaaaatctaatatttttgtaaaaaccacctcataactgtttttttatataaatatatagggtacatg

SEQ ID NO: 38525 - DNA, 2111 bp, Cannabis sativa
tgagatgctctataagcttcaattctctttacacagtctatttgttcctcactcagcagaaattaggattcaagtttgctacatggattaaaaaaaaatacattgctaataagagaagtcataggcacttgataccatttacaacattttaatctgaaagctaagatgacattgaaaatccttacccccaatacaaatgtggataatggagagcttttcaaagtaacagggccagcaagttgatcatcagaatagagatctgaccaaaatactaaatataatgacataactgtgataaagatggcatgaacagtggacatggccctgttgcaatagtgacaaaaattataaaccatcttttacaaaaataaaataaagaagaagatacatacaaaggccgtaaccagtaaaacggtaataaaaaatcacctgttattccactcagtacgttggagttttgaaaggcttgaataacacttgaagtgtgtagagctgacaaactgagtgaggtcatatacctgcagaaagaaagaaatttagatggaaaatgaagacgaaaacaagggtgaaagaagaacatttattcttacaaaatgtcctcagcatacattatacattaacatgagccatctattgtgtgttttatttaacaacgaacaagcgagagaaaagcttaaagcataccattttgcatgcaaaaatgccaccaattattggaatatatggcatagcaggttcagcaagtgcatactccttcagtagttgttcagcctggtcttggtaggattggattaccatggtcgcttgctcagaaacaagaattcaatggacacacgaaaagatttttcttctttgcagactagtgccaaactccttttttcactatttccaataatacatacatacaatgaaaggataaattaaacaacagtagcaattagctgaaaattgacagaaacttctacaaacacaagatagaattttaaattttggtaacacaaaattattgaatagcttaacttgtagactagaatgtgttaaatgtattcatagtacttagttgttacccttatttatgtgtggtagcacttttagattatcagattcccctaaccaagacaaatggaatataagagtaatcgaatcacaaaaagctagaatcagccaaagtcgatgcattagtggcatgagtaaaatcaactagagcaagggaacgtctgttgtagcatagccggtggcagaggagtcacaggggtaacatcctgctcacccacagcccttctccttaagcactgtaaattaggccccttgaggttaggccaagattcaagtttgaggaaagagcaactaggccttgtatcaatcatctataggaactaactatcattttcacagggggtctttccaattccaagcagtattatcaagataaggacatatgaaaggggtattagatgagtgtcttttaaataaggaacacttccagtaaaagtcaggaaatcagtaaagctaaatttgatgtacataactgtccacaatttatatgcaaaccaaaagtaatcaaagagtagattcatacatcccactgaatgattcttcatcatatcacataaaagaaaataaaggttaataatgcataagaacagcatgaaaaccattcaagttattatcttgtccaacagcagtttcataaaagtataataaacacatatacaacatgcattcactaatcctcaaagcttaagttggcaccaatcccataagtcttgcaaggcaatagatatgtaaaagcttaaaaatacaagattggtatcctaaatgatgtgatattgcttttcaataaatatgattggttgaaaaaaaaaaaagagatcacgtcactatctataatgttttagtgcatattttgaataccaagttcaaacacagttactcaggttgtaagtccccaggattgaaccaatgaaggataaagaaaaatgctaatcaactgataaagtttctcattccattgaaagctccacattctcattaccctcctcacaagtttttagacccttagcaaaccgacatagaagcttcacaatcacagcttattaaacaaaaagctc

SEQ ID NO: 38526 - DNA, 2498 bp, Cannabis sativa
gtatttttgtaattttttttccttttttgtattttttttttcccataatattaagtgtaacaatataaacgtgtcacgtgtataagattgtacacataaattgtattttttttttgaaaatcataaactgtatttattaagtatttagtatttaaaaaaatttattgccaaaatttaaacagttatatacaaataaaataatacttgatagaatttaaccgccaaacacactaacaaaaaataaacgaaatagtagtcaaatatttattaatttagagaataaaacagagtatagtaggtaccataagattaccaccaccagaagtaggtagaagcaatggacggctgatcttgtatgtgccaccatcaagatgaacctgtgagccaccaagatcaccaactcccttcatcaaatgcgcatcatcatccaatggagactcgaacgcatcatgaatagctcgctcaagagcttctgtgctgtccgatgtccctgtggggtctgctccgtaatccaccacgtgatacacacgtgatgccataagaacctgtttcaaaattaatatcaactataactaccacgaaaaatagaaggatggagaagagaagagaaaggagtgggaggaataatcaaatcctcattaaaggaacatagtaaaaaggaaaagtaagaacataataaattcactccaatgtactatttactatatttagaatcctttaaaaaaaaaagccataatctctaatttatttgttcaaaattacaaaattttgttctaaaagaattatcaaaaagtaattatgaaataatttagtcatattgtaaatgaagagtttgtatatctatcatcattcaatctttttatctcctcttaccaaacaatttagaagaattaatactctcttcttcatctattatattatccatcccctcttaattaataactctccatccattttattcttcttcaccgtaccaaacatatcatccccatttttaatctatcgctagatcaatctagtagcttagttaatatcaaattaaatttcaaatcttccatgatcaaaggctacctcattattgaaattaattaaatatttatgaatcaagctacctaattgaaattataataattattattataattattacataccgaaggtgtaattgagaagctcggaaattgacgagggactccattgtggttcagatgggaagctttgatcaatgacaaacgtcttatttgttcatggtatgaattgcctgcgcttgaatatgagctctcaccatgatcaaaaatcaaatttaaatgcacaaaaattactaaacaattcttaattatctctactaacaacccatcattctttaatggcatcatatttgtaaaagtgttcttggtattattatacagagataaataattgacagagcaaattataaacaacttaactctttgatacacacatatatgtatatttaatatagaaaataggattctcatagttgtaagaatactattattattataacaaacttaattgcatgtggtttagcaagttaggtttgaaaaagagaagactagaatttgtcaaattaaggcaagtatgttactatatttataaatgttatatcactcatctcttagaaatagtatctgccaatattaattttcaagtgtttgccaacaaagtcattaaaataaattttgttaattttgaaatggggcgccatccctatattccttatattagtccaacattatggggacccgtggtcgctgattacttgattctcaatagtaaattggactaaaattcatattacattattgaacataaatgtgttttatgtagatagttttgacttataaacacagcatcataaggccatacttaatttaacaagtatttatatatatatactaggtatttgttaaaaaaatgcatatttgtttagggttatattagagttactaatacttgattattaatttaaatattcataaaaaattaaatctaatacaattcaattatatatttcaaatacataaaatttaatctaatttaaaatttatatttaactaattttattaaatattaaaataagtaaataaattaaatattttaaacaatataaataataaatttattatatagtatgattaatataaaaaaataattattcaattttgttgatacttttaaataattatctaagttatactttaataaataaattaaatttagatatttaaaattatttttttttcaaaaaaataattaattaattaattaattagcggtattagttttaacggttaattttaaccaaaaaaaaaaaaactattaaacaacaatttcagttaaatagttatatttaatataaaatatagggatatgtttttgtctcgttattgtactttcacggattgtaatccgtgatgtacgacagctgtcagatgagagagttatttaatcagacggctgagattgatctaggg

SEQ ID NO: 38527 - DNA, 1174 bp, Cannabis sativa
gaaaaatggttaatgctagaaattcaatttagatgaattgtagcattgctcacttaatctcagcagactaattaccttaattttactcagaaaatactacacataaatcataaaaaacacaattaattattatggtcaattactccaccaaatatcataatcaaacttccattaaatattcatcatcataagcacgatgatgaggtccatgactacttaactagagtagcagtagctgatcatgaagcttaggggctaaagttagtgatcaacctctcaaggcaaggaccttagaccaagctggcctggcagtgatatcagtcacccaagcattaacatggggccgagactcgaacagcttcttcaaagtggtccccaacaagcactgcaaattaggaaggtggtaaagatcagccaaaccaatacattcaccgcccaagtacttggatttcgtgagccgattctcatacacatccaaaaccttctccaatttggcctcgttctccttcaccacagcttggtcagtattcatcccaaacatgggcttgtagaataactcccacgacaatttcgcagctgctggctcaaatttatgagcttccacctccatccataccgacgaaatcgccttctccttcgagtttgaagacactaattgcgttcccttttcagagtattcttccgctatgtaattcgaaattgccctagattctgccccaaattcaaaaaaaataaaaaattaaatgaaaagatcgatttgatgaaaatagaaggagcgtttaggaaggaggaaacaaaaatggttcaccgaatagctgtaaatctccatccacgagagctggaacttgaccgaatggctgaaatatttggtgagatgagattagagattgatttaagtaaaaagcggaagagagaatattaattactaacattgagggaaatgaaaggtgattgtttgtgagatccggcagacatgtcgacggggacgaaatcgaagtggaggtgtttctcgtaaaggcaaaccagaggcctttgtgtgttggttgatattgggcttccatggagtttgatgatcgccattaacactaccagacttgatgttgaagtgaagaaatatttggaggaagaactgaagaagaagaagtaagattttcctttttgggaggatccaatc

SEQ ID NO: 38528 - DNA, 1912 bp, Cannabis sativa
  modified_base (372)..(373): a, c, t, g, unknown or other
cgcactcctcgtggatgactctttctggggggaaacagctgaatttccctggagcagcagatctaatacaacatcctcgcctttgatttatgccacaggactttaaaacaccaccaacatactctccaatggttctgaccttggattcgataagttcaacttcaaaggtgacattagagtcctgtggggtcttggacttacgaggtttagtagacacaattttaaaatcaaggtcacttgatgaaaaagtaacagtgactttgggtaaaaatactggtctcgctaatggaatagaagataaagattgaggttcaggccaggctgcatctcgcaagtaacgatgtttaccctcagttatctcttgtagaaaanncctatagcgactagcaacttcatcctgattggtttttgttaaatgtcactaattttttcatcatttatctcaagtttggattgaggtttatggattttgtgtttgaatggaagggctaattccttaggacattctatttctaagaattctagagtataaacttcaaaaccagattgggacatttttataaaaagaacaatcccaactcctggaagaaatttatttaaaccagaaacttattaatacgatagttctaagtttttctctgattaaaaccctagaaattacccaaaaaattaaattgaaatcactaaaaccaaatgaagtgaacaatgatgcgattaattacaaaaataccaattcaggttaaagaaataccaaaaagaaaggaatgaactacttactgttcatagatgagtttttcgcacaaaggagaactcggtaactaaagttgagacgaatggctaagtgtactctgggaactcctgaggttaaagattagattcgaagaaagtcataggaaatatgtcaaggatgaagagggcatacaagggttcgaatgattgaaaatgatttctgcagaaaaagcttgaaagttccaaaagatagaaatggcgaaatagtgattttatctcaggtttaatactctaaagttgatcactgttagattaaaagagtaaagatctaacggttaagaacaagagagaattggaaaagatgggctattgatgttaatgatgtgcctcgaaatcatgaactgccaaaatttaaagcatgcaatttttcaaattaggttaagacaaaaatacccttgcatcatttaaatagctctttttattaatttttttaagagcaattattatacacgaaattcgactacatttctactgaattgctcttcaaaatcttgctgaactacaaattggaaataatctaaaaactctaaaattctctaattttcctttgaatttcttaaggtcgaataagagagagaaaatgagagagagggtgttgagttttaggattttggtttaccttttaatttttcttttcctaagtaaatctaactaaaataaataagcatataacatcatttaaaaatccactaactaaaggattactattaacttatgacaaaattcctaaaatacccctcatttggtttttaagaaacttcttaactaggggtaaatggttgttatacccgaaattcgactgcacttcagagggtgacacatgccagttagtggaatatgaaccacatggtataataatgttatgtaatttaatgcaaaaaggaataactcatttaatatagaattaatagagtatattcataactcgctgactgtatagtttttagcgagacaaggatataaaactattaatacctgtattgacgagacaccgacctgcttcggaatacacagatcccaggacaagattcgtttaaaagaataagtgaagttactcaaaacaacctcaaatgagtatatagcgaggcatccacctcgctattcataagaaacttgatgaggc

SEQ ID NO: 38529 - DNA, 1957 bp, Cannabis sativa
ttcttttttctttttttaaattttttacgtgtaagtggtaatgacaagtgcagaagaaagagtgtgaaaagagcatttatggctgatcctctttaaggaggaagagtagaagacatagtgggatttatttaattagaacagtgacagagtaagaaagaagactgtaagaaataaatattaatttttgtttaaataaaaaaaaaatagagagagagagagagaatggaatagaggagcattaatgtctgtgacaaagacatacagagtacggacaacctcatgtaatggaaccctacctttagctgttttttctttctccttttatttattactccaattgtgaatgaaaccaaaatatgtataaggtacataaaaattgaactgtattagtattatatggcaatatcatgagtgacttttttttaaaaaaacaaaatacatcatgagtaactttacggattggagatcaatttgtatcaaaattatcattatatctcatagtttgtgacttgtgtaacctaaactccataacatgtgttatgtgatgggttaaatccatttggaatagttgtaccaacaaaatatcatgtaatgtatttgagatatatagtcaaattgatttttgttgcactgtgatcatcctactgttgttacatttttgatgaatattacacctataatttgatgtatagtaattaatgtttgattaattctgtctctataacgggttacagagttcattagctgatcaaactttattttttgaagaaaaataataagtgtgataacataaaagagaacgtctttttcaaattctatttataagttttttctttgaagctgaaagtcaaagtacaaatcttgggaaagtgatttacttcttatacagttttcccagttacccttgtttgttttgataaaaaagaaaataatgaaacgaaagggaaggaacatacgtgtgaaatgagaaaataaaactaaatgaggttttcacttttaagtctctttttctttgacttttctatttgaatgcctttgaaagatgggagtgagactagagtctagacttggtgagaaaccaaataataaataaagaattatgatgtggttttgtttaggaaatgaaaaggagagttattaagaaaggaaaagaagaaaataggagagttattagaaaggagaataagaaaaagtaaaaagtactggaggtgtaactttgttcagacgcgacttgacacgtgagttgagacacttaaatgttaaaattgtatgtgttattaattaaatatcaaatcttacataacttctaaaaaataatttttttaaaagaatattgctaacaaatcttacaatcttagtgtgctaaaatattagacacctaatgcttaatagtaatactttataatttaatacaaccatattttacttagaactcgaacccaggacttccaacacacacccccacttatgagcacttgagctagcctcaagtagttaaacgcttatagagtgagtgggtgagtgtgtgtgttggaggtcctgggttcgagtcccaaataaaacatgattgtaatatataaacttttaaatcaaaaaaaaagtactctataatataatttaatattttttatataatatcgctaactaattataaaatactagttacaatactctttaatactatatccatgcataaatgaaaacgaaaacaaagacctttcttatttcaaaaaaaaaaaaaccaaagactttatgatccatttaatagtgagatgatttacatttagttcataatgattaagtttattaacaataattaagataagatggataaaaaataagagatgtaggtaggaattataaaaagatggagaacgtgaaggaaaaataggagagtaaatcttttagattgtttagtagaaaggatttaatagtgtgtataattgttattatgcac

SEQ ID NO: 38530 - DNA, 1709 bp, Cannabis sativa
tgttttctctctgtttttcatgttctaattatattatttataattctgattttgtcattttaattcttgtttaaccttagattgatttgagtttgcgttgtatgtttacaacataaggtttagcaaaagatttggtatactttattaggtatgtataaatgtgtgtatatatatatgtccctatattatatatatggttgattcttaatgttatatattgatctggttttctctttgaatatagattgttttagttacccaaaagacaaagaagattgttaatgtcttaaatgcttctaattttcaactatactctattatgactttggatttgcatttatacttgtcaataatttatgcagattgatccaagacatatgtatggtcatagcttgcatctgtactgcaaagagtggtgtaaagctgatgttggtcagccattcttttactggcgagaaaatttaccatttcatagattatccttatacttgagtactggattatttggaattcatcttggaaattatattgttattttgtctggcaggttagacataggagatggtaaagagattgaccttgaaaaatgtccaagatcaaagcttaggcaacaatgcatcaaatatcttggacctgtaaaagttaaagaggatcagattgatctaatgcatagtttatgtgcttataaccccagttcctgctatattgagatatacttactccttttatttttttggcttcttctgattttagcaagagagagaacattacgaatacattattgtggagggaaagattattcagagcttcaattgtctttcttgaaacactgatccctttttcatattttttggaaaaagaaaggggtatttcatcattctaggttcttggctgggggagctacattagctgcagggagactagaagcaaagtttgggactttgaaggtacaaattagaagaataatatatatgcatgaaagttaatttgttgtttggtgctgactgagtaatacattatatatatttcacctgtttaaattgacctgttaccctttcttatctttttattttttttaaccttctatttttagagaaattacacatattagcaataccaaatcaaagttcttattgttctgatttgtggtgtctaatcaacagctttgactttttagtccattattatcgaccaacaaatgatcgtttgaacaccttcttatcaattctcaaagaaattagaatttagtatgagttgtttaaggacaagtaatggtcatgttacataatacgcaaaggggattggaacaacaagcattgcaagatggagcttggtgaaaaacattatcttttgatgatttggttgtttagtttgatttgatattacttaattttcggattgaattttaagagatcattaaagggtcaaattgatgagtggaccattttaattgggttttgagtttgtttgccttgtttttatgtgacttaattttgagaagaaggttatagaatacatttaataaataaaattactaacaacgttgtctaatattttattttagattaatgatgagttgcaactaaaaggatattagtgacaataaataattgtggattaacaaatattagtgataaatttttattgtgattaaagaaatatttgtcacaataaaaaatatcagccacaattttttgttgtgactaaag

SEQ ID NO: 38531 - DNA, 2465 bp, Cannabis sativa
aattttgtaagatatcttaaatagttataacgtatatgaatataaaaaaaattagactaaattttttttcgggatgccgaaacaaatagagggtgtatcaatacataaaaatcatccaataatatctgaagtacttttcaaaataaaaactatatgaccgttggataattgaactaactaactaaactaaacatttggaacatttttggcgggaataagggtatgagcagtctctcaatcggaggctcttcttcattatccatttctgtaaagatcaagactcgtctccttcaacgattcacctccttcaatcaactcaaacatgtccacgcctttctcctccgtctcggccttgaccaacacacttatctcctcaaccacttactccaccgtagctttggtttcgaaaaaaacactactcgttaccctcgactcctcttccaccaaatcaaacaacccaatgtttatctttggaataccatgatccaaggcttggtatccgtcgattgcttccaagacgccctcgaattctaccgttccatgcggcgagaggggtttttgccggatagttttacctaccctttagttttgaaggcctattgtggcctctgtgatgttcaattgggattgagagttgttcatagccttgttttgaaatctgggtttgagaaggatgtgtttgttagtaatagtttgcttggcatttattcgaaatttgggtatttggagagtgcccttaaggtgtttgatgaaatgtctgagagaaatgttgtttcttggactattatgattagtgggtatgttagtgttggtagatttagtgaggctgtgactatgtttatgagatcggttgagatgggtttgagacctgatgggtttaatcttgttcgggttttgtctgcttgtactcggttgggtgatttgaggagcgtggagtggattgatcggtacattatggagaatggtttgggaaggaatctctttgtggctacttctttggttgatatgtatgcgaagtgtggaaatatggataaagcgcttcgaatatttgatgggatgttggagaaggatgttgtttcttggagtacgatgattcagggatatgttttgaatggaatgcctagggaaggagtagagttcttcttacaaatgctgaaagaaaatataaaaccggattgttatgcgttggttggtatgttttcgggttgtgctaggttaggtgcactagaattaggggagtgggcgagcaacttgattgataggaatgagattttgtcggtccctgttcttggaacagctctaatcgatatgcacgccaaatgtgggaacatggttaaagcttgggaaatcttcaaagggatgaaacataaagaccttgtggtctggaatgcagcaatttctgggctagctatgaatggacatgttgaagccgcctttggattgttcggtcaaatggagaaatcagctattcaacctgatgaaaccactttcatgggcttgctttctgggtgtgctcatgctggccttgttgatgatggtcatagatatttcaaaaacatgagtagtctattttccttaacaccttcgatcgagcattatggatgtatggtggatcttctttcccgagcaggacatctaggcgaagctcataagttgataaaaaacatgccaatgaaagctaatgccatagtttggggagccttgttggggggttgtagactacatcgcgatactgaattagcagaacgtgtactcgagcaactcatcgagttagaaccacaaagctcggggaactacgttctcttatcaaatatttactctgctaacaggaagtggaatgaggcagctaatatcagaacaagaatgaatgagcaaggaatccagaaaactcgaggctgcagctgggtagagttagatggcgtcgttcatgaatttcttgtaggagacaagtctcacccattgtccgagaaaatgtatgcgaaacttgatgagctaggacaggaactgaaagcagcatttggttatgttccaacaacagagtttatgttgtttgacatagaagaagaggagaaggaacatttccttagaagtcatagtgagaaactggctattgcatttgttcttatcagtaactcttcgaaagattcgattattcgagttgtgaagaaccttcgtgtttgtggtgattgtcatgagttcatcaagctagtttccaagattacagggagagagatcattgttagagacaataacagatttcatcgtttcattgatggtttttgttcatgtaaagattattggtaaaacaaaaataaaatacatgctttgtttttttttttttttcttggctaatcattttttactctaaacaaaaataaacaggttggtacatagtaaactagattaaattcatgtagtcaaatgtatggactgtaatatccgctaactccgaaagggtatttttg

SEQ ID NO: 38532 - DNA, 3277 bp, Cannabis sativa
  modified_base (2625)..(2625): a, c, t, g, unknown or other
tagatctaagattctggtaaaatacattccaacaacgtgtcctttggtcaaaagggcacaacctttgctggcacaattgatgtcgccggcaaaagtccccgcctacttttgcgggcacgtttttttactgcgagggaaaatgaacccccttttttcctcgacttttgccggcgcattttggcgccaacaaaagtaaataataaatgaatggtttttccggttcgctatcatgcgtcggctaaaggttgccaacaattcccaccttttggcggtttggctccaacttttgccggcgcaattagtacactgtgccggaaaaaggttgatgtggacaaaaaaagttgaccactattgccggcgactttattgacttgcgccggcatttcttaacttttgccggtgcaagtcctttaatccgccggcaaaagtacacattcttgtagtgtcggtctgggtccgagtccggccgggtctaggtctgggtcttggtctaggtccggggttcggatatgggtctcggtccgggtccaagtttgagtttgtgttcgggtctgggtccaggtccatgtctgggtctgggtttgggtccgggtccgggtcccgaatgtgggttagggtcggagattggtgttgaccccaaatcctttgtaaatattataatactacctaaaactgaccatttgttatttatcaaataatacagcataaattgtattaaaattttggtaataataattaatacaagaaattgctttattcaaacatagtattatttattatttattgtaatacgacccttatacggcgtactaaatgagccctaaaatgattatttcctgtcagttggtcaacacctaatcggggcaatcagtacctcaattaattaccagttctgaatcgaggcaattgaacactcaattttgtcgattagtcacagacaaaaagaagttgccaaaaaataatttgttaggaggagacaaaaaattaaatatatttccaataattaatattaacaaaaagtaaattcacaacctaaatacttcttttatttattttattgctaataagtattaatttgtaacgccctaatctataaggacgccacgtgtaattgtataaactatattaagactaatatattaattgattttttttaaaagttgtgagaatattaaagacttgactaaaataaaagactagaaacagacattataaggacagtaaaaatgtgttccggagatccctgttgtaaaattttttacccaaaagactacaaacaatagcaattcaaaacacaattcaaaatacaacagatacaaccaacccaaaacaatttttggcaactccgcacacaggctggtggggtcaatatgtacattcttggagaaggtagtcacctcatggcaactctaactttttcttgcccttatctgctccacatagcattcgtgagtcacaaggactcaacaagaatgcaataataattgtaatggaatacctagggtttcctaccaaatcttgaggtaaaagttcactaaaatgaaacttatattttggctctaaaaaatacaccatatcatagagctcgtcacaaggtttgaaacggtatatcaaacgtccaaaacggacacccgagtaaaaagttatggccaaaatacaaaattcgactttcaaaaactgaccagacgaaattctggttagtacatctggaattccggttctcaacagccaagaacacaattttcctcatatttaaaccctccaaactagcttcaaacctaaccaatcattccaaacttcacaggacatatatataatatatatataaaataatccttacttaactgaaattaaaatcgagcccttaaacggaaaatgtcattaaagctcagacctaatagctttaaaaaattacaaactcaatttttaactcaaatccacctcaaattcaacaagtaaatatcggaactagtcccatgactacacaagaacaattctattatgtcaaaactttaataactattataatttacaaaagccctatacgaaactaattatttaaaactaaaaactgaattaaatcttactttaagccttcccgctttgagaatttactatctcgctactacttgagcttagattattatgtttcagattcaaatcaaagaaaatagatatgaaagtaagagagttttgacggaaaacaaaagtttcgtttcgtttgtaaattttatttataaatttattatatataaactgttacatttatatatgatatattaatgatattaatatttatataataatataatataatatattaagaatattattattaataataataacagtaagattaataatgataatataatgatattaataaaagaatttattaacgattatcttattattttttagccactcagaactttttacttttagagcgctaagttaaatcatatatactcttaagtacccccaatacctatattatcaacttatcacaattttcccatcaaaactaataattacacccgctatgacatttttggccctcgatcgagtctccaaagtcgcgaaacctaaaaatatttgtgttccacatatagctcatattacatncacacatgctatataaatctccataatttataaattattcttatttatccagttatagaaaatttaaaatttatgttcaactaaattagtaggatcataatcccacttattatctaattaacccatattaataattataaacccttattattaaccagtatgcttatcgggatattacagccatcccctccttataagaattttgtcctcaaaatttacctgaataactcgagatacaactcccacatttgcaactctaattcccaagttgcttcctcataaaataagttgtctggagttcaatatcatcgtaactcaaaatacatgatggaatgaacacatactttctcaaaatagaaatgtggaagacattatgcaccccggacaacacgggttgtaaaactaattgatagaccatctggcctatctgctccaatatctaaaaaggatcgatgtatctaaggcttaatcttccattctttcaaaatctacgcacccttttcgtaggtgatactcaaagaaatactgagtctcccactagaaatttaatatccctacgcttcaaatcaacgtaggttttgctgtgtactcaatgaagcaagtatacaactcgaactcttgctatgactttataagtttcttggaacttttc

SEQ ID NO: 38533 - DNA, 1821 bp, Cannabis sativa
ttgagatccttagagggcatgaattggaaccttgaatatcacctctctcactagtcactataactatatgaggagtcatgaaacaagtggtagggtatatatcccctaattgtttgaatattatttctctttctatgcaaacctacttttttttttcttctttccatttcattggccaagtgcatcacttcacaagctaactctctctttcacctttattaatatcagtactcctaaattccaaatcatatagagagctggggccaagaaattctgttcccaccaaaaaaagtcatttccaattttttcttgtgtatatataattcatcaatctgatcaacaatcatggaggccatcattatgatcatttctctaacagtttatcagtcaattcaactcaagcatttacctttatttaattgcttgtattagcttggaattaatatatacctatacacagaaattaatatcctatatatactatttactactagctatccatatattgagcaatataaataactagatactatattattgtaaatgccaaatagaaagaaacatgtattatttgtcaaatcaacaacacaactttatgtgacttaattaatataatatatttaataattatctgaatatgattagatttaaattgagtatgattattttcgtgtctaattaactaatcctaataatactatatatgcaaaacaaattgatacaaataaatcaattatttttgtcataattttttgtttaaagtttagttttaaaaaataatgaaataaataaagctagaagtacaatcttttcttcatgcttttttttttttattatttcctttattaattaacatgtagtaggtgctattagttagaaggtaatgttgatatgtaatcaaattgatttgtgctttggttggtggatttatacgtttgatggggttttagctgaaaaacaaggcaacaatcctcaattattccccattaggattgcaaaaggtgatatatgtaattatgtatatatatattaggtttaataatacatgctcaaaatattttattttgatgcatgacaatgtttgttatagttactattagaccaatataattaatgtgactgttcaaccataaaaatgtgatcaagaggacataaatccaaactataacaaagtgaacaaaagtgtaaaaacgaaaaattaattagcttgaattaatggtgaaaaatgatattttttattgaatataatcatcacttttacaatctcaaattacaactcgatcttaaaataatcaaacacacatgtgttccatttacaaccatcctctctattttcttggacataattagactaagaagatctagagtttcgtctaagatagagataaattcatctaggtgatgttgtatctgagttttgagtaattatgtggtctatttataagctttgatgttagtttcttcgagaaaagaataattagccaactaactttgttgcccaaaagccactaaggctagcttagtggtgaggaaagaatggaaaatactaataggaagaagtcatgagttcgaacccatactattaagctattaattgattgtaaaatatcattactctgcactcaaaaaaaaaaaaaaaaactttattgttgcccaaaaaatagaagtagttgatgtggcatctgatttagtgagctaattctctatttgctaaatgtgacaatttgttaataatcacataaattttttatgactaaatgtgatttttagtcacaataaaaagttacttgtgtgtaatatccagattaaaatagtatttaa

SEQ ID NO: 38534 - DNA, 1108 bp, Cannabis sativa
gccccatcaagtgcctcaggcagcactatccaagtggctactagccacttcatcacacccctcccaactattatccctttactcgataccaaccaacccctcataaggctccctacaagtttctctctaggatcaagtgcctaccactactataatatgggcctttagaggttgtttttcaaccctttttataaaaaagaaagttaaagaatgtaaaaatacccgcctgatacaaaattgacattgagaggcccttttttgataaaaattgtaggtacattatttatggagtacatttagaggcagttttagaattagggttgtgaagagtgagaagttctctctatgctggtcatgaggcttgcaccataccttcagttctttctttgctgtagtgtaaatttagcaacaaaatttaatataattaaataagtatttacaaattataactgctatattttatttggaaaattattgtaagaaaataatagaatcgttatctaacaacattattgaaaatcctacatggatttagttgcctttagagcatctccaacgtatgcaccaaatttggtgttacactatcaccaaatttggtgtcaaaaattatttcaactccagcgtaacaccaaaatttacactaaaaaaatatttcttattattatattaatgtttatataaaataaaatattatttttagtattatattaatttagtaaaatcaccacaattaaaagtatcttttcatagttgtatacgttatagttgtttaaaacattctgtaaaattttgagaaatttaaaataattgataatatagaatgcaatattcaaacaatctatttcacatgtgtataagataaaagagtcatatgtgcaacagaaaatttaaaccttgtttccggcgtgttaattttttttttaattttccaaaattttacagaatgtcttaaataactataatgtacacgactaaaaaaaaattttagattccgaaacaaacaagaatacatcagtgcacaaagtgaattttattgtaaaattttactaaattaaatttttaattttataaaattaaataataatataaataaaaaattaaaaaaaaa

SEQ ID NO: 38535 - DNA, 1603 bp, Cannabis sativa
agcactcgtccattgtcgaagcgtggtaattactagatgagcatttttatattgccccagagtattgtaaaataagtggaaaagctttgtaggggattcctttggggtgtcaaatgcaatagaagtaagttatatgtggcttcttgggataaagtgtgtttaccaaagtccgatggagggcttggatttgaaatggggctgattagatcagggcaattctctcgaagtatatttgggctgtcatggaaaaacatgaccttctctaggtcaagtggtaaatgtgatgtacttaaagggtgctaacttttaggactacactcttattaatgacacaagttggtattggcgcaaactatgtcatttaagagttaaattcagcaaaacggatatgattgcagttggaaagacatgtagattttgagcttcattgttgtataattgtcttttcaaacatggagtaacaaccatgcggtttggagtaggctcagccttcctaaacacatgttctttttatggcaaactgttaatgctcatttactgactagggattaattttttaaggttccatatagagctaaacatgttgaattgtccagtttgtaacattgataaggagagccaccaacacttattctttgattgtattgtctctaaaatggttgtggctaagatttttgtttggtcttgccctggccaacccaatccaccagtagtctacagtgaccaagaggtaaacaacatcttgctagtaagatcccttgagaaaaggaaaagaagaagagaccaagccaactcaagcagcatggctacccatacagagttaccgagcccgtcaacaaatagatcgaggaaagaaattcttcataagagaataactccctaaagaatattccttgacaaaaaagatcatgcaacaagcatgttcggactaaactgagaaggtccgcaccatgttacaagataacaatacaggtgtacacaagtcgggcgagtacaacgagaacttggagttggaacttctacccaaatattgaaatagggaacatccttgtaagtactctcactagccaacttgtcaattagttcatctaacgtttcattgtgtaggaacccataaaagagctagtaaccattactttttagcatggcctcccatcactcttcagtgatggtggttgcgcgataagctgcgtaggggtagccacatcgtaatttcaaaagcagacactaagctgtaagcttttgttttacgtgaaactaactatgtctaaaccacttgctcacaagattaactttttaaagttactctttcagttccacatgcgtactacggataacacctcaaggaagaacctaggcaaagtctgtgaaacttggtgaatagaaagtgaccaagagacttgcctgcatggtcacttgaggggcacacatgccatacaatgcatcgaaatagcacaaagaacttatgcagagaaattttaacacttagaataagctactaaacctgcctctaagttatggaggcatacttcggcttgacaaagtaaattcggacccttacatgtcaaggccataagaagatagccaagatgatcatatgtcc

SEQ ID NO: 38536 - DNA, 2301 bp, Cannabis sativa
ctgcatctgtttgtttaattaccatatatgacttctcatataatagtggcttcattattctctcatcataaatacaacacaaaatgtcatccatttaattaagattattgcaattaaaaaattgataaatgtaaattatcaaggtatatgagatccatggggaagggagggaaggaggcattattaaataatgagacatggaaaagaatataataatagtgtcgaataattttatatattttaatttaataataattaagataaatactattttgaattctgagttttgtaaattttttctaattaattaatttttcatttttttagtaattttttttcttttattaagtttataatccataaataataaaaaaaaatattttcaaaataatattaaattaatatcaatattttatttaatttaattttattctcaaatattgatatttcataaaaaaaaatatatatattaagtatataaaaaaaatatatagattaatttagtttaacaacgtagagaattcaaaaactatcaccaaacttgggaattgaaaatggtccaggttgatcaaactattcacgccgaactaattaattatggtttggaaccacagattataaattatatatgaataatcatatgcaaggccgaccttgagattcggtaggtcttaggataataaaaataattaggtcttttatttaaaaatatgtagtatttttgaaaattattaaaaatatatatatttttaaagaaaaaaatactttttttgatccataaactaagtagatcctaaatgcagacctaatcgttttaatccaagcaccccacgtaaaattacaagtgcttaataacaattattaaaatcaccatgtttggtctcacaattaattacattttattacttaaaaaaaaacacaaccaaatatatcgatcaatatgaattgtgagggtctaatagtgaggatctaatagggctgttgttgaagaagtttatattaacatgttgagatcctatccccactattttgactttttctggccacagagtcacacacacacctaactatatttaattaaaacatgttagtcatctcatctcttttgttttgagcttaattaactaattaattaattaagctgtgctaattaactttagttgatctgttggtcaatttattattataactaatataatatatagtcatggctattgtcttgtattatttcttattcaactgtgtaaaaaaattaattaatccaaatgacgaaagaaatacaaaaagatcagagagaaaaaaaaaaaggaataatgattagtgactagagaaactacttgatcttattcttacctaattattgtaaaaaagtaattatattaattatcatcaaaataatattatacataattaaacacaaatgatgttgcataaattgtatcagggtcagctacaaaaagtcaatatagtttaattagtctttaaaattttgcatctaaatcagatttaatgtcatacaaaaattattattgattaaactatttattttgttaaataacaaaataaattctatattttttaaaattataaaagtagggttatgagttcaatttttgacaaatattttttaatataatcaattaaatttaaaacaattcttagaacaaaccgatgtagaaaatgtaacaagttttatttcataacacttttagatcatgttattattaagttttattttgataaggtcttatttatttcgttttaaaaaaaaatacaagatttattttatgatttaaaaaatcgagttcaaattaataactctttcaaaatataaaatctaaaataatatttaaccaatatatataataataataataataatttatatatattgtaatatttttgtgaaaacatactagatggttagtatccagctgtccaaattcgattctctatagctagggctaatagtgattgagctataaattaagttaaaatttagacaagataaatataaattttgacaagttaatatcaaatgacatgtagcttaattatatctagctagttaattaatacactttggaccacttatatatatataataatttacggcgtaattatttaagtttaatttttaattgtagataaatatttaagttttactttttacggtaataatacttaagttatctttctaaaactttggtatgtccctataattgttcagtatcaagcagggtcggccctaaaatttagtgggccatagaaaaaaaattattttgggcctttatttagaaa

SEQ ID NO: 38537 - DNA, 2265 bp, Cannabis sativa
tgtttattttctatttagtgttgtctaaatttctccgacaacaaatagtattagttagtagcacgtctttttcttacaaaactatattatttccaaggaagcattttttgggaaatttacggtaaaagtctccaaaaagtttattttgatgcagattagtccccaagctcgataaatgcactaatagtccccaaggtcatgtttcttgtaagtccgttagtccttattttaacggatccgtttacttatttaaaaatgccacgtgtcgaaatattattggatcgaattataattttgatttaataaatattaaaaataaataaatatattatttaaaaatcataatttttttctcaggtttttttttctctgggtttctttttatttcttcgtcttcttcatctttcaacgattcacgccagccccgatccaaccagctaccaaaaacccaccacccaccctcttgatctatcctgtctcaccctctcaatctctcctcagatctcactcactccctctccccctctctcttgcatcttgcagaacccaatcatcaaactcctctcttaccgtcatggtccagacatggcgagcactctccaccatcaaggtctagtcgcagccaacctctccaccatttggtcagttcaacaatcacaaatataaactataatttagtaaagttgttcaaatctcgtcgacagcaagcgaaggtggtatgccttgtctgggcagcgacgagcttgtttggtgaaatctcgtcgatgatagaagaacagaagaacattccagctctggcatgatcgaggagaaggagagcaagagagtaatttggggctttagggttctcgggtattaggaaaactgagcagtggggccagggtggccggagcacagccatccatcatgagggttaggtgagactgttgtgagagttgggtgtggctgggtgtgttgtcgtgagggttgggggtggttggtggtgttgtcatgagggttggggggtggctggacaaagaagataaagaaaaaaattatgactttgaaattatttatttttttatattattcaaattaaattataatttggaccaattatatttcaatacgtggcatttttgaataagtaaacggatccattaaaataaggactaattaacttacaagaaatgtgatcttaggaactattactgctatttctcgagcttgaagactaatctacatcaaagtgaacttttcgaagactttatcgcaaatttctctttttttttttgctgaactgcgtaatatattaaaaacaagctctaaactagagcatctacaaaacaagtctagttgatcacaatgaagcattgtataagagcatctccaatcaagtgttaaaaatgtagtgtattcctatattttagcacacttaagaaatattactacttggacacatcaccatgggttgcttcttcaaggagtagaagccaatcttcattctattcttcctcatcgggttgggatctagcttgtagaagtataaaattttgtcaagagacggaacctctctaagctggtccttacagatgatgtgtcatcccgccaacaatctgtatatatgtggaatgagctggaacgaagccactcctactgtcgtacagaatcgtggaaagtaatttcagaaagagagatgggctcaaaattcggcatggtcccagctccagaagctaaagtcgtccacgcaagaacaagatgacttgtccttcaatgccagcctgttccagaacaagctaaatatatatatttaatgcattgtgatctcgaaacaactcaagaattttaacaaaaactatttatctcgtgttgataacgtgttataaaactattattaatatactaaaatagagaagaagaaaagaagataaagagaaaaagagaaaaagaatctgaatttcttagtaatttagagtgaaatcttttttgtacaaaaatataactaaacaaataaaaaattaaattaataaagtaaagagaaatataataataattatgatattaattgatttgagtaatttgaatatctatatacattgaggaattactttatatattttttttttaatttttttttttcaaatttgcggtttgagtttttaaagtgatttttccaggagtttctatgtaggttgctatacaatttttggttacgatttaggttgttttgctagttgcaatacgggtttctatgtagaattccgtaaaaatgcaaaagaaaaaaaa

SEQ ID NO: 38538 - DNA, 2187 bp, Cannabis sativa
tgtcatagaatgtaaagttgaataaattttaagaagcttaatcgaaaactgaggtgttttgcaatagctcggcttatgcctcgaggcaaaccaattagagcaaaaacttcattacatcataagattcataaaatttatagggatacacataattgcataacacaatcataaaatttatgagattactagttctaagtcataaaaccataaactaaaagttttgaattaaaaatcctgattaatagagcttaaagtctaaacattttaaaagactaagaagtcctcattatcatcactactgagatttgctaaaaatggaggctggacaacataagaactgtagagtaacacatatgagaggctcgggctgaggctgagaacaggggcagggaaaagatgtcgtttttatttggagtttgggttaatttgtgttatataaaccaagtttaaaagccaaaaatgtgttaaaaacatataaaaaaacaaaaggccaaataaaagaaaaaactcactcagaaagactaaatacattaaaagcaatgtgagtgagcctcaactaaacctcaggtattttttaagtgtcttacacctcaccaaggcataagcctcgatagctttttcaagaacaggatgtaatcggcaatatgcagaaaaataagccacttggaaagagaaccaaagaacttgtatagttactacttaagagcacattataagcacaaaattgagaagaagctatattttaggtagttgggtggatcttcaatactagagattagcacctttggatgcaatagtagtcctagataatcctctatcatcatcatcatcatcttctgttgtataagaagatgattcctttcatttcttgtcaccccatctctccaataataatgtttttgtatcaaataagttttaaatacaagtactaacaattctactccctcactctaaattctctagactgtaaccatggcaccacatagaaaagcaagtaccatatcaaaattccacacacaaaaaaaatggatacaataacataaccctgagaaactacagccttaaacttcacatctcaataactgaacataaccttcttctcaacccaatccacaaacagattgtttaaagttatcccttttcatgttcctctcccagaaccaatattatatatatatatttatatctttgagcactcccatcaatgcattaccaaaatcttactttttttttttaatatatatttacctaatacatttaggttactccacacatcacattctctatatttttctccacatcattaataataacacaaaagcaaaagttgtaagaaaatatttgaaaatgtttttaactaatgagtaatttgtagctacatttagctaaacaaaatagctaaaaactactaaaatatagaaaaatttagctcatatgatggagaagggaatcaagattttagctttttcttttttttgttcatctaatggatgctctcccataaacccaatttcgaaattaacataactatattacttttgtgaagaaaaaaattacatactatatgaacaaatagaagagttaatataaataacaagattgaaacaattgaattcaattcaaacatactctgttcctttctgcctcaaaatcctaaactgctcaggcgagaggattgcctgccattcctcctcggatttctgaaccgacccagatgcggacatggccacaacagtggaaccacgaagcccacgcttacttatgcggtgaaaagagcaagacccaccaaacccagaagaagaaatggaaatgggattgggtttgggagaagagagtagtgagaaatggtgggtgttgttgaagaaagagttagaaggagagagaggcctagtaatgtttggtatggatttggttataatggggttgaagattgggacgatggctttcgaggaagaaggaattggtgaggttctgagtatgttaaaccccatctcaaacaacattctagaacaataggactattatgtgatggtgcttccccattgtttggttatagatattctcaattatgaatgaaaataaataaataaataaataagactatttttctataaataaataaataaagttattttttttaaaagaaatttcatcaatattataaatttataaggtacgtcgccaaga

SEQ ID NO: 38539 - DNA, 6831 bp, Cannabis sativa
tatatataaataattaataaaggaattcaaaggaagggaagggacataattacattatatttacaagtccattaggaattattgcatgtgttgttaaattagtaaaagttatattaggttttataccctaattaaataagaggggattatataattaaatatatatatatatacatttgattacttgaacccctgtttttcttttgtttaatttcacctaattcacagactatacatcattaaatatatagtgtataatttatcatataaatgtatgaatatatatgatatatacttgcattttagatgatttattgttcaattacaataataataagaagaagaaaatggattatatatatatacctggagatggcttttgacatgagaaattttcagtcccttgacactcattgtctgcaaaattcgcttgggagttgcctctgaaaattagttaattatttttaaaaattaataatacagctttcatatttatatatatataaatataaatatatatgtatgagatcagctcgtgaccattatagtcctacaactttgatcacgtttataatgactaattaatttaaaatcgttcaatcgattatatgatgaatgattaagaagtaataattcttaatagttaattagaatgaaaattatatatatataatatatgaattacgagactagctagctatatagtctaattttgtgaaacagtttcagttattaattaagacctaataattttactctgtacccaataatatatatacataactgaggaagattaggtatctccactaactaattaataatagttattattttaagtaacaattattctattaaatattttccatattgatggcatacatatactattgatggcatacatatacatatctatatattatacatatctatatatatatattaatatctatatatatatattaatatatatatatatatatgaatatctattaatcatcaagaggacacaaaattatagtattacagagatttaaactgtactatatttgtttaccaatttaaattactaagtctaaactatatatatatactatacttaatttcagtcagaaaagatttcttcatctattacagttgtctaccaagatgtcctataaatatatatatacacacactcattaatttaaattaatcaacaaataataaaaacataagcttaattaattaattaattaattatatatatatccatctagctagggtttactataatttctttctttattctttttctaaattaataactaaaattaaagaagatcaagaagaagacatgttatattggtgagaatatttatatattattaaaattagcttactgtgttttccgccgagaattcgaacagaatcgacaaagagctcgtgaagttggggtgtccatcgaagccgtggaaattcagatttgttgtattttctcactcccattttctttcccttttcacccatttaatttatttttctctgtatatatcactttttatacatatatgtataaaaatcaatcattcaaattaatatatatatatatatgtgtgtgatatgatacaagagctctgatgatcaatatgaatatataaatatacttaaaaccaaacaaaagcatatgtagatatatattgctgagtctgaagccatagacttttgactgtgaataataataataataataatatataaggcctagctaggaaggttctctaattacttctattttattttattattaattattatatacatataattaataaactaattgtcttctttcgccacgtgtgtattttatatataatattataagtaaaagaaaccattcgatttgtatatataaagaaaaaaatatcgaattaataggaatattctttgttaatttagacatttggctacaattagtgtaattacgtagaattttcagaaatatatatgacttaattaactctaataatataaagtgagtgaaaaaaaaattaattataaaaattaacttttttcttagatgttattatatgaaaaagaaaaaagttttagactttaatattttgatataagagagactttcgagccatcatcattcaaattattattttctttcttttttggtagaattcaaattcttatcttgcagccgcatttttttttaaccaatgaatttcaacattaattattatgtataaaagagaatttaatatatataaattgaaaaagaatttatatagtgtattcacatatagctagctactagctagattggttcatgggattttccaattcttatttcttaatttcaactaaaattataccaaattttgtggtcataaattttgacttttgatccagctaattaattatataggtgtagagatcaattctttcaaaaattagtaatgaataagaaaaatggatgcaaattgcaatagcatgcgtgcatatatacactttctttgaaatagttattatgtgatcattttgatgtatgtcatatataataattacttagtggaaacagctataaaattatcataaaattatatatgcatgtatgagttgtaaaaataaattttatatgaaaaaaaaaaatttatcaaaataatttttttaaaaaaaaaatgttataggctttggatatgatgtagtgattattttgttcttattgcaatttttaaaacactgacgcgtattaatcgatcgaccaccatatatatatatatatatgtgccctagaattttatttgataatttgattaatgggttactagctacttcgttagtacttgaatgtgtttattaattaccatcgatatatattagtatgtacatttatgaaacatgtatattatatacattttaccaataattattttcaatatatatatatgcactttatacatttatattaaactgggttgtttagttttatctgttttcactttttttttcttaaataactatatatgttatagttatttagaattatttataaatttttaaatatttaaatattttattgcatacttataattttttttttcttatactagctagtaactttatatttttgtaaactatgcagaaatttttttgaaaatataagacagtccttaaaatatataacgtaacgtgtgtgataaaaaaaaaaatagtctaaaaaatataccaaaacaacattttaagagagtacatcttttttttacttaattaattatcactatggaagctcgttttgaattagctcattaatggatatctaaattttattctctataatcatttgggttttaagctaaaagattctcatttctatgttatttaaaaaaaaaaattatctaaaaaattaaaaatttgattctatataattttaaaaattaatattattcatatgtatatatatgtatattacattttcaccagcccttaattttaggggttggtcctgtcactgcaaaaagtacgttatttaaatcttaagagatcattatagctagttggaattaaatttataattgaaaacttggctaatattacttttgcaatcaaccttgaaaagaatttatagcagttcagcaaagtgatcatgtgtggagcacaaagaaaagtttgaaaaactaattttgtcagtatttcagagtggtatgttgagatacaagccatgttctatgtcatattttctacacctaaaatgtatcatgattttggcatcttaattaattattcaactacatcatacattatcaaataaaaaaataattttacaacttatcgttgtatgtaatatactatatatatatatataaatagtaattaaaaacagtcattaacccatttttttatataatatatagtattatatatataatgtaatatctccgcttcaactttttgttggatatttttccagctcttattcacatgtcatttttggctacttatttatatatgtagtaccaattaataaatttaaactatcttcaactatagtcctgaacttacttaaaaatttaaaattattacacttgatcttcagaggctaataagattgcataacttaatatttcctcacacgaattatgaaactactaaatgtgacataattatctagtaaattttgcttggagtgaaatgagttatataacatacaatataatatatgtatagactagatcttacactgtttcttcgttattatataacttctaattaattattaggttttgttttaattagttagggacgtgaattagactacatttatatatatatatatatatttatatagcttgctcgatctatatatatacattctcttgctaacgtgttctaggaaaatatgtataatattttggaattgaaaagtcaagaataactgtagcttgtaggagaattaaatggcaaaaagaaaatggtaagagaaacataaataccacacgtttatataaatttgacatgtatatatattttttaatgtatagatatatattcctttatcctttttgttaacccacagaattatcaattatgatatatatagccattttgtttggtctaccataccaatcgttgccttctgaaatttaaatacaatattaatattactcaattaataacattcgagaaaatcttgtaaaggtcaatcaccattatatatagtttatatctatgatcaattaattgatagagcaatgagtaattgtttcttaaagttttaatgttagagttagctagttggaatttgttgaaaattaatcaggtgcacccgttatatatgtgtatgtgaaatgcatgcatgaatttatgtcaagtactagatgtgagcatgaatttatatagtttcctatataataacatttttattatataatatataatagcatgtatgttgttattataccaacaagatcgatctatgtatatacattatgattcataattagggcatatacatttatgaaacttatttgtttcctcaaaaatgtatttaagatatatgccctaattcatattaattatgtgggtaataagatcgttataatatatatttactccttaaaaagtggatagcaaaagagaattttttttataacatagtcaaaggatttttataaaaagaaaaggagagaataaacacacctaattaaaccaatctttatttatatatttatatctctaatatatatatatatatatcaacatcatttcaacaaaagacggtgcctacttttggacccatctcttgctgtataataatatataatatatatttatttatgtatatattgtaattaaactgccgtgttcaacacttcactaccagtctactacgtactatagtatacttctactaattaattacaaaaattacaatacaattccgaccttcaaatttatgcaacaagtttaggcagatagagagtttattattatataataaataataatttagctaataattaattaattattattattattattatagctagcctttgcaaagactttggaattcttggtagatataaattaattaattagtggactaattaataatataataataataatcgcagttggggttggagttgggggatgaaaggaatgattcaattgataattaaaacacatgcagacatatattccagtggatcatgtgcatggtaaaatacttgtaccaacattttggaaccaaatgtcaaaggatgcatatgcatatgcatgcctttaagaatgagaatatatatatatgtattatgtatatgatcactctctctcacacactactatatactattagtactactactgcttaaatttaatatataaatatataaaaataattgatgagttggtttccattaattataccatgtatgcatgcatacacatcatatataaaaaaaaattattgggaaattttaaaaatatttttttaatgttttatttataattttaaaacttaaaatttttatttactaactctcaaaattttaaaattataaaaatatactttactcactaaaatataaccagaaattaacttcacaacaactataaattaattataaataaacggtaaaacaacaagaaaaataacctcataaaaactataaataaactataaaataacaaaaaaaaaataatttattatttttagtgaagatatatttttataaataaaaatatttccttgttgaagtatttttataatttttttttcaaatttttttatctattttgtaattttttttataatatacatatatttttaaaggtaataatttcttttaataagaaaattggatgtaatctatatattacatgctgaaattgcttatcaagtaaaatcaataaaaataggctaaccaaattgtttacaataattaggaaaaaaatcttcacaacaacgacttcaacaaaaaactcatatgtcattagcagtgaagcatcaaaagaatgcgaagaatgctagattttcttcctgaataagtatgtgacagatcacacctatcaatggtcatcagccaaaaaatttccaataaaattaggacaagacaccctaattaatttaaactagaataaagaaaaataacaaaaccaaccatgtcaataaggacaaaccctaatgaaagatcaatctataaaacaagaaattaataacaatcaagggatcatccagatcaaactactgagtagaaaaaccttactgattagaataaaaactattcctcccattaaagaaatttaaaaaaaaaaggattaaataccatcacatcagacgtt

SEQ ID NO: 38540 - DNA, 2483 bp, Cannabis sativa
  modified_base (2035)..(2037): a, c, t, g, unknown or other
  modified_base (2286)..(2295): a, c, t, g, unknown or other
cgatcttacttatcactttattacttgtttgactgcatatacttgcgtatataattttcacaacacccattcaacacaatcatacgttttacttaagtcaagtttcaaagccataaagccctctttgcctttgcgtttacgcttcaagtagtgcataacctcaaaagcaatcatgatattatctgaaatgagatggctcgggataaaggccgattgatttttggatataatatgatgaagcacaatctttaaacggttagcaagtaccttaaagattaccgtgtagaggatattacagagcttcttatctatgacgatttatctcatgtattacagttagtatatgagataaatcgtcatagataagaagaaataccataaacaatttaaaaattcatatataaattaatcttgtttaaggttataaattaagaaacatgttactttcatgtaatcaaaacaagtttttcaatgaaaaaaccagttacgaataccaaaatatataaattttgcatgctttgtattttagtttactgtatggaatatgaacaaatccaatataatacaaaaactaaagccaatcacaaacttttcaaaagtttcaagactcgactatcaatccacaaccaaaaacagttctctgatgaaaaaaccgatttccaaatgaataaactagtttcttaatgaaaaaatttaatttcttatgtttcatatttatttaataaaaaaaaatcaaatatagcatttgaaaaagccataatagaaatatagcataaaaacacaataaaaaaagaaaaaaaatagtcaaatcccataaaaaaataggtaaattaaaaattgccctattttttaaataatattttaaaatacagtattgagtgtaaattctacataatattgggtcatctaaatagggttgttagatcttaataaaaatattaaaaaagaactttatacaaatgctgaaaaaaaaaaaatcctaaaagtttacatagataaagttttgatatatatatatagcatgtaaacttaattgtataaaatatgaattttttttttttttaaaaaaaaaaacttaaaatatgggataaatcatcatagataaaaaggtatatcataaaaacttaaaaattcatataaattttacttctatataatcaaaataagttttgtgattaagaaattagttaaaaataatcttgttaagacaatgaattaaaaaacatgtaacttccatacaactaaactagtttctttataaaaaaacttgttacgaataccaaaatatataaatttcacatgatttgtattctagtttactgtatgtaatattaaacaaatcacacattaccaaaactaaaaccaattacaaacttctcagaagctccaagactcgactgtcaacccactacccaaaagagtttcttgatgaaaaatcagtttcatgatgaacaaaatagtttcttgataaaaataaccaatttcttgtgtttcagatttgtttaattaaatattgcatttgaaagaaaagataataaaaatatagcataaaaaatacaataaaaaagtaaaaattaatctaatcccataaaaagtgagcaaattaaaaactgccatatttttcaaataatattttagaatacaatattaagtgtaaattttagggtgttcattaaaccgcccaaaccgcccgcaccgcaaaaaaaatacggtttgaaattctttgtggtgcggtcgcggtttaaatttttcctaaaccgcgcggtgcggtgtgtgtttgcggttttgaattgttaatatgcagttcaaaccgcaccgcaccgcatattataaaaataacaatttttatatttatttaggtccaatatgtgaatgttcaacttaaagtctactattatttcaaaaaaaaacttaaagtctactaattattgtattgttgacacttaattttttttttcatatttgttttcaagcgttatggtattttgacaggttttgctcaaagtttgttatatttgtgatagtttaattattnnntgatagtccaaaccgcataaaccacaaaactgcaccacaccgcaccattttttgcgatgcagtttttgcgggtttttaatttcgcggtgcgagtgcggtttgggaaatttgaaaaccgcatgtgcgggttggtttgaaaaaaatagtcaaaaaccgcaccacttgcaccgcgaacacccctagtaaattctacataatattggcccatctgaatgggatcgttagtgttaaaaattattttaccaagannnnnnnnnnctaacatgtatgttgattatataactataatcaaactatgaaattcctacaaataataaataaacacattagctagggattaagtaatccttacagtgatgacagtggaataatatgactccttctgttcagatctctaacccttgattcctgtcagtagcagagcattatcaagatctgaacctaaa

SEQ ID NO: 38541 - DNA, 1014 bp, Cannabis sativa
  modified_base (969)..(988): a, c, t, g, unknown or other
gtcacgagaggaagatcccccactaagttatttttctcaactcgttactttttttgatgggatttgggtatctctaaccctatcgaagcattttccagtgattttggtgtttgtttgggctaacgggtttgacatctgttatctactcttcaagggggttgttttgatatatactacccttatttctggaaacatttctggtacactaatttctactgccaccaatagttaatgtgcactgcttaggtgacctttcaagacttcaaatttcaaatatgatcatgctatatgtcgtttgacttggtttaaagagtagattacaatgatgtatttatttgattggagaatataagacaaagttacttttggagtgactaagctatttgaacttaaacatcaaggacttaggagcgtctcttttggggaaagcttgacgatcctaaggaggtatggactcaactatatattggacttaattttatatgtgtcgaatgatattaggcatattctaatttttatgatttataaaatatttaaaaaattaaaaacttaatctacaaatttgtttgaactattctggggcactgattgccagatatattttgtacgaatattttgaaggttatggttttggatttattcaaattgcagtcgttatgctactagatttcctaaaataaaaaaaaaaagaaaagaatatgttcttttgacattcttgattgcctgtttttggttatactgatttcttatgagactcaagttgatcatagttttgtgcatattgttgtttcacgacctagtctctatgtcatcattggtagatcgggtgtacactcatctataggtgaaagacttagaatatgtacaggaagtgagttgactttgagccttgataatatggtggtcattaggcgtgactactgttggaaatattttaccaggatctagattgttgggttttatgccctnnnnnnnnnnnnnnnnnnnntaatcagatttgcttattaatataga

SEQ ID NO: 38542 - DNA, 1375 bp, Cannabis sativa
aatacagaggttaattcctatgtatcagaaataaattttcctacagaggagtttttttttttttgaaatatccgaaagaggagattgcaacttcaaatctccttctccaatataaataatgaaaataaaaaacaccaagattgttaattttccttttatatatgagattgtttatttattctaaattaatatgaaaataaaaaaaaataaaaattaagcacgtacattgcttacaactaatacaaaaataaaaatagatatctaaaaagaatatttatatttacatatacataaactataacatacctcagaaatcacacaatgcacgtgagcaaaatatttgcagtcgccacaacaatatatgcgaattcgtggatttctttctgtttcgcaaatatcgcagttatattcaccagaagaatcttcaatgaatgaatcaacaagaagtaaggagtgcacatgaccttcgtactttatgatacgaggtagtggaccacataataaatggagcttgaaatcacaatcacaacaatggaatctgaaagactcagttttttggaattcgttcgaaacattaatggacatgaatgaagactgaaaacaagtattgtaaatattgcattgttcaaatgcaggagacattttcttgacaaagaaaagaagatgatcatggtatttatattttaagactccaataacattgcaatccatacacaaccgaaaattacattgttgacattcgtaataaaaggctcttggatctttacttttacaaagaaagcatttacccaagtagaactttgtcatacgaagggaaagacaaccgtgattaggatgggcgaatgtttggatttgttgttggagttggtcaatgcattgtttatgaagataatatttacatctattacaaccataataaacttgatcatctgatggtgaatctttagattgacatgcaaagcatctaacatgaatatttttataaatagtatcggttgtgtcaacaagtagtaacaagtgaggatgagtagaatgttggatgcaatgtttttgaccttgaggacatgagtttgacattaaggcacaatccacatcgaaagatagacgacattcaatacaactgaacatataactctttcgagagtattggccacaagaatcgcaaagagcattttttggggtaagagatagagggtggcgaggatgaaaagggtgattaattttcttaattttacatgacttgtgaacataatatttacatgtatcacatacataaaatggagctacaacagaagactcgcatatttgacaagtaatttggttagcatgaccaatctcactatcgtttaccaacaaaacatgttgctggggacaa

SEQ ID NO: 38543 - DNA, 1861 bp, Cannabis sativa
aaaagaaaatttgataattctaaaagtttattgggaaaaaattatgtttttaataaatcattaaattttattagtagtagctaaaataatagctcgcaattaatcgaccaagattagaattaaaaaaaataaattaaataatcagtcttctaattctcaaattgtttgacaaaaaaattttgataaaattagatgaaaaaaattagacaacaatagaaactgttacagtaggttcgacctcgtaatttgagtattatgtcaggtatgtaactgcactactaacaaccccttcactcaaaaaaaaaaaaaacttgttattctcaaccactaacagcgatttaatggcgagtccttgaagaacgaataagaaccaacaacaaaacgaaacaaaacaaaactatatcacatagacaagtctaaagcaaagtatgtcacagagataatactaaaacactcaaaatcatgtcacaaagataagactaaaacacttaaaaacaaaaatcgaatgacaatagtaaaatacaactccgaccaaaaaccacacctaagctcaaaaaatgtcggcagacctaaccgaaggaaaaaaaaatttggaaaaaaatataaatataatataaattgatttaaaattttggatcattttgtatcaaaattatccaagaagactgggaattattgttcaattttttttttttttttttggtgtccatctcacttgttaatgatccaatatatttgtttggtataaatttagtataaatcaataatgatggctcctctcaccatttttcttacaaaattggatatatttcattaagttgggattatatttttcaataatgataatttatactctatatttcataaaataaaacataataatattattaaattcaattttaatcaaaaatagaataaatctaaaatattaaaaaagctatgttttaaaaaaattgtgttaaaaatatatttggtaagcagtcaaaaaaaacaactttttgaaaaatttataaaaaagctacagctaaaactaaagctagcttaacccaactttttcaaaaaaaaaaataaaagactataataaatttatttgttctaaaattatatttacttatttattatatattaaaaaacaaaaatatctaaaataaattaattataataaaataaataataattaaatctcttatttaaaaaaatatatattttattttaatattaacaaacaacatcaacttaaaacttttcttatatacttgattttctgatttttttttttacatttgataaaatataatataaaaatactataaactctttttatcaaatgcatatatatttatactttgaaaaaatatatataaaaaaaataaaagtgttatataaaacaaatttttatgtatttatgattaaataacattattattattattattattatagatcttaacaacttatagtactttaaaaatttataatttatcaaacactcagttctacttttttccataattttgttggttttttctcagcaatattttcccacagcacttgtgccaaattaactctaattctttctaaccaaaaaattgcatttttcataaccctaataattgtgatatgattaataatcctaactctagaattaatcattgactaaaatcaaactcaaaattattattatattatattttataaaataaatagatcaatcaataatttttacaaatccttttttcacaataatattatatatttatatatatatatttgaaatcatagtctttcaattaaataaaaaattacatgcgtatctggctaaatcgcaaaattcgcataaagagaattaatcttaattcac

SEQ ID NO: 38544 - DNA, 1764 bp, Cannabis sativa
tcaaagtttaactggaagcctactctatcttaccgctacaagaccatatataatgtacgtagtgagcctgctatcaagatttatgcacgatcctagtcaagttcactacgaagcagccaagcaaatctttagataattgcaaggaataaatcaaactacacactaggctcaaatgaattggctacattaatagtgaatggacaggatcagttgatgacatgaagagcacattagtatataccttcacaattagatctagaatattttcttgtaacatctctaatgaatggtataagttttgtgctaaatttagttcaacaatgagtcattgctatatttggcaaaaattttataattatgctcaaatacactaggggtaaataaattttattttgataaaaagttgtaaaaagacaataaaattattaaatgtttattgataaagtatgtaaaactatattaactacataaagctattaattatattaatcagtggtaaaagagtaaataaaaaaatgatatttattttggtgtacaaaatttagcacatgccatattttatgtaaaatttgacataatttttagcatgtgctaaatttggaccatattatacaccgctactagaattcaattttataaatatgagataaaaaaagtatatacactatatttatagcacactattagagatgctcttaggcatcaaagaaacaagtaactatgacacaaacatcaacaaaagtagaatatattgcaatagcaattgactacatggcttaaaaaaattcttgtagacatgggagagtcataagaagaaactacaaagatctactatgataactaatgaactatagcaatgataaaaaaatcggtatacaaaaccaataatatatgcaaatcaagtatcatttcattatataagaggaaacaaagaaagaaatagaaatcaaacactataaattaaagaacaattaacagacatattcataaaagtactctcacgaagaaaagttcaaactattttatgacatgattgaggttactcaaatgtgtaataaggacgagtatcaaaagtttctatatatttcattacttttgtaaaaaaaatttaatggtatgtagaatgctatataccctaaaacaaagcctaaaaaaatatagaatgctacatatatatacatatatgaatttcttaaaaatttctagaaactttgttgtcatagaaatttctagttatatgcttaaaagaataatttagaataaattatatcaatcacaaatcaatgctggtttggtatgaagccaccgaccttaattactgtataaaccactttaagtggatgaaatatgcaccgtgaaactagaaaggccattagtattaaacaagcctcttacttgactatttaactataaatacatactctatttctaggatgtcctatctcactatatatcatcaacaacaagtacaacaagccattttatactagacatagtctcccattatcaatatacaatctgtgcaactacactttcatcatttagtaaaacaacctcatctaattataaacactaatatacttcaaaaaaaaaaaaaaaaaaaccttcatatctaatgaaatcaattctaaattattacaaacaaattagacgcgcgacatgagcaatatatatttattataacaaatttttacaacaactaacaaatttaaaatatacttaaatttgagcgtaaaatgcatatgatagaacagtagctagaca

SEQ ID NO: 38545 - DNA, 1540 bp, Cannabis sativa
ccttagaatgattacacctatattatttgatagtatatatattaattttccacctcatagctcagatatccaacgtatttaattaggaaaatcctaattaagctaaaagctacaggagttggtgaatatttattagtgtattttaatatcgagttccacattattttaatttaatgaatatgtaaggaaccgtactaaccaattacaatgtaacatatcatattaatatagtttacatgttggacactttagaatatctaataggattttatgtattctaataatttaaaaatacatacaatatatatgctaagttacacctgattataaactctaatacatgctcgttttcatgaatatattttgatgtgatgtgtacactctaattgttcttttgtcaaaaaatgataagttggtttaaatatattgatttcgaggtggaatggtgttagttaagagaagatttaggttaaattttaatatcgtgtacgtaatgccaacttgatagtgaccaatgaccatgagccagaaaataaaattgaaaaaaaaaaacaactatatgtaaacacccattgaaattaaactgtttttataatttctaccataaatggtgttagttgacaagaaaagatgattgatcttgaattacattctttagaaggccaattggatttggtggtgtcataaaaaggtttcatatgtcacacgccgttttcgttaatgtaacagttggaagacaaaagttgtgtgaagaataaattattgctttctttcttctgttttaagggaaagttgtagcatattgactttttacatttatcattttcttttcaatcactcatattcttgcataaattcatgtgaagttattaatttcataacattcttacctattgtgggactttaattattaattagtagtttatgtcaaacttctctgtggacagccctcaattggctggattctcaattttaattctttaattctttagttctttgattttttatttttttttttaatttttgtgtgtgtggaaaaaaatggatttccactgtgggaaaaaccaaagataataaattaatatttttaactttaaacatgtgggtcaactcttggcccacgcagcctaatctaagtgttatcgttaggaacaaacttcatgttgaattagttatacaataagaataatagttacagaaaaaattctatatgaaattaactatttttgtttttaccttgaaaaaaaacaaaaggaatggagtacaaaacaggagaaattcgtttcaagatggtgtgtacggaacaaattgcccaattcctccaggcaagaacttcacttacaaactacaagtgaaagatcaaattggaagttactactatttcccttctttgggctttcagaaggctgctggtggatttggggccattaaagtgctcagcaggcccagaatcccagtcccatttcctgaaccagctggagattactctctcctcattggagattggtacaagtttggccaccaggtatttataacttaa

SEQ ID NO: 38546 - DNA, 2778 bp, Cannabis sativa
  modified_base (2745)..(2748): a, c, t, g, unknown or other
taatttttttaaaaagtgtacatttactaacttagttaccaaatttagggccattttgcatctcaacccaaaaaaaatattgtttggatattgttttcttcgtagaaacaacgtaaaaattattgaaaaataattctttatattttttgaaaatatgtaaaaatatatatttaaattggtaaaaatggaatttttttgtcttttttaggtatcatgaaataatccctctaaaaaatgcttaagattttgaaaaaaaaaaaaaatgtacaagcataaggtataatcataaatataaaatttatttttctttaaataaaatatacaattttgtaacaatatttttatttctctttttaactattcacaagtttgtaacctcatgccacaattctgtaaacaatttttacaaagtactaaaacagattacaaattgttaaatgtatatgagtagcaattgggactaactggaagaaagtaaaatttgtttaggcagtgagatcagaagtgttgaagaacatgtttgagtcagagagtcggttcaaggctccagcaacagagattgaaacagtgtgggagatgaaacatgatgagttggaaactctgctggagttcttgtacaatggtgttgtatcagaagacaagatgaagagacacgtgtacgcattgtcattggctgcagataagtactacatcccctacttgaggaagatctgcgagcgccatttggatctttatttgtgtttaaccaacgctttagacattcttgaaattgctgaggtttgttcttaccccaaattgaaagacaaagccttggcattcattgttgaaaactcctcacacttcgtacatgctactggtttttatgactgggctcttaagaatccacatttgcatgtgctaattaccatggctatggtcccaaaaactaaaaccaaaacatttcctttttagagactaaattacataagaaagagttatattatttttccttttattataatagaaatttgcatttatataatatgtatgatgaagttaaattttgttacatgcaacaaatcaacctactaaaaaatgagatcatgatcacctcttatttatactaggttgatcttacgtgtcatacacgtataattagtttttttttttttaattaactttaattatgtgatgttaagtaaaatacatgtatgtttaatttttttaaattaggtaatgcattttttttttaatttttaaatggggtttgaaatttttatctttgaggaaaaaaatttagctattactacattagtgtatcatttgaataagattatatatatacgtatttttttaatttttgaaatttttttaaatcaggtaacgtatactatacatattcaattcactccctatacagaatctaggtctttcacctacaagtgagtgcacacctgatctacctatgatgacacaggtactaggtcatgaaacaacaatatgcgtcgaatatgatcaacatagctctcattagtataaccaaagcacacaaataataagaataacaaaataacatattcctttttattttctaaaaaatccggtagcataacggatgtattttgaataaaccgaaaaattataacccgcataaatatttgtaccaaaatatatttggctctccgagccccagaacagtccagaaaaaaaatacagattaagtttttaatttttcaaacaatttacaaatcataaaaattagaatatgtctaatgttagtcaacacatgtaaaaatcaagaacaataataaagttgagtccctacctctcccaagtcgttaaactttgtccgaaaggcaatcttaagcggttcacattaactatcgatggcggtaaaaattgttgtactagaaatattgccaaaaataggggtagtatatatcaaaacaaccacattgacgagtagctccaaaaagggacagagctataaaaacatcactggaaaaagtagcgagttgggtgaaatagcttaacataggttgttctcctcgacgagttgagtctagtggtgaagacgacttgtcaaatggacaacggaggtgggcggaaaatccgttcaaagtcttagccttaaaactttgacttgcgaacaacaacaaaatgagcaatgtcgcttggaggttgaggtcgccggcacctaagggtttgaatagtctgacgtgtgggcccggatgtttgtcggagatgggtcacttgagtcacgccggtgatggggttttattgagagagtgtaatgactgcattttagatatcgattagtaaaggcaattagtgttaattattgatatttttataattattcatgaatttatttgattgtgggtttcatttttagtagtgggcactagagttataatttctcaatttcgaagattttattaaactctagaggctctgcttaggagaatgacttaatggtttgcccctagtggcatttttgtaaagacaagtttgtaaccaatcttagttttttcttatcttaaatgccttgtactatttttattcgaacataatacaattgtatttgcttgcgttattattcacaatgtaaacaactatattttgatcaaatatacagtacttttggatttttctattgctcgtaatcttcttgtttaagtagttagtaatctaccaaactttaggatttttcgagcggttgtcaattctgcctcgcaattgtagttataatctgccttaagcaannnnaaatatactttaaggattttatcactttgt

SEQ ID NO: 38547 - DNA, 3620 bp, Cannabis sativa
  modified_base (2177)..(2180): a, c, t, g, unknown or other
  modified_base (2359)..(2363): a, c, t, g, unknown or other
cgtaaattcatgagtgattttaatcactttgtaaaaaaaaaaaaaaaactaatgtttatacatttaatgtgaataaacaaaatttcagattaaaattgttaaaaaaatctgtaattataaatataactattagaaacaaattattttaaaaaataatcctaatacaatttgcgacgatttacatagcttcggagaaaattttggccaaaaaaaaaaagttcacacaataaatctctataattattacaaaattgtttaattatttatttttgagtgtggaatcaattataaagtcacatttctatcttttcaaaatgatgaccacatacagtcactcccataatcccaattgctttaaagatctctcttcaaatgaaaataatggctttgttgccccatcatcaatgaggatgagaaaatcatttgatgacaagttttggaatactgttcttttctcccacctagctccacattgaagtgacttggggttcaataaataaatatattcaacaatgttattaaaagtttgaaaagaatttaaaaaaaaaaaacaattttattaaagttgatggatttgacagaacttaatgtcactatttcccaataaattgagtgaaagactgcttccattagtggagccataaagcttttagaaacaagtgaaaatttttacatgtgtttgtaaatatatgtatgtataggtacgagaactactacttggttttatacaccagcttcgtttaaatttaccaaaagagcccgtaacgaactagtagtattaatgtgagagctatagcttcccctgataaaatgttgttttttttaagaaattaaatgtaatttttttaatttgataataatagactaatattatatctaaaattcgactacacttcagagaatgatacgtgtcttacagtagaatatgaaccacctgatataatgaaactatattatctaacgcgagaaaaaaagaatacctcgttaaatatatggttaataggaaatattcataactcgctgactatatagtcttaagcgagacaaggatagaagactattagaatctatattgacgagacacatatctgtctcggagtacacaagcccaagaagataattcagttatttaaaggagtgaatacagttatgcaaagcaacatcgggttatgaatagcgagacaaccaccttacaattctaaagaaacttgacaaggcgaatgatctgcacttagcattctttccacattataatagacaaggataagcaattcgaaaataagcgagatacaattgtccatatcagcattaaccatttataaagataagaataacaagcatttaccttgttatctagtattatccaatatacgatttaaatgaaatgtgggaattaatcacgtttcattaacgattatattttgaattaaatgtaaataacttccaacttatattcctataaataggggcagattccatagaaaagtggacggaggattctagagagaaaaatatatacgatcaattgtatattgcatcttgtattcagaaaatatcttaataagatagactcgtggagtatgtagatttaactgcaaaaccacgtaaaaaatattgtgttacttatacattatttattttttattatttttgtgttatatttattacaaaaaatctatccatggctgatcacaatcaaaacgatgtaagtggacttgagaaaactacacatcgccctgggaaagaaccaatgggttctcaaagaccccatacttctgaaacaagacgttcaagaagaaactatagtggtgataataaaaacacagaaagaaattgtaatgactgcctaaatttaatatgtttgattattaaataatcagggtttaattatgagagtgaattattaattatgatttacacatttatggagacttattataattcaatatgtattaataatgctatgtgtgagtttcgtattttctgtatttgtgcttggtagttgtggtacacgaggttgtgccattagagagtcgcgttttatatggttttgaatattattagaagggcatcattgttaggcattggaagtatcgagaaattgtcaggatttggaaaatgaccgaactacccttaggggccgttttgtatacaagtttcatttcatgggaataggnnnnacattgcttggagagtgatgaagggaatgataaacctaggaaagcaatattaccgtgttttgttgacattggaacggaatgtgacaactttttttttttacaataatgattattttttttttgtaaaatactaataatttaatattttctttctttctaagtgttcaaaataatttttnnnnnttatttttcatataattttataaaaaaattaacaataataaataattataaagagtaaatttatatgtaaattgataatatattttataaaataaaatatataaaaaaataaggaaagtactttatatattattttttaatttggaaaaattacttcatatttcaaatatttttatatacattagtattcatatattaaaaaaaataattttaaaatgcaaaagtttgtgtctgccaatagtatttgaaagtgaaaactacatttttattaggttttccttgccagccaagctaaagcctaccactttcacttagctaatattaaaatattaaaacctaaccaaacattgtaaactttcatattcccattctcactttccccattaccacataccaaacagtccattagatgttactaagctttttatattatgttaaggggcataatgatcttttactagaggagtattgtgtttagtggacattattattcagattttataagttaattatttcattgattctttttatttattagataaacaaaagtttagaaaaacctagatctctctacaagtctctctctcttttgaacaccaaagaaaccaggtgagggtttggagttttcagttcaattttgtgtagttctagcagatttaagcacatcaatccaaggtaaatgattctagcctctttctccttgatttaacttttagtgcaagaatcagttaatagggtgttgtgttgatgaagcttgtttaattttgaattcttgagttattttaggtttctaagggttgttttaagctgaattggtaggctttaggtatggtttgtgtaaattggagtttagagtgctcatcctaagtctttaatggtgtttttattttctgaacttattgttgcattctattacttggattgggtctattatggcataaattggtattctagaggttttccaattgttcgggggttgatttgtggtgcggggagcatttttggtggttcttgcactgaaccgatcaaccgggttaggggaacctgtagcaaccagtcgaccggttggtccccaggaaatcccattgaaccagaattctggttggggaaccggtctacttgttgggactttttggtgaacaatagtttttccagttgttgtgatatttggggtgttagcttgttatccatcgataggggtatttcttgtaaagcccgcttagttaatttggaaattagcagctgtttatgtttaat

SEQ ID NO: 38548 - DNA, 1463 bp, Cannabis sativa
gttataagtaatcagtgacttgattcagcataccaacatggatagttcatattggctactttcttttgttttgttatgttagttgggattagtcttgtctagccatgacttatcttgtaacttaggttagtcaattcattacaattagagagaaaaacccttgtgagaaaagtcttgatcatagaagaacttgtatcttgaatattggtattcttgttgaacttgatcaatcactttcattgtaattcttgttggtgaataataaagatgactagatgttgtgctgcgagatctaactgtattgtactaagttcaaactcgttaaattcttgtgtcttaaacttgttaaatcttgaaatttgttggtgtgtgtttacataaagagttttatgtactaaaagaaaatagtatcataatattaggcaaaaatttctattttgaaaagtaacctatgtccactaattatttttattgaacttttatttattttattttattcttaagtcataattttagtttttacatacatcgtcattaaaagtttggtgacaataatatatgacatgaaagtataagtgtcaaatgcattcttggaaccactttcgattgcttttcgacaataataagcgatgatcttaaggttgatcgagctcgattgtagtttgattgagagcttctcgaatactttcataatccgaacatgcatatccactagtcaagagattaattttgccacaaactcgaccacatccttatccttatgtgatcgagttgtggtaaagggtttaaccttaccactcatgtaagttagtcccttctaaccctagtaattaaaaactaactaggctacaacaaataataatacaaataatgacatatatagcttttagatgtaaaaacttgcaactacataattactcaattacaaatttgccattataagaccaacacaatttgcttgatttttctttttcttcttataaaaataaataaataaattcatttagtttatttattaccatggaagtcttgtcaacttgtccctgatttcattactgcacccacatgatttcttttatttattatggattaacaatgaccatataacatatatatttgtatattttatttttaacattataaaatacttttaattttctttaaaaaaaaaatagagatgataattataacatacacaattaaattaaaaaattaaataaatattttttaagagtatactataagcttacttagttttaagtacatatcatatatttccaaaatttctaatttatcatcaagttatgtgtttattatgtaaaaattggtacttttttcttaacatatacaattgaactaaaaaactctatataccaaaatactaatttatagagatatactattgacttaccctataactaataagtacgtaccccattttcagaatttgtgtttatcatcaa

SEQ ID NO: 38549 - DNA, 1463 bp, Cannabis sativa
atatttttaatgataaatagcccccacgaattctgggtccgtcactgcatgtcataatagcatctatggtggattgccatatatggtggttattatgttcatcctaaaagtggtgggagataactatgaattcttcaactcgagaaatatgatatcaaagataagttctttgttcattaaattataattttaaatgaaactcatatattaatttaaaattatcattaagtagtgtgtttattaaattttatatctttatcttataggcgtgctttcatttcactcacttggttatgcaaagatccaaagatttatatgagataagttctagttattctttcttttatagaaatattttattatgggtagtttttatttctatcttaaaagtgttttactaattcagttctatttatgtgatttgtaaatatttttttggttgaagaaagcaaaatgagtgcttttacaattacagactttaaaattttattgtttattttttctaaatcatctttgcatgcctttaggatatccatctctctttttgttttggtgtccttatcttccaatcaggtggaacctacaaaaaaaaaagaggtttttacaccacatattgaaatttctaacttttcttattttttttctattgtggggcagatttttaaaaaaaaatactatgtaaattttatactgtgtactgtgttaagtttctacagttattccacggttttttttaagttgtttcattgttgttttaattgttatgttttgttgttttgcgaatgttttataaaaaaacagtatttttgtaaaaaattccatgtaacagtaaaattgtaaacttttacccaaaatttagtatttttgtaagaactccaaaaaaattaatataaagtatatagatttataaatttttctaaacaaaatcagaacaatgaatactattttataaagggctatttacaaaaatatgagaaaaaataaaagaaagttttgaaatatatggcatgcaaacttaattgcactaaatatgatatttttttttaaaaaaaaaaaaagaacataaaaatttaaaaaatttgagataactcatcatagataagaaggaatagcataaataacttaaataatatgtataaaaattttacttctatataatcaaaagcagtttcttgatgaagaaactagtttcttgaattttttgatgaaataactagcttcttgatgaaggatcttcaatgagtttcactttgacagatcatcgtcggatgggtaaaaaacttaaaaagtcgtacataaattttacttctatataattaaaaccagtttcctgataaagaaactagtttcttgaattttttgatgaaaaagccagcttcttgatgatggatcttcagtgagttttgctctgactgatcattgtcagatgggtaagaaacttaaaaacttgtttataaatttta

SEQ ID NO: 38550 - DNA, 2615 bp, Cannabis sativa
agaaacatttgacttctctctatgacctatttatagaccatagagaccctagagacagccacaaacacgttttcaaagttgtacaaaacattccttaaaaaatccctaatatgcaacatcaaattttgattttgctacgacagatcaggatcaaacagaaaactttttaaataggaccaacatcacaatttggtattcaattcctgccaaataaagattatttgatttgctatatacatagcaaaaccaaaattaataattagaaaaagggaaagtcaattttttcaaaaacaggcaactttccataaagataattcattctcttgaatgacaagtttcctaaacaaaaaagaacatttgaaaataaaacttttcttatagaaaaagagcaatcaaagccacgaaattaacacaagaaaattaattaaattacacaataaattaaatgatattttgattaatgccaaaaaaagacctaacaaatttctcaaccatctctcatctcaaccatgaataaatatctataaaacttttcaaatttaaatttaaataaatatttatctttttaattaattagttaatccgaaaataaacaaagtggggacgtacgccattgtagtaggcgcctatcattgtgttggaacaaagtgctaaggccaccttgtaatattattacaagacggtgtcttgttctaaaaacatcattgtctccctaatttatataagtaataaatttaaaaataaactatttattacaaaaataaataattaatattttactatttcaaaatagatttttctcaacatcattattttgtatcatccatactcttaccaatgttatatagtggtgatccggtaacctgtgacctttaacaccaagttcaaataaattagattacttattgaatctcatcaatcaaatactcttatttattaatttcactattattccactaaaaatattaaattatactcttagtaattaaagaattatatttagtaaatttaactacaatatctgtttatataatcaataccactgattagccgtatatgtattggtccataattagttttggtcaaattactattttacccttctagttacctatttttctttaaggattaattcactagtaaaagtataatttagattcgatctaaatttgtgcacaactttcagttttaaaattaacaattaaaggaaatcaatattcgatttgtattaggaaagtcaagattccatattaaaatcaagttctcagtcatccatattatcagcttcctaaaatagaagttgtaagaacgaataagagttcatgaattctcaaatttagaccgatatgataattgatcatagttatgatatgaattaggtctttatagtaaacgactagtttgatatagacaacttaattacatatcagtcattctcatctataatctttattatatacaacactttcatcgagatgtccgtctacatcaatgatttgaatcaagactgcttgcactgaataacgggcattagtaaactatactaacaatcgttgattaaagattctataactataatatgttgctgactattttattcataacttatgatctttgttctccatacaatacaagtcacaacctcatatatgaataagaaatttcttgatatttatacatgaattattaataaataattcaacattgaaacatatattaattttttttagcttatatttgtaattaaaatatctttacaggcttttcagaacgtaaaccctaacaacgttgtatgtcttttccaagacattggtaaaataaacttgatgtcagatatataggtttatattagacttgaccaatattaacattacaacatatatcataatcttaccgttatatctattttaagtcaatatcactaagtttatcataaatcatttaaatcggaatcttgacatgattaagctttaagctaatttttgatttgagctctttgacctattccttaccatcttaccctatggactagcccatacatacatcttgggaacttagtaacataattgagtaggagtgttagtcatatatctatagcttatattatgttagaagtaaaatgataattttattttagcttggttgaaacatataatgatagaacgctcatttcagtaattgaatcagtttactaaaatatcattatgtcaactaagtattttagtgataaaatataattaaagagtaaaacgataattttaaatcccgattacattgtctatggagaattattgattgatatgatataaatagtggataatttataacatatctatattatgtattgttatacctaatttttgagaagtcaaaaaagtcaaccccacgactttgacctagactcataagggccaaataagttaagacatcctacttgagggccccatggcacctctagaaaattcatgaaatgttagaacttacacacccaagtgtgcccatcctaggatttatgggcccgtacgatggtttttatcctacacacctcaatccgacaatgaaacaactaaggatgtaatgaccgctctagtaatgtggattagtaaaggcaatta

SEQ ID NO: 38551 - DNA, 2764 bp, Cannabis sativa
aattcttggtttaacgtttttgttatttttattctgttaactttaacggaggctaacccttccgttaactattgccattcaatttaaacgcagagtccattcctcattcttctccctcaaactcaaaatcaaaactactttatgcatattcttgatcttcatttgttgcgattcttcattccttccgttgcaatttttttcctcttataaaaaaaaaaaacttatcaaaaaaaaaaaaacagaggtgcgaagaagaagaagattgtggaacaagttggaaataactcacttaattttgattatatgcttaacaacaacaacaacagtcgaagcgaaggccaagtacactaattcaatacccattttcatttccaatcgttaattttattcggagcagcaatcagttgatagcgttttgtttcaatcccactgatgaacccattctcaaagatgcattaaaggtgatttctttcttatgctaaattattggggtttttcttgtattgattgtttttatgtttggttgaaattctaggtcttaccatcatgggtaattgttaactttcagtggaattgggaaaatttaatacctaattttcttcttctcttttgtgaactttttcaattatgatattttaggaaaattatcagtcggcgtgagtatgatattatctcttgaatttactaattttataaataatatttattcatgtggttaattgagtgaattagctacaagaatgtaagactctcttattttcgttttattggcaaagattgtgtatattctttaaaattaactagaattaaaggttattattttataatctagatatatatcaataattgtgagaaaaaaatcaatggaatcttgataattttattacaggtcaggtcaccagttgaaaggccaatcatttccaccatattagttgaaaatgatcttcttgggagattgtatgttgcaggaccagtgaaaacgaatcagatatctttctatgcaaatttgaagtattgtcaccttgttgccattgtttatactgtaatgattttgaagctaatctccatttattttgagcattttgtttttgaaggtgttcctattgctaggttgtatagtctgtattcatttatctgtttttgttcctgatgttgttactgcttttgtacattttttttttaattttgtcttgcctctatgatgatgcatttaataacttaaattcttctaggatatctcatgcagaaaactattagagacctgaattgaagaggcaacattatgaaattatatttgcgactgttcaatattcctttttgtttcagcaagtgttctactttttctttaaaaaatatgtatatttcataatgttagaagtcttttaacacggtatcttttcgttgtttgtgtgtggttttcagatcaaattaaagtttggattttagagacaagaaaatttcagaatggtgtatttctttgtttttagttacttgtacatttactttttcattatctttcactgtttctgtaggtactaatgtgtctttccttggattgggtttgtggttttgcttctccagtcggccaatggaagaagatataagtttatactttgctatgttgcttaataaatatgatttaaaagtatctttaatagtttgcaatgcttaaatgttaatgctaatagtagaagtcgatcgctgtaggttgtaggattattaggaatttaatacaggaccagtttctcaactgatgatgagtgtcaaaaacaatacccaagtaataatgctctcttgtgattacatagtgttgtttcatttttgtgctttgtaattccagtaaattgtttctaaaataaaaaataatattttatctgttgtcaaataggtgctcattaattgtcgaaacaacaaaatgcttctcagttgagtaagagcttttgacaggcactacaatgtggttctcgaaaatgttaaagaaatgtggaccactcgattcttgtttcatcattcatttatcatctcattatgtttcaatttcctcaaattacttttttcattgtccaggtactgaagactaggaaaggcaagaagaaggcacaaccagtaaacaaagacagatttatcagcaaaatatttttacatggagactcggttataatagtgcttaggaatcccaaatgaggtagtatagtgcttaggaatcccaagtgaggccaatcttgttatgttattcaaaaaatttcttatcgaaaaaaatatcaataaacttttaaatgttgatatttgtagtttgtttgttagtttatttttagattggattaaaaaattaaagtagccattagttactataatttgaaatatatgttataatctatataaaataaatttagttttttttttaatgaatgattccaattttaatttataattatagatttggttttttttttattttttataattaataaatttagtttacaataaaataaatgtatttagtgagttaaaaaacataatttgtgagtgataaaaaattaaagattataacgttgtaacttatatgtcaaagttttatattataaaattttaaaaattccaaatattttttttttgaatttattattgttattatttttcatatcttattatttatttaattaaattatatatgataatatttattaaaaataatatctttaaaaaaaaaattaagtatctttatttattacttaaataaaacaaatcattcacataatcatac

SEQ ID NO: 38552 - DNA, 2191 bp, Cannabis sativa
  modified_base (60)..(63): a, c, t, g, unknown or other
  modified_base (984)..(984): a, c, t, g, unknown or other
  modified_base (1010)..(1010): a, c, t, g, unknown or other
  modified_base (1314)..(1326): a, c, t, g, unknown or other
aacaatctcaatagttcatggggaatttttaacgaccaaaaaagttcagggggcatgatnnnntacatgtcaaagttcgagggaaaattgctaattagccttattaatattatatgtatttaataaataatcaaattccattttgttcatgaaaatttaattaaattctatatttttttaagaaagttaaataaattcaattaaatgtataaaataattgtgagaaaattacaactaatggtgcagaattaaatcaacaaaactttaaacgatcaaacgattagcaatgacaagattaataaacacaagcagtaatcgaaagaaaaacatggatgaacagattatggaaaacaagaaaaaattaaagtagtaaaacaataaaatcaacaccaagatctatactggttcaagttcgataaatcgacgtgatctatggctctactccagctttgaacaccaccaaattctctttattgattgagcaagaataggtacaatacagttgagatcgattctctgatagattctctcaaagtatttcaactttcacactcttatccaagaatcttcttcatctacagaagattcttcatacaaaaacccaacccctatctctctcttttctctgtacctttttctctctacctttcaatcttttgtctcttcatctctcaactcattctgaccgttgtgttcgaaatgataagtgttggtggtaggtatttatacgcttaggatgaagatcctaacactacaaaaaactgctacttttagcgacaattttttagtcacgatattatttatttgtgactgtgacttttaatcacaataaaatgttacttgtcactaatttagttttagtcacaataagtattgagactaaaaatacatttagtcacaacaaattataacttttgtgactaatacttttaaccgcgaactttttagtcacaacatagaaattatgatttataattagtcacnattttttcacttttagtcacaagttntgttgtgactaaaagtaaaatttagtgtaaattcgatgactgcaagaagttaggttgttaagttagttaggcactaactaacttaaccaactctcctatgagtgagatctccacgtcaacataattaagagtgcatctgagatcgtatatgagggctttcagaatcacgaactaaggcactcgctgaaggaactgttaactcaaactcttaggtctccttattttgatgattaacaaatatttgattattacttgttactaatgatttgttgattttgtagcaaaattagaagagaaaataaannnnnnnnnnnnnattggtatttttaccaaacttttcaaagcaacccaaaatggattcaacaagcatatccagagaaaaagtttcatcaagggataaacaactcaagaccctattcaaaagaggtcttcaaaagcccaaagtgaaaagtcaacccgagagtcagtcaaagtcaaagtcaaagtcaactctcgagaaaagtcaatttgggatcaaaaacatgcaaatcaagctaggaggctcatctacatcaagactgcccaaaatcaaatggtataaatttactttagtcttgttaaattgatttgcatagcacactaagttttataaattcaaattttggctcactcactaacttgtgcaacaagttttctcacaagatagttcaaaaatttgtttgattggatttcttaatcacatttaatttaactaagagaacaaagttggaatttttgaaattggataatcgagtaagaagttatgcgcgttttagtcgcaaaagatggcatttttgcttgagctagccattcgaaattctggttggaatccggaattttggttgtcatcaatccggaattctggttcacagctgaatcatttttgattattttttatttttagccgatttatttctctcattgattattctgattcaaattacaatttagaataattagcatgtttgccccctgaactttcggtactacttgattttgccccctaaaatatacggcttgttaaaaattctccctaaaatataacagttacataattatgcactttctattaggttccgtttcttttaccgttaaaaattagtatttttaccccctgaacttgaccaatacaaaattttgcccccttttattaaaaaaaatta

SEQ ID NO: 38553 - DNA, 2266 bp, Cannabis sativa
  modified_base (1487)..(1493): a, c, t, g, unknown or other
ataaaagtattaatacataactagagaaataatcggggtattagttttgtgaatttggtcaaagtcaatacgtgtaagattagtatgcactattattctggtttttcttgtttaggttctaccaataataaaggagtgaatagatgaacttgttataaaagcttgtcttatgagacattttctgaaattaaatggttctaattttttttttttttttgttaacgtggtgaacagagtcacacaagattaacaatgtagtaaactacagtcggcggtggaacctcttcgaaccaggatagttcattgtctaaccaaaagacatgttttgccaaactatgagctgcaaaaatctaatcgcaagccacatagtactaccaagaataagggagtgatagatgaacttgttgtaaaagcccgtaccttatgcgtcattttctgaaattaaatggttctattttgttttgcctcttgataatctttaatagacaactttaaaacagacaaatattggtgcacgtatgaaataaaaaaaaatatatactatgaatattggtgtattgaatcaatacataaaagtaaaaaaaatagagaaaaaaagaattaagtactttaaaaaaataataaaaaagtaggaaaatagtattaaaaaaataataaaaaagtagaaaaataaagaaaaaagaatgagtataaaagggaatttttcaatattatacctaaaattgattttatttataaaaatacatttaagaaaattatttgcacaaataccgttgtgccacgtcagcatatataccgaaattcaaaacaattatgaaaatagaaaaaactgaaaaaatctcgtttctaaaaattttcgctttttaggagttttgaaaaaaacaaccatttagttacttttgatgtgaataagatatcaattagttacttttatatgaaaaaaattattttaaaattttatacatatataaataataaaataattattttagtatgtgagaaacgtatgtaattctatctctaaaaaggacgattaatattaaaagaaattttcttacaaacattgggtacttatgccgctaaaaataaatattggaattatgccccttacaaatttaaaactttgggtacttatactgctatttaccctattataaataataagaacataatatacatgaattcaataacaaatttataagaataaaaatatatatatacacatataatatatagatatataaataaaaaaaaaaaagaaaaaaaaaaggttcatgaaaatgtttcattgagatgagtatatatataaatatatatttaactatcataaataataagaacataatatgaattcaatgataaaatatataagaataaaaacatatataatatataggtatataaataaaaaagcaaaaaaaaagttcttgaaattgtttcagtcagatgagtatatatataaatacatatttagtgtattttgactnnnnnnnattcaagaactttaacaaaatatttacctgagaacttggataaagactcgtgttgataacgtattataaataatataaaaaatatgtgtaagaaaaaaaaaaaaagaagatgaagaggaaaagggaaactgaatgagaatttcccagttatttattttaataagaattaggatggatgaactcctatttatacaaaagtattgaataaaaaaatgagaaactaaattaatgtaataaagaaaaatacaatcactctctaaatctatttatattttctcttttatttttggaatacttttaccgagagataaaaattacattaaaaattaataatgttaccatcaaaaagtattatattattcaaataataattgcattaaaaattaataatgatcacaaattaaaaataattatgaattgttttaattatttgttacatcaagtggagtacggtgacattaattttggatataaagataacacaacaagggatgacttatttgatcagtaagagaaaatcacaataagatttttgagtaaatcgtagcatagtacccaattttttgaatttttaagtgacataaatccaataatatttttagcggcataaatactcaatgtttgtaaaactgcaattttctccaattttgtcaataataattctagagaagtgctagggaaactctcttttgcactctcttttacactctcttcctaattgagtgacatgtgtaactttctaaaatatatttaagtgtagttacaattatacc

SEQ ID NO: 38554 - DNA, 1740 bp, Cannabis sativa
aaaagtaattgatttaatcaaaattacacatttatatagattttttaaaaaaattatataaacaattaacattttaaaaaaaaaatagtaatttaaattttttatacatataaaacaaatagttcaaatgtatattttattctaaaaaaaaattagggattttctttcttaaatttatagatacaaaaggttgtattttttctctggccagccttgccggcctcctctgggcatagatactatttggttggggttgtgtttgttactgcgattaatcttatctttgtaatataattttgagtgttttagtcttgtttttgtgacatgattttgttttattttgtttcgttgttggttctttgttcttagatgacttaccgtcaaattgctattagtggttacgtacattgcacaatagttgagtactcaagctacgaggttgaatgaatttgctgcaacaatttttactattgtgtcttttaagcggtaaatgaaactggatatagatgctcttaaaattaattgtgatgttacaatcttttttatttgatttatgttagttttcttgttgaacgatatgagaattaggcagctaattatttttggctcatatttattctaatcattgtcttgtctttaatggggagatgttccaattgaattgtagattattattttaattgattactattaataaaattgtatgatttattaaaaaaatgtatattctactctttttatgtgcatattttctacatacattaaaataaaattaaacattctttttacacaatgttttttcttccttcaaatttgttattttttattttatttaatttaatgttagagacataaaacaaaaataatttattttattttgttgttagttatgtgaaaaaaaatattcttttaataaatattaaatagtttaatattaaaaggtaactaatttaatccacaatttgggaattggattgtatttgagttattgtgcggattgaatctaaaatataaaatttgtacattgtgttgatgcactgtaagcaaaatagtacaaattaaatttgacgaacactcctaaacttttgcacttgtgttttgacagaaggtcatattatcatgaataatatctatatatttatataaagaaaagtaaaaaataaattaggtggcatttatatatatataattttttttttctatttttactaatctatgagactttttcattttgtgaagaaagtttgatgataaatatttaagaaacaatctcacattatttaaaaaaccattttatatgttgtcttatatagtataaataagtaaataaatattcatttttatttgtaacagtattattttttttttatcacatataaaagttgaaaaaatatttttattattcaatcttgtttagttgattataattttttagtttttgttttatcaaaattttagtattaagtaaaaaaaaagtactatttagaatttatatggctattatgtgagttcttaagatttgttttaaggatttttttaattaggtgtaataggatttaaataaaaatgaaatttaaatatattttttttgtagtatatatgaataaatataatatgttttagggcttttttcataaacatacaacaaaagcaaaataattacaaaaaatgtgcaaaaaaaaattatttgaaaaactcatacattttaaaaatttattacataaaaccatacattttaat

SEQ ID NO: 38555 - DNA, 5323 bp, Cannabis sativa
  modified_base (4274)..(4278): a, c, t, g, unknown or other
agagacaaagatcatcttcaccacaaaaatcatcctaataataatattccttctcataattataatcatcatccttctacttctactagttcatcatcatcatcatcattatttaaaagaggttagttctttatttaattattttttatttggtgatttaattaataatttgatgagattattgtaataataataataattatgtaacatttatgtaacatttatttatttatttatttattttatagaagaagtgccaatgagtgagctaattcttgctgcaaaaaggagaaaagctgaattgcaaaacaccattttcttaggtatattattattattcttttgtaattttgtgtagagagtattgtactaggctcgaacctcgtttcttagtttcttgcacttgaagatttctcttttcttgaaaaattagttttcttatgaaaaagattaagttataatttttttaaagtgttgaaaaaagatataatattaataaggtgagactaaaaatatgtcctattgagataagaaatatatgttgttgtttgttaattaataattgcttgttttgtttatgtttaatttataattaataataatagggattaattattatttgcaatttttaatgttgttctatattcgatctttttgtgttcttgagataaaacttgactgattaataaagaaataatgatgatcatatgattgttctttcgttgaagagtagagaatattgcactagactcgaactttattaaatcatcggtgttttctcttttcttgaaaaactagctttctacgttcgttgttcttgaactactcacatataagaaagattgttatatatttttcaaaatgtcgaaaacagaaaatatttttgccggtaaaagtaaaactgatgccctaactaggtaagaaaatgtttctttctataattttttttttataatgttatattgaaagcttaattaataacttgttttgtttaaattaatttaattattaataatattgactgatttttaatgtagacaaagaaagtctccaaaaggaaagagaatctatgcggcttaaacttcaaaaggtttgtatatttctttaactaattattgatttatatcttaattaattatttacttaaatacaattatacaatattatcttattaatagttatttgttttgttttattttatttctattcatattctttttaattttattattccgaactaaatctaataaatcatactaaatattgtttacttattatatagatcgagaaagaagctacacctcccgaacaaaacctaatggctttaatggaactcgaaaagctatgcggatacaagtcttcattatatcatatattagactaaatcatcattgttggtgcctcgaatcttcttcgaaggagatgttctttagtaatcgagtgaagaagctcggtttgtttttcaaagggtagggtgattgatcagaaagaataaacaagtataccaaacatagccttaatttttttgacacattataagtttgctttcctcacactttttactaatactgtaagttcatttttattttctctttttattagtattaaccaaattggttattcaaacattttattgttagtttttcattagttatatctttaagttttttttttgtattattttttttttatattaaatatataattgatattcttaaagcttgcagatttatgaattaagttgtacaaaatacaaaattgaagagtttgactggacttgacttgatacaaaattaaatatatatatattattatctaccacaataatcaaaaaaatagattgaaggattgagagaaattaattaaatgataaacaagaagaaaaaggtatttggtagttatatatatgttacaacttttgttatgatagtaatttttaatattgtgagtttttattagtattaattacttaattgaggataagcaaccattcaagtttgaagtgtaaagtgtattttaagttttttttttttttttttttgaaacacaatgttgagatttatattttcgaacacatattgaatcatcttattttgagtttggatgagaagtttatgtacattttatcgagaaaaagttgagtaaaggcttctaaaattacaggcggagacatgtcaccatataactcgtttaagggttagagcacgacgaaaacactaataaaaaaagagaaacaaaatttgaagggcaaaaaacatacattggagagacaataatattatttttcattttttttattctttttattttcttttagataatgaacaatatatattggaattataaagggtaatggccaaattggctgattttctcttagagttcatagatctctaattataattttgattctatgatttaatgaaatgtattttttttttttgaaataagatctcagataaatgtgactatgtaacactccatattttcctataatttgatacaattatatttgatcttttatttcatggtatagttaacattaatttgagtccaaataaaaataagaataaaataaataaaaatttcttattgaatataggggaatttttaaaaattaataagatggaaattagactaaaaaagaaaaaagaaaagagagaaagaaaaacaatgcctaatttctattttgtataaacaatgatttttcctaatttctcttttgtatgcaaaaagaaagaaaaaatacatttattatttgacaaaaattagtcaaactacatatgtgttgatcaagggtagtcttgagtcttctcttgatgttctactaatgtagtagtataaggccaattgaacaactcccaagattgtcccaatcacatttggaacctatcattaatcaaataataattataattagtactcaaaattatttaaacaaaaattgctatgaaaccctaaaaatttaccatattatcagggtcggccctaagttaaggctagagccgaccctgagctaatttgagccctaaaaaaaaataatttttggggcttttttcataacaataaatgatatttttaaaaattattcaaaatatatatatacttatttaaagttttttttttttcatttgtgccctaataggagtgggccctaagcgcgggcttaacctgccttagcctagggccaactctagttaaggcaagctaggcccgagtctagggcccacccattttaggggcctaaataaaaaaaatatctttgaaaaatatacatttttttaataattttttaaaatgctatttatttttatagtaaaaacctaaaaaattgttttttttcttaagcccatttctggtccgaccatacttacatatatgaaaggatcataattggaaaatccgtaagctgagaaagagagactcatcaagaaagttgataaagagagataaaatggcatgaattcaacactctttgttttgatcactagtttctgcaacaaacaaacaaacaaatcaaaattgaaagtcgatcgaagcacttgtacaacttatttcgtgtgtaaaaattaaaatacttacaatgataaataatggtgaagcaaacatcgaaataagtgaagcaacgctcaaaaaccctacaaaagtttgcctagcactgttgtcaagtactcgtatactaacaaaaactacaagtgcaaatatggcaataactgcgagtagtaatcctgtcatctttaactgcaaattgacattaaaagattataatcacaacgatgatgatagttcatatgtcaaaactttgtttggaactcggattttatagaatgaaatttaataaaaaagattcgagttgatttttgtttttttttctttctaaaatttcaacttccaaacaaaatcaaaaaatataataaattaagttggatgtaaagaatagtaccttttttgatttttcagcatagagaatgaaaattgttatgtatatgaattgaaaaattgccccaattgaattgacagtagcaaccaatataacaccaggtgtcacaaatggtgatccgtaccaaagacatatcaaacaatttagaaatgaatatatgtaaggcaatcctgagaattgttctgttgattggtttctcataattctcctaaatgttggtctgaaaatacacaaaaattaaaaattaaataaataaataaataatttttaaagatgtaaaaattaagggaatttttattttattgtttttaaattatatatgattttttttttnnnnnaaaaaaattattttatggaattttgttagaaaaaaattaaagcataaggcattggttacatcgttgtggtaactagttattcttctggttaccataagagtacctagttacctttatttgatttttcgatatttttcaattttttctttcattttcccataaaataacattttggaaaaataaaaaccatattttttttacaaaaaagtataaaaacccatttgtaatttcctctaaaaattaattaagtttaaatgggaatttttattatggtcttaatttggttggaaaacttacattggtgacacaaacaatccaaaagcaaagatattccctgcaattaataatcaatgtaacaattcagtaaccaaaaaaaaaaaaagaattaagttgatataaataaatattaaaaaacatatatgtgctataattataatattttcaactgtttttggcatgactaagccaattttcttatttgcaaaaaaaaaaaaatgttgcattgtattaagaataatagaaaacaaagaacatttatacatatgttatttttattttttttactaaaatattaaaaaatatatatttatatattaagtagaagaagatatatacctgaaattccagctgcataactgcaaaattcatatacagaaaacaaagcagttgtcattattgtataattaatctcaaaaaaacccagcaggagaagctttttctctttctcttaattttgaagtttataaaaattttggtcaaagtaatttataaaaagggttctcaatttttctttctttttcttcacttttttttttctttctttttaatatttgtaatatatatatagagataagaaaaaagacagataagatcttatgtaaagtatcaaatgaaaatatactataattctatcttcatttaattagtgttggcaaccaatggctcttcttgtcaatttatttattttattttatttttctgatttttcaattaattaatttcgaccccacaattgtgtatttggtccacatgttcatggcaactt

SEQ ID NO: 38556 - DNA, 2028 bp, Cannabis sativa
gttttcacaaacttcaccatccaatatacaaaacttgtttcctgatgtcattcttcctacgtgcaaaccagtagaacaacaacatcagggttgtataccaacaactaattcctctccttcatctggttttccaccagcatcaaacacaaatcacactggctcaggtacacttttttctgcaccagaaaataacacttctacaccagaaaataccatttctgcaccagaacataacatttcggcaccagaaaaaagcatccacccgtgccccaaacctggcaggttattcacccctgcacctgcaaaaaaatctcaaattaattcttccaaaacagaagcaacttcacccaattcttcacaacctagcagccctcatgcaccagtttctaaaaattctcctcaacctgggactatagctcctaattctgtcgctacttcaccaggttgtcaacaaaaaattgccccatcaacagctccaatgcccttcaaaactactaaattgggcaggaccttgcaaaaaccaaagcatctcacagattatgtctgcaatgctgcatctacagcacatccaattgagccttttctttcatatattaagttacatcctcaatttagagctactgttcttgcagcatactctgaaattgaaccccaaagttatgctcaagcttctcaatttcgccattggcttcttgccatggataaagaaactaccgccctcgaaaataacaaaacatggatcatcactaagcttccacctagtcacaaggtcattggttgcaaatgggtgtacaaagttaagtataacgaaagtggggctgttgaacgcttcaaagctcgtctagtggccaaaggctacactcaacgtcatggaattgactattcacaaacttatgctcctgtagctaagttcaacactcttaaaatctttctagctctagcagctatgaacaattggaatgtgcatcaattggacatcaataatgcctttttccatggagatctccatgaagaagtctacatgaaaattccccccggatatgaagcacctcctaactcagtgtgcaaactcaacaaaagcatttatggccttaaacaagcctcaagacaatggtttagtaaacttagtcatacactcatttcggatggcttcaaccaatctctctccgacaattccttgttcattaaaagaacaaaagacatcttcctagctatcctaatctatgtggatgacatcattgttgcaagcaacaataatcaagccatatcacacttcaaaacatacctgcatgacaaattctaacttaaagatcttggaaccattcggtttttccttggtcttgaggtcggtcgctcaaagaaaggtatttcggtctctcaaagaccctttacactccaattactaaaagacaccggctacataggtgctaaacccgtatgtactcccatggagaccaacctaaagctaagcaaagataaagcgaacctcctacccgatcccacggcttatagaagcctcattggcaagttaatatacttgaccattacacggcctgacattacctatgccgtgaaccatctaagccaatttctcacttgtcctcgggctccacatctccatgctgcacatcgtatactgcagtttctaaaatcaacaccgggacaaggccttttctttccctctgacactacagccactatatctgcttatgctgaaacaagcctatccccacaaaatgtccaagtctctttcttttcggatgctgattggggggcttgccaagacactaggagatccatttcaggctattgcctattccttggaaactcccttgtctcatggaagtcaaaaaaacaacaaactgtttcacgatcttctgctgaagcagaatatcgagccatggccaatgctacatccgaactcacatagatcctcgccctactcaaggattttggcatcaattctactaccccagcacttctctattgcgacaacaacgctgcaatccacataagtgaaaatccagt

SEQ ID NO: 38557 - DNA, 1760 bp, Cannabis sativa
tcaaaccaggctcttggagcttgtttaagtccataaagtgacttgagtagcttgcaaacatggtcaggtttgtttgggtcttcaaaaccttctggttgacacatataaacatcctcttcaagattcccattcagaaatgcattattgatgtccaactgcctaatattccatccctttgacacagcaatgctcaacacaattctgactgtagaagctttgacaacaggactgaaagtctctccataatccaaccctgctctttgatgaaatccctttgcaacaagtcttgatttgtatctttgaaaagaaccatcagcattccttttaattctgtgaacccacttgcaccctactaagttgtttgcctcagacctgggaaccaatatccaggttttgtttcttttgagagctgtaatttcatcattcatagctccattccagcctttgtgttgaagagcttcagcagtattctttggttcttcaaagacagatacccacttggcttgactgaggtatgtttttggtttaaatataccagcctttgatctggtaatcatatgatgagttgggacagcaacactttctggttgttcatgcactgaaggttctgcaccagtgttgagaatttcttggcttgatttctctggttcttcattgtaatgctgctgctgtatagagaaattatctctgctgatattgacagtggcactgtcaggtgcaacaaggccatgatcaagtgagtcaaaatcagatactagtgagtttgaagagtttacctgattagatgaagatgctgctggtgtactggattcagtggaggcttgagatggtacacgagtgtcttgattagaggtaaaatgtctaaagtgaaagtttggaagttgagaccaggattcattatgaataatgagttgtttctctggagcttgtgtgtttaaaaatccagattgaaaagggaacatattttcattgaacacaacatttctagaaatgtaaactctccctgtagtgcttagacatttgtaccctctatatgagtcattgtaccccaaattaacacacctaagtgaatgaaattgaaatttatggttttggtaaggccttatgcagggataacaagcagctccaaaagttttgagctgtctgtaatcgggttttctaccaaacagagtttcaaaaggtgttttgttgtgcaaaacaggtgttgggagtcgattgattaaatacactgaattttgaaaagcatctacccaatacttaagtggcacactggcttgagcaagtagtgttaaccccatctcaactatatgcctgtgttttctttcggctctcccattttgggcagaggtgtgtggacatgaatgctgaaagtgaatcccatttgttttaactaaatgttcaaacacttgatactctccaccccaatcacacttaatgcttttgattttactgtcaaactggttttcaacaaaagctttgaaatctgtaaaggcattcaatgcatcagatttttgtttcaatggatataaccaggtgtatctgctaaaatcatccatgaaatgtatgtaaaacttgaaatttgtgtttgatgcaattggggctggcccccacaaatcagtatgtatcaattcaagaaccttagatgctctaaatgaggacaacttaaatggtaatgcatgtgacttgccaaattgacaagcttcacagaaattttccatttcattctttgaaatttttacattgtttgactcacagacaag

SEQ ID NO: 38558 - DNA, 3842 bp, Cannabis sativa
  modified_base (3093)..(3095): a, c, t, g, unknown or other
  modified_base (3184)..(3184): a, c, t, g, unknown or other
aacccaagtggagaactatccccgataatctcggccctatgtcacaacaacagtaaaccaataagtgtttatcccgaaacactacttattattcacataaaacaatctaggttttctaccaaaccccgcggtataaatacactaaaatgaaagttatattttggctctaaaatatacactatattgtagagctcatcgtaagcttcaaaacggtatatagaacgtctaaaatggacactcgagtaattagttatgacaaaaacacaatttctgatctcctagaaattttaaaaactatgaaactagaaaatcccaattttcacactcaccgaaacactacaaaaacttaatcactccaaacttcacagggcacatatataccataaatatcaccatccttgcgtaacagaaactaaaattgagcccttaaatgaaaaatgtcattaacgttctggctaaggtttaaaaagttcaaaactcgatttctaactttaaatcacctacaattcaacaagtaaacatcgatactagtcccataggtaccaaagaataattctacgaagtcggaatctctataactattctaattcacgaaacctttatataaaactaattttttttaaacttaaaacgaaattaaatcataccttaagctttccctcttcaaggatttggtatcctgctactaccggagcttagatcaataagttttgggttgaaaatcgaagaaaatgaatatagagagtgaaggttttgtcgaaggagagagaacgagggttcattcgttcgtacttttactgttatatgtaaaacttaatatatatataaaatcaaacgaacaaaacttatcagttttgttttatatatatctaggtgtggaggacgtgccataggcacgtaaccccgttaaaacttgtgggtaataattatatattttacttttatcaattatgttaaaataattgttaaaaaaaatatgtttaaacaagaacatagtgtggtatagattcacttattaaaactaaaattattagtcgtcctgtctaaatgttagtccaaataatttgttctactattatctactaataagcaacatttaaaagaaaaataaaataataattaacaaaaatttatgaaaaaaaagaagaataacaacacaaaaaaaaaaattaatatcatatccattctcgtatagtcttctacacttttatatatttactaataaacaaataaaaaaaaaagaaaaaaacaaatataaaaatagaataagagagaaaagaaaaaagatgattaaaaaatattttaaaagcaaaaatagagtaaaaaattttgaggaaaagaaaaaaaatttgaggtttcaaaaaatagaaaatgacaaaaatatttataattggtacaaataaaacaaaatgcacaactacaaacatgataaaaaaatacaaattactatgataatttaatttagtttgagaaaatacaaaagattaaggactataagaaaaccaagtacagaacaagtaaagaaaagcttaaaaaattatgtataattagaaaaaaaaaagttaaaattataattaaagtgattaaggatgtgcatattaagatcagggacggacccacaagtaaaaatgtgggggctatagcccccactaacaaaaatattgccttctaaaaaattaaatgtaatttttttaatttgataattatagactaaaataatagaaaagcccccataaaattaaataaatctagtaagagtgattataatgtatgtataaatattttttaattataaataagcccccacgaagtaaaaattctaggtccgtcactgaatttaagatcatctctaaagaagagctgaaaatgtggcttatgtatatatttaaggccatctttataaaggtgaattccaatagtggtgtataaaaagtggtccaaatttaacatatgctaaaaattatgtcaaatttaacacaaaatataagtcaaattttgtaccataataaatattttgttatttattctttgccatttattaatgtaattaattatttttttttacaatttatttatatatttaatagattttttatataatttagtaaaaatttaatgttttatttatatatttaatagattttttatataaatttggggcaaatataatttgacttatttttagctcaaattatacaccatctattgaaaatgataagaaaagtgttaaggaaggtgttaaacaccataaatggtagcataccgttattagtatatttcattattagttttcacaaattttaatttaatgaataatataaaaaattgctaatcaattattaagtgacatatccgtataatattggacatcttaaggtggtaaataataatgttctattaataataataaaaaaataattcacaagaaaaaatattgtacaaaaaattatacataaagaatcattcataagaaaaaaaaacaaaaaaaaaaaaattaagatcattaaaaaaaaatctcacagaagttgctgtaaaaaattatcattcataaaaaatactaaagtacatgctaaataccataaatggtgacatactgttattggtttcaagtaccaaaaaaaatagtaaaaaataatcccacataagttgtacacaaaaattgtaatatatatacaaaataattgtaaaaaaaattgtgaaaaaattagtgaaaaaaatataaaaaaattcaacaaaaacaagtctcttcacaaaataattgtaaataaaattataaaaaaaattgcaaatacaagtttctttattgtaataaaaatttgtgaacaaaataagaaaaaaattagtaaaaaaaataaataataaaaaaattcaacaaaaacaagtctctacacaaaataattgtaagaaaaaaattgtgaaaaaaaatttaacaaaaacaagtctctacacaaaataatcgtaaaaaaaattgtgaaaaaaaacaaattataaaaaaaaaataacaaaaataactttctttattgtaaaaaattatgaaagaaaattgcaaaatatctattctatataaagtatgcctatataacagaattcttnnnttatgagaaattcatgggtgacatttcatttatattaaaaataaaatggtttatgagaaatgcatgagtcactttttatttatatatantaaaataaatcccattaaataaaaaaaaaataggattctagattttgtcgaattaataagattttttttttctattaatatatagcgtacgtacgtgtgtacgtacgatattgaatatatattaattaattatagctaaccttttaaaactaccaactaattaattagattgaactaaattatatattactatatattatagtgaaactatatttttatttgtactcgtgaaaaaaacgtacctacctatggatatatatatatatgcacaaataatcatcatacatattacatatatgtatacattaatattattaattttgaatgaaaaaatctaaattcatctacaacatctatatataaatggattcaaataaaataaagaaaaataatttatttatatatattacttttttatttgttattggtacctaaggtggatcaactgatatatagtgtaaatttatgtatatatatgtatcgttattgataatgttaaaattattatttataggaagatgaggtttggtttgtgggacttttgctcatatagcaaaatatcatacttatatatagacatgttatttttattttgtaatttagattttcttagtcattatgtactacatgtattatttatttttgattatgaggaggt

SEQ ID NO: 38559 - DNA, 1911 bp, Cannabis sativa
tgcagagagtaagtttcatgttgctgttaattcttgcatgtactcgttcatgtttcttttaattgatgaactttgataaaaatcagagtaaaaagttgcaacaagaaacataaggggaaccttcaagcaaaagataaataaataaaatacgcatcaaataaattctgtcaattatgcatataaattaaacgaaaagaacataatctatggatcaaatgatgaataaaagttatataactatgcctctattgttttaatgatggacagaaacttgggctctagtgtttcacctaaatttagttgctcgaagttagcaattataatataagtatgttggcatagactggctggctcactttacactcttttgtctaagttcattttggatatgcttcaggtacagtgaaaatattatcattgacccgggtcgtgtggacatatttccatcatcacgagttccaaaaaatttgcaccatttagtgaagcccatttatcattcatcatcagcaaattcaagggagtcattaaatcctgtaaccatgaataaaaagggcttccggatagaaacagatgcatcaactctatcttctgttctgcaattgacacctgatgatgaggtaattttcatcttaaagttcaaatatattcgtttttttttatttatttgaatctttttgtgctgggtagttgctattaatgatacttgacctttaaatagtggttgccactgtagggctttgaatcaatctttctttatcaaactgacttaaaactatctcatttttaggtgaggaaaatggcatatgttcaaggaaactcttctcctcaggcaaatcttggtgttcttaataggcttataagcactcgcaatgaactagctcaggtgaatgatttctcatgcatagctttgtgattaagtatccaatggtgcatttttttttagatagatccaattgcaatttaatttgaggtgttagtagttatttttcctgttttactaattactagtaatgatttgcacataaatatgatgtacttagtatttgtgggaaaaacatatcttctgtttctggtgagtgcagatattagggtatagaagctatgctgaattctcactgaagcctaacatggcttcatctccagaagtggtgatgtcatttttggaagagatgagcaacatggtccgacctagtgctgataaggtatcattatttccatggtggtggtttgcttcaataagttgtgtaagtaaacacacatgaatatgtattaatacatccatatataatccttaaaataataattgcaggaatttaaaaaaattagggattttaagagagggaaatgtggtcaaatatctggagatttagagccatgggatgaagcttactacactgcattaatgaagtcttctgtctataacttggattcttcggtaaattctgcatatattttattataaatcttgcatataaattattttttaatatctattacagcaatgagaatttcagagatctttatcattgttctgtcataagcattagtgatgctgttctttcatttaaggtttttgctttaaatttggatgtattttactttcttaaccatcatatgtagctacttttagctaaaaattttgcttatgaatgtaggaatggttacgattcttttttgtgcaggttgtagcatcatattttcctttgccacaatgcattgagggtttgaaagtgctggtgcagtcattatttggtgcaacattttgcagtgtacccctagcacctggtgaatcgtggcacccagatgtgcttaaaatgtcacttcatcatcctgacgaggtatttaaattgatgttgagagctctgatttgcttttctttagatgggaaatattttaatagaaatctgatat

SEQ ID NO: 38560 - DNA, 1520 bp, Cannabis sativa
acattttttttttactgattttaaaaagtaccacattttattttttaaaataagggctcaaaaatatttttttcctatgacccaataaatttcaaggtcggtcatgtattggtatctagcattattatttaagatggtgttattgttattggtataattaaatatatattaaatctatataatttaaaataatatttttttttttattgaatattgctaactaattttaagaggtgaacttataataatggtattgacaatgttgtttatatatgcatgcatgcatgctttaattttaataataatgttttgactaattaactcaaatggattctgatcactcttggcatctcggtgtcatcctttattgagacaaggaacaatttattcaaattgattattaatgaatacttactttattgtttttttttttgttttttaattcaaaccaattatcaaattgccactctctctttcttcatctaattaatttagtttagtgggaagctatagctaatgagcataattaacttgttgatttgaaaaacattgaaaggcatcaatatttagaagtagaactatcaaggtatatctcttatctctgttatggggttgttaggtttttggaaatgagaatctaaaactaaaattaaagtttttttttttttatataattaccggccccaaaatataatatatatatttatctaataaaattaatagtgattaaaaaaagtatgttttatatgattttttagtgcagtagtatttatgtttgtgtgtacgtacgtatctttaatctttttttttggaagaatctcaatattttttaaaacaccatgagttggagattctcttctcaaatattaaaacctactaaataaaattcttaaactaaaatataattaaatgttgggtctcaaatattcttatttaataatcaatattcattatagaaaatcggtatatatatatattatttggacgatgctactttatagttgtgacacatgtgactaataagtgttaattttattttttcatcattaatttgtcccttgtagctagctaaaaacctttgtatatatttatatatagtgttattttttaagagaaataaaaactttgactgtaatccctcttgttcatatctatatttatttatatattgatggtatatatagtactataattcaaaagctttttcttaatttaattatatataactattcttaattagatgcacacacatacatatacatatatggatatattaatttagatgcaatataacaaattaactctcttatttttctttaattttgagcttgacctttacacaaattcccttaaacaaacaataatatgaatgttctaaatattctaatgtctgaaatgtttttttttttatatttattaatttaattatgtgtgcatataacaatataatatattcagaattatattgttgcttccttatgtatctaaatttatatataactccgtttattattaccacc

SEQ ID NO: 38561 - DNA, 2915 bp, Cannabis sativa
tctataaacttataatattttattggttaccgaaaacctcggtcaacaataacagagtaggtagttttattaaataacgaactatataattggacctttttactgagattttcaaaaaataaatatttgaaaactaaagaaataataaaatacacaaactaactagatgaagatttttacgtggtttaggtgttaattaaacttagtccactagtcagtctattagcctcttaagggcgtgtttgatgtgtttataatatttttacacgaaaccctaaccgggtgttcttagtttctcttaaagaagatgaagacttaaaacaatattggcagagcttcgattattttggttgtgatctccctttcatatagaaatagaaaagtatttataggctaagggcgagtatggacatgcccatgacccgcgtagggtttctactaaaagcccactaatggggtgaattacatgcaagagagagctgactattaggccctctggaaataattgtgctcgtgcatgctgcaactagacaattgggagccattgtacgttgtggacacgcgttgccccaaggtttaacctttaaaagtagagagcacgtgtcaccaaaaggtttcacctttaaaagtagaggtctggtataatcgttttgcaaaaaggtgcatgaggtgtgcacactattatgcctggacacaggggataagatctaattctgtgtctgaaaaagcaaaattgtcactacgcgatctagattacaccaaaggtacatgtctgcgacactcttgggtggtcagtcttcgcgataggcccttcgagtacccattcgggtattagttgagtaggcttctgcatttagactatcccaggtctttaagaggcaatatgtcttctgtacctgggaaactgagataaggtaaggtggacttctacttatctcttagtcttgacttcttcccgattcaatgaagcttcttcatgataggagtgtagtgggggatttcaattagcaagattatgaggttaatatattcctttatatgccacatgtcacttgttaggaaccacagataacatttacccccaagctttcgggactctttgagttgcgagagcttggagtcttcttccaactcttggagataggtcttggacacatgttgattgttgggatcacggatgtatcctttgagctatcatcaattaaatgactaaaaattaaaagtaccatggatgtggcatgcatgtggcacctttaatacatttgttgatggcacgcgcatgcaaggggcacatctcttggaatatgctataataatagcagttcgattgaaatgacctctcttttaatgagcacgatacttgaggcatgtaatgacaaaaaataagtgccatgggcaagttttaaatgccatctttttaacttcccatctatcggatcaaattgtgctttttttaagaaaagatttggactgtccatttcaaatcgcaaggatttagcccagagtataaatggattcgtcaaacccattttccttttttcaccatctcagactttcaaaattctttgctttcaaacttcaaaccagagccttattttccagaaaacttcaacctcatcgtcttcagtagtgaatggaagagatattcgactacttgattcagtatttagcacaataagttttcggcgtcgttgttggggattgaaattaaaaattgtgtattatcaactatattgcaatttatttctagtttggggttctaatcttacttgagtgggttgtatttttctttttcaggattcactgtagtacatgaacgagtaccaagaattcattaatcttgatttatttcctattgatcctgaaatagagcgcacattctgagaaataagaagagcacaacaatgagcacaaggggaaataaaaagtatggataactaaggagatagacagcgagttcaaagaaggtgggcccctaacaatggtcaaaatacatcgatcatggcagatgatagagatcaaagcattcaacaatatgtagcccctcttttcaatgagctcaatccgggcatcgtgaggccaaaaattcaggcaccatagtttgaattgaagccagttatgttccaaatgcttcaaactgtgagacagtttagtggcgcacccaccgtagatcctcaccttcatcttcgtctatttatggaggtgagtgattctttcaaattgcccagagttatggaggatgccttgaggttgaagttgtttccctattctttaagagatcaagcccgagcttggttgaactccttgccctctacatcagttacaacctggcaagaattagcagagtaatttttgatgaagtattttctgcccactaagaatcctaagctccgaaaggagatagcttccttccaataatttgaagatgactctttgtacgaggcatgggagaggttcaaggagttgttgcagaaatttcctcaccatggcattcctcattgcatccaaatggaaacattttacaacagtctcaacgctcatactcgaatggtggttgatgcttcgacaaatggaactttacttgctaagtcctataaataggcctatgacattattgagagaattgccaataacaattaccagtggcctactactagagcacatttagggaagaaagttgctagtattattgaggttgatgccatcacctctttggctgcccaagtagcttctatgtcaaatatgctgaaaactatgagcataggtcaacaaatgaatcaaataatgtttcatcatttgcttttattttttattactcaaggacgagcaatactctaagtttggagtgtgataactctatggtatagagttatttttattggctttaaacttgatttatttgttgggttttgtgc

SEQ ID NO: 38562 - DNA, 3708 bp, Cannabis sativa
  modified_base (30)..(39): a, c, t, g, unknown or other
  modified_base (93)..(107): a, c, t, g, unknown or other
tgctacacctaatgtaaggttttcttaaannnnnnnnnntttatttcattgttttagaatccatattaggatgttaatcaaacatacttggtnnnnnnnnnnnnnnntggtaaaatatttccaacacaactctcttcgtagacttcttgtcgaccaagggaggactcttgaacatgctctccaaatccacatccatatctacgaggcaataggtgttcattagcacttaagctaaataataagtgaaaatgggaaaaaatcccacttgagaaggttaccataatcttcagaagatgacgagggaggactataatattcactaaactctctagatcctgtgatcataaatatatcataagggcttcgtgaatctgaatctcagcttgaatctaagtgacccgacctatcaaacatggtcccgtactacttggcaatcccatagtaggaactagtgcagctagtgtgaacgtgaaactctgggtaccaactatcaaacctatgagttatgcaatctatgaggaagggattccaagtgtaaaagttatatcgactatctcgaaaaaatactaaggtattacattctgccctaagcactgtgggtgaccatccacattgattaccttgggatgctccttcttcctcaggggcagctctctcgagatagtgtgtgcgagccacgacgtttcactttcctcttcagttggaaccggaacattttgccacgaagaatacttgggtactttgtaatcgcaagtaaatttgttcgaggcaagaaggctcgcgttctttagattcttctcatttaataagaaatttgctgctcgcagtctatatggaagactaagtacaattttgtggtgcttacctatctcaggagtaggaactggtctttgaggaaccgctgcaaacagataaaagttttgtaagtgactttaaaggtacaaattaatacattttaaagttacgtttctaaggaaaagaacttacgtataatgcgaaaggcggttgtgtttatgggagagaggctcatcatccagaagaagtcttctttaaactttgtcttgtttggcaacctaactatgatcttgcgatcaccagtataagtcccaagatagtagaagcctcctacgacattcttccttgcagggatttctttgacagagtaaaagcaggctatctctaaaggagtggggcactcccatctttaaatgtggtataggaccttcaggctcgcaaggatcctatacaagatggggttcagctaaaacggggcaagctcgaggtagttgcagtactctttaaagtaattcgtaagcggaaggaccgcctcagccttgatgtgctcgaggctttaggctgtaatgtccaaagaaattactcatgctaggcccactgcactccttgcgtattaccctttctagaggaaagtagatgaattccccaggtgccacataccttatgacacaacctttcctctgcttcgtgtcgtaagatcttaagatgccgcctacaaggccaatcgcctaaccttggattcgataagttcaacctcaaaagtgacattgggatcctatggcgtcattgatttgcgaggtttaggagacataatttcaaaatcaaggtctcctacttcaaaagtaaaagtgacttcgggtaaaaatagttgtctcgcaagtggaatagaagctactattgtgggttcagggcaagctgcgtctcgcaaaaaacgacgcttgccctcaaaaatatcttgcaagaatcgactataacgactggcagtctcttcttggatcgacttaattagatggtctctaattctggcatcattcatttctaatttggaccgaggttggaaatttctgggtttgtatgggagcgcaagttgtttaggatattcagtttctaagaattccagaaaataaacttgtgaaccagattgggacatttctatataaaaagaacaatctcaattcttcgttgaaatttattaagctagaggcttaaggaatatgtaaaacctaaattatgcctaaaccctaaagattcacagaaaacataaaccctaatttctaaaccaaatggaatgacaaaatgcaagataatcataacccataaagataaataataaaaaaaaaaggtgatgagacacttactgtatgaagtcgagtagtcgggtaatggaaaattctgcaaatggagacgtgatgaatggcgtgaagagttttttgaacacttgaagttgaagagaaaatctaagtaaattcgtaggaagaatgtcaaagataaagagggtatgcacggtttcaggaggcttggatgaaatttttttagaaagcttaagtttttgaaaagacaaaaattgtgaaagatgagttctttaccatcttatactttgaatttaataaccgtaaaatcaaaatgcaaaagatccaacaaatagaaatggaaaagaagtgaaaaggatggctcattaatgttaatgatgtccctcaaaactaccaaatcccaaaaattcaatggcatcaatattttcaaaatggattatgagaaaaataccctcagtattcatttaaaaagcaccttttattagaaattgacttttaaggggcaattgttatactcgaaatttggctggtacttcagaaggtgacacatgccaatctcagagaatatgaaccagcaaatatactgacaattatattaaatgggaaaactcattaaatatattatcctaactaagtgtaacagcttgaaggacatagataaccgagagtaagcatccatatcgctataggaacgcatactcctagtaaactccaactcgctgccagggttattgttgctattaagaacccctaggacatggttgtccagtttgtaaggccttatggtcaaagagcagttcttaagtttgctcagtacacggttgctcatgccattgctggaagacttatgaataaaccaagctattcatgtaccaagtcagatgtcactactacaaaaaccacctttagaggcagcttttttagggctttcagcatcggtttttgcaaaattcgctaccgactctgatcagggcgacactgtagggtttaatttagctgacgccatatatacccctatggcgtcggttattagctaggaaccgatgccataggggtataaatggcgtcggttactagctaataaccgacgttatatatgccgtaggaaccgacaccatatatacccgaatttctatttttttaattttatttaatttatttaaagtatatatttattaatttatataataatttatttaatttaaatttaaattacatatttatttttttaaaacgtaaattaaatattattgaaattaattttagaatttgcaaaaatacataatttcatttcatagaagtaattaaatattacacaaacattgtaaaattagtaaaagtattaacaagttaataaatctaactgcaagttaacctaaagaaataacctaagaaagaaaaattcttgggtctttcagcatcaatcgtcatcgtgaatcactgccatcaaccgttctatccactgtcgttgtattggtaacaatttatatttttggattgtattgccacttatctccaagttgttaaaaaaagaataaaaatttatattagtttatatatatatgtatattatttgttattataataaatactataatcaata

SEQ ID NO: 38563 - DNA, 2086 bp, Cannabis sativa
tatcatatgatgggatggagtggggtcgagcatacaaaatcactcgtttctacactcttaaagagactcatacaaggaagaatatcgacttcataacagaatgagagaaaggaaatgagggaagaggcatgagaatgggggagtctcgtgagataaggttctcgctgaccgttccatgtcatgccaccctcacgagataagggtctcgcggatcctactaggttgcgtcgccctagggagacgagggtctcactgacccttctgtgtcgctcaaccccaacaagatgagggtctctcgctgaccctctttagtgctattctgatccagcaagtcgaaggtcttgtcctttttcgtgctgccccgctagccctcaagcaaaaggagggacctcgctactcccgtaccgcatcattttgacttagcaagccaagggtctcgttagagcctacttccaccactccccttcagtcgagaagaagctatgctcttccgtctctcatcgtaaagtgacttcaagtaatgataacccatccaacaacttaaggactcaaccaagtctttgagtctcactaaataaggaatctctaggggacatagaaggcatgctcaagcaaagatgggttagttatctcaggcatgacacatgaaaaaactgatacaaagtagtggatgtacaagggtcgacatacattgagtacaagtagtgggggtgtactcatgtcagtaccacctgacacccgactaacaatgtctccatcccactacaacctatcatcataatagtacatggtcccaataggaaccacttacacagttcagtttgtaaacaagactactaaagcccaactataattaccattcactctattaaagaaggggttggaaccttgtgtatagagagactattgtttgaatacaaactacaacattcatttcagattttagatatgagtcttctacttaatctctaatctttctctcttttaatatatataaatatatatatatatgtatatccaagctaatcaacaagttagtccaaggtttccaatcatagctttgttgatgaattctttccgtcaacatatattatacatacatatcactaaatttatataaacaaatttctaaacttttattttcgtagtaaacataaaataggttatacttacttaaaatggtccatcactgccgtgcttcgactaccgtcgatgaagctccaccaacaacaaaatccctaactcacaaacaaacaaagataattaaaaaatacaaagataatacgatgtaacttaaatatatatatatatatatatatatgtacacataatttatacctctatgcaagctaaaaaaaagacaaccaaatcaaccacaaaactgctggagttaaagaaacacacaaaaccgttgaaggtatactaaaacactaaaagaaattgttccaatgtcgacatgtgatttcgagttgtgaaaatgagagattttgaaacaaaaaattataaagagaaatagctaaaaatggaggttggggtgatgggttttgggttttgggttttggttttccgttgtagatttgctgatagaatgaagaaaaaaaatgtcaagccatgttataggattataaaaccctttaactattcggttagtgagtgataaccgaagccatagccatcacgtttctatatggcttcggttactactaaaggataaatctcgctatttttaatgttttagcttccttttttagtagtagtgtgtcctcgttatgattagatttgtaagcattgttttaggttagttatacatgcaagcatggcttaagcatgtgcaagtgcaaccaccatttggattttggattatgattgcaaaagaaaaatcatgagattggaacaaatctttgtgatgaaattaatgaaagaaactctcaagaaagatctaagaaattaaaaactatatacaatatggaaatgtatttttactcaatttttgtaaatataacaatacccaatttttttaggtgtttttattgggatttgttgagaattatagggttccatctcaaaaccaattggcaatgagtgg

SEQ ID NO: 38564 - DNA, 1693 bp, Cannabis sativa
gaaaacttaacacagtatcagtatatagtacttttacttttgctgcaaaaaaaaaaaaaaacttattttttaaaaaatcctacctcatagtaaaaaagtaaaaagtgtaaaaattcaaaaaatttagaggactcctattgggccctattctcaggcccattgaaccaatatactgatccaaccataactcttttatcatttttcttggtttcttgattttaggaacctatatttctcattccatttccatctcacaaaaaacaaacatgataataatctattgttaaaatcttttataaacaaacaaatttattaatatattagtagtacggatattaaagtggggtaagaaaatatggacaatagatcaatccaagttatgtgacaaatactagtctataatccaataatgctaatggtaaatcaaaatgaggaataggtaattaaaaacatatatatttcccctaaaaactattatgaaatccctagatttaatctctaagcatataacaattatttagttaggagtctcaaacaaagataaatcccaataataacaacttcaaacaaagagagagtaagaacagagaaagagataaactcaaagaatggtttcactactaaaaacagctaacaacttatttaattgtcataacatatcaacaccttcaattataaatatcaacttatcaatattatcacctatattaggagttatattatgtcacatgaccccaactcaactttttataaattatttttggtataacttttttttttatatatatttttcctcacaaaataaaattttcatttttgttattataattttttttattttcgtccttataaatttaataatttttatttttattttcacatatttttatatttattcctataaaatatttttcttttatttttattcttattctcatatatttatttatgttcccagaaaatttacaatttttatttctaataaaataatatatatatttttttttattttcaataaacttcatatatttaattagttaattttttttttttttgccaaaattaatgtacatgccttattttacaagttgcgcactttggttaaatgtgcgtttattagtttacaaaaaaggtaactgaatatgttaaagttgtattttctataaattaagttgtcccatgcaattgaatgggagacatagaaactaaaccattaatatcaatattgccatcatcacttatcaaaattaattaagactttttcagttattattatgatttttttttttcatttttatacttgtttcgttattacggaattttataaagaattcctatagtaactaaaataacaatttaaattttaattaaaattcatatagcctattatataaaaactatcagaactaaatttaaaaataatatatagagtaattattattattattattattattattattattaattttgattagaattattattattattattattattttattattatagttggaaattgataggaattaaaggggccagcttcggtacgacattattggacacgtggtttgtagagaaaaaaaacatcatctatcttaaaattatgaggtcaaaaaataaggacataaaatattagaaaaaataattcaggtgatacatacaaattattgttgtccttctttctttt

SEQ ID NO: 38565 - DNA, 2200 bp, Cannabis sativa
taattctaatatgaaaaaaaaaattattgatttttttatgtgacaaaagacaatataaataataaataatctaaaaaaatggacattttgctacaaatgttgaaatggagatatttactaacataatcatatgattttaggtcatttactataattttccaatatttattttaattttttacatgagattttgttataattataatatcttttcagtaaatttttcaaaaattttaaatagtttttcgtattaaaaatatgttgaaggtttttgaacatgtatggtaaattagaataccaagattatgttatcagtactgttatctcaaattttgtccacctgacgtattatgtttacatggtcaaaagcagaagacatgtggagaacagctcatcactaacctgcaaggttagtgttgtgcaccttctaacttaccagattactattagtgcctgcagccttccaactgccaggactatatgttgtcactacaagaaatattgcttttacaccggcaaaagtatactatatgcgtcgacatacttttaccgacacataattgcgcagtaaaagatgtcagctattgttggtcggtgaaggaggttttcccgacacaattcaccattaagctggtaaaacattctttaccagcaagaataagcgccgaaaaatgtgtacactagaataaacaaaggcccttccaatagtcagcataacaaaacttttaccgacgtattaatgcgctgataaaagtgtcgggcgctttttgactgattggcacgaagggttttacatgcgtaacattgcgctggtaaaacattttcacgccaagatatttttggctcgtattaccttttatcggcacagtaatgagcccgcaaaaaggtaaacaaatttatcatgggtattttatggggggttttgcaagtgcaaaaatgcaccgacaaacttagatttatttagttttatatatttatattatattttaatcattaagtatttataataatataataatattaattataaatataaaattagattaaagaagcataattaaaaaaaataatattcatattggtaattaaaatgtattctgatcgaactaaaaaacaaaaatatttaatttgtgctaaaattagtatgtaataaaaagttctatggttaacaataaataaataaataaaatattaaaagatgtttgaaaaaaaattaagatctaaagttaattgcaaaatatatattgttccaaagacgggtaatgtcatcgtcgttgttcatctaagtcttgagaggatgcgatgacgatctagcaccacgtggagtggggaatggtagaagatccataagaggcaagttgaaaccaggcacaactcgagataagtactcaaactgatcttggaattggctgaggtagagtttttgtgtttcatactactgccttgaataccgagttgcctgctctgcatcctccacttttttctataagccctcgtattattccatagtagcactctgtggggcaaaaggagttgtggcaggtgctcttttggccacatctgccttcaatctcgagagatggccaaagcctctcagatatcgagattgctcatccagtacttgtgtcataacaagcaagtctcggaggtactaggtagatctacaacagtctcatcaagttgatccttagtgggcaatggttgatttgcagtcaattcaactatttgctctaaaataaataaattaaatagttaattagaatggaaaataaattgcaagaaacatttagaaattgttataattataaagttgcataagcttgtcgtgccaagtattgtctctgaggtggacttttgaaaagtgtccacagcagttggaagttcttctgtctcaggattagcctatatttaagaaaaaattagtgtgattattatttttacaaaaaaaaaataagacttatcaatgataactaaatatataaagttatcccatcaacaacatgtgcaacaacaggctttgatccccagcctccttgaaatttcatcttacctcgactttctttatttttttgttgttcttgcctgaaattaatatatttgtgttataacttgtcagtatgccgcttgcatgggacatggcctaaacttccaagagacgttgtggtgcgccttggccacgagtctcaacacaagatgacac

SEQ ID NO: 38566 - DNA, 1412 bp, Cannabis sativa
cggatatccgcattttgcggattggattggagtggatcgtgcggattggattgaatcagatactttgtgaatacccctaattggaactctctcagtctctctttaattattataaattataaaaatactttcaacaaatattattaaaaaaaataattataagaataaaatagtagttttataaattagtaattatctattcttcctataccaaacaatataaaaccattattactcttctttctcttatattctttatccaccttactctccctctttcctatcaaacatagtcttaatatatacctttttttttttttttatgaggagccttaatatttattttactctctatttttctaattctattcttcatttttccaattttacttttagtactaaacaatacaaaagagaacaaccatcatcttcatcctttttattttctatcctttctaaattttctatccattctactctcttttccttctaggaagcatagcctgaatgtttaagtgaaagaagaaacaaagattacatcacgccaaacaaactcaaacttcttgaaattaaaaaaccttaaattatatatagggtacatatttcataaaatagattattcaatccttgactaaaccaaacaaggtacaataattaaaatcaacaaatcagcatgaaaggaagagatcgacaatactaccaaatatgaaaatatcactttttttttttaaagaaaaaaaaaacaaaaaacaaaccatataaaaatatcacatatattgacttggcttttattaataaacgtactattttcctatatatatatataaaataacgtaatttactagtgtaagagatgatgtgacaataattataatgtgactctgcattaaagcaaaatcaatgctaattaatattttactataatgattcatcattaagattgtttttgcaattaccctttatttctttgttgcttttgctcgcttttatttttcttttttcctctttctcttaagtaaattgtagaaattgatcctctaaaccaactctttttcccactcacctaaaccaactaacttaactcttttgttatgttagttagttagttggtgctattttcttagtatgagttgggcctatacataagtctagtcttttcactttaagttaggagttaagagagacaataagagagaggatttgagagagttgcttagggttctaagttgagagttctgttcttgaagagggtcaagaacaaggggtgtactcgggttggtagagaaaaaactgtgactgttttctctggtgtgtgtcgagtactaacagagctgtgattgctcggattcttgtaattgtattgacattctcttattcacatattaatcattaatgaagaattggtgatgttt

SEQ ID NO: 38567 - DNA, 4673 bp, Cannabis sativa
  modified_base (4015)..(4039): a, c, t, g, unknown or other
  modified_base (4212)..(4215): a, c, t, g, unknown or other
agattgtgattagtcttattcatatcgaatcattcatttatatatagaaagcaagtgatcatcaattaattacataacccatggattgttgcaacattaattacacttaattaaaataaaaacgttcctaaattaaatggaagagcagttataactgttcttaattaatatcaaacgggtgtgaataatctaatcgcacattggtcgttcgtggttcactaggaatagaaagcaagtgatcatcagttacataacccatcacatgatagttgcaacattaattacacttaattaaaataaaaatgttcctaaattaaatgaaagagtggttttaaccgttcttaattaatattcaaacaggagcaaatactctaatcgtacattggtcgttcgaattcctagtaatgggtgaacgtacgggttcacttcgagttactcacatatcgggtctctggatcattgtggatgtatttgaacctgtgtataaacctctcgatatttttatacatacaaaccttccgaggttatcgaataaaattcctggaattattgcataacgagcattcgtgtgtcaaatgaagttatctattattgtatggcaacacagaactcacgggttcatgatgagttttttttttttttttgataagaagcaactttattgaaaaacaaaagaaactagtacaaactcaaagctactgaaggtgcaatatctttgagcagacccaaagtgcaggacttggcacatctcgccctgcccgcaaccgcatcagccacaccgttcaaagaccgagggcaatgagcaaaaataacaagatcaaaaagcacttacaaacacatagacaagattcaaaaataggataagtgccccaagcataaggcaaacagccattgttcaaagccataattgccaccttagaatccgataggattttgatcttcctttcaccccgctctcgagccactttcaaagctagcagaatggccaataattccccttcaagaatcccagagaccatatgaaattcaaaagccacccaagaatcacccacattcggatcagcaacttccacagccgccacaccagcagcatcatcaagaatagatgcatcacagtgatagcattgcaggtcatccaagttctccacaatcgggtcatggagatcaacccgatcaacctcttccagaggaacatctctcaactccatctcctttactctgtgtcgaatgtcatttatcaatcccgttaaagagaaggtgcaacctttaaatattaccttattcctccaatgccagaccatttcacagagacacgcagcaaatagttgaagttcctcatccctcacttgagaccaccattctccaaaatccaagatggtatcccattgaaaatcttccagtcgaattccccatcaactttgaaaccaagccgctcgaacaacactgcaggaatcaaacagatgtaaaacagattctgaagccacatgacagagagaacaagtattatcaaccaaacccaatcgttgtttcgaaggaagagtatcggaccacactttccaaaggatgagctttaaccgttgatgaatcttagaccgccaaagcttttcccaaacacgatttggattgttgaatctgctttgttgacttatccactacccgcttttaactgtatacatccctgactttgtctctttccaaaatgtgatgtcttcacttgtcgccaatggcctaattcgcaaaatggacattgccccttcttcatcaaagctttctcgtatcagttcttcattccacaatctagagccttccaggaagagatccgagaccctcacaaaagcatgcctcctagagtaatggaaactatcccgaacctcctccatagactcccctcctccaatcaaaactccagcccctgcagtacatatatgtctagcctctaaaattcccagccaagctctcaaatcgccagctcttttctccactctccaagcatccataacctgacaattactagcctccagcaacctaacccaagctttatccattcccgttagaaccatccaacaaagctttgctaacaaagccttattaatgtcactaaatcttctcaaaccaagaccaccacatcgcttgggttggcaaatctcctgccaacttttaaaagctctatatctttctttatccgaattccccacccaccagaatcgagcaacaatcctatccaactcttcacaaagagttttagggaccaaggctgtcgacataaaataccccagaatactctaaaggatcgagctaaccaaagtcgttctacccgcctgagacaaattctttgccctccaaccttctaaccgcgacataattttctctttaagaaaattgaaatccgttctcttgctagcagaaaagaaaaaaggattacccaagtacttctcatcccgaccaaggctgttcataccgatcttgttcttcagctcatctttacacctttgagaggtattaggagaaaagaccacaccactcttttgtttattcaccttttggccagaccaatcttcatatttagaaatacactgtagaagagcattcgcattcgtcccattcgcctgacaaaaaaagattgcatcatcggcataaaaaagatgagtaatcggcattgcattccgagacacctttaccccattcaattccccattattttcggctctaagaattaacttcgataagacctcgctgcacagaatgaatagaaacggtgatagcggatccccttgccggagaccccgtttaggattgaagggagtcaacggagtcccattaaggagcaccgaataagtgaccgaagtcacacaggtcatgatgatagagcacacatggtcgctgaatccgtttgctttcaaaacccgaagaaggaaggtccattccaatcgatcatacgctttgctcatatcagtttttatcgccatcaccccatgttttcctttctttctcttaaaactttgaagaacctcttgagccatgatagagcattccgctatccatctattcgggacgaaagcagactggaaaggggagactaatctgtcaataacttttttcaatctgcccgtaagaatccgagaaatgattttatagcagaagttacataagctaataggccgaaattgatcaaaccgagaggcattattaaccttagaaatcaaacataaaaaggtgtgatttaagttgggacaaaccgattgatcttcaaaaaaaccttgcaccatcttgcagacttcagccccaacaatccgccaatattttcgatagaagatgcccgagaaaccatctggtctaggtgatttaagaggatgcatatcaaaaaccacacttttaatttcttcatgatgagttattgtgtactttagccattcgggtgaaacactaggtcttcacatataattgatgcattttgcaactgtgttaacttctctctatgtctcaactttatcttctttatgcttggtataatgtgcgactagaccttatctcggtcacaccttctcgcatatttctatcatgtgaggataccctaccagtgtggggaattatagaattctcgcgattcagactggactccttgcacacatcccacaccaatgggtgtggggaacttcatcgtcagatgatggatagatgtcacgttctccatctccttccaaattggcctacctattgtaacattgtaggctaagtataattaattacagcaaagtctaccatggaccttagggtgtgtttggaaggagggagacatgggtggatggagagagaaggagggagaggggtagtgcgagatgaaaaatctatttatttggcatagaggattgtgggatggagagaagaggtagaatgatttacaatccatttgggcccaccattttgaatccttcctcaaatagaaggatttatactcctctttctaatttattttaaggctatttaacaatttttctccccgaactttgatatgtannnnnnnnnnnnnnnnnnnnnnnnntggccgttaaaaattccccttgaaatattaagattgttagatttcaggactattatctaattttagtaaaaaattctaacatggatgaaagttcagggggacatgatttagtacatatcaaagtttgaggctcatgatttggtagatatcaaagtctgaggagcatggtttannnnataaacaatcactgaaacaataaaatcgaatgaaattaccaagctggtttcttgatgaagaaactactttcttggtattttttcggtgacaatgccaattttgacgacttttccgacactgacagctactctggagacttttcgaacacaaacagcaaacttcagaaaggtcatcaaaattggcataatcatcgaaaaagtcaccaaaaaaactgatttcttcatcaagaaactaggttcttgatgaagaaacagtttcttggtaattttttcaacaaaaatgccaattccgacaacttttctgacgtcggcagcaaactatgacggacttctgaaccggcagctactccgatgactttttcaataccgacagcaaactctagaaaatttgtcggaattagcattgttgccgaaaaaattaccgaaagaaatactaagaaaccaatttcttgatgaag

SEQ ID NO: 38568 - DNA, 1217 bp, Cannabis sativa
ctcagagcacaataacggcagactgctcttataactatttctccgatactatccttacctaatatatttaaggaaattattttatataatatttttttaattttttttttaaattgaccgtttaaattgttctaatagttatttcagtaatttttatattaattgttatatgatttttagttataatttaagttactctattaattagtatgtgaatatttatataaatttttgtaaaaatacaatttttttttaataaaatatttagtatgtatcgttcaaattgttgcattttacactaatcattagatatggtcttagtcatataagataaaaagtgcttcttttagacaatttatgggcactgatattttcttttttttttttctatcaagaaaacttgatattttcttttgagagaatattgtagatttaaatacataactaaacaaaacaagagatattttcagattgagaacaatttctaaggttgattattatctatcttacataatcaaacaaaatcaaaactttgaaattacgattattatttctcctttttcaattaaaaaataattataattaaattctgatatagacactcaaacttctttttttttttttcaaataaaagaaaaagataacaacttagtataaataaaaggaaaacaattttcgaaaaaataaagaaaagactgtgctttctctctctaaagaaaaaaagcaaagaatcaattcggaggagagagtgagacaccgttttgcttcttcatcttctttgaattgggattttggggtttctggaaatcgaagaagatgatagactttgctcgggttcagaaggagcttcaagaatgcagtaaagacattgaaaaatcgggtatcaaagtcactcccaagagcgactccagtctttctcgtctcatcggcaccattcctggtccagttggaaccccttatgaaggtggtatctttcagatcgatatctccttaccaggttcattctaatattccactttaccctttttcctttttgagtttttgttttgtgttcaaatttatttttatttcgtttgtgtaatttgattgggtattaatattagaaagaaagacagaaaaaagaaattaatcaaaatgtgttgaattttatcaagaaatcatttcttttgggtaattatattaatgggtttgctgttagtaactgatatgttgtttat

SEQ ID NO: 38569 - DNA, 1397 bp, Cannabis sativa
acattcacaacatttccaacagattctgagcataataagtagtttttcgatgagaatacgatatactacaactgttgagaaatttaattgtatatcgtccttcctaatatggtaataatagtataatattagaatttttataactatttccattatagtctaaaatttgtgcgtttaaaaaataaattaatatttgattcaaatttacaattgagctctaaaaccatcttcaatgtaataggtaaaaaaaatgtgttaaatttaacacaagcatatttctttaaaattaaattaaggaaaattttcacctgcgcttatgtggacccgcaagtggccacccctaataggacggaaatttttcacttaaataggtaacggaatggggacaatcttctattttttatttattttgtaatattattttatagttattatacatatattttttatatgtttttgtagttttaaagtaaactctgaaatatatttattctattttttaaaatattgtatatttttaattattaatatataattttttttatgtaatttatcttttttatttataatatatatattttctaaataaatagatttgtcacaagcattatctggcccaatggaaattctctgctttgcacttataagaaatatggagtataggagcaaagattagtactaaaatagttaatgggaatggagatgggagagtactcctcgcttattactcctccatttatatccctaacaataataaattaaaatgtaaattgacataaaaatatttgtcataaatggtttttcaatactatagaaaaaaaatcatgtgtcaaaattataacaatattatattttgtgccaaatttaattaacttttaataagattaaggcttgaaaagattgctctagcacgatggtatgagcaaatcatgtttcatgtggcaaggctatggtttgtgttgatgcagctgggatgcttgaatacactgtaacactgttgttatctattggactaatgatggagttcttgacacaatggtcacttcgagaatggtcatatcttctcttcgagaagcgaaaacctaagctttgttgaaagttatccaacattgtcaagaaatctcatagtcaatgttcttaaaagttcgtattgataatgtgtagaaatttaatatcatatatataagatatattgattactccaattgttaattattttacaacttactatacacaccctatttttttttttttccaccacacttctagacttctaacactctttgtttatttgtttgacactttctctaatttcagtttgttttaggtgtcttggtctaaaaatgagtttgtccataatgtagcagcttgggaggatcatcataatcgtgttggcc

SEQ ID NO: 38570 - DNA, 2120 bp, Cannabis sativa
ccaaacttaatactctttttttttagtctctacttgactacacctatagatatagaatatgcagaagaagacccttttcttctctctctctctctctttcaagttgttgatggtgagaactcgtcagccaacttgtggccagaaaatcaacttatgcttcaagataaaaaacaagatgaagaaaaagatgaaatgtaaactcaaattgctatcatgaaatggagagaataatggagaaatgtctattgctctcaatatagtgttacaagtaagattttccaatccctcctcacatttggaaaaaaagatatttataggctctaatggctcgaggtataaaatggtcccaaggggacaaaatgtcgctctcacgctgcatgttgcaggtgcaggaggtggccttgcatctcatacctttacttggtgttaggtggtccttggttgcaggagggtagtcctctgttgcaggcatgtgacccctagttacaagctgcaagaggtggtccccggttgcaagcatgtgatccttggctacaggttatagaagggtggtccccagttgtaggcatgtgatccctggtcataggagggtggtctccgattgtaggcatgtgctccctagttataagttccaggagggtgactgtagtgtacccttgtcgagtttttagaccttgtaggtccgttgtcaccgctactcataccttctcatttttagagtctttaggaggcgtggttgtatgctttttccttgcatgtcctgtcctttgattcctcctccaatgtcattcttgtcgatgtgcattcacctctcgctttatacttacaacccctaaaacacattcacgcaacacagacaacgactcgcatgcgagatctctaatgggctcgcatgtgaacccccaacacccaacatatgcatacacgacttgcatgcgagccccccatggactcgcatgtgagctcccatactcttcacacacacatgacaccccttccccacacacacgcgacttgcatgcgagccccatacacttgcacggtcgcaccaacacacacacacaacaccccttcccccccacacacggctcgcatgtgagccccccatgggctcgcatccgagcccccatacactcgaccaacacacacacacacacacactaacacgtaaaacaacactcacacacgcccacggcttgcatgcgaggcccctacttgcaccaacacaccctcgcacacccatgcacatggcgctcatccacacatgtacaacctctccttcttacgcctgtgctttcatcgttggatcaccgcatgaccaatcattaaattgcaagggtgcatcctgggaattgcgagtatttatggcggtgttgcgaaatacatatcgagtaggtaagctcatttaatgcgcttttgttaattgctttgacattagttaactaaccttagaaattagcagcgctaattttcggggttaacacttaccccctagtctataagaattcttttatgtgttcttatcgactaagtgagttgggaaatctcccttgccgaagtgtgagaccctcttggttttcttcgaggaagtgcccgtcttttttttactgagcaatctaatccctcatgcggttaagcaacaattttacttgacattggctgaatgactctgagggttgctctttagcccaaaaaatttagtaactggcgttggccgagcgactctggagatcactctttggccaagccattttcgtaacttgcgttggccgagcggctccgagggtcattctttggctaagccaatttcgtaatcgacgttggccgagcaactctgggggtcactctttggccaagccattttttgttgtggtaagcgtgcatccatttgagggagtatggctctttgagcagtctcaacctcttatcatttcttcatccttttactccaatgggagggagcttatgacacttgactgcgctaccctcttgacttgcaattgtttgcttactcttgagaggcgttcccctcgttttagcgttaggccatgagtgtcttttgagatctctgttggctaggtaacttttgtggggagaggtatgtgttgggttttatgccc

SEQ ID NO: 38571 - DNA, 2436 bp, Cannabis sativa
tagaggttgcaccaccaggaaccaaactccaggatattatcccaatggaaagagtcaagtctaactccctttcgaaaccgcagacccctagtgaacggacattgacagaatatatgcagagatgactcaatctcagtattacagaaacaacacataagactttgcacctgaatgaaactggttctactagtagtagggagaatgttcgaaaacattctccaacagaaaagcttcaatcggggatgaatacttgtcttccacagtttctcccaagtttttgattcatcctttagatgctgtttttggctgttccagtaagcgcttttcaccgagaattttcctgatttggacgctttccaaaatagaatatcaggtccttcttggatcagtttgatcttcaagatctcaatagcaatgtcctcttcaaagcattctctaatcagagtttcattccacaaacgagttccttcaatatacagatctttaactttccatagagcctgattgtgaacgaattgaaatcggtctttgatgttttcggaatacaccaagggatccaaggtctgtcccacaattcgcactctccttcagcaatcaaaacacccgcactatccacacagattttcctagcttgaagcaaacttttccacactcttgagtcagtatcttgtttatccacttgccaagcgttaaccttgtgacagtattgatccaaaaataatctcacccacactttgtcatttccctgtaagatcatccaaaaacgttttgcgagtagagccatattcatgtctttaaaatgacggagaccaagaccaccacacttctttggctgacagatttcatcctaacacttcagagcacaataattccttttgtcagaattgccaatccaccaaaacttagccagaatccgatccaattcttcacaaagtgtgctagggacttggacagtagacataaagtaagtagggatactttgtaaaacagagccgattagaataattctaccctcttgtgaaaggtgcttagccttccacccctcaagcttcgacaaaattctttccttcaagaagaggtagtcatctcttcttttagctgtgaaaaagaaagggttacctaaatacttctccgatgccttaattgggttcattccaatgattctcttaatgtcctcgcacatccgagaggttgtgtttggagaaaacacaactctacttttttgcttgctcacacgttgaccagaccttctctcatatttttggatacattgcataagattactagcattcccgactgtagcctggcaaaagaagatagaatcatctgcataaaaaaggtgagttataggacaagcatttcaggcaatccggatcccagagatagccttatctttttctgctttaagaattagctttgacaacacttcactacagaggatgaataagaacggggacagcgggtctccttgccttagacctcgtttaggattgaagggagccaaaagtgctctgttgaggagaattgaatagctgaccgtggtaacacattgcattatcaggttacagaccttgtcattgaaaccgtttgcttttaaaacccgaaggaggaagtcccattcaagtcgatcatacgctttgttcatgtccttcttaatcgccataaccccattttttcctttcttctttttcatagcatggagagtttcttgagcaattaaagagctttcagcaatccatcttcctgggataatggcagattgggaaggagaaacaagtctatccaaaattatctttatacggtcagtcaagaggcgagagataattttataagtaaaattgcacagaattataggtctaaaaagatcaacacgatcagcattcaggattttaggaattaggcatatgaaagtctggttaagttgcttgtttatcaccccattcaagaaaaaatctttaactagataacaaacttcccttcccataatatgccagtattttcggtagaagatacctgagaaaccgtcaggacccggagatttcagaggatgaactttaaacaccacatttttgatttcgttgtcatccgggacacggctgataagatcattctccacagtcgtcaccttgtcatgatacagagtctccaattccacgtcgatagacaccccagtctgagtaaatatgtctctaaatttttcctgaaaatggtctccaatggcatctctctgtctcaaccaagctccctccggggtcattacacttccaatgaagttacgccttctccgaatgatggtagaaacatggaaaaacttagagttggaatccccaaaccgaatccaattttcacgagacttctgcctccaaattctgtccatccttccttcaagggtcataatttcaagctggatacaagcttcttgctcaacagagtaat

SEQ ID NO: 38572 - DNA, 3706 bp, Cannabis sativa
gtcaacctcatatttccattttagtgggtctaattaagtctatccattataatttcttatgtcctcattataatttatatataattgaaaatttcaagtttatatatagatggtaaatattattttaaatcctatattttgtaaaagttactaattaaacattttgttttattaaataacaaaacaaatcatgtattttttaaaatagtacaaaaagaaccctaaattgattttttgtcaaaataaaatttaataataaatatccgatctaaatgtattatgacaaaattgtttacattttatgtatctgttcgtattaggaattgtcttagagttgattatattttaaaaaaaaaatatataaaaaattaagctcaggatcctatttttactattttaaaaaatacatagtctatttttatcatttaacaaaataaaagaacaaatctataatttttacaaaacataaagtccaaaataatatttatctttatatatttatatatttctcaaccaaaatatttcacttttcttgcttttgattgaagtgggtatatatatatctggttttgttttgtttaatggtggacctaactataccaccatgaagaatcattactcttgcttctatcttttcatgagttttaagttgcttagtctttgtttaacttaattctaatcacatgaagccataaagtgggtccatgtaataatttgtaaagattattaatcaatccttcattcattaacaaaaatatgggaaaattcttatgtttgtctcattgaatagaatagatatacatatttcaattattcaaacacacacacctccctaatttgtcaaaacaccccaaaatctctaacaaaatcaatattttcaaacatctaattaaaaccacacagatctcgaaaagtatcatcgtatcattcatgcttaagttggaaaaaaaaaatccaaattattatgatcattttattaaaaacatatataattacatatacccaaattccaaaatatgaaaaataaaacggtaatatatatataatggtggtgtagttataattaaattccattgagtgaagaccttttgggtttgaccagatgaaagcttatagtctactttgtcacttattatagttatgtaaccttagaggatacaataataaaaactgatagcgtactatagtagcacatcataactagggctagtaaatatatatatgaccttaacgtgtacacgaagatttatatatgtgagaaaatgtaatgtttgtttggagagatggaaaatcttatacgccaaaaatgtattatcactcacattatttacatatatagtcttgtcagttttcaatgtgcagcaccaaaaaaaaaaaaaaaagttatttatttatatatattttgaggtatatatgaattaataaataaggtcacggcatgggattgggagggaatttaaacgtagaacatcattacatgaattatggcattgtagtcagcagcctcatgcatggggtcgaactactcatcatatcatctctaatgtctattctatataatataatatatatatgtattattgattcgaaaaaagtgaagttgaaaatggatttatataaatatatctataccttagtacggtttttatatgtaaacattaattaataaccatgcttattgttgtgaaattttcaaattatacataagtgaaagtataataataaaagttaagtatcatgatcttacaaaaattgtagttaagtattaaataattaaattttaaattttaatttatctggttacaaaattatatttttttaaagaagtttagaaattaagaaaaattatattgaaaacaataaaagaaaaatagtaaatagcaataatcaaaatttggggtacttaattgtattaatgtcttatggtccaatacaattttaattactatatatttaatagcagatttaacactttcaatctatattcttataaagatatatagaatttaaattatatgtgaaagttctatagtaaattacacatataatttgtattaagtatagaaattctaattactacacattttcttctaatatcgaagtctatatctattttacaatagaataatcaacacactttttaagatttaatttgcattgaaatgataaatatataattggtgatcaagctataagaattaagcacaaataaaatagaggcaaataagaaattggagaagaattaatttgtattaaaccatcaagaaatatcaaacaatatccattaattgtctaattaaaagtttaactacccattgtcatggtgaacaattgaattaaactaattggaaacatcaaattaaaataagaagaaaagaactcgtagataaacaatggtagtagtctcttcagtcgctttctgcctccaatttcgtatcccaaaagtctaaaatccaaaagctctcctcctccttcaaaattagagtttaaaaactctcataagtgcctaactccctcagcgagccgtgacattggcttatgcaatgacctgttaataacccctaaaagtattagatgtgacaagttactattaggggtgcgacaaaaatcgcctctaataaattgaaaattacccattgcccaaaggcgagaattttcccacttatactagtaggggcaactttttcgccactaatggacgtcgcccctaatagttttgcatttaaagcccgtatccccttcttccacgacccataattatcttccctttccaattttttcatctgaaaaacctccattaacaatcctgacccccatgaccacaaacaagaagaagaggaagaggagaaagcaaccattaaagaccccgaccccgagaccacgaaaacaagaagaagaggaagaggagagagcagccattaatgatcccgagaacaaggtttgtgttttatttggttttttttatttttagaaattttttcattttcatcttcttatttagaggaaatcggtccatcacattggtccaacaggtcaatgactgtaaattttctaagaatcaggactccagtctttaagaaccatggagtcttgtaagaccatgtgatgaatctgttcctcattaaaagatagcgctagactcaagaactctctagtcttgacctttagtttcacctaccaattcttctcctctagcttccataatcgacataggtgattttttaaggagtccctactataatcccgattaattagtgcagagacgacccatgaaataaggcttacccaccttgtcagccagatagaagatcttccatcgtcggcaattcatacactacgctttcaaaaaagaatgcctttcgcgaggcgagggcaaacccaagggaaagagttggagtaattccaaaccctaacaaagcactccaaacttttcaaaaccaatactacactaaaatcatttggtgctatctaacttttaatgactgactaaagtggggtacctagtttagtacttattataatcaaataattttttgccgacatcgttaacaataacggtctagctggtaataaaagtcttattattaatttaccattcaaagtgaaaacaattattttacttttacttttgtttgtaaaaaactcctttatatcaaatattatgctagcttttaactaacactatatatatagctaattaattagc

SEQ ID NO: 38573 - DNA, 2925 bp, Cannabis sativa
tgaccggagcctagacgcaataaaagaaccaccgtcaaccaatgaagaaaataaaaagaggaatagtagtgcctccacactccaaactcgagcaaggacataccatcttcaaagctccaccaccagaccattgagaaaggttgaatccaccaccattaatcccagtcgaactaaggcccccaatcgtcggcgaccaacaccactcaccacataccatcgtcgagaccaaaagccaccacaaccagaactgctatactagagaaaacaagaatgtaagatcccattcttagtgaccccgaatctaactgtaacaaccaaacccactgactgtcgacacctataaccaacgtctaccaaccatctaaaatcattttagtgataaatttttagtcacaacataaattctttgtagctaaatgtgactttttgtcaccacaaaaaattatttatgactaaaaataaagtacttaaatacaagttgtcactaatttaattttagtcacaacaagtattatgactaaaaatatttttagtcacaacaaagtgtaatttttgtgattaatacttttagtacacttcggccaaagcaaaggctaggagcgacctccttggccgaaatagacaaagagaccaaaaagaagaaaaccttaggctatgtttggtgggagggagggagagtaggatggatggagaggttagagaggatgaggagtaagatgaatgaaaatgattgttaatctccttcctattgtttgatattaggtgtgaggtgggaatgatggaaaaaaaattgattagtaaaattacaaaattacccttttaaaaataaaactttactagttttttaaaggtaataattgtattttgcaaaatatattttatctttttctacaatccttttggagagattaagttttgaaaaatttgaaggtttggatctccctcgatctctcctctccatttttcttcctcttgccaaacaagtgatttagtctctccttccatctatcttcctccacccctctccatccacccatcttcctctcctaccaaacatagtgttagacgggaacaagagggtctcaagcgagagggagcgtctaactatcaaatcaataaatatatattttttcttttgaaaaggggaatcaatattaattgcaccatatttttatatccaacgtaatataattacatatcaattcttacagtaacttttacatttttttttcttgtaggatcaacagtaactttacattgaatgatgatccaatgctaaaaataaaaaaaaaaataaattaaaaaaaaatgaccgtcataattgaaagtcgtacacttgtaccaattaagattccatattccaaaaatttacaaaagaacatagcaatgaagttaatttacaaaagcatgatctaattcaaaaacacatgttgacccctgttagttcttatgaccaagtttgtagtcaataatacctctatacaaaacttgcctatttaatggcatattaagaggatgatgaggttgcttctccatcttctttttccgatactcctcgttatttgaagatggttcaaccacatcttctgcaaatctcaccgttttattactactgcttctcttcatacaagaacctcctatacaacaccaaaacaattttaggtagaaaaagaaaaagggtatttttcaaaatattaagaaataaaatacacataccaattccaaatcttcttttgggaagacccaattcgaattcaatgtctttcataaagtcagaaaggacacgtttgtggatttgatgagcaagaagaacaacacttcctgtcactgcaaataccgccatgaatcctactcccatggagttttccatctctctctctgtttttctctataaatatttatatgatatgatattgatgatatatgtgtgtgtgaattaatatatatacatggattttcaattaggatcaaagactatgaacattggtttttaagactttaaggaaaggacatggaaaaaagacagggaaagtattacagatcaagattatgaccattcccaaggaaaagaaatgaaagagaaatttgttggttggctttaattttttattatgttgaaataatttaaaaagaattaaggtatgggaaaatgggcggtatgaacaaggcatttatgattatgattgactatgagatttttatttgtttgttaaaatggaaaaagagctgtgaaaaaatatttcttttttggggttagaaaatgatgccttaacccccctttcttttttacctgtctttatcctctgcctcaagattatttggtaagtaatctaacaaaaaaaaaaaattaatggttttcaacttgacttaaaatacctaaggtgtcttgtggtaattttatacttgtttcgtgtattatatagggaaatagatttgttaggagctaaaataaaaagtaccatagattttgttatggctcacaaaatgactgtaatccactaactattactattttttttttcaaatatcaaccattgatatcagtactaaatttggttttatgttttgtcaaataaaaaaaaattaataataacattgttacagtttaaaaaaatatatatgaatatgtttgaaaaaaaatcataatattgttggaaaagtaaaattaataaaataaacgatttttttaatatatggaaaggaaaagagatttttttatttaattgttttttaaaagagaaaagggaaaaatgatcagctgtttaaatgtggagggtggtagagtagtgaggacttaactgtttcgcacgtctgaaaaaatcgttccaactaccttcaagttgatgaatgatgacgtggcttcttcagtaatattactttattgaatgaatattttactagaattgttagttttttttttttttt

SEQ ID NO: 38574 - DNA, 2465 bp, Cannabis sativa
ctacaatgtgggtccgcccgtgcatccactcacttcttccttctaccaaacatagtgttaaacttactacgaaaaggcagaaggagagtaataaaagaatgtatggtggttttaggaaaacttcctttagatgttggaccaattggaatattcaaaggtgttgaagtgtcctccatagttggtggtgattttttcttcaatcaaacttacaacttaaatttgtgtattcttatatggtgcatgttgtgtggtggcttaaatttatatgttttaagatattgtaatatcttaaaacatatacaacttaaatttgtgtgttcttatatggtgcatgttctaacgtaatatccctataggacctgacctttatggtctaacttgaccagaacatgtacaatctaccgtcaaagccctcaaactcataaggcctagtaagaaagcataatcaaacccaaaataatcacgtaacatttatctcatttaatacgccactttgttaataactatgcctctacactaatataacacgccacattatttataatgatgccaccacatcttagatctattttgtatagacaccgcgtgttatgcccacatgtctatttagtttataatgccttattaggatttatcttggtttgattaccaagtctaatctaattatatcttagatgcataacccttgtcatttatccacacaacttatttaacatattttcatatataggaacttttagagtgatagccctaacacttattcctatatatgtaactacatagcatataaaaggtgtcatagcattaaactctaagtgtaaagttcactttcttacctagattccaacgttagtggagaattccaattgacagataatcttgattaagtggtggtactcctagtcacaaactcaagtacaaacacaatagaattaatttccaatcacataacaatatttataaataactaggtttcaaaatatagactaaatggtagagtttttcacaagattttcaacgatataaaatacattcaaaacggagctagaaataaaaaattatcgccaaaacaagttacgaaaaatttcagttctattgaactataagggccgggactctgcaactaaggtcgtggctctcttgttacagagagcaaaaacaacgaaaaaataaaggtcgcaactcccaagaatagggtcgcgatgcctaaactaaaaatcaagattttttactctaaaaatacaccaaaatacaacttagaaacttgaaattaaacttaaattcatgctcaaagtttaagtttcagctcaaaaacatcgcataccaaaatacatgaagcaaaacaagattaaaacccactaatcaacttcaactatgactctaattatcatagctatgcaattatcacccaaaaacatcatcatcagtactcaaattcaagaacggcatatatgaactcaaatcctaaaattaaattaaaaaattcaaatattaaagaatcaaattcatacctcaattagattgcacaatcactaactatagaattcaccaagcaatcaagtaaaaactaagttttttttacaaagagggaaagagagaatgaaaggggcgatgaagctcttcaaggctgaaagaaatatgaatatcacttatattaaataaaattcctttatcaacatagcaataagtggcaacaggctacaaacatcataaaatggatcaaaaggcattgacatttcattaactcacacaattaatcaaataaaattatttaatagtcataacacataatatgattctgaactcagtctcaatcaaaatacctatttataattataccgcactaatttgtcgaaaattacttatatgctaattaggatttttgtcccctgaactttagcatataccaaattatgccccatcaacttttttggctgttaaaaattccctctgaactattaaaattgttggatttaaggacttttgtccaattttatttaattttgtactaaatcatgctccctagactttgatatttaccaaatcatgttcctcgaactttgacatttgtcaaatcattctctttgaactttcacctttattagacttttcttactaaaattagacaaaagtccttaaatcaaataatcttaatagttcagaaagaatttttaacggtcttcaaagttcaggaggcacgatttagtacatgtcaaagttcgggaggtaaaaatcataattagccttacttataacacaataaaacgaacacactacataataatatagtcaactagcaaataacataataaaattacaactttactcttatcgggtcaaaattatagaaaacatccttatacacataaatgaggtcttaaattcaaatattcacatataattaattatataatttcccattaattaagttaattagaatttttttttttttttggtaaataagt

SEQ ID NO: 38575 - DNA, 1101 bp, Cannabis sativa
aaagtaaatttaaagagaggcttgccaccaaatcatacttctggaaatacaatattgtaaaaatgttcaaatttttatatattaacatatatttatcaacatatgactattttttatttttgataaatattatcaacatattactatgagctgttacatataatatcggtattgaattatgacagctaccactatatatacatgtcccttgatatatatcagaagttttttttttggcttgaaaagacgagttaataaaagtacacaacaaccgtccaatatttgataggaatttcaatttaatagagtccatatcgtacataaaaactataattccgagccaatattttcaggctcttaattttccatgggccagtactaaaagtagataaaaaggaatgaaaatcataagtttgcagtgaacttatctcgtacagtacaaactatatgctcctggttttttgcagccaaattagtacatgatatttaatataaatatgtatatgtataagagttagtagaagatatttaatatatatatatatcgtgttattgttaatctcctattataatattgtagtcaatttctgtgcttgaaagtacatgccgaaatattattttttttccatggcagtattcgttattcttacaacattatctctgtaaatttttataaatttttacatagtttatagtgtcgaaaatacgtatgaagtttattaaacatgcgtggtaaactggaatattaacaactttgctttcgctactgtaaactattcagattttttcaaaaattacagggatgatactgtaactacaacaaatactgtttactgaaattttcagaaactaattaaatgaaagctttagggattaaatatctatttaataaatgagacgatattttttacacgattcaggtattaagtattcctagtcaacaagtcaatatattggcctttataggaatttaaatgtattacaagtggtgtttacgatgaaaacataactctggttctctgggtttctcttgaagaagatgaaagcttagaaagtattttaggagagcttcgaatatgtaattttttgaccccccccccc

SEQ ID NO: 38576 - DNA, 2927 bp, Cannabis sativa
  modified_base (85)..(89): a, c, t, g, unknown or other
tatacttgagatctgtctcacattctcactattataattcaaagagagccactctagaactcacaatacttgtgatctgagtggnnnnntctctcatatcaatacaactaaaagggaagtaagtcgtcacccgctaactaaagtggtcaaacctttataaaattgttgtgtccttttatttaagtgtttacacgtggtgattccgaacataaataagattccactgctagttgaccaaatctaaggtaaatatatataaatatataaaatctaaaataaaactagttcaatataatatatttttaaaaactaataaaatttatgtttatttgaattatttttatgttgtgttattttttttaaatgggaaataactttgtggtaaatttgaaataaaaataaaaaatgagcaaatgacattaaaagaaataagtaaaatcttaaacaaataataatgtcattgattaataaagtgtagtaaaataatatacttgtcatctcataaactttctatttttttttctcataattttgaaaatagcccaaaaatattcttttaagcaaataaataaataaataaataaatatacaagtcacaaaattttcaaaagcaaaccgttgattgtacaaaaaaaaaaaaacaaaataagagatgtagaataattcttgttatgtatttataaatattaataataaaaaagaaatgaagaggtgtttctctagaagagaaatgaaaaagaagaaaaactcatcaatatatgttaaatggagtaaagaaaggagatagtgaggggtttattaatatttataagaagtgtatagctgaaaagtgttcctaaagtactttatacgccatatatactacttttcttccaaaatataaaatatgataattatatatacataattctcatatctatataaatatatagatataatataatactggccatgtcaatttattttgtcttgctcgcaagtacagaagaaatccatacttgttttgcttattactaattaatgacagaggtaataattaaacatattactacataaaacaaccattagaagaacacgaaaactaaaaacatactttaggcaccaaatcacatatcagtccatattgaatacccaaatacattatttaactagcactatatcatagcactattagatagatatcatcacacaacaccaaattaacaaaacaaagttccacatcctagaaaaagaaaaaagaaaaacaacagtactcaaagagacactcagtcacagtacccagccgtagaagtaagttgaccatagcactagtagcaccatacgtgttagaaagagagaaagccacgtgtatcaatgtccagcagtaggaccatcgatgtggcaacacttgtagctaacaaaagtctccatggtgcgagggcattctgggcattgcatcacatccggagcctttccagcaacggtcggcaactcaaggcggcagcaatggcgaacagactggataaccttgctatggtactccttgaaaataacctcgaaacttctgtccttggcaaagtccttccacctgtcaaactcctccaaaaccctaaggatggtgaaaccatggccagtaaccacgacagtagatcctttggtgagcacagcccatccattctcgttcttgtaggaaagcagcttctggatctcttgggtcacaggatccacagcttgtttgtgagccttggtgaagaacaagctctctattccggtccagaacttgcctaagatgccatggtcttctcctcctttggctgtttttccaacacagaacaactcaatcttgatctttaaggtgtccttgatgaaggggtcgtttataagctgagtggctctcttagtgaactgttggatccagtcgttgtctttccctccatagaaaaagatatatttctcttctttgacctgttcaaatcaaaccataatcaataaattatttattcaaaaaaaaataataaaaaatatgtagctcaaataaaagagctataataatatacccaagccggaatactggggtggatgtcgtgaaccaaaggaccaatccaggtgagctccttggatatctcttcttcgacagttttgttgaaaggaaaggccttaactccccatacacgaatgaggtgaagagcattgtagttttcaattttgccttgagggttcagcacaactagagtaggcttgcccttatagttccattcttgcttgatgaactttaagcctgcaatgggtgagaagtactgaacgacataccacggcatcttgactctaatgctttcgaactttttcttcagctcctcagtccactgctccacaacaggaatccatacaatcttgaacttatcgtctttccttgtaacttcataaataggtttgagaacagtaatgtcttcttcggtgatatccaggcctgtgatgtatagcagcaaattctttctcctcagaacttcgatttgaacctgtttaattattccaagaatcaatcaatcagaaactagcaaatgtacaacccaacccaggtaaaataaggtccaacaccaacatttagttttttacttttcaagaatgatgagttctaagataaaactaagcaataattacacccatgaaattaataaataatatacggggtgaatataaatgttggcaaacagagcaataaataccgttttgttagttgaaccgtcaataagaggatgaacagtgcccttagtaaagatcaaggccttgaaaatctccatgatctcagttggagttttgaacagtttccacagcctcctgtaactctctgcctcatctgtatataattaatacaaaattaataatcctccttaattgataaagctcgacactacaaactacaagtaattaatagaacaactcacagttat

SEQ ID NO: 38577 - DNA, 3675 bp, Cannabis sativa
tcagactcttaggcatacattaggctacaaaaatagaagcaaataaatgttcttaatttattctcattctagatcattttacagatgatggtttgagttaaatttatcacacttaatattaaaattaacatgagatgaataatacgtaattttaattaatcggagatgttgtggcgactctcaaaataattaaaattatatatgttatttatactctttatctcaaaataataatttaagatataaattatttcattttatatataaaattgttatcatcacttgcaagtaacatattgtctatatataaaataaatattactcccactaaccttctggtatataattatttccataatgttcttttcaaacctaaagaaaagatgacataatgaaagtaccgtttgtgagatattttgtaatattctaaaaaatataatgatatttaattggtcatattttattaaatatataattaagtgggcattagagtaggattataatcctacttaagctaattacgagttaattagtgaaatactagtaagtgaacaaataaagcgtaatttattaattacagaggttttatcagactatgggggtatcgtggataccatttttgaaataagatattttcgggttcagcggtcgtggaaactcgacaaaatggtcagaaatgtcacagcgattagagttgtattatgttggaattacactggactagttgagaaagttggattgtgagtctgttcgggaaaattaaaataaccaaaatacccctaggttgtgtttagttaaagtttagtgggaggggtaaaatagtcattttaccaagtattatcctagttttgtcttatatgaattttagcttttgttggctgaattagaattatatttaagtttattaattttaaattaaggttaggaaattcaagataaaaccaaaaaaaaaacaaggatacacatattgatccttcttttctctctctctctctctctcgagaatcctagaagcccagctaaaaactaagtttttcttctttaatcaaccgattctagactgaattaaagccaattttaggtgctgcccaagcttggagataagtcttattccttccgtttgattttctaggtttatggttaagtttttattgggatttcttttgatttcggcttgtgtaattgttgaggttcggagtatgattctaaggttaaattaggtttgtttaattgtgaattggatgattttcatggttgttaaaattggaaatgaaagaattaatgtttaagaactcaagtttgctcaatcatggtgttttgtttactttgatgaatttctgggaattgtttgattgtttataatgtttttatggtatggaactgttctggaaggtgtgagtagatttgttggtgaattggttgggttttgatgtggaaaatcaggatttcccaccctgctacaaaaattggttagccaattttacaggtgctatgaaatcgatcaaccagtttgcctataggggaaaccctagttttcggttcgaaaccaatttttcttgaggtgtttttcagagcttggattaggatattctagggatgtttaagctaatttttaaccagtggggagttagaatttgtccggttgtgaattagagattattttggggattggataagtgattaatcaagttacgttattcgtgacataggacccgggatcgtcgagcatggttccacccaggtgcccgcacacccgatatcggtttgaggtgagaaaagttatttgcaccactaagcatgttagtaagaaacaattattatcgtttgtgactcgattatgatcgaggtaatgatacggaacgattattatcgtttgtgactcgattataataaaatatacgatcattaccgttattgtggatggataaagatacggtcattgccgttaatgaaatgagtaattactcccttgaaaccacatataggtttcttacttatcgagtgctttaacgggcaacgatagtgacatacgtagctcgtggacaacgagtggtaaggatgctttgtgaagcatcaaagtcggattgtcttataagacaattaattgtatgtgaaatgcgtgattatgtattgagataaatatctaattactataataataagttgttagccatggtttgctatgattttcttgtaatgtgtaatatatgtgtttgtatttatttgcttttcttactaagtctttgtgactcacaagtgctttgtggtgcaggtaaagggaaaagaaactgtggttcaaccatgagtcagaggtctcccaacgatgtacatatcaactgcgatgtttcagctgccagtggataggatccatccttaattttgactattttagggaattgtaaccctattttgtaaatctggttttgaactaaattgtgaaagtttttgaacagtggatccccgtacttatcaatcttttgaataaaagttacgttttagtttaatctgaaagtttttaattaaactgtatttttcctaaactaatagattaattctgaattagtttgtataaccacacacgtggtattcctataggtcagggcattacatgtttgttttattctataggtagacttcttaagtttacatatgttcaccaatattagagggaaaatctttatagttatctatataccttatcctctagttcactgtttgaaattgattaatgaattgaaatgagcaacaaatgtcaagattactatagtagaatcttttataaagacaagtgagaatgtaaatctcctttgctattgattcttagttcaaaatgaatttcttagcaatgaatcttgttttatatctttatgttttaccattgttgcttgcctcctaatgagtatttattggtaagaaacctatgattaatgttcttcacccccattagatagacttcattgatctttaggatattcattgatttatccaaggcatattgtaccacaattttaattatttacattctatagttttaatttgtgtctcaaaattaatattgttgttgaactcttattgtacataatgtaatcactaaaaaatattgatcttatttttctaataagtcattttaaggatggaccagcaaactctttaaaaagaaaatggttcaacatgaatgttgtttaaaagttgtatgcaattactaaataacatgacttattagaattttatcaatgacttgtggattattaatgattagttatggattctcaataactataaacttaaaggttgttttaaatcataattaatctaatacttgaggtgagagtttgagaaaataaattatcttttctagaaacttggttcctagatcgatcgctcccactgatcaaatcaattcttaatccacaattctagtgttgtgggatggataataaaacatgtaactcttagaccttatagcatttatggtatttgggtcatgatttttcttataacaattgtactctaaatgtattctggtatttctaaaatgtgtacattgcatgaagtcggtttccaactttatgacaactcaaaatatgtttgagaaacaactttggttagaacacgattcgatatgtacaccccattgttgagtatcaatagacaaagatttaggaaagattggag

SEQ ID NO: 38578 - DNA, 928 bp, Cannabis sativa
acacggaggagcacacaatcagaccacccacacgacccacgacccacgactcacaaacaacctcaacctcgcgaccacaccacccacacgacccatggaccaccgcgatcggaccaccgcaaccaccaccaaacaccgacaatgtcttcatcaaaggtatccctaattttttcatgaatttttaactgtaatcatatcatttttttttcatgatttagggttaaaaaaaattagatttagggttaagtctatgtttttagtggataatatgtgattattgaggtttttaggcaaggatctgtcttttggaggaaatatacgatttttgcctagcccgatgcatgtttgatgtaggcctgatatagggcttgatggtaggttaatgtcgaaggggttgaaggttgaagaagataactcgataggtccgatatagggaccgatagtaggcctgatggtcctcataattttaagttttattgtgaaaattatgaggaccgccgggcctactatcgggcccaatatcagacttatcaggctatcttcttcaaccttcagccccttcaacattaacctaccatcgcgccctatatcagggcaacatcaaacttgtatcgagccaggcaagaatcacagattctcccccaaaacacagacttgagcttaaaaacctcaaaaatcacatattttctacttaaaacacagacctaaccctaaatctaattgctttaaccctaaatcatgaaaaaaaaatgattatagttaaaaattcatgaaaaaattagggattacctttgacgaagacattgtcagcgttcggtggtgtggttgtgaggtcgaggtggtccgtgagtcgtaggtcatgtggatggttcgattgtgtgctctttcgtgtgcgtgtttatatatatatttagagagagagagagag

SEQ ID NO: 38579 - DNA, 2106 bp, Cannabis sativa
tacctccaaccaaacgccaccttggtttatttcctaacattattattttatttttttgctaatttagattttggcgttctaaactttgatgtctttaaattttttaggccgttagaaattctcttcaactattgagattgttggatttaaagacttttgttcatttcattcaatttactaatttggtcattatacatgtactatattatgctccttaaactttgaaatctacaaaatcaagttctttaaacttttattcgtgttaaacttttcttactaaaattagaaaaaagtccttaatttcaacaatttcaatagtttagagagaattttaaacggtcttcaaagttcacggaacataatttggtatatatcaaaattcgaagggcaaaaatcataattagccttatttttttttctgaaattattttgaaacattattggttttttgttttgatttaaattgttaaattaaaatatataagtcttgaaatgatttggtttgaaagcaacaatatgttatggcagatggtgttcttatctcatatacgagttgtcttgtataatggaagtcagtcaatttttttagttggtgatagagttaaattttagattaagtcgctagagaatgcaatcaaggtaattgttgatgctgccattctttgtgatcaaactgcgtttgattatggcataatcgctcagggcaattaatgatggctaggttgtgtaattttgctagtattgacgctccgaatttggctgaagcaattggtattaaggaagagctaagctgaattaaaattcaaccgtagaagaaagtggagttggagttagattgctggatagcagtacatgctattcgaaatttattacctgtgcttttttttttaaggttattatagaagattattgcaaatttcttgcatttttaaacaatattttcttgttttttattaaatgatatgcaagatgattgttcatagtcttgctagagtatcttgataagcatttctcttagtgggagaaacaataactctaaagaaaaatgataagagataacgtacatcagaaattaactctgtaaaacatgataaatctgaagatgaagcatttaaagcattggagactcgcaaagcattagtttatgtgttatcgagagttgtaactgcgcgacccaattaaggctatgaaaaagggccttagcccccatcttatctaatctaaagcacccttgtacaacttttgaaagggctgtgataaccttgccatcatgattcatgatctcgtatgaatgcacctacaccaagcttttttgcatcaaagttcacagcagcatcaaagtttaacttcaagccatttaggtttggtggcttctaagggacactttcttttggcatgtcatttttgagtgtggaggttgttatagtggatgtagtagcaggcatcagctaggtttcttagcctttaggaaattattaagatatgatcttgcataagcagcaatggaggaactttgcctactcactccaccatgaaaaactctatttcaatcactccagatagtctacataatacaaatgaataattctaaatcagcttgattacgaagagagaaaaggtgcaacaagtaatcaacattaaacatacgttgtgcttgtccataattaatagaaaatttggatttagcatgtttacaaccaaatagtgtatgcccaatcgattcccaagctgatgtgcacagcgaacaagttgctgaatcaataattcttttcttataaagagaagcagccacaggtaagacatgttgaacaactttccaagcaaaaattctaatctttggaggcaaattcaaattccaaaaatacttccaccaatcgcgttgaggatcaaaagtggaagaatctagttgttcctccaacgatgtcaaaaccagatttcaccgtgtatacaccaactgtagtgtaatgccatatgagtcggtcataggttgcaaagaaactcagagaaatcgacatgattcgatcaatatcaataggcttgaaatatgaattcaacatagaaacatcccattctctattgtcggtgataaaattagaaacatgcatt

SEQ ID NO: 38580 - DNA, 1318 bp, Cannabis sativa
  modified_base (582)..(593): a, c, t, g, unknown or other
attttgtacatttaagtttttatgccatatatatcaaaacttacatttgttttcacatatttttgtaaatagcccattatattttcccttaccgtaacaaagctgttgtttttgtttttccaaataaattggtataaagccaaatctattacaatagaaatgatacatttataaaagagtgttgtataaggaccgattgtgggcctaaattaaacgtccggcccaaaaccaaaaaattaaaatttagctttttaccgttcatattattttagaatgaaaaataaaaattaaaacctattcaatagtattagtaatagtaataataataatggtttagaatcatcaaatacacaaaagcagagccataatatatactaaagatttacttgagttgaagggtttccaattcttaacaccgttcttgtaaagttgagtagaaattaaccttgtaaaaaaagtgtcgattttgaagattagttgggaaaagtaatttactcaaaaaaaaaaaaaaaaaaacaccgaattttggatttaatttgtatggcactacaaaaaatagttacttttagtgacaactttttnnnnnnnnnnnnaattttttgtgactaaatgtaatttttggtcacaacaaacaactacttgtgactaaaacatagtagacacaagttgtcactaatatgactttaagtcacaacaagtattgtgagtaaaatcacatttagtcacagactttttagtcacaacataggaatgataattaataattagtaacaactttttttacttttagtaacaagttttgttgtgactaaaagtaagattttttgtagtactggcgtaggttacttttgtcggtgccacttgcgaattataggaaaatcattaaatatgttattgtttatcaagatttttcaaaaactgattataaaataaataaggttaagaaaaaagtaaattaaagaagagatcgatcgagatttttacatggttcgagtgttaataaaatgcagtccacaagtcagtattattgaactaaaatactttaaagtatttcttacacgtgtttattccctaattgaagaaccctacttattctcagttcttctccgaagaattcaatttccaaccctttccatgaaggtataatattctttttataggggagaatcaagtatgggcttgcccgaactcggtaggtttttaagatccaaactaggccctctgactaggaaaatacaatatttattgactttggatcaattaagtgaggcccgattcacgatgtgaaactgttccgtacaagcagagacagtttaag

SEQ ID NO: 38581 - DNA, 3552 bp, Cannabis sativa
gaaattagcatgtctaatccagtcgagtcatgcgtaccgaacgggcccttacggtaatatagtccttccatcacattttattcaattttatcataaaacgatgaagtggtggatgttaattaataaatagatacaaattaaatatctttcacattttttactttaataaataataaaataaaagaatttttctttgttataatatttatatttgtatttttattttttttaatcattagagtataaagggtgaaaagtatttaatttgcatctatttatcaactacagggtttgccctaggcataggcaggctaaatccatgcctatggctcacactttttggggccaaaataaaaaatgaaaggcttccatagacttttatttaagtaaaattaagtgtattgtaaaataataaatattcatagctttattggtacacattataaaatagtgtgggttctgtaagtactgatatgtaaggttgttacacagtttgttattgggttagttgtacagttaggatgttagttataacagttgtacagttgattttctgttatgtacattgtatttataaatagagcttttgctcattgaatgaatatatagaatcatttcaatccaatctttgttattctctctattcttctgtccttacatggtatcagagttgttcatgctcaaaattttttgcttccgcattctctgtttcttgaagtgatattcttctttctccttcttcttcaccatgacaaactcgtctgcatcgaccaattcgacttcagcaacaacgtttcatcctattgtttttctaacaatatctctgttaatcttgataacaacaattttctgctatggcgtcctcaaatcctctcggctatttgaggtcaccaactcattgattacatttcatctactactcaaccacctccaaaatttctttctgagcacaatcatattactcaagactatcaatcctcaatatgctcagtgggagcagcaggatcaacttctctactcttggcttttatcgtccatgaccgaaggtgtcttaactcgagtggttggcagtgagacttcagctcaagtttggaaaactctcgaggtatatttttctactcaaacctcatctaaaattgatcaatttactaatcaattgtagactataaagaaaggctctctttcgatcaatgaatatctacttcgtatcaagactgttgtggatcgtcttggatccattggacatctggtttctgttaaagaacatataacagctatattcaagagccttccatctgaatatgacacgttcgtcatctctattaactctcagaattagccttatactgtcgctgaaattaaatcgttgttgctctctcaagaacacagaatggagaatcaccatcgtgatcttgattctgtcaatctcgctacaaatcgtaatactaagggtcgtggttctagatctggatctggaaattttttcttccctcactctagtttcaattcgaaaaccaataccgatccatttgcttctcgtggaggtcgaactgtctggaatccctatgttgtcaatcctagaggtgttggttcatctccagttggtattcgtggtcctccaccacattcacagggttctgtctcctcctctgctattaatccaactggctccagatctacctgtcaattgtgctctaaacagggtcatatagcatctcgttgttatcagaggtttaactttgactttcctggagttggtgctgctaatgtagatcagtatgctgctaatattgctacttcagacactgtttcagaccctgcatggtatccagattcaggagccactactcattgcactgccaatgaaaccaatttcacccagaaagaaccatattttggtcctgaacaaattcacatgggggatggtgctggccttgatatacaacatgttggtaagaaattgtttcacactccttatacttctaagactcttactctcaataatctccttcatgttcctaatattaccaaaaatctcataagtgtagctcagttcactaatgacaataatgccttttttgaattttatcctgatcattgtgttgtcaaggatctggactccaagcaacctctaatggaaggacatcttagtcatggactctatatcattcctccaaatcagcttcagtccaacagccttcaatctttacaaccagttttttctttttctataaataatgctcaagtgagccattgtaataattccccaaccaatttttccttatggcataatcggttggctcatccctttgctagagttgttaagcagaacatgtcttagtgtaatgtttcaagaaataataaaacatatgttgatttttgtgatgcttgttgcaaaggaaagatacataaatttccttttcgcatttctcaaactgaatacacaaagcctctccaacttattcacagtgatctatggggaccttcccctattccccactcaaatggatatagatattatatccatttcattgatgcttacaacagatacacctgggtttttctgttgaaaaacaaatctgaagccattcaaacctttgtcaatttcaaaacccaagttgaaaaagagtttgaatgctctattaaggcccttcaatctgactaggaggagaataccaagcttttcagtcctatcttttaaccaatggtatttcacatagactgtcttgccctactacacatgagcaaaatagtgttgctgaaagaaaacatagacacctaattgaatctgctcttacccttcttgctcatgcctctatgcatttgtctttttgggatgaggctgttagagcatcagtttttactattaacaggctacccacacttattttccttaatagaaatcctcttactgttttgtatgacagggcaccggattattctcaattgagagtatttgggtgtgctttttaccccaatattagaccatataataagaacaagcttgagtataggtttgttatgtgtacttttttggggtacaacatcaaacacaaggattaaaaatatctctcaccaactggtaggatctatatttcgagagatgttctctttcatgaacatttctttccttatgctacacactctcctagcatatcctcacaatattttcctactgattctacccaatctagtgtgccgacttttattcctcaatccacctctgtctatcctatatcctccacacactccccaactgattcatccatctctacttcatctcccaccaattcacctctccactcacctactatgttagaatttaattctgctggtcctgactcaaatcccaccaaccccagtcctactcccatagtagtggctttctgtcactgctgctaccaccacaccaacaactttagcccctacaaccaatgttcctactaatacacatcctatggttacaagggcaaaggcaagtatcactaaaccaaaggttcttctcattacatttgaacctaagtcctacaaagttgctttgcaaaatcccca

SEQ ID NO: 38582 - DNA, 4130 bp, Cannabis sativa
gtaaaataatttccaacaaaatcctaccaagtttactgctttctctgtcctgacagaagatataaaaactatctacatggctactcagtcattagctcagtacaagaagcccgcacccatgaaaaaagatgtaagcaagagagacatgaccaagttttgctgttttcatggggattacggccatgacaccaaggaatgcaataatttgaagcgggaaattgaatttttgataagagaataatccgcacgtacaaaaatatgtcaaggccgaccaaaatcaaatggctgacaacaatcaagatttactaccaccaccagtagatggaaatttgcaagtcatcattggaggtccgcacatagctgtagattcaggcaaagcccgggaaaggtatgcccaaacattttagcacgagcaagaagaagtgattttggctgtagaagagaggaagccaaagataccacgggcaggagggcccaccataacattttgtgatgaagatgctgtcaagattaatttcccacacaacgaccctttggttgtagaagtccaggtaaccaacaagatggtggcgtgaaccatgatagataatggagcctgtacaaatattttgttcaagataccgtatgaaaatatggtgctccaactcaaagacttaactccatgcctccagcgcgtgtatggtttcttcggccagagggttgcacctttagggcaaattcgcctatccctcactgttgggcaagctccaaagagcatagctataatgacacaatttttaatattagacgttctatcagcatttaatgtcatgttaggccgacaagctttatatgacttaaaggctgttacatcgatattccactcatgccataggtttccaacaaagaagggggtagggtgcctgagaggaaattagcaagttgctcgggagtgttacaaccttgctctaaccaaggctaaaaaggaagtatcctctagccaaagttctgacaagggaaaaaatattgccaaatagggaactgcccaaggcggggatgaagatgtggatccccgacttggggagccaaacaccaatgtttgtccagtgggagaactagaagaaatcaaaatcgacccaaatattccgaccagaaagcttaagattggaaaaggtttgttgctcgaagtaaaatgagcactgataaaatttttgagagcaaacctagatatttttgcatggtcacatgaggatatggtcggaatcgatccttctataatttcacatgtcctgaatatttatccaaatttctagcctattcaacaaaaacgaagactgctggacaaggagcgagccctggcactaaaagaagaggtagagaagctacgcaacaataatttcataattgaagctttctacccgacctgagttgctaatcctgtgctggtacccaagtcaaacaagaaatggcaagtatgtatcaatttcactgaactcaacaaggcgtgcccaaaagactattttccacttccaagaatagatcagcttgtggatgcaacagtagggcacgaaatattaagcttcatggatgcctattcagggcataatcaaattaaaatgcatccactagaccaagaacatacaagtttccaaacagatataggtctgtattgctataaggtcatgccattttgtctcaagaacgctggagctacataccaaagatttgtaaacaagatgttcaaagaccaagttggacaaaacatggaagtatatctggatgacatgctcgtcaaatctaggaaggctggggggtatatagatgacctggacgaatgcttcaaagtcctcaggaagtacaatatgaaactcaatcccttaaattgctcattcggagtcagttcgggtaagtttgtaggcttcattgtcaatgcccgtggaattgaagccaattcggagaagattgaagccctcctagatatgaaatcgccaataagaaccaaggaagttcaaagtttcactggtcagatcgtcgcactcagcggatttgtttcaaaatcaacagacaagtgtcttccgttcttcaacattcagtaaggaaataagcaatttgagtggacgaaggaatgtgaaaaagcttttcaggagctaaatacacaactcgtagaacctcctatgctctcaaaacctctggacagagaagaacttgggatatacctggctgtcacggaacatgctgtaagtgccgtactgatcagagaggaaaataatatccaacactcggcctattacatcagtaaaagactcattgaggctgaaggccggtatccattgatagaaaagctcacttactgcgggatcctagcaacaagaaagctaaggccctattttcaagctcatcctattctggtatacactgaccaactgttacgccaaatattgcaaaaactggatgcctctggacggttgctcaaatgggcagtggagttgggccaatatgagattatcttccaaccctgaacagcgattaaaggtcaagccttagcagattttgtagttgaatgcatgggtaaagaagagagcattccagaaaacatcccagagccagtacaaatacctcagcctagtaacagtgaagacaagctgacttggaagctacacgtggacaggtccgctacaaatcaactatccggagtagggatcgccctcgtcacacctggggggcaacacctgtacgctgtagtcaaattttgatttaaggcatccaataatgaggccgaaaatgaagccctgatcacaggtctaaaactagcctgggaaatgaaggccgagaacattgagatctacagtgattcacagctggtggtaaatcatgtatctggagaatatgaggctcgaggggaaaagatgatagcgtattggagtaaaatacactatctgctcgtacagtttaaaagctatactctcaggaaaattccaatggaagaaaacacgactgctgatgaaatagctcgacttgcgagcagcaatgtaaatgatagagcaaatctgattcctattcagtttcttgaagaacctagtttcatcggcacagaagagattaaaatgattgatacatcaccgaacaggatgatgccaatagcagcctacctcaaaactggtgaactcccaaataaaagaaatgaagctcgaaaaataaggaggaaggctgcatggtacatcatagtatagggagttatgtatagacgaggcttttccatgccattgcttaggtgtgtcacacaagaagaagctccacgactttcgtctgaagtacatgatggattttgtggcaaccatgctgccaggccgagtatatctaagaaaattctaaggcaaggttacttttggccgacaatgattgaagattctaaggcctacgttaaaaattatgataaatgccagagattttcaaagatacctcgagcaccgcccaacgagctaactcaaatgcaaagtccttgggctttcgccatttgggaaatcgacctgattggacagttacccaaaggcaaaggttgagtgcagtacgcagtggttgcagctgattactttaccaagtggacggagaccgagccattagcaaccatcacgtccaaaaaagtgcaagatttcattgtgaagaacataatttgccggttcggatagccgtacaagataatctcagataatggcaaataatttgacagtcaatcattcactgatttctgtgcaaatcatgggatcattaaaagtttctccgtagttgcgcatccccaagcaaatggtcaagttgaagtagtcaacaagacattgaaggacacccttaagaagagacttgaggatggcaaaggaagttggctggaggaacttgctgaagttctatggtcgtactgcacaattgagaagacaacaaccgaacagactccatttgcaatggcatatggatatgaagctatgctgcctgtagaacttgaaccaccatcccacagaagattaacatatagccaagaggcctataagaaacattattttctgtagtgacaaattatgtccagttgcattccagttgcgtctgggactcgtagtgttttgtctggagttcgtacttttagtgttagtccacgtcagcaa

SEQ ID NO: 38583 - DNA, 2641 bp, Cannabis sativa
gagaaccttttctgttcctgcactttcaaatttatgataaaacaatcataaagtagccaaacatgtttaggacagttattaaattaatgtaccatatagttgatttagaatatgctccatggttgcattaacagtcgattgtaagagaggaccgataacaaatcctggatgaatggtgactaaatccatcccattttccttggcgaatttccaagcggcatcctcagctagagttttcgaaagtggataccagcgctgttgaaatgcaaattaacactttttttttataaaattatttccaccaaacacattatttatctaatttctaaaattctatcacggggttaaagcttgaaaagctgtagattaccgcaaatttaaccgaagtatctcaaaagaggaggaattatggattcaagattgaataagaaaagagtatatataaagtaagaaataggcagtgataattagtgaaaacatcataattaaactcacaagctcatattgaagagatcattaagcttaaatgaagagaatcagtctgtcaaaagtatggggagtagacaagaatagagaagtagtcaaggtaagaaatagaaagtccaaggcaaaatcagtagttattagtaaaaggtgcattgttagtatgtccgattcatttctcacacagtaggcttgagaaaaagaaaaatcacaacagaaaaaaaaaatgcagatatgctgaaaaaaaggggaaaaacataagatagcaggctagtataagaaaaagtggtgattttggtggctctaattcagttagtgacatgtgtgaaagaacctatgtaatatgttgtaatctaattggcaaacattggtattataaacaagcatacgaactccattgttattaagttcttattgtcatggagaggtaggcatatatatttatccaaactaacctaaaacttggtgttttccttttcctatttcattctttcattgaattcctgggccattttagtttctgtgattattaacttggcataacaagatatgaccatattatatatgagagggattaacacaacagatcaacacatatgtgaaaaattcatataccttgtttttctcacagtgagcaatatcagaaaaccatgtctcatcaattactacatcaggggttagaggtattcctttctcaaaaacagaggaaatggaagaagttataacaactctttttatagatggaactttagcacatgacctcaaaacgtttagtgttcccttcacagctggatcgatcagttgtacctgaaataaattaatgtaaactcaatccatgttattattattaccactatttcattcttaaaagtaaataagagcatgtctcaaatctctacctgtgggtcaacgatcaaacttgaatcaagtacaggagaagctgtatgaaaaaccccatcacatccaatggtagcagaatcaaaagacccttcttccattaaatctgctttgaacaaatgaagtctttctttggctccatctagtgcaaccaagtgttctgttttctcttgatcacctataatagagttcaatgaatgagtaaatttcatgaatagagcagttgaaaataaaaataaaaaagctttcttttagtaatgaaaatcttagaaactgaaataactaacatgggtcacgaactgttgcattgacagaatatccatggtgtagtaagagcttaacaagccatgaggctatgtagcctgatgcccctgttacacataccaccttccctattccactcattctctctttatttcttcctagtgttcaaagccaattaattctgatcattttgaagtagttgtttaggaaagatgtacatgaactcatttgactattttattagcacgtttgaaagccaatcaattaaaaaacaaatactttaaagtcaatgaagttgtgttagcatatatacaatggcaatcttttatgtacagtgattgttggaatttttacctttttatgctaacacaacttcaaaaatacaaaattaatacaatagtgcaaaatgtggtatttttcaaattctgttattctatgcgtccataaaataattggtattattaaaaactcacaaatccaatttactatcttctacaagactcttactccctctccaatccaaaaacaaaattctagggttagggcttctttaattttctttctcttctccttcttcagatcacggtaggaattagggttctaatgtgttgggttttttaagtttctcttctcttctaaatggcagctaggattctaagggttaatgcaaacttcttcttttcttgttctacccaaagcactatccccagaaaataacaaagctttcagcttgatactcaaaaaaaccaaacccagaaattactcacacctctcggccacaaaatatacacacaatatcagaaatcaaattagggttatgagaaaacaaacagtgcaacatcaaggagttcacccaacaatggctacgtctctgttccaactttgtctctattagttttcaaaaagagttctttctggctaatgaacgaatacctaatctttaaatagactatgttctgtgaaaatattgatctagcagagccatgaataataatta

SEQ ID NO: 38584 - DNA, 3469 bp, Cannabis sativa
agaggtctaaataggcgattatcgtcgtggaagagctctgatgatccttgtcatggagatttcacttatgggattgagcttgatgaaccaaaccatacatatcctcaactatttatccgttatggaacaacaaaattctttcgagaagggccatggaatgcgataagtttcagtggaacttctaataacaaatcaatttcttggcatgattctgattaccaatttgtgcacaacaatgatgaagtttacttctcttacaatgtcaaaaaaaactcaaacatatcaagaattgtgttgggtgaaagagtacttgaatacaaagaatggttagaagaaaaacaagtttggaattcttattacactcttccaggtgatcaatgtgactactatggtacatgtggagctaattcacaatgtctcttaaatgaagtacatactatgttttgcaaatgtttggaaggttttaagccaaagaatcaagaaaattggaacgcaatgaattggtcagaagggtgtgtgcgaaatagtactagtttcgcaagttgtgatgatgatgatgatgatcataataaagagaaagatttgttccttggatttgttaacttgaaagttcctgatagtcaatatacttgggcaagtaagagtgtaaatcttgaggaatgtaaggctaaatgcttgaccaattgttcttgtatggcttatagctttacatactcaggtcttagtgaagggcctaatggcactgattgtgtcctttggttcggcgatctgtttgatattcgacaaccttattacggcggacaacatatctacattcgaatgccgtttccaactataggtacatacttacatagattgaaaatgttatgttcttatatgttatatattcgaataataattacatgtcgagtaagaaaattacaacacttttattattattgaggaagtactaatgtcttaattttctaaaattttcacaatcttgtactcttacacactttggactatttttctcaaacttgatatcttaatttcactaaaattttctaattttctaactccttaatctagtttctactattcatttaaataattttctatgttcttttaaaaactttttagagtcttctacgttttagaaatttcttaaaatattttcgaacactctaaaatatatttagatttagtaaccacttttaacattacacacagtgatatgaaatgttatattcttatatgttatatatactatacacagtgtaaatttatgatcgttttatggtcgtacagtgtaatttttggaaagttattttgctaataaaattttcatatttgactatttttacatatatttgtaaaatagtacaacaactcatctgaaaaaactgttatgttttggttataataaataataattagtatgtttcttacaatggactttctttcattgtgaaaaagcaagaagtggtggtaatggtaagtttaaggtggagagagcagtgataatttcagctatcttcctcttgattggattaagttgtggaattattttaattggcttttacattcgtagaaggaagagacattttaatggtaacactctctaccctttcacttcattctttccaatttttgtatttttaatgtaatattttgactaacaaatgtccctacatagttgaatagaacagagtattgtttttgccaataagaaatttatgaattatatagattaacatttaagtgtgttcttaacattcttgatatgtgttgtgttatcttttgaaaacaaaattttttgtttactaattgcatcaactattataaccacttgaggttagctctagtaaatgtgtgtggggtcctgagatcgatcttaagttgtgtaatgtaatgtatatataaacggttcaatagaaaaaaattacatcaactattattatatcttccgattcttgacagctggtgatactttaccgaagagaaacaaaagcgaagacgaagacttggagtttccatcattcgaccaacatacactgagtattgccactgataatttttcggagaataataagctcggtgagggtggttttggacctgtatacaaagtaagcttcgtattcgaatatgtgcattttttcttcttttttttttccaagttgacataagtaagcaattatcttcattgtgacataatagggtacacttgaaggaggtcaagaaattgctgtgaagaggctatcaatgtattctggacaaggagccaatgagttcaaaaatgaaattaaactaattgctaagcttcaacatcgaaatcttgtcaagatatttggttattgcattcatagagaaatgaaactattgatttatgaatatatgtccaacaaaagtcttgactatttcatttttggtaacactcttttcacctcttttaaaagtattacatacatgagatgttttgtaaatataatttgtcaaatttgttccaatattaaaagtagaagcctacatttgcagatgaaatacataggagattgttagagtggcctaagcgctttcaaattgtatgtggaattgctaaggggcttctctatcttcatcatgattcgagattgagaatcatacatcgagatctcaaggctagtaatgtgttacttgatgaagacatgaatcccaaaatttcggactttggtttggctagaacttttggtggtgaccaaatagaagaaaacacaaagaaagtagttggaacttagtaagtcatctaaaaaaaacagtttagtttctttaataaaaatctattacatactaattaataatgttatgcaaatgtagtggttatatggcgccagaatatgcctctgatggcctattctcaataaaatcggacgtgtttagctttggaacattgatgcttgaaattgtaagtggaaagagaagcagaggcttttatgatgaaaataacggacttaacctcattggattggtaagtgtacacaccattttttttttattaatgtcacattataagtgaaactatctattttttgttttaatttagagttttttgcggcgaaatcttcttaattatcgttcacttgcacttaatttttaaagcttaaattttggcggcagaacctttcaaatttagcacttaacaaatttaaggtgtcatccggttaactgtcatgtgtacaaatttaaggtgttattatttcaaaattcattttaaaactaaaaaaaattataaaaataaaaaataaaatatttaaaaaaataaaaaacattataaatttgaaataattttttataatttttaaatagtaatattaaatatactaatataaatgtgacttcagagcccaatcctattaggggccaaaataaaaaaaaagggctatttacaaaaatatgggaaaataaagataagttttgatatatatggcataaaaacttaattacactaaat

SEQ ID NO: 38585 - DNA, 3564 bp, Cannabis sativa
ttgctgaatgtgttcacacacaaggggtatcatgtaaaataagtttctttagagtggttggcatcctttcttcagttgtatttgggttgttttagggttgcattgtagttcctccataaaaatctacactacttcaacaaaagtgcaatcttgatattaactcaacttcattcgtaatcaacatagtgcttgttgacatcccaatgatcattgctctataccaaaatttgcagagattccatgtcttgcaatgtttgtatttgttatgagtattttgtattaatagttctaaacaactattttaatctataaaaatagcttataaacaattgtttactgacaagaaatagtatatgacattgaatgcaatagtaattgttctattgtaaattactcatttttttatcactttttatcttaattgtgacgccctactagattaggcacattattgtgttttctaagtactttgtactcctttgctaattaaggggtttgctgaaaaacgtgaataattaaaattttcaaaataaactgaaacttatataaatacatttaatacaatatttgagatcccgtttttaaagttacaaaagtttacaaaatactttcactataaaattcgtcgcctagcgaccatcaaaataaaactcaattgtcccaaagatctaaaagctttaggtttaaccacctcgatatgtacaatcttcattcagccagaactcactattgctcagcctttgcttagcctttccctacacataaaaacaatatctgtgagtccgtagactcagtaagaaaagcataatcataacgtaaaacataaaccagattataaccagacacccatacacataatcacaatcctatgccacgtccaccgtgtaccaggtctggaacgttcgtacgacaatatagctgaccataatatcagcttatactcggtactgtaatcgtaccgatgtgatagcatcaatctatacttttccaaaaatatatccatcgctattcggtgtaactttacgtacactaatactgctcttatgggtatgttatatatttggcaatcataaaattgtatgcgaaacatggaagcagatatacaattattacactaatcttacctccaatccaaattcaggtgtgccagtcaacctgagtcaaagctgctgctttaaagtcccctaagtcataacatacataaattggtaagtgatacgccagatcaatttttctggaattagactcaaaactaaaagttttcatatcgatagatagtgtggaaaaaccctaaatatagataaaatgtgaaaaactaagccctaaaatctaaaaaatctagtgaactgaaaccccaaaatggtttacctttttctggggccctactaggaaaacctttcactatttctgtagaaatgtgaaaaaaaatttcctgcaaaaaataccaagcctggaaaacatgctcaaatctaccctaaattcaaccaaactctccaaaacacctattcaagacataatcaacataattcaaaagaaaaaaccaacatcaagcttctacaacgaaaatgaccatttaaggttcaaggttgagcttcaaaactcaaatcaatcttaaacactactacaaccaagaaaataactcaaaacatcataattaaccttaaaacataaaaaaaaaaacatccctaaataaccccattttgtatagaaccaaaacccttaaattttgcatgaaacctaactttctactaagaatatcaaagagaaaaggttacctcaagttcgctatcaaattctttgtaagctgaattcaccttgaattctggtcctaaatggaggaacaaacttggtcttggttgggttactccatggtcaaacaaagaagaaagagagaaaggacttggttcttgatttttctaacttggataaattggttttttattactttacttaattaatttaattaaattctaaattcttctgcacaagtaaattccccactaaagacaacttaaggcaaaattatcaatttgcccttttacttaactaagaggtaatccacactcgtaggggtaaaattatccaaaaccataatcccgaataatcttgatattctaaatatctaactaagttttctcacttatctaaaatactcaatgatatctatgtgactcaaattggccaaaacgttgctttccactgttacttggcaaaaaatatgaaaaacataaaattataaatatagcataaattatacaccaaaaatatcaccataattatgaaaataataatttaaagcttatttatgataataagacctaattatcaactaatctccatataaagctaagcgttcattacaataatctcccattaaaagaatttcgtcatcgaaatcaaacttgaacaactcttgatactgggccctcatgtcaaactctaattcacatgtggcttcctccaccttactatttctctagagtacattggccaatgttatggtcctgttacaaagaactctatccttcttataaaggataaggaatggctgctcctcataagacaaatcgagttgcatctctagggtttcataagtaaaaatatgtgttgtatccgagacgtatttctttaacatagagaattaaatatgttgtgtactgctgacaaagatgggggagatgctagactataagctactaagccttttcaagaatctcaaaaggttctataaatctagggcacaatttgccctttttccagaattgcttaactcctttcattggaattctacttgaatttctatatatctgcgtttcaaattcccataacttttctacctactctgagaagcaagccttttggccttaatcttctctatagtctcattgctccattgaactgattccaaacctaagtattttccttctcaagtctcatcccagtggattgcagatctacattttatggcattaaaaatctaataaagagccatccctatcatactttgataagtattattgtatgaaaactctatcaatggtagatacttactccagaagccttcaaaatccatcacacaagctcgtcacatatcctttagtatctgaattgtcctctcggattgaccatctgtctgaggatggaaagctgtacttaactttatttttgtacccatggcttgttggagacttacctaaaacttagatgtgaatttcagagccctatccaaaacaatggactttagagctccttgaagtcatactatttcttttacaaagagctttacatactgatctactgaatacgttattttcactggtagaaagtgtgctgacctagtaaactgatccataactacccatatggaatcgaagatacctgtggttctaggtaatccaaccataaaatctatggtaacatccttccactttcacttgggatgtgtaaaaggctggaacaacgctgcaagtcatcaatgctcaaccttaatctactgacaagtcaagcacctagtcccatattataccacatccttcttcatacctaacacaaataatagggttt

SEQ ID NO: 38586 - DNA, 1749 bp, Cannabis sativa
  modified_base (61)..(64): a, c, t, g, unknown or other
ttatcgttttagaaagttcacatttagggtgttaaacaacgtacttgtgagtagatctaannnnctggtaaaataaattccaatagcttccaccatatgcaacattatagaagcttgggggtaaatattatctgtattttcggcaatggacacatgcaatccaggtcagcattcaaggcccatcagtgggtttctcaacgaagataaagtgggccaatcccatttagatgagtccttctaggaacataacccagctctgtgaccataaagtcttccactattgataacttattctcagaagcaagtacaataccatgagaccaaaagggtgagacaacgtgttcccaaaagactgatctggttcccctttttaattcatgcacacaaataaggaaacaacaactgccagatctcgactgagtatcgtatcaagttaaatagggaaacttcctaaaatgaatatcaagcaattaattcacagttaattaccgacaatcaaagcacactgtgttgaccaaatcaagccaattccaatctacctagccagcaattcctctccttcatgggctagacttcacaagataactcaagtgtgttattcactttaaactccccaatagagagaaaaggaaaactaaatgtaattctcaaactactataaatacccatcgaatcctatggattaagggttgaattctctggcaacgcttgctcaggaaaatttgagaacacatattctttgtattcctaaaggcttttcaagctaaagaactaccgaataacactaactcatggactaaggctaattaactccccaaccacgtaaaaactatttgtctcttttgattttctctcttttaattatttattactttagttcttatcgtttataattaatttctaaaaatcttgataaacaataaagataaggagttgacgaaggcctctttcggtgtaaagctaaagagttgatgaaggcctcctccgctgtgaagttgatgcgtgtcgtttgccatatcgaatttactaattttttttattccaatactttcaattattttagtataaaagtaagtatggatcgatcccacgaagactatgattaatttattattcactatcaaacaaaaattaaaaagggggttttgagatgtaattaaatatcataaaaagaaataaacaaacaaattataattgagactacgatatgagaaactagtcaaaggttattctccaccctcgacaatcattcttaatttctattaataaatgtaattttagtttacaatcaaactattatcccgcagataaagctgaagcagtaaattatcccaatctccttattatatataatcaaggcgaagtactcaatattaagccttttacctaagcagtaaatccacgaaacatacaatttatttaacttagataaagctttgagattcgaggagatagattaatctaggcaacaaattaatgaaacatataattcatttaacctaggttctattcttcatcacaattagaaatacttttgacaatattagaaattgcaatttatctcgaacacttagaatcctagactattaggtgaatagtaatcctaagatgacgataaattaaagtaaaatctaatttagtggccatccaaacgagattaaacaataaccatgacattgaacatagaagaatagaagcactttgatataatagaaactagaaattaacattcaataatgaaattaaaaa

SEQ ID NO: 38587 - DNA, 2266 bp, Cannabis sativa
  modified_base (1406)..(1407): a, c, t, g, unknown or other
tatatatatatatatatgagaattcaattactcaatgggaaaatccaagtcttgaatagtgtgacacctgttccattaccatgaaagataaaacgtcttagattctgcttctagttctactcatgaaagtcaaaacataaaaggttagacatagtgcagaaccagaagtaaccagtaacaccatagaaaagactagagcccccagtagagtagaatcttagaaataattttaagttcaacataagagtttactttgtctaataaccaatcaatgtttaatcataatgaagcacacataataagttcaagtgtattggtttttgctattaatgcaagaaaagagaagcaaaatctgaaagccatcaaaagcttaaaaaaaactaattgaattgtgatcacaaaaatgaattcaatgaaaataatcataaaatttcaaactttttaagtaaaagaacatgaatgaaaatagagaatcataaatgtttagttttaatgaaaataaatcagtatgacccatttgaaaagaaaccaccagtaatcccaattgaaccccacatcatctctactctgtcaccaagtgtttgataaaatgtgtgactagcaatactagccgatttacacaacgtaattgcaaaaaccaaacctgttttgtttttatcactactaatcataaagggtttgtttgttccacccaaaaagagcaaatagaaaacgaacatagttgatgagaatgatgaatgaaatgaaagaagaaatgggaggaagaaaatagtaataccgtagagaagtgaagaagaggatgggattcagattcacagttggggctccactccacggaatttttgggagggaattttgagcttccttgcttttcaggtttttagtatctttttctattttttttttttttggcattatttattttgagaagtgttccacattgggaaattgggagggaactgatggaataaagtgagtgcattgttgtaactttaatttagattaatataaataattaagtttaatttttaattttaaacaaatattaaaatttaattttttttttgtgataataataattaaattatatttatgaaatgtcaagtcaatgataagtatagtctaccaattttaaagagaatgtagtttttcattcaactacctaataagagttttttgcagctaaactctctcaagtatcatttcacttgcacttaatcttgcttgcaagtcattaattttttacagttaattgccaatataaatggcttatgtgtacacttttgtacttgtatcaaatttatattagtacacctaatattattattttaaaaatataaaaattatttcaaaatttataacatttttttatttttttaaatattttatttttattttttataatnntatttaattttaaaataatttttaaataatatattaggtttgccaatataaacgtgccatatgtacaagagtgtacacataagcagcacacagtgacagtcaactgaatggcactttaaatttgctactagcccaataatttatttcaaaaagttttaccgttaaaatttaagtttggagagttaaatgcaagtgaatattattattttagacatttttatccaagttttgttttacaatagaaatgacttgtttttattagagtatatttttatattattatagctgtagcagaattccatgagagaaaaaacaaaaacatttttattacctttctgaaacagttagagactcattgatgctaatgattaatctatacaataacaacagcacaaccttaacattgtttcgtatcacaaaattataatgaccaaaattttatatatctacacttgaatacaaaatgaatgccatctcagtcaagttctcaactgtgattgtgagcacctgttgagccctctggtgcagttgatacccttcttgggagcacagacaatacccgattgctcttcaactttctcgattagaagcttcagcagcggaacctttgatagagtcttacatgatccaaccattatcaactttttctgtaaaaacaatgcaaaagtattacataaaataaacactttcttctaattacaattttatagaatggagcttaccttggcccttgtaagagcaacgttaatcctatgccaatctccaagaagtgaggaactgcagtttcttggattttcactagaccttacaaacgacacgagtatgcaatccttatctcttccctgcaaacatacacata

SEQ ID NO: 38588 - DNA, 4385 bp, Cannabis sativa
gtggatagcggattggttgtcgcaatagataaaagccggttgtgtttgtggtatttggaaatcctgaagaaggtaagccatgtaatctcactaccagttgctgccagagccctatattctgcttcagcagaacttcgagaaatggttggttgtttcttagttctccatgaaataaggcaatctccaaggaagatgcagaaacccgtagtggagcgacgagttatggggcaagaagcccaatccgaatcagaaaaacctcggagctgaagagatgatgaagctgagtaaagaagaccttggcctggacttcctttgagatatctcagcaagtgatgaactgcttgaaggtgtggagttctaggggaagacatgaattggctgagaacattgacagcaaaggttatatcgggccttgataaagtgaggtagagaagttttcccacgagttgacgataatgcgatggatcagtaagaggctctccttgttgatcatcaagtttgatacgcggatccatgggagttttggtgggtttgctaccaatgtagccactgtcttcaagaatctggagagtgtatttgcgttgtgataaaactagtccttcggaggcacgagctatttcaaacccgagaaaatatttgagagtgccgagtgctttgagggagaattgattgttgagagtggtctgtaattgttgcagcaaaaccaagttggggccggtgatgattatatcatccacatagacaaggagagcaatgaaattgtcttgagtacctttagtgaataaggtataatctgcttgtgattgggtgaagccttcattaagtaaggcagtacagagagtgcgataccattggcgtgaggactgtttgagtccataaatggacttatttaatttgcatacaatgtccttctcagtagcaaattcagggggtaaagtcaagcctttgggaacttgcatataaacctcctcatgaagatcgccattaagaaaggcgttattaacgtcgagttgcaaggtgtgccatttctttatagtagagatggccagcaataatttaaaggtgaccatcttagcaacaggggaaaatgtgtcaaaaaaatcgagtccttcttgttgagtgtagccttgtgcaacgagtcttgctttgtgtctctcgatagaaccatcactgttgagttttattttatagacccatcgacatccaatagcctttttgttggcaggtaacttgacataagtccatgtcttgtttttgagcaaagcaatgagctcattgttcatagcgttgttccaaactttgtattgagatgcttgattgtaggtagctggttcatataaagctgtaacaagagaaataaaggctttgtgagagtcagataatttgtcataagataaaaatttttgtagattatggggagtagaggttttgtcttgcaaaaccgagtgacattcataatcacgaaggtaagaaggaggtcttgagaccctgctggtgcgtctgacagtaggtggtggtgcaactggagaatttgtggaggaaatgtcctcatttgtgtcttcgttgggaggaaattctgattgtatgctagtgtcttgtatcgggtattgttcctgaggagttgagttagtacaagcaggattggaagtaacagtagggaaatcattgacaagagtttcagaaacatgtggagatggaaatacaatgttagagaaaggatcaattatttctttagtggtattgagtttgtgaaaggggtatatatgttcatgaaatatcacatttcttgaaataaagaattccttactgttaatatcatatagtcgataccctttgatcccttgtgggtatcccataaaaacacaggttcgagctcttgaattgaatttgcttctatgggcagtgagtgtactagcaaaagctagacatccaaagttccttaggtgctcataatgaggcacttctttgaatagcaattcatagggacatttgttgttaaggcgtggtgtaggtgtgcggttgataagataggccgctgtcatgatacagtcactccaaaattggatgggaagtttagcctgaaaataaagagctcgagcaacatttaaaagatgttgatgttttctttcggcaatagcattttgttcaggagtttcaacacaagtaaaatcatgcattatgccaaattttgcaaaaagatctttaaacactaactcaggggcattatctgatctaaaacgtttaaaaatgcatttaaactgtgttcgaatataggataaaaaatcagtgacaatttgggaggcatcggatttttgtttcattaaaaaaatccaagtgaatctagttttgtcatcaaccaaggtgagaaaatatctatggttggagtgagacgggatatggtaaggtccccaagtgtatcacaatgaattagatatcaaaactagatttggcaagatcactatgtttgggaaaaggaagttttctttgttttgccataggacatacaaaacagggagaattcttatgaacattatcaatgttacaatgaagtttattgcaaagtaaagattaagcgtttatgagagggatgccccaaccgagaatgccaagtatctgctgtaacagtaatgttgcaggctgcatcatcaatgtcatctaagatgtacaaaccattcctttctttacctctgccaatcacagtcttggggtgtctttcctgaatacaaaagctgttagtatagaatttaaccttaacaaaattattgctggttagtcgacttacagacattatattaaatttgaagctaggaacatatagaacatcctcaagaatgagatttttcgatatacggacagtgccattttgcctaactaataggacttcattgtttggtaaaataagtcttgtagcagtggtataactgatactttggaacagattaatgttattacatatgtgcctggtggcaccagagtctaaaatccaagaagtatcaaaaaatttagaggtagaacaggtcagtatcataccagaagtgtctgtggaagtgcaaggatctgctacagacaaattaccatgttggttggcaagaagattgagtaattgttggtactgtgtcgcacttagttgtgggaggagagtgtgtgtgtcttctgtcttggcactagtttctgcagtagtctgaatttgatttgcaacagcatctttaggtttgttatttttattgtatccaggtggatagccgtggatcttgtaacacctttcaatggtgtggccatgtatgttacagtgggtgcaaaagggtcttcctttcttagaaccttgagatttctgcccttgttgatcacctttgtttgatttgtcaccttgaaaagcaaaggcgtggctggtgttgggatcgtttccagcagtagagttgcctttttgattttcttcttgagtaacgaggtgaaagactcggttaacatctgggagaggatccattaaaagaatactcccacgaacttgagagaaattatcagacaaacccattaaaaacgacatgatatattccatgtggtaatgttcttggagcttcttaactccaccacaagtgcagccattgcaagaacaatttggtctgtaatttgacaattcttcccaaattgttttcagtttggtaaaatacataccaatggttaaggtatcctgtctaagattcatcaatccctttctgagattgtaaatatgaggtccattcctctgttggaatcgagttttaagatcatcccatatgttggctgcggactcatcatataggatacttgaagagatttcttttgagacagaattcaatatccaagaaataacaatgttgttatttctgatccaagcgttgtataaagaaaaatcagaagaggatggttttgggatggaaccatcaagaaatccaattttattcttaactgaaacagaaagttgcatagctctactccaagatgcataattttcttgtccagtgaggagttgggatacaagaacgttacctggattgtcgccatggtggagaaagtaaggatttgttggatcttcgagaggattcttcgaattaatgaattgtaagtcttggtttccatgttcggtagaagcagaaggactttgaacagttcttgtggtctgatcttcactttccattggaatctcagcttgaacgtcgctggtcataaaggtaagaacgaaaaaggagatggagaacgcagaacagagtatcggagaagatgaacggaaaacacgatactgtgaccggagaagaagacaggatcaggatcggtcagggaaagtaattctttcccgctctgataccatattgcggaagagagaattgatgaaattcatattctgtatt

SEQ ID NO: 38589 - DNA, 1802 bp, Cannabis sativa
tatgtgtatggtatatgcatattgatattgatatatgcctgagttctaaatgcttgaaagatgtggaataaatttgtgataaattatgcagccagggcaatcaaacaattcgattagcaagttttctgggctcagaatagatggtacggaagaaaacccattaccatctcaacactgggaacaagtaattggtgctatgcaagatacgattagacaacaagaggaatagattcgagatttgagagaataacaggctcatcttgtgtccattcatgtaccaccaacacttcctgttgtgccaatagatgtggtggaacatatggaatcaacttacaagcagattaggaagaaaaaactaaataaaccatcaattatgggaccaaatgaaaggttctagggtgaccagggtagtagtcaaggtgagaacaagaaatggcaaccttatcttgaatgtccaagatgcaaaagatgctatttaggccaatgtagaaccaaatcttgtttttattgtggagtggtgggtcatttgaaaagaatctacccgtaattaagaaagattgatgttaaaggagaagagtgtatgggtcctgcccaagtgtcgattataactcaaaggaactcgggtatcggcccttcgaccgactcaggttagaatcttatgggtaaaattatttattttgattgatatttatattaaacattgtatattcaattagagatgccaaaaaaatctaaatggacggtacatgtacgttatttagtggtagcttatctgacggggtagagagattaaaggaatgacactatgagctaaatttgctggtattccaaagagaaacatacgacatgagcagctaatggaggtatccatttaattgattcagagaaagcaatctttttatctagaagtgatctagtattagtaaaggtgggacaatttatgagtattgtccagaattcttggggaattgtgagcaggtatcaatcaaacccaagaaaggaacattgagcggctattaagcatattctaaaatacttgaagaggacaagggattatgtgttagtctacaagggtggtgctttaaatcctgtaggctataccgactcaaatttctaggcttgtcttgatgataggaagtctagatctgggatagtattgggggtggagcagttgtttggaaaattatgaagcaatctgcaatatctgactttaccatgcaagttgaatacatagatgccactgaggctgctaaggaactggtctggctaagaaagttcttcatagaatttggtgttgttccaggaatgaaaaaaccactagtgttactttgtgacagcactagtgctataaccaacagtaaagagccccaaagccacaagaggagtaaacacattgagaggaaataccacatcattagagaatatgtggcaagaggagatgtgctggtgaaaaaggttgatattgaagacaacctaaccgacccattcaccaagatcttgacaaaaactgcatacaaaaggcacagagagaatctaagattaattgaaatgtactaattattttatgttaatgcaagtgggagtttgttggattttgtgctctaactaaaacttcatttcaatataatcttgaatattcatttatcaataagaaaatagatttatttcattacttgtttaatgtattacttggttcacattttattacatgatcatttgttttatttataaattcatctaaatccttatcacattattattcatgattactgtgttgtctacacagtggaaagtaatcaaga

SEQ ID NO: 38590 - DNA, 5638 bp, Cannabis sativa
aaaataatagcagtaaaggaaaaaataagaacacaaaacttttttacgtggttttgcagttaaaattctgcatagtcaacaagtcaatcttattacatatcggatagaattctagggcttttttctcatgaatgtttaatccctttttcagtgtaaactgctcctatttatagttacgtatgagggcaattaattacaaatgggacttatatcttacaaaaataatcccctaaatttgtggcaatagattgcatccattgtaaaataaacgcggttattatttgaaaattacacagttgtgattggtccgcttttactgggtcaatgcatatgtgtatttaattttttgtaaagcgtatcgttctgggacatcgcgctgggtaaatagcagcaataaccctagtagcgagctagagcttttcccatgtctttccgaggttgataatgtaaatctcgtcgtttatgctattcaagacataacgcttcatctggaaattgcagttcttagtgacaaggtgaacttcagcagtcaatatcatttgaatgtcagcttctatttgagagagctgacttgacgaagcagtgaaacgcattgaaagatgtctgaagctgattagtgaaggtaccatgagtggccttcctatagcgagatggatacctcgctattcgttgtttggattcattcgactgttatacttagtttgtataaggtatattatgtgcaaaatgtcttaacagtcatcctgtctcgtctttgtctcttcatgcgtagcgaggttgacacctcgccttacactactgaggtcgtatggtttctcgtcatcacacgatgcaatagtttgtatatctttacctcgctaaagaccttacagccagcaagttgtaaatatactctgtcaattctgcatttaatgagttactccattttaaatatcatcatcattatttttgttgattcgtattctctcaatttaacacgtgtcctcctctgaagtggtagcctaatttcgagtataacaattgccccttaaaaagttctttttaaagaaaagtgctttttcatgattatagagagtatatttgtcataataccttttgaaaaaatgcatgtcctccgatttttgcagttttgtggtttccaagtacatcaacatttaaggaccatcttttccactcctctttcgaattctatctgtaggattaatcatctttctggtctaaccgagattaacccaagagtatacaaaggaaaaaagaaacacatttgcattgttttcgccatttaaaaacttatggaaatttttccagttttcctgcaaaaaatcgtacccagattatttcgaaaccttgcatgccttctttgtcattggcattttccctacgagtttcattcgattcaatttttgacttcaaagcattcggagagatcttcaagacgttcagggattgacagattgcagagtcgttcatcttccccaacccgaactttaaacaataagtggcttttctatttattatctaacatgcttattatgttgtattttttggctcaattactatcttattggtcatcatcgttgttatctcatttgtttttagcaatttttagggttagactgtatttcgaaaaatattagggtttagacagtatgtaggttttctagaatctccaacttaccaacttctggtttgataaatttctgccaagaattgggattgctttttccttgcagcaatgtcccagtctgtttagaagtttatcctctagaagatttagaaattgattaccctactgagattgcatcccttacaaacccaaaatttctgaaccccaatccaaattatagataaatcaagcaagaattatagaacacttagtgaaaattcatcaggaagacattgctagtcaccacagatgcttcttgcaagaaaatactaaaggtaaatgttgtttcttgcgagatgttgcttggcctgaacgtcccagtttgtcttctattcctttggctaaaccgctatttttacccaatgtcacaattgcttttgaaccaggtgacttggattttgaaataatgtctcccaagccacgtaaatcaaatactccccaggaccctaatgtcacctttgaggtaaagttaatagagttgagggtgcaaaccatcacaatttacgtaggcaattcaataaggacctgtggcattgagtataagcgacactgtaaggttagatcagtacgagttggcgagtttagttgttacccacctgtgccacttacacgccagacctctaatgggctagtggtgagactagtacaagtggctcgactggaataggcgcttggagtcttgagcacatcaaggcatgagcaataatcccccttcgtgactatttcaaggacttggtaaaccacctagagcttgccctgttccaactaaatcccacatcttacacaatcctcgcaagtttgagtgttctgtataaaatcttgcattgggagtgccccactcccttggaattagagtatctctactttgttaaagctgttcctgcgaggaagaatgccgtagggggcttttactatctcggcactcactccgacgatcgcaaaatcatcgtggatttgtcgaacaaaacctctttcaaggataatttcttttggatgattgtcctttccatgattggcacaaccactttccgtataattcgtacgtgattatctgcattagacttggttgaattattccatgtcttttattccaagttatttgactgaaattttgttttgttctcgacaactacatcgaaaagacctgcccctacccctcagatggccgaatggtgcaagttgttgctgactctctcgtatggccttaggtcatgtgacttccttctaagcgaggttaatctgaggtctttggatctcctaactgacaaggagtttacttgtgattacaaatatcccatgtattcctcttggcaataggtttccatcccagatgaggataaagcttaagatcacatggctcgggcactgtaccttcagaataccgcccctcaggaagtgggtgaaggagcttcctaaggtaatcaatgtggttggtcatccacactgcttagggctgaacataacactctagatacatttcgagattgtcgctttaacttttatgtttggcatcctctcctcgtggatcgcattacacattggtttgacaattggtatcccagattccgtgttcaaattagttgtactgaatcgtactacagactagccgagcagtataggactataatggatagggcaagtcatttagacgcgagctggaatttagaaccaattagtccctatgatatattaaggatcacgggttgtagcgatgttaatggatattatgatccttctaccccatcttctagtgataccttgtcttctagcgactatggtaaattccttaggaggaaaatcattctccaagctctcctttttcttgtcttcaattaatgctaacgcttttatcttgtctcgtagaaatgcatttcgagggtctcatgcagaggaaaggaaagaagaggcagaaaaccttggaggctccttctgatcccgaagtggagcccttaaaaggcaaaggagaaccaccactataaagaataaatcctctcaagccgttaacctcaaggtccctgaaactgaaacccaggatccaattcctcctccggtaaccgtaagtaccgacgagcctccccctaaagcgactcaagcatctactcgagccaggccattgaaacactacatgtcgaggcaagaaagactggctcggagttcacccaagagtttggggctatatgttggtgccagttcaaggctctccttccccatgattgggatttaatcaatcatggggatttggatggagtgcttacgaggagtttgtcacacagcctcttcgtaagtttctttgtcccaatctgctcacttcttttatttttcttctccttccttttttctatacatcattgtttgggaatttcaaggcttctttcctctcttctgccgcccagtgacgaggcttagaaaagataaaatacttggagagtgaggtccataactcactaggccaacacgaggtcgtggttaagaaatggaatgatggccaactagaaattactcgccttaccaaagaagctgagaggatgaagaagagccttgaagatgccgagaaggcgacaaaggccaaaactgatgaatgcgagaagcttaaagaggaacttgcagctgccaaggtgacacttgatgggaaagagactgaaacccaagaacgatgcaacaacgttgggcttcgtaccctttatcgagcctggatggaaaatcaagacatggacacgagtttcttggaggaagaagagaaggaaattcttgccttctatgagaagaccaaattagaggaggaagaggctgaggcagcagaagaagaagatccgtccaagtctcctactatgtaggtttggtttttacatatttttattttgtataggaaaatggccctagggtcgagacaatggtttgccccttgtggcacttttttttcttgtaaagacaaatttgtaaggtttaatggccaactttgcttttatctttattaaatgcttcgtacttttatgcttgaactttaatatatacttgtatgcttgcgtttttattcataatttaaacaactatattttgatcaaatgcaaaatactttaggcctttccattgcacatatattctgctaacaatatctaagtagttaattatctacaatgtgtgcgagcagtttattacctgccatgcttttgatctaggagcagttatcaattctgcctcgcaataacagttataatctatttcacgcaaacttgaatataattttaatgatttattttttattgcttttatgaatatttagatcgtctattcataaactaggtttaagtacttttatcaagacaccttgatgtctcgtttaataatttcctgaacagtgcaagccgttagtactcagcttcacacgtgagttatgagttatatcttattcataacttttgattttcctttctcatcagacgggtttttaatcaaaaagttattcataatagtttgatcttcctttcacgtcagaaaggtttgatcaacaaaaactttaaaaaaaaattaaaaaactttaaagtgttgggtttgcactatatcatgtatttctagataaattccggttgattatacacatatgcccctcaagtatttttaaagagtaacactttgtaattacttgaaaaaggattaacttcattcataattgaagttcaaaatattacatcagaaatgtgagttacaatcatcaatttactggtagtagggtcgcaaatgttccatgttccagtagttctttatcagcgagcccttcagtcaagccaatttgtaaacctcgattcctactgtcgcttcaatcacataaggaccctcccagtttgggttaaatactcctacagatgcgtctctccgacattgaatagcctctttttgacccttttgttgaagtaccttgttactcgatgttggtatgctgcattagtaatttgtgactcagtacgtttttcatca

SEQ ID NO: 38591 - DNA, 2615 bp, Cannabis sativa
  modified_base (1717)..(1733): a, c, t, g, unknown or other
ttctttttgaaaaaaaagaaagagaagataattttaggtagtccattggtagtataaatacatcatattggtgatcatttatttgcactcgtccaaatatccatatctttatagtactccaaacatatattcacagaccatgggacccaaaaaagccagccctcagttctctacgccgaagaagagtaactctccttccagtccttcacacaaattgtcactggttctcccctcacgcactcgacgagtactaggaggaggtagaaactcaacaacttttactgcatggttcttgagacgttgcttgatgaagagaggaaagcccaccgagatgcccatggtaacacgtttgaggcccgccaccgttgctcggagctggctagcatcatctacaagctcggtctgcaactgcagaaggcatcggacgagcttcgcacgattgagggttacgtggactcggcggttcaccacactgcccagggagcgccttgccacagaccttatcagattggagtaagtgatacaccatttctatcactgagttttagtacgtagctaagtggttaggtttaatatcggaagtagtatttttatttttattagttaagtgtatttttcttatctatcttaatgttctagtacgtaagaaagtttacaaaactttgtattagcatctcatgtaagcatggtccttttgagtttgttttattgatgaccatgtaccttattaacaaaggattgtaatgcgctatgtggtgtactaacaccatcatagttcagtaatgaaatatgtgatttgaatctttgttcttataaactgttgatgatatcttttaagtactctaggttttattaataggttctttctgtggtttgactgaactaaactatattcatctcccacgtacattgtatattgaaaaatagcacattttatatctatgaactaattaatctaatttatgctatatttgtaagcccatcacctttcctagttgattatttccagccacttaattaactatatgtatatgtaacatgtcccatatatggtatcataaaagaagaccaaatgctttaaaagtgactataaaaattgggctaaggttcagtcctacttggacaaatgacacgacttaattaattggtacaccattcagcaaaaaaaagcaaaaagaaaagtgtggtacaccattttattttccatatgactaattaagacaatgagacaatatttatttgttggatgatgatatccattgaatgatgaccactatatatctaatggataaaggatgtaactgagaacaagacaaaataatttaaaatgaattaagcggtatataataggagagaaaacaaagaaaattgatttgatttaaacaaaggcattacagggaatatatatagtgtaggaagtcggttaagactaactacaataacaataactaacttccctaagatgtggcaactaacataacaaatcctaaccacttaatctaataggccccctcaagatggatggtagagattgttgacattcatcttggacaaaatgttgtggaagtgagctgggaggagtggcttggtgaggatgtctgcaatgctggacttggaagtgacatggttcaatttgatgatgcctttgttaacttttctcggataaggtgacagtcgattttcacatgtttagtgcgctcgtggtagacaggatttnnnnnnnnnnnnnnnnntgcattgttgtcacaaaaaagtattgaaggaagtttatgttgaatgccaaaatcatgcatgatggagtgtaaccaagtaatttcacaagctgcagtaccattgctcgatattttgctttagcagaggagcgagagacagtttgttatttcttagacttccaagagatgagggattgtccaagaaaaacacaatatccttatatggatcttctagtatccaaacatgccgcccaatcagcatcagcaaaagcctgaagctgtattgggttaggagaggagttatagaaaaaaagaccttgaccaagtgtgccttttagatattggagaatttgatttgcagcttggagatgtggttctcttggttgttgaagatattggctaattttattgactgaaaaagcaatgtcaagccatgttatagtgaggtagattaacttgccaattaagctcctatattgagtaggattatccaagagttttcctgtttcattattgagttttgtgtttggttccattggagtagtgactggttttgtgccaagacaaccaatttcttgtagtaattgaagagtgaaaggccttcgagtgacagagatgcctttattgtttctggcaatttcaaggccgaggaagaagtttaaacttccaaggtctttgagtatgaagtgggagtcaagagttgatgtgaagtgttgtaattcttcaaggctatttgttgcaacaacgatatcatcaccatatattagtattgcaagaaagatgcaagttttatatctaatgaacaaagagtgatcatttttagattgagtgaacttttgttgtagtaaagtggtgctaagtttagcgtaccattgccttgaggcttgcttaaggccataaaga

SEQ ID NO: 38592 - DNA, 1768 bp, Cannabis sativa
acgaatttgtttttgggcaccttcccaaaaggcttcattccaatggagatagtgttcatccttatatacccaagatccttcccatttctagccaatgtggggctttggatgtacacccaacaatgagtattcctggtaataaaatgtttcagattgtctctaaatttaagcggttcaaagacaggcagagggcgataaacaaagacagtttctctgatttatagaagcagctacttgacattaaagccgaactggatggtttgcaaaaccagttacagcagcagccacttaatccctctctacatatgaaggaaaaaatagctagggagaagttagtccaaaaacagaaggattacacttctttcttacaacaaaaaggtaaaatgaattggatccaggatggtgatgctaacacgtccttgtttcatgcttgcatcaagcatagattgagacaaaatcgtattctctctattgagaattaagaaggcaatacgatcactgatcccactctcatcacagaggcctttcttgacttttataagaatcttcttggtactaagagagagaataggaggcaggttcaaaagcacatcctcaacaaaggacctaaagtgaattcggttcaggccgatttcttgttgcagagattcactcatgatgagatcaaacaggttgtttttagcatacctggaaataaatctccaggaccaaatggcttctccagcagctttttccagaataattgggagactattggaggtgatatatgcaaggctgtgctctcctttttggactcaggtaatatactgaaggaaataaactctaccatcattacgttggtgcctaaagttaaatgccctaattctgttacagattttaggccaatatcttgttgcaatgtgatttacaagattgcaactaagctattgagctctagaatcaataatattctcccttcagtaatatcactgtcccaaggtggttttattaaagagagatttataggacataatatcttgatctgtcaagatttggtgaggcattatggcaggaaggctaataagcctagttgtatgattaaactgaacctccaaaaagcatatgatacgattgaatggggatttcttgaaaagatgctaactggtctaaattttctagggaaattcataaagctagttatgaactgcagcactactcccaaattttctctaatgtttaatggtactcttcatggatactataaagctatgagggggatcagacaaggggatccgatttcccccctgttatttttcttgggcatggagtacttatctagactgatcgtgaaagttggggaaaaagaaggattcaaattccatgatagatgctcagaattgaaactcaatcatcttgcttttgctgatgatgttcttttatttttccatggtgatttcatgagcattctctacatgttgcaggcattaaaaaccttctctcttacatctggattacatccaaaagcaagtaaaactgctatctattgtagcaacatgctctcgagagaagtgaatcatattgtgcagatttcaggcttcataaggcaggagttgcctttcacttacctgggtattccaatatgtgtgagaagataccagggaaagaatgtgaaatacttgctaaaagaatgactgctagaattaaaagctggagttccaggaatctctcctttgctgggagaatcactctaataaactcagtcttgattgctatacaggcctattggagt

SEQ ID NO: 38593 - DNA, 4773 bp, Cannabis sativa
ttttaatcaacttaaaatgggacgtataaaagtttgtgttattaattgagtcaagattttctctcgttttctgttcttggagctcgtgctgatgctatggcaaaaacaagatcaaaaaacaacggaaaattgaaatctgcaatgaagttagtgaggaagaaaggatcgaaggcaggattgactgagaaacaagagcaagagatggaagggattaccggtatcgatccactgaaacattctgaagatgaagaggatgcgattggcgagatgcatgggagaaggagtatggatgactatttccaacctccactgtctcctcgcagttctctgaaggagattcgccgaatggaggatgtcgagagggattttctaaggtatgttcactaccccaccagttctgggatctggcaatattgttcgtaatcttgaaagctcttttaagagccctggacagggaaacaaggttaggattgtgatgaaagatataaaagaggaagtgagctattggtcaccctcattggtctgctatgttcttggatcaaatcctcccttgcacatccttgagggttttgcaaaaagactatggggtgagaaggttgataaagtaaagatgtgggcttatggtatattcataatcaaattttgaacaattgagagtagggatacaattttaaatggcggatacgtcttcttcaatcggagacctgtgatcatgaagccatgggacccgaacaccaactacaagaaggaagacattcagcaagtgcctacatggattccactagaggatttggatctcaaatattggggtcaaaaatctctcttcaagattgttgggcagatggggcggccaattatggtggatgaagttacaaaagagagagaaaggctcaactacccaagagtattggttgaagtagaaatggaccaagacttgccgagaatgttggaatttataaatgaacatgatatgaacatacaggtgggagtgacttatgaatggaagcctactatatgtaagcactgttttggaatgggccatttgactgatgattgtaagaagaaaacaaagccaaagaaggagtgggttgtgaaggttgatagtaggaaagctgctcccgaggccaaggtggatggagatggttttaaagaggttataaaagggaaacgaatgcaagagaaagaggtacctgcagtaacaaagacaaataattctttcagcatacttgcagaagacaaaagtggacagcaagatgctattcaagaggctgagattagatccattgagaacacaggaggggggagttccctctctttgtaatggataagttcctatgttggaatatccgaggagcaaataacattcaaaagcagaggtctataaaaaaatttattcagactcagaatgtttgtttggtggggctcctcgagacaagggtaaaggttcataaattggaaaccttgtacctaaatgtgtttgaaggttggtgtttctcaacaaatattgcttggcatcatggagggaggattgtaatatagcatggaatccaatgaggtatatagtggacatcattagatgcacaagtcaattgatgcatttaaaggtgaccactgtagataatacatattgtagtttcatcactataatatatgccttgaatgacaaaaatggtaggcagagtctatggaaaaatctcagggagctagctactaaggataaatggctcttaatgggtgattttaatgatattctggctaaagaggagagagttgggcaaagagtcaaatactatcctgatatagattttatatagtgtgtgaattattgttaattggaggatgtaaagtctacagggaacttctttacttggtcaaacaagcagcaggggagggatagaatctcctccaaaatagataagatcatggccaatcaagcatggcttgatcattatcaaaatgcagaggcaaacttcctcaatgaggggctttatgatcactctcctagtattctatcattgtatcctagatggtcgaatgggaagaaacctttcaggtatttttgaatgtggaaaagtttccctgggtatgaacagaaggtcacagaggtttggagaaagaagactgaaggaacaaaaaggtatcaagtgattagcaagctcaaagatctcaaggctgttttcatggagatcaatagagttggttattctgacatttacacggcagtaatgcaagctagaaaggagctaaacaaaaaacagaataaggtgcaccaaaaccctttagatgaatcttctattgctgaagaacaccaagccagaaccagattacttcaagtgtagaaggattactcttcttttctgcagcaaaaagcaaaagcctgttggattcaaaatggagatagtaacactgctatttttcatgcgagcatcaaatagagagtaaggcagaaccaagttttctcaattgaacatcagaatggtgtacgggtgactgaaccgaagtagatttctgatgcttttgtggattattatcagagtttgttgggttcaaaaatggagaatagaaggaaagtggtgaagagcatcatagcaaggggtccggttctgagttcccttgaagctgattcccttacaaaaaggttcaccaaagaagaagtgaagcaggctttgtttgacatacctggcaacaaggttcctggccgcgatggctactctagtttcttttatcaggacaactgggatctggtgggagaggacatggtggaagctgtgacatcctttcttgaaacaggtaattgcataaggagataaataatacagttttgactttggtgccaaaagttaagtgtccaaatacattaaaggattttagaccaatagcttgttgcaatgttatttataagattgcaaccaagctattgtgcgctagaatcaaaacctttcttcctaatatagtctgtcaaactcaaggaggctttattaggggaaggttcattgggcataatatcatgatttgtcaggatattcttaggcattatggaaggaaaaataataaggccagttgtatcattaagcttgatttacaaaaggcctatgataccatagaatgggattttattgaagaaatgttgcatggcctaagctttcctactagattcattagtcttgtgatgacttgtattagaacaccaagattctcattgatgtttaatggaaccttgcatggattttttgaatcgaaaagaggactcagacaaggagatccaatgtcacctctgttatttgtgttgggtatggaatacttatcttgaataatgggtaaggtaggagaaaagaatgacttccattttcaccacaggtgtgctgaaattaaactgaaccatcttgcctttgctgatgatgtaatactgtgttgcaatggagattttgggagtgtccattacttattacaagagctcaagttattctctatgacctctggactgtaccctaatgcctcaaaatcttccatatatttgagcaatatgcctaatgatcaattgagtaaactgctgcagatatcaggttttataaacaagtccctgtcttttacttaccttggtgttccaattggagctaagaagatttcgggtaaagaatgtgaagtattggctaagaagatgattgctcgaagcaaaacatggagtacaaggaatctatcctttgttggatgggtagtccttattaactctgtgttaatggctatccatgcctattggtgccaagtcctaatcctacctagcaaagtggggaaaaaaattgaagcaatttgtaggaattatttatggaatgggaaagaaacatatcaaggccatggagctttatctcgggaatctatttgccaaccaaagtcagctggtggaataggtttcaagtgcgtagctgcttagaatagagcgacaatgggcaagtacgtgtgggcaattttaaataaagaggatacactttggctgagatgggttaatagtgtttatctccgtaatgaggactggtgggactacaaattaccaagccaaagtagttggtattggaagagcttggtgaggctcaaagatcagatgaaagaagtttcaggcagcattgttttgcagtagaaatacacgattgctcagggatataatctgttcaaaccagcagggaaaaaatgcattggcctaagcaagtttggagtaggttgaactcacccaaagatagctttgtgctatggcttgctatgcaccagagattgaaaaccagagatagactcttcaagatgaaaatcgtggaagatcaggtttgtttactctgctgtacacatcaagaatctgctgaacacctcttttttggttgtactgaaaccagcaggtgcttgcaggaattgacaacttggctaaataggaaaacttctcacacttctctccccaatctcatcaagtggattgggagaactaagttgagtaagtttaagaaaatgacatatgctgcctagccagcttgacatacaatatatggagattgagaaataggtgttattgggtgaaagcaaatccagaaactgatttgctgattaaagagttaaaggctgaagtaacacatcgaatacatttgttctggccaaagaaaatttcagaggaggataaacaatggtttttgactttgtgaataacgtaattgtgtagaatgaattgtggttttatggaatacatgtatagatgattatttaggcccttgatgggtgctattagactgtaaagac

SEQ ID NO: 38594 - DNA, 3710 bp, Cannabis sativa
  modified_base (2092)..(2092): a, c, t, g, unknown or other
  modified_base (2724)..(2724): a, c, t, g, unknown or other
gcaggaatattagtagcgactactccaaatttagtgtcgaatctgactgtcttaaaattgtccaataaattcagagaaaggaggagaattgtcgagatatggatgacattatatcatatttaccatttattgttatttgataatgttgttagtgtttcctttgtttatagggaagttaatggagtcgctcatgagttagtcaattatgttttgacacacaaaattcgagctatgtagacttagtaaaaaagtaaaattgtaggtatttaaattctcaacttcttagttgttaaactaatcaaattaccattaaactacaacacttacttaatattataagtattattatttattttattactaattatatatatattttttcaaaatacgagccttaagtagtgggaggcttaaggcggtcgcatcattcgtctcactttaggaccgattctttttttgggtagattttgcttagttagatttacctttataatctcttttgttgaatggattttgatttaaaaaaaaaatgtgtattatagaagttagatgttgaataaataaataaataaaagttttgaaaatacagttgaaaattttgtaagagtgttttgcaagacttgacccaaaattatacaagttggtatttatttagtaattcgtactattttatgtattccaattatacaaaatacaactaaattagttattttaatatatatttttttacatcaccaaaataaattaattattataaataagaaatctgtttcataaaaataaaatacacttaaagcaaatataaataaataaatcataataattgaaaaaaaaagacggggcgagtaggtgaaagttgaacatgtgcaatattgaaaaaccacatatgccgaaatttaattaattaaaaaaacaaaattaaaaaaaaaaataaaaaatacagaggaaaaccaaaacgggaggtgggaaaccaaaaacaaaacaaagaaaaaaaataaaacaaattcatttaattttatcgtatttatttggatttttaataatttcatttttaaaaataaaaaataaaaattggagtaaaaagtttcaataaggactttgggatccaaccctttcaggaatctgcaacttcgtcttcccatcgttaaaagaaagaaagagtttttggtattgagttgtgtcgttttattcccattcctgtgtcgttttgaaggattcctccttcgttttgtaaatcgtcttattttgggatcaaaagctccattattaactcgatcaaacaaccctcaaacccttaattgctgcttccatggccgttcccggacttcatcggttccggtagagttgaactaggaggaaattccggtctttgttttcgtcgttgccgtttttttttttgtttttgtttttggttcaggattttgtttctttcatgggcgatcttcgggattggtcgcctgaactaaacggcgtcgttttggaagataggccgtcgtcatcttcgtctttgtcttcgtctccaccgccgccgccgctacttcagccgccgccaccgctttcgttgaatcaaacggtgattggtttggaatactggcagagagcggaggaagctacgcaggggattataggtcaggttcaaccgactgttgtgtctgagaggaggagaagagcggttattgattatgttcagaggcttattagaggttaccttggttgcgaggtgagtatctatctatatctaatatgtgtttgtatatgtgtatgcattcgagctttggggttttgttctgacatttttgcgcttagtgctagtgaaactattgttgtattattagcattgctattgagaattgaaatatgatgattttgaagtgttatttaacaagaaatgaaaataaaattgggaaatgcaataataaattttaattaattgaagagatatgaaagctttccattagatagattttgtttgattggagttttggatcttaagttctagtgcttggggcttgttagtttctcaacaggaaaagtttattagcttgatagattatgcttcataaataggaaaaaacaagaagaagaagaagangaagaagaagaagaagaagtaattttgtggtactttgcttgtataaaagtagtttaacttaaaggaaattcaagttgaccgactatgttattgaggtagcttgatttcagttcaaaatgtgttatggaacaaaacaagtaaactttggtcgaatgattaatttgctgggtcacgtatacaagtgcctaagaatgtttcatttggctggtgaaagaaaggttttggcttgttataccagtttaaatctctcatgtctttggcatcatgggcatttgggagggttttgttcaagtgttttcattttcattagctgtcctttttgtggtacccaagaggggtagctcccacaaggtttgaggttcaagtcccttgtggtatctagatagcagttgctatagttttctggttcccaaacattgttgtggactaaggcagggctcctcgtttaaaataaatggcgattcatagaatatcgcctttttgttataactggttatatgaaatcaataatgctgctggtagtattacctaagctgtgaactagtttattccctccatactatcaacaaagcttgccaacaaaactacacataacttttttgctgattgatatatttatatataaatatatntatatatatatatataaattgtcctttcatgctctagtcagttttgtgtggcatcctctttctttattcttctaatttataatttttgatgcaatgttactcttggatttttatctcaatacatatatttgtgtacatgttttcctttgcaggtgttcccatttggatcagtacctttaaaaacgtatttgcctgatggagatattgacttgactgcatttggtggcctaaatgttgaggaggctttggctaatgatgtgtgctcagtccttgaaagagaagaaaaaaataacgctgcagaatttgtggtgaaggatgtgcagttgatccgggctgaggtctctatcttaatacctaacttaagttctttggtacatttgaactttgatgatatagattctgtttaattctacttcaaacatgaatcaagcaaacattgttaacctagtctatgtagacatgtggaaactattcaattataatattttttaaaaaatattataaattattagtgaaatacacatgccatttgctaatttaagagattgcaaaagagagtataatcttgagtgcatttagcatttctcgtctcttaattgctatttaagtttagtggctgtgcaacctcctcctcttcttctttaatctacatatcctcgcatctttcaaatagaccgactttcagtgaaattcatttgtataattttgtcttttatataaatatatagataatttagtaattttatacttaattactaatttaagatacatatatctgatgattatcgtaatttttgtgctattgtctttttcttagatttcctagctcgaatagggattgcatatctatgtggttaattattttatttcatatatggatttatggcttaattatgttattttattgatggatttatgaaacgagcatattattttctctatgcatatgctctcttcgtacacctctttcaaaatttgtttttttt

SEQ ID NO: 38595 - DNA, 1862 bp, Cannabis sativa
ttttttttttaatcacaaattttgttgtgactaaaagtaagaatttttgtagtgccaacatctcgctaattcctcttctcggcctccccatctcgcctaacacttcattcgtgggcaaccatgaggctgttttccaatgtgcttggataagtttcaaaaattattaagtgctaatttttggagttaacacttgcctctcactcaacaagaattcttttaagaatttttgttgacgaatggattggttttttatcttgttgaaaagcaaaccttatccccttcacgttttttgagaatgggcttattatataaagaggacctctttatgttttcattcacttcatcaaataattttttcatggttgtaaagctcattctacttgcttgagaggtcacgagttcgactcttcataaggtcatttttcacctctaatttcttttcccttacttttatgacttaaaaagagttttttttttggaaaatgtgcgccaacactatcccgatgttcgggggaaactttgggtgagtagtcttgatgagggtcttctttggcaagaaacttcaatgaatggttatgtttcctagagaagcttgccttggcatctgtgattgcattttgatacatgtcttttgatttatgtggtaggtgccctgctcactttggcggagttcgttatttctcaacagcttttctcaacatctcaaggtactaaattctcctcttctttgcttttggatttcgcattgtagtgctccatgtattgtctccatttctctcattttataaacttccatttgtcatgcttagaaaattaattagtacctctcttttaccttttaggttagggtgtcgagacgttgcgtctcactgaccttgtccaccttagtttttttagggatatcttggaaaaattccatttgtggcttacattattgacatattatttttctctctaagggtccttgagagaaatccgatgagatgcatgctaggctaatgttcgagaggagaggccatctaagtgtccaagcgaaaatttatttagttttgagtggggagcaggatggcatgactgtcaattccaacttgtacatttctaggcttaggaaatcacttgttaaaatccaaagtcaactgagatacattgagagcacctttccatcagatcccactcccccgccttctcccgaggcttatgcgcccaccttggatgaggagcttgaagtcgcttccattttttcctctcctctctcggggttgcctagggtcaaggcccgggcatgcaagatttcttagaaaaatataaaatgtgaggctcgctcttaccatcaattttatatgtgtaataccccgataagcctaacggtaaataattagcagagtttatatttatattatgagttaatcagataataagtgggattatgatcctactgatctactccagtataaaatttaaattggctataagtgagtaaataagtgtaatttatgaattatggagattgatctatagcacgtgtgcatgttataggagctatatgttgaaaaaaaaatattttcaggttcgacgaccctgaagacccaataaatggttaaataagtgtaatttgttaattacggagatttatttgaaatgcgtggatataatatgagttatttgtgaaataaaaatatttttagaggttcgacaaccttagagacccgatgtgaggccaaaaatatcacaacggttttagttaaaaatatttatgagattattaggataaattaattttagaaataccgaggtattttgaggtattcagagtcgaccaaacaccctaaaaatataaatttcttagtggctaaacaataata

SEQ ID NO: 38596 - DNA, 3071 bp, Cannabis sativa
actagaaataacatgcattacaaagtgtgatttcaagattttaaccagtgaacatttagttaataatctctaaagatttttctctacttttttctctctcttttctttttcctctaatgagcttctctctctaatttggctcgtaagagaagaagaattcatgcttgtaatttagatagggtagttagagtcacgagctgtaattttttgatcttgtttttgttaattatttgttgtaactgaaaaatagttagaatcttgtatttgagtgtttgtacacttgcaatttgttgtcatttaatgttaaccttgagcttattataagaagatttacacagcagttacttaattatttttttattccttttatttataacatttccttgcaattgtattgttgaaactaacaatgtgaaatattaaaatttgtaaaataattgcacttaatttactttatacaactaaatagcacaatgtaaatttatagtcgttttgcgaccatataataatcgttgacagttgcgtagtgtaattcatgatcatttctgcgaccatacaaagttagtttgctaataaaatttttgcaaaattattttactaataaaagttattattatttttttattttaagtacgtttcactaaatattcttttattatctttatataatttaattatacttttaaattaagagtgaaattaagaaaaaaaaaacactgtgcaaaaatgggcgaagttactatttggagcataaaatttaaataaaattttctagtttataataatttatttattaatatagttgtttggtataattataaacaccttatgacacgtttactatacaatattcaaaatcgaaataaattaattgagaaatagaacagaataaataaaaaataatcagaactaatctttgcaaatatgttgtttaataaaattatttgaaaataaaataataattatttatcttatttactttatcaaaaaaacgtaatcggaatgtttaaattgattaaattgtcatttatagtgaaactataatgtaaagtaattattttataagacatattttaaatgataaattaattaatttagtattggttttcgtgtcgtgaacataatcatattcttctttttttttttttaagagaaaattcattcaaagataaaccaagataaacccaacattatcagggataaatagagcgataaatctcatagagatgatcaaacaaataattaattaaccacactaattacaaaaagagcaaagagctcgaaacacaaacaaacaatccgagggaagaaccctacaaaaaaagggcacacatgccaaaatatatattcgaaatatatactaatacatatacaattcataaaatcaattttaatggtgggttattccaagcataaaatatccatattttgatcaaaatatattaatatcaatcatgccttggattatttttttattttttaattttccatgttgaattattattgattgtttgtataattgtatgttaattataatattaaataaaataattctatttttttttaaaaaaaaaaaccacttaatgacttgatgtttctactttctatactattttagtcaacacaatttttcctttctttcttttcattgttatcatcaaaaaagtatattttcaaaatgtgtcgtttataaatataaataatatgtagtatatatcgagccatttcttctttaaatattagattaaagaaaacatataataaaactcccccaaaacataggagaacatagatttatgttttcatttcatgtcgagtataattattatatattcccaaattgtattaattaatctatatgacaatataatacttctaaaattaatcaataaataaataaacaagttgtgatgagagatgtctctactttctatactattttagtcaaaaacaattttttttcccttcttttttatgttatctccaaaaaagtttaaaagccaccatagtacaaaaagaaataaaaaatataatttaagaagcaattatataaatatatatatttagatatataaatttgtggtacacttactaaaaaaacacccaatgtatgatggagtacgtgcccaaaattaatcctttgttcataaaatatgcatgagaatccattttctcaccatgtggaagcttaatttgtttccccattatacgtgtcctatttactaataaaaaataaaataatttgtgatatatttttatttatttattttaatatcaatattcattgctataaaaatatagtatatatactattcatggataagttagattaatgggattgtgtgatgataatgatttcatttattaattgaaaattgtgtattgtgagggtagttaaggacttgtataaattaaaaattctattttttttagaaaaattaacaataattttattaaatttagatcaattactaaagaaaatattaacaaaatctcatgtcaaatttatgaaaaacattttccttttattcttcctatttttttcccataaaatttttcttttggtaaaattcattttttttttgaaacaaagattgcaactttattaatgcaaatcagttaataaaatagcttccaaatcaatatggacagatcccttacaggaaaaacggtcaggacatgaaccagaagaacgagctaaccaattagctgcttggttcccacaccatttaacaaactgaactgtaatatgaaacatcgaaagagatcgtataagactaatataatctgaaacaattaaaccaagaggagaaagaatttgcctgttattaataatagcatttaccaacactagacaatcagtctccagacgcacctagcagggatccatttattgagttgtcaaataagaacatataaattacttaattggcattaaatatttcaatttggcaaatttttatagaaaaagaaacctaatatataaatatagggacatgattttgtctcgtgatgtactttcacggaatgtattccgtggtacattagatgggtctcggggtacattaaat

SEQ ID NO: 38597 - DNA, 1920 bp, Cannabis sativa
  modified_base (1100)..(1114): a, c, t, g, unknown or other
  modified_base (1231)..(1248): a, c, t, g, unknown or other
attggacaaatgtttataaatacgtatatataccataaaaatatatagagttggggcctcacttgccttgccttaatacggtcgacactgcattaattaagatacttgagggattaattaggttttaacattatattaattattataaaattgtataattttcaagcactttaaagtctctataacttggtttattatataagaccatcatctctattctctactacatgggagatataaaaatttgtgcagtaatatttagcacaaaaattaattttatatatgatatatgtgcactaatttttaatattgtactaattttgtacagcttttagcacagagtaaatttttttgtaaagtgaactatgtaatttatgccttcatgtgatgcactataagtatttcatagtagttttaatcttattatattattgtaaatttgtatcttatatattaccagatactactactattattattattattattaagaagaagaaaaaaaacttcattatagtacaaacaaaatagggaactattacaaaccgaaccatcaagctcctaccaggcagctcaaacacccaacaaaaaaaactattaattacattataactttctcaaataatctctctagtaatcttcctattagtaacaatttgcaaatctgtacaaaacaatccttttaatatttgtaactatatgtgagctatggaattagaatagtcataaaaaacagtgattcttattcagccagatgttgtaaattattgttgccaaaattgtaaccctaacccacataaagtgaattaaccccttggcatatatatttgaggccatccaaaatattccaacctttgtgaaggccaaattctggaacccaactaatcaaaaatcttctccataactctccgagataaatcacaaaagaaaaataaatgctcagtacttgattcaataactatgccacaaataggcactacaaaaaattttactttttgttacaaattttgtgactaaagataaaatagttgtggctaattataaattattattattactgtgttgtgacttaaaaattcgtggctaaaagtattagtcannnnnnnnnnnnnnngttgtgactaaatatatttttattcacaatatttgttgtgactaaagctaaattagcgataatttttcactaaatactatgttttagtcacaagcaattttttgttgtgactaaaannnnnnnnnnnnnnnnnnaaatttatgttgtgactaaaatattgtcactaaaagtaccaattttttatagtgagggcagtcaagcatttccaaaacaatctgaaatcttatcattttgtacctagttagcacctaattattcacaacttaccaaagaacaaaacgatgtttagaaaaagttaatgaactctaaacaactttgtgatatgttacatgggtttgagccaataaattgttgtacagctaaccagttttaaaccagcccaagccacttgctgccaatatattattattattatttacggtaaaacttttttaatatttacaattattatacatatgaccttaataaaaaaaatagcagtaaaaatactttatcttatgactatgttgcagtcgtacccttttttggtcattaagtgtcaactcaaaaatacgtggcgatatattattagaccatgtattaaataagatatcgccgtatgtttctaagctggcacttaatgagcttaattgacacttaacaactaaaaaagggtacgactgcaacaatatcgtaagataaggtacttttgctcgactgcaacaatatcgtatgttagagatattattacaatggaagataaaccaagatatatacaactcaattgtaaaaataatacaaggattaaaataagagattgattaaat

SEQ ID NO: 38598 - DNA, 3309 bp, Cannabis sativa
ggtatgggagaacacattcttcttcttcttcacccaacagaccacatggaggggtctgtatcaccacaaaataagtgggccctccctccccacataaataaaaacataatattggctcttttttaaattcgatttattttcttcccctcttttcgtggatcttgttccttgaaataatagtaaccaaaatttgtccataaaatatcttagtagatatatactactatcaaaatagtctttaacttcccctattttagttgattaaaaaaaatgaagctaaagcattcaaggagtgtgttttattagttttggtttcttgctcgttgaaatttaaaatttatttgcaattatattataaaaactagaaaataaatcacgctttgcgtgcgattgtattttgtttagtaatcattaactgtttatcgagtttttcagcaactaaatattttttgaacttaagaaaataataatagagtaaatagtgaaataacaaataagagatttttacgtggttcaagcattaactatccttagttcacgaatccattttattaggctctttcgtcggtaattgtttatacaaataaagatacaatggattaaaactccttttcaccatgttccttttgaagaagaggatgcttagtaggaatattctggagttaatagtagggttacagacatgtgtttgtcatgggatgatgaagaatggatcttccatgtgaaagagaaggtcatccctcccttgtgctttttatggggtatttatacgccagcttgtttgcatgggctgccttggatgggtcatcgttggggaaaaatcccaccatcaaattggtaggtggcatatttctcatgtggcatttaagtgcatcagattgtacaactcgaacttcggatgcgtgtcacttcagggtttctcctttttgaatttcctctatccctagccgttggtttgtttggtcaggtacactaggacacacatgtttgtacgatggcgtgctgtgggaaacaacctttgaccttgtacctgaggagagcctggtccctaggtccgtagtctgacacgtatgggtgaggcttcatcgggctaaaggcatagaccgatttgttgtgtctcagaatgccttgacctttctatagagaatccatacggctcgcgggaacaaatggcttcagctcttggaatggagtgagactttagttcacggatgcccttcgcatggccagcagtctgagaactccccttcacagagactcttcccacgagatgagggcctttgttttcccggagcatcaattgagggagttgggcagctgatgactccttgaacatctttaattaaaattcacgtatcatgctaacaaaaatgcaaataacattaactcataacagtaaatcaaatttcaaattttttaatatttttgatataatttgttttaataataagaataattgttctattttttatttaaaaaataaattaatatagtagaaaaattcatcatgccatttcttatttaaaaataaaagtaaacaaagagatattatcaaatgttataattaaaataaaaaaaaatcaaacagtgaagaatcctcatataaaatagagatctaaaatgataattgataaatatatagaaaacttatcatataatttcaaaatcgttgtcatcatcatatctcatttattgttgttactatattcaaactcgttgtccttactatatctcacttgtagttgccactgcattaaaaattgatgtcatcaccgtatctcacttgtagttaccactatcactgcaattaggtttgctctctacataaaataaatcaaataatgagttacctattatagaagaaaaccattatgtcaatcaccttatgtctcaatcattatgagttaattactatgcaatgagctaagcagaaaatagataagagtatttgtagtaattttaaagtatcaaatcatcatcttatgtctcaactttataaatatatatatttatatatatatatgggtgagtattcaatggttacaataaaaatataaccatgatggttacatttttttataacctgttataacaggtcactaataggtaaatttctatttttagacttaaataaattatattttaattaaagtatttaataaaacctttttagaaattaatatttataattttttttattttaagaaaataaatcaaatcaggttagtatcaagttgcaggtaatttattagtaattttttaaattaatcataactgtctaataatgatccaacgactaaaaataaatgtaaccatcatcgttacatatttaatgtaaccatcatggttacatatttaatgtaatcatcatggttacatatttaatgtaaccattggaaccttctccatatatatatatatatatttcaaattatatatgagaaaaaaatatatgtttttgatttatgataattgagtaattaagatgtaataagattttaattgatattttttatacagtattttttaataatatgagtaactagtcaaattttatattctttttctataagattaaaaaaatattgtagagttcatatttcttaattatattttgaatttaataatttgttacaaatttgtgttttttttttcttttaaataattctaataaacttaataccacctacagtaatagctataattacgtatataaaattaaatgatcataatttaaggatattatattaagttaaattgcagtataaatatctaaaagtttgaaaattttaatttgtaattattttttcatgtagtttgaaagtttgatgttgttttcttattactttcatgtagtttttttgctgttttctcgtatttttataaaatactgtaaaaatataaaaaaaaaaaattgaacataaaaatataaaatttttacaaaaattaatgtcttatgtaattatcccttttttagtgtataatatcattcatttgttttataaatttaaataaccacaatttaatatactatatcaagttgaatttatatttgataaccatctaaaatttaaaaaaaattagtttctaatattattatagtgtgtaattatatatttttttgtttatttttagttagtacgtttatctatattttacttaattttctcttgtttaatattttattaattgattaattaattaagaaaaatatttcagtacaattcaaaaaaatcattcctatttttttttttcaagtcattaaattctttaactaattctattatttaaatatccctaatctattat

SEQ ID NO: 38599 - DNA, 3363 bp, Cannabis sativa
tagttagggtgttacattttatatggcttttttttttaaaaaaaaaaataaacaagatctataaccaaagaaagagactagagaaactaggttacaaagatctagaaagattggaatgccaattgttccaaacaaactcttcgccagttcctaaagtcgcctgagccaggttatgcgcctgggtgttttccgatttgggagcaaatctgaatgaagcgcctggaaaataggacaaagaggagataatattcatgatgtagcgagaaagggttgagcggtcggtaagcttcctttgaattcttgagaccaaattctagcaatttgaaataatgagttcaatgggaaaacaatctgcttaacaccaacttaaagcacgatgaagggcctctacttcagcaaaaatgggagtgaaacctgaataggctagggaagagaagcatgcgataattctgccttgaaagtcttggatatagcaccatcgccatgtctgttaaaatgtaactgaacaactgcatcaatgctaagtttaaacattcttggagaagatatcaagggtgaccaatcatgctgattgttggtagaaggggtagtgatctttgtttgtggattcttgtattccagcaagttattaatgatagaaggttccacatctaaaccaatgaacttgttatctgcaaaaagaaaattattgcgcttgttctaaatagcccataagataccaacaaatacaactaagtcatctttgctaaattcatcaaaacctcttaacaaaaattctttaatatcacaatatttattattgtagaaaaaaagaagagaatctagactgtttctacaacttacttgccttagaacaatacaaaaaggagtgagtgttagagtcaatctggtttaaacatatggaacaatatgggttatctagaattttcctagagaaaagattaagcttcgagggaagtatatgatgaaaggctttccaaatgaagtgtttaatttttgggggaatattagaagaccaaattgacttccaccaaggtttaagagcatcggcattagaagtacaaaggttgaaattattagagtttgcaagatggtaggcggagttgactgtgagattgcctaaagggtcatgcctccaaatgagacaatccctattgaaaggattgatggggacattgagaatggaattaacagtattatcatcaaagaaatgggttagtttattaatgtcccattgtctatcctcccttaaaaaaataagaaacagtgttttcaggtggatatgaatcactgtgaaaagagatattcctggaatcaggcaaccaattcgaactagcaatttcaaccgacttaccatctccaattttccaaacaagccctttagaaagaagatttctaccccaaaggagacttctccagtaaaaagaaggattatgaccaatagaagctcagagaaaatcgttgtgcttaaatatttggcttttaaaaagaagcaacaaggaattagggttagttaagatacgccaagcttgcttggccaacatggcctgattatggtgaaccatatgatgaaacccaagacccccatagaatttagatttgcagagcagatctcaatttttccagtgtaccttatgcctattaaccaaggaaccccaccagaagttagccatgaggctgctgaaatgcttacagattgagatagggagcctgtaacaagacatagtataagaggggatagcttggatcactgatttaagcaatatctctttgccagccttagaaaaagtttttggttccagacagacaatttattgctatatttttggagaaggaaaaggaaagagaattttttaaaacgggaaaggcattggggaacactcatatatttatcaataaacggtttatcctccataatcagagaattgaggaaaaaatatctatcggaagggctagtgttaggggagaagaggatggaggatttagttaagttaaccgtttggccagtggccttattgtagaggggaaggatctctttactagcatcacaattgtgagctttaacctaaggaaaaaacaagttgtcatctgcaaaaagcatatgtgaaatacagggagtagaacgacagacggagatacccttgaattggttgtggagggttttatgattgataatagcagaaaggccttcagcaacaagaaggaaaatgtatggtgagagaaggtcaccttgcctaaacctcgagaaggttggaagggaggggaaagattattgttaatacagtctgaaagaggcagaggagacgcgtttaagaataagggatatcagttgagtagggaagcctaaatgatgaagaatttgacgtataaattctcattcaactttatcgaaggctttctccatatccaatttaagggcagcccaccctaacttaccagcctttctgtaggtaataaagtgaatgacttcatttgcaatgataatattatcaaagataatgcgattgtggaggaaagcgccttggttatgagaaataacatcattcagaacacgattaagcctattagcaacagtctttgaaataactttgtaaatggtggaacatagactgagaggccgaaagtccttaactccagtggcattcttactcttagggataagaacaagaatagtctcgtggataggagcaatattagcttcagagttaagaatataaagaataacattacaaagattccttccaacaatgggccaattcttcttgtaaaagaatggatttaagccatctggcccatgggccttatcccaccaagttggaatagagcccgttttatatggatttaagacatgttttatatggatttaagccatattttgtatagcttttataagtaattaagttgtaaaagttagcaagctttatgcagtgaaagtacaacaagaaaatgaatataccatttagactctcaaaaacatttcatattatttttattacaaaaaacaattttttaaaaatatagttggtataaaaaaaatatagttgttataaaaaaattaacataaaaagattacaattgtttctaatactgcttggaatattttcttataaaggaaaatttgtcaagtcaccacaaaaaattttatttttagtcataacaaaacttgtaattaaaatttaaaaagttgtaacaaattataaagtatcatttctatattctagctaaaagatccgtatctaaaagtattatttacaaaaattacaatttgttgtaacttaatatatttttagtcacaacaaatattgtagctaaaactaaattagtgacaatttgtatttacatactatgtttttagtcacaaat

SEQ ID NO: 38600 - DNA, 2183 bp, Cannabis sativa
agacctacatatgaaattggtaatagtgtaagaaagaggtgtgaggtatgaatcaaaacatggattaacaacgagaaaaagtgatcacctgtcagtgaaccatggtctgtatgccatccacaccacgacgacatggagatgttatccttactgcaagcatagttgctagttaaaataattatcctgaagcctaaaatttaaagctgaaacttctccttttctccataacctccaaattggagagatttaataataaataaatagtttttttcactcaaattattaatccttccaactgttatcctttaaatttctcacattacaatagtccccttaaagaatatcgactactgaaaatacccctattgtcacattccaatgattccataaataaaataatagaattgagatgtggcactctcatgggtggtttattttctcccaaaaattactgacctctccagattttctttctgaaattatgtaacatttcaattcacctaacaattccattcattttatggacacgacataataaaagacaaatattccagaagttgaaaatcttaggggaggaaacttacaattacaaaaccaaaaaaaaaaaaatcaagaagtgatatgccccgaaccccatggaacaaatattaaatgcaaatactactaacagtagcagaattatgtaatttgagcgggggcaatctgtctttgaaaatgagttcaaaaacagatattacactaataactaacaattcatttttcagctacatacaaggacatgtattcttccaaagtctccaatctttaaacaaaatccagaacagaatattacattcttgattaaagttttaatgagaataaaaaaaaaaaaaagtttcaatgagaatcaaaatcttaataaaattgccctctcactcagtgtcaaaatggcatatttctgcactgcattttagtaggtttccaaaaatttagtaagagccagattttactagctcacttgcacttgaccagaatcttcagtaaatcaatgacatcatggaaccaaaacttgtttctctcatgcaacatatgacattataaaactattctagagattaatttaaagatttatagttcattaggcattacagttttaaagatgcaatttcaaagccacattaaatatataaaattatgcatttagaacatgccttcatcagaattttcatttccaccaaaatatgcaataaaaaagtaccaaggtttagaaaaatcctaagatggttgtgacacaaggactgggtcatatgaaatttcagaacatcccagcaagagtttagaaaaactaaaaagctaatacatgataacaagttaactggaactttcagccgagggatgtatatatgtacgattatattatatacaatttcaaatgaaagaacagaatcacctttgttctgttggaaaataataaagtagacgtcctttaggacaccgagaacgacatagtatattttcaaggccttcatcctcgtccattttcatcactctggatactaattgagaaagagcacataaaaagtttgtaactgttagagcaacaaaatgacaagaaggtagccaggaaatttgcttatttacaaaaggctagtgtcttctacttgcttttacgggataggtacatttatttctttttatcatacatgaacacacgatgtgaaggcctattcagatatattttttcaaagtgaaatgaaagtcttttgtggatgtcaaggttcccgcttttgactttcctaggagatcttgacatatgattaattcttcttttctcagaataaatatatttatggaaaattcaatcgttctaacaattatttttaagaaaaaatgatgcttgcgtagggaaatggtacatattgacacctttgatttatgtgacgaaaaacatataccctatgagaacttaccatagcggtcgcagtgatgtgccaacataagtccgacatcatgcatcaactggccaagagctttaaaggcttcacgaagatttagtataatattatcatgaaaataagattctaaatgcattataagatacaacacaccaatacacatcaatttttatcgcttatccaaaggaacgtatttgatacatcaacaatccatacttgagatagtaatgaataatgataatgaaacaa

SEQ ID NO: 38601 - DNA, 1703 bp, Cannabis sativa
  modified_base (926)..(938): a, c, t, g, unknown or other
tataaccaaaaagttaagatacaacggagggaaccaaatacaatttatgtccaccgaatattggattaaagtatttacgtcgcaaattactatttaatttttaataaaatttgtagattttgatgggcctacaccagaaaacattataaggtccactgggctaaatgtggctattgatgggcttggttagtgaagattaactaaagaatatattgaaaactacatgaaatatttgttttcttaataagtttgcaaaattatatatatgcatacttttttttcaaattaaattattttacttcactttatttgtaatatctaaatatataaatttgttttcaagtacaaatattggttgatgcaatatttactcttaattaagttttttttttttctgtattttcttaactctttttcataaaattttggaaaatatatattttgcccatattcttataaatgataagtgtaaaaccataatttcaaaagaaattatctcatatataattttttaaaaaatttacataaaccaaaaattaaaaaaaaattacaattatatgtcgactcgaaataaatttcagttttacaatttgtatttttttttaataaaaataaatcttcaatcaaaataataaattattttttagttattgtattatttatatagagttatattacaactagggtgtctttttctagttatttgtcatttttttaattgttcttttacttttaattgaaaaaaagtatatatttataattttaaaaccttacaagcctatttttgtaaatacaaattttagacctaaaattataaaacctaacaatatagtgtttttgaaaattcccgtttttatttatttatacttttgatttttctttttaattaacaaacttaacttttctttcattattattattattannnnnnnnnnnnntattattattattattattttgccataaatattatgcaaacctatttttgtgagttttacatattaatattttttttcctattttgaattttcctcaagagagtaatttatacatttttatatatttttttctcattcactttggtaatttatccttttatacatatcattgataatgttccttttttaatttgtgttgaaaatagtaaataccataaaagcttcttcttctttttcttccataaagagaaaaggtaacctaaaattgtcaaaataattatgatcaagtttggatattagtttagatatttgtagtgattattgtttggtctatattaggaatttttaaacattaatttctgtctttttatttgtggtttttattttcattattgatatttattttcaaaactttattataaatatattattttcgtggggtttttttgataccatgatttatgtttaatttgtgtataatagggtttgagtttattttttaaaataccatattttatattttaactattatttattagaaaatataactattttttttaaaaaaaatacttaatttattttttaaaacaatacattaaatattttattaaaataaaaggctcaattatgttttcaaaatattacattctttattttactattatatatacaaagaacatataaaaatttatataaaaaagacccaattagatttttttggtcgaaagctcctaattggcataagacgggttgtgacagtcaata

SEQ ID NO: 38602 - DNA, 5070 bp, Cannabis sativa
tgttagagcaagaaaatgagaggtgagtggtggtgagcgaagtgcggtggtgagcaagaaaatgagatgtgagtggtggtaagcgaagttcggtggtgagcggtgtactttggtgagtttaggtggtctttcataggagagaatagagagaatgtgtaaactaaaatgagaggaatatttttgagtttaggtatagatttctcatttttaaagaatgcatttagaaagcataagtggagattcctcattctttttttatcaactcgttttattttgttgtggtttgttatgattacgaggtggtgattataatgttgtgacagggcttgtacaccgttgtttttggagctctatatagaggcaggcagcctagtggtgaatttatttatttatttatttttatttgtgtggcttaggcttagtggatttgtttttggtgaaatgcatgcatgatgatacaacttgctagttgctagtttattgtttaataaaataataggtagttgctaccatgatttctaataaagcctatctttttttgttttccatataataataacactactcttactcttatttctctgtcccccaaaaccttttgtttcagtttcacatgcttctcgccacttcttcactcttatctctctctctccctacacacctgcttcactccaacgtctctatttttagtatgcagaaaaaaatataattcaaattaattcactttatatcgtgataatataaagtaatttactgtaaattaaaattttgtagtttataattatcaactaattaattaaatgtaaaataataaagttataatgatagagatagacttgaacatttgatctaatctaacatttttttctttattctcgtttcaatccaattctatttgaaaaatcatcttctgattaaatttaattagactttaaaattcaatccaatccgattaataattgaatgaaatcagatttttaattggatatccaattaattgtacacctaatttttaatatcaatttaaaaatataaagaaaaaaatacttaaacactaaatatcactctttttttaagttaatatactccataaaaatattcttgttacaagtgcaatgtaactaaaagtttaaaataaccaaaataacaatattatcaaagtaataataaaaaaataaaataaataaaacaaaatatcatgaaaataaatacatagtgttaacgtcgattttcgttaatatcaataaataaactttatttaatttagtaaataaactttagaataataatagtaataatatgtatatataaagagaaaaaagttttttttatgtgattttgaagttaataaactttaaggtgactttcgtgcctatgtatgatctttaaaaatgctttttgcgctatttgtaatgttgagggagatcgagtatatctacgtacgcgagatgctgtcatcatgtgattattctaagatgaatcacattccattaacatactcatgagtatgtgggtcaaatgagttgcaagtttttaaagaactcattattcacccttcgaattgactgtcgttctgttgtatactttgtgtatcccgtgatggaccttctgcattgattgttcatctcgctggtcttacaaaatagtagttgttatttacggctcgtccttatctttaaaaggagaagctcaaatatatctaccaattgtattttttgagacgagtaatcgtgcataattatttctttacaattcgagctggttcatattacagcttcctcatacgtgttgtaactatattgcttgctcgaaataacacatagaataactaagtgttataaattcaacaaaaaaagtcataaaaagtataattaatattttttattttatataactttttattatataaatcaatataaataatttttaaaatatataaatataattagatgtattggagtaggtaatgatttgtaactcatttatttcattaaaataggtattggaacgttcgagaggaatttagctcggaaaggagttacaaaactcattgaagaaatttttgaaaacactacaggcatgatcaaatatttttttgggggttttttgacattttcatgcaggatcaaatattttgttctaggcgacatgttgcctagagcctgtttttgaataaaagttgcaagacgttcacctctttaatgagaacgtttctagacttcattccaacaattatttacctccattaatccctcttacatgcctggtaatagccatggaacgtgtgtgatttgaatttcaaagtttgattcacctacactataaataggaacctaagggattcattttatgacactagagagtttttatcaaagaaagaaccttgttagaaactatataggcttgataaatccagaaaactatttcagactttcttcttccctaagtgtttgtggtaggaaaaactaagtttttggacaaaggtggtgtaaaatcttgttcaagttttgctgattcccctacttgtcacttggtgtttgtggtgttgagattattctcacatctatatatactactatatacattgtgttttatttgttgtttaaagtttagagttataaacttctcttcatattctttttttatatatttatgtgtatgctttatcaatagttgtaacattattttattaatattattgtccttatatttcttgtcatagagttgtatctcttggtttagtatttctattgaagcacaacaattttcaacaatcaaaagcttatcgatccttcctacctagcttcaatggaaggtgcaaccatcaagatggtgaatcaagacctagtaaggttgggtaggtttgatgaatctaactttactgggtggttagagaaggtgagatttctcttgaccacagtaaagattgcttacattcttgagtcaaccttggagcctttacccgctccaactgagaaagatactcctgagatggtggagaagagaaggaagagagaggaggacaatctcctatgtagaggtcatattctcattgcttttctgatagactttatgatctctacaataatactaaaatcgcgaaggagatatgtgatgctttggaagcaaaatacaaagcgcaagaggaaggtacaagaatttttttaatttctcaatattttgaatttccttttagtgatgctaaagaacttcttcctcaaatctatgagttccaaatcattgtaaacaagttaaaggttctcaagattgagcttcccgaggtatttcaagttggtgcagttgtagaaaaattgtcatgaacttggaagggctataggaaaataatcctccataaaaatgaggattattcttacaaatccaaaagcatatcgagattgagagataagggaattgtgaaggagcctatagatgaggttttcaaggctagtgcagtatcaaacaagcatcccaaaggaaccaataataataaaggtggtggaaaatatttgtgtctaagaaaagtcaattaccagtttaaagaagtgagaggccattgttttttgtgtaaaaaatattgggtccgccccttgttgttgagcttggaccaataagggctaaagcccatttgaatggaacaaaaaaaaaaagttgatggtcatcgtgagagaagcaagaagcaagcaaagaaaaaaaataaagaaaaagagagggaaagaagagaaagaaggctagagagagaaaatgtttttggtactttgcattgaagattacgtggttgattctcattcattttagcacaaattttggatagtgaatccttgcaaggtgccctaccaatctagctgctaccagttttgatttggtgattgtcctctcaaaggtactcttctacaatacctatttggtgagacctaaactttttatttgtatatccatctttttgaaataatgatgatgattgtattagattcaagattgtttattcttgatgttgttctgcgtctctagttttactagagaagaacttagtaatctcattaatgaactttcgtgatagtggatgatttgagcaaactgcagtcttgtggtttttcccgctttgagtttccacgtaaaaatcttggtgtctcacttttatgctcgagttgtgtattttatattgttgttgatttttctctataagttacatcttcatgtaataaactttgttctatttacatattaatgaatatttctattttctctctttaaaaaaattattttatatttccaataaaacattgagtgagcattaatttaatattaaattttacattaaagtttataattaattttatattgaattataatgttaaaagctaatgcaaatatatcataaaattattttttgtaaatataacacaatttgtacgtctctcattagagatggtcttagtgcactctcatatagtttctttattctatctttcaaaatatctcactaaaattttattttttctattttattttatacatttacagtatatcatactttgaattatttatatttttgtctgttcatttaaataatatatttattatacagaaataataaaatattatacattatactcaatatctctaattttacactctaaaagtcaacaaattaaagcattataaaaataataaaaaatacatatactaaaacttataaatattctaactacatctagctaaactctatttatgataacaacaataaagttggttttagtatttattggtcaagcatctttttatattgattattgttattggataacattaataggtagcatgacactatagattttatttttccatctaattatctcctttatagttttcttttaacattaagaaaaataaatttacgtataaaaggcatatataattaatgtttagtgttacgaaaagtatatatatgtaactacgataatagattcagaatttttattatgtgggcgtttaattatttttttaaaaaaaataggtctatttatttaatttatttatttttgtgggatgtttttttttttaattttttgt

SEQ ID NO: 38603 - DNA, 2573 bp, Cannabis sativa
aaaattatacatattatcaaaaattgagtatttatatttttttttatgtacttttatatataattatatatatatatttatgtcttatatataatttctaagaattcaggggggccacagcccctgttgtggctcctgttggggtgtatgtggctccgcccctggttctatataatttaatgtaataattttaaaaaaattataactaactaattgtaaggcaacatgtctaaaagtgttagacactattaatatccaataataataataataatgctcgtatatatatatatttactatgagagtaatcgagtactcatttgactaaaatcccattcttaaaataatacttattatttgtatttgtcccttgtcttggttaggttagctgattttttggctctcgttcatgattgtataaatgccattttttaattgcatttatcagttgttgcataaactctaataatattgtttatttcgtccaacttattgctgctatgtttgtcaactccacatacatttaataaatttccatactatagtcaaattcgtttgtcatgattcgtatacatattttatatttatactaaaacttaggaataaaatataaattagtggacaagaaaaattatgtttttcccaccatgaggctcttttctacatatattttaataaaaaatagaaaagacaattttggaattaaagacaataacatttataccccaacataaatatcaagatatgaagagaaaaagttgttagttggctgagctgtcaccagttagttagtaatgtctgttattttctgttagtaataactgaattcagtttgttagttcttatcagctgtgctgatataaattgttgtaatcctttcttttcattatataatactgaaacacttttcctctctcaattttttttctctctgttcttgttctgtttgtaataataaataaattactttattgtaatatagggttattgagtttagaaaatgtatgtgatatcggtatgaaaagagtgtttatatgctcacacataaattatatgcaaacttgacataaatttatgtgataatttattttgaatacgtgggactcattttaaatagagataattgaattaatttcttgcaacataacaagttatgaagatgatgaaaattagattaaagaaagagagaacatttgttcaatattttggagaaaattttattcgtatttcgaagttgacttaccttattattgatgaagaatttttctctctgttgcctatggtttccaatgatgaggagatttaaaggatggtgtgggctttacccatctcgaattcttcaagatcggatgagtttctagtgatgttctataagcaatattggcatatagtgggaagtcaagtttctaatttagtgaaagaattcttcaatactagtaagttaaagaaattaatagtactttcttggtgctaatacttaaagaggaatttggctagatgctttagttactactgacttacttatgagctacaagataattgctaataggttgagatttttatattgtccaatttcatctcccctttttattaaagtttgttgttgtaaggtgttgtgtattcggttagtttcttaggaagttagttagaggttgttatgttcgttttgtgtgtataaactgtatataaagcatgtactgtaatgaactccttgaatgaatgaatttcactttcatttctcgtttttggtcctctgttttttctcttctaaaagtaaaatggtattagagccaactatttgttgagctcctctacttccgcttctcttccctttctcttcttttcttcttgattgttgttcttccattcttccatggcacggggaggaagaactcagactcataccaggaacaatgaagctggtgaaaatgtgaatcgatttgaagttcttgatgaacacaacaaatttccttccaacgattcacgaagtctgtatttcttgtccaatgctgacaatgcttttttatctttggttgccaaaattctcactagtgccagataacttcagctattggcgaacgttgatgatggtagcattgctggcaaggaataaaatcaagtttgttgttggaagacttccagctcctgataaagataatgagaattacgaatcatggatacgatgcaacaatctggtaatttcatggatcctcgatttcatttcccctactatagttgatagtgttatgtatatggaaggtgcttcttgcatctggtctgaattgcaggaaaaatttcatcaaaagaatgcccctaggattttcaaagtcaaaaggtcgatgcagacactaactcaaggatctaatgatgtcacttcctattacacaaagcttaagggactgtgggacttgttgcaagagtacagaccacagcctgattgtacttgtggcgcaatgaagactatacaggaatatcaagatgaagaaaaagttcttgaattcctcattggtcttaataaatcctacctaaatgcccgatctcaaatcttgcttcaagatccactcccaaatgtg

SEQ ID NO: 38604 - DNA, 2322 bp, Cannabis sativa
ttttaatttgtgttataaatatatagaaaatgtgtgattatgcaggaatgcctggttttacagcttatgtgggattttttgaggtgtgctccccaaagaaaggagaaaatgtttttgtttcaacagcttctggtgctgttggtcaacttgttggccaacttgctaagttacatggttgttatgtggttggaactgctggttcaaatgacaaagtaaattatttactattattttattcataataaactattattattagaatatttttatatatgaaaacaaaaaagtattgttattgaatattagtgttgtcctaacactttttagatgtatcgccttgtagttggctagtactagtactctctaaaagttattacattaaactatatgagacactatacttaatttcactaataacgatattaacacgtagaaaagtgctaagcactacgagtggtttgctacttttgttattattgataggagagtttttatgtttttagtatttaaagatattataactcaattttgttgtatgaagatttatattatttatatatattttaatcatacatatattatttatttaattatcaaaactatattatggaattaaaacttattagctatatgactataatccaataaaaatttacaatataagcattttcatccatatcataaattgttacaaaaaataatcaattataggagtatgaaaaaaaaagagtaccagtgcaattgaattgtttaaatcttatttttaatataataaattattttaaatttttcaaaataaataaaatgttaacaataattataatatacacaattatatagacaatttaaattataattattctaaatgctaaaaatgaggatattaattgattaggataaaagtaccactccaactatataaaaagtttcccaatatataattcatgcatgtgtatataagttaatcgtatagtcatattaatttttagaataatgtttacattttaataaaataaaatttcacaagtgaaaattaatggtataggttgatctattgaagaataagtttgggtttgatgatgcttttaactacaaggatgagccaaacttagttgctgctttgaagaggttagtcaataatttttcagaataaatcaatatgttaatttttatatattatatactaacttaaattttttacataatagaccaaaaaatatataaaaaaaaaattacaaaaaatatattaatttttattttcatggtttgaactttttttttttttttacaaaaatacaaactaaagtagattttttttatacaaaaatacaaaaatatgttaatttttattttcatagtttgaacttttttttcttacaaatattcaaacttaagtagactttttgatattcttttttagtcgttttatagtttatttatagttgtcatgttaattggttttctcgtttttttgtttaatttatagttatagtgttaatttttttattatttttaattattttcttactttttattagaattgttttataaataaaaattgaagttgtaaaatgcaaaattaaaataaaacataaaaaaatatatttttttttttgaaaaaatacctcgtttatgtttatttagtattcattaaatttaaaactaatcgcattaggtatgttacctaactaaatcaataatggtaggtaaatgtgattatcaatatcattcactaacttaatacttttctctgtattgtagatatagtttgaggtatgaaataatctttctttaaaaacaatattttttttttgataattctttataaaatatcagaagacaaactacttaatacttttatataaaaaaggctcgatacaagaaatttgtataaggtgacgcttttataattcacttatcattataggtactttccacaaggcatcgatatctacttcgacaatgtgggaggagaaatgcttgatgcagcactccgaaacatgagaaatttcggtagaattgctgcatgtggaatattgtcattgaaaaatcttagtgatcctcaatcattttaccacctcaacaatgtaatagtaaagcgtctcaagatacaaggatttatccaaagtgattacttacacttattcccaactttccttgaacatgttactactctctacaaggatggaaaacttgtgtatgttgaagacataaaagaagggttggaaaatgctccatcagctcttgttggcatattttctggtaaaaatattggcaagcaagtcattcgtgtagtgtagcagcctaatgttgcttttcatt

SEQ ID NO: 38605 - DNA, 2827 bp, Cannabis sativa
aagcatcaacgcatcaacattgaatacgacaatacgactctacgactctatgactctattgttgtcggttggccaaatctgaggtcaacagtttggcgatttcattgagagcaagttgatattatatttgatcgaacgccatggttaacacgaggagaactctgactacaatctttgcctcattgggtcttcttcaggatcctctaactacaaatcctgatgttcatgttccagccacaactagaatttccacgaagactgcaaatgtagtcaatcatgccatctcggcaggcatcacaaatctagccaccatagctggtcagggtgacacaaacatctcagtggatatgaacaatcgaccatttccttcgagggaagaccctccactggcgcctcccactgaaggaagaacacacgaggaacataccccaggcttaacaaccggaccctgtccccaatactatgctagagagacggggctaggaattggcgagccccatgtagacttaggagaagatttcaagttagctagacttagagaggtcatctaccaagccagtcaaactgaagaaccatgcgctactgattgcgatgtattcgctcaatagagatgcaaattcctgagatggatggatgactaagagtacatactatgatctcaccaagtagagttagaccaccgcaacagagaaatcagtgacctaataaggcagttcaataaaagaactactagaagaggccaggatctcatcaaagatccactccaaggaagactagttgacagatagaggagggtctactggtagtctgtccaaccaggttcttcaagaactaggacagaccttcccctacccgaaggaggacaggcctttccataaaggtctaatggcgagaacagtcgaatcccagcaaccatcggtttgggaggctagctagggatctcaagctcaacaactccccctaatggccaacctttggccggccagccctctggaggtgtacgtccggccgaccaagggactgaagtcttttctcgaggcatctaggagtgagtaacccagaggctaatcttcaaccggctagggccaaaaacgggtggaagcacgcagaacaacaattttagaagtgatactaatcacttcatgtatctagatccacctaacactagaacctagtgcaatctacctcatgtcaacacactagtttcaccaaccaatcagggaatcactagaaactaggccctacccaacacagggctggccggccatgaacagctgcccagtgtaggcttggccaaccaggatcagtctccctacctgggagtgggttgctagggccaacaactaagcacatggttggctggcctccaccacacactctcccagagtatggttggccagaccttggcccatttgagtctacagcccatccaaggtgggccagtcaaccaagtccctgcagcaacagatccttctgtgcatgcacagttagaccaaataagggacatgatcaagggcctagctagtccaaaaactttagaccttgagctagacaagtcaagaggatcaccattctcaacatacataaatgccttgaccttgcccaagttcaagatgtcagtatggaagatgtataccgggcgagaagacccactaccacacatcaagtacttcgagatgcaactcaatctataaaggatcactggtgatgtgcggtgtcgcatattcccaaaaaatttgtcaaaaataacttaggaatggtactttaagctggccccatgaaggttcaactcttgaaatgagtttttccaagaattctacacacagttctcatcctcaaggcttataccatcatagctagaagaccttctcaaattcaaacaatgacaaggagaacctttaaaggattacatccaaaggttcatggttgaggccaccaaggtcaaaggccttactgaagaatgtcgataacgaacatactagggggcatccttccactaagtgacttctggaaggatgtccagaggatctaacctaacaatatgaatgcgttcctagacagagttgacgactttatcaagctagaggaagttttccagaaagcccagatagggaaagttagcaataggcaatcacaaggcatcttacagccccacgacttgccaaacgtgtaggcagacactagcaactctgcccaaacctctaatggcaagaacacttagagtaagcgcaacaaaaacatctctagaagaacagtgacaaaaaagggaagtataacacttctcccatgccacaaaactagaaggaaaaagaggagatgtatacccgcttcaccctcttaacggaaaaacctaaggccatcttcatggccactcaatgaaaagtctcatacagaaaaccccctcccatcaaaagggagttgagtaagagggacatgtcaaagttttgtcagtttcacaatgactttggccatgacaccaacgagtgtcaaaatttgaagagggagattgaattccttataaggaagaacaatccccatttgcatcgttacgtgcataacaaccagacttaggcactaggtcccaaaatggaggccctatgccacctccaatgacaggtcacttaggggtcattatcgacggaccccatattacaggcaagactagaaaagttaaggagcgctatgctcggaaactctgccacgagcccaaaagtgatatctttattgtcgaagaatgaggctctaagcaaccaaagcttggagagcccatgatctctttcacaaaaggagatgctactcaagttagttttgttggaatttattttac

SEQ ID NO: 38606 - DNA, 2791 bp, Cannabis sativa
tttgataataataatagtgtaaactggtcaaactatattttcgcagtgtaatttttgtgattttaagatctaatagtacaattacaattttaaaaattacaaaaacatcatgtacaatttgatttgaataaaaaaattacaacccgtgcctccttcaccgcaaactcccttaatattgcctattaaaatttgtcatacttattattattttaatttttttaacttgattccgcaatttatttttaatagtataaataaaataccatattattttgaaacaataatcctgactgctgagacgcgccattcaatttgttttccaaatcatgtttaattaatttaatttttttgagtaattacgtttaattaatttataaaacttcaaaagaatatttacagaattttaacagtatttcaatcttaaaaaccaacttttttttgtggctaaaataccattttttccccaatactaaatgtgaagtccgacttttaatacaactttttttttgatagaaatgcattggagatgctccaagtaaatcattgtatatctaccgatccaatcaatttggattggatatcactgaccaaattcacactagtgtaaacttgtgaccactttccaagggtcaacggtcctaaatgcactcctcgaaatccagaaaaaacaacttgaaaccagtgataaaattcgagggaacttttccacaagcctcaactgtttcatgcagaatatacctttctaataaatttcataaaaataataaacaaaaaataaaacaaaggtcagcatcccttaggccagaagagaacttcaagagccatggccatgacactggcaaataattcctcacataaagcgattgttgagaatctcagttgttattttccagatcagccatcacagatgcaatagcaaatgctgctccctaagaacgattgatcgtatctactcctgcaacaatataaaatgaagatccacattataactgaaaccgatatactagaatagataagttaactgggatgtaaatgtaaaataataagttaacaagcaactttactcagaagtttattgaagcctaatacttgaataacatagatatggttggttatagctttaggaaagagaaactgcataaacttcagggagtgtagcatggtccaaaaaaaaaaaaagaacagtaccgaactgaatcaatttatcaattaacagtttccagagattagaaccccttttagtatgcatagcagaccaaagctgaggggaccaaagagcagcccttgataggttatttccaaatattttccaaggcaaataattataaaatatgcatatcattggatcaaatgagtacatcaaagaaataccaaatgttgaatgaagcgaagagcatattaatacattaaaaatagttcggaagttgtagcactagggacaatgaatatattaaaaagacaaatacaaatagttcagaagtcattaatacctgatccatgggtacaggttcatctttatcatgctccttcacatctcttgatttaacatcagcatcattttcactattcgggactgtactttcatttgtttcttgaatgctgttggatggagtgttgccaaccaaagtgttgaaatccgcgggaagctgaccagacttcaaggcctactcaagtatattattcaagatcacagtagcaatgcaaagtggacatacacaaaaaaaagaaaaatttatgagaaaacagcttccaactaaaacgaaaaaatgggaaaaagataagcaccttctcaagtcttgcaacttcttcaagtgtctgggaattcacaattgcagcctgcgaaagaataaaagtgacaattatggtaagatcattttaaattcatacaagcatatatatatatatacatataatacacacacacatgtacatatgttcattcctcaagaacagaagtaagcagaaagatagaacatcaacagttagaacctgaaaccacaaaaaactatggtatttgactatttgagctcccaaggatcaattcgtttctacttgtgagtagagcagggctttaacctaaagatcaaaacttattttaagaggacccagataatcacagagactaacataaaagaaaaattaataatgaaattggatttacagtattgatagtcaaggaaatacaccaaatacagataataggcttataagagtgctccctactcttcactagcgtttaaaatttatgtcattgacagtgcacacattacatctctcactggagatggtctaaagagtgctccctcctcttcactagcatttaaaaatgtgaaactgaggcaggctggaatgacctcaaagtatatgccacctaagagtaggcactgtttctaatggcacctcacaatcatataattgaaggaggtgtccctgaattcattaacgtttggtttagattccgagcttgaatgttgggcgactctttcagagatggctatttttgttaggctatttaaataattagaaaagctcagtccagatttcattaacttgaccaccactctctttagtctttacgctgctgccttctgccaacatcaaagagagctactacaattcccacatgacgcctcataggaacttagatctaaaaaattttattcagccttctatattgacattcgagctcagaaaatacaaggaattagaagatagaaggggaaattcaaggatccctgatgcatccctaagaattctaatgagttccaattgttacacaataattctgcac

SEQ ID NO: 38607 - DNA, 2109 bp, Cannabis sativa
taactaatacaattaaatctttatgttttgcttgtaaaaagggtaacataaatataaatctcactcataatttattgaactatctgcaaatatatataaattacatccatgtggaatacgtggcatttgatcaataaattaatctatatatatatatcaaatcctcaattcaaatcttcttgtagctctttagacaacattttcaatcacatctatctttttatttgttagttttttcttcttaataattttatatttgtatataactgtgttgtgccctccatggaccacttatagagaaaggaaaattagaagaatagtgacaagctttctttagtacgattttttttaaacaaatgtattaattattgtatggttttctttttggtctgttttatatttatatatatgttttatcgacatatcaaataatagtcaggagactcagatcaggaccaccccagaatgagataataaaataattaattacctttttcttatcatatttatatataaaaattgataaatatgcatattcaaataataataatgctgtttatatgtgtctaattttttcattcatttttatttagctggttatctaatgataataaatctttcattactagctattatagaaataagtagttatgctaatttttcaaataaaaacactacaaggtggtatatacatatcaaataaaattagtaacttttaagtttatcttctactgttagtgtaaattttaatttagtcttaattaatttatgagaaatctaactatagaatcaaagataagcagaaacgtaccgtagtctatttacttgtttgtaaaaggtatgatttttcaatttgcatcaaaaacctttgaagccttattttcatgatgatggagatttaggattctaaaaaatatgatatgatgcaaatggggaccattacctgttatattaccaactgttaaaacaattagtaatatttattaactatttctaatttggcctctcattaaattagaaattatttaattggtatccacatattaaaatcatgataattatatccttaagtcgtaaactttatttcaaaatagactacataaatttgattttatttatttaatgattcaacagacattttatatatacaattgtaataactctaataaatttctaacacgaacaatgtggaacccactgtattatcacaaccacacacataattaacaattctcagctgctaaacatatatatataattaagtatctaatctgggtttttcttgatgattaggctattgtggagccacagcaaccttttcttcatcccaactactataaagggtgtaccatcgtttatttattaaaagaaaaatacaaaaggaaaaaggggtaaatattggtgatgatcaatgatgataataatgaagagataattttaattaaaacaatggtcgactgctataattaattacatgtaaagtatttaaatgtacatgttttgtcaaaatatataatattaaaatgtacggcgtgggaattagaaaaataatattaattcttaattataatttatatgtatatatatacattattttatattaatcatgttataatgagattctagtttaaatcacatatgggttgtaaaataggacaagctagccatggaccatatatataccataaccacattaatagcaatatatatatatttgaaatcaatatatacatacatgtatatattttcaacatataaataatatttatatttggatccattttgcttggttgtattttgtctagtccacacgtgtggaattaggcttagctagctagtcggtgcattgtaattagtcaaattaattgatattaattaattataagattagatgaaaattaagtgcaataattaagtgactatatttttgtgtatatagaatagtcaatatagtgtagatatgtttgtttatttaaagggtcccttttaagcacaagtcgctagtagtgttactgaataatgaacccacaattttttggcactatagcaacgtgaaatatatttattggtcattaaaagatgaaaccttttgtcattttatttctctta

SEQ ID NO: 38608 - DNA, 2682 bp, Cannabis sativa
gagtgggctgtggttgggcctgagccgtggttgtgccaaaaaaaaaagacgccagtgaaggcactgtttgaaccgaagtcggagtggaggaggaaaatggcggaagcatggttgtttgaatttgtgatgctattgaggtcgatgtcggagcggaggaagaacgaaaaggtgcggtggagtgatgttcaaccgatcctgaacttgggagatcagcaaggaaattgaagttgattacaccagtaaaggacatatcaaatatgaaagaagaagcaccgattggatcagagattaagttctcaagagtgggagaagtaaccggcggagcaacgttggaggtggtggtggctgtcgacgatggagcttggccatggatgatggtcggagatggcggcagaggggaaggggattaactgacggaggcagcagcaatggtggagtttctagttcttggagccatgaggaagatttagggttttgtaaggttgaaaaacataactactgataccattttagagagaaaataactctcttattttcattatatgcagccaaaaatgtggtgtagaatatgtaatgtgtaggggttatatgcaatgaaaagtgtatatatatatatacacagtaaaagaaaggcccaatgggccggtattgggccaagtaaacaaataaagcaattctaatataccacacaaggaaatatcatttgaatatgtatatgtatgttattttaaaatttagagatatttgtggcataaatacttttatatactaattaaatacgtgattttttttacagttattttataaaaagatagtatttttataaaaaaaaaaaattctgtgtgacagtaaaattgtaaacttttacccaaaattcaatatttttgtaaaactccattaaataccttatattatatttgagttattttggttactatttttttttattaaatagaccttaatttatatgccacatgttgatgagctattcgtccatgtaataactttttttaaaaaaactattattaatttttaactaagaaaaataagtataaataatagaatacttcgagaccatccatattgattagctcgaggtgcttcttcttaaaggttactagcgaggtacgttcagtcttaagtacagttggtgaccatccacattgattacctcgagatgcttcttcttcaacttcccaagggactacgtttttgagatagtgggtgtgagccacataatctttgtcctcctcatcggctggaattgggactttctgccacttagaatactttagattcttgtagtcgcatgtaaattgatcagtgccaaagaggttgatggtcctcgaattggtatcgtttaaaagaaaatctactaatcgcaatccaaaaggaagacctaacaaaattttatgctgcacaaccatctcgcgggtaggaattggccttctagtgaccgctatcaacacaataagtaaaataagtaagcagcttcaattttataaatctaaaaactcaaaaccaagtttttgagaaagagatgacacttacgtataatgtaaaacgatgttgtgttgatgggggagagaccagtagtctagaagaaatcgtcctcgaactcgatcttatttggtagcctcacaatgttcctgtgatcacttgcgtgagtaccgaggtaataaaaacctcctaaacaccgcttctgtaatatcttggaaaataaaatgatatttaattagacatattttattaaatatgtaattgttttggtaatgaagtaagattatgatcttacttggatcaattagtgaaaatctattaaatgattacataaagcgtaatttattaattacggaaattatattgagatatgtgggtatcgtggatacttattttaaaataaaaatatttttcgggcccagcgattgtagaaacttgacgatgtggtcagaaatgtcatgacattaatagatagattattttgagggtattctggactagatagatcttacttggatcattaatagatggattaatgaaattaccataatacccctaggttattttaaagtttaaattttccttgagaggcagattactcattttacaaataggtattttgaaccttttgactttgtgggatgactaattaaaaaaatgaacaaaagaaaagaaacttattttatttaagtttacttagaagctaaggcaccaaagcttcaacttcgcctcctccttcgtgcaagcctagaaccagccagccttggggaattttctccaacaaatccttcttttcaagctactttctaactccaagtcaacctagaggtgttttgaggtaagttccttactctttggattgaaaattctaggttttgagttggttttaaggtagggttttgcttttatgtggctgtagtaactaaactaagattagggtgggtttaggataggtttttgagtatgttggagattgttttgacaggtttttttgctgtttggtttgaattgtgctagaggaagctaaaagttaagtttctttcactttagcatatgattttcattcaatgattgaattgttgcgttttgaagcttgggatatgttgtattatagttattataatgttctgaaagtttggttaggtttggaggagttttgggtcaaaattgaaggagagaacc

SEQ ID NO: 38609 - DNA, 4657 bp, Cannabis sativa
tcttaagcatgggcctaacccacctatactccaaggcctggttgtcatgtggtgccctcggtctagagagctggatacatgagctgacttcaaaagatttcattcatggtttcatgttgacaaatagacagcttttcttctgtgaaaaatagaatgaagtcaaattaccttgttgaacaattagaaatattaatgagcacgaagatgaagacccttaaatatcaataatagtcctatcctatcatctcatcaccaaatcaaagaatgaattggtcacatatttgaaaggcaaccccctcataaaatagatatcaatgttcaaagcatttggctaataatactaatatatatacatattagaaacaacattattctatcatcttcaatctcaattcactcaaccccaaaccatattgagctgctaatgagatgagtagagtacatatagtactatgtaaatgtatacatatacaatagaaagtgaagaaaatcatatcaaagtacacaaaaatacataatataacaaggtaggtacactatcaaaactccaccatattctattctgtaaggacatatataagctcagtccagttgttactggcgcaaactatgtaatattcggaagagtttcaacaagaaggatattgtagccgttgattacaagggaaagttttaagaagttgtacaatagtacaattcgacataaaaaggtagcttttacgaaggtaatttggtgtcgtcttatcttgcccaaatataaatttatcttgtggcaagcaactcattcctatcttcttactaaagatactctcattatataaaaattgacaaaggtatgttcggtgtgtggcgggcatgatgaaagtcataaacacattttttttttgatttaagagtttatatattacatcagtataatctgggactcgaacttaggacctccaacacacacgcaccccctatagccacttgagctagcctcaagtagttcatcaacacattttctttgattgttctttattaaaaggagtagtcgacatctttttagttggttgggttttgatgcttggccaatagaattttcgaattagctagtgtggatagagaacaaaatgacaggtctattagctaatataatctatgttcttttagcggctacaatctactacttagaatataatcgagtgttcattggtaaattccttttaggtgtgcattattgtagaatttttcaaaaaagttattagtttagtaaaataaaataaaaaataaaaaggtgcatctacaatacaccttaataaaacgggtgcattagtgcatttttaactgtttcccacatttaaaagaattttttagtcccctttttcgtcgcgtatgttataattatttaagacatttaataaaattttaaaaaattcataataatttacaatataaaatttaatgttcaaaccatttattttacactcgtataaaataaaaaatgagcttttttacttttacacttcaaattattttttttttttgtatttttacggaattctactttgaaacccctatatcaacttaaatcgcaaccaaaatttatataataactcacataaaaactaatagagcaacccaaaccgtaaatctgaagaaaaaaaaaggggctaaaaatagtatatggaataatttctcaataaaaaattgacaggtataacaaactctttgaactctatttttgacgtgttaaatttttttcgaatttttcaaaaatttcgaactaaatttttcttttaaatactgaaagagataaggatgcataagtgctcctctttacataatagaatttaaaaagaaaatgtgaaattttcaaaaaatattaccccaattttattggacacgtgtcacccttttctttgccttcttcttgagatgtcatttacaccattgttgtaggaagaaatcctctccactctctccacctagcaaagccctaaatatcaatcctttgaacttatagctttcgttctctctttctggttcatcaaacataaactttgtaagaatctaccttaatttctttccattttatatgctcaaatttacattcgaaatccatttacttataataaatgttgttaatttcattaaaccaaactattccaaagttcaccattactcagatttctttatagtatattatgctttttttttatgtatgttcaataaaatcatcagccatcccataatgcaaaatttcaatatttttgatgcatcttttattgttctttgttttcatgaaatttgaacttgtatttatttacatatgtgagatatgttcagagaacattgtctcacatggattaaacgtaaaagtattgagtcatattgatcatcaattgattttgagatggaattcgatgattaacattcaaattaatctttaccgatttttttttttatttatttggttatgtttttgtcttgaatttagtagacaataaacatatgagtaagattgttttcttggtgggattcatatttatttatccttgttggaaagaaaatgaattagtattaaccatgttcttagtattagagaaatggtacttccattcattgaatttggtcttcatgatatttatatttgttgttatctcttacagtttataacatggcgaaaaagagggttcaaatggcaccatccatggctgatgatgacagaatttcgaaactacctgatgcactgatcacccacatcttatcttttctcccaactaaagaagttgttcaaacatgccttctttcaaagcgttggaaactcatttggtattccgttcccacactccttttctataactatgatatggatgatcttgaaaagttgtacaattttatcaataaatatttgaaacgccgcaagaaaggtatgaaatttattgctgattcaggcgtaactagttttgtgcttcgtatgaacggaacatgtaaaagaagtaaaactcgccttttaggtaaatggttagcttttgctgttgagaaaaagatcaaggaaataaagcttaagctgagtttagatttaatgccacatgattgggacagtatctactactgcttacctaaaatattattagtcaatgcaagatatttgactatattggaattggaagggataatgttggatacattttatccatttaattttccatctttaaaaagtttgtcactgagatttgtttatcattcatctactgcaacagatgatggggtatttaagtttttgttgggttccccttctcttgagaaattgtgtttagatgaatatgatttcttaaggattaatgatcaaatccaattacaaagtttaagtctcaaatttctggaacttatatatttagagttagaccgtcttgaattacatgttcaagttgaagccataaatcttgagtctttggtactatgtggtgttgctttgcatgaaatagatctctcatcttgcaagaaaattagaaatatctcattagaggaatgtacagaagatgagcagtcatcattacaagctcttatctctaataatcctcttcttgagaatttgactttgaggtactgcctaatgtataattcaaagcatcttaacatctcaagccaacacttgaaaagtttcgattttacacattttcggtgtgatgaagatgaaatgattagtgctgttacaattgaatcagctccaaaattaacatcatttcattatgatggtgatattgatcttagcatatcaataaaatcacataacttgttgaatgggaaaattgttattttagaggagcaagaggttgactatgacacaaggtttcccaatatgatgaaatttctttcaaagctcaattgctcttggaatattataactctacatgtctgcaaagatgaggtattttgctttatttttatttgttttcattgctttatttcaagttagtattattaatctacatattgcatgttagttgatatgtttatatgtttgcatgaaggctcttatattgccaaaaaatgtgaaaaagatggacatgtctcccttgattagttggaagcatctcagagtaattattaatgaatatgatcccgaaagattgtcagatttgaaggattcgttgttgtggatttcgccatctttagaaacattatctattaacggaaatgtgatattttagtttgcttaatagtattgtaactgctgattatgagtagggatgattgtttttgtctctttttctttttgctaagtggtactttgaggttgttattttgcatgagaattaaagctcataatttaaagttaagaatgggcatatcttggaatattatttgatttatgatctcttttcttggctcctctctgccattgcatattgtttgtctaagtatttggttatttcaataataatcatagagaagagaatataaactattgatttatatgcatgagtacatgtttcacaaatgccttgtttatattttggttgaaaaatgcatttgttttaacactgaaaagtataagtataataatggtaacttaaagtaacttggcacattgtaatttgtaaatgtaacaaagttaacaatattcctacaacactaccaaattataattaattataataagagcaatact

SEQ ID NO: 38610 - DNA, 2998 bp, Cannabis sativa
taactttaatttaaaattattacacttaattatttaatttttttatttaaatatttaaaaagtaaaaagtgaaataggttgaatgtattttctaaaaaaagtggctaaactcctccattatttttttataaggattcatttactcaaaaaaccaaaccagagtaaaaaaacaaagtcaagctcccccaaaaaacgaagcaacctcaaactcgaatagaaaaactcatacttaattcttctagctataagaaaataatttaatattatttaaaaataataaattatttaaaaatttattatacaaaaagagaattctaatttgtgtaaaaagaagtctaatttttgtaaaaaaaaataaagttttattgtaaacattataattaaatggcttaactggtaaaataattatagcaacaatttatataaaaaattatttataattattaattgctaaaagaagtcttgttaaatatttaattaactatattaaaaaaataattaattctaaaaaaagaagttttacttattagtaacctcctattataaataaaaaaaaatgtaaccacgatggttacaataaaaatgtaaccattgagtagtcaccctaataataaaatattgcaaaatatatggaagatacatttaggctattgattaaggttcaaatgtgtatattttaaacctttaattatgtacataaaattaatttaattaaatattttttggttttaattgtaaaaattattttagttgaaaagatttaatttattttaattttgtgttaactttttagatttggtggagaagttttttattttttgaacaaacgagatctgtaacaaaggatagaacatgagagtacaagttacaaagatctaaagaaacttttaaacaaaattgttccaaacacactctttatcaattcctaatgcagcttgggcgagattatgagctaagatattgttgcttctaggagcaaacagatctttgcattaggaaaagaggacaaagaggagatgattttccatatcaaatcagacaagattgattgatctctctgcttctttaggattctagagactaacacttggcaatctgaaaccacaaggacaataggaaactagattgtctggcaccaatttcaagctcgaagaagagcctctacttctacaatggttggagaaagacctaaagttgcaaaagaatagagccctactataaatctatcatgagaatcttgaatgatagccccataactatgtctattgacctgactcttcactgcaacatctacacttagcttatatttccctggtgaaggcaataatgaaactaatttcgattgatccaaattgctaccttgaaaggtgccatctgatttgagggtgaccttagcttgagcttccttgttatcatgcaaatatgaaataacaaaaggttccacatccatgtaaccaagcttcttatctacaaagagagacttattacgatgattccaaattgtccataagataccaaaaaatacagccaaatcatctctctgaaatatttaaaaacctcttaaaaggaattctttaatatcacaagacttgttattatagaagaaatttgaaaaactagtgtgtttccaacacttacctgccctagaacactctaaaagggaatgggtattagaatcagttcgtattaaacaaaaggggcaatatgggttattgaggatctttcttgaaaaaagattaagtttgaagaaggtggttgaaagccctccaaataaaatgttttatttcaggaggaatattggaagaccaaatagatttccaccaccacttaaaggtattaggattaacagaactaggataggaataattggagtttgcaagatggtaagctgaagtgactgttaggattcctcaaggactgtgcccccaaatgagacaatccttagtattgggattaagtggcactttgagaatcgagttaatgaggtcttcttcaaagtgattgttgagcttatcaatatcccaaagaccatcctccctaataaaataagaaactgtagtttcgggagaaattgggttatttttaaaagagatataattggatcctggaactaaattagggtagtgatttggacagatttaccacctttcaccttccaaactaaaccttttataagaagatctcttccccaaaggagacttatccaagaaaaaaaaggaacatgtcctattgtagcttggataaagtcattatgtttgaagtattttgcttttaagagggaaggcacaagggaatcagggttagtataaatttgctaagcttgtttagccaacataacttggttgtgatgaaaaatatcttgaaaacctagacccccaaaaaacttataattacaaacatgggaccattttttttcagtgaattttgtgttgattattacccgaagatctccacaaaatatttgccataagttttccaagatgtctacaaatagaaagaggaatcctacaacaagacataacatacgaaggaatggcttggataactgtcttgagtgaaatttctttaccaacttttaaaaaaagtttttggttccaaacagataacttactactagctctttggaggaggaaaagaaaagaatatttcttagaacgagaaaaatattgagggacacctaagtatttatctataaaagatttatcgttcatgtggagtaaatgaagaaaagaggtcttgtgcttaggtgttgtattaggagagaaaacaacaaaagacttagccaagttgacagattgacatgtagctttattatagatgctgaggatatctttaattgcctcacaattttgagggttaacatgagtgaagagcaggctatcatcagcaaacacaagatgagagatagaaggagcagaacgacatatggaaataccttaaaacaaatgagcttgagtttcgaataatggtagatagaccttctgcaacaagaagaaat

SEQ ID NO: 38611 - DNA, 2023 bp, Cannabis sativa
cttttcctctattaatactctttttgttttacaaccatgttcaactctaaaaagaaattaaagtgaataaatttgggatattttggtcaaaattgaaaaactgttaaccaaaactggtggaaacatataattttaaaactaaaatgactaattaggtaataattagactacaagacaaaacagaatactaaaatggaatatttcccaaatcactaccactatttatttatcaacacaaaaatgcaatgaagcaacaaactcctgttttgacaaattcagacttttcacattaactttgaccataaccatgtaagatatatagtacattcaaatattttaattcaattcagttagttacaaaaagtcagaaactcttacctcagcacctgaacatttatcagatgagcctaatgtcccacaaacataacactggtgctgtttatattcacaattcttgcacaaatactgaatcgactggcaatttttgtaagataaaagacataaacgaagattaatctccaacataaaaacaccaaaatgaaaccagagttgcagaattgatacaaatcagcaacatacctctacttcatcctctgtatagcctagagaaatgcacgaagcttctctaccgctctccacagttggatggaacgaccttaaacagctaccagtacagctacaatggatcacaaatagcattaacatcttaaattcaataaccaagtttgtgaatgaatgttaaaaacactacaaaacaatcatgaatgaggagagttgaagttgtatatcgaaattataaattcagattgtataataatgtatatgtacacaaccaaacttctgttgtagtaacactaaattcacttgagattagtgaaagtggttgggcatgtgagtgtgtaagaggtggaacaggtttaaatcccctttgtatccattcttgtaagctaaagttaatatataagcagcaaaactatctaagattttctcattctgatacataattagtaaagttttttccacatttactaaagcttgtgtggttttaccaataatattcttatattttatatcactaatataagtagcaatattttatttcaaaactgagaaagaaaaaaggttcaacaacaataacatacctcaaaagattaccaccatcatcacaaaaagtacagatgtcaaagttatcagaatcatcgtgctgtacattatctactatcttctcgtctgtttcttcaactataaatcttggagtagatgttgcttgcttttcctgataaataatatatttttcccattgagaaaatagataaaattgaaaaacaaagaaaaatataggaaaggagaaaccaagtgaataagtgagcgtgataatatgacctcatcaagtagtctcctctttctctttctgggcttctcatcaagaaattcaagtaaaaactgtgcaacaaataaattaaattacagttgagagatgtatgttagaaactgagcaatgaagacttcaatacaaacttctatgtttcctaactagaggcttggttcaacattgttcatataacttcatacaaatgcacaatggaacttaataccatacagacagccaacaaatatagcaacctaatgtgtagccatggaaactaaattagcaagcaaactaaaggggtttttttattgttgttattaacaaaatcctgaaatgttgtgaccttaacaaatttgcatctaatgtttggatttatgatattcatgctctctataacacggatatatgatatatcaaatcccaacttattttttaattgccaaataataaaagctatacaaaccttagaccttgctaaggtgccatgccttttaatagcttccgcgattaaagttgagtgatctgccaaatcaaactcagaatgcctaaccttacataatctgaaaaaatgaatagagaatgtcagtgaacaatgttaccaagctaaaacaaaataatgactattcgctaagtacataagtgcaaaagacacct

SEQ ID NO: 38612 - DNA, 1116 bp, Cannabis sativa
  modified_base (1019)..(1024): a, c, t, g, unknown or other
aattacgtgtttaatattaaatgtagtctcataagacccttatgaattggtaaaacttatgcaatgcacgaggagatgagaaataaagtagcacaattttatacttttttttcaattaaaaattaaaaaaaaatggaaattattctagtctaaatttaacctctcttttctctcaaatgcagccaaaataataccctcttctttctaatgtggtggagtttatactttatacaaaaatgttgttttttgaagccacctacaagtgtacatctaataaataaagaattccattgaaatatcatttcttacatttaataattgtagagaaaaattctcttaagctgctacatttgaatttttaatcccggacgtggaacttggaactcggtacttggtatttgctataaaatctaaaatacattgtcctctgtttttattattattattagttgaataaaatagagaaatgaatatgaattgaagcttttcttataaagggacagggagtgggctcattgtgggcccatttgggcctcgagttgttttgggtatggaattggaatgggtaaagtcaaatatggaatgaatatgaagtcaaagggagggtaaggagagtaaccaccgtcgtttgagtcgaaaacaattttagggttggaaaaggagttggtccaagtcaagcacatgttccattactcaaaaatcaaattcaacaagacttttaattaacttttggctcatcaactcaggcggcgtctctctttctttctcaactatcattcaacctttgaacttgccaatttatattgtttgcccataatccccaccatgccaccaacaaatctacttttgtaaagagagtgagtttatatatgcttaaaaccctctctaattttataagggttaaaacaagagtttataaaggagagtcccattattccatatcattggatctgttaataataataggttttataaaacttacccacaactgcaactgaattggatagttggatgtaggnnnnnnttaattttaaattaattaattaaaaaaaattcaaaaaataattaaataataaaaaatattttcggatttttaaataaatttaaataaaataa

SEQ ID NO: 38613 - DNA, 1814 bp, Cannabis sativa
ccaaccaaatgccacctaagtgtattatctatgttatatggaaaatttataatttttctatttttactcggcgacgataaaaaatgggacagatgaccaatttagtcacatgggttagttagaatctttatatttagtgggatatttataagttgatgtttggaatatcaggattaggcagggttatgttattggaccattttacccttaagccattttattaactaagcttttatgtaagggtattttaggtatttaatttaagggattagtgattaattttcttagttggcagctggctacttagtcacttggcttgatttgtcttttattgattattaaattaatcaaattaagaaaaaggaagaaaagtcccatttttcttcacctttttttcaccctattcaaacccaaggagaaccatcaagataccaaagtcttgcttaacaattcagaggtgttttagcaagattcaagaggtgaaatctaaaggtaagaaccctagagtctatctctttaagttttaaagacttttctttagttttgagcatgcaaattatagaactaccctctttgaccggggaatctttcctagtggaccccctttgtttccctgactcttgatgcacggacatgcttctctgatctccacggtcctgggccagttttccctttaggaaacctaccctctagtggacctttccctttcgggagatcagagcaaactttctgtggatcctaagcctttttgttatttttaggcacaaccatgggattcccctttggggcaggcctttctgaagggtacttgtgggactaggccccctattcttttgtttttggcctcccttgggctgagagggctctccccaatcttttcttgtacagatgtgactgtagttggatccacttggatgtccgcattttccattgcttttttcatggcaattaatatttcttgcattctcttattttgctctttttgctatgccaactcaacctcatggtcagtagccttttgccttagctcaactaattctatgtaatggtcttcatcatattcttcatattcttcttgatttgtatcctcggggtcattagtgtctccctctcctttagcgtccaccctagacgctgcctctttttcttttgggtattttgggtcgttaggttattgtggacgcgaagtgttccttttcatcaccatcgtactgcaaggttatttatgatttttttttattaaagcaagcttcatatagttctcaatgaaaataccaaaatattgaccgagatttttgacaaccaataattagagctgtgtgaagtagttaatgaatgttagaagagaagattttacatggttgtggcattaatgagagtattttttttacgaaaaatttcctgatcgatccccttttctatatatcattagggtatttataggctcattgtggtggtaaaaaagccgctattatcgtgtttgtttgaaccatgctttgcacaatttttcaaatctagccttagggcacgattgcctacgtttatgatgtatttgggttgtctataagtgtttggagagacttgactcatctcttatttatgattagacaattcatttatgcagtcatcaattgatgtatggggtctcgtgaaattagagaactatgggtttaaacccttaagcatgcctgttcagtgtaaggtgtcagatgctctttcacatgttacattaaacacttatacaatgtttttagcctcgagcagtgtgtctacttcccctatcctcatgcacctttcttcgggttgacttcacc

SEQ ID NO: 38614 - DNA, 1331 bp, Cannabis sativa
ttatcttttgtgaggtgtaaatagaactctttttataatttttatggtttttacaaaaattgcaatatattttgaagtatttaaattaatttcctttttaaaattatttaagtacaagtggcacctccatcttccttttttatagataaaacaaaatttttggcttattgcaatatatttttataagagtttgaaaggatttggtaactatttgtacagttttcttactaaaattgtaaatttttaaatgttggaatatattatgtgtatataaatagtaacattaattgaattgaggggtaataaattttttataattaaaaaaaaaaaaaaagtataattggtgagtcaattatggaggcagattctatgtctttggtattactacgtgactagtgtgtgtagtgtatagtagtgtctaatgttgacataagcactaccattttagcctttttaattcaattaatctataccctaattatttattatttatttcttttttctatacattactataccattttgaaaaatgttatggttaaaaatgttattttttaaagtgtggattgacgctagtgacagatttagaatttttatttagtaggaggttaaaataagtataaaaattatttttgtggggcttaattattgtaaaattttatgttgaaggatattttgtgaatatttaagaaaattaaagagaatttataatgtatatttgtaaatatgtttttgttagtgagggcttaagccccgtaagaccctaagtgggctatccctagttgtcgttcttttaagtttttaagtgtgtcttcgacggtgtgagtggtggaggggatggttgtgcttcaggggctcatgctctgttctcgcctgagtttttcgcagttagaggtgggctcgaattgtcagagagggtatgtatagccttgatgaataaaactccattgtttggagaatttggaaatattttatttgatatcttgtctcttttttccgttgatcatttattatagtggtattatttagtattattttaaaaaatatagggtctaatttgtatagattggctaatcagtttcttttgcaaaatacagaatcaaaaataatatttacccttaatataattttagttattttttttataaaatatgattgtaaagtattttttttttgttttaccccaatatttcacctatgttaacattgctaataatatttataatcttttcaaatatgttttgttatataaaatattcacaagagagagagagagatctagagtctagagagagcatgtatataaattaacatgtttaatataagatttt

SEQ ID NO: 38615 - DNA, 1545 bp, Cannabis sativa
attactatatataccttgcagttttcatattctacggtcatcttctcgctgtcggtaacaaagtaaggggaaatgtaacctcggtcaaattgcattccttcaacaacatatagactgttttcagcacttttcccttcctcaagggtcaccacacccttccttccaaccttactcatggcttcggcgatcattcttccgacctcgtggttgttacctgcactaactgcagccacatctgcgagttcactgtcctcaacctggaattaacatcaccaaatgataagtaaccactataaaacaaaataaacagaattgactaataaattcaaacaattcgcttacctctttcgacattaacttgagttcagcaacaagagctttggtggttttctcaatacctcttgtgatcaaaacagggtttgcaccagcagctaccacctgaaaaaacacaaactcccaacaatagttagaattcatctctccacacacaacataaacaatcatatatatatgaactgaacagaaaagaacaaacctttactccttcagcaataagaccttgagcaaggacaacagatgtagtggttccatcaccagccaagtcattagtcttagcagctgcctgtctcactaatttagctccaatgttctcaactgggtcctctaactcaaccttcaaagtttaaaaccaattaaagggttgcacttgaattgttaaccttatctataaaaaattaagaacaataatataaaaattacctctttggccacagtgacaccatcattaacaatcttgggtgaaccatacttgctctcaaggacaacattccttcctttaggaccaagagtgacaccaacaagatcagctagcttgttaacaccagtctgagaaaacaattgtaagtcattattaatacaataaacaacataaagggaaatcaaattaggtaaagagataagagataaggaaaccccacctgtaatttcttgatggctgaaccatccttgttgaaatgcaactctttagccatagctgaaatccttggagaaggggttcttctaaccacattctgttgtcttttagcaaaagaacatgaagcaatggatgaagaagaggaaagcttttggaacttgttatccaaaactctaccacttggtgcagctaaggaaccagcagaagacatggctgcaaatgtagatgccatctactctctctatctctacaatggttaccaaaacataatcagataatgtttcacttgaattccacaaaattcaatccaaaatgtaatcatttcatttctatcctcaaaaccaataaacccaaataaagaaaaaacaacaaaataacaaaaacccagataaggtttcagttaaattcactcaaatttaatatgccatttcatttctatcacaaaaacaataaaccccacaaaacaattattcataaacagaagaaactaaacaagaagattcaaactttaatccaataaaacaacaacataacaaaaacccagttacggtttcagttaaattcactcaaat

SEQ ID NO: 38616 - DNA, 2542 bp, Cannabis sativa
agctgaatttgctaagtgtagtccgtaatcaagtgtaccagatagatatttgagaatcctttttatagtagtccaattagattgaagaggattgtgcataaattgacacactttgttaacacaataggtaattttaggtatggtcactatagcatattgtaggccaccaacaattgacctgtagaactgtgcatcctccacaaggtcattgccataggcaaacaatcttacacccaagatcattggagtggaattaggctttgcaaactctatttttttcgagcaagtaaatctttgagatactttgactgagatagatgtatgccatttaatgcatggagcacatcaatgcctaagaaatacttgatttccccaagtgttttagagcaaaaatctcattcatatctgagattaatgttgatatgagagatggagagttccctcttattaaaatatcatctacataaatagaaattagggtagtgttacttacaatgtgcttggaaacattaattaacctacctttgaggagaaaaaacaaaaggatgtaagaacatatataggctaatttgtcaaaccaggccccaagggcctattttaaaccataaaatgctttatttaacttacaaacactttatggttgagttggatcttcaaaaccctgtggttgggtcatatatacttctttaagtaaaccaccattgaggaaagaatggttgacatctaattgatgaacatgccaccttttagagagagccaaagttaaaactattctgttggtctgggtttcaccacagggttgaatgtctcagaaaaatcaaagcctggttgttaatggtacgcctttgccaattaccttgctttatatgtttgagtggttccatcagggttttctttgattttgtaaacccacttccacctaacgtgtgttctaccaacagaaagagggaccaaggtgcaaatactgtacaaccttcctcatcatcttttgagcttcattttgatcacttgaaagtactccagtttcaagataggctgtaataaagatcattcaggtaggagtgtcattcggcattttgattttcttcatgcatgagatactagggtttttcaggtactggatggggactaagtttgctttatccgtcactgtgttgctcctagccatgcccaagtgtcaacagttgcattttcctgtcttggaatttcgctgatagtgtgtccctagaattgtgtcaagatttctttaattttgctcaaatatgccatcattttttctctccgagcaatatattcccccataacaggattaacaaccatttgagagttaccattagatatctaggtattcaacatgaaatattagagctagcttgattccaacaatgagtgtcttatattcggcttcactatttgatgttgtaaacccaaatcttactactttgtgcaagtgtttcccccaggcgtaataagggtaattcctgccccaaacaacttaatggtagataacctgtccacgtgtaacttccagattaacctttcttcaatcttttgttttggcaggggctcttattttcctatcttgggattattttctgaggttgttgtctcaatgtacattcatccacaaaattagcaaaatcctgaccctttattactacctttagttgataagagatttcgtactgtcctaactcaaagctcatttgagtatctgatcagatgcatcagacttttgtacgtaagacttgtcaaagagatcggttggtgtatactcgtatggggtgatcttaaaagtatggtcttaattttctcaaagcaaggaccatgcaataagtcaattttttaattcgaggttatggactttcagcattgattaacctcttcttgacacagtagatcgaattttgggtgttgttttcctctctgatcagtacgacacttactacaaatttggtcactgcaaggtatatccctaattcctccccacttaaatgttttgataatataagaggttgtgtgagctgcttttttaatgcttggaaagtatcttcacacttttcagtccattaaaattttttacgtcctcagaggatgttgaaaaatagaacatacttgttcgttaattttgacatgaatctgctcagagtggctatccgaccagtgaggctttgaacttatttgactttgtcagtgacttcatatccagaatggctcaaatcttctttagttagcttcaattccatgagcattaacaataaagcctagaaacttacctgaactgactccaaaagaacacttgaggggattgagatttatgttatattttttgaggattttgaagcattcatccacatcctttatatgcccccaacctttctagatttgattagcatgttgtccaactaaacttccatgttatgctcgacctgatctttgaacatgctgttaactaaccattggtaggtggccccaccattctttaatccgaatgacataactatgtagcaatacaagcccatagggctgtacatcggtcggt

SEQ ID NO: 38617 - DNA, 1731 bp, Cannabis sativa
  modified_base (1700)..(1706): a, c, t, g, unknown or other
aaaaccttaccatcatcatttcctttttaaacgccccacgttcaatctatttatctatacatcaaaaaaaaattattattattaggatgaatggtgggcaagataggggattggttttcaacttattaactcattatttttcccttaatttttaagaatggtataatgcatatgtacatcatgtaaaaatgttatacctgtgttgatgtcctattgatgttctactggtacctcacgccacttttatgcgcagaaatattatggtgatcgttttttgtagcgcttaatatagttatagcaaacattttatacgatttggaaatgaatactttatagcgtaaaagatagtcttaaacaatttgttagacgaagtagttgttttaacactaaattatttagaattttttaaaatatatatagttatatatgttataactataataaatatcgttatgagaaagaaaaaaactatgttatgtgatttaagcgctcttataatcattttgttggtttcttttaattattgaacatttatatagcctactttttatccttctttctttaacgtttaaattttcaaagcaaaaaatgtatttatttctgtttactttgtatgtgaatatattttcaatacttttgcaatctcattaatgttaattttcgtagaatactatttttatttctgttaactttgacgtattttgatgtatatttaaaagttttgacgtattttgacatatatttaacaagttttgacgtattttagccatttgagataggatacagtgtcaacgactgactaaaatagggtaacttttgacgtaatttttgacttaaaaaccgtcgagatagggtaattcattatgtatgcttaactaatcttgacattttaactgctgagataacttatacttagtggttaattacgacgacgtgcttaagcaagagaaataataataatatatatattttaattttactttaaatatgcttgtatttacggtatttacaaatacaaattacaatataatattatctaataaaatcctattaattaaacaaaagctcataatatattatgttagaaaatagttgaagtatgacaaacattatattttccagcaaacaaaaaaacaaaaatatcctaagattatattggcatatactcagttaagtagttgatttattattcacgcacaatattaacctcatttattatattttcaatcttacaatgacatttacaatatcaaaattaatatcaaattttatgttagttttttggttattcaaaattgatccaattcgaatgcacaataataggttaagtactcacatatttcagaagatattttttttagttttctgccataattaagtctctcattagctcccttatgaaaaatctcacaggatgctatcaagttgcctagcacctttcatatacatatattatatatcaatctttaatctataaaagaaatgttgaaataaaataattttcaatttcagccttattaccttaattggaaacaaagttatgctctataccttttctctcatactattcaaagtattatgtatgccaaaatgcacttaacaacaaaatgagttttcaattaaaaattttaattcatgatttattaactttataaggtttgtatcttagataaagttaaaataaaattaaggctaattannnnnnntttcccctgaactttgacatgtagt

SEQ ID NO: 38618 - DNA, 4554 bp, Cannabis sativa
acaaaatgttcaaagatctcattgccgcaatatggaagtgtatgtgaacgacatgctggtcaagtccaaaaaggcaagagcacatgtggaagacctagacatatgcttcaagatcttccacaagtacaacatgaagcttaacccactcaaatgtttttttcgggtaggctcaggaaaattccttggcttcatagtcaacgccagggtaatagaagcaaacccagacaagatcaaagcccttttggacatggagttgcccacaaccatcaaggaagtacaaagcctgacaggatgcattgctgcactaagaaaattcgtgtccaagtcaacggaatagtgtgtacccttctataacattgtcagaggtaacaaaaaatttgagtggacataggaatgttaaaaagcattccaagagctgaaaaaacaattggctcaaccacctgtattgttaaaacccctagacaatgaagagctaagcatgtacttagttgtcatagaataagttgtgagtgcagtcctaacaagagaagaagacggtgtacaacaccctgtatagtacttcatcaagagactaatcgatgttgaaagtcagtacctactcttggagaagctgacctaccacttgctcttggcatccaaaaagctgaggccttacttccaagcacaccctatgaaggtgtacacgaaccaaccattgcaacaggttttacagaaaccaaaagcatctggatgactactcaagtggaccaatgaacttagccaattcgatatcatgtatcaattgagaatggccgtaaaaggtcaagccgtttagactttgtggtcgagtgtatgaacacatctcttaaagtctcttaagaatcacgaaaaaagaaagaggtagagaagaagcgagagcaagagtagtagtaaaatcttgaagaatcaacatggaaacttcatgttgatggaagctacactaaacaattgtccagtgcaagtatttccctcataaaacctgggggaaacaattaaacggagcaatcaaatttagcttcaaagcctcaagcaacgaggctaaatacaaagtgtgatcgctggccttaagctgacaaatgatgtacaggttgaccacctagacatattcaacaactcttaactagtcatgaatcaagtcctagaagaatacacatctctaggtgaaagaatgatggcctacttgagcaagattcaagacttgctaagttagctcaaaggctatactataaggcagatccctacagagcagaatgtcactacagatgcattttcccatttggcaagtagcaccgttgccgataaggaaaacctagtgccaatacagttcctaaaggaacaaagcattaccatccttgaagaagttgacatgttggatgatagtccaacattgacacctattgcagcttacctccaaactagagccttgcctgaaaaaataagaatgaggcaaaaaagatgagaagaaaggctattaggtatctaatcctagacagagtaatgtacatatagagcttctcaatgccgctcttgaggtgtgtcaccaagacttaagtcgagcagttgataatagaagtgcatgaaggcttctgcgacaatcgttcgccgtagttgctgtagactactttaccaagtgggcagaagctgaacccctatcaacaatcccctccaaaaaagtccttgactttatttttaagaacatcatacattttttcgaacttccacagaagattatgtcagacaatggaaagtagtttgaagtgacatgcgcactgatttttgcaacagacatgacatcattaaaaacttctctaccatggcccatcctcaagaaaatgggtaggtagaagctgtcaaaaagaccctcaaggacaccttgaagaggcaaatgacaattggcctgaattgctcccagaagttctatggtcgcacaagactaccaagaagacgaccactagaaaaactccattcgctctagcttatggctatgaggcgatgttgcttgtagagttagtgccaacgtctcacatgaggacaacctatgatcaagatacaaacaagatcctactggcagaatccctggaaaaaatagaggaaagaagagatcaagccaacctaaagctgcaagcctaccagcaaaaggttacaaggtaattcaaaaacaagtcaaggacaagaaatcttcataggagacctggtgctccgaagagtgttcttgaacaccaaagatccagcagtaggagtgtttggaccgaatcgagaaggcccctacaaattacagagataacaagtaaggaagcctacaagctgggaaggtataacgagaacgtggagttggttctcctaccacgatactggaatggagagcttctttgcaagtactaatagtgactagcttagagaatgctactcaatagtagtagttctaccaactcatctttagagttagttaaaagagctagtgcccacgaccttgttagtgtggctgcccatcgttcttcaatggtggcctctgctttgcatgtcaagtagggggagccatttgatatctagaagtagaccttttattatgtaagcttgtagaatcaatttatgtaagtttcacatcaacaaagaccaattaatgaataaaaatgattgtttatgttcaaatatctcgtgtctaaaccacttgataatacgattaacttcttaaataattcttttttagttccacatgcgcacaacaggtagcacccgaagaaaattattaggcaagatttatgaaacttggtgaattgtaagtgaccaagagactgtaagtctgcgtgctcacttggggggcacccacactgtacaatgcatcaaactagcacaaagaacttatgcagagaaattttaacacttactgttatcttattttttgcagcttgacgtgccaatgagaatggatgacacgtgtcccacattttcaatatatgggcagaggaaagtattcctagtagccactaattggtaatcttaatattggtaatactcgcatgtccgaacaagctagtcaagaagacgtccaaccaagatgcagacatatcaaatatagaaattaacaactttagaggttttctctctagctcctgtctcgcagctacctcagttggcgccatggcaaaaatgagatcgaaggttcaagggaggcaaccaacatctatgaagacgaggaaagttcgaaagagggaccctgtatctactgctgatgtcaaaaaaaccaaatcaatggatgaggttcttggcatcgaaccgattcatttcacgaatgaggagagtgttgatgaaggggatggtcatgaaccagatgctgatctatttcaagcacctttatctcccaaatcctcacttcgctcgatccaaaggcaagaagaaattaggtctgacttcgccacttttatggaggcaaatgctcaatgtagcagtaacatctcacaaggtaaatcctccattcctcctattttacgatttgataatattcaaagatatttggataattcttttaagaacttggagaaagagaaggtgaagataactgatgaggatatagaagaggaggttgatttctggaactcatcaatcgtttgctatgctgttagagctaaccctcctctatttgttatcgatggattcgcaagaagggtgtggaaaagataggatttataaggtaggaatgatttcatatggagtgttcttgtttcgttttcacaccattgaaggcagggacaatgtattaaacggagggtatatttttttcaataatcgccctgtagtcatgaagccgtggaactcagatgggaactttaaaaaagaaaatctcagtgtgattccaatctgggtgcagttggaaaatttggaattgaagtactggggtgaaaggtcattattcaaaatcatagggcaattgggaaagccaataatggtagactcaattaccaaagagagaggtaaactaatgtatccacgaattcttatttaagtctcgatacatcaggatttacctgatctcattgagtttgaagatgaacacggcttcaacacttcggttggagtcaagtatgagtggaaaccaatgttttgtgagtattgtaagggaatggggcataaaacaagtgaatgtaggaaaaagatagggggcaaacaagaatgggtggtgaagaagaggcatgaggagttaccaggaacaaacaagttgcaggcagtagactctaatggttttcagccgattcaaaaaggctggaaaccaaaggaggttcgacaacctgctatgactataacaaataatgcatataagattttagaggaaactgatatggaggccaatattgagaacagatacctcggggaagaagaaaatggctagtgtggaacgtccggggaatcaacgaccaacataagcaacacatggtttggcagtttattaataagaataaggttggtttggttggtctcctcgagacgagagttaagtctcctaaattaggagatttgtacttaaatgtgtttcaaggatgg

SEQ ID NO: 38619 - DNA, 2337 bp, Cannabis sativa
ctctgatagagaatatatggggatgaaggtagaaatgggtataaaaatagttaatggggatagggatggggaatcattctccacctattatccacctaatttaaataccgaggtaggagtggggttggatgcatgtcgtgtggagtggaatattgaagtattttttttagtaaaaaaaaatccttaaaacaattttcagaaaacattaactaaaaacgtcttgtattttaaaaactacaaaaagtattttctattcttattttttttaaaaacacaaaattttgaaaacacaaaaaacaatgtaaaacaccccgctaataaatttttttagtttctaactaaactattttttggtttaatctaattatctgatactgtgggaagagtccgtgctcattaatctgttattattttctaacctctattagtatgttatttaggagaaattatttaatttattatttttgtttcttgtgttcaatatctcttgcccaaaaaaaaaaaaccttctgaataggatgaagattgaagagttgaagacagaagatgaattaagaagttttttatttagttgttctagaatatagctctaatgtgagtagattaactaggttaacggtataattttaaaggagttttttcatttttaaattttaaagtaatttttttatggaaattgacatagtaatttaaattcacataatatcagagcaatttaaactaaaaaatttaaaaaattgtatatgcattttttgctctggccataaattttatttgtttcttaaaataaaatgtcaaactaaatttaaagatattttatactgatttttttcttttgagaaaaaagatatttcataatttatcggagattattattatttaattaatgatattttatcaattaattatcatatgtctacacggattagatttataattcaaaaatttaaattccattaaaataccgtcataccaacctataaatatacaaagaagaagaaactcaattaatataatcgcttaataataatcatatcattacttctagctaataataattattattattatttttactactaattaccatgatgatggttggttctactaagcgtcgtagaagtttatcaaggactaggctaagcaaatctcgatcaaaggacaatcaaaatcatgaaaatggtttgagtttgcttcatataaatgctcgtaaaggggatttaaaagaggtaaaacgtcttcttaaggatgatcacgaccaaacaataatcgacgtaaatgttgttgcatgcaacacaaaatccaaagggatcacccctctccacctagccgcggaggggggtcacatctcggtcatgaaggagttacttaagcacggggcgaatatcgatgctgaagttaagcatgttaataatggcggcggtggttgtggatggacaccgctccattatgctgcgaaagagcgaaagagggaagctgtgaagtttttggttgagaatggggccttcttagcttctgatattaatgattttaggcataatcctcctctttattattgtgttggacttgattgggcttatgaggagaaggaacgtttggtacaagagaagatgaatgcttccacatcgttcttatcatcgtcttcgtcttcgtctgattctagttctggttctggttttgattctgaagagacttattatattaattcttcaagtgaaattaattaattagaatgtttttaatgactatctctaatttgtagatttgaggatatgatgatgatgatgatgatgatcttatatttaaattaggaatctctagctatagttccttgacactctaatttggagagtgaatataaaaagtgttggagtgatatttttatttatattataattaggtaatatagccgctcttcgcgtggttaatttaattttttttagtataagtatttttgcttttgatgtacttaatgatatttatttatagattttttaatttatattagatataaaaatattttaaaataatatatatgtatatttgattggatagatatttcttttttttaaaaaaaattaatataataaaaaaaataaaagaaataataaaacaattaaaaaaatgagtaaaaaaatataaatagattattttaaataaaaaaagagaattaaaaagagaacaaataaagataattagagagattttagactgtcagtgcttcatacttttatagatagatagatatatggtagatattatttataattcaaaattaaaaaaatgaataaaaatagaatagaaaatatgtgatatataaaaaatgaataaaaaata

SEQ ID NO: 38620 - DNA, 1696 bp, Cannabis sativa
agattcatcttagtggccttttcttggaggtagattgttgcatatgaaagagtgtatgatttttccttgaagagtgggattgtggcgttttggtttatcaagaacacattttcctacacaagctctagttgaaaaaaggttgtggttatagttggtatcattcctgagtctaggcctagggtgaagcaagataccttcatttggggaatctaagttcattcaaaaaaatcaacggttaaggtgaattttactccctagatggttctcttgatattataaggattacacttaatttcaatacaagcataaaaagccctcactagcctagggtatatatttatttgagtgcctatcaaaatttctcaacccatatctctaaagaaattgctaaactcaacataatcaaggatatctagatcacatttctcaccatagagtatgtctctttttgagaagtcttcagagaatatagtgccaaattttccatgacagaagagctcatgcatagccttagttctttgctcctcttgttgcatagatgatcttagccttttttcgtgccttgatgaggaagcaaccattggataaagtgaagagatgaagagagtgatgagatttgagaaagggatgaggtttgagaaattgatgaagggaattaggtttagagagagagaatgaggtagagagagattgtaagcttctatataggttagtaaatcaaaatggggagttgtaagtgtttaggataggttttatagcaaaaataaatggattgaaatgacctaaaagctcttggccactagttcctgtagaaaacggtctattgttttctcaagtacgggaaaatggtctaccattttctcaatccagtggctaaaaataaaaaattcgatgacctggttttcacaagcccttttgaccccaaataatttctaacacttcaaatataataaaatgaaaatgcccattcaagaaagttggaaaaaagttgaaaatgatgatttacggtaagcttttaaaaaattaccgaaaaactagaagcttaccaaaaatgagctgtatacaaccaaattaaaaaatattttcccaacagtttaaggatgtaaaatgtgggtatacaaacttacaaaattgaaaaatattgaaaaataagaaagtttggcaaaaaagactcttttagacctaaaaatctagaaaacatgtagcataccaaaaatttgttcaatgcatattcagttataacaaactcataggcatattaaatacactcaattggacatgttcaaacatatacacacatactagtcaaatatgcaaaaattcacatgttcacttgtttaaaaacaaatttaaagttcaccaaaagttcacatagtgacctatgattttgatttttcaacaagtatagttcaagtaggtcaaacattaacaaattttctcatttatgcataaatcatataaatatcatatcgagagcgaataagcataaataagtgagtaaagaaatataatttcaatagctagcaaattttatatttcctttaagttggtcatgcctagctctcttttaataaaattaaatctctcatcactaagagacttggtgaatatatcttctagttggaattcggtggtcacaaagtctagcataatgtcacctctttggatatgttctctaaggaaatggtgccttatg

SEQ ID NO: 38621 - DNA, 4065 bp, Cannabis sativa
  modified_base (344)..(355): a, c, t, g, unknown or other
  modified_base (1223)..(1225): a, c, t, g, unknown or other
agtatttttgtagtaagtttctcttttttcaaaagagcttttagctttttcaaaagctgtgccaaacgggcccataaaatattaacaaacttttgacacataagcagggccaaccctaggctaaggcgggctaggcccgtacttaagatccacctattttaggggctcaaataaaaaaatactttttttaaaatattatttatctttatagtaagggctcatatttttttaggataattacataagacacccttttgtaaaaaaaattatatttttacgtttaaagatattttttttatatacttttttacggttttccattgaaacaacacgaaaataacaannnnnnnnnnnnaaaataacatgaaaataacatcaaaacaataataaaaaatacatacatataacaataaattaacaagagtacaacataaaaagaccgtatttttggtaataaaataaaaaaatcgtaaaatatttaaaattccgtgaaatcatatttttataattatttattatttttgtgtatttgtgaaataattattattttcttttatctaccccattttaatttagagccagtcttgcacataagtaccacatcatagaatgtcaagacctatggttagcaacactctataataaggatatgtctaatgaagtcaataaaaatagttatcctattaatttcacttcatatacttagccagtttttatttttttatttaaaaatttaagggacccatttaagaattattttaccatctatctcttctctctcttttagtcaaaaatgtatggacaattcctataatagtgcatttactaaactgtaattagaattagaataatcaatgagaaaaatgaattgatttaaaataaaaaataatcgaaaacaacattaaatatttaagatcatttgatataaaaattaagatcatacaataagaatgaaacaaatacatggtcttggagtatcatcattgtcataaataaaattttatattatcattaatttgttatgttcatatctacttaaaattttaaactttggtgtgaacaaaattgtatacacacatgaataattcaataagttagataattaatgaagttcataaaactcttcatttataatttagaagttcacacatactctgaaagagttgtagtaaatatataatcataggtaatttattatgatgatattttaaaagtgataacannnatcttatgagatatattatcacaaaaataattaagaatcatatgtgtatgagggagagacatattcatgttgcactctttttcctttagctcaggttatgtctcactgagttttcctgacaaagtttttatcgagataactttcaaatagttatgaatatgaaatatatatatatgtgtagcacgcttttttccgtagctcaagttttgttccacttggttatcctgagaaggttttaacaaggaaactttaaatcatgctaacatacttggactttataaagtaagtagaaaatgtgtgggagcgacatcatcgacatagcatattcgagaaatatatagattgcactcagtatcaacattagcaattctctatgaagataacacgaaatccatgctcaactaaagctataatgaagaagatagaaccaaagatatttttatcaaattattcttaactcatgatcttaaggagagtggctatattggtatccaacatattcaattagtgtcgatcatgcatacttattcacaaagtcattaccactattaatattcgagaagatggttcacaagattgaaattcgtcgattaggagatctccacgaatgcctaatgagggggagtttaatttatactgcactttttttttttcagcaaggttcttaatgagacagctatgatagacatccaaaggaaagtgttatgaaatattatacatatggatatctaaaccacccaaatcaattataccataaatactattgtattttcatttaatttatgaattttgtttctcattattctagtcatatatttttgtataaataaggtgtcgctctattagaataaaatactgagaaattatcattcagtttctttttcttacttttttcttcttatctatttcatattattcgtaataattttataattgattttagttagcaacattaattacaaatgtacaaatctaaatattcatatatttaagaaaagaaaaatctctcaccatactataatttaaaaaagttagttgacttgtggagtagtccgttattagttatgatattaatatgcaaatagtttctttttcttctttgttttaggctatgtcaggaagttagattttgataaaaaaaaaaaaatgtaccaacaaaaacgtagataataaaaaaaaaaattaattttttaagtttgaaatgaaatatttcattgaattaaatatttcattcaaatatttatggaatttaattaagtaattttcatttttaaatattatttgtatgtgtaaaacatatggaaatggataaataaagtatttataattttttttatgatgggatagatgactaagaatattcttaatagtggtatgaaattgtgaaaatttgccaaagatttaaagtattaaaatttacaaaataacttcacttaatatattctatacgatcataataattgcaagtctaaatttatagttattttgtgaccataatagtcgtttatagtcgcacaatataacttatgatcgtttctgcgaccataaaatgttattatttattttgacttgatcataaaagactattttattaataatatttttttataaagttattttattaaaaaaaaattcataaagattatttttacaaaatattccgtgcggataaaactaattttatttttgataaaaatatgtaaaaaaaagtcaactaaaattttaaataatgattaaaaatgtataaaaatcttactaaatatataaataataaaatgcaaaaaattattaataatatttattagtgagtgataaaagaataaagaaaaaaattaatatttattatagtgtaaaatttaacccatattatattttatgttaaatttaaccgaacttttactatttgtcaattttttcaattttatgaacgtgttctggctgcgatgtcaaaacttgggaactttaaaccataggaaatggaatattttttggttttcgttgggctgaacaattgaatcttcctattgattttgtggaaaccgattgtttgatgcttgtaaatgcattgaatgggcgtacattacaatattcggtttttcatgatatggttcaagatgtatcatatcatttatcctttctctaatgtttgtttatcggaatgctaaccaaattgcttatggtttggctaaacaagctttagagttagatagtaattgtatatggttagaagagatactttctaacgttgttgtaagtgactgcgcttcatttataataatagacttttctcaaaaaaaaaagaaaaaaaaaaatcctagttgctttgctctctcaaaaaaaaaaaccagttgctttgctctaaaaccctcgtatttcttcctatttagtcattagtacctggaaaatcaccgcctataaattctgttacacaacaacaacatccctccaaccaaactactcattactctctactctacagtcgctactaaccgccgccgccgcaccaccaccaccttctccggcgccggcctcaacagctccacataactcgacccaaatggctttcccagtcttcacccgtatccgcttagcccaacccaccgacgttccccaaatccacaaactgattcaccaaatggccatattcgaacgcccctaactcacctcttcaccgccacagaagcctctctctcctccgttctcttcaaatcaccaccatttcagtccgtcaccatcttcatcctcgaggtctcatcacagcccttcatcatcgaagaagaggaggacttaataaacaattctcctcctctctatcagcccaaattccagaccgccaatct

SEQ ID NO: 38622 - DNA, 2866 bp, Cannabis sativa
ttgatttttttattcatacattctgatactatttatttattacttaatatgtataatttatttatttattttccaaaaccgaactctcctttattacttaatttgttttctcttcaaataagtacataaactgttagaagatttcttttatggtggagccactcaattttagtgagtgatattagatttagtgttgtgaatacgaactgaattttttttttacacaatatgaaatcggtactagttcgaaaggcacgagcacgattagacacagaaaatataaatttcggtacaatacgacacaatgctataaatttacacaaataatataggctcaaacacgataagacacggaatatataagtttaagcacaatatgacacgaaaggcatgatacataagcacgaataatatattctgaaagctcaacatgttaaaaaccctatatttttttataactaaaaaccttatagttaataattgtaattgttgactgagattttgaacaaccaataattagatctgtgtgaagtaattaatgaatgttaaacgagaagattttgaaatagttgcgtcattaacgagtcttagtccacaagttgttatattaatgagagtgtttattacataaaattttcgaactaccccgttttctgtacatcattggtgtatttataggctcattatagtggtaaaaatgtcactattgtcgtgtttgtatgaatcatgctttgcataatttctcaaatctaatcttagagcatgattgcctacttttattatgtatttgggttgtctataggtgtttagtgggattttgacttatcccttatttatgacttgacaggtcatttatgcagttgtcaattgatgtatggggtctcgcgaaatttaaaaattacgggtttaaactcttaagcacgtttattcagcataaagtgttggatgctcttctccatgccgtattaaatgcatatacaatatttttagcctcgagcagtgtgttatgctccggcagtcctcctatacccttctctcggtcgactatactcgcggagaagaatagacaagaggcatccattgccgagctagactctcccaaagatgactagtttgttattactcccttcaaacaacaaactccagagtaattaatgtggagtgtctcgtaacgtgggtcatattaccacttggttcgctcctgaactgccatatattttgggagaaattttaggcagcattacccctcaagtcttttttttgcaatttttcaagatgggacttgcgatgtgcctcctagagtgttgacatcatgttgcgcgtgaccatttgaaatgctactcattatttctctcgtttttgatgaaaacgataaatttcttattcggttttgatgccattaattacagggtgtcagaaggattcttgagtggtgtaactgccttttaggagaccccctttcctttttcttatttagggtttgatataggggctaactactggatgaattcttgcttttttaaataagtgacattttgagggatctgcataaacatagttttcacgcattcgacaaagaaatattagaactttactttgagaccaaaaattcgaatcctgaagctcaagacacttcctcttctcaggctgtggcccccacgataccctgcggtgccattatcagtggtgatatagcatccattcccggtcacgaactatatgcatcgagccactggttgggaagcataagaattgcactcgtcaatgggatgtctccatcacttgggcactatcgtagatgagaatggaatcgtgccccaagagcctggggtttttcaccgcttggcccgagaaaccaaaatccccaaccataattatggaggatttggggcgtggagccgtggagcaagactcacctaacgtctatcgcgatcatccgtcgcaaaattattttatagattttttagtttttgtaggactcgcctcgtaccaattaatccctcaggggtatcgtctttaggtcttcttattttttattatttcgggttgacttttttgttggtttattcgatttggtttggacggtttattcgggttgagcggtttgtaaattttattgaataccttagagtaatggctattggacaaaaggcatgtttacttttatggtacttgcaatcttagggtctatcgtagggaacatggtcctaatatcaagggatgaaaaattaatggagcgccatatcagccatcttctggacacctatttaattgctctttcagaagtaccacttagagatttcagatgctgtccgtgttaggctttctatctctatctgggtaaaatgcccttccaaaatctaggaaactcaattcttatgataattggagttgccttagatctggagttgtgactcaactccttttacaagcttagtccatagttaggcctgtgttgattagtttggattatgaaagtacatatggccatcttcgaaaatatagattgcataatcgaataagagttgtaatagaaattaattattatgtttagtttgttattccaatgaacatttgaataggtggtacgttgacaaaattattcttcttagtaagaaaaagtataaaataagagtaatataactatataatatgttaagtaattgtcataaggattcaaatataaaaatgtaatcattttcatacaaataaaataaaataccatcacaagagttaaaagtaaaaaaaaaaatgctagaattgcaatcatgatttcattacaatgataacaaaccaaatatgcttttagtacattttgataaacgaagaaagtcttctcattaaagggcatttggtctagtggtat

SEQ ID NO: 38623 - DNA, 2156 bp, Cannabis sativa
catttgagagatagggagatcccataattagtacgcttgctccaatttcttgaccagaaaccaatctatggtttgttagaggactctagaatttggtctccaggttctaatggtattttatcttgtaagagtgcctttcaaagattagtttcagatcagcatatgacagaggaaaaatgggctaagttggtttggaaaagttgtgctccatctagagtcaaggtgtttggttggctgttagcaatgcaaaaggtgaacgttggtaatgcaaaagaggtcatatcaggcgctatctctggcctggtgtgtttgctgtaagaatgatgaggcatctcttgtgtccatttagccaatatctaaaaagtagattactgaaagaatttggtttattttgatacatgccacgaagctgtgctcagctcatgtcttggaagataagaggagggaagaggtctgctagactgtggacagtagcagtattggctattttctgggcagtttggttagaaaggaatggcggaacttttgaaaatatagaaaacaagaacgaagacttgtgggataagattaaattttggattgcaacatgggtttatagaacaaaagcttttgataacttttcgttacaagacctacttagagaaagtggatgttatactgtcctaagacttctccctagataagacatttactctgttttattgtttttgttttacttttctaactgttacattacttttgttatgttagtactatggttttcctccgccacaaataatggtcccaaataaatatcggggaggtcaattcttgattgacctttgtctctttttccaatatatatacatactatttatatatatatatatataaatatatttaaagcattcccgaaaataaaggccataatcttcttagggacagacccaacagaaatttcccctaataagacaggatggcaatgcttgaatcatgctgcaaccccaagatttaaggagttgggttgagcttttattacaagagatttaaacgcttaagataaacagcaatgtgttttgatcacaaagctgatatgtctaacctcaatgactctgccgctgtccataactatgattctgtcagcagctttgattgtagagaacctgcaaaaccattgccaataattgtcaatcacataaaagatgtcaaagcaggatgagagaaatgagaaatttacctatgcgctatgacaataacagttcttttggaattcaggttattcctgaatgcgtgaataaccccctaaaagataaagagtttcatcaaagtgagcaagcagtgttaataaacataaaaaatgttgaaacaacttgccttcacataatgttcactttcagaatctagagcactagtagcttcatcgaggatcaaaatagcagggtctctaagaatggccctggctatagctattcgctgcttttgtcccccactgagtaacttgtcatcaacaagggtttcataaccatcagggaaagatgagatgaaatcatgggcatatgcctgcttggccgcccattctatgtcttcctgtttaatttctctagagcagccatatttgatgtttgacttcacatccatatgaaacagatggggttcctatctaacaagagaaaattagatgtaactttataggctgccaacaattctccagctaatttgtattctaacctgttcgaccatgccgacttttcccctcagccacctaatatccaactctttaagagggataccatcaatgtaaatctgcagttcagttgcacctttaatatgagagacaagtttttacattcaactcttacagtgctctttacaggtcacacaaaataaaactgaggttacctgaccactgatgggttcataaagacgaagcaaaagattgattattgtgctctttccactaccatttgcgccgaccttggaaaaatttagaagcaattagtccgagtgcttttgtgaaagcatcatgtagaaaaacaatagtaaaaactaaagataattcatacaattgcaatgacttcatttgcttctatagaaaagtttacacgatctagaaccggtacctagttaatgcagaagaaaaataaaaaattaagttagtctccaatctggaaagaatt

SEQ ID NO: 38624 - DNA, 2566 bp, Cannabis sativa
ctcccgtacctactgtcggtactcatatgtcatcgacgctcgtacctacactcagtacgtcaccaggaagaaaccctacatcagttacaatttatgccataacctgacaattttcatatcactaacgcccgtacctacgctcaatacatcgccaagaggaaaccctacaatgatttcaatctgtgccataacctggcaattttcatatcactgacgcccgtgcctacgctcgaaacatcgccaggaggaaaccatacaacggtttcattctatgccataacttggcaattttcataacactgccacccatacctaataaggtacggcacccgatatattacatcacctaatcaggtgagcccgtatatcatattcatggtatcatcacattatcattgcttaattaatcaatctttttattatataacaataataatcataacttaatcctaatatcaatcaattctcaacaatattaattgcattacaacataacttgatatgcagtacaatatacttttcttacctttaacctagatttatacatgtcagccagcccaagtagagaactatacccaatgatctcggccctaagtcacaataacggtagaccaataagtatttatcccaaaacactacttaacaactacaaaggacaacacagggtttcttaccaaacctcgtagcacaaatatactaaaatgaaacttatatattggctctaaaacatacaccatataatagagctcattgcaagcttcaaaacagtatatagaacgttcaaaacagacacccaagtgaaaagttatagcaaaaatacaatttctgatctcctaagaatttccaaaaacagtgaaacacaaaaatctcaatttttgcactcaccgaaataccaccaaaacctatccaaatcactccaaacttcacaaggcacatatatatcataaatacaaccatccttacgtaacagaaattaaaatcgagcccttaaatgaaaaataccattaacgttcggactaagctttaaaaagttccgaactcaatttctaactaaaaatcacctcaaattcaacaagtaaacatcgaaactagtcccatagctaccaaagaataattctacgaagtcaggatctgcgtaactactctaaatcacaaagccactatataaaactagtcgtttttaacttaaaacgaaattaaaccttaccttaagctctccttcttcagtgatttcctatcccgctactaccgaagcttagatcgctagattttgggttaaaaattgaagaaaatagataaaggtggaaaagattttcgtcgaaggaggaaaagagtttcgtatcgtactgtttgttcttctatttataaacttataatatatataacaaatttattgtatatatatgcactgataagttttataaaataatattataataataatatttttaatataataatattaataaaaattttgatattcataattatcttattatttcttagtcactaagaaatttttacttctaaagtatttagtcaattttgagtacccaaaatactctagtatttttaaaaatcaacttatcccaataatcccaataatatttctaactaatactgttgtgatatttttggcctccaatcatgtctccaaggtcgtcgaacctaaaaatatttttatttcacaaacaacttatgttatatccacatatttcaattaaatctacgtaatgaacaaattaagcttatttatccacttatagcaaaatttataatttatgctaaattaagttagcacgatcataattctactcattactacttaattaacccataatttataataaatcctaattattcataattaggtttctggaatatttcaaaaatactccaaaaccataatctcatctaaaacgatatttcaaatacgaataatgattgtaccacttgataaaatgttctaaactaacacacatgactttgctggccatccgtcactttttctattattttcgagcaaaaatcataaaaaagataaatttgacacatgacatatataatacatttagagtttaataaaatctttgtaattgagaaattataacgataatacatatttcttgaaaatagcgcccataatatataaaatcaaaaattatagataattaatgctaattatcctactaatttatattctaagtatgtgaattatcccccgttaaaaaaatttcattctcaaaatctaacctgaacaactctgatattgagccctcatgctagactctaatttcaaggtggcttcctctaccttactattcctccagagtattttgactaatgctatggtcgtgttccaaagaacataccttttcctttctattaaggatttgaactggttgttcctcataggaaaaattttacaatagttttaggatttcgtttctcaagacatgagtcgagtttgacacatattttatcaacattgaattatagaacaaattatgcaaaactgataatgctggtggtaaggctagccaatacgctacttgcccgaccttct

SEQ ID NO: 38625 - DNA, 3082 bp, Cannabis sativa
tctcacaagatcttgacaaaccagtcattatgagcaatatacctcccattaacacaccctccttgattatcagcaataagatctggcagaaccctccttaacctattacaaataaccttcgtagcaatcttgtagaggacattgcaacaagagattggtctgaaatctgccacactctttggacaagtaaccttagggatcaaggtgatagttgtagtgttaatttgctttaacatcttcccagttgaaagaaaagataggatagcagctacaaaatctgatctcaccaaagcccaattgtcctgatagaaagcgcttccaaacccatctggtcctggtgctttgatgcctgggatggaaaacaaagcttctttcacctcttcctctgtgtactcaaccaacaaaatagctttgtgtgcctttgtaatccttgggccaaagttcaccactgactttaacacctttaatttattctgcatactggtacccaataatgcttcatagtatcccaagaaagtttcctgaaccccttctggagaatcatgccaagtcccatgctcatcctctatcgagaaaatctggttgtggatcctcctagatttcagagaagcatgaaaataggcagaattttcatctccaaaagtagcccagctgatttttgctttttgagataagaacatggaataggctttatggacttaagtatacttcttgcttgcttccttttcaatttccatcaaggttgaacactgtggattctttctcaattcttcttgggctgttattaaatcagcttttgcaaccatatcaaccttgtgaatctcaaaaaaaccttctttattgatctttttcaatactaactttaatcttctgagtttagtgactattctgtacatgtgcgagccttgaacctcttcattccagcttgtactcacctgtgtatcaaagtttggagccatcttccacatgttataatatctgaacaatttctttcctgaactcctactttggtatatagataccaataaggggttgtgatcgaaagacaattaaggtaaaaaaactgcttcagaatctgagaaagacatgcactaatgtgagttcgccatggctctgtcaattttagagaaaatcctaccctctggtttttgtttattattccatgtgaaaaaggagcctgaaaacttcaagtcaatcatgtcacaattccccatacactccttaaatctttgagatggaatgcatttagctttcctacccacctctctcatttgcaaacaggtatttgattgaaatctcccataaggatccaagcctcatgaattccatctgctaatctttccaaatcatcccacattttgtctctcttcatttcttcgttaaaaccatagatgaaagtttcataaaaacaacctttttgttgcattaaagtaatgtagcaatggaccaattgactagagcaaaactttatatccactgtgaacacagatgattgccaagctatgattattctccccttatctagccagggtttatagttagtaaagcaccaaccttgaaatagactactatatagctttcccatactcttattctgaactttagtttctaggagactaacaaacccaaccttcttagagaaaatcaattgcttgatttcttgatgcttttgttggttgttaatccctctcacatttcaacatagtaatctatcattggtgtctcccctacctccctttcagcagaaacgttttttttcctttgctaactctttggaatccctcctcatccacctgcacctcctgcttttcctttttttctttagggatccaaattggtttcacaggctcctccttcgtttctttcttcctacatgattgagtatcgtgcccaatacctgagcaattatagcaaactagtggtatccattcatatttcacttccactttaacctcatgattaaattcatcaaaaaaggaaatctgattcggaaaatcctaagagagactcacctgaatcaaaactctggggtattggagacggtccctatttttagtaatgttgtccacttgaagaggttctcccaattgcccaatagtcttgaacaaagacgtttccccccagtatttgatgtccaaacctttcaattgaatccaagttggcacgttcgtgacttcctccttggtaaagtcatcgacagaattccatggtttcattaccataggcttcatgtcaaagaagacatacccatgttccattattttgtctctcatttccatgttctgaaacctgataatgaagatactctttgctagcagacccactttcaccaccgcatccttccatattcgacgaacaaattcatcgagtatattaattggaggattcgctccaatcacataacaaaccaaggaaggcccccaatatctcacctcttctgcaatgtcctcaaaatcaatcttaacactcttctttcgtgcagatccagcatctaccgtatccttctctgcttgtgcaaagctagcttccaagttcttcgttacactatatctgagaattggaggagagatcttcttccccaaactcacatcctgagcaaccctattagaaattgtgagccactcagataggtcctgaacctcactaacaggtgattttagaccctcgatgcactgttccattgcctccgagtattgttccattacatccgaagtctcaggaatctctagttcttgaataccaatcacctcatccatggatctggttttgataaccttatcctatgaagacaaccctattttcttctctttagctttcacttttccagccatttttgcccttttcgccataaccccggtgaatcaccgaaagagagagaagagcaggaaaagtaaatattttgctgtgatacaatttgttttccaatgacttcttcatgtaaattgacgaaagcttattccgcaacccccaatgtttttcttcatgaaattttaaattgaaataagatattttgctaacttttaaatttggttattttatttaaattaaatcttaaaattagaaaaatgatatttatttatca

SEQ ID NO: 38626 - DNA, 4258 bp, Cannabis sativa
aaaccacaaccgccggcgaaacccgcctcacctctccaagaaacccgccaccgtggcggcgcaacacggcggaggaaaaaatcacggcgatcttttctccttccctaaaattaaccgccttaaacgaaagcgcttcaaagacacggacgagtacgaagtcgatttggaatctgatcttgagatcttgagaaaactgggtgagattttcccgaattaatcggctctccaccgcgtattcctcgggaacaacggccgtaactcggagaacaggcgagttaactcggagagactcggatttctctgcgagttccttcatgagcgaggcgtagtgtccggcgagtccgatgtcgaaatcgatgacgtggataatgaaggtggacccaccaagggcttcgagtagagcttgattggtagtgaattgagtaaacatcgggataggcgagatatccgaaaaggccttatgggctctgatggtctgaacaatttcggcccatgaagagagtcgacctgtggtccggttcgaaccggagagaattgactcaagagcttctttgaagtaaatagcagcacgttgaaacggtcgaccaccctgttgttgtactcctttattattattattgttaatattactagatctgactcggttgttgagacggtctagtataacctgagcgagttgtaaatcgtccgagtcgaaacagtcagcaactcggattagatcttcaataaaatcaaacccaatattccaattattattattattattattattattttgaaaatcatgggaaacctgaaagagattcaaattatgattatcagagaataagttgaagtgatgatcagtagtagtagcaatagttggatcgaagggctgaggatgatcatgattatcggccgtgatgatctgatgatgagtagtagcgttggtggtagttgtattagtagaagctgttttgaaaggagaagggacagaatcatcatgtaaacccaattctctcatgatattatcccaatccaagttatgcaaaacctgatcgtccacaggccactccagcgtattatgatcatttgtcgtttgagtactcaaaacgacgtcgtccgaattattattattattattattactattattaataactaccttgttgttgttgttgttggctggtttcccgccaccgccacctggcgccgccagtaccggacttgggctacgacccaggtctagaacagaagtgggctcgtaacagagattgggaattatttgatgaaatacgatgttgttgttcggaatattattgttgttgttgttgtcggtttttgtgttgggagattggttatttgggttgttagtggtaacagggacgatcatcgctaagaaaagaagaaaagaaaaaggagtggatcaagttcgaaagacgagaattttattagcttataattttttttctttttatttatgaaaagctatacatgtatttatatatatactatgtggttgttaataattattttagggaatttaatttggagaatgagatatgaatgaatgaaaagagagagctttttttggtggttatgatgattgtggttgtggcttttttttcttcttttaatctttgcgtgtgtgcatggcatggagaggtgcgtatatagcatatataatatataatgggattatatataataatattttcgtatatgtatgtatagatatcatacatgtcatgacagacaagtatgttacacgcgtcagtggtctctttttaatctctttgaagcttctaactcaagtcttccatccatgtctgaagtctttttattattgatttattattttctttatattcgaagcttaataattctaccttttttaagatctttagcttatataacctttctaatggaaattagtgcttgtagttatataattagctagtactggtatatcatagcatgagatttatagattcaggggaccgaaaaatgatttcatgtgatgtaatgtactcctctaagtcaacaccaagaacaattaagctgctgtggtgagaaaaagaaaataaaaatatactactatattataattataattagtctaaatgaaaagaataattaaaaaaagtacttcttgtcagatttcttagcataaaaggtaatttagttacgggtaaataatatttttagaccatttagtttgtaaaatttattatttagaatattttttataaataataaaattttattctatatttttcaaaatagtaaataataatattttgaaccaaaatttaatcatttgtttttcaatataattaaacaaccaggtcataaattctaaaataatatttaccctttaattattgtactgttattaaaaaatgatgtcatctctcgatcaattgcttcacaaaagcaacaatctaacgatccacatgaattcatcatcagcgatcgattctcgttataattagtagtccttagaaagttcaatctccagagaataacaacaaacatatcagtatgattataattaggaaaatgttaaggagtacttaaaagtactaagtaatattattagtgtattttataatatcagtactcccatcacaatttattttaataaataattaattatgatgcgatacattataatattatatacagtgtcagacattttaagttgggtaatatatatagcaatgcttttataattatatatttgtgtgcctaccaattaaggtgggatttacttcaatattttgctacacgtgcatgtgtgtatctactcaatctacaaatgcatgtacttcaatatttttattgttttctattttaaaaacctggagttaataattatatagtcaatctagggtttctttaagtgtatgataaatatcatgatgatcatttggttgatgatggagttacttgtagcttcttatttttgtattttaattaggtaaaaagacttttgatatataaaataacaagttcaccctagtaataaaaagagcaaaaaaaaaaatctctcgacccttttataaagtgaaaacgacataaattatcatcttcatcttttggtgttccaaagttcaatatttgtcctctaactaatgatatttgtttgcagtaaatttaattattattattattattatttaagtaattaaaaaacgacaaatgagtggcatatttggcgttaaagttgcaaagcaatgtctccctcaaaaactcgtattaggacccactacaaaagcttggaatacccaccaccaccagaaccccaaccccaaccccacctttcttctcttcctttcctttaaaaaagcttaataaaagagctatcattaacaactttgagatcaactactatacaacatactccaaatctatcttcattaacgcttccttatctggcaaactaaaaactttattattattattattattagagaaattttaaattattatattgttattagtgtaatttaatattaaattttatttatttaataattattaaaaatgtaattactggtaaaatattatttgatggccgtagatattactagtatagtatatggtactagctacactattattattatttaaatatatatgtgaattgtttttttttttaaaataagttcaaaagagtagggcttgacttattgctccactttagtatatatataagtgtatttcaacgtggaaagaattattacttttacagtaattagttgaatgtatacctaaatttttattgtaattcacatatatgttgcttaaattaatatattttgcagctttcttagacttaatatgactaataattcacccttagttatgttagattagttatatcaatattataaataaataaatataaatattcttgattcaaaatgtctatttcatatttatatattctctcgtgtgtatggtcaattttcactggttttgacatttggctacttactgagacatcgtcagatagaacaatatagaagaattttacaaaaaaaagagtcctcgcgtattttcttctctattatatatcttttcaattgtataacacacaaaacccagcgtgcatgtgttccattattagtcatgtcttccatttacattaaattaagtagctcttaattatacgaattaaagaattaatattgcttatattataatacaagcaagaaataataaaacctatatatatatgttgcagtactctttgaaaatttcatatttaagg

SEQ ID NO: 38627 - DNA, 2249 bp, Cannabis sativa
  modified_base (69)..(72): a, c, t, g, unknown or other
tttggtcacaatacttattgtgactaaaactaaattagtgatattttgtatttaaatattatgttttannnncaagtaattttttgttgtgactaaattcatatttagttacaaaagtaaatatgttgtgactaaaaaattatcactaaaagtaactatgatcgtttagtgtgatttagatttgaagcacttttaaattactatgtagataatttttttatcaaatgaaaggatttcactttgaggatatattaattaaggggttattgtaatttcaataagaaataaagatacataaggataattaatgaaaaaacaaaaatattattacagaattttaaatatttttataattttatttataaaaagtacaactttttaatatatttttatgttatactcatgctaatttattgttcattttttgttgttgtttgaatgttatattcttgttatttttatgtttttttttttgttattttcgtattttttttaataaaacaccgtaaaaatataaaaaaaaaaaaatctatctaaagtaaaaatataaaatttaaattttataaaaaataataatttatacaattatctctttgtttcaagaataatgaacccaatatagtgatagagctcttagccaatcacaagaactcttcttaattttcttttgaaatggttgttatatgctttgaagtgcaatttaattaatttgttttacacattttatcaaaaaaaaaaaaacttgttctacacccaattcttgttgggaatacttgaaacaatatattataaatgaatatgaaaaagtgtagggaaggacataaaaagagggtggtacttacagaattgaagaccatgaagccaaggtctaaatcaaaaccatcaaaagtaagagtgttggcatggcctcctaagtagtgttctttctcatatacaaccacttcagccccattttctgccaatacgtaggcagaaaccagcccactaataccaccaccaacaactgcaactctcatcttttctctgctttttattattataattattatttatgtgaaatcaaatgatcactctaaataatattagacaaaagtactatatataataaatatactttttatttagaaaataaatgaaagcaaaagtagtacaattttttttctttttataaattacaccaaacataacaaaagtactagtacttcaatatatacatatatagtatagatactatgtacatatataatcacttgagctaggtccatagagagtatagctggatcgaatcccaacaatctaatatatataggtacttcaataaaataaaattaaaaaaaaaaaccgttactcaaataaaatgatgagatttgaaagaaagatagtatatgaatgaaaagtatgcaatacatgtaattagttcacaagttaaagttgtaatgttgtaatgtttgatcgtgaatgaatataataacttattcaaaaaaaaaatgatgagatttttttatttatccttttatacttcattttttttatttatttatttataaaaataaaaataacataattttaaataaaaacagcataatctcaaaataaaaataatttttataaaatagaaatattgtaatctcgaaataaaaataacataactttaaaacaaaaacagattttataaaaattaaaaaaaaaattaaaaaaaatacatgataattctcctaaatttttttaaaaaagaaagtacattcgtaaatataaacagttttaaggcacagatagatctttctattggtttttcttattggaaagggatttgttatatacacatacacaaatacacaatcataactaattataatgtattctcttctcactatcacacacaaaacagaaaaatgatgagaaaacttacaatggatgtctatttcttgagtttaatttcactcaacaaaatatcaaccttaattagctatgtttctgttctggcaactccaactccaagcctctagattttatagtacagtatatgaacataagaatgtacaaaatggtaggcacaaaattaaaggtgtataaagcatctatatatatagctagctatgtttgaaatgaacgtggtttattaaatagtagtagctagtacttaatggacaagataaaacgtacaatccatactcacttaggtataactaccttgattattttattattcattaatcacaattagttatcaaatttatttagtcaaagac

SEQ ID NO: 38628 - DNA, 1779 bp, Cannabis sativa
gatctaaaacctgcaagtcaaaaattacctgaaaatactagggtctaactcaaatgatagggtgtgtgttgtgtgtaagaggtttggggttcaaatctcagctgggtaactacaaactgtttcttatcccaaaaacacttacctgaaattggtacagaaaattgaaatgcttatgcgtttcacagtatagacaaattcgggcaagtgctgcagctgtatactggctcactgcttcgtcttgtggctctgtagctgacattcttgctgatatcacttcctccaaaacaggcattgcgccataactaacgcacagatcacacagctcatcaatggtcccataatcagtcgccaaattatcttgtctttgaggggatgaagaagatgttgccattcccaccattgatggttgaggaggaagagggacagcatttggggggaaaaacaacatgcaggcatcattgaattgaccatgcttaaacataaattcaagcaatttctgtcgtgcatactgcaaaaaaaaaaaaaaaaatagaagtttgcatatagagatatccaatatccttgagaaaaggggctaaatgatagagataatttactatttgggttttcttgtttttgaaggaggatttctggttctcctgttctttattttattaaaaaaatatcaatttagtaacaaaaattgcttacagttataaatgtttagaacaaatgtaataggaattatcttcttaaagaacacactaaccaagaaaaagagacaggcttatcttttaaattggtttgcacagttctaggttatcaattcaaaacaattggcaaataataaaaactaaaaccatagagcacagtttgattacctatcaacattgtaaaagtctgtcaacaagaatgaaacaagcaaactaaaacagtcaaagcgataaggaatgaatttaagatatgaatgaaatcttacttcttgcaaatagttcacacactcgttatagcgattgtagtccaagttgctgcgaggtccatcttcaaattctgaaccatatgtagaattatcattcgcatattctggaaatggtcttgatttttcagaacgtggaaaagtggatggcatgtacagcacattgagatacgaatcagctgaaagagaatcatctaagattgttggagcactcttagccaaatgttcatacctgaagaagtattggtcacacattagattctgtggtacttttttttctgaaaaagagaagagatcctcttgtcttagacaggatcctccccgaaatatattaaaagcctcacttgtggtggaggaaaaccatggttacaattaataacagaacagaaattctaaggcaatagtactcccctgctttgcctcagaaaagggaaaagctaaacaaaaccacctacagcccctaaacaattgtcttccattctctacataaatctaaaaatgataaatcctcaaaatgtttggttctaaaaacccaagtagctgtccaaaatttaacttgctcccacacatccgcttctgatttagtagtcccttcaaagattctggcatttctttctaaccatacggcccagattgttgctaaaatcactattttccaaagctttaatctacgtttgcctccggttagcttggacgctatcaattgtgaaacagaccttggcataacacaggacaattcaaactctgccaacacatatctccataatcgtcgaatatatttgcaatccaagaacaggtgaccaacatcttctccgctgcctttg

SEQ ID NO: 38629 - DNA, 1431 bp, Cannabis sativa
agcccaattctcttttgatttgagaagttcggcccatgcagagaatcaatcggcctaataccatttcgcacgtgctgcgtctcgtgcaacaactcgttgatcgcctcaaggattcgagcttgatttgaattttttgcgtcgttcgaggaactatcaaatgtcctcctcaaagctatatcaggaaaataagcagaacctttttcattttctaatatctcagcctgaactccattaccattaccagaaatcttgggcgcaccaccaccatgtctcgacttaggcacccacgttgccgacttcggaattcccagcgatgcaggagatcgatgggtcactttcttgcccattctcgaaataccacccacagtggtaaccgtacgactggaacagtcatttctagtcatcccacctgcattgttaatctaggaagggccgattgacggtggctgggaagaaatagctccggtcacagtcgtaggaatcacatcaggggagagcaagtcattctgggtttcgaacagaatcgtcttggtcttacgcgaagctcgctcatgaactagagcattcttcttcatgaaatagtcggggtaggaagaccccacattcatccaaaggccgaacaaagggaaggcaatcccatcggcgttcgagatcatgtcaggggaacctggagcgcatccaacatgtaaatggccaaggcgtccacaatgatagtaaaaggcaccgatcttctcacatttgaaatggtatccactgtttgatgcctttccgagtctcaaaaaagcttggtggagcaatcttccaatcaagaaattcaacatcaaaaatatattttccaattaaaggaacatcagcagcccagatgaaatcttcattatttttaagctgtgtatccttaatctcaggatgaatcaaagccttacgatcgccaacagaacaaaccactttaataatacaagaagcaatcagtggagtctctctagtgaaattagatatttcagtatatgatttaatcaataaactctgtttttctccacaaataagtgccaattccattttccaatcttgaaaagagcaaactttctgtaagaacaagaagacaaattattgattctccgttgagctaaacgcgacgtcgttttgactctacaagcagagtctgtcatttttcttctgtcagagaaaattgataaagcgaaagaaatttcatggatgcaatcgaaaataccatccaagaaacaaatctccctgctttcccagattgaagattcaaacttttttcaattttcttcataaaaacgaaaaccccccaaacgaaacttcatctaactcactctctctctctctagagataatttaagtatctgcagagataattagtttagtagaataactattctgttttaaaatagaagaaaaaactacttcaat

SEQ ID NO: 38630 - DNA, 3011 bp, Cannabis sativa
aaatgtgaagaagaggtggtcgtgttcaagaggtgatgaagctgaggaagaggttccttttcacatatgtctaatgccctttatagagtaccagggcttacaaagatgcagatagagatgtccctagaaaatagggacattacaatatacatttgaattacaaagagaatatctcctaaaaactagaattgttatttattgatggagagtcccatctttatggggtttgaactgatctggagtcataggcatgttgaaggtgagttggaaggcttgtgagaaaaacacaggtgttggtctgttcttgcacctttggccgactagccttgctaaaggcttcccaatgcatggaagctggcactccaggccgacaagctataggtctaggtaggacctgtttggcaggtacatggattcttgttggcctatatatgtcatgcaacatatagtttccatgtctagaaagttgctcggcactaatcttgacaggttagtgctgagatgtcttctatgtacttcttgctttttgccacgtggagaagccacatcaggtagacaaaattttggataactaatttgttttcaaaaatctcagtaaacatattggtgctttcattaagagttgtagaaaaatttgaagctactttgcatctacacaaatggtgattactaggaaaattgtcgtcactaagcctactcctctaggctaggtcgccatcatggacaacgctaacctactccctctagggtaagccaagctgagcaatgtgagggatggggaagtgtctgaagttggcgaataaccgcttgataagacctatcaatgagaatagcatcttaagaaagacctcgaagacgatggagaaacagaaaatggcacatggtaaaaaatcaagggtggatactaccaagatggatattattatgagcaagaccccgaggtggtttgattatctagtgagttagctaagacccaacagaatttggtacatcaggaagagttttctcgccaaatggagaaaacgatggcacaactacaagtcagacttggcggtataaaggaagactcaaaggaagatgcttcagaagagcctgtgaaacagtttatatctgtcaaagactttgacggggagattggatccttgaccaacctcaaatagaaaccaggttaaagcctagaaaacgtcatccaatacatgatggaagtagcaacaaaaactaaattcagcgactacatgaaacttgtggtcgtctaatctggattgaccataggctccttcttatggaactaaatgcaaagagagagggctaaggctctgtctgagttcatgtccagagcctaaggaatcattaatttggaagattcttttgtacaagcttttagagttgttccatttccatccccactagttgcaacacccacttatgctctgcaagttatatttttggccatcacattcgaggaacccagtttacaactactgcagtctatggacccactgcctctgggcacgcgcctacacataccaatttctctaggttcaaaatagcacaaatcgaatgcaatatcgctcccaaacggtcaggcaacaaatggaggttcaaaaatcaaatgtgagccattcctagaacaagagaggtgggagagctagagtcgaagtgaggctccaagtaaagaaaggaaccaatatgatcctaagcatatcgagtacactagcctaattgatactcaagaaaaattttatagggcaacctgcaacatgttccactacagaaagctccccgaatgttccaaggaggaaagctataaagggacctgagtaagaaatgtgagtaccatggtgatattggtcataccaccaaaaaatgtgattatttgaaggatgagagtgaaatgttggtcaaattaaatcaccttggccagtgggtatagattcccatcatctatcttagacaaggtatagttcacggacatctcgccattcctggatagcgcggagccataaatcctaccaagggggtaggtctccttcaagctcccaaaacatgacttccgtctttacttgctccaatagtgaaagctgcagtaccagtcctagctttaaaccagattatccgtattcgccaggactggctccaccacctgtagatggccacgtagcaattatctctagaggaccacaccttgccagaatcacttgcaactcacataagagatacttgaaaaagttggaacatgaaggggaagtatatgccctagtgtagtctctagcccagcatccacgaatgatgaaccttctcatcacctttatagaagaggacaccaagcacgtgcacttttcccataatgactcgttagttattgaagcccaaatcacgaataaaagtctctagagttctattagacaatggcagctttgtcaacatcttgttcaagttctccttccaagtgatttggtaattgaagttggtctatcaccatgtctaatacatctggaagactttaacggagattccctaatgttgatggggaaaatccagctcctagtcaccttaaatggggaacataatgtcactgctttaaaatattgcctatttgtagtagtaaattgctccactgcctacaatgtcataccgggacaccctgtctcagttgaatttggagcggtcacctccattcaacacatatgcatgaagttcccatgtgataatggaagtgttggagtgatcagaggttattagaaaaatgcaagaaaattttataatgtcttcacccaaccgatatttatggttagagaagaatttgcaaatgatcctagaatagccatccagtgagggacagaggccatttgagaggattaacaagatgaattggatccccgagttaggatagaaagaatgattgagccactagaggatgttgaggaagttgacatcaacaaaacaaatcctactaaagttatcaaagtgcgaagaaacttatctttagtggtgaaagagaaaatcgtgtc

SEQ ID NO: 38631 - DNA, 3051 bp, Cannabis sativa
  modified_base (2071)..(2087): a, c, t, g, unknown or other
  modified_base (2189)..(2193): a, c, t, g, unknown or other
  modified_base (2616)..(2619): a, c, t, g, unknown or other
tcttgattgtttctccttccattgaaaaagaataagctttttgattgttaggaaaatatgagatatcagtagaagaataacaataagatgaacaaagagatagaaaaaattacaactctatacaacaagattacaaggactatagattagataaatgttacaatctcaaagcacaaagtacaaataaagagaaagaaaatatgaggacgaagttacaaccaaaagcaaaatatacacataaatataaaagcaataagagaaaatatatatctacaataaagatatatatatatatgatatatagtagaattagtgtatatataaaataaagaggagaagagagcagaaaacaataaaaaaatagaggatgaaaaagaactcaagttagctatgggggatcaccagacgctctaaaaaggtttaagcacctttgtccaaaaagtttatttccccctataacaaacacttagggaataaaatggaaatgcttctgagaataaacaagcctcttaatattttctagcttagtgtttagaagatagaaaattgttgttgtctacaagtgaaccaaagacctctatttatagtgtttgaggatcacatttgaaaatcaaatcctttcatcacatggttgttacaagcactttaatttgtgtttaataggataaaaatattgggcaagagagctggaaacatgcttaattgttttatttgcgtttatgaacattttcaaaaacctggttctaggtgtttgaaaaacaactatgaaacaacatattaacaaccataaaacaatcgtttctagaaaactcaatatttagtttttgtaactcctctctgagtcaaatctttctcccacgtctcaatacccatttaaatgatataattgagtattgtaccaatttctaatcgctagaaacttatcccattaatttcataacttccaaatgtaataactcacttaattacatattatcaattgtgatccttaggttacaatctattttcatatttgtaactctcatatgttatactttttatgtgtattattatactatatattaatacaacttccaacacataatatatattaatttcatattaatatataatatgctacattttaatctttattatatatttgttaaataacaaatatataatagttgttgatgatgatctaaatgtccacctccggtggacattcaagcgaactttgtgagagcaagcgaaacgttgaaagtgggtggttctgcacctcaaaaaggccaacaccaagggaactaagttgatgaaactcccatcgatgaagatgaccaagaaggccaagacgaggaccaaaaggatgactacaacaaaaactctgataaagactacgaggagtactacgaggaagatccagaagtggtgagattaaggtaagtagttgcagaccaacaaagaaacatgatagagtaagaacaagttccatgctagatacaagaaaccctcttcaagcagcaaaacatggtagcaaaggggaatatcaacgctgaaaactcacaggtattaaagtttaaccatcttggtgctagactcttcaatgcaacaaattagaatgggaaggacaatatggttgggcccccgaagaagaacttattagggtttatgccctgaaaagcctgtaaagatgtaaagatataaagatatttttctatttataaatttataaataagagttgagcattgttatatatgcttgaatgttaagttatgaatatgtaatatggaatcattcatatatatcgaaaaatttcttatttatatatgaggctatgacttgtacagtacgtagaattaagattactttgcaatgaataaaataattgaaacatattaaagttatagaatctttaatcaacgtttgctagtgttgggttttgtgccctaaataaaactcatttcagtataatcagatttactaattaataaaagatcagaaatcattttatgttgcacggttcacatgatttatttcaagattatatgtttaatgtataaattctattaaatccagaatatatagttattnnnnnnnnnnnnnnnnncaacacagtggaatataatcatgattgtatgtttcaaagtttaagtccaatgatttatcagtaccctggatttagaatgacatgataatcagcgataaagtnnnnntacaccttggataagtgttatggcctttccagagcattggcaaagtatgatagtatcgatgtatggagtatacatcggattggactgatattgaagttggataagatatcataaacttacccttatatctttcttaaagtcaatatcactggttgatcttaggtcaatagatcttaatcctgagatagttatgttcgatctcaattgtattatttatgttcttagagttgtttgtgaaagctaactaagggttcgggcagatatttacatcttgggaacatgatagtataacagactgagagcactaatcatagatatggaatccatagcttcgataagtatttagaagtaaaacgataatttccttcgagcttgacttaatagagataaatgattgagatctcattttagtaattatattannnnactgaaatatcatttataggtaggtaagtgggtttcaaggataaaatacattgaacggtagaacggtaaatttgtccctattcaatgtagataatctatagaggatctttgactatttggattagaacgatagataattcattgcgtatctatatcttggtacatatagagcgttttatacaattaagagtgcaatttttgaatctgtagtgacgcatggaagatataatctacaattgatttgcaatagcacacaatcatttgagactatagtagggttgttcacttgttgttcattaatctacaattgagataaaatgacaattattaagcaaactttatgtaacaccctaactaaaataggcgtattacgtgatttttaaacatgatgtgcagctcgttggtaatcaacgaggtttatggaaaatgtga

SEQ ID NO: 38632 - DNA, 1932 bp, Cannabis sativa
aaaaaaaacaaaaaacaaaatattatcttttttttgaaagaaactaaagttcattaaataaaaatgttgatgggattcacagggggaataccctccccttgatacaaaactgccaaatcacaattacgtcttgtgtgtttggctacaccatcagccatactattaaagttacgattgataaaggagaaacaacatctagaaaaactattagataaatttagaattagataaaaaacttttgctaccctccaatccggaattactctagttgttagagcacaaacagccacttttgagtctgaaaaaatctgaacttcagaccaaccatcctcagcagctttgttaagagcaagatgaattgccattaattccgcttccaacgccgagattgcctgaaccttttgggcattaacaaaccagcaacctgttctcatatctacactgattgcagcaatgcctgcatccccattgagccacgaagcatcagtaagcatataattctggtcaccctcattcattctcatgttactcatgctgtgctgctcatctgaactcttttctgcctgggctatgttaacttctccattgcaatcttggacaaaaaatgacgaagccttcatttccaaggccttgtgctcaatgttaatcaaggcagtcttagcgttaacgttacaagaacgaaaacacatagagtttctctgctgccatatttcttccagtatgcagccgaaataagaaagtaactccttcctgtctgagacgtcgaaagtgttgattagagagaccaacgtattaatcattgtgtctgcagggatgctatctatcttcaaagccaatctacacccaaaccagacagcttttgcaaagctgcacctccaaaacaaatgggaagccgattcctcctctagatcacagaaactacacatcttatcttgaaggaaaattagccgagacttagtaggaatggcctcactcagaattctccagagaaagattgaagttttaggatggatccctggctcccaaatccatttccaaatctgctcctctgaggcaaatcttcctttattatcagtgatataagcagctttcacagagaattttgcacttgagttttgcttccaaaaaacctggtctttgaaaggagttggaattctagggattttgacaatacggttacccaactcatcaccaaagatctgcaatattatttccacattccactcattacctagagatacatctccaatagtctgaatggtataacctctgcctttgatactgttcattagagacacaaactcaggatactctaaccaagggatccaaggctgactccaaaagttaattgaagtacccgaggctgccaatgacaatgagccgttgaagatcgctgttctagagtccaggatacacttccattgataggagtcactgcccttttgcttaacacaccagaagttttcatacttacaatatttttgaagcaaacatgagacccaaggtttgtcttcagcagtagcaaggctccaagctagcttggataggagagctttattcatttcttcacattttcttagacccaacccgcctgaactctttggttgacaaattttgtcccaagccttgaacgccataaatctattcttttccatattccccatccaccagaattttctcatcaaggaatctaaatctcgacatgtggacaagggaagcttggaagtggacattgcgtatattggcattgctgaagtcacagatttgattagagtaaggcgcccagcatacgaaagaagtttcattttccacccttctaatctcttcaataaattttctttgagtcgcatataatcctcttttttcctccttttaaaaacaaatgggtttcccaggtgtcgttcccgaccgttcacttgatcaatgttcaac

SEQ ID NO: 38633 - DNA, 2451 bp, Cannabis sativa
tatttccttaattagaaatattctaatattttcccatctttatagcaatcataaacccaatcacacagtatcatttcattttcttcttctaccttagcttcaatattcctcctacaacaaatcaattccaataacactataccatagctatacacatcaaccttaactctcacacctgagtttttgaaccattcaggtgcaacataccctctgcttcctcttattccagtctttgtttgagtctgattctttgtcaaaatcttagctaatccaaaatcagatattcttgctgtaaatgagtcatctaggaggatgttttgaggtttaatatcacaatgtatgatctgtgtactacactcttcatgtaagtaacaaagccccattgctatgtctaaaccaatttgtgttctgtggtgccagcttggccttggagatggtctaaaaacaaagctcgctacagaaccattgctcatgaattcatagacgagtaatcggtgttgcccttcattgcagagcccaattagctgaaccaaattcttatgattcgtacgaccaatggcacttacttctgccttgaactcctgctcacctgatgcttctctcgccatgtctattttgtccaacttcttaatagcaatacagttactataaccattaatgcttataactcctttgaaaacagtaccaaaagcaccacttcgtagttgctcactgaacttattggttgctttctctagctcctcataactaaagcttcttaagctctttcccttgatggcttcgaatttcggtggaacaattgctttcgtcttctgtttgaatcgaaaaataacaaaacaagttgctaacaaaagaagtacattcatgaacactgagccacttaagaaaacagatccaatgagtatgagttttgaatcattgttatcatgtttattcttttccaaaacttttccatttctagtagaatcctttcttattttgatgtgtgctttgccaccaacaatgggatctctcctcccattaacaagaggaactttcagcttccaacactcaccatttttgaaatatgcaacggcacagaaacagtcaccaaggcaagccaccttcttgcaccactcctcattcacctgttgaaagtgatcgtaattcgacttaggccagaatgtgttttccatgcttataaactcaaaaccattatcatcattttcattttcattttcatattcaactgcttcaccaccacaactttgagcctcaaagcttctcttgcatcctctgctctcgtcgttggaattgatcaatgtgtaaccatttggacaaccacactttggtctgcggtcatttatagtatattttattaactatgagaaatatattcttaattttatatacaaactatatatggtaaaaataaacaataaacatctaaacatatataaaaaaataaataaaaaacatacatgttttatttataaatttgtatttaaattttaataaacatattttttttgtatcattaaataacttcattgaaaaaaaaaaaaatcattaacacattatatcaacatatcatcacaaatttggtccaaaaaaatatatcatcacaaatattatcataacaaatatattagattaataattaataaacattatcaacaatattataaacataatgtttataaggtcacatttaattattattttgtttatttttttaaacacagtttttaattactaataagcataagtattatattttcaattgtttatggccttttaataaaaaaaaaaatatttatttaaataaataaataaacttatttattatcataataaacatactagattaataatagcattatagatattaataatactaattaaatatttaataaatatatatacattatttataaaatataaataaaatttgtaaatgtgtttgtatatttttttttttaattttgtattaaattttagtaaatatattattttagtaatatattaaaatataaatattaacttttatatttacatatttagctttatacgtttttttttttcaaaattcaattgaaaataatcaacatgttaaaatattaaacatataagtttaattgtaaatatttataaaattgtataaaattatgtaattatatttttttccacataaattaaaattgcccttaaaaaaacaggtaaaacgtttacttattgaatttaaattaaatagtggcaccattaagatgataagtatttgtgatagttgcattgaacaaaaaaaattattatagaccaagccaatttttacccaacccaaccccatccaataaaaaatgaagaagaaattgactttaaattagattaaactgtgtgtcaagttgtgtcaaaagagagtattatacatatacatatatgtaacaattcaagcttcaagtttctccatataga

SEQ ID NO: 38634 - DNA, 3619 bp, Cannabis sativa
aaagtcactaaaataaactaaaaatacttaaaaacaaagctaatttaatgcccaaaaagatataaataactctattttcatagagttatcattttggtaaataaagatgttaatgatgctttggggatgaattagatttagatgagaattccttgaaagaagcatacagaagtatgtatggtgagtgattgaaattgtgttcaaagtatctgacaaaagatattaaatctctttcttaaagaaataaagaatttgaagtaaatgttaaaatttttgaaaatgagactattgagaaaaatattaaaattaaacgattattcaataaatttgagcatattgaaaaaaatacaacaatgctaaatccaaatttttcaatttttaaagaggttcagaatacagaaatcatgatgaatctcaaattaaatattaaatttgtctagaggttcatccaatggaagttgcattacatttttcaaaaaaataaaaaataaaaaataaaaaataaaaaaaatcctgcttgttgactgtatttgtatagggctttaatgtgtagagctgacagtgacaccatattttgttgtgttgtgccaaaagacctggccgataaatagctctactctcgagtaaattaaaaaacaatattccaataaagaaaaggttcaaaaacaacaacaatgaaacgatcacgtgcaagggttttttatgttttgcatttagcattaggtacttgtgttgtctctattcttatttttacactttcaaattattaatagttatacgaggttagatacttataataatatataaaaaagtattaaatattatggattttttttatttttacactttaaaataatattttttttttgtatttttacggaattctacattgaaatccatattacaacttattaggattgggcttttatattgggttgattttattttgggctttgttttagatatttgccactttgtataaataccttttttcccattttattgggtaatgagaaataccaatttctaatatcctaatatggtatcagatgaaactttccattctctctcattctaaacccatcaccttcatcaaaccctaaccctagccatggttcagacaagaggccgttcatccacgccgacgttcgccaatgccgtcgacctcccttctccggttgaagcttctcagcaggttcctcgtgcgactcctcctccgacgatcgtgccgcttcctgaagatttgatttcaacagatccttctccttcgacgatcgcaccagtcgaaggtcacctcgtcggtgcttcgtcttcacagttttcttctctgccacctgagaccttgatcgaaggtgctactccgaccattccgctgccaacttcgcgtcccgctggaccgtctttttcatcgtcgatccctacgatgactcttctggaggggttcgcacctattccctcggtcctctctggttttccagcaccgcctcctatggctccgacggcttccccatcttgtccacctggttttactacctttgacactcctcgggtaaatcttgatcgaccttccattgatgaatgcaatccatatcaccttggaactggagacaacccgagttttctcattgttccctttcaattgactggccaagataatttccagtcatggaagcgcgctgccacgatcaatctggctaccaagaacaaaactccatttatcgaaggtactcttcctcgtcctcctattaatcatccataccgatctgcttgggatcaatgcaatagtatggttatggcttggatattgcagtatgtctcacgtgaaattgcagcgagtattatgtttaaagattcagctcttgctatgtggaataacctccatgatcggttcaaccaaagtaacggccctcggatctttaatctcaagacttctttgactcgcatcaagcaaggtgctaactccgttacaacctattttactcagctgcaatcattatgggacgagattaatgagtttcaaccctttatgccatgttcttgtggctgtacttgtggtgcgatgcaacaaattcaagatcactattctcgtgatcaaattttgtagttccttacgggtctcaatgactcttatatatgctggtgctcgtgatcaaatcttgatgtttgagccacttcctccgctgtccagggttttttccatgatagttcagcaagaacgtcaacgctctcttgctcctccgaatgctatggttgttgccgcttcgtctagccgccctcctccgtctcaaaacaatagcgggaatccttctcggagcaagaaacctaggcctacttgttctcactgcctcaaacctggacatttggttgagaaatgttactttctccatggttttccccctggttatggtgacaaacgcaagcaagattccgccaagtccaaccaagcttcggctactattgttacgggataagacaccacttcacagctgcaactcaaccaacaattgatccaacttcacagccgctccgagtgcctctaatgtgtttggtaaccctaatttttactctattttttggattgttgatagtggtgctactcaccacatatgcaataacattagatgctttactgattttgaccacaatattattgcctctttagtcactttgcctaatggccaacaaattaaagtcaccgcttctggtgtggttcagcttaacaaagatattaggctgaaaaatgttctctttattcctgaatttagattcaatttattttcagtgaatgaaattttggaagataacactaacttgttgttgttttctgaatctcattgtgtcattgaggacccctctcagaatttaacgattgggactactaagaaagttgggaagctcttcttctttgagcaagcaatccgcttttttacttctgatgatttgatttcagcaaataatacttgtactaatgatgatccttggcatttccgtcttggacatccttctatgtacatttctcgttcaataaataaaacattgcaattttctttgaaaccgaatgactctcattgttctatttgtcactttgctaagcaaaaacaatatgaccgctgccccttttgatttgatacatattgatacttagggtcctttccatattgatagcattgaaggatatcgttatttttttaccattgtggatgatttttctcgttttacttgggtttatatgctcactaacaaatatgatgtttcttttctaattcctcagttttttcagcttgttgcaactcaatattctatgaatattaaggccattcgctctgacaatgccaaggaatttaatcttactgccttctatgcttcgaatggcgtcaatcattttcattcttgtgttgatcggccccaacgaaattcagtggttgaacggaaacatcaacatatattaaatgtggccctagctcttctttttaaatcacatttatctttaccttattggagttatattgttaacactcctgtttatcttattaatcgtactccttctaggttgcttaaaatgaaatctccttttgaactcttacataataggcatcccccttatgatcatcttaaggtt

SEQ ID NO: 38635 - DNA, 3348 bp, Cannabis sativa
aagaattcggcaagatagcttgcaagattgatctgaaatgcacagacaagttaatatagttgtagcattatacatatctagcaagttcattaatttagaacatataagctacctgattaagaggatcagacacacttattaggtcatcttcgtaaccatcttcttgatcctacaaaataatgtcaagcacgtttgattgagagatttcaggaaattaaggacttcaatgaaactcttcaaacatgcaggaagattaaacctcattgtaaactttagccatagcttcaagatgttcatttgtagttctgctacgtgatgtgatcccagctgtatacaataaattattatcagcttcggcatcttcagtctgaacttcttcccagtcactgccctgcaacatgaattaaataaggaattggcgttttgtcaaagtatttattttttattttattttttttttggtggaatcaaagtaaattttttgacaagacaagacactacaggatattacctcctcatcatcagccaaaacctgctcttgtatttcaaccaatgcatctgccaatagagccagtatctgcaattcccaggagaaagggaaacatgaaaggttattgctcatgtaatattctgcttctgaacaagtataccttgagtaaatatttcaagctccaaaaaataatcattcaaccatgccatagtgtataatatggaggtgtcaaacaaaatattgttcactcatactcaactgagtgataaattatagtttaatgtacctttgcacgaagtgggaccacggtccactgatctggtgctaatttagctttggagcgagtggttatccctgcaacagactttacaccaaaaaagttcaagcatctgaatcagtaagaaagactcaattactgttaagagtaagaattgaaccttaattagatgtccttgtacatttacttttgctaattcagcatgcccagtagatagcagtaaggctaaagcagtcgtagtcactttaatttggtatgccccattaatctctcctgcacgcaattgacaagtagaaaatctgtaaagtacatctcatttcacatggcatacaataaatttttgtgctgtggaattactaaaaccatcatatcatgatttagatatacacaggacattgtcaccatctgaaacattattatttacacggcaagaagccttaccttgttgtttagtccactccaacatcaaataaacaaacgaattatcatgaccttccgcagagatagtggtcagtaaatcaataaactgttcgacatttggtacactcaagtgggcctgtatttagataaacacaccatgcagagctcattttaagaacgggacaatatgtgaatcacaaagctatgcacgaaaagaagtatctttatagtttggaaaaggaaaaagaataatacataatagtctatttttgtagccttcctcaagctgtagagcaggactaaaaataatttaaattatttatataaatatggacagcgttcatttcagatgaacttagtctgaacataccaatctagcaaatatgactatcaatgagcttttcaacccttctatttgaacagattgcatacgcctaacaagagcagcaatcagatctcgaatgtgaggtagcatttgtgatggaaaatgcagtataagttgcaaaatgtagctaccaacaaagagagatccagagctttccaaatctggatccagaagcctgcagttatgaaaaatttcggaacttagaaaatccctcaagacccaataaacacagttttgatgctctcttaaataaaatattattaagcccactactcgtcaatatcctaagctaggcctacataaataacatgcacaaggataatgccctgatacatctggaaaaataacatgacatttaaatcacaaactgcaaaaataaaaaaggtgtctgtgatgagtgcacagttgtacatttatgcttagtcaataattagatgaattaatatgtatttcttaagtatcgtacagatttaatgtgttttctccaagtgcattagtttgtgcttaaaagacaattttgtgatggattaagatttttgaactactaatttttgacaatattttcatcattttcttaatgagcttatgaaatccaaaatgatagagctcattcccatcctttcaaaacatgttaaaacatctcatttggaatctgaacgcgaatgttatgcacgatttactgaccaaggtcgaaacagtgaaaaaatggtatgtggcgctgtagtgccaaaagtgtggcactatagcaacaacgctatgttctagaaaaaataggcttttgcgctaaaacgaaacctcggagaatatcacatggcactatagcgccgtccgtacaatttgatatttatcttatttttaaaacgtcatctttctttttcctataaaaaaaacattataactttggcttttgggacgactggagagatacaaaaaaaaacaactttgagattagaaagcacattgaatagcaagagagaagagattcgaagttatcatcatcaactattatcattagtcattttcttcttcttcctctttattcttttgtttagttatttaattatgaacatgattattgtggttattatgtttgtgattatgaactaaacactctttttagaatgttgatagaactgttttagattatcaattaaaatttttagatcattctcatattttctcttgctatttatttatgcaattttgtgttaattattatctttttaatgcttgatcactaattagtatataaattttaagttttgtacttgagagatgtaatctaaaatcagacttagaattgcatgacataaaaaaagtgtgagattgagagattccactaattctatgagtttcatttaaagaaaatcatattgctttattattgcttgattgattaatattgaatagagatatcttgttagttaattaagttaattctatcatcactcaataaaggttaatagattacattagaattcttgaagctacaaatcatagaataaattaagataattggtaaattgagattcatagtttgaaatagggaagtcaatgctctaggtctttctgattaaaatcgttgtttgactgtttatttttcagttatttattatttcattcttaaacattatttactttaaattttctaattaaaacataaaaccaaaaagtataataattagtgaaatttaataatcaatccctgtggattcgacaatctttttagaattaaatctttgctataacaacattgtacacttgcagtaaaaattg

SEQ ID NO: 38636 - DNA, 1630 bp, Cannabis sativa
ttagcaaagattgcacagtaattgaaaaagcactgtagcgtgctttagcattagggcgttacatagtatgactcaactcgttggaaagataggtggtcagtgtccatctcttgtacgatatagtagtctcttaaaaaactacatatctttgtcacttccgtgtcagtgctagtcagtcacggatgctccaactgagaaaaataaaaatagcccgatctcttgtgccttggactggactttagatcgaatagccaattcatatcatgcagggacggctcccccaaccctatttggcgtaaagcacaaacaatgcagaaaaataattgatctccttcgaagtgaattgcatcaggcagatcttgtaatagttggccatcatcttaaaatatggatgaagaggcagaattgcgccttgcttagtgtggggtccggaccgcgtgcagatctccttcccgaggttagtggcatgcccgggataaggcacgaaggcctcgacatctccaagaaggcctttagtttgaaggtttttcaacctctttaaagtaagggtggatggaggcaatatccaccgagtcgctttcttatccttgattttcatgggatgggcctcctcaaattcctcctcaacatagtcctcatttaaattgaggacctcgctggatgccaagacgggttccccgacctcattatatcctctatatagcattgttttagaggcctttttcttcttccccttcgccttcattggaggaaccagctgcatgggctttgtcaagttcctcagtctctcccacttccacgacacccttccgcatttcaaaatcctcttcctgtacgggatcctcgtgcaagagtggctctttggcataccctacagcagccatggcaacgagtcgagcaaggtggagatcctcagtagaaacctttctcagggtttgctttatgttcgccatctttttaggtctggacggaggagtagacttaacaatatacttggctatgttgactatgatcttctctagcacggagtgtcttctcaatagccctagacggccctttagaagacattcaggaacgtcttcacagaccctgtatgtccatgtggccgagctcctaaatgaatctcttgtacccctcttcgttgatttggctggggtggtgatggtgttgtacggaaggttccggagaccctagtgaatcattagatacttcccactcgtctaagcttgatgtggatgaatctccacttgatgatgaaaaatctgcgtggagtcttggctaatctttgaggagcagttgaagtaaatcattgtctattcggtgttcaccttttcagaatttttctggattcatctacaaaagaagaaaagagaggtaaggatcgaataaataagaaggcttttttaacaaaaaacatctttgatattctaaccaaaagggatttgaggattaaaaaggaaagattccatcctaatcatagaattaatgcatttaaaatcttgatattttgtctaagcaatgtatgtactctatcaacttgatctaatagaaataactttttactttgattaaaaaaaaataaagagtttttttaatagatttctaccatttcttataagtaatgtaaata

SEQ ID NO: 38637 - DNA, 3506 bp, Cannabis sativa
attttgaattgggatcataaagcatgtaaaatgtgatcaatcttaaacatgtaaataaacacaaatatggataaatttcacaatcaagaaggagaaaaagcaattatcattaactaaagataatgtcaatcaacattcatcatctccccaaataggaatgtagttcataacatccataatcaaatccataactaaaattgacatagaaaatagcatagaaaaattaagagaagagaaaaaaactattccgggccacaagccgctcttgaagtctcttcctttgtttctaggactccaaatctgaatgaatctcacttttcacgaactcctttctaattaaacaaagccttctctttaaaattcgtgaaatgacaaaattgcccaaaaatcccatcattgagacttcgccgcggtgaaggaattgcccgtcccagcgaaagaatttccacaattttgcaaaactctctgccaattcctgtcgcgacgaaggtttttccccgtcggcaggactaggcagcaaagtgtcttgtttgtttttcttcttaattctttcaccacttggcctcaactcttgtaaatactttttttaaacatccggggacctgaaacaaaagaatcaagtgtaaaatagccctaaaattaaaaataaagagtgaaaactaaccaaaaatacgacccgaaacttagactaaaattagcctaacatatacataatattttattttttatttttatagaaacttttatattacttttgaatatacggagctacaataaattacaaggaaaaaattagcaaaatatgcataaatttttgtaatatatatggaatttctttttgttttttatgatatttaagatatcatttggtttctttataagttttttttttttttttctagaaatttattgaaataaacctataaaataagcttatataaaatacatgttatatggtaatttttagatatgaaataacaaatatttttagtaatttataaaaatagtggacatattgaattttattgattacttcttttttttagttaataaaatataaaataatagacaataaagttatttttaattgtgaacatctattcggtaatagtgaaaaaatctctttatccacattgcaaaatgatcatcttgaaaatagatcatactggtactagtcttgagctcaaacgactaacggtatagctaaaattattttttaattgcttccttattagttattttagaatacaatttagttactttaatttattgaataataaaataatttttagtaatccatgaaatgtagttggtatatttaattttttttaggaaagtttgtttttgtttttctttttttaatgtaactcgtaaatactatttggttataaattattttatgaactactaaaattattatataaaatataattattcagaatatatcttgtaaaatgtaatggtaaataagaaaatacgttttaataacttataaagtctttttttttttaagtaaacctataaagttgattattatattaaattttatttgagtttaaaaattgattacttatttaactaaatgtataaaaaattaaagtattacttttggttgagccaaaaatattttggttgaaaaatatatgcttcccacacatcaaaataattacttcaaagcgtaaattacaattgtacaacctttgatactaaataattaccgtttaagcaaaaaatattttataaaggttaaagaataaagataattataagtaatgtttaatatttaaaatatattatatcggtagaaaaaaaaaaaggaagatactcgggacttaggtgaaagaattggtatacacgtggaccaaataaatttacaaacttttgataataaaacaattattgttatatctgtaataaatttcaaatatctgttcacagaggtaattttctgctttattaatgagaatattgatgaataaaggcccaattttgttcttgaaaattcttgaacgggatgtcattaatccaaatgcatatctttctactatttgggccttcatttgttgggcttgatataatcatctcaatgtcaggctttttaaagttcattacttttcctcaaaagtgaaaaattaacaaataattcaattaagggaaacttataaaaatcttgggttttaaacaaatatttacaattttactgttacacggtaaaaattacatttatactgtattgagttttctttttcttttatacagtggacatcgaatatcaagaataatgcatctatcttccatacccacggatagaactaccattaaaaacatgaacacacctggaaataaccattaattccggtgaggttgaacaaatacagtgaaaaataaataatcatggcaaaacaacaataaaacaatactaaaacaaataaaaaaattaaaaaaaaaagattaaaaaaaaactaaacatcttctttacaacattaacaccatatgcaagcttagtcttgaaaaattagaataaaaaaatactaaaacaaacctaaacaaacacaaaacaaatgtaaaacaatgaagcagaaataactatttagaaaaacataaaagaaccacacacctcaaaattcttttgccagtgagctcgtcaaatttatttatgggagaatcaaagtaaaaagaccacaaaaataaccatagaaaagaagaagaaatgtatttatagcctctatcttccacacctacagacagatccaccacagcaacacgagaacaactggaaagtaaccattaattccggcgacatagagcaagaatagtaaaatcggcatcaaataactaaattataacaaaacaaccgtaaaacacactaaaataaataaaaaaaaaaaagaaaagaaaaaaataaaaaaaactaatcatcttctgcgcaacctcacaccaaatgcaatagatgttaaatttgcaagtccagttttgaaaaatcaaaacaaaaaaataacactcttatttttctcaaaaacgtgattgaaaattttaaaaaataaagaaaaaaatgaaaacaagatgaagaagaagaactagacaaagaaatcaaataaaaaaacatatatgttattaaagagaaagagagagtttttgatgaagaagagagtggtagattatgacaaaacaacgtaaaacaacgtaaaacaacactaaaacaaatcaaaaaaataaaagaaaaaaaagaattaaaaaaaaaaactaatcatcttctgcacaacctcacaccaaatgcaatagatattaaatttgcaagtctagtttggaaaatcagaaaaaaaaaaataacactcttatttttctaaaaaacgtgactaaaattttaaaaattaaagaaaaaaaacaagatgaagaagaagaactggacaaagaaatcaaataaaaaatatatatatggttaacggagagaaagagagagtttttgatgaagaagagagtgatacattttgaaaaaaaaaaaaaaa

SEQ ID NO: 38638 - DNA, 1869 bp, Cannabis sativa
ttttttttttttttttctaatatgacattcaaattatgtgatcaattttagaagtaaaataataaataaaaccaacatatataatacatacacatattaaatttaattaaaaatatttattgaaaataaattcaaacgcgggtaaatattatatatttctccatgtaaaagtaaaagctccttgaaattcttttgcacacatatatataatttttggatttttacacaaacacctaaaattgtatataattcttactttttttttatatatatatatttttttaatttttagagatgttgttttttcccatttttttacttaaatgtttcaaaaaataatgtaatttttatgttgtgaaaacataatacaatgtaacatagtgaaaataattattaaataattgcgcaaattttattagaaaaaaaaataatttgtaaaatattaaaaatactctttataatatcttcgtaaatatttttgttgtttttaggtatttattcaataatccctataatttgaaaaaaaaaaaaaaaatggggccacattaatggactgggttggaacatgatatgacaaggataacacaattgagtagtttaattaggcaaaccagatgctaataaagcctaaaaacgtgcagatgtagtggaagtggtagaagtactcttcaaattatatattgtttgaccaaacgaaaaataaatgcaaactttgctattgtttatgggcacaatattcactctcattcaaagcaataattataatactctatacctccccaaccccataatccatatatgtataatatagaataattcatggaaagtcaaattcagcgtatggagttataacggactattaactgctactctagtcaattaaattcatttggtcataattgatcttcttttatagagtaatttgcggcaaaaatacctaagttttactccgagtagcagataaatacctaagtcgtatttttggcggtaaaaatactttctgttagacttttggaatttccgtaagtacctcaccgttaaaggcaggaaagtatccacttgtcattttctcattggtccaaatgtattgatttttattttttaataaaaaaattatttaaatatttaaaataaatataaaaaaatgaaaaatatactataaaattttaaacatatatatttaaatatttttttaaaaaaataaagatcaaacctaagattctcttaaaacctagattactaatcattcaataacatttcaaaaaaaaaaaaaaaaaaatcattcaataaaataaaaaattaaaaaaaaataaaaaaacctaaattactgtatatcgtcttcttcttccaccattatcaccccttcttctttctttttcaatatgcagcagaaaataaaaaaaaaaaacaataacccatagaaatcacaataataaataatacccacaaaataaaaactcaaaaactaaattctaacattactcaaatccatacctagcagttcatgtgcataatgcaacacaaatagaaattggatacactgccaaataaatcccaaaaattagttcatatggagttttgactgttggtacactgtcagctcatatcgtttgctgaagtttcgaaatgccctcggaggagtgatcctgaccgccggtgccaaagaagtttcaggtgctctcttcgtagcaccagatctgatttaggagacgagtttaagtgcgggataaagctgcgaaagataagaaatatattttatatattaaagcaattagatctgacagaaacaataagaaaactcattcaaaatatttttcaaaaatgcataaccaaatctgaagcacccagattccggccacctcctctctc

SEQ ID NO: 38639 - DNA, 1984 bp, Cannabis sativa
tttatcacgatttttgagaaaatcatttgatttgcaaaagtgtgcactgtaattagaaagtcactgtagctgcctaagcattagggcgttacaccttttttggcgaaagtaatgggaattaaagaagttattagttggttgaaatttcaaaattattctagagtgaaggttgaatcaatatagccttgttacaattcaagctattcgtagttcttttagaatattttctggttttggtttagtgcttgaagattataaaaatttattgtgatctttaaataatattgtttaatgtttttgttaaatgatttgataatcaatctgcacaatttcttgcacgacaatctcaatgttatgttggtcatatgtttagggaggggatgtccctctaaactttctgctatctttttgaggaattagttctagattaatgaagatgagtttcataaaaaaaaaaattattatcattattatagtttatttttttgttagtttaaggtggtgtgttgcatattcctgccaaaataattcatatatatatataaaaaatattaatataataggcctaccattttaatgtttttgtagtttagtggagaaaaaataaaattctcttcatttcttctagtacagatttataattttgattcattcttttacttactgttttttaatgaaaaactttataaacgaaaccaaatcagttacaaatggtattaaagtgtatactttggtccgaaccatgccatcaaacattttcatccatttctctctccaaaattaacaacactttttttgtaatgaatgagcgaaacaattttaactattatatatatcatgtaattttaaaatataagtcacgtaattaaatagtaaaaaggaaaagaattgaacgaattgttaagtaatgtgggactaattgaatgaattgatatgcttcaccattcgcggtttattggttgttgaaggtgctaaaagaattttatttacaaacggcatcgtttatctaattttgttaattatgctctttgagcgatttcaagccctcttggtagaattctctcattaaggatatgatggggtttaatttgttggaaccaaattaagttggattgaagcaaattatattttgtttggtattatatagggttatacaacaaatgtaaaacaaatatacaattaaaagattcaaattttaatagtatattaaaatttgtaaaaggattcttctatggggatttaaaaaaataccctatttatagggatttaaaaaaatagaatgattccattgcattttgtagatataaagaagagttaatggccattaaaatgtggtgtattgtaggagattggaattgacttttaacatgagtctcactcatttaatgttatgtttgattgatgtaaaaaaacactcgtttttctttttttttttttaaattacacaataaattaaaatattcatttttctgttaaaaaaatttaaaattaattaaaaaattcttttgacattctattatacttatatcattttaactaaacacttcactattttcttagttgctaaaactaaattaatcataaataattatatatttatttttaaaatgtcacaattcattttttaagtcacattacagttttaaatttttttataattatattttttaatcgatttttttaattatattacattaataaaaattatatttttttcgttttgaaaatgatacaaatttttaatttaattgcaacatacaatcattagaagaacaaatttctaatcatctttaaaaaatcacacaaaataaatattttaatcattattattaaatattaatatttaattatattactttattcatataatactatttaattataatttagataagagtaaatagcggcataagtacccaaaattttgagtttgaaagcggcataaacccaatgattttttttagtggcataagtacccaatgtt

SEQ ID NO: 38640 - DNA, 1581 bp, Cannabis sativa
ctctctctctctctcattttctcttgctgagatataggggttagtgatagtgatttcgaagcttccttattagagcgcctcccaatttcgactgggattgtgacggatggacaactttgtatgattcctttgattttgatagcagcgacgatgagattattgaagtcgatcttgaggatgctgttgcagaaagtagttctgatagtgtggcaaaaactttagtcgaaaagatgatcttgacaaaagcttttaaccgggagaatattcttgatgagattacaaggttttggaagatcattggcaccataaacgtagaaagtgttggtaataacacctttttatttcattttttttttgatatagttgatcgacgcaaagtttttgaaggtggccctttactcgttgaaaagtagcttttggcgctggtcctggatgttgttcacctgacctgtcatatctgtataaactcaccactacggtcaggcctgactttctttattctttttctaagttgattctcaacttcaaccttaaaagatttgaacatgtccaggacttagacttttcatgaagtagaaataggtatgcatatcttgagtaatcatctatgaatgatacaaaatattaatgaccaatctaggaaggtgtaggaaacgaccatacatgtttgtacgtatcaactctaagacatccatagctcttttcacacctaatttatttcttttggtttgttttcctcgatgcattcaatggaaacatcaaagtctaaaaagccaattgaacctagaatttcatcgctcaatctatttctagagatgtcacttaactgtttttgtcataagaaacttgattttttttattatttgttttacgtttagtaccacttgattcaacatttaatgtttcattataagaaacaatagtgttaagcaaataagctatcataaaccataagagagctaattctaatagtatttgaattaatagataaactaaaataattatttttaaatgaataataataatccaatttgtccaaacaagaaatagaatccaaattctatctaaataacgatacaacaaaagtttttattaggtccaaatagtaaccagtacctaacaacaacctaaaatgccctattgcttccacattcatcgacttgccatctcccacataaatatttctttcagcatcactttgctttcagtaactcaggcaaccctgcattgaaatactgatgttagtagttgtactaaaatctaaccactaagtgtttcttggtaccgaagctaaatttacctcagaacataccaaaataagaaatatacatttctttgctcaccatgcaatgtacttagcgcattcctttttcacgtgtcctttcatattgcaaaagaaacaaccatcatcgttgttggcctgagtttttttcttatgtgctagacccttattcttagcaacttcatttttccttttcttgccattatccttggaggtgcttaccaaatgagtacttttagtcttctcttacttcaatctttcttcctcttgaacacaaaatgaaatgagctcattaagag

SEQ ID NO: 38641 - DNA, 1753 bp, Cannabis sativa
agctaaaagttgcattttaaaaaagttgtgctgtaaaattattttgttcttagagtgtaatgttgctcttcacggactactgaaaatcaaggcttggctgaattggaatgcagtaacaatcagcctacccaacctgttgagatgaataggcagagcaaagctctctaaatttcgaaaaatggtcaatgctgctgcaattgcagggctggtatataacatttggaggctgagaaatgctataatttggcaggattgtttctcaaattccagccgaattgttaaagacactaacttgagtgtaaagatgagaattgcaatgtttttgccaaaaaagattaatgatgtagataaagattagttcaatgctttatattgcgaaattgtatagaaagatttgtttgtgtatgattgtttaggccccggatggggtgttattaggttgtaaatacagttttgtgaaatacaatgtcctgatttatcaaaaaaaaaaatttgtaaatagttaaaaattaactgattgaaatttttttgagaagctacagttaaaagctaaatttgtacaactcaatcttaagattaaaaatattttaattaaaagactaatacatttatttgtactaaaatatattcacttttttattatatatttcagaaaataaaaaaattatataaaataagtaatatttaactctttaattttttttattttggtttaaaaaatgttttatatttttatacatatattttatattaacaaactacatcaacctagagttcctgatttttttacatgtgataaaactataatttaaaaatactataaattatttatcaaatgcttattgtttaccccaaaaaccgagcttggtaacgtggacatcaatattcgacatgcggtaaaaaaaaatatcctagagttgagtagtcccgagtcatggcagttgacttggagggtccctagtcgtgcgaccaggttgactcccaaaacactagaatgggtgtttggatcccactaagttgttgacaactcactatcttttcaatattttgtaccatgaagacatgaagaatccaaatccaaggcctggaagctacaaatacacgaaatagcaacctggaagtcaacccaggtgcccaatgcctagattgacaaccttactggagtttcagtttttgggcccgtcttagtgtaaatgggtcaacttttgtattgagacatgaattagacctgtcacaaacatatttgaggcaacagaatcaaaatcgaagcactttcaattttgagcactcagagcactgggtgccctaggcacccagcgtccaggttgacatattgtctacctggggcatttccaaccacaatattgaaaaactatatcgagcattttcttcatattcattctaaatgagaaaacaagtactttcgggggagaaacgaatcgacttggaggccaaatggggacccagcgcccaagtacactttgtcaacctaggccacttccatcagcaaattcagatgaagtcttttgggcatattctccgtttttcattaacaattaagatttgagtgctttcgagaaacaaatggagccgtttgggagttagaactgggacctagcgcccaggttgacactttatcaacgacactttgtcaacctgggccatttccttagccagttttcttgtaatctcgtgagaaataaaaactcaaagtacacgtagctcaaatactgtcacgatacgggaagtgaat

SEQ ID NO: 38642 - DNA, 2629 bp, Cannabis sativa
  modified_base (2279)..(2280): a, c, t, g, unknown or other
  modified_base (2332)..(2360): a, c, t, g, unknown or other
cacggagcacacaataggacaacctgcacaacccatgactcacgaaccacttcgatctcgcgaccacaccacccacaaaccactgtgaccacaccatccaacactgataatatcttcatcaaataatccttttttcatgaatttttaattgtaatctttttattttttttttcatgatttaggattaaatcaattagatttagggttaggtctgtgttttttgtggtttttagtggagaatatgtgatttttgtggttttagactcgggtctgtattttagggggaatctgtgatttttgcctggctcaatgcaggtccgatgtaggcccgatatacggcccgatggtaggttaatgttgaagggcttgaaggttgaaaaagatagcctgataggtcttatatatggctcgataggttcgatagtggtcctgatggtcctcataaatttatgtttcattgtggcgcgatgggtctgatatagggctcaataggtctaatattatcttgttgaattttttgtttctgtgtttggtccaatacgaccaatatagggcccgatagtaggcccaatggtgcctgatatgtccgatatgaggcctgctatagagtccgattgtattttttagatttatgattttttttctagttcgataggctcgatatgtggcccgatggctttgtacaaaatttctaacttctaatttttttgtgtttttttgtagtcttatagagctctacgccttttacttccagcgtcaggatattacactgatcgtgtcacttagtgggtggtatttagtatcactccaagatcaaatcaaaatttgcagagttacaattgttggaaagggtgaaggagaaattccctttcaagcaattctttgagagatagccattacagttttcgagtgcacttatccatcaattgttcatacacaagatcaagtcggataagacagacaaagttcacttttacattgcaaagaagagatgtcaattcagttgagctgagtttgctctagtggctaaggtgaacttgttatcaggacctactgagtccgaagttgaagagaagacgacttcaaaccgattgatagtggagtacttcaatgggaatccatccatctccttgggtcaattgcacagaatctttgagagttgcacgaaaaatgacaatgtgtacaagttagggatggtcttgtttgtgatgggtgttctcactaggaaagagcagaagaccatcgttctgccatttattattagaatggatgacgaccttcagttcatctacaagtactcgtgggggagatttctttcaacatgctaaaagaaacttggagtaaagaattcgtagaaaagaaaaaacataaggataagaagattgaaaaggtaacgacccaagagttgaagtactcgtcttatggatatattgtaagagtcgaaggagtcgaacaagtatctaagagagtgctactcgggtctgcacgacgtggcttggttcaaaaagctgcttacgacaggggaatgacccctacaatcagtggttcctttactattactggttccgtctggacgattactattggtaccaggtgtttgaaaatcttctcaatggggtcatacacactaggtccaatattagacaagtgatcaaacccaacatcggacccaatttaaagctgaccaaccatcagacagattatcggacccctcgagtaatcatccctgatcttagatctaagtacccatcaaattagcatcgggatccaatcgggcaccatcaaactaagtgaaaaataaataaaaaaccaataaaacacaaagaaaagataaaaacaaagaatattataaactaaatataacaaccaacaagattacccaaagaatattaattatccattgaaaagataagagaatgatgatcgagttaagtatcttaagaagtattatgggtatataactaaaagtttgtctattctattaccattgaataacttcggtttaggtttaaaatttttctttgaaaccatgcatatataaagtcaaatttctctcatatatatatatatatataggttaattaagatttttatcttgatatgtaccaaatcatgtctcttgaacttttaaggtcgttaaaaatgtcccttgaactattgagattgttggataaaatgacttttttccaatttttgtaaaaaaaattaacatggatgaaagtttagaggccataatttagtacatgtcaaagttcgaggggtatgatttggtagatatnnaagtctggggagcatgatttagttaaacaatcattgaaatagtaaaattgannnnnnnnnnnnnnnnnnnnnnnnnnnnnacaatctcaataattcagggggcatgattttgtacatgtaatttagtgggcaaaaatcctaattagccatatatatatgagaaatgctaattacaacctcctattacaacctcttagtcaacctccacgtccgaaatcacgtaacgaaatatattttttcatagcagtatttgttatagttacaatatcatccctttaaacttttgaaaaatttcgaataatttacagtaccgaaaacagagtccctgatattctagtttaccacgccc

SEQ ID NO: 38643 - DNA, 2306 bp, Cannabis sativa
tctcatgggggtgatggaggaagttatcctcctcttggtgcgagaaatattagagctgattgtgtgcgaggttatgtaatttaaaaatatttaacttatgttattaatatttatttgaatatactaactcatgaatatttaagcatgacagcagctcctctaaaaaaatgtgggccccataagggataagcacacgagaaaagtgagaaaaccttaaacttccactgcctatcgagtggggcatcaaaggaaaaacttacaaggagataggtccactactacaaaatgtacttttggtgtcagttttaaactgacacttatacttttagtgtcagttcatagaactgacacctattccacagtcacaaaaactcaaacttttggtgtcagttataaaccgagactattgacttttggtgtcgttttaaaacagacacttaaagtatacatatatattttttttcttttagtgtcggtttaaaaccgacactattgagttttaaatttttttggggtcttagtgtcaggctttttatggatttttattttcctttttgctgtgctttataaccaacccttaaggtttttttttttgagtttttagtgtaggttttaaaacgacgcagtattcagtgaaacaattataattattcgtcaattttcccacctacaatataagattttaaaattaacacaaaatatcaataataaatggattgtttagagttccctgggcccatgtcatgtacactttagattttttgagagagttaggaatgctcgtacgatagtacacaaatccagactacataagttgggcacaagaacctgactctgtgaagaagaggagcaaagcaatgttattaatgcaagagacgaagatctatcacttgctcaaactattttttggaagacatcgtgggcaccaaaaaagttacgggtgtctaattagcacaagagagatggcagtaccaccttcatttacccaacttcctccacctcaagctggtgtatatgttggagctgatgtcataacttatatgtagaagcaaattagaaagttggagtaacttgttaattaggacaaattgtgtcactctggaatcgcagaattcgcctcaacaatctaatcatcccgctaatggaggaccgagtcagcaattatattcatatgtagtatttatttctttcaggagctcttttattagcatgtttagtatttaggtaattaaacttataaccttaaaaatatataaaaagttaatttatgatatttttattaatgaattttacttttatcatttattgagaaatattaataccaaaataaaaatgtgtatgatgtatttattatgaaaatttacattgaacttaaaaaaatgcttgtaaaaaaattattcttggtaaaaggttctaccaagaataatatttttggtataaacgagccaactgggtcaaaatattaggcaaccactgagaacatatctaacttttactaacaacacttgtttttggtatagcctttaccaagaatatcaatgttgtccttggtaaaaagttatttctaacgacgagcttctaacaaagactttataacgagaacatgtcctcgagaaaagattttcccgaggatttttcaacttgtaacgagaacatttgtcctcattacagaccctaattttgtagtgaataatataacaaccatgacaaaaaatatataattaatcaagttttaaaaaaataaaaccagtttccagactcttaaataataaaaaataaaatcagtttcatcaacaacataatgaaaaaaaaacacaatgtgagaaattataatctaaaaaccataccaagtttaaaaacaagtttcatcaactttaaaagaaacttattattaaattaaaagcagtagaaaaaaattaaattcatcaataacgtaatgaacaaaatacaatacaaaaaattataagataaaaatgttaccaactttagaaacagttctatcaacattaaaagaaactaattatttaaaaagtagcaaaaaaaaaaaaaaatagttccattaacaacataatgaaaaaaaaaataatttaacaacgatacaaattttaaaaagggaaatttttattaatatacgtattagatattttaataacataattgacattgattaatttaatgccattgtgttaacgtgacacatcaacatctttaccagcagtaactttgagaagttgaaaaattctggagtcaaatgtggcagaaataaagggcagcaaggagctctcttcaatccaaaaagaggggga

SEQ ID NO: 38644 - DNA, 1082 bp, Cannabis sativa
gtattttttaacttacccctttcttttatttgtccttttaaaattatctgcgtttcttaataattgtatttgatgtcgtttttagtttgttgtcgtttctcattttactatcgttttcaaaatttaatattgtcgtgttttaatttttttttctcgctgaaaagtcgtgttttaaattttattgtcgttattccaggaattgttgcagaaagaaatctcataaattgaccaatgatttattatcagcgtaatggtttgaaacaaaaaagttggatttggttcgattagaaatatggtgtcgtttcaataaaactttgtcgtaaacaggtttacatgaaagtattgttttcttttctttgcttacaaatatatcgttttattagaaaaaaaaaaaaacaaggcaatggaaaactgaagaagtgtactcagagagaaaccgagcgacgttattttgaaaatataaagttagtgttacgttaatctcttattaaaattcttaatttccatacttaaaaatatatgttgatttattttttttctaatttttttttcctattgttctttatattgtaaatttttaaaattttttgaataggtttaaaaatttttgaacactggtagtaaagtggaatatcaataattctcttttcggtactgtaaattatttagaattttttaaaatttagagagatgatattataaatataataaatatcgctataaaaaaattaaggaaatatattctagtatatgatgtcgagcgtgtaaattgattaaaaaataaataatttgcagcataaatacttaagctatatttttaaaattttataggtatttggttgttaagggttaagtaaattgacacgtgtcaatctctgattggttcacgccattacatttttatttttttaaaaaaaaattagtttaagtatatcaataaaaaaataataggtgataataatttcacatttaacaatctaactatctatggagtaacaaaaatataacttaagtattattactactaaaaattaaacttaaatatttatttacaatttataattaaacttaagtatttatac

SEQ ID NO: 38645 - DNA, 4299 bp, Cannabis sativa
agagtcagtcaagtcttcttcgactgggaagtgcaggaccagctattagtttcgtggctcttatcatcaatgaccgaaggtcttctcacgaggatggtaggttgcaactcggcacttcagatctggaacaccttggagaaacatttcacgctgcaagtgtcttcaaaaattatagagtttcgcacaaaacttcagaacctcaagaaagggacactaagcctcaacgattatctactgaaagtgaaacagcatgtcgaccttctcgcctccgtgggagaaaccttaagtgatcgtgatcatgtcgcagctattttcaaaggtctttcgagcgagtacgatactttcgtcatctctactaacactagagttgaacagtactccgtaggagagatcgaagctttgcttttggcttctgagtccagaatcgaaaaatcagggaaggaagtggatatgagtgctaatctcatcactgatgatcaagattcgttgatcgaggctaatatcgcatggagacgattcaaacaacagtatgggcgtggaaattttcagtccaatagagctggtcaatttgtaaatttcctcaataacagaagtttcaatcgtgcaggtgaatctaactttgcttctggtcagaattctggtggtagaggtaattttttccagaatcgagggggcaggtctggaatgaatgtgaacaataaagttcaatgtcaattgtgcttgcgatttggtcatacagcacacgactgcttctatcgctttgataagtccttttcaggttctctgtctggtgctacttcaggtaacaatgcttcgatgcagacacatttaccacaagcaaatattgctacaaacagcagcatagaagatgcaaattggtatccggactcgggggcaactaatcactgcactcctcaagttcagaaccttgcaaattgttatgactatggtggacaagatcaaatgtatgtaggagatggtacaggtttgtcaataaagcatattggtcaatcttattttattcctcagcattcttctcactctcttgttctaaataaccttcttcatgtgcctgaaattacaaaaaatctcattagtgttgctaagttctctaaggataacaatgtctattttgaatttcatgctgatgtttgttatgttaaggaggaagtgagtcataccactttgctgatggggagacacaggaatggcctatatacttttgaccaatcccaaataggtcctatctactcaatccctgaccaagccaagaccaccaactacagtcagccagttcactctcaaaccagcagcagtagggactaccaatcgtccaagtctaagtgtacattcatagctactctaaataactcctctgtcactgtgtcaaattgtttcaaatgtaatgccaatgttcaaaacaattttactttgtggcacaatagactaggacacccctctgaaaagattgttcaaactgttcttaagtcttgtaatgtccctattcttaataaagattctcaattttctgtttgttcagcttgttgccttggaaagattcacaaatttccattccccaaagcatctactactattatttctgagccacttcaattagtggtctcggatctgtggggtccttctcacacaacttcctttaatggatataaatactatatctattttgtggatgcttattcaaggtttacttggttgtatctcttgaaaaataaatcggatgtcttgaaaacctttcaacactttaaagctgaagctgaattacaattaggcaaatctattaaaactttacaaacagattgggggggtgaatataggtcctttacatcttttcttgctgacaatgggatccaccatagacatccttgtcctaccactcatcaacaaaatggtcttgctgaaagaggcacaccagatgccggtacatcgggtactggcacaccagatgctggtgcatcagatactatcacaccagatgctggttctccactacaaagaggttctgttttaccagacaccaggcctgcacctgcattctcatctccagcagccttacctcttctatctggctgcttaaatgcccctggcaaaaataatgctcataggatgatgactcgatctaagctgggagtgtttaaacccaaagcattcatggctttaagggaaccaacatcacttaaagaagctcttcaacaggagcattggaataatgcaatgagtgatgaaattcttgctcttgcaagaaataaaacctggattcttgtgaaactacctgaagggagacaagccataggatgcaaatgggtctacaagaaaaaggaaaatccagatggtagtgttctgaagtacaaagctagattggttgcaaaagggtttcatcaacaagcaggttttgacttcactgaaacattcagtcctgttgttaagccagttacaataagagttgtactaactcttgctctctccaagggctggtctgtgagacaactcgatgtcaacaatgcatttctaaatggtgatttgcaagaggaagtttacatgactcaaccatcaggctttgaaattcctggtcaagagcacttagtgtgcaaactaaacaaggctttatatggactcaaacaagcacctagagcttggtttgacaagttacaacatagcctaatttcccttggcttcatctcttcaaagtctgatcactcactgttcattaatcagtcctctcaatccacaacactagttttagtgtatgttgatgatattttagtaacagggagtgatgaggctactgtaactaagttgattgccacactcaatactcaattttcccttaaagaccttggtccacttaggtactttctgggaattgaggtgaactacacagattgtggccttcatctttgtcaaactaagtatgccaaagacttgttgatcaaagctcaaatgttcgggtccaagccctctccaactcctatgataagtggcctgcgcttgtcagctcatgagggggaacctcttgatgatgttcagatgtataggtcgattgtaggtgctttacaataccttacaattactagaccagagctgtccttcagtgtgaacaaggtgtgtcagtttatgcaaaatcctctatctacacattggcaagctgtgaagaggatacttaggtatgtgagtggtacactgagtcatggccttcattttactagacctgaatcctatgatttgactgctttctgcgatgctgattgggcatcagatccagatgacaggaagtcgacttcgggttatgctatatttcttggttccaatttgattgcatggaagagcaaaaagcaacagactatttctaggtccagtactgaggcagaatatcagagtgttgctaatgttacagctgaactcacttggcttcactacctattttctgaacttaacattcagcttcctcagcctcctactgtttggtgtgataatcttagcactataatgctcacacagaacccggttctacatgctaggacaaagcatatagaacttgacctatactttgtgagagagaaagtgatgaacaaaatgctaagtgtcaagcatgttgctgccattgatcaacttgcagatggcttaaccaaagccatttctagtcaacgattctcaacattcagaagcaaactcaaaattgaagacctttcaattatgagtttgaggggagatgttaagaccactgttgagagttagttagtttgttataaagtttgttattgttgtttggctgttagcttgatttctggttttctgttatagcagattgtttaatttctttctctgtataaatagtctgtaacaatctttgatcaatgagattgtcttttcttctccattctttctatagttctttctctctttctttctctttgtttcagctctgttctttgatttagttctaatggcatggagatctaataatcttcaatagccaaaattcaaaattattttgtcctgttaattttcccattttgtacttggtttatcccatgataagtgatccacactcaccacaccaatttgttgagaaattgggttctgaaatcaccacaaaatttgaaacagatcagaagatcaataacaccaatatgttgtgaattgtatacgtcattaattcgatcgtttgctttgtagaaactacctgtaataacgaacttgtgttaggctatttttagcctatgttttggatccaatttatgtgcatttctagctgtgttgggacggaattacgcttgtttt

SEQ ID NO: 38646 - DNA, 2205 bp, Cannabis sativa
tatgatcctcagccaaacacacaaaatgcaatgctcaaatacaatccaatttcagaattgaaacaataaaagaaaagagggaaagctacctcaagagcttaacccgcagcttggacaacaatctccttcaagaaaaaaaactccaaaacacttttaatgcaagttttcctcacataaatgaacaaagtttcaaggtgatgttaagagagagttcttgagaaagagaaaaagacaaaaatgattttttttttgtttttcttttaatttctgaaaatgaattgcttagttcatttcttgtaaaaaggtggtcaaaagaccaatctgcccctagggtctatattccacttaaaaatcattaaagggcaattcaagcatttcattccatatacacattgagatattcccaaataaattatggtatgcataatcacgcaatgcactaattttgaaccctaaacccagttcgagcccaaaatatccgattgtaactataccgtgccaacttatcaaaatcacatgcagtaagataatatgaacatgctatatataataatatagtctattagcataatatacatcaaaattataattacgaaaatggccctaactcataaatagggtcttataaaagatagttctcaaaaaattttatataattaattatataataatatgactactcaattatagttaatttattttaattagggctgctaatctattttactagtctccagatattacacgttgctcaatacttcattgatcatcaaatcgtaccgattataattcttacgccacaataacgctaataagcattttctctatactaaactttagcaatcaaacacacattttctaccatgcttttttaactggcatataatcataatataccatacttttctaatcatatttctaaaattatcatataaacaattaatcacataacaggtaagaaaataatacttactatactatgagtcgagcttgtcttcacagaaaatcagtcagtcttcaagacctttaaaatcatggttgctctaataccaatttttaacaccctaactcctaaggacgtcatatgtatacttttataaattagtttataataataaactaactgtttaagtaaaattgtaatttaattaaaatcttgctaattaatcttgaaacataaaatttcttagcacaattctttaaagattgggtatccccttttaaaatattacaaaaaatttcattacattattttaacaaaatacatattaaaattcagagtatcataaaatatgaatcctaaaaactcggtttcacttgccggataagttgatatgtatatttgctaaaaaagatccatatctcatgttgcccaaacgttttctaaaccttacctgcaccacatagcaccagtgagtcacaaactcaacaagaaaaataatagcttaatatttcaaattagtacacaaataacatcaatttaaacttagataatcacaatcaaacaattaaaatcagatatttacaaatatataagcattcaataatgcacgtacttttctaatataacaagggataattccaaaaaatacaaaaacaacaaaaaaaaaattacaaaatacggtctgtacggagtttttaatatttttatgattttttaaactttatttatataaaatacggtcttttggtgtatttttattttgtattcttgttattttgttattgattttttgttatttgtatatcattttttatgttgctttgttgttgtttggatgttattttcttgttactttcatgtggtttcttaatgttttcttgtatttttataaaataccataaatatatatataaaaaaactttaaatgtaaaaatgtaaatttttttacaaaaattggtatttcgtgtaattatcccatgtcacaagttatatccattactttataaagtaatcaattttgtcgttgtctaataagacaaccctaatccctaatccgacattcaaatataaccattgttgtctcaaaagacaatcttgatatctttccagcatccatatgtcactactgctacttaatgagataaccgacaagtaaaaaatctaacaacaattttaagttatagccgtgactttttttcacataatggtaatgatcgtgtcttataaatgataataatcgtatcttataaacaataataatc

SEQ ID NO: 38647 - DNA, 1434 bp, Cannabis sativa
ctatttttaccattttggaaattacatgctccattttgtcatttaacaaaacagatggtcaaatcggtaacttttacaaaacacaggtccaaaataatattttccaatactcaaatatatggtgagatacaaagagataaccaactgaaaaagatatctcgataaaaaagatttaatttaatcatattaatgacactatttttgtcaaatttttatccaatataaaaaattttgtcataaattattcctttaatatttaaattaaataaaataaatacaaattatatatatacatatttatatacaaccagatttaattaaaaaatacaaaatatttttgttaaataaaatccaaaaaatggaactaacatatttgactgtgagggtatatattttctaaataaccactagttgtttccattcatttgttatatttatgttgtattgtgctttagctatgacactttttctcttataaaggttattagataatatcttaaagaatttgtgtttggtagttttgttatatttatagttgttgaaatataattttattaatttaatttttttatttgatttgatttgtgtagtgttataaaaatggataaagtgaaactcaaaatgaatggacttccaagcttcttgaacggatgacatatagagtaagtagctagagtagttatataataaattaaaaacttagtattattaatattgtagtgattaggtacaaatttatgtttatacaattattaaaataaattctttgttcttgagaatttataaggtacaattttaaatattgagggcctgtgttcatattagagttggtgtaagttttgcattttaatttaaagaaaatgttgtataattatttaaaatttgtgatgaaatctaagattgaaattttatgatatatatagtgtagcaaggtgtgtacatatcaaatattaaattaggtgatattttgtgttattgatagttacaaataaaagtttggtataattttttttacttcttttctcagaaaagtttggcatactataatgaggtttttataaaaatattaaactttgggtaaaaatttataattttactgttacacataatttttttacaaaaatactatctttttataaaacaaccgtaaaacaacaaaatagaataattaaaataataatagaacaactaaaaaatacttatgaaacaaccgtaaaaatttaacacagtacacaatataaaacttacacagtatttttttaaaaaaaacttctgccccaataaaaaaaataaaaaaattaaaaatttcagtatgtggtgtaacttctcatataatttaaacaaaaatattaaatttaaaaattaatgcaattttattacttaagtattataaatacatattgtaaataatttagaatcttcctaactaattgg

SEQ ID NO: 38648 - DNA, 3172 bp, Cannabis sativa
  modified_base (2103)..(2111): a, c, t, g, unknown or other
tttgtgcaatataatgtctgatttttatcaaaaaaaaaaaaaacattaaattctaattaataaccgatataatcaaattgcaattatatatattaaaaaaattatttgtatttattttgtataaaataaaaatactagaaaaattaataaaatatatgttatatttttagtggctattagttttttttttattgaatttataacacttgattgatgttttgtatatttattttgatgttgtttttttgttttttaatattttattacatggtagtgttgttgttttatttattttaaaccattagttgcattaaacttataataatgatatatttatagaatattaaacttaaataaagggtaatatttaatttttagatatttttttttccatatttttaagttaataaaaattaagtttatacggtgctacaaaaatagtttttctcgacgtttttaaacagtcgtttaaagtattcatgttggtttctagaaccgtcttctatacgccgtcacaaaatgggcaaaatagtcgacagttaaaaactgtcactaatgtggacttctaaaccgtcacctataacagggtataggcgacagttttaaaccgtcaagaatgtaaaaaaaaaagaaaaaaaatacaaatttttctgccattaatggcagaaaaatttgtattttcccccatttttttcctacattagttttataattttacctaaattaaaataaaacaactaattaattttattacaattacaactaactttaaaacacattaaacttatagaataataaaataaatatgtataataaataaaaaagtatataaataaataaatgtattcataccgagatcggagagagagggagacggacaggaggtggtggtggtccgacgtatgagtcggagatgagagggacattgacgagaggtggtggtggcccgacgcatgtgacagagaggacagggagaccgacgggaggaggggtgggtagagatcgatggacgagagagacgagaagaaagggagattgagagagggagaaagacggcgagaggagggcgatcgtgcagaggcgtggatggggttttcgagggttaagattttcgtcttagggtgtgggaaatggagaagaaataggtgggcatgtaggaaatagaaaaaaagtaggtgggcacgtggaaaatgttgcgagaagtaggtgacgattttttaatgggcccttatacccaacggtttaaaactgtcaggtatagtataggcaacagttatagggtatagtataggtgacaattttttaatgggcccttaaaccttcgcctatactatactgacggttttaaactgtcagttataagtctctcttaaaaatttgcattttattataaaatgtcacctagtttgtttactacgattttaaaccgtcgggaatactaaatttttcctgacggttttaaatagttagttaatttttttagcaatggtccccaaaaaaaattatttttaggaccgtagcgaattctgatatttgtagtaatgtataattggatatacagtttaaaaattgatacaatccaattattaattggattggattggattttgaggtctaaatggtttggatgggatgataattttctaaatcaaattattaattggatcgaattagattgggaaaaagcttagatttgaataggatgctcaaccctaatcaaatatatttatcactactacaaataaccctttctatgtccctttttcatgtccaacaaaaaaagtgttggacataattttttttttcaaaaatttcatgtccaacattaatggactaggaaaaaacacatatcatgtctaatattaatggactaaaaaatgtgttatgacataataagttaaaaataaaaaaaataaaaaaaaaatttccaaaagaggaatgtgtccatttgggctggacgtggtgaatcttgcctcattcttcaaatataatataatggtataattaatagaaatagtagaatgtatactaattcattaaatagttatatatatactgattttttttagaaattacatctgaataataataataataataatnnnnnnnnnaataataataataatgtatattttagtatataaagattgaacacctcattcctttgagcgcgcgggtcactcaaattttggcgcctaatttttcactttgtctctttttgcttcttttttttttcctttgttttaaactattttcttttttcttttttattttactttatttctctatgtttattgttgagaaatcccttatgtctcattctttgcctctgacgatcgacctctgagaaagtggccattcttgtacaaagagagcaagcccaaatcattgtccagcaaactctctcttcaaactgccttaattttgattttgctgcacccaaatctggtgaggtctttttttttttttcctggacttctgactttgaatcctaaaaagtggattatgtaaatcctttactttgattcattagcatcaaaatgtataattgaaatcaattgatgcttgagtgagattttttgcatttctatttgtatttgattaaagggagtttctctatttctcaatctctcttttatatatactttctcttgatctctcttccttttactctatattcactacaaaaaaactgacttttgccggcgcatttttgcaccggcaaaagtacactgaatgcaccgttaaagttttgcatctgagaatcttggtcggtaaaagacttaccaacgcgtagagtaaatgcgccggcaaaaccgtgttttgccggagagaaattacgccggtaaaagggaaacgccagtgttggaagatacctttatccgctttgagtctgctttgataaacttttgtgcgccggcaaaactgttggcgcctgttggcgccaatctgaggattggcaccaaaagttttgtcggcgctataaatgcgctggcaaaactattagcgccaatccggcgcaaaactattggcgccaatctgaggattggcgccaatagttttgagccaccttttaccggcgtagtaatgcgccgacaaaagtatttatattttaaaaaaaaaattaattaattatatttgattaattataattatttaattttttaaataa

SEQ ID NO: 38649 - DNA, 1634 bp, Cannabis sativa
tataatcaacttgaagacaattcctaatacgaacggatatagaaaatataaacagttttgtcatagcacttttagatcggattacaattaattttattttgacaaaaactaaattcaggatcctatttgtactattttgaaaaatacatagtctattttgtcatttaacaaaatagaagattcaattggtaacttttacaaaacacaaggttcaaaatagtatttacccttattacaataatattttaatataatcaatataatttatttattaaaagtataaataattttaaaaataactcacttatggttatttaaatttttgaatatacacttatatttattagttattcacaaatgtattaaaaaaaataaactgtaattaaatgtaatattatgtataaatattatatatttataatagagcaatttgcgacataaatacttaagtttaactttcaattgtaaataaatacttaagtttaattttttgcataataatacttaaattatatttctagaactctgtagatacctcaccgttaaatattaaatcattagtacgaactaatttaattaaattcacaaagtgcgaatacataaaaataataagttttttgaaaaaaaaaaataataagttgaatattaatttttatataaaagtaattaatttaattcaatccatacataatagaaaaataaatgagaatgactattttttggggagaaattactatatttacgacaagttatatatatatttttaatttggattataatttaaattgctgcgtgaattataatatagattacaaattaagttgagttgtgatttgaattgttgcctaaacaattaaaacatttattgtaaagcaagtatatttataatttataccaattttacggtttaaatgaaaaaaaaaatactctcaaatgtataaatgaagaaatattttttttataagagatagaaagaatgactattgactacattagaagagtgagttttttttttttttctttttttttttattatagaaggagaatgagttgttcaattacttgcttatgatttgtcacggtcgaaatagcaaaaacgtgggtcccctagaagtcggcacttgggtacatgggtccctacaaataatacgatgcagatcttgccttcccaacttagttatattcttctctccaattctcaaaatatgatattgattcaacggtcctgatgggtccatctccaattgttttctactaaatattttagtggggccagtccctctatttctattttctcaaacaacactggtagatccaccgtccacgtcactctttcacaatgccaaatcaaatctttttttggtttatgtggcaaactctactctcttatggttgtgggtcccaattagaggtaacaaaatgtgtcattgtgtcgagtttgtattatattttatgactcgtttttatatttcgtgtcagacgtattaatccagtttttgactcgtgtttaattttctcaattctaacttgacccgtaaaaaatcgtatcgtgttcgtatcgattgtgacctgttttgctattattaaagttaaaattataaagaaaaaatataaatttagattctattaaaaaa

SEQ ID NO: 38650 - DNA, 3247 bp, Cannabis sativa
tttttttttttcttttgattattattatatttttcccactgtggaaaaatctaaaaattatttatttcttccaatcttaataatttttaaaagacaatatcgttcgattgcatcatgacccatccagcagtatgggccatgtgattcaatagtaaatattacaaaaatatatttttgatcgaattcctttattttattggctaaagaaaagattttttttaaaagggtatttttggaataatgatttgctttacagcggtagtgtggtcgagattatcgtttaaacgagaaaagataacccactctcctactctctacgcgtgcattacacgtaccagttaaaatgttcaacaaaagacaaagctggtgtccacgttctgacgtgagagtggcttagtatgttataaccgttgcccacttcagttctccgactcggtcacgattctactcacaaaaagtacgttttggtcgtccgagtttaataaactcggtttgaactcaataaaagttcagttcttttatttaaaaaaattaaaaccgttttccttttctctctcaaactcaaattttcatgggcaccatttctttttgatttgatgtcgtttattaacagtaaaagccataaccacattcacaggtggtgtttttgatcattattattcttttctctcactaacccaatatatctcttttattaagtctttatagtttatatataaggtggtgatcaaagagagagagagaaaaagtatattttattaattattagttccgccatgaatgctgctttgcttcctccatacccatctgggctctactttttctaaaacttgggcattcatgactttacgaaactgacctaccaagcaaagcagaacagaacaaaaaaaggaaataatactttggccatgaatggttgtagcagtagaagaagtagtaagatattcaaagctttgttctttttaataccaattagtgtcttttacttcttttgtcgccaaaaacgttagtttggttttttctttcacctggagataaaaccaaggaacacccagattacaaaatttgatcttttgaagctttccaatgtctacgaacccgtcaaagctagaccttgaaaccatgtcattctctgaggcttttaaaaagtttaaacgttttagactgtttgagccatctttgggtgttctggggttcttttttgtcatagtctgtgtggttttttgcttcttttacttggattcaagaagtttctctaaagggtatcgattctctggccaatcagagcggttcctgtggttgcagactagagggtccgtagaagaaaatcatagagttgagtttcttgaagaaaaaggtgactcttgtaatgttttcgatggtgattgggtttgggatgaatcatatcctttgtatcattcgaaagattgcccttttttggatgaaggctttcgttgctctgagaatggtcgtcctgattggttttacaccaaatggagatggcaacccaggaattgcaacttgcccaggttccccttttttctttcctttctttctaagtcaaaattattattgttatttcatttaaggtttctcatgcatgtataaaaactacctaggaagactagaaaaacaaaatagattagttaattgtgttgaaggtttgattattagtgaaactttacatgatcaatcttaaattgttgaagttttcaaagaggactgatgatgagtttaataactccactacgtacattcacaccaaacaaaatatttgggttgttggtggagttatggggtgatataattaatggtatccgaataatataaaacataaacttggaaattgtctttgtctgttattggatgaattttccttgcataaccaaaaggataaactttctgggctttttgggttggtgctaatgcattaattattgatgttttcgtatatcaatattgattggtgaaagattatttattatttttagttgttttccgagaaagtgataaccattttttttttagtttccatagatgtcataatctgcttctagtgagaaagcaagtagtttagtttttataatttggtgttgttttattctggaaatggttatgcagattaatagctaatatttggttagactttctatacggcagtttttttttgtattgacatgatttgctttgtcctttattttctcactttatgcccgtgaagtttgatggagacatggaaaataattgatccaaaaataagtctttctttcattttaatttttccgtgaacataaaaatgatgttgttctcttctatcattttctttcttgttttccgggcttttttatttcttgtaattttgttattatccgacagtcctatcattttcttgtctgtattgaagattctctaatttctacctagagttacaacggttgttttttatagttgtaaaaagtactgatacgttggttactgatttgaaaaataaacaggtttaatgctaagttaatgttggaaaaattacgaaataaacggctagttttcgttggggattccattggaagaaaccaatgggaatcactcctttgcttgctttcttctgcagtacctgataagaactcaatctatgaagtgaacggtaatccaattacaaagcacaagggatacttggtgttcaagtttaggacttttaactgcaccatagagtactacagggctccatttcttatactgcagagccgcccgccttctggctctcacgaaaaaatcaagacaactctgaaattggatcaaatggattggacatcttctaactggagaaatgcagatgttttgatcttcaacacagggcattggtggaactatgggaagaccataagagggtaactttttaatctctttgaatacttgatgtctgatgatttgagcactttagagtgtggctacttcattgtaatgcatatatggtttttgtaagttttggtgaaaggtagctaaaaaacttcataacatttttgttcaggggctgctacttccaagaaggggaagaagtaaagatggaaatgactgtagaagaagcataccacaggtcaatagagactgtggttcattggattgaaaatcaagtaaactcaagcaaaacccaagtcttctttcgtacatatgcgcctgttcatttcaggtttgttccctttcctcgaagtctttctagtaagaaacaattaaacaagtttgctatacctgt

SEQ ID NO: 38651 - DNA, 2990 bp, Cannabis sativa
tttttgtggtaggagaatggagggtattagatatgttatttatttttctttgctctttggataaaaagtgttgtcaagataagtactggttgccgctgggttgcataacataaaataaaggataactctaagactgctgtcgtaggaaaacaaagaaattgatgaacacatctccctgttattttcgctattcactttatgtattatgaaactaaaaccaatgtacgtagacatgttatgttgtgagtgtactcattttgttcatgtgatggtaaaggatatggaagatcagtttttcatatagtatctttggctgtcaatataagaatttccatctcagtgaaagtaggggcttattatgtatattctttaaatatgaaaagtctatttgtgatgtctttcttttcttgtgcttgttctgtatatcaaactttgtggatgctcataacctcttctgatgtttcctgtctcagctatcttgttgcggctgctggtttgcagtgtgtgtggagcctttcattggccatcgttgacatgtatgctcttttagtgagacgctctttacagaatcatcgggttgtgagctttttcactgttggtgatggggtaagattcttcatagcgaaaaatactctagcaaacagatagtttcgggagatgcagagcatgatccctgatctcttgaccaataggtttaacgtggtagattagattagaccatggggtgtgtttgccttgaaccagttattttatttatttctctcttcaaactcgcacttttcatggattacatatttcaatttcgcacgagccctttctttagttacacggtgctcattttcatgttttaatcaggacccttctttctgctgcagatgacttcaactcttacattcgctgcagcatgtgcttctgctggtatcacagttctgattgacaacgatcttggtagctgcgcacacaaccactgtgcacagttcgaaactgctacagccatggcttttataacttggttcacatcattaccatctttccttctaaacttctggtcactagcatctcggtgagtgtactacaagaatgagaaaacttaaatgaaatataagaacgaagagcagcttcggtttgaaaatgctatttttcttctttttcgtcgctgtgtccttgtgtgacatgttaccaaaatgcccttgaatgaaaaaaaaaaagttggttgtaattttgtgtatagtttgtgtgagtcagtctgtttcaacaatacaaaagatttcaagtggtggtgagatataatgggtggttaacatacataccctctcaacctgaatattgaatatattggacatttttgacatagtatcagatatatttgtatgcatataggtggtttttgatgatgttgttgtttatgcaaataggttttgagtgacatttttggcttattcttcttcttcttcctatggttttgtttagtcattttaggatggttttattttgtttcttagtcatgtgagcattggttaaagacaatatgaattataaattaataacatagtaatgcatacttttcatgaaataagaatctcgtgctaggttgtcatcatgcaacttctcaaccctttttcttttcctttttgttttttaatacaaccactcacatttatatatattaatgagtaaatttgttggattgtaagtaacttagagtattttgaaagtagttttaagattattctaattttggaacaaatagtgcttagtaatatgagagagagcatacattatcataggatcacaagtgaatgaaactaagactaaaaagtcctaatttcctaactttttttaaggttaattaggatttttgctccctgaattttgacatgtactaaatcatgttctctgaacttttaaagttgttaaaaatacctcatgaactattgagtttgttggatttaagggcttttgtctaatttcattcaattttactatttcactgattgtttatgtactaaactatgttttccaattatgatatttatcaaatcatgcatctcaaactttgatatgtactaaattatgcatcttgaattttcattcatgttagacttttttattaaaattgaaaaaaaatccttaaattcaacaatctcaatagttcagggatatttttaaggactttaaaagtacatatcaaagttcaggagtaaaaatcctaattagctttattttaataatcttgatatgagcgagtaatgcttatttatacattaatagaatgattgagttgtatgtatgtctcttacaatcaactatgattgcttgaacaaaaggagaaatgttaaaatgcactaatataatattgttataatattgttattgatataattaaatattaaattttatataagtgaatatattaatttttatagaatattattaatttattacaagatatcacttgtggtgctaaatactattgatgttttgtggtactaaacactactcgtgccttatagcaacccaatttccttctgtcttacgtaaacaattcccacttaacacaattgtgaagccaaaaatcacaacttatatataaagatattttataattattaattagttatgttttttgatgtaacaaatttgaatacgaagtattaattaatgagatattttttataaatactataaaaagttaaaaaaaaaaattataaaaatacggttatagaaaattttgattttttttaacagtttatacgtttttatttacaaaaaatatggactattgacgtctttatgttattttttttttattgtaatgttgtttttgctgtttttttctattttatgtgattctcaatagaagattagaatataaaaaacttatctatataatatatagagacacgattttgtcccgtgatgtacttttacggaatgtatttcgtggtacattagatggatatcagggtacattagatgagtttcagagt

SEQ ID NO: 38652 - DNA, 2227 bp, Cannabis sativa
aaaattatattgtaaaaattagtaactttgtaatatatagtgtggtgcagtttgaactgcaattattaaatttaaaattgcaaactgtaccgcactgtgcggtttaaaaaaaatacaaattgcacccgcacaacaaaagatttcaaactatattttttatgcagagttgtttgtacggtgtgggcagtttgttgaacatccttagttatcaaattgaaaagtttccaacttttgaataaacttaatcttgtgtgtttgcccacaattaaattgattcaatctctagttcttctctctattaaatacatgtttaattagtgtccatgaccttgcaatatgatacagttcaaaccaaaaagtttcaaaaggagatgacacattagatatctaagaaaaaacaaatagaaaaaaaaaatgaggcaaaggagaagaagaacagcagctctaacatagaataatcactcacattaatccacttaacttcattaattatcaaaattctgaaattaaaaataaaccttcttgtcatttcatttcctattgcttcttcaccattggtattggttgactccatgactgggtttaattaaggtgtctcactcagttgactccttctattactggtttgagcataagccataatttatatatatatatatatatgtagatcatcaactctgtaatattaactgacctgataattgatttggccatacaaatgacgccggtaatactttttcaaggctattcgagcataaccggcgctggttactcgaccgcagtaacgggagaaagcaagaccgacggcgtccaaagcgaagttacgtacacaatttgtaaaggtcagaagtcactgatggaaacgatcgacataaagcaatcgctgggcatgaagatgaacattttgggatcaattgatgagaagatgaattttttcaagatgctgaaaatcacggacaagtgtttgataattgttgtacacgctagacaagttgaaggaaagaagtttcagactagcgctcgattggcatcagctgatatcgttgctccgatcagcgatatgcgcgagttctttctccattacggtgactcgtatgtttcgtcgatcaccaccggcggagaatatattggagtgtactcatttcacacagaaaccgaaagtgatcatatcaacttggaagcggagcttaaagcccatggaatattcaagtttggaacgctcgatgccaattttcaagggaaactggatcgagccgttgagggagctcggacacaagtttcattcaagcagatcatgttgggtctgaacagtgagttacccaaaagagaagacatggtcgattttgcgcgcaggtttccgagccagaaacttactgcgcccaaggttcttgcatttgaaacgaccggatatgaacacgttgtcggcgttcccaacggttttaaccccgtcgcattaaatcggaatatattagttggcactggatttagagatctgggtctggcagggaagcacgccaagttatcccaaatgatcgatagaatcgacttaatacaatccatctacagtttttatggtggattcagtgaccctaacctaagcaacgtcggcgtccaagcgaaaaaagacattgaatcactggaaaaaacattttcagattatcaaagcaatccaatcccgaatgtgatcataccgcagctgccgtccctttcgaaaggtatgccggagatccaatactcgatccatttctcaccagagtttggagatggtactggcgccgcccaacccatgtacccatatggcttgttcacgggggtcgatgcctacatccagagtaaaacaaggattaccgggattcagatgcacaccaataattgtcgcagtaatgtgaacagtatcatcgtcgatttcgaatcgaccttaggaagacggacggagagttatggcaaagccgaaggacggttgagtaaaaagctggtgttggaagatggtgagtttatcaagaaaatttatgtaagatcaggtgttgaacttgataagcttggcctatatatcagagatgatagagggcttctggttggtggccatggaggagtggaacactattttccgatccccgatggtagtttcattgtgggattcagagggttttactcaaccctcatcgaccagacgcagctcatctatgccgccttcaaacccgccaaatgggtgccctttaccatttct

SEQ ID NO: 38653 - DNA, 3127 bp, Cannabis sativa
aaatgataagttttaaaaaagagggtaaaaatgaaagagaacaatataaaaagggtatagagtctaatttcctcttatttttatgtacatgcagtggtcattcaattaatatttaacggtaatatttaactaatgtctcaaatttacagaaaaaataaacttaaaagattttggtacacgaaaaataaataaatgagggggttaaatttattaaaattaaaatataaagaagtttcgtcacttgtacaaattaaatgttgattgacatgtaaaaataaccgattaaatttaatcaacacatatttatatatattttaaagtatgtatacacaattattattttaatatataaaaaatcataatttaaaaatttaatacctatatgatagaaatatatgttaaaacataaatgaattatgcataaaatataattttaaaaaaataaacattttttccacgtacaatttttaatttctttcattttgttatttgtcattttatttattattaaagatataaaacaatcatattttttttaattaattgtgtaaatgatatattttcttagtaaatattaaataattaaatattaaaaagtaactaatttaaaataattgattgaatttgattagatgagatttaagttattatgcatattaaattagatctaaaatataaaattctcatttagtacgaatcaaatattctgtgagtaaaataatatagattaaattagatgaacacccttaatttaatcttttataaataaattatattatatggtaagttgagagactcaatctattacatttttccttctttttttttttgtttggatataaaaaggccagattttgctcttgtgggagtttaattaaagcagacagaataaggagcaagtaaattatatttatatcttttttttttctaaatttttattggtgtttggttgtcgtttcaaaacgacatgactaattagtttgcctaataataataatgaagcttctttgaaattcttgtctacagaaacggatgggtttttattaagtacacctgatttgcattgtatttaattctgaaggaacaacaaaattaattaataagaacaaagtttctctcgaattagatgctgttaattatattatattaggtggtttaattttataatgtagtgttggtagtgggctggagtggcatattggacaattccatactaataaatggactacagttgttttagttaaattaaatcaaaaatcatttacaataattgagaaaattgaataggaaatttctcctatctaacaaaagttttcattgaactctagaacgtattttgctaatttatgagtgactggattagcataccatttctcttagcataagaaacaataactccaaaaaaaaaagaataaaagacaatgaactattagaaattaaatttgtaaaacataataaatctcaagatgaagcatttaaagtataggagactcacaaagcatcagtttcaatatgcgttatagagagttgtaattgcctaacccaattaagactataaaaaagagttttagcctctagatcaaaaacacccttgtacaacttttgaaaaggttgtaataactttaccatcatgatcacgtacaagtgcacctacacaaagttttttctcatcaaagttagcggcagcatcaaagtttaacttcaggccattcgggtttggtggtttccaaggtacaccttcttttggcatttcatttctaagtgtgtatggtggatgttgaagttgatgtagcagcaggcattagctgaggttttttaacttttaggaaattatcaagatatgctctcacataagcagtagttaagaaactttccctacacactctaccatagaaaactctatttcaattacttcatataacccacatgatgcaaatgattaattcgaagtcagcatgattgtgaagagaggaaaggtgcatcaaataatcaccattaaacatacgatgtgcttgtccataatcaataggaaatttggagtgcttccatattactttagcatgtttacaaccaaatagcacatgcccaattaatttccaagctggtgtacaaaacgaacaagctgttgaatcaattattttttttcttaaaaagcaacaaccacgagcaaaacatgttgaacaaccttccaagcaaaaattctgatctttggtggaaaattcaattttcaaaaatacttccaccaatcgcgttgaggattagaagtagaagaatccagttgttcctccaacaatgtcgccaagtaaaaactgaatttcaccttgtatataccagttgtagtgtaatgccatatgagtcggtcatgtgttgcaaagaaactcaaaggaattgacatgattcaatcatatcaataggcttgaaaaaggaattcagcaaagaactatcccattccctattattggtgatgaaattggaaacaaggattgatggaggtcctataaaagtcagtgggcctaaactcattgtgacctggaatatccatgggtcatttccgttggctatgtgaaaaccatttccaacattatatctaagccctttaatcaacaattctttaccccagcagatactttgccaagttaaagatggatagtgttcaaggttggcatccaaaaaaaaaaagagtttgagaaatacctatattttagcaaacgacttaataaagagtctgacactttgaaaatctgtcatgcttatttagctagaagagcttgattaaagtgaacaaataagcgaaaacccataccaccttcatattttgatttgcacaaagatttctatattttccaatatattttagatctattttgattggtgccccaccaaaaatttaccatcatactttcaagttgattgcaaaatttcttagtaagcttgaagcaactcatagcataagatggagttgatactgctttcaaaagtacttctttctaatggattttattttattccaagcatgaagcaatttctaaacacattctttgatattgttgaaaagtttttgtttatctcgaccagaataagaaggtaatcctaacaaccgttcatgacactcactgataggcattcc

SEQ ID NO: 38654 - DNA, 2113 bp, Cannabis sativa
gttgcttcgaaccgatccagtggacgacagagaagggttcttcattgctctgtttgtgaggaagaagggagagaagccccaaacaaaagatgagaagcagaaagaaattctagttccaaatgtgtttagtaaattctgtaaatttatgttttacagtcaagtaagtagggcaagaagatccgttcctcaatgtggatgttgccaccatgaaacttgataatgatagcatgggcattaaattttagacattttttttaaagcaatattggttttttacttgataattttattcacacttcacattttattatatttttgtttcaagggtttatgtttttttttttaattattttttatatttatttatttacaaaaatatacactttttttaacatatgttttgcaaaatgatttttctctctctataatcactttattaattgatcatggccaaaatcaataaattaaatatttatatggtgaagttatttttatataaatcatcttcacattttattattattattattatttgctaaaacattttattttatttttacaacatataatattgaattgtgaagtaattaagtggtgctataattacagaacttcattgtgtctttttacacaatttactgaacacattcgaaactaactagataatattgaaatgttgtggaagtaattaagtgatgctataattgagtctaaaacatagatttacaaaacacattcggaaccaacttgctttagcttaaccttacaattatcaaaacgacattgtcggtaaaattgtactcgcactccaaaattaaaatactgtaaaaacaactgtactgtaatattttttacggtataattttagcaatttaaactattactcaataattaaactgttacaaatacaataaaattcaaataatacttctataaaatactataagaattcaaaaccccatgttaacaattcaaaaatataaactacgcgatttaaaaataaaaattcaaagcaccataaaaaaatttcaattcgtatttttttatttttttttacagttttagcggtttaataaacagccataaaatatttgctcgtatgtaaaaattcaggcctttttcacactgtgaagagcgcttaaatgaagtgatttgaaaatacgaattgccaaaatataccattaccatatgaatttatgtttctttaaatttcggtaaacgaaaacaaacagtactaatttcgattaaaactcgatgaaaattcatacaactactatgaatacgaaaacgtacccaattttcatttaatcacaacaaaagcaaaagaagcaaacacaggataaccaaaccaaacagaaacattcctcatatccaaacagcctacaacagtacccattgatttttcaagcaatcttaacctcaatagtcttcggcttcttcggctccggtggtggaagcttctgaacagtaacagtcagaacaccatcctggcaaacggccgaaatggcgtcagtatcagcattctcaggcaacacgaatttcctcatgaattttccgactctcctctccatcctcacatacttagctccttctttctcttcctctctcttcctctcgccgctgatcagaagcacattgtcgtcctccacctgaaccttgatgtcgccggatttcagccccggcatatcgatgatgaagacgtaggagttcgggtactccttaacgtcagccggagtggccgccatggccttggcgtcacggacataagttctggtcggagcgttgatggatttgctgtgatcggcggagtcttcggaattgtcgatcatttggttgagtgttgtgaagagtggagagtccaatcccaagattctgaaatccatgtctgctgatcttcttcttcgatcgaactgagcttttctttttttcagttaagatgagattttcttaattggttttttgctgtaatgatttttgatcggagaagaaggttttggggtatttatagtgagagatgagaagtttctggataaatgttctggggaattctaagagttttcttttgttctacattgatctagaattttaactctttaatgaaaataactcataa

SEQ ID NO: 38655 - DNA, 1334 bp, Cannabis sativa
tttttttttgaagaaaagcgtaaatatattagattcaaaaacagtccgacatcatgatcattacaaaatttttatttctaataattacataataataataataagtatatacgtggcattaaaaaatatttatgttttcataaacaatgtttatgtatacatggaaattataaaccgtgagaagagaagattttgcttgtacaatgtaattattaaaaaaaaaattgaaagatgtacacgctaaagccaaaatatagaaagaatagccccatatatagtcctgaacaaacaccaaactatatcttaatccaaaccaaaacaaaagaaataatatttacaaaacatcttttgaaatattattacaaatataaactagtctcgtgtaatcagaattattattcttcatgtaaatgacatagttatattaattagataatgatggtcggacacgtgtggatattgttttagatgataaactattgtttttcttcagctaaattgtgacctattattatattgtgagatgttgttttcttaaatcttgtatattaatattgggatacgtacaaccaaatcttttgaaacaccacaatgctttaattaaatttattattgtcattgggtataacacatgaataacgtggtaaagccttcgcaagttcaatgtacaatgtcactacttcggtctataatatatataactctttgtcaaaataaattgacctccttcttgttggtttcttgccaattccgacaactttttatttgttaaatgtataaattattttcatgactagggacaacattttattttatattccaacaaaataatacgcattagattacattatttgtggtgacaacactttgagcttttttttttctactcattgagctaaaaaatttgtgtgggtatttgagttaaacagaaattaataaatttaccaaatgaatccaaaaaaaaaaaaacgcaggtgagagtgtgagagagagtaacaatgattaaaaagtagaaatgaaggtgatccaattcagactgacaagatccgaaaaaatcggttagccacctgcacctaccgtagttaacaaactcgttattgtacttcaaaaccaagctcactttactttcactttacctattattttcttttttcactcctaaattaataattaaaaaaattaataaatcaatcttttaattgaattaaaatcaacatcctacaaaaaagaaaaaaatctaaattgagtgtttttcagtggaatctgatattcaattttgcctaccaaaaatttgtctacttttttttaatgatttaaatttaaactttaaaaat

SEQ ID NO: 38656 - DNA, 3149 bp, Cannabis sativa
tgatttagttcttgtcatggagagcaaaaattagcaaccaagaaaaagaaagaaaaagagagggaaagaagagaagaaagctagagggagaaagtaggttttgcaccattgaagatcaagtggttgattctcatctattttggctcaaagttttgggcgatgaatccttgtgaggtgctctaccaatctaccagttttgatttgacaattgttctctctaaggtgctcttttctacaatacccaccaagtgagactcaaaatttttctttgtgtatccatcttttgagatgatgatgatgatgatgatgattgtttaatcttgatgttgttgtgagtctccagttttactagagaactttgtaatcccattattaaacttcgataatagtggatgattaaagcgaactatagtccccgtaattttttcccacattgggcttccacgtaaaaatcgtagtatctccctttcatgcttagatttgtgtattttctattgcttgtagtgctttagttgatatttgatattgttaattgtggtagttgataattttcgacatacaaaaaggaaaaatattgtgattaattgcaataaattttcccaataaaaaccataattaaaagagtgatcaaatcttggtaaacttgtactattaaactctaatcattgtaacttttactttgaactatgatttgtatagttttgcccataatttttttttaataaaatcttagtattcttcgtaaatacgtccccttcaattgaattccattcattgtaaatatgtccacaagcaacatggatacagtacgattctcagtttaagtaacataaactagtcgaaatcatgtataatggcattaaatatacaagcataacattagctctagatgtacctacataatttgtccatcatatatgcatatatttttcatagataagctccacatcattgctaatcaacaaactatgtaatataatgaacgaaatacaatcaaatgagcacatttacgattatttctataattaagaaaaaacaaggcaaaactcaacaagctcaataagtaaaagtcttatttattcttcaactaacaacaaaaaccagttttacatttctgatcagaatgtgaccgtatacatgttgagattgacttcgaagttaccataccaaaaatgtataatgcaagctttgccatgctttcaatatttggaaagacagaaacaagaaataaggccagcaaattgcagcttacctaaagatggatttccactctgaatgccattgtgccaatcaaaattaataaataagcgaaacagtaagacgccaagagggtttcaaacaaggtcattgccctgaatcgtcatccaagacaggcatttgggtcctcttcatcggagtcaaattcagcctgcaagaaaaagaaaacagataataagcagatacaattacagttacactttagttcctagttttcctagttaatatattgtgttcacttgatcatgataagctcaagagatcagattcacaaagttactacactttgtatcatattaggaaactcacattctcatctttgtaccacttcccatgaccatctggcttccaccctgcagctgcaaacttgagctctttctctttgcgctctcggtaatctaaacaccattgctcgacaacctctaaacaagttacatctgcattaggaaatgagctaacaccactatccaaatgagaattgctagtagtttcaacaatagcttgactcacactcccactcccatgaaatttggtatcatggtggctttggtttatgcttttgctttcggtgacagaattggcctgcgcataaatttctcctccgagtctttctggagcagcaaaacccctcgccgcccccggttcactcaacaaagttcctgaggccatcttaaacttgtggttgtaaatccctctaaagcaggcaggggcacgagaagggtactcttccaagtctattctcattttcttagtaacattatttgttgtggccacttctctttcctttagtctagactctgcagcttggtgctttgaacccttgcaatgcgtctacaagtgcaaatacaaagttattttatgccaaaaaaatcctgaacgagaaaatattgaaaattgaattcttaattaaattctcaaaatccaattattaaaactaaacaaagcacgcagaatatactcacactaagatattattttgggagacaaaaagcttaaacgcatacataaatccagccaaatgtttcccctaaattaggataggaccgaattttcctaactaaacaataatatatcaatcaccaaaataatggaagaagaatcgaagagagagagagacgtacgggaaacatgagaggggaatcgaggacaggagagtggggacagatgaggcaagcaaacttgccattagagagcttcttaaaggaagagccttgaggggagtctaccagcagatgttctactcgcctcttcctgtactgcgcttctcttccccagctatcacccccgaacacgctcatctcttctccttcgactaacttatttctattttagaataaaatggtgttttaccctcaatttcacacttacaccagttacgctttagaataaaaattctcaaaaatatttaaataactaaattagaaactctcaactcattcactattttaaactaaaaactctaaattcattttctattttaaaccttctttaaaatttactaaactttatttttataaaatattattcattactctaaacttattttattaattatttagaattttaatttatctttttatataaaaatatgtataaatatatttctttttagaagttttacaaaaatatcgacttttgaacaaatatttataattttactgccacacgataaaaattatttttatattgttttaagctttttttaatactatagacaccaaatatcaagaatcatgcctccatcttttacacccacgcatagaactaccacaacaatatgaacacacacacaaaaaataaccattaatttcggcgacattgagtaaaaacagtgaaattggcgtcaaataagtaatcatggcaaaacaagtgtaaaacaacattaaaacaaa

SEQ ID NO: 38657 - DNA, 2106 bp, Cannabis sativa
acttgcgtgagatactacttgatacgtacacttgcgtaataaacagaattttcgtaacacattccatgtaatttttttttttaccatttgtttcttttctcctctccctaaagccaagaaacttgtctcatcaaaatgacaatcaacaaaaggtgccgtaaatatatctccagttgtgggttcaagatatttatgatagacagagattcatacccaacatatattctcaacctcctatgaggacccatatttgtttgttgtggtgaagcaatcagaacatataatgtacatccaaagattcttaactgttaaatatttggctcctgactaaaagccaattgcaattgggagcatttgtgatacaatgttggtctaatatttacaagtgctacatcatgtaaaatagcatgtccccaagctgaaattgggagttttgttctcataagtaatggtcttgtgattaactggagacgtttaatgaatgattccgctagaccatcttgtgtatttacatgagcaacttgatgttctacttttatccttattaacgtacaataatcattaaaagtatatgatgtaaattcaccaacattatcatgaggatctatcttgattgcataatctagaaattgtactcgtaatcagattatttgagcaagcaatcttacaaatgctacattatgagtagaaaataaataaagatgtgaccatctagttgatacatctaacaataccataaaatatctaaatagttcacatggtgggcaaataggcccacatatgtcgccctgaattcgttcaaaaaattaaagggattcaattctaactcttactagtgatggcttaatgactaactttccttcagaacaagcagcacatgagaactcattggataatagaatattttggttctttaatgaatgatcgtgtgagttctttattattctatgcatcatgattgaactggcatggcctaaccggtcatgccaacaataaatgaacttttcaggtttgtgaacctctcgttcgcaataacgtgtgcttctattgtacttatacgtgtaacacgtacaaaccagaagacaaaccaaacaatttttttaatatgcacttttttcttgaaacaatagatataatgtaaagatattcaatactattttcatctattattttcatatgatatccattacgacgtatatctttaaaatttaatatattcatttttgatttggtgaataataagacatcttctataataacttttatttatttatgcatcaatataatggctcttccagagtcttcaattaaacttgcagtacctgatattgtaataacatttacctctattcttgataattttaaaaaatatttatcgcttttaagtattgtttgaatagttgcgctatccgccaaacatatatcctcaccattattctttgaatcatgtataagataataaatgtccattatttagttagaaattcatgctgaaaacgtgttacagaataatataatttaaagaaaaaaatagagaagagatataatttttttgagcctcttattccaataggctgatttcatatttatatacataatgttacgtgcaatgcacgtataattagttttttttttttaattaaattcaattacgtgatgttaagtgcaatacatgtatgtttatttttttaacattaggtaatgtatttttttaaaaaaaaattgaaatagagtttaagattttgatctttaaaaaataaaatttagctatgatacattggtgtgtcatttgaatgtgataatatatacgtattttttaaatttttaattttttttaattaggtaacgtatctaataatgcataaatttaaaaatatgattaaaaaatatctataatattttaactattttaaattaaaattaatcttttttatataaaatatatataatttttatttttaaatatataataatattataaaattaaaaaagaatattttgttaagcaataagatattctgttaaagttaacgtagaaacaaaaaacatcattaaaccaagaatttcgttacatagccacattttatatatactaggttgatgtta

SEQ ID NO: 38658 - DNA, 1740 bp, Cannabis sativa
  modified_base (59)..(59): a, c, t, g, unknown or other
aaaagatgacaactaatatacattgtcatatgttacatattattagtttattacacatntttaatctatatattatattattttaaataatataacaataatcgtattagccccaaacacaatataaatacaaagagttgtcaaccatatattagagaacaggtcattttgaaggaagcaataatataatgtgattgcataaatggatttgataattgtaaggtgttgaattcatagtaatgtggaatatcatagaaagtgagacaatactccataatcatattacctaaataagagacacaataacacaaattcccaccctcttataaattaatgtaggaattctatgttcaaatcaaactcatcaatcctatctcgatagaaacatgcgtaactcaccctaccatgccatatcatatattttcaattaataattaaaaattcattaaatctgtaaaactaataacaccaattattatttatgtcatattaaaactcatttaaaccaccaggaagaagagaagctataattatatttatgcatttgttaatttaaagcatttaaagaaattaattagccccttgacttgtcgctttttttaaaccaccacctctttttaaaatttatatgttatcgggtactagtgatatctgcccaacaccttctatagatgacgctttatgattagtttttttttttttttttttgaggagaactctattattaattaataatatatgagatctgatatttaagtacagtaatatctatatgacattaaaaagaatcttaacttttaatatttttcttatttattaggtgcttctattatgtatttataatttacaataaaaaaatagaatcaaataattaattttacatctgtataaaataaatgttcaaactttaattttgatacaaaatatcttcaaagtaaatagtgatattcactttcatttttatgggtgagtcatataattattctatttttttttttattgtattctttttagtaatattattattagtatatttattatgtattttagttaagagttaagacattggtataagagttaagtaagcattcacgaactcctacattctcctcgtttgggttgaaaatcaagttcctttgcgttatgaccggcaccatatcttcactttttaccctttttcattttcccaatacaacccattgacacctcacttcacccaaggtcattttagtcatttcattcatcacactcctcccccttttcaatttaccaaaacacccaaaacagtccacataaaattatataattaaattttatttatttttatcaactttacggtgtacttaattgacaacgtcgttacattttacttaatttttttaataaataatatttctttttttcttaaatataaaatttattatttaattttctttttttttttttctttttttcaagtctttgactagttgtacttttacagactctctctcttctctctcagctccctaaattctttctctttcagagatttttctctctcctctgtctcctccgccaggttctccgacaaatcacctttttattctcgccggattttaactccggagacttctcttcttcctccgactttgcatctctgttacttcagcggaaaatcgctttcgccagctccggagcctgctctcgggaacggtccgcgttagtccacggctccgaccgtgctttattccggtagga

SEQ ID NO: 38659 - DNA, 1687 bp, Cannabis sativa
aaaaaaaaaaaaaaccttagctaattatttacttgaatcttgatataatggcgatcaataagaagaaacattaattcgtgtcatgttgggatgaattaataaagcagttaaaatagatactgataaaattattatttataccgcaaattttcaaggatttatttgcatcaaaataatttaggaagtaatgccacaaattaacattaatacatgtattttttgaaacaactaacaaaatggttacaagaagaccatcttgcatattctaaaacactcaaaacataatcatcaaaatctaattaaaaataatcacaaaaggccattttaggtaaaaccctataaaaggttaccaaaatgattttgtgaggagaagaagtatatttataaatacaggcacataatcagaaaatagtaggattcattaattataatcaaaaaaacaattgaactataaactttaaaataatgggacaatatttttacaaaaacatttcttatgttttctcatgacatcaaaaatattggagacttgaaattcatctatcatatgttcttgtagaaaattttgcttagacatacactttctcaatcccacattgattagtgatgttccaactttaatgtaagatagtcataaaatgattaggcagttcatactatgatttaaggtatattataaatttaaaaaaccatctcatctatacaatttaataagcaattcatggaaaatattctaattctgtcaatcgaaaacgggactagtccacttttaaaattggtcctgcttatagcggattatcatataaaagatgactttgaagttgtctcaatatctcagcttttaccatttaccacgctctggtagcgaattaacctagaagcaactctcacgtgatcttgaggtcttcgtcgcctccttcaagaatttccaaagaatgctagttctgaccattctctcctctaactccttcgatggcccatcttctattgttctttaggtgagaggtggtggcggcggtgacatctttggcggtgaagttgttgcccctaaatatttttttctctcaacaaaggtggtttagtcacaattaaataaagaacatgaaaatgaaacaaatttcaatagtttcacctaaagttggtgaagaatattagacttgaaccaaaatggaatttcctttactctgtcggggtctatctattatagagtttaaaaaaaaaaattcttttaaatttatttttttattgattttgaaaaatattttcctttttaaataagagctcatttttttgtatgatccactaaccatgttcactctcagaagtaatttgatcagagggttccactgtcccctctattcccttatgacactgcaaataatgtcataattaaccctgtaaaaactcattttttttcaatctcaaacccgaaagtaaagcattatgaaaataccatcttgaatattccaaaacgactcaaagacataatcaataggatctaaaaaagaataagaataagccatgtttaggtaaagcttcagagaaggttacgaaaaagattatgtggtttgaagaagtatatatgaaccaatgacaaaatatgataaatacacgcacaaaatcacaaaattgtagagtcatggagaaaatcatattattccaactagtcatataaggggctgtttgt

SEQ ID NO: 38660 - DNA, 2427 bp, Cannabis sativa
acaaatattaatttgataaaacaaatcattcgtatgatcataccttcacatacaatctaaataagaagaaataataataaaaaaaaaaaactaaatttcaccttaaactaatatttacgtgcatcggcacgtaactcctacctagtatatacatatatgtgtgtgtgtgtaatatagtgctttaaaaagaactaaggtggcagtagtatcattgtgtgaataacaaagttaataaaagtaattgattcttacattaagcttcttgatagaagtagtaatgaaaacgtaaaatatatatttgtatatattttgtgaatgtaaaatatattttatctatgaaagttgtcataaatttagaagatctttcaagaaatagattggtttgggttatatagagttaaaatttgtctaactcataaccaacccataattatatagtctataacccttaacataaccctttattttggcccacattttgtgcacccctacccgtcacattatcatcttactctttgaatttgggataaaatgaatgaagttctatctcaaaatcaattggcaataggaggagtagtacattcatcttatatgtagtaatttatttctaacacttaatactatttgtttctgaaagcatctaactcgtattttaacaatattaattttaatattcaagcaaacaataactcgtcataattctcatttgatatttcatttcatcactatcttctcatcatccgaataaatgtttatcaactctagagtgctgacatgcaatttcgtttctactaggggctatgtagccagatgaagaaaatactcataactaacaaatgaaagattttgtcacatatttgaattgaggtagtgatttgtatgtttgcaacatatatgcctctaatccggggtatacctttgtagcttccttcttctcaagtttctataaatggtcattcaccttaaacataagagaaaaccagcccccaaaaaggaaagtcgttacattggtttacccaatgtaatttatctaaagatctggtcaaacaactaatctggttctctaatttgtctctttgccttaactaaaaaaaatgtcccaaaagagatggaaaccccatcacgtgtcctaaaattacaataccattaaccatttccactcattaatctatttcattttgagcctttaatcgttattcaacttgacctgtacaagtacagggcaaagggtggctaaattttgtagagttcatcatcatcatatctcaatttttctgagatatagagaaaaagaactcttcctgtggtttctcactgaacgttttatcatttattgtattttggtattgtatataccattattgatctttctctgttgagcttttgaagtttaacaacagaaagaaagacaaaaaaacacaacaatggcgttcagtggaacccaacagaaatgcaaggcatgtgataagattgttcatttcattgaaatgttatcagctgatggagttatttatcacaagacttgcttcaaatgcagtcactgcactggccttcttgtggtatgttttcaataatgattaagccttttcttgtcaattagtttctttaacttgattttagggggaaagatccttaagggactataaagattattcaacatgaaaattttttcacatggaaatcataagagaaattcacaaagtttaatgtaaaagaagataagggtaaagtggtaattaaaatgagatgatgaagcacttatctgatatatgacatcttttttatgcagataagcaattactcctccatggatggagtcttgtattgcaagcctcactttgagcaactcttcagggaaactggtagtttcaccaagaaatttcaatgtaagaacaccctctttcacctttgaagattgactcatcttatttccttcatttgtactaataaatgtttcttcatcatggctgatcagctggaaagccaccaacagatcaactggtacatccaaatcttttacatttatcttcatatctttttcttctaggaaatctctactcaacttagcatatatgtattcattcaatctctcaaaattccttcataccatactttctcaggccagggcccctagcaagctctcctccatgttctctggaactcaagacaaatgtgcaatctgcagcaaaacagtatatccactggaaaaggtaagtgaagagtaaaatataatcaaatcccaattgtacttttaggctttggagttcagcactcaagtcattaatgagaatagataacttttttcattgtggcaaataatcaaacatctgggccacattgtattttgtgttgctgtttacaggtaactgtggagggagagttttaccacaagtcatgcttcaggtgtaatcatggtggttgcttcct

SEQ ID NO: 38661 - DNA, 2818 bp, Cannabis sativa
  modified_base (2782)..(2783): a, c, t, g, unknown or other
gaggggttcattggggctttgagcgattgtaatttgattgacttgcctcttgttggatacccgtatacgtgggagaaaggaagaaatagtggggactggatagaagaaaggctcgacaaagccttggtgaccaacgagtggttgactctgtattctcagtcggttctttacaactttgagttctctacgtccgatcattgccccattcatctggtctttaaaggtgtgttcccaactgtttcttttcattcttttcgtttcgaaaacgcttggcttcgtgagcctttgtgtaagcagcttgttgatgattgttgggaaggctcgggtctaactaatattcaaggaaaaattcaaaagtgtggtgaggttctcgggaagtggggtcgtgaaattactgggagtttttgtaagtgtatcaatcagtgcaaaaccagataaggaattccaaatggggtagggattcgatctgacttcaacaacatcaggaagcaaagacaaatttgtcagaggttttagctcaacgagaagttttctggaagcaaagatcaaaacagtttttgctaaactctggtgaaaaaaatagcaaattttttcactcagttgcgagctcaaggaaaagaaacaacagtattagtcagcttcaagacaataatggtagatggctcaactgggattcggggttggagcatgtcattactgggtactttcaagatttgttccaaacatccaatattgacttaggaacggttcttgatggagttcatccttctgtgtctcgtgagcaaaatgatgatcttttgttgcctattttagaggatgaagtaagaagtgctttatttcaaatgcatcctgataagtccccggggcccgatggtatgaccccggctttttaccagaagcattggagtattgttggcacggatgtggttcaatttgttcgtgatttctttgataccagtaagttttcggactcaattaatgatactcacattgtcttaatcccaaaaaagaaaaacccctctcaaatgagtgacatgaggccgatctcactatggaatgttctatacaaaattgcctcgaaggtcattgctaatcgtatgaagggagttcttgatcatgctatttccgaaactcaaagtgcttttgtatgaggaagattgatttttgacaatgttatggtggcttttgaagtaatacattacttaaaaaggaaaactaatggaagaaaaggttacatggcgcttaagctagacatgagaaaagcctacgaccgagttgagtggaggttcttggaagctgtccttcgagtgatgggatttagtgaacgatggattggattaatgatgggttgtgttaactcagtttgctatcatgtcataaatagtggtttgaaaatggggccaatcattcctacaagaggcattcggcaaggttgccctttgtctccttacctttttattgtgtgtgccgaaggtctgtcatccttgattaaacattatgaagccaaccgtctcatcacgcggtgtaaggttgctaggagtgcacctactatctcccatttgctttttgcagatgatagttatgtgtattgccaagcatcggaggaagaagcaaattgtgttctctcgctattatatatttttgaaggagcttcaggccaaaaagtcaatcttcataaatcatcgactttctttagttctaactccaggatggatattaggagtcagatttgtggtttgatgcacattcaagaagcggaggttgatagcatgtacttggggcttccaagcatccaagcattgttggtcgcaacaaaaacgcagtgttgggatttcttaaagagagaatgaggaagagaataaatagctgggagggtaaatttctttctcgggctgggaaataagtgcttatcaagtctgtggttcaatcgctcctgtcatatgccatgaatgtcttcctttttccaatcggtacatgcaaagaaatagagaggatgatggcaagcttctggtggaaatccaataaatctaatggcaatgggagtggcattgtttggatgaattgggatagaatgactaaacacaaagctaaaggcggtatggggtttcgaaatctaagggactttaatcttgcaatgctgggaaaacaaggttggagactcttatttagacatgaatctttagctagtaaagtctttaaagctagatattacccgaatggtaattacttgtctgctgagttggggtcaaacccgagctttatttggagtagtatctatgctgcaaaggacactgttaaactcggtctaaggaaacgaattgggtctggtttgactgtgcagattacatcagatccgtggcttcctgtcatggatagaatctctccttctccgattgttcctggtcttgaaaacttcactgtgaatagcttgtttcaagtaggacaacaaagatgggatgctgatgttgtgtgtgatttattttccccaaccgacgctgctatcatacttggtatccctatttcacaatcaagtggggttgacacttggtactggctcgctgagaagaagggattttattctgtgcatacaagctgcttcaagatcaaaagtatcattcggacaaccccgagggacatactttttggaaaaaactgtgggcacttaaggtgccgcctaagacaaaggatctggtgtggagggcggcatccaattgtcttgcaaccaaggtgaatctttgcatcaaaaaggtcttggttgataactgtaaagaccgcttagttnnatttagaaattagcagttaatcatatttaattatg

SEQ ID NO: 38662 - DNA, 6081 bp, Cannabis sativa
cctataatcacctggaaacctaattatgtataattaagacttattatataaatatgcagtaattatggtacaatgagtatgattatgattctattaagaaattttaccataagtagataaataagcatattttattaattatagagattttattagaatatgtaggtatgatatatgttattcgtggaataaaaatatttttagatttagcgaccttagggactagatcggaggcaaaaaatatcacaacaattttagagtgtgatttcaattgaattattatgataagttgattttaaaatattggggtttagcagggtaatagtattggactattttaaacccttagggttacgaggttacttagcggggaagtaagggcatattagtcttttcgtcctttgattagtcaccttatttttgagtggaaagtggctgtgactcatcaaatttctggtgaccagtagcttggaaagatttaagatagaaatcaaatcaaaagaaattcgaagtgaagaaaagtcaaaactcacatttcttcttcatcatttcgctccatttttgaactctccaaaactagtatgatccaacaagctttcctccattttcgaagcttatttcaaccaaggatatctagaagaaacctctcatccatcctcccaagcaatctaaggtaaactctaaccagaattcattgattttctagggttttagttggttttaagtggttgttttgtgtaggacttgtttaggggatctagggaggctagaaaaggctttctagggttgtttaggactgattagaattggtttgaagtgttttgactagttgtagaaaaagttatacaaatttgagttcaaagaactcaaatttttctcatgcttgataacttaatttctattagaaatttggctgaggtttcttcatgaaaaatgatgcttatgatgtgtataggttctctaaaaaaatttataaggtttggctcaagattgagagagatatgaattttttaagattagacaagagaattttggaccgtcttatttcaaaaataggtcggccatttttagatgaaagttgatctaacctaaagtggatcttttatataccttggaacttgcccaatatgtaccgaaaaaacagtcaatctgggtgtgtccatgatccttgtaaaatatacctcaccctattgctttatttaagtaacacaaaattcgttataatgctacccaatgataaattattaaagatgacataaactgactcacaacactaattgagaatgcaatgtctggatgagtcacagtcagataattaaactttcaaccaatttgcaatatttctcaggatctttaaatggttccccatcacttgtaagatgcacacttggattcattggagtactataagatttgactcctaattttttttgtctcagttaacaaatcaagtacatacttcctttaagatagaaaaataccttgtttactctgagtgacttcaactcccaagaaatacttgagcacccctagatccttcgtgtgaaattgggtatgaaatgaaagtattaagaattgagatgcctttagtatcacttccagtattaacaatgtcatccacacacacaactaacaaaatgataccagcagtaaatcttttatagagcacaaaattgtctgacatacttttcaacaatccacatttctcaacaacctgactaaatttaccaaaccaagctgatgcatatcgtatgcacacaaatttactaattattttattccaatacttttaataatttcagtataaaagtaagtacgagtcgatcccacgatgactatgattaatttatcattcactatcaaacaaaaattgaatgagagttttgagttgcaattaatagcataaaaggaaaacaaatcaatcaatcaagaacaattacgaattttaaaaggcagttaagaattatttctccacctccaacaatcaatcaagaacaataatgataatattatattttattctaaaattaaactattaaccccgcagataatcacttattccaatcttcctactacaattagttacagcgaatcactcaataattaaatctttttactaagcaatagatctacgaaatatgcaatccatttaacctaggtaaatattaatttctatggagataagttaatctaggtaacaaatcaatgaagcatataattcatttaacttaggttctatttttcatcacaatccataatacctttgacattgatattaattgcaaactatcactctacttagaattctaaactattaggtgagaagtaattctaagatgattatagaacaatacaaattaaaccttaattagttgcacacctaacaagaattcgcaatattcataacatttaaatagaaaaataaaaacaatttaatatgagaaaaatcaagaataacattcattattaacaaccaagaatttatgttttatagttttgaaataactcttaactaaaaagaaactaattcataatcacaactataaccataagtataatcattattaaaaactatagagattagggagaagaaaagaactagaataatgaataattgatgatgtaatctccctcttctccaccttttacgagtttttctcttaaaaacgcaatctaaaagttgctaaaaatgaacactaaaagtcctatgtatactccataaaaatcttatgatctaaaaaagataaaatttggaaaaatctggaatcgtgctcttgtcgcggcgaaggttgaggctcgtcatggccacgacttgttgctaaaaaaaattctattgtatgttcagattagtatttcggccataacttcttcaatacaacttggaattagacgattcaagatgatttaaaaatttgagaactagatatataacttttatgttcagctccaagttcagttttgcttctaaggttgtcaaaatttacaattaagtcatgtcttgtaagaccgagctcgtcggcttccactattttccatcaaaatgtactaaaattcttccaaatgactccaaatgcatgattagtcttaaaaatagcctaacaaattaaaatcacactaatcaataatttaaagaatcaatttaagaatagcaatacataaattggccatatttataagataaaataacgacttatcacaagcacaaggactttgtttcaaaccatataaagatttgttaagacaaaaaactcgccctaactcccccttagaaataaacacagaaggttgctccatatacacctcttcttgaagatctccatgaaaaaaagtatttcttatatcaagttgatgcaaaggccaatggtgagttttcaccatggaaatgaaaagtcgaatagatgttagttgagcaacaagagaaaaagtatcactatagtcgactccgtaggtttaagcataacccttagcaacaagaagagcctttaatcgagtaattattctatctggattaactttgaccgcgaatacccattttcaccctatggcgtgatttcctgaacgtaaaataaccaagttctaagtaccattcgcatctaaagtattaatctcttctatcattgcatcaagccaaccagaatgagataatgcttcataaacatttttgggtatcgaaatataatcaagagaagcaaccaaggagcaagaagatgaggacaaatgactataagaaaaagaagaaataggattggtgcattttgtgtttactgttacgcagtgcaatgggaggatcattgctagggtccagatctgatgacaaagaagtaggtgcaggacatgaaataagaagcagaggaggcagatgggtgggactcttggagtacactttaataggcagaggtggttctcttgattctattttgatacctaaaactgttcgtgaagcattgtatcaggaatgtagatgcttccagattcatgtcctttactaataatttatttcgtcataagatcctgaaataagcaatgatcaagagaaaaaagatatacaatagctaagatcacaagtaagttggctaacaaagatcaaattaaaagaaaaattaagtatatataagatggatgacaaatgaagcattaaagtatgagtaattataccaaacccaacaacatgagatggtgacccatcagctaaggtaatagtagaagtggaagcgtgaggttgaagattataaaataaactagtattacctgttatatggtctatagcactagaatcaatgatccatttggaagataaggaaagaagacacgaatttgatttacctgaataaacaataatagtgatagaagaagatgaatacttaagagactcctgatactgtaagaatttgacatattcaatcgtagaaataagaactagcattctagaagccattacaaatattatgtttgtcccaccaaactaacttaaacaacaaaccaaccaataaatccgataaaagggcaaacatattaagaccacaagttgggaacaaaaagagatactgagctaacactcaaaatctcacaacaaaaataggagatcccaaatctttacaagcacaaatcaacgaagcatataaggcgtactcaaacacgaagaaaagagaaataccaaaccagaacttacgagtataaaatagatgcgaatagtcgagagaggagccgaaaaaggattggagaccgaccaccgttacaaaaaatgttggatgcgcccacacgcactggcgcgtggggtgcgtgacagcaacaatgggtggcgctgacaacaacaatgggtggtgcgtgagctgcacgtgctaggattttggtgaccagacttcgagtttggcaaatcgacaactaggcaagatttctgaatgggcggtgagaataaaagatcactccaattagggttttcaaaaaatgacccttgaaaatgaagaaaatcaaatcctaattacaaaccccaatttatgatgaaccgtaattttgaattttaaatcccaatcctaaactctgccttgataccatgtagaaaatggtaaatgaaaattatgtataattcaatagaataacaagtattatatacaaacctagagaaacttaaaaatgaaactaggaaagaaataagaaactaagtaattacaattattcctaattcctacagctaatatacaacttaagtatattctaacaattccaatgaccaataagttcctggatgagcttagcactctttactgaatagagtccaaaagattctttacaccagtaccaagagtctcattcttaatataatatagactaacccatactttgtaaagcatgttattagttatctcatgtttgggtttctctaaatattttatattgtctgttaggatttcttttcctaaatccttagccatctgatattaatttttctttagctaggcctgctgaccgtccctaagctggcttgcttgaggtctatggttttgctactgtaattgtttttgtctttttgacatagttttgagtatattttatttaggttattgcgattagtcttgtctctgtgacatgattttgttttattttatttgttgttggtttgtctttttgttctttgatgcctcactatcaaattgttattattggttggtaataacaagttctctaggggtgtagttacgtaccttatacaatagttgaatgcttaagctaaggggttaaatcaacctgctgtaatagattcattttcatgtctttttgagtggtggagtaaactaaatataagtgacttaatgttaattacgacgttgcaatctttttcatctaatttaattttagtttcttttgtaaaacgatctaacaatcaggcgactaattagttggctcattttttttattctgattctagttaggtttccaacaaatgatgtgttttgattaggttattagtcacagattgctattaaattatatgatttctttaaaaaaaaagtatgttatttattttatatttttaataaaaaaattccacttattacacaatcatactttattattattattatt

SEQ ID NO: 38663 - DNA, 2422 bp, Cannabis sativa
gggtcattttgcatcttggccctactttttaactatctctatataattgtttaatataattataggaccaaccttcaaatgaaaaagaaaatacaaaagaaatagaaagtaaccgtaaatttgtcaataaaaaaccatacaataatattaataacggtataaaacatataaaataaaattgctccgttattcttagtaataagatgcaatttaccattgtagatgtaaattcccctttttaattttgctcaaggccccaagatatttgggccgaccgtatgagctcccaattttcaaaaatgctattacttaacataacaaaggctctcattattttatataaaaagttataaaattaaaatatttatattggagcttagccatataatccaggccaaaccctgaataacatctcaaaaaaaaaaaaaaaacaaacttgccacatgaatatatttaattaccaaaacaaacataacatttattcaaacataacataacttttattcaacgatcaaaatcttccaatatccaaattattataaaaataattcaaatactcaattactcaaatgacgacgtaaagtaaattttaatattctaactaattataattatcctccattatgcatagattttgtagtaccggactacataatatattaatatgtactgtacaatatctctagtttttccaattttaaaatgtgatgacacaatacatattcactcacatatatgtatagcaagtcaactacttaatgatctatctagttggctttggaattgctcttgtcaaattgagaggtttcattggttgtctccctttatcttttgtccccattcgtgcaagttgcaaaaggaaaataatactcacaatcaataaatacacaccccttattattggtatacttcaatatataactcatcaaaagcaacctgacataaaacagaacacgacccttttgttttatttcttaattatatatatatatatatataatgaatgcttcatatctctctacccgtttaccgcgcgctaattaatcatgaatgtatcatgttcatatattttatatcatacaatcatatgataatgaaaaattaattagtattgaataagaataagagattccttttaagccctttcattaatattacaaactgcagggggcaaatggaacaagataatacttagttcgaaatataaattgtatgtataaatctataaacatatatgtacgaatttataatagtgttacatgaaattgggggggcaatattgaagcctcgggtgtcactttctcatatttggccaccaattaattagagctaggctagctagctcatcataaatgaggtataagtatatctagagtgcggccaaggattatcaagatatatgtagctgctagctagggcaccagttgatccattgagcgattgctgttggtgagtggtgaccgtgacttttgccctcaaacccatgcaatgcatcatttcctttagttttcacttggcagattctataaatatgttcatatatattctcgaatatactataagaaaatgcatttttattatgtgtgactttattatttaatattaataattaattaatttcttttatattatttttatttattttttttaataatttaatgacccctaataagaaaacttagctaatattcaacattgtggatccttaaacctcatttactaaaaaatcttcaaataaagttttatatgcattttttttttattgaaacacttatgcaatatttttgttttgatatatagtaaaatttagatattaaacattatgaacgcattggacatataaaactaaattttaaatatagttgattgtacaattaattaatcaaataatactaattttttttaccacagttcgtgtgactctattagtatggctttcaataaatattagcaactttccttattaggggttactaaattattcaaaaaaaaaaaagaaataaaaagaataaaaagaattaattaattattagtataaaataatagtttcacacatattaaaaaaaaatatctgtatatacagacgctttttatgactctacttaaacattatcttatattattatggtccacacaataatgtatcaattttgtaatgaataaaataggctttttatggctgaatttgtgatacctatagaattttgcttttgaaatattcttttcatttttctaaaaaaaaaaaatccctcgaattatgaaaataattgttaatttccccttcgattgcattttcttttgtaaggattttttttttcatataaaactgatccagttgatctatactgtaattcaagttttagtgaaaataattacataaactctactacatataacaatataatttaggattgcgtatcaa

SEQ ID NO: 38664 - DNA, 4718 bp, Cannabis sativa
  modified_base (4391)..(4398): a, c, t, g, unknown or other
  modified_base (4652)..(4669): a, c, t, g, unknown or other
acaggggggatgggtactaaatttaagagatgtttcaagtttgaagaaaattggacacgggatgttagaagcaaccttgtcgttgccaatgcgtgggattctgtgaaccatccttgggcccctgctcgcgtatttaaaaagataggagctactcgggtagctcttcttcattggaatagaaccccgtttggaaaaattgatgaggtcattaaagatctggaacagaaactggatagattacaacaattgtctgctggaaccagagattggaatttggagaacgacattagacgtaacctgaatgaagctagagccagaaaagcttaatttattggaaacaaagggaaagaatttcgtggcttaaggatggtgataaatgttccaaattattctttctttctgctgctataagaggaaggagaaatgccattgagtgcattttgaataaaaataatgtctggattaatgatcgggagctaattggtcaggaattcttggaatttttcgaaagtattttttctggatctgattatgatcggcctttggattgtggtcatttattcagagagaggatttctcctaagaaccaggtcgaggtcgtttgttgtccttcccgtgaagagatcagaagtactctgtttgctatgagtaatcataaagccccaggacctgatggaatgtccgttcttttcttcaaacactactgggagtctgttgggggtgatttttgtgaagctgccgctgatttttttgtcaaaggtagtatgcataagggtgtaaattctacgaatgttgtgcttattccaaaagtacagaacccgaagagaccaaatcaatttaggcccatctctctttgcaatgtgttgtataaggtcatctcaaaaatcattgcaaatagaattaaacctatccttccctctcttatttgccctactcaggccgcgttcgttcctggaaggaatattcaagataataatgttatggtgcaagaaatcatccattccttcaataggaagaaaggtaaagagggtttctatgcgatcaagatagaccttgttaaagcttatgataggctgagttggaaatttattgatcatgttcttggttgcttcggtttccctcaaaagttctgtagttgggtttctcagtgcatatccaccacctccctcaacatatgccttaatggtggtccagtcggcaagatcatgccttcttgtggtcttcgctagggtgactagttgtctccctacctcttcatttgtgcagcggaagtattttctagacttttggaagaagctcttgggaaggggattattcagggtatcaatctaagtagggggggccggtgctatcccatgttttcttcgcagatgacctcatcctggttggtcgagccaacctaaacgaagctaaatgcttttggaattgtcttgagaagttttgtgagtggtttgggcagaaggtcaataaactcaaaacatctatattctttagcaaaaataccgcgactggaatgaggagaggaattaaggaagccttgggtatagatgctcccgaaggggttataaagtgtttagggttacccctattcagatcaagacaaaaagatgttgactttaacttcattcttgacaatctcacttctaaattgcagggctggaaggccaaaacattatcaaaagcgggtcaggctacccttattaagtcggtgggtctgtcattgcccatctatgccatgcaaaccactaaactttctaaccgccttgtgaataggattgatggcttgatccgtgatttttggtggggctttgagaaagggaaccatggccttcaccttaaagcctagaataaactttgtcttcccaagtctttagggggcctgggttttcggaaaacaaaggaaatgaatcttgcctttatggctaactgggggtggaaattattgactggtagtcagtcgttatgttgcaagatcctggaggctaagtaccttagaggaagggattttctcaactgtaattataaagactctaattcctggttttggaaaaatgtcgttcaagccagtgcaatcctccgaaagaggcttgcaagagggtggctgatggaagagatactagtatttggagggactcctggatccctcacttaaaaggttcgtcccgaaaccaaatggaggtgtggtaacggataacaactatgtggccgatctcttgtcacctaagggtgggtgggatattgataagctcgaaagtcttttcaaccatgagactgtttcagatattctgaaagatggaaaccccttaggtcttggcaaggatagttggatgtggactttggagagtgatgggcgtttctcatgtaaatcggcttatctggctcaagctttggatagagcgcctcactgtgatgtcgctccaactctttggaataaactttggaatagtaacattatggagcatcagaaggttctctggtggtgcatcctctcttaggctctcccagttcgagcagtgattggaagaagatttcagattgaggatactagatgtcttttttttgtggtttgagggaggaaacgatggaacttctatttctaacgtgcgatgtggcgatgcatttgtggcgttcttcaccgtggggaattttccctgtgtgaaattctggtattcgcaagtttgggattgggtaaagttcatttggagccttaacaataggggtatccgtgttgaggatgtcttcctctatgcttctattgctgttgacaatatctggcgaatgcgtaacaatgtggtacacaataatagctctcccgatgttttgaaatgtattgaccatataagttcttcttttgccacgttacatacttctgtcttgcctagtcgctcgccgcctttgaaggattgctggactcctccacctttggattggatcaaattgaattgtaatgttcgtgtggggagggtgattcgaattcacacgtcccggttggatttttcagaggctctttgtggagaagctgcggcctgatgcttggcagtgtctgttgcaatggagctagagtataagtatgttattatggagagtgactcgaggctagctatcaacgctcttaatggtaaggcgtcccattgggctctagagaactatgtctccttttgtactaagtcttctccttttttcatatgttgtaacttttcgaatattagtaggacttgtaactttgcggcccataatgtggctaaataggctttcacccaccagatgtacggatctatttcgatccactctttaccgaagaatattttgtgtaacgaccatgaggtctaacatctatttaatatgactacgcttcttttcaaaattaaaaaacataatccttgacaatgaggagtatggtgagtcgaaccttttacccaagtaaaggaggttagtaaaaatttccctactactacaccacataatacgtggttaatatttttggtttttggtttgagagaaaaataggtaaatatcacccaacatttgttttaaaaaaaaactatcaataacttttattttattttttctaaaaaaaaaaactaaaattatgttttttaacttaaactttcataacaaattgccttattttctcttcaatatatcattcaaatattaatagtttttattaattaaaataacaattaaattgaatgaaagagagtaataaaatatttttgaagaatttatcattctatctctcagctaaaatagctcaaactctaaaataattctgtttgattaagtttctacttttacttatagctagaagtataagccttgatatatatgaaaattttctttaataaagaatacttttcaaagtgtttagatatcattaaaaaatttgtgagtaaattatgaattatgtaaattatgttaattttaaaaattattgagttttgtgccttagctaaaactctattttcaatgtaattttgaatattcatttatcaataaagaaacatatttattttattacttgtttaatgtattatttggttcacatgtttatatcatgatcatttgtttgatttataaatttatctaaatccttatcatattgatattcctgattattgtattgttaacacagtgaaaagtaatcaagattatgtgagtaaataaattcttacgatttatcagtacacagaattttactgatatgataatctacagtgtagtttacttgcatcttggataagtgctatatcctttctagggaattggtaaagtaagcttcgattgaatgtatggagtatacatcagaaggaaccgatattaaacttggataagatataataaacttactataatatctatctaatttaatatcacttagttgatcttannnnnnnngatctcaatcttgagatggttagtttctaatttaattatattatttatgttcttcaatttattcgttaaagttgaccaattggatcttcttgttatatacagattaagaacatggtagttcaattgagtgagagcgctaatcatagattcagaatctatagcttcaataaatgcaaagaagtgaaatgatgatttccttcgagtttggcttaataatgataaataatggagtgctcatttcagtaattatattnnnnnnnnnnnnnnnnnnttataggtagctaagtattttaagaataaactacattgaagggtaaaac

SEQ ID NO: 38665 - DNA, 2218 bp, Cannabis sativa
  modified_base (1541)..(1551): a, c, t, g, unknown or other
ctatagttgtactgcatatgtgtcgtatgtagcatttacttcaaatataattattatatggtatggtgttacgttagagcggacgacaaaggtatgttgtagcaaaatttggacagcaaaaacatatatgttgataccttggggttgcgtatagtagctattggagccttattcttcttcacaatgagttatatcagtttttttattctatcttttaaaatatatcactcaaatttttaatttattttcattttatctcaaacatttacattacacaatatattatcaaatttttttgaaatgttaaatttttattttattaattttacatatataatagtaatattacacatattcacatagaaaataaaaattaaaattctaaataattaataaaatatatttaaagcaatgaataagttctataaatggagaacacgaattgtaaattttaagaaaacttaaaaataaaaaaagagtttttttttttttttgaaaatgaaaaaaagagtttagagcctagcatattttcagtttagtttttaaaatattttaaagaatctatatattaaaatatttgatatgagtgctcaaattgctctttggtttagtttacttattcaaattgctgactgataattaagggtgttcatctaatttaatccgcattattttgtttatagtgtatttgattcgcactaagtggggatttcatattttgaatccaatccaacccgtatagtagctcaaatcttattttgaatcgattattttttaatatttataaaaaaatattttttttacataactagctacaaaataaattaaattattgttattttttgtctctaacaataaattaaaataaataaaataacaaataataaatttaaaggaagaaaaaaaaattatgtataaagaaatgtttaatttttttatgtagaaaaataattgtatataagatgtaatatatgtttgatctattaagttttgaaatatatttgtattatatgtattagattttaaaaatatttttttatactaaaatattaattgtatatataattttttattttttttttttataaatatgtgtggattggattggatcagttacttttatatgtcaatcagcatctaattcccacaaatacgaattttgagttttctaatctaagtcaattcgcacaagtaggattttgagttttctaatccaattcaaacttcaaattgaatttaattgaatattttatgaacacggctgttgataattggcccacagccacatagggtcttcttataagcaaagcaatccttttatttatttatgctgctggcagtgagcgcaactcaagcgagtggcacactaaaaacaaagcatttcattacattacaaaagatagggaaaaaaaaactcaattaaaaaaatacaatcaaaatacgttattgttattattattattattattagagaaattatcctatatactatttttataattttttatttaaatttatggtttgagtttctaaagtggttnnnnnnnnnnntgcaataggagtttctatacgattttttattgcaatttaagttgcagcactagttgcaataggagcttttatgtaaaattacataaaaatataaaaaaaactgttttgaagtgtaaaaataaaaaaagtttttaatattattattatagcatataataattttcatgtatattttttctttttctatatatgatataggaaattcaattctagaaatacccctacatcaactaaagccaacaaataaaaaaccaaagtcaattaagacgtttgaaaacttccttttcgaaccaagttcacacccccaaaacaacaccgtaagcctttgatataaaatcaaagctaggaagaatcgagaacacttcgattcaactttaaaaccctaacagacaaggcttcattttcttcttttcaagctcgatcttcagcttcaaaaccactccttgaacctacaaaatccaaacacaaaatagaacgaaacaactataaagatctagattgatctttgttggttagagataaaacagaataacacacaagatcatagggagaatttgatctcagagttcaccctaaattagagttatatctccgttaagcccgcctcagagatgcttaattatgcactatcaacataaaacgattacaagaacaagggtggagattc

SEQ ID NO: 38666 - DNA, 2386 bp, Cannabis sativa
  modified_base (523)..(558): a, c, t, g, unknown or other
agtatcttgaatttaaaagaaaaaattacttagttatttattagtatttttatatgaactctcacttttattttcgttgtcaatgttattagttttttagtatgtaatgttttaatatttcatatgaaatttctttagtatattattatgttcttttatgtttagctctattaatatttaatataaaattattttataaaaaataatttaaaatctaattaatagttttattaaaaatttatatttttttagtgaggacaaatttatcactaatagtgttatcagtgacgacaaatgaccttataataaaaaaaaaaataaacattatcagttatgacaatgtcgttactaatgtttatttttcagtcactaatggtcatcatcaatgacgaaaaagacattcgtctgtgacgaaatctctcctcattgatatctattttttttgtacgtagtgacaattgattaaattaattaataaattaataattataaaaaacggaattttaaataataataataatannnnnnnnnnnnnnnnnnnnnnnnnnnnnnnnnnnnataataataataataactataactgcaagcttccaaaacaagtaaatgatttgaaacaatcatttttcaagagaaaagcttgagtggaatattagtttaccctacaactaaatatcaaaatgacaacgttttttaatctattcaatattgctaaaatacaactaagaaaaaaataataattaaaatataaaatttggagagcatgaatgttttgattaagaccataaattatatttttggtcaaaaaatttctgaacactttctttttccaacacataatcaaaacttttgggctctattagttttgctactttctctaatattttttcatcacatcatctctcatcattgttcattttcatccttaatttgctctctttctctcttatggacttattctttactttctctttctctctcaacttaaacgaactttctcttatatgctctctctctcaaatgaataaatttttaatttatttttatcaattattgataaaaataataaattttttaaattttaaataacacatgtgagtattaatattgcaatgacacattagtcccattaacattttgttagtcaacataaaacttagcataaatctagattttaattgtgtataatttgagagaaatatttaacaaatcataagaatttaaaagttggaagataacaatcttaaatatatatgttttttgttttcaaaatgaaagtttacacacataaatcttcttgtttctattaaaaaaacactcacaatttatatatccatgaattattaaataaagttcattagtgaaagaggtcaaatgcataaaagaaataactttacactacacgttgataataaagtgagaaaaaaggatccaaatagacaaagataatgttgttattgccttcactttgctatcttttttgctttgattagtaattaataattagtaagagatccacaattgatttggttccttcctaattatttctcatttctaattcaaaactttaagaaagaagaaaaagtaaaacaaaaaagtttaaagaagatgatataatggtttgcctttgtaccttcttataaaaatattatatattttactattcttttctcatattttcccgcgtaatgaaaaaaaaaaatgtgtgctatatataaatattatgatataaaaatatccaattcaaaaaaatattattactatttggtgatgctttcggtgaattattagttagaaatttgcatgtggtttgcagaagtagaccataccataccataccaccagttagtcacttagtgtgactgttgagcagctaataagctggctaaggctaagccatccaactaagttcaccagaaatataattagacttttttataaaaatactaaattttgggtaatttttttttaattttactgcaacacgatagaaattacatttgtattgtccttctctttttttttttttttttcttttatattgtaaaaccaaagaaaaaaaaaaagaggtctccatctttcacatcaacaaataaaaccatcacagtaacaccagaacaaccagaaaataacaattaatttcggtgagattgaacaaaaatattaaaatcgacatcaaataaataatcatgacaaaacaacactaaaataaatcaaagaaaaaaggaaaaaatgattagaaaaactaacaatcttctgcacagttttaacaccagatgtaattgcggttatatttgcaagttcagtcttagaaaatcagaataaaaaaactactaaaacaacacaaaaacaaatgtaaaataatgaagcagatataaccacttagaaa

SEQ ID NO: 38667 - DNA, 2460 bp, Cannabis sativa
  modified_base (27)..(28): a, c, t, g, unknown or other
aacataaataactgctaatttccaaannaactaagcgggctttacataagtaatctaaaattataaaacatcaaaaattaaaaagaaaaaaaacataacataagctcaaaaaaataaacatacattgctaagtaataaaaatagatcaacatcaagaatcacaaaaaaaaaaattatataacaaaaacttgataactataagtggactttgttacaaaaactatttattgcagaaaaacttgatatttaatttgtaattaaaaattaaataaaaattaaagtaacataagagaaaaaattatctaataattttgctgccaaatatctattagagaagaatttatcaataaataatcatttgtaaatctgaaaaatatagatcaacgtcaagaattagaaagaaacaattaacataacaaaaaagaaattaataacaaaaatatcaaaaatatgaattatcacaaaagtttaatttagatttggacactatatataaattttttgtagtgaaagaatacaatagttttttttttttttttgtttgttaaagaatacaaatagttttaatataataatagaatattaatatatacatgaatgataagagttatataagaatacaaatagttttttttagttaaagaacataaataattttagtataataattgaaattaatatgaacatatataaatgacaaaggttacataaataattcaaataatatttaggtacaattttttttatttattttttaaaactctaaataaataaataaaaaaagtaaagatgaaagaagtctcatgtgtgatgctacatgacctcttttaaatgtttttgcataaatatatattgattgaagtataatcatatatatctaaatcaagagaaagtatataatttatatataactataatattatataaaataatagtagtgagagtaaatataattattgctatgtcattcatgtacactggccactaaaatatttatatattttttttcatttatcattcttagataataatattctcttaaaattgtaaactatattgtcttaaatggtcttttaaatcctataacatataaatcaataaatttaaatacctatccataacatttaaatattaatttaataagtatatttaaaaacataaataaataggggctcaaaaatatacatctgtttttattttaaataaaaatctttcacttttatactaattaaaaactagacttaataagaattaagataattaaacaaaatctgtcttgcctattggcatgtgttatggttttttctctctaaagtctttctttgtttttttactgggttattgttttttactgggttattgtattttctgggttcatattgatacaacagtattacaagttatacgtatcagtttgagcatggcttccagcagccgatccatggaggagatggaggagagatacgccggtatcgatattgaaggagaagaggagggtgtggagattgacgttctcgactcggaggaggaggtggtttttgatgatcggttttgtttggtgggaaggtttttgaacgctagaacggtggacttcgaagccatgagacacactttggcgggactttggaagcccggtaaagggttgtttgttaaggaattggggcccaacctttatctttttcaattctatcatgaaatcgatatcaaacgagtcatcaatggaagcccgtggacgttcaatcgtctactttttctgtttggaagagtgccgcgcggtggagatccgaaatcgatcccgctgaataagttggatatgtgggtgcaaattcatggtttaacttcgggtttcatgacggagagagtggtgaaggaggcagcgaaggtgatcggagagcttgttgaaaccgatccgaagaacaacaatggactgtggcgtgattttatgcgtgttcgagtccgagtcaatatcgatcaaccgatcaagaggagaatgaaacttaaaaaggctggcggtgaatggttttgggcgccatttaaatacgagttcttaccaacattctgttatatatgcggtattattggccataccgaaaacttctgtcacaaactgttcgacacaccggaggaagccattgttaagccgtatggtgaatggatgagggctcaaactcgtcgtaagaattatatgcttcactctcaatacttacgcactggtacggaggctgatatacacacgtttggaccacgtgaacctgctgctgaagtccaagccgagaaccagcccttgccgtccatggaggcgatgaacagtgggaaggagaaggtgcagtccagtcgtgcgattaacagaggcaaagaaaagttgccttttttatctgatggagagaatcacggcagtttacaccccaaaacaatttctcctaattttgtgggaggtaatcaatctcctttatttcctca

SEQ ID NO: 38668 - DNA, 2322 bp, Cannabis sativa
  modified_base (1581)..(1584): a, c, t, g, unknown or other
  modified_base (1802)..(1815): a, c, t, g, unknown or other
gaagagcattatcatcattttgataatcctaatcataatcataccaaacataatgaagatgttgttgatgttctgcttcaacttcagaatgatccaaaccaagccttaaagatcaataacaaccaaatcaagggtgttataactgtatgtaaatattctacacattttcttttttactagtcttctctttttgtaattctatttgattaataaatatgtatatgcaggacttattcattgctgggactgatacaacatcagcatcactagtatggataatggcagagctgatgatgaatccagaagccatgaaaagagcacaaaaagaggtgagagaagttgccaatggaaaagggtttgtagaggaaatccaactttcaaaactaaactacataaaattagtgatcaaagaaggattgaggctccacccaccagtaccattactagttccaagagaaacaacagagttttgcagagtaaaagggtacgacattccatctggaacaagggtttttgtcaatgcaggagagattgggagggactcgaatcattgggaaaagccaaatgagttttggcctgagaggttcttggagagctcatcatcatcatcaattgactatacaggaaaacactttgagttattgccttttggtgttggaaggagagggtgtcctgggattaactttgctgctgtgttgattgagcttgcacttgctaatcttttgtgtcgttttgattgggaacttcccaatggaatgaaaagagaggatttgaatatggaagaagtgtttggtctaactatgaataagaaaatccctctatgcctagttgctaaggtggttgatttttgagtacttgtaccgtaatactcttgtatacaatttctaaatgacttgtcaattaggacaatgcaaattgatttttgtcaaattaattttgttaggaccgtatacttccaattagatatatatcgtcgtataaaataaagtccataattagctgcccattcaaataatattacttaatttttttttcttctatgataagatattacttagattttgcgtgtgtcaatgagagcctaatcctaaccataaaaaaaaaaaatatatgagtcgtgcataaaaatatagatgtgtacgtaacaattttagtaggcgcagcacagcgtatgaacccgcaagcttgctagcataatgttgtgctcagatttatatgtgatttattttgggtgacttgtttttcttaaatagacaactcttttattataagggctcaaatttgtactttatatttttatttttattgcaattgatgagttaattaataaaatatatgtgcatttataattttaattatttttatattatttttcaatcataattacatataattatagtagtacttttatttaagaatactcttgggatcaagtaaattatattctaattaagatgttataactaaatagagttatactagaaaaaaaaaatcaaaacaccgaaaaatatcaatataacaacaataataataaacaatctttaatattatatcacaatagaattatttttgagtaaatannnnatttatacatgtattataatttttaataaaattattaattctacatacataaatttataaaataaatgtatatatattttattaagatatagttattcttatatagtagtatactttcttaatgcgagatttaaaaatatataataattacaatttagaagttattcttattaataattggctcgaatttggacttaattttttataacaaattagannnnnnnnnnnnnnagagtattcttaaatagagattcttgtgtatataaaaaataagtataattattagaatttaaatatttttattacttaattgataaataaagtaatattattttattactatttatcattgttgctatttatcaattaaaacaataatatttatcattgttacaattattatattatcaggctttttaatgtatcgtgattttgagctaatctattcgtgcttacgtctcatactttcagacttgtcaatttgtgtcgtgtcatgcctaagcctatatttttcgtgtcgtgctgtactgattcgcaacattgtgtcgtgtcatgcctaaacccatagttttctgtgtcgtgtcatgctcaaccaaataattttcatgttggggtcgtgctcatgcgtgcctcttgggctcgtaccagtttcgtattgtgtcaaaaagtctgacccatatttataatactagggtccatatgtatactatgtttcttagtcctaaatacttaatttgt

SEQ ID NO: 38669 - DNA, 1657 bp, Cannabis sativa
aaaaaaaaccactagttaagataagacacaaatcatgagcaaagaattatataatattaataagcagagtttatatagagaaaaataccttctgtttttcttcttttccttgtaacgttgcatagcattgcctctgttgtgagccaaaacctccaactcttcctttgatgttgcacctgttttcatagtgtcatttctcacaagaaaaggttgttccatgaaatacacctctctcgacgcactacactcttcgtttttgtgcttacccaaagctgaagtactagacgatgacccctttccaataggtagattgttgctctccgaggttgctgctccttggctactattctgtattataacaaatcaatatgattacacatacaaaacaaagtcttctagtatttttctagtcaactatcacaaactatgatttacattgatagtcatgtcatctggtgcaacagggcaattcagaagatcacaaaagttcttaatcataaaccctccatcattaggcccgtatgaaatttctggttcttcattaaccctcaatctccctgaatggaaatcccatatctgcaaaagttataaccacttctttttcaggagactaaacatggtgtttgccaaattgaggcagattaaaataaatctttaggaataatacttaataatataacacctgagtggttggaccattggggttggtatcccacattgccaaatcaccatcgtcaatgccatcattttctttcaattcacagtgcattggcatcattagtagagacgtgaatggagtcgaagatggctgagctgcaaaagcaacatcatcaacagcatcacagccatcacccaaactgagtgctgcttcagcatttcgttgccaactactccgatttgaattctccggcattaagctctcaacaccaccaccaccactacaaccgttgtctcctccgcaaccatcatcgccaagttcgtcattttcaggggccaccaaatccctcttaagcaactccaccaactgcttatacatcacctgtttcttcttcccgcagcagctggcacccattccactctgtttctttccctcttctctaacaaggccgttcccggtcggtacaataaggtcctgaaaattcactccagaccaagatgtgtcctcagcctcaggcatagccatacccaactcgtaattctgaactgtggaatcgggccgacccgatttcttttccccaagatgaaaaccccaaaccgaggcgagctcgagggccgatgggcaaccggagaatccatcgacggaattccgttcgtgtgccggggagacagaacaagttccgtgagcgtcccaatcacagtcatggcaaaggacaagattctcggtagagcaacggacggagacgggttcggagccacaattgtcacagatctgagatcggagatgcttacgtgaaagaaggttggctgagtgaacgtgttggtcgcagaacaagcatagcttagcagagtcagctctacagaagagaacagcaacctgttcactacagaaatcacagggcacactgttacccgttcgagatctgggactattcaccatgttcttattcgtagtaatgctagaaaagaaaaagaaaaggacagagagagagagagagag

SEQ ID NO: 38670 - DNA, 3019 bp, Cannabis sativa
atgtcatatgattagtttgattgatgttagcaatactttttattagatatctcattcacattttcacaattaatcctacattaatttattagagtttgtaattgagcattagtaatccttaacactttctataggtagcgctttatgattagttaaagatattccctaaaagttattttcttaaattatatctaatctgatacttaattatatcaataaaagtatgacacgaaatagtgtgctagatactaatagtaccttttagcaattctcttattttaaaaaaaatatacatacacataattactaaaaggcaccactagtacttagtaccctcgttggtgtcatactgctattcgtgtaattaagtatcgggtttcatataatttaagaaaataattttaaaaaatatcgctaactaatcgtagactagagtgccacttataaaatgtgtaatggtgccaataacaatgctccacaagagtgcacttgaaatatgtttggttggaaagtcacgtataagaatatatgaatatatgtagaaaacgtaactagttttgtcataacacttttattaagttttattttgataaaaataattagtttaaaatactatttagtattattttaaaaattacaaatttttaatttattatttaagaaaatatagagtctaatcaataatttttacaaaatataagattgaaaataatatttacttttatatacaaggagactaataaatattaaatagtctcaaggaaatataaacttactactaaaaaatgtttatataaattcatatgtcttcgtataatttaactaccaaaaagggaaaaaaaaaaaacattggctagttagtttatatttacctcatctaaggtttggatgttacgttgtaaataattgaatactataattctcccaatatttacttttgacttttgagtaggaatggagagctacctctaaaaatgttaattattaataaatagttagtttatataaaatagtgaagtcttattattggatatatagacagttgtgttttttgttcttagatcttgattcatttgtttgtgacctcattaataatagaatgatgaaaagtaaaggttcttttttcatttggtctaataatggtgactggattttctctagaatgttttcaagaatgagacttattgggtagacttattttctcaaaattaagctcttttccaatggaatgtggtttttgatcattgtcattaattgcattgtcaaatctttagaggttgagaataaagatctatatggtattgattggaataaggatttgaagggtatgtctttgaattgaacattggggaaactgcttaggctcaaacatgctcttaagaaattcaacgagtatttggccaaatcaaattactaggaggctcaattactcttacaggaagatccaaaaaatgggttgctactgaaaaagcttcttgcaatcacttcaattaaaactcaagctagaatgttttctagttatttgaagtaaaaaaaagtaagattacttggctccgatattgggatgataatacttcttattttgatgttagccttaaaatgaggagggaggaaaacatgatcacctcgtttatcaatcaagaggagatagttgacatgtatgaagcaatcatgtttctcattattaattttttttttaagtggaaagattacaaaaataacaataactcttctcatatcattaaagtcttaaaccatatattatctattacttctttgaaataaattaacatataatttgcactaagtaataatcaaaatgtcactcaagctacgtgaatactctcgtttcacatcaaaatatatttattctattagagtattcgtaatattaagattatgaatcatatttcaggtggccaatctaaaatatgtataaatataaataagaacaaattacaatgattcagaaagaagattaaaaaaattatattaactaaattggaataacatcaattaacattcattatatccctaaattagtttataagttctaaacttatattttttttcacggcatgactcatattttttaaaaatatatataaatatgagccagatcaatatgatacacacaaatttgaagcactaactggaatctctcataagcggaaaataatctatttattatttagggagaaaatcattaattttctataatttgttagtcatattttaagtgtgtgcaatcttctaagaaaaaattttcattggttcaattcatgtgttcttgagagagatgttactagctaggcaggtattggtttatgacaaaagcctaaaatagagcttggaattctacggtaaagctgtatacttttcctaagatgtcatgtttataatttcttacttttgtggtatttttgagaatgttaattcttatacagacaaaaataagctcttgcaaatgattttaaatggataaaatatccgagttattcaaaaatagctgtcatatgttccataaaatacctcaatagattatgctaataaattttatgttcttttttattttgttaggagtttttgcttttagttatggcgaagattaagttaataataattcctaataaattatggagaattgtaaaaagtacttaaaattttgaagaataaatatacaaaattttaaaaaaaattacataattatggaggattaaaataataattacgtctattaaaaaaatagtaattaagtagtttttcatcttttatatatatacatatataacaaaaatttactactcactattcagctaaaatttttagagaagagtactctttattcctatagcttcttgtatgttgaaaatctaaacattctatatactatatagtcaataacgtccttatctataatcaagctcggccccaaaagcattaggtctgtgcttaggatccacttagttgaggagcacaattttttttttttctttataaatttatatatattttttta

SEQ ID NO: 38671 - DNA, 3220 bp, Cannabis sativa
ggcacaaaacccaacatcaagttacgtaaaatacatcggtgccagacttcctcaccatgaaatcaaaattcattttcaatgcaaaccttcccactacgtttttcaattgagtcttgtttgtgtacaactttccaacatgtatttcccccaaaagtgtaccactaagagaagttgtatagacactattttcttctatgtcttcccttgtccagacaagaggtttgaatttgtataaacttcaaaatatgatggcacggtacgacgaggagcaccaggctgactgctactagtgcttggtgtttggtgattttcactacaatgggttcttctttcttactatgtacgctagttcgttggaggtagttctaacctcaaagtaggtacctctacaactttatcaacttacaattccatctcaccattcttgttcaaatctacaatgggatcattattgtaatagggagcattaaactcatcaaactgatcaaatgaattgtcaactctgtcttcatctatattagtaggggcctgctcatttaaacctaccataagatctgtttctgggacaatactgccaacaacacttcgtggggggatagttggcggagtaggtcccaaattcgcatgcctcttaacattagtcacaaacagtggtaacaacttctccacacgcatttttgccttcattcttaagaacaatcttacttgactatctttcactaaaaccccggcagtatcatattgcctttcgtgtacatgtaacacacctctacttttagttcatacataagagggtctatatccaactcttcatacaaaatttcatccatcttctataaagtagtgtcaacctcaaacattaacatcttactttttgggttattgaatatccaattgaaaccttcaactgctcaagccccatcatataatacaaccacaaatacagttgaatctgcaaacaaaaatagaacaaataatatattcagatgtgaaaaatgtcgagaaatgcattgttattacaacttatcgcaaaaaataacacaaaattcgtcgctaaaacccacttatagcgacatattatggccatatcgcgaaacatcgcaaaccgcgtcgctaaattaaattatcgcggtacatctcaaatccaaacatgactatcgcaaactacgtcgcaacatattgacagaaattattaaaggtgattgagccactatatgtcggcaacaacattgctagacatcgcgacacgtcgctaggcgatatcctggaccttaaaatcttatacttattgtaaaacattgcaaaacattgttaaaacacgaaaaaactaaaaaaatgcaaatttactcaagttcattttaggcactaaaaagacataggaaaagaagaatatgggtagatctattcttatcatacaaaatacaactaaacacgacaataattgataaacaaattacatactcatagttttttttttaagtaagtgttggtataatgagagtttgggttggtcctttgcacttgatgtggagtctggtggtctacctaaattgaaactttggcaagaggtgctccaattggtgtttgtgtgtgttagtttctagagagagatagagagagcgtgacgagaaagagggggagatgagtttagttttgttattggagggtataattggaactaaaaaattaaggtagcatattttgtctcatattttataaggtggtatattacgaggccatacacaatgtttaagcatggtatatcaaatatcccttatttaatctattagtctttatatatatatatatatatattttgtattgagttgtatttcttttggtcttttatttatcttattaattttcttttattgatatctctgtatttttctaacattttagtcatactacaattgtatttttatatgttagaaaaatatatatttctttcaaatatatatacgcttttttcccatatatatttttctaaaaaaaaaataattagcaattttgctcgctgaacttttgacaatattgattttgccctctaaattataaggcttgttaagaattatcccgatcttttacatttaaataaatttagtctttatgataggttacatcctattattctgtttaaaagctgacgtatttgttaattagtaattttgtccctaaactttaacaactatcaaattgtacctactcaaataaaaatgggaaagattcgatatttttctttagtaaatctaaataaattaatttagatattaaaaaaaattatttttaatgattaagaaaattaaaaaagaaatttaaaatttaaaactaattaagcaatgtaaaaaattatttatttattatgaaaaaaatcatttagatttaagaaaaatatattaaaattttaattgttgtaaaaactaaattttacgggaacaaacttgagtctattttttttttcctccaaaattctaaatttgtttaagtaaacataacctcttttagtttaatttctaatttttttacaaaataattttatatttttattgaattttaaatattaaataagtttgattttttttttcaagaaaacttagtttgtttaaattatttattggattgttaataattttagtttgatgttgtaagataggtgtttataaataaaataaagttggattttttttttaagaataatttagatttttttaagaataatttggattttttttttaagaataatttagatttttttaagtaaacttaatactttttaaataatttaatattttaattagcttttaataatttttacataattaataaaatattattatttttaaaattaattttttctaataaaaaagagtaaaatttatattattttttttttcagggaattacatattaacttttaacgaaacgaaaaaagatataattatacaagtgttatattttaagaaatttttttaacaaaatatgtatatttgacggtgtaatcaaatagtatggaaagtttaaaaataaaaaggaaaatttgacattttatgcttaaaaatgactaatggtgtttaattataccatcatcctaaaatttttgtaactatgctaatcttacaatggtaaccccaaaatgccctctcctcaaacccaaaaaaatcagcctctcctttctctctctttccctctcgtttgatctctctctcttcttgcactctct

SEQ ID NO: 38672 - DNA, 1661 bp, Cannabis sativa
atttcttaaacaagagcccaataagaaatattaattcattttgtgagcccattttaatgatagttgctccatattttgacccatgtaataaatccaaaatgtgcatgtaaactttctacaaaaaaaaatacacaatattgtgaataatattttgaacatgggaaactaaataaaattgataaaatattacaaaattaattaaaaaataatctaaaaatactaaaattaatatttatggaaaactaaataaaattaaataaaagtcactaaaataaactaaaaatacttgagaacaaaactaatttaatgcttaaaaagatataaataactctattttcatagaattatcgtcaagcgttagttaaaaaggtctatttatatcgttaacaagttcagactgttaacactaagttatatatctttcttcttctttaaccatacagtattcttctcttttaagttgtatatgtctagtaattctacttctacaagccacgacaagcaggttcgtagatttgtgggtcattatctggctaggcctaggagcgatattcgacaaagactggctgtgcaacttatgtgctaacgaaggacaaaacatcccccttcgtgttcttgttaatgttgaatgtcaagtcagacaattaagagcgaaacatggctaagaatatcatcgcttttagcaaagacaaaaaagagaatgtatggaactatttgaaagtgaaagggtggcgaacgagaggaggttcgaacgcattcaaatgcatggtgatctcttttatccactaccagggttccccgaatggtgtcgtcgttgcaaaataaatttagttaaaggcaaaccggtcatggctgggtggttatgcatatattgcatgaatcgcctaaactattgagacttttaaatttaacgtttaggggttacttttaaagttcatgattgttatcctgattgttgcatttttatttatgtttaaaagttttcacttgtttcagccactttcttataatattgtcgacatactatcgacatcctatcaataatatgtcgacaaacaacaattacgatgagaaatggaaaattttattaatcatcaacaacatatcgacaaatcatctataatatttacgtaatatatattttcaaatattattgacataatatcgatatactgtcgagaaatgatgcttaaatttaatttaagctatattgtcgataatatgtcaacaattaatcgacaccttgtcgataatgtgttagtttttataatccatatcaaagttataaaagcagaagtagaatttgataaaaaataatttttattcaatatgaactataagcctctcaacataatatataatgattaaatctgaactattgaaagaattaagaaaggttatacctcttgaagcctatcagaatatccttatttctttttgtatatttatcaaatatccaatccaagaactttatttcgaaaaattcacactttgatcttttaagtcagcctcaactctcaagaatagagtggactattagatcttatttagatgaacaaatttaggtattacattgtgtgcttaactcatgagacactataattgagttaggattttgatctcacacacacctgaataggtgtgtgtgtgtgtgtgtgtgt

SEQ ID NO: 38673 - DNA, 2048 bp, Cannabis sativa
gcaactatcttaccatatttcctaagttaataagtttactaagttaattcaggctgaccaagaaaaattcatggcttcaaacctaattaataccaagtatgagaataggaagtaattcctgaaaccgaagcctaagggatatggaagtaaggaactaccttaccatatttgaagagaacaaagtttgctaaattaacttacgttaattaaactttcgtagaaacaagttattcaatttcaaggttcaggttgttggaaccaggttccaaaatatttataaaaaagaatttgtgaaaataaaaaaataaagtataagcataaagtgaatctcctaatgtccaggctgttagaaccaaaatcttagggatttagaagctagactaaacttagcaaaagtaaattcatccagtatgcatcaaatatctagtgaatctaaatatatagtttgtaaatttgaaatatttaaagtaattacatagttaaagtctcgcggcaatggagaaatatttgctctgtattaatgaaaaggagaatccttgtccccgaaagcaaaaagaaatgtaagagatagttcaaataggagtcatactatggccgagatggatcagtgatttcttgggtgaagattagtggtttttactagaagctttaagagcctgagtattgtctgaagtggaaccttattaactgggacattagttagatttataacattactagtctaagtatccttagaggccagaaaggtagattcctcacgattcttgtcttccaggagaatgatttcaggatcactctccttagcaactttagcttgtttggttgcttcctcggctgttgtaagttccaaaatctgaggtagcatctacattatatcgcaattttccaacatgtccaacattaatttgtaattttctagagttggaaaagataatttaccaatgcttgttacaaggttgccttgagtccctccttagagtaaagattttggttcttttcctccaactcctcagtataacactctgctttcttagtagcctccttagctttagaaatgtcttcatgagctttcttcgtggactcctgaaaggtcttctcagcctctttagttagtcccgagagccttcaatctcaaattcttctaccttttgttgcaggcagaattttatcgtttataatatgagtttgtttgtcgtactcttgagaaagggtggtctgtttctgatctagctccttatacttcatctcagcttcagttaccgtcgcttccaaattagtagcgcgagacagtgattgactataggattctttgtatctgcgtatgtgcactctctatcctagcaatccctttatagtgagaaactgtgtcatttaagtatttctcaactctctatgtaatagtgacctcgattctggcattggctacgttcaaagcttgaacaacctcctcttaccttttcttgacattgacatgttcaactgtcacgacctcaatctcataggccattttgttcactagagaggagcacctctccaccatcaaatcagcccaaaaattaaattacacaaatgttaaaaataatacaaacaaaattttacttgctataatctaaacaaaaattgaaaaaacttacaacaataatttggttcttcaggctatcaaccatgaagaatggatccacactagtcatcgtggcaaatttattaggacctaacttggtacaagtagaaactcttcgatccaacaaatttgaaagaaaaggggtcagttccattccaactctaggctagagcctttcaaacaattttgcacgatcaaaaatagtaggaattgtctctttccatttgctaaatttagcaaactctccattattccaggagcataacatggatgacgtccttttcatctctttatactcgaaattagtcatttacacatagaactaatcaattgcctctagttgagcttgcacttccttcggcagtgagaaagagacgatcaacaagttgattcgagaaggcgagagtaatgggagagcagttgttct

SEQ ID NO: 38674 - DNA, 1313 bp, Cannabis sativa
cagccaatgctttagcatgtgagacagaatcgtaccatatatactaataaagagacctatgtatatagctatgtgtggtgctatatatatattgttataaccaagtattatatgttttatagtagggattatatatagtattgtgaaaatgtcaatcattaatatatattattctcccagttggggttcttattgtcttacttgcatgataatatataactaattaatttatatatagagaacgtacgttggcccaaaggaggggttctagtcctctcctagacgttaaaatgttcaataaaaaaattaaatatatacattttttatatataattaagagcagagcatttttaataaggtgttataaatgtggtaaatatacatttttcaagcccattttcattgaattgaacaataatatatgatggtgtaattataataactatgtaagccacgttttatgcatactaaaagttatgttaaatttgcataaaacttggcattagtttacataataataataaattcaagacactggaaagagatctcttctccatttactagagttgaggaatctaaagtttccttgctaaggagtatgcctatagactaggaaagatcaaagtgagtgttgaatgtaacctttatgtgtggggtggtgaaataggggcaaagtatgaggttttccaaacaaaataaatatatatttttttgtcttattaatgtaatttatactttttatattttattgatatatttaatatgagttttatatattattaataaaaatttagtatgttttgttgatttttttctccattaaacatggtctaaatattagtagtggcttcatatctaaatatagatgagaagtttctcttaaaatactacaaaaattgttacttttagtattaactttttagtcacaatataatttttttttattactaaatgggatttttagtcacaataaaatattacttgtgactaaaatatagtatttaaatataagttgtcactaatttagttttagtcacaagtcacaaatatattgtgactaaaaatacatttagtcacaactaattataattgtgacaaatacatttagtcacagatcttttagtcacaacataagaatgataatttataattagtcccaataatcacaaattttgttgtgactaaaagtaaaaaaaattaatgtagtgaaaatataagatgagaagaagatttaaatttattttattcatattttattaggaaaggacctaagatttaagttgggggagggggtggaattcttttttctaagt

SEQ ID NO: 38675 - DNA, 2835 bp, Cannabis sativa
  modified_base (2786)..(2794): a, c, t, g, unknown or other
acttataaaaaacacagtaaaaatgtaaaaagtaccacctggcagtatttttgtaaaaaaattacaaaagatagtataccatgtaaatttccccttttcttattctatagacaatgagcataagagagttgttaagcttgcagagaatttgccatccgtcaagcaaagagcttttgatgcggagattaaggttactgacttagaaaacatagtcactgagcttgaaactagcgtctcaaatctttgaggtgccacaaacaatgccaaggatcgtaaaaagagctcacaactttgagaaggaagacttctgaagtagaagagtcccttcgcaagtcccttgctgaaaagaccttaagtgttattgaattggaaggctagattcatcatcttaagggccaagtggcagccctagaagcaaaggcagctgcaaacattgccctttatgagggctattgctttgatgccatttacaactcttggtcagtcaatggaggagctgatgactttaactgggcagccttcggtgaagacaagatcacattcttttcgagccaatgtgaccgctgcgcaaatgaggtagttctttgtgacatcaactttaacttgaatggtgatgtccaagatgtcagacatgctgcgggagtcgaaggctaccaccctaagcatccaaacttggtcgcagtcaaaatgtaccagaagagaatgcaacacaaatcgaggagatattgcaaaactagatagctgatagttctttgaggacattgtcttagtccatctttttttattagcattttagctttaatgtgttagtcagtcgtcttgggtgaccttttagtgtggatatgccttagtaaaaacattatcagaatttgttctaatttaattagaaatgaatttcaattcaattagactttattctaatattttttttttgcttttactttatccgttacagcacaacctttaacacttgcacaatatttcatgtcttaagaaactcgattagtgggagtaacattaatatttcttaacgtttcattaccttgaaagtactacttaggtgtgcaattttttttgcatgcccctgtaataactagctgtcatttagtagggggtatatgccacataagtgatcaaagaagtgccttcatttgtcacttgccataccaaatccttttcggttatcttaatcatgaatcttgaggaattgttacatgttgagcaaatgtccacttatttgtagattcgtgggttggcagtgtttaactcaccaaagaaataatcgaagttaccttaagaccaaatctacaagctttacaaagtgctttagagtgtcatcaattttgtgagatgtaattgattattaacaataatgtaccaaaaaagattccattcaatgtttttattcataaaaaaataaatataattacattagctaaattgaaaaataaagtgttcacaaacttgcatctcatcataaatagttgagtttattcccactacattgatgccatgttttactaaaagtgtaggggccataactttgcgttagacccctcgacctatagatgactttgttacatcttttcaattccagaggcaattgattcacttgcattgtaaagtgaatctcactgtgaagcgagatattttggagacacctgctttattagtggtatcgttttagatgtaccccattccagtacctttgtacatgcactggattcaagtggcagtcatagctaaccaacttgtatttcccgagttttagtgcatcaatgatgacatatggcatagccttgcggagttcagagttctgtttgttttcttcaatttcatctatagactcaggcagtagttgatgatttatgtgttgatcataactgagtcttcgttgcgacagtgaggagagctttacaggtatcattactttgtacctgtaagttaaagcaaaaggagtatgaatggctgctattttttcgtaatgcggtatgactatggtgcttctttggtgtatctttaagagtttggttaatgacttcaacttgccaactttctcgtgggtaagcaattcccgagaaacacttaatgatttagtgtccctcacaaaaatcaataaaggggtcattgtcaaactgtgctctgttatttgacatttattgttaacccaaaaactttctctggtaatgtggacatcaatgtttgacacgtggtaagaaatataacatctcagagttgagtagtccagagtcatagcagttgacctgggaagggtccctagtcctacgcccaggttgacttcaagaactttggaatcaatgtttggatcccccaaagttgtttcaaactcactatctttctgtattctataccatgaagacatgaagcatccaaatctaggacccaaaatctgaaagcacatgaaacatcacctaggaaatcaactcaagcacttagggtttcactaagcacctaggttgataacccaacaagcgtttcaattttcaagatcatattagtggaaatgggtcaaacattgtactgggacatgaactagacatacaacaaacatatttgaggcatcagaatcagaatcaaagaactttaatttttgagcacccagagaacctcatgctcgcccaaattgacaatttgccaacctgggccattttcaagcatcaaaccaaaaatttgactcatgcatcttcttcgtcttcatcaaaaatgggaaaacaagttcttttggggaaccaacatggaggccaatgttggaaattattttaccnnnnnnnnnatttactaacaagtatgttagattaacaacctaatatgaat

SEQ ID NO: 38676 - DNA, 1350 bp, Cannabis sativa
ttttttaattaatttaacagaagttgggaaaaatgtgggattgttggaaagagatgaattcgaagatggaagagttaatgagtgaagaattattagaggaagaaaacgacaataataataataatgctgttgttgctggttatgagaaaaacgacaacgtaatgatgaaaaacgacgtcgtttcgaatgaagatgatgttgtagttgaagaatctttgagtgtggagagaaaaggagaaagcttaactgttcgattcaactgtcaatgtggaagagcttatgagtttcttcttcctggtggtaactgttactacaagctcttgtaataataatctcacccatttttctactctttttttttttctaaaaaaatttaaataaagacaagacatgttctggttttgttgcaattcttattctttgtaaagaaattaataacaataataataaaaacaaaatttagcactgtaatttgccttatatttagttgttttagtcgttttgttgtaactattttttcatgtatgagaatacctatatcattttttttgactttgtttttactaaaaaattaaaaattggaaaacgtgaatatatgcctaaatttgttttgatcgtggtcaaggcacctaattgtttgtttgtacgaaatattgtcgttctaaaactgaattcatgttattctttgtcatttaagcatgacattgtcgtttataagaataaactactgtcgttttgcccccaacaacatgatcgtggtgtgtttctaatagaatgatgtttttactattttggtgaaacattttaagttattttttcttaaaattccattctacccctcccatttgaacatacatctctttgtaaacacacacacggaggagaatacaatcggaccacccacacgatccacgacttaaggaccagctcgatctcgcgaccacaccacctacacgactcacagaccattacgactacaccacccaacgtcgacaatgtctttgtcaaaaataatccttaattttttcatgaatttttaattgtactcattttattttttcatgatttagggttaaagtaattagatttagagttagctctgtatttttagtggagaatatgtaatttttgaagtttttaggcttgtatttgtgttttggagagacatttgtgatttttgctttgcccgatataagtttgatataagtccgatataaggtctaatggtagtttaatattaaaggagttgaaagttgaagaaaatagaccgataagtctgatatatgagccgatagtggctcgatgttcctcgtaattttaaattttgtaacattgaaagttgagatgaaa

SEQ ID NO: 38677 - DNA, 1895 bp, Cannabis sativa
gcggcttgaagccgccgccgcgccgtgcccggagcaagcgccggtgccggcgccgccgtgggagctattttgacatgtcaggcgaaaagctctttttgagcatcggaaactgtcaccacagtgtgaagacagagaagaagaaaaagaaaaggaaaaaagcaatgaaaaaggacaataagacgacgatgatgactttgatgacgtcagcagcaaaaatgagtgggggtataatgggaagaaaatgtcagcattgcggggctgaaaaaaccccgcaatggcgcgcaggtccttgtggacctaaaacgctttgtaatgcttgtggggttaggtacaaatcggggagattggtaccggagtataggccggcgagtagccctagtttttcgagcgatttgcattcgaattcgcaccggaaaattattgagatgagaaaagggaaaaatgtggtgggaatgatggtagagaatcataacccaattgagtcttgatgatttgtattagtgtgtaatattagttagtaattagtacttttaagggtttttttttaatttgttttactattaatatatataagtttctagttaggttagtttgtattttttgtattggattagattatttttggttaagttatttgtttgtttgtttttttattagtatgattatttagcttgtagattagcttccacaaggtttgaagtttgagattttggtacttgcatataattactatagttgaaaacaatagaggttaaaaatgaaattatattgtggtgagtgagtttgatgattttgctagattttttttttttttgggtattttaattaactgaatttttagattatattgggttttgggaagaatgtcgtttttgtttggtttgatattttggtatttatatcaagtttgaattttgaatgatataacacattattatttttgtattttaaatgaattgtaatgttttgttttttatatagttattttttctgtggtgaaactgaatacaatgttagtcatttgatagtttttttttttttttttaataatagaatttgatggttgatttacttgttatataaagaagatttttctgaaagattttatgatgaatttggatgttttttggtattttaagaaacatttgtaactttttttttggcaaacatttgtaactctgagtaagaaattttggtaactaaacttggataaaaagctgaaacccttttaactaattctttggaaatgttgattctatttaaagttgaccttagaagtgaacattcacatcatgagtttattttttaaaatacattattaaaattttacttaatttattttacataaatttttgcattacattattcaataatttctctattttttttttaaattctatcttttaatatattttattcattttagcatatgatacacacatactcatacataaaaaataatttaaaattataaaaactaataaaataagtttagaactattataggagtgtgtttaattaaaagaatattgctattagagcactttctctactttattctttaaaatacattattaaaactctatcaccatatattaacttttttaaaatacatcactaattttttttttttaattttaatatattttattaattttaaatatataatactaatatatgcacatatccccatataaaaataattattaagacccaaaataatttataaaaaatatttagagtaatgaatactattcaataaatgtagaatatgaatagtaaattttaaaaatactttaacatgaaaaaataggttaaagcatttggtgtacttatctttagtatgattttttcaaaaaaaatatttaaaatttttctattttagaaaagttgtt

SEQ ID NO: 38678 - DNA, 3621 bp, Cannabis sativa
gctgccagatgtttctctgatctgggagagtatgaacgagcaggtataaatgaacttcaaatcaatatattataattttgcgatttatatttatttttatataatatactgaaacaaaaactgtgtatttaattattagaacagaatacaaaaaaaaaaggatcaagttcatgttatatcaaaaagaaaaggccacgaaagcctgaaagcagcagccttaatagtttcttatgaattggttttctgttgccaggttgtatttatttggataagtgtggtgagcttcgaaaagctgcagaatgcttttctctggcggggtgtcatgagcttgctgctaatgtttatgcgagagggaatttcttctcagaatgtcttactgcttgcaccaaaggaagattatttgagatggccttggattacattaaatgctggaaacaaaatacagcaaatgagtgcagtactgcagagagaagcaatgaaatgaaaaagattgaacagatgtttttggaaagatgtgctttacattattttgagatcatagataagagttccatgatgaaatttgttaaggagtttaattcaatggattcaattcggaactttttgacttcattgtgctgcttggatgaacttttgttgttggaagaagaaaaggagaatttcatggaagctgcaaatattgccaagctaataggtgatacattacgcagggttgatctactggaacaagccggaaaatttaaagactcagctaatcttattctgttctatgtgcttgtcaactccctttggtcaccaggtaacaagggctggcccttaaagcagttcaaaggaaagggtgatctcttaataaaagccaaaacatttgcaaggaatgatacagacagcttttatgagattgtttgcaatgaggctgatatcatttgcaatgaacagagtgatatggtaacaataatgagtcagatgattacttcgcagaggcacaagtgtgttagcggtgaggttctatctgctagaaaaattctcgacgtgcacctttcattaaaacccaccaagtactattggcaagaggaactggtgactgatagtatgaagcattcaaaagacatgatatctaaaaaccaggtatcaatagagtcactggtctacttttggaatttttggaagggcaagattgttggcgttcttcaatatcttaaatgtcttgagacccaagaagttaatgagtttagatattatggagagttctgttttaattttttaggtgtttggagggagttcaatagtttgaatccagtattttttcttctaaaccctgaggctgattgggcaagagatttggctaaacgatcaaatagtggaaagttggtatctattgatttacaccaacttgtttctgctgctcaaagatattggtgttctgagatgctttctgttggtgtcatggttttggacaggctcaaagttcttttcaactttccgatccagaattgtgataatattttcttcaaaagcagggttcttaccctgatctatgaggttgcaacatttcttctggatgcaaaaattctgaagctgaggcatcatgagtctgagaatctgttgaagtacatcagattttctactgaaaacatagttgattacatattccctgaatggcctaaaccatcaagcgaaaacttgattttactcagaggaacagacactactaagagtatgctgaatcgagtcatagctgagtctgacagtctaagtaaaaaccccacttacggacgaattggaagaattgccatgattattcttggatctgggaaggtgaatagagaacactgggaagataataacaaaattgaaccgcgatgaaaagtggaaaccttggaaggtattctttgaagttctaggcaatgttatgggatcagattttccaaacaaccctgtatctcccaacaaaggagaaaaatcaacacaagattgccctgcgaacgcatctgagataggagtttgggagaagtatcttattagtattttcaaagatgctttagaaaatacgtacaacaccaattggaggacagttaacgactacatatcgcctagttgtttcttgtatcttatcgagtaccttctgagctggttgtgttgcttcaatggttattttttatccaccagatccacatttgtcgaatgtcttatgtaccatgagaggctcatctgcctcgcaggtcaaacaagatcatttgaatttaatgcagaacccatacttgcattcttatgcaatgtagtccaagaatttcttaacaacaagatagatacacttgactggataggaaaatctaccacagcagtgatggaacactactctcttcttgttacgagacttgtggtgctgacatgtttagtttgtgtcaactttggctcgagtactgaattactcgtcaatttgttgaagaagatgtacataaccgaacaactaccacacttgttttgtgtagtgctcaagagagtaaggagaagagacaacagtcaagagctcaatgtgaatttgattgctgaagctcttaagaaaatcgacaatcctatggtgatcgtgaacttatggggatgttgtccgttcaagtcatgtcctgatgctatgtatgtaagtatgagttccaagccctccaaaaatgaaattttgggagtgttgtttccagataaggttgatggttcaatgagctcagttggagttggaagtgctgtggatgctagttctgagggtgacttaccgttgtccaatgcttctaaggacgaggcgccatccttgtccgaggcttgccaagctagtgaagtacaaaacaagggaagtaagcagtctaagagaagcaaaaagagcaaatcaggaagaaagaagaaataggcttagttaagcattcaataatgaatttggtagttcttattaactcttatgattaaacttaaatgtattatttttatgtattaccgcatactttatgaatatgaataatattattgtcttgaaacaatttgtgtagattttgttactatctcaattctctagatattgatatgatttggttttaagtatatttataaaaaaagcatattgaaagagaatcatgaataataaagttgatgtatagttccactaatacatcaacttgatgagtatcaaaagtctatcccaaatgtttcataaaagaatatgaagtcccaaatacatgacacaatagctaacacatagacaaacaaattaaattaattatataaactatatttgtatccaatctcatacataacttggatgaaaagtagattttcattataacagttgattagcattttagattaaattttaagtcttttaatagatttattaatatatgttttgggttgagaaaacttagagaatgagttaggtccgaaactttttagaaaattgtagaaaaggaagttatttttttaagcaattagtgaaaagacttagatttttagtgttattttaagtttttcttattacataaaaaatatgaattgacagtttatttataaaaatacttctataaggtgtggacaacatttatacctttcatgtaattttaattatcaaaataccacttacactat

SEQ ID NO: 38679 - DNA, 2830 bp, Cannabis sativa
tgtcaaaatgatagtgacacataggattggtgtgaccaaatcgaagacaaacttgacagatgagtcatggattttccattagataaccacgagaagtaccacaaccagttggtcttgggctatcttgggaattttctcgagcagaagggggtttatagtttccatttcttgaagaaccaaaaacaaggttggcttgcatcttgacagtaaggtttgtcatagcattatgatgctcaagacgactttcatgagacaagagtaaagcttgaacctcttcaatggataaagaaccactctaagatgttgtacgagacacaacagagtcaaattcagggcctagaccattgagaagttaaagaacaatgtcttgactttttaaagaagatcaagcactggcaagagaatcagctaaatattgaaccttatcaacatagtcaaagattgatgagtttcccttctgtacatgagagaattggcctttaagttgaagcagtcgagctcgagtttgactggtaaacttctgctccaaagctctctaaacaacgaaggaggtgaagtgatttgtaaatgaggccaagatccatttggacatagacgatcaaagccaagaaagtaacaattgatctcgtttcttccattgattgtagatcaggttgatttcacgagaaaaaagatgttgaataggaagaacaccacttaacaagatctcatccaacttgagaccaataacaattggcacaacctaagactttcatgcaagatagttaacaacacgatttaattttatggtgagagaagaggagacggagctggagaatggattccaattgggcagggatggagcaggcgcaaacaaaggagcagcggtatgactaatttgagtagtaggatcgaaggaagtggaggtatgaatcgaggactccattggaggcgactgatatcatgtataagcatggctgcagcaagattagaaagatggtaaaaaccagagaaagcaaatggtaagaaccaaaaaaagcaagagtaagaagagagaaagatttgactgaaaagcttatctctcattaatgaaagattctttatttataagcacaaagttaatacaagtggacaaagaaaggagctaaacagagctctaccaaaaaaaaaaaataataaatagaattgtaaagtaaacaattaactaactaaactaactcaaggttgtgttagctaacatccactacgaaaaaatctatatttagttacaatcttatagtcataacataatttttttgtgactaaatgagatttttagtcacaacaaaaacttttagtcacaacaaaaagttacttgtgactaatatatattatatacatacaagttgtcattaatttagtttcaatcacgataaatatgttaaaaatacatttagtcacaactaattataatttttgtgactaatacttttagccacgtactttttagtcacaatatagggataataatttataattagcataattttttcacttttattcacaagttttattgtggttaaaagtaagattttttgtagtgatcaatgagaatatttttttacaagtaattgtaacaaaagactattttaatataattttttgtgtctagattttttacattaaaattttacacgtagcaagtgtacttgcattagagcatctctaatgaaatgtaaaatagtagtgtagtgatatattttagcacttaaaaaaattagttcttgctaaatcttgtgtcaaatttgattaatgatgaaagttgtgccaaaattaacaatatataatattgttccaaatttaacacaaaattaatgcacatttttaattacaattttgtcattgatcattaataataaactttaatatacactttctagttgtaatattgtcgttaattattttataaaatatttaattttatttatgatcaataatgctattttattttttattataatttgcactataaaatgttaaataattactaaaattcattactggtgcctagcaccctctttagtatcatactgttattggtgtaattaagtattaggtctagggatgcacactaggtgaaaaatcggtagggagtgctcctgccgtccccatccccgttaatgactttaatccacatccccacttattctccattagggatagggtggagaatcccctaataaaaaaaataaagtttataataaaaatttaaatatatataaatattaaactacataaaagttaaactattacacattaattattattcaataaactaattattatctaaaacacaacttaaaattcatataaaaagaatactaatatactaaaaaaggcaaacatacattataaattataaaatattactagaaatataaaattaaatactaaacgggttcccgtcagagcgaggagtgtgatccccatccctaccccccgtttatttaatttaatattcggggacaaaaagtaaagtccgtcgtccctgccccgttccccatttagacgaggaatctccgtcccattaggggcgggtcctcgcggggcccatccccatgggagaaatgtgcatccttaattagatctcatataatttaagaaaataatttttagagaatattgctaaccaattgtaggaaatcacctaaatagtaagaggttgtttggctttacagtttaaaaactgttttctgttttataaaacagtttttagaaactattaggagtcgtttggcaaaaaattttaaaaactgttttttaaaaattgagttttaaaaaattagaaaacagaaaacatcaaaatgttgtt

SEQ ID NO: 38680 - DNA, 2636 bp, Cannabis sativa
  modified_base (1341)..(1342): a, c, t, g, unknown or other
ggtaaaataatccccaacacttggcacgtccataagaataggcgtgctttgcacaggcatgacgtcacattacaaacccttcaggagggaactaaagagtaagaataattgcaagtccaaactcacaaaactatgtatcgggacttgggggtaatattatctatattttcttactaaaatatatggcaaatggagaataggccacgtgtctacacgatccacatgggcacacagatgatcaaacattaacataataaatgtttaatattctcttcaaagcatgaggagcgtccgagagtgcataacctagccccaaaggaattttaaagtcaaagtcaaatattaccctccgagaagatgcaagattctcagatcacatagcatccatgtacttcccatgtgttcaactcgactcccaaggcaaaacactgtagatgactgcatcaatgcaagttgtaaagtaaacatatatactctccaaatggagatatcatttggactcagcccatactattctgacattatattttgctatgaatactaattgatggctaatccttgtggtctcatcagtcgcgtataagacaagtcttctcttaccaaactcctacttcaaaacttaccattggtatacacaacaaacatcctttcctacacatattacagaggtcatgtacagcctagaggtaaagggaagatgtacccatcctccaaagaatatcctattttctcaacctataaatacacagggaatgtaaaggaaaaggggattggaaggattcaaaagcaaagagaaaccagaactctaaaactctaacagagaatatattctcttgcaaaaaaaaaaaaaaaagatattgttcattaataatagtgactcgtcgactacagttaattaaaacctgaaccacgtaaaaatattattctctactcataattaatttcttaatctaagatttagaaatttccaaaaatctcggtcaacaccaagtaatcatcattaactatcattagagtcttcttcttcttcttcttcttcttagttatttaattatgaatatgattattattgtgattatatttgtcattatgaactaaatttttttttctagagtgttgatggaactattttaaattatgaattaacgttttaagattattcacatatttgctcttgctatttatttgtgcaattctattttaatcatcaacttgttaatgcttgatcaccattaattagtatatagattttaggttttatacttaaaagaggtaatctaaaatcaaacttagaattgcatgacataagaaaaatataagattgagagattccactaattnnatgagtttcatttaaagagaatcacattgctttatcattacttgattgattaatattgaacatagatatcttgttagttaataagttaattctatcatcactcgagagaggctagtagattacattaggtttcttgaaactacaaattatagaataaattgtgataattggaaaactaagattcatagtttgtaataggaaaattaacgctctaagtctttattatctaattgaaattgttgattgtctgtttaccttttagttagcttatcatctcatttttaattatatttactttgaagagtctaatttgagcataaaacctgaaaaacatagtaattggtaatatttaatatttaataattaatctctgtgagtccaacaaccttttttattattaaaattttgctaaacaacattgtacgcttgtagtaaaaatcatgtatcattgatcctacctttttgccaaaccctttcctgagaagtgacaaaggagacactcttcaaatttagaggggttgtgtcagaatggtgccacgtagaaaacatgcccagattattggggacatcaaggaagcagttggctcttggtgatgtatttcctaccctgacgacccttgaaaggattgtttgaatcggtcctagtcctctattcagtttttgggtctgagcataaggcgctggcataaagctggttgaccctacatttctgactagcttgataatttctcactttgatgttattcagggatttgtactcaaaaaaaaaatattcatggacaaatgtgagtcgatcttattaaacttggcacccttcacccgagaccatcttcgaatgatgaacttgggtcctacttcccggaggacaataaatgggccgagtttcagcctttgcttgtggactcgagataggtcttgttaattatagggtttttacaccacatactaaaaattcaaattttttagatttttattgtggggcgaatttttttccataaataatgtgttttatttccaaaatactgtgtaagttttatactgtgtactgtgttaagttttaactgttgttccatggttgttttaattgttctattttgttgttttacggtttctgttaaaaaattccttataacagtaaaattgtaaacttttgtccaaaattcaatatttttgtaaaaaccccttactatattcgtggaagccacgtgtcgtgataagagaaatcacagataacatttaacttttctaaagtatcaacacatgccctaattacttttatcaaccttaccaaaaa

SEQ ID NO: 38681 - DNA, 1446 bp, Cannabis sativa
tctcccatggtgaatgggagatcgattctgcctaagctcgcgacactatcgcctgtgaacctgcataggttaaccatgaatagtttccaccttgcttcctctaagcccatcttctttaaagtctctttgtaaagaatattgatggaactcctattatctatgagaaccctctttatcctcttatgagtgagttgcaccattattactagaggatctgtgtgatgaaatcgtaccatgcaatgcatctttatcagtaaagatgatgggaggttcatcagatttgcctctttttagaggttctggagtgaaggatgatttctcgtttttcacttcatttatataccctttttgtgcattgttgatgtttcctgtgaggtgtggccctccagaattgaccaagatatcctttcccttaatggggggaggttttaatctttgattattcaggttattgggtagattctgttcattttcttggggcctcacatactgcctcaagtaaccccgcgagatgagattttcaatctcgtattatagctaaaggcattcttaagtggtatgcccaatgtctttatgaaaacggaaatatttattaggatctcacttttttcttgcatgtctcattggatctggtctgtgaaatgcgacccagttttcattggcgatatagatatttttgcgagttttattcaactccgtatacacttagtatattggaacatatttgtcatacttcttttgtttctttttatcctttaatgagtctcttgactcatcctttctcttagcatttgagccagtaggatttgaatttttggctttggttatcacagtactcgttgctgtagtgcttgtgctggatttctctccttagccagaatttagtagttttatttcattacgttcttcttccttctgcacaaaaatgtatgctctttcattgaactcgttaatgtttctaacatgacaaccttgcaaatcatcccataaatctcccgttgtagttgacaagtcagttattattccagcttgaagagctgttaactgaatactaacattcaaattcctaactttggctgcggccatagtgaaatggcttaagtatgcttttacggattctcttggttgcttaacattggttcgcgaagatgttttcggtcttcaatctcttacagcttggaattactttttgaagtcctttgataattgctccctagaagttatggaatggttggtaaatttgtcaaaccaactacttgcagcttctgttagggaagttggcaataatatgcatcgcaagttatttgaaatattactgcgcattatggtattgaagttgttcaagtgagccacatgattagttgtaccatcattaggggtgttcatcaaaccgcccaaaccgctcaaaccgcccgcaccgcaccgcaccgtaaaaaaaatgtggtt

SEQ ID NO: 38682 - DNA, 4018 bp, Cannabis sativa
ttctgatctttattaataagtaactctgattatattgaaatgagttttttttagggcacaaaacccaacaatataccacagtgtaaaataaagatggaaaaaatttaaatcacaatatacacaaataatttaagtgtttctttttatacctgcattttaacattctcctgtgttttttgttcctccataatagttgtttgttcttaacaaacaaagaaatcttagtaactttttatatgtaataaaattaaattgttggtatatagatttaaagtttatagatataacatatatactacaacttaaaacgaatatactttctcaaagattggagctgtcattgcaacaaaatactctaaaacaatacacttgaaagttaaattggattgtcaaaactaaactaaatgattaaacactctaaattatattttagtgttaattttattgttaggtaactaaagaaacaaaggttgtatctaaatatctgtttgataaaataaactcaatattccacactatcatataccttgattgttttatttgtaggtggtgttataattgtatagtcataatattactcggcagtaacatccccgatcaccccctgcaagaaaaaaaatcagctaataacaatataaaaactcatatttgctagataaaataaaattaattttccacacaatcatctaccttgcttgttttgtctgtaggtggtgttacaattttattgccaaaatcttcctcagcaataacatcaccaatcacccctgcaagaaaaaaaaatgagctaacaacaataaatattcattaaaaaaattaaattgactttacaataattttcttctaataaaaaatttacttttataatattgtcaataaaagttttgttgctcatggtagcaagtattttctttatgtcagcttctaattttttttttaagaagctcctcattttgttagataagattctcattctactgtagaattttcttgttttgttgcaaaactttatcattctgttgcagaagcttctcattttgttgcagaagctcagtattgttgatcgtgccctaaactttcctcgatgtctctgcttcttcttcgtttttctcattgaattcagcatctttgaattcaaccatgtagtgttgcttcgattctacattttttggtatcattgtttgcaaaagaaccttaaaataacaaaatacaagttaattactcacatcacatattacacacaagcaatatagaattataataaagttaaaaagtagaagtgccatgtttggtattacttacatcgagatcatcaaatacatcgatcttaatatcatcataagtgatccgttttttcgtttcatcggaggaatcttgttgatttttacagatcaaatttgtaatcctaggcagtttatgtcctaccttatctacataaagactcaattttccaatgatctcaaaagcaaaaacttgaagggcatatggactcctcccaaaaatagatttgaatttttagtattctttgtcggggcattctttagacttttacaagtttcttgataggatcatcttccccaatgataatcatcaaaaactttgaagttatctaccatatcaatatgcctgttgccaacatttttattcaaagtgctggataccaagaaattttctactaagtgtaatctaatcaacttgaacaacacctgctcatcttgccccgtacattcattaaatgcattttgtatgtctatttttttcacttttttctttcgtataaacacctctatcgagagagaacctcttctgaatgtccttttgataatagaatcatcaactgaggtttttaattccataatcatggtaaattctttcaatacaaaactgaaaacttccccattcatcatatattctaattcatcttctgctgaaactgatgttcgtaacaccataaggcataacaaggcatttattgcctaaaaattcatatccaataagtgcctgaatgcactattcctcaacattccaagctgcctatcagttaacttggatattatacttgtaattattgacaaaggtacgtagcattagattttttttcgtccattgatctacatgtataacatatgccatttttatgaatcctccataaaagacatgtataccacaagtcatatatacaattctcatatagagtatatacaaaaataaaacaatataaaacatattaaaacagaatgaatttatacctaatagtcaagtgctcatacagagtttacgcaaaaatcaaacaatataaaacatattaaaacagaataaatttatacctaatagtcaagtgctcgtacaaagaatatgcaaaaatcaaacaatacttcactcaagtaatgattaataaattatgtttgagtattttgctttcatgatctataatattcaaaataagcataaacaataatttactgattaaactttcatcacccataaaattgagagattagactaatataagaattgacatcactcttcaaatataacaatactttaaaaaaggcatattaaaatttcaacagaaagaaaatgatactcaaaaatagtattgtaatgccctgaactcttagggacgccacgtgtgtgcttttataaacttattattactaaccatttaatttagtaaaagtgcagtttaattaaaaaccttcaattgaaattaaaataaaactttacaaatcaaatactgttggaatatggggatgccctgctaataaaactcttttacagctaatttacaaaacgactaatacaaaattaaggttacatatccaaatatagaaaaagaggtcaatcctgcttcctagaagccaagacaccacggctgatatgtacactattgggagacctctgactcatggctgaacacaactgctattcttcttacctgcaccatgaagcacatgtgagtcacaatgactcagcaagaaaagctactagaaaatagtatagtaagtactagcattataacatagtatacatatcagtggatcaatacatattcagcatgcatatacatgtcagtttgtctacgcgaacaccttcataacacagtgtaagaaaaatcatacaaactcataattaataaattcaccttttcactaagtagacattcctttaacccataaccatataatctcagtgctttgaatagcactctagccatacattattgtaattacataatttcggtacttcacttagcactctacttacacaataccataatcacctaaactcagtgcttcataaaacacccttaccactcgttatgaacgagctatgtatgtcactatcgttgcccgatatcgtgaacgataagtaagaaacctatctgcggtttcaacgagtgattcctcataacggtaatgaccctatcttttctcgatcttaatcgagtcacaaacgacaataatcgttacctcgatcataatcgagtcacaaacagtgatattcgctatcttgatcataatcgagtcacaaacagtaacattcgctatctcgatcataatcgagtcacaaacaatagtagtcactatctcgataataacttgatataaaatataaataataactttctttttttctgttttttagcctaaatggtcactaaaagacaaactatttacaacccaagaaatgtctattctaccctttttaaacatcatagctcaaaatacaacttaagggtaatttagtcttttcaaactaatccggccaaactaacaatttacagttctaaactagttcggtacaattccaattcaattcatcttttactgtcgtgacatttacgacctccttgtcaagtttcacaattgtaggcccaaaaatattttatttgaattatgttgtgtacgatacccacatattccaatataatctctgtaattaataaattacgctttatgtattcttatttccctaatcaactcgtatttattttaagtaggattataatcctact

SEQ ID NO: 38683 - DNA, 2423 bp, Cannabis sativa
gtggtagtaatgtcccgaaaattactttttcctaaaaaaatatttagatacaagttttagttttaagttatgactataaatatatttagtgataattaattgtaatttttgtgacttaaatttgtaattaaaagtaagattttttaggagaaactaattcgggtgcactaactaattattaatttcgagattattttttagtccactttatagaattaaagaattacatttataatttcccttatgtataaatcacagattttgtttaaccaaatccaattaaacttttaagtagtgtataataattctacggcaattgattataaacgaaacgaaaaaaatgcaaataaaataaactaaaaaactaatatattaatataaaaaaagaaaaaaccagtacgtaacaataataattgagtaaaaaataaatagaaaaaaataactaaaaaagctaatttgtgtctaaattaatatatctaaatattaatgcccaaatataaaagggttgaattgaatgaattaatcaaactctgtcagcggcagagagctcgacttcaccacttcccttcttaggagttgtaccatagtagcatgcgtacaagatgagttgaacagccccagaaattgcacccaacccattgcttaccaagacatagatatccaacttgattagggcataagcagtccagcaagaaccgttgaggaaattggtcaaagataagtaaaagggcatgtactccacgctctttgttttgataacttttgactgtacgtacgtgtaattaattcagtcacttatatatatatatatgtatagatagatatgataaagagagagaaaagggtgtgtttgttaccatgatagtgagtggagaagtgtacataatgatgttgaaaatatcacaaagaatcccaacaaagagagaccttcttgtagtgccatggaaaaccaagagtcctaaggcaaccacccctccgaaaaagacaagctcaaaaaataaccatctcactacctttctctgaaatatatatataaatattagtacttattataaacttcacatggcaataatatgacatgatgtatgttaataatgttatatactacttacacgtccttcagtggtagcatagatgaaaaaaatggtaaggtaaatgagttcaaggacaaggccaactgagttgatagtgacgacaaggaggctgtcagggtgaataaagggcatcccgtagaagatccatagggcacaattaagcactgttgctagataaggatctggcttgaattcctccactgccttactcttgatgattctccaaaatgttgggctgcaataatacacatcaccattcattattcatttacatatttagtaattagtacaatacaattataaattgctcaaagtaaaagacatagtagtgtctaacaccttttttaaggctttatcagagttttatgtaaaatgaataacaggccaaatgtgtgagaggttgagggaattgatattctagaagcaaaaaagggaaaattaaataattaaaataatttgtgattatgtatgagtttattaatgtacttaaaaaagggaaagatttattgaaaactgttaaagggttgttaagcttcttaacaacaaattgttaaactccttaacaacaaagatttttttttttttttttttgaaattactcataatatatcttgcctaatcataaactctttccataaatatggcaagagtttggtaattgtaagtgtttaacttatttcattctattgaaaaaaggttaggtgagtagtattggcggatatctggacgtgatctaatatgcgtgggctctaatttaacatgcaataagtacactattcgtaattcaatttaattaattaattaatgattaaatatataacagaatacgaacaaaactatcttaattagagaaagagagagagttacactggggaaagaaacaggccgaaggagataacattccctgtgcagagatcaaacaaacaaaaatcatatacatcaataaattaaacataaataaattaataatatttatagtactaatcattaccaaatacaccatatataaaagagataataatcactataaataagcaggacaaccctatatatgttaatttgggctcggtggaaaagttaaattgttaggattagagtaattactctaataaattaattcaatgaagtacgtgcaacatatatttaatattatgagtacttaaagataatatatctatacaatatatatatatatgtacgataatcgattagtctatagtctactcgatcaccatacagttatatatatatacacaatacatatataaattgataataataatagtataatatagtatatagtatagtactgaccaatgataccgacga

SEQ ID NO: 38684 - DNA, 1563 bp, Cannabis sativa
ttgatcttttaggccgtgctgggcagttagaagaagctgaggagttcatactaaatatgccaattcaaaaggacgatgtcatatggaaggcattactcggtgcttgcaagatgcataagaacatagagattgggaaacgagtagcagagattttaatggacatagctcctcgtgatagtggatcctatgttgcactgtcaaatttatatgcctcttcaggaaactgggaagctgtttcggaagtgagattaatgatgaaggacatggatataaggaaagatcctggatgtagttggattgagctagatggagtgattcaagagtttcttgttgaagatgactcccaccatagagctaaagaaatccattcaatgttgaatgagatttcaaaccagctgagattggcgggctattcgccaaagaccgaacaagtgttgctcaacatggatgaagaagaaaaacagatgaatttgcaacatcacagcgagaagattgccattgcttttggcttgatcagtactggtcctaagacaccacttcgaattgtgaagaacttacgcatatgtgaagattgtcacgcttccataaagttaatctcaaaaatttataagcgtaagattattgtgcgagatagaaaaaggttccaccattttgagcatggaacatgctcttgtatggattactggtaatttatcaaaactagagatgaatataggtatgcagttagctcagctgtaatttaactctataaagaaaatgaccaagcattaaatatggtcaaacttatcacccaagtgcgtttggagctccttgtataatctcccccttgccaaattgaaagagttcgaggtgtgacttatcctgttttgagttagccaagaacaaaagaatataatccaagtttgaaatgggaaatatcagccctcttggttatttgacctcagcttctcttggtcggtcatttgtgaataacccttttgagaatctcaattagtttgtgaattggactataaaaagaagcctaaaatccaagtacattgctgtgctgtgcttatgtagctttctcaatttccttagtccaaacttaaacaggatcaatactactatatatcatgtggggatttgtagccagagcttatgtattcaagtgataaagcaacttgggaggaatcgccatgagattttgattccagtcaggttctatcaaggaaagagaggggagaagcttctgatatgtatgatcatctcccgcacagaaacctttatgatcttttacatggtatgcatattgattcagctttctgaaattcactgattatataaatatttatatatgcattagtggctacaaaaatcatggatattatttagttttagatgtatacatatgtgtgagatttattgattactaattctgtatctgtagagtaattcatttctaatttttggattactaattttgttgttgcttctgtaatctcacttaatggttgtaatctgtggagcaattattgttaagccccatagattgcttagttactaagctataaatgtgtgtaagat

SEQ ID NO: 38685 - DNA, 2827 bp, Cannabis sativa
ttctcttgaattaattagggctaacttaagttttacagtattcttaacaaaaattacataacaagaaaatagcatctaaacaacataaaaatatacatcaaaagataatattttttgtaataataaaatctttaaaatatttaaaattacgtataactgtattttataatttttttattaatttttgtgtatttgtaaaataatatagactaaaaaatattttaattatcgaaacaaacatgaaaataattttttttttttttttggagagtatattataaattatttcaaatatatagtatatatgctttaaagtatagcctttctaaacaacaaatgtaagtgtcacatattaataaacgaagggtgagccaattactttttataagtctatgaactttgtaatctttttcttttgatgatgagttggagtcgtgcgactcgcagactcgtattgaattaacaatgggattgagaaatttctaatgaataatttgaatttatttgtagaaggaaaaagaaatgaatgtgtgagttgtaatgagtttagatacttggaaataattaaattagctttctggatatatataatatttctctttggtgttttgagttaatatcttatatcgaaaggatgaatattggcttcactcgaagattggcttcgagtgaagaccacttgtcaaaacagagatgtaaagttatttgcaaaagaattggagtgaaagaaaaaagagttgacgaatgtctttttgctctttatttgtcagttatcttttctcgctttcatttctttaacgttccatgttctataccgaaagaagaaggtgttaatgtgtcctaatatgaaaaaattatgatttattagaattcattttaagtgaaaaatgtagaaaatatatttatacaaaggatttttttcaaaggaaaaatataaatattaaaagaaatttttacaataataatttgaaaataaaatctagcttttgaaatattatgtcaatcaattatattttatgtgtactctacagtttcaaatttcaaaccaattaatatttaatataattatttttattttattttaaatgttgctaggtacagttacaccttatgacaccaaacaaacacgacatatataaaatgaatttgtaattaattttttgatattataatttttttttttttgcagtggataataaatttaaaattaaatctcatttattataattttgataagcagtagtatatttttcttattttttttggaaaagtaataagtagtattatttgatactacgtatcctaatatattaatttgaatttcacttatataaatataatttattataagtggtgttggagaccgtaatatctaacataaattgttcgatcgtattaatgtaatatttattgttgttgttatcttatttttatcctttattatcttttgtcctcacttttataaaatattggttcgagttattatagtttctgctacttgactatctgtatttattatcctataagactttgtaaatttaattatttatttatttcttctattattattattattattaaaacatttggagttgatgacgaatagttaggctattgtaatgttttgggtttgtggtttataatatatgaactcattttttggcctattttcatgtgacatttaccaaaaaaataattaatttctttcgttattttgttaattttataacgaccattacctaacattttctcactcactcttgtttcgtatccaaaattgtcttttaatatatataatgatgatgcctaattatattgttttgattttaatttggatatttctgtttttataaagtattaatttaattggagtagtcttcattatgtcatcaataaattattgaataatcacttacgtacgtttctttgaatgacaaaattatcatataataattaattattttcttgtaaagcatttaagtttgactataatgggaaatgggtccaatttgaaaagttaattttctttgagaggggttatagttataatatgagcattgctattaggcaccagtggtgtctagcaccttctcgacatgtcgcgttacgattggctagcgatattctctaaaagtttttatattaaattatatgtgacccgatacttagttggactaataacgatattgacacataagagggtgctaggcaccactgatgccctttagcatttctcttataatataaatgagaaccaaacgtcaaagttaaatatttgtttagagataacaaaatttaaatatgtgttaattaattaattaagctgacaaattagttcgatggtgtgattacaaatgtaagatgatccataattaatgatgaattaataatattcaaatttttataaaggttataaatttgataaactaagttaaaatttccatattctcttctatgtgattttgactttaggtcatttttgtcgatgtctatctctcttagttaggtttttgctagggtagttttctcgaggttgaaacagtttggaatatcgttacttatgtgtaaaattattcacaattgatactaataagtattttatatttttcaatgtagaggatgatgttaatcttgggtttatgctcttcttttgtaatttgcggcgtgttttagggtttgtttggtcaattttctcgtgagatatgtttgattacattttagagagttttatttgttccccataaagttataagtacaccccattttaataatttttattttatataaaatatacatctttaattattactattttttttaaaaaaaa

SEQ ID NO: 38686 - DNA, 1696 bp, Cannabis sativa
agcaccctatttaaaactgctgaaaataaaaacaatcagattaaatttaaacttaaatttatcggtaaaatttatgtaattgtagaccctctacaaaacaacctacaaaataacaaaaaatactctattactacacgatataatgaaaaaaaaaaatataaagtgaaaaaacaatagtaaatcaatccatatattaaagaaaagacttaaaaagacttgaaatacttatctgttaaaagtaaaaaaaatcattgaagtagaaattatgagcataaaatggattaattttcttatgcattgattataccacaaaattaccttaaacaaatagggacaagccataaaatggcacaaaaaccataaaaagtaaaaaaactgtaaaaaaaactgatatttgaatgtggtaatttcaagaaaataaatacattatgccccaaaaaaatgtaacgctttttatatttattaataaatttctatatttaactaatgtattatagtccttggttgagcacattgaatacaattctatccagatgactcaaatgcatatactatatataatataataatatagtctagataagtcactactcactatatacaactaactaaatgtgtatataaatcaacataggccaaaagaattaagcacaaaaacttgtaaacctaattccaaaccaaaactctcaaatacaatatgagtagttctactccattagggcttgttatatgccttttgtttttatggtgcaaaataacaaatgtgaaaggatggtattttcaaccaaagacgcatgtatcgatgatcaacggtcaggattctcctgatggaggtgatttgactgttcactgcaggtcagaagacgatgatctgggcatccacgtggtccctttcaatagctcgtacgagatagtatttcatccaaatctctcatgcaccactcttttccattgtagctttaaatggcctaatagtgatatctactattttttcaacatatatgattgttatagggatgatcaaaagtgtatcaaatgtaagcactatgattggaaaataaatttaacaggcccttgtatgaaacatataaagaccaaaaattttactatttgttatgagtggaaaaaataattatattaagtagatataggagactatataatatattatttagttgtaaaaaatggctcttgatgatgataattaatcatcatataaatatataatagttataataatactttaattatttttcttcttgtccttctttgtttattttgtttataattaatatatatatatatagaatacttcttatcttatctataacatatatgataaggctatactataatttatgaggagtgttcatttctttattatactcctcctattactcaacattcatattccaaaaatattatgaaataattttttttattattaaaatatttattatagttacaataaaatattttaattagtttacaatgttgaaaatatatttaaaattttctcaataggtatgataaacattgaatatataagagagaatttaattttctcatatttgaatgaaaattgataaattaaaaaaaatctaaaaaaatataaaaatgtaagtcatggtcggctcaagcattgagcagcttaaactattacacaaaaccacttatattaaaggtccaatttttt

SEQ ID NO: 38687 - DNA, 2635 bp, Cannabis sativa
gggcataaaacccaacaattatgggtttcccaatcgtactaactatagcactgaggcatttgttaccccaatagtgcaacccaagatcatataaatggatccataggggaaccgatttcataagactcaaagtagtaatatcagtcgaccaaggatggactatgacttgttttttatcgaattagagaactcctacctccaaaactagatcgcgagtcacctgtgtcattgaacttcactattgtgaatccaccattcatcctaactatctattgaattcctagttttccccatttatgtttataaaaccctcaaaacagcaaatagggggtttgctcctaccaccatacaaactacaacagtactccaggttgccgcttgatccttaaactcctccaaatacacctgagcaatttcttccaatttttgtggatcgatttagtgtaggttagttttagttcagagaacaagagcttacctttagtgaattgtctccatttttgttgggaattcgctagtaagtcttccttctcaacgtcatctacccaatttccattaacctcgttatcctccttctctgttcctaagttctgttctgcctcaataatatcctcctattgcaaagttatctccaccaaattagaatcctttgagtcagttaaatccaattgatcaatcgaattgtcttggattgaagggggatctactaggttcggcttaatagtaggctttcgtatcactctcttcttttttcgccatggaagagaagagctgatgcacacacctcttgcaattttagctatatcgattcttaaagatagaagagtttataaatctattaattgaaaaacataagccataacccacaagatattaaattttttaaaatattcaaattgaaaatattattttttttttaaaaaaagagaagaatcactctaaaaaaaatgaaaaattactaaagacaaaatattttaaccaaaacaaaatatatatatatatacaaaacaaaatataaactaaaaaaatacataacaaaatataaaataaatgtgagaaaaattaatatattatatattttaaattactgttttttaattgtaaaaaaaataaatttgatttttttttaaaaaaatccacacttttttcttgaaaaattattgttgatgggatttaaatttttggccattggcatataatttaacaattaaattaaaaagtattttattattaattatttattttttaaaagacatatattcatatttatatttttttaatttttttagaggagcgatcgcttatcttaatatctataagaatactacgcacggtttttcaccaacttattacatataaatattctaaatttggaaccgctagtttggttatagggaatctttttagttggggttgggaaggttttgtcaaattaatgataaatgtcattctcgatttaaggaagggcactattttctttttaacatttaaagaaaaaataaatatcattgagatattgtttattaaaaaaattattcggatattcttaaaatgaatatatgattggttgttggtttaaacattacatttaattatcaaaataaatgataattaatgactattatacatcccattctcatggaccattggtaataatcattaattgaccataagatcacaacatttttgttttaagtattagaatgcaaaattaatttaatttctataaaacaataacaattaaattcttccaaattacgtccaaaaaaaaaaaaaaaaaattcttcctaacaattattgtcattattgtattttgttctttaagtcctaatactaatagatttgtattttctttctttatttcttttttatatataaataataattgcacatattaaaggtcttcctcccttttatatagtcatggagtatttatataaaatactattttttaaaaaagaaattatttatactttgagaaaagaatttccacatttatgttttatctttataatttttttcttttaatattttctatttattaaaacttcaaaaaaaaattattttctccctaattttttaaaatttttacaccaaaaatataaaataccaactttattacatatatacaacaacacggttacatcaatatttttaccttctctcttaattttattacacatatacgagttgcacatcaaatccatgcacctatcaaccatcaatcaactctcaatcacttccctttctttttttttttcctttttttttcatttgattttttatttctattcatttttttaatcagatcaagtaaaatccatgcacctattaaccatcaatcaactttcaatcacttccctttcttttttttcttttgttttcatttgattttttatttctattcattttttttaatcagatcgagtaacctccattgttgaaccataactccccacgattcctcaacaattttttccctctcatttttgttctttaaaattttttcaactccaactaaaccaatctcataacttttttccctctttccttttgttttcaatctctatttaaaatgattgtgacccgttcatcctcatctccttcccctgttcagaaaaaaaaaatccaaaat

SEQ ID NO: 38688 - DNA, 1064 bp, Cannabis sativa
catatataccgaaatagataaagttacattacattattttctcttaattagagcaacttggtgataataataactacttataattaattaaccagaggtataattttaacttttaatttttgataataaccagagaataagtacaaaacttaatttgcaatagtgtagaaaaatcgaaaatctaaaagaaaaacgttaatgaaaatacattactaaaacttttttctttcattttctttttgagtgtcactaagtcaaacttgactgcagagtgcatactaacagtaacatattagtaaagttaattagagcttagatgtatatatagaatttaaagaattgaagaattcttcagaaaattgtatatacaaattgtaaattatataatcattaatttgatatttacataattgagattaattgcgtacctttcgaggtggagaaggatgaggactactatatgcggttactgttcccaggtcccttctgttatccatgccaattaccttgtgtttgagttttgaggaaggaagaggaggacgacgagaggtggcgttcttctgaagaaggggctccgaggcagtagcacgcccactggtgaataactgggaaccatcaccatcaccatgaggcatattgtcggagaaaaaacaccaaccatcatcagcaaggtgtttccacaactcatcatgatcagaattattagctgccttatttggatcgtgatgatctgtagtcactggatcatcagcgaagaagctagttggagagaagtgatcgaagctcaccggaggaggtggaggtggaggtggaggagtgctccctgctgatgatgaatccccgatttccctcatcactgtaaacgatcgaaagagagagaaagaaggtggagtgaaattatttagtttagatctacacatttaagtcaacgtcgtctgatatttattattattcatgataagaatttttagaaatgagtgtaggacctcttttgataaagtcaagctgattatttagaacatctctaatcgagagcgtctattgctattttctaaaatattttg

SEQ ID NO: 38689 - DNA, 1956 bp, Cannabis sativa
aaacaacatcaatgggtgttgaaaaatccagaaaagaagatcaatgttcctaaagctaatcaacctgtaactgattctgatggttttcaaccagtcacaaaaggttggaaattaaagaaagacaatacaagtatggctgcctctaccagtaatccatttcagatttgggagaaaagatgaacactagcactacagaagacatacaattaccttttggtgacaaaggaaagaaagttaaggaagatgacacaggagagggggagttctctctttctaacaaatggatagaatcatgagttggaatgtctgagggattaatagccaacaaaagcaaattttagtcaagcaattgattggaaattagaaaattgggctagctagtctcctcaagacgagggtcaaatttaggagccttatatgttcttaggatggtgtttacttcaaataatgcatggcatgagggtgggaggattattgttagttggaatccttctagctttacatttaatatcttaaaatgtacaagccaactaattcatctctttgttgaaccatggataaagaaacaaatttctttgttacttttgtctatggtttcaatgatgaggaaggaaggagggtcttatggggagatttgagggatcttgctagtaatgaagcatggattgttgttggtgatttcaatgatattctaagcaaggatgaaagaataggtagtagagttaggtacaaaacttctactgccttcaaggagtgtgcggatgactgtcatctagaggatgtgaaatacactgtcaacttttgtacttggtgtaataaatagcaaggaaatgagaggatttattccaagattgatagggttctagctaaccttacctggctggcttctcacatagcagctgaagtgaattttcagaatgagggtttgtttgatcattcccctactgttctcactgtgtctgaggctttaccaagtggtaaaaaaccatgttgatattttaggaaagatggaagcaaggtgaactagggtctaaaatgttccaggtggtgtcaaaattgaaaggattaaagcctattttcaagcagttaaatcaacaacattttatcccaactgcaatagccagagctaaggagaacctagatgttttccaaagtgttgtacaccatgatcctttcaatgttacattacaagtacaggaagctgaggcttgagcagcttatgcttcattgcaggatgcctatctatcatttttacaacagaaggcaaaattactttggcttaaggatggtgacactaacttagccttttatcacaacagcattagagctagaagaagtcaaaacaaaattctttccatctctaatgctaatggggtaagagctgaagatccccatctcattacttccttatttttatattactacaaaaacctacttggcagcagtatgcagaataggaaatctgtgctgaactctattattaagcaggggcatgtattatctagggaacaagctgaccttctggctaaagaattctcctttgatgaagtgaaaaagaaatttttgacatacctggtaacaaagctcctggcccagatggatattgcagcttctttttccaagacaactgggagttggttggtaatgacatctatgaagccattacttccttcttgcgctttggacaactcttaagggagattaactccactattttgacacttattcctaaaactaagtgtccatacacaattggagattatagacatattacttgctgcaatgttctatacaaagctgctacaaaactaatttgcttgatacttaaaatagttctacctggtttagtttctcagaatcagagtggttttgttcaatggaggtttattggtcataatataatgatttgtcaagatctcatttgacactacgggaggaaaacaagcaagaacaatt

SEQ ID NO: 38690 - DNA, 2991 bp, Cannabis sativa
gatatgttatgcaaaagtgtttttgaaagaaattattagcctagacaaataaaatggcttctctttggctagctgccttgtaaactcagttcaatatgctgtttagattagcaggaattcaaaatttgtctttctttggctctccctgatatttaccaattttcttgtaggattttcttggtctggtcgagaagttttactatctatcaggaagctatgacattcagcttactgtaggcgatgctgtaatggtaagcatcgattaactcaagctgcccaaattattgtttttaatcaatctgggattcttagtagatttttttgcttcattttcaggaaaactctttcttaaaggctattggtcagattgagttggatctacccgaagcccctgaaaaggccccacgtcctcctcttcagcctgctgatccttactctagatatggccccaaagcagaaataagtcacatcttcagggctccagagaagcgtccaccaaaggagctctctcttgctttcttgggtcttacctttgtgccacttatcggttttttgattggggtacgtctcatttataatcttggtgtgttttgttcaacattgctattaatcgttgagtctaggagctaatcaatcatctacccttaatatcctatggcctttacttagcatctttctgaattcttccattgatacaatgtacgagttcatttttgcctatatttgctttaggcttgctctatcaaggcacataattttctcgtgttttcttaggtgcgttcattgttaacgtttattcttttctattttcagctattaagcctaggggtgaatttcaagaacttcccttcttcagcagtaccggctacattcgctatccttttccatcttggcattgctgcagttctgttcctctacttccttttctggttgaaggtacgctatttactgtgctaaccacgaggaaacctattcagaaaaattggattaaaaataggaaagaaaatgaatacatttacaaactttagtggaaactttcataaagacatgatgtgtcatacctattttattggtttacaatgttctatagaatataattcgacgactttctaaatttgcgactagccccattttttttcttaagaagttggtgttgcaaaactagtagaacatcatgaactcttgtacctatttttctttctttcttgggggaaggagaacactaaaccgaaatgaggcaaaccctgttgtaaacaagtatagaaattgttggtcgttatggtggacagtgttaatataattagttgaatactttgtctaatctgagttttttcattttttttttcttgggggaaagaaaaaactaaacaagtatagaatttgttggttgttatgcgaaatgaggcaaaccctgttatatagaacttgttgctggttatggtggattgttattattatgattagttcaatacttggtccaatctgagtttttcatttctttcattcttggggaaaatagaacactaaaccgaaatgaggcaaaccctgttgtaaacaagtatagaaattgttgctcgttatggcaatggcggattattgttattactacaattggttgaatactcggtctaatcttgagttttcgtttttgtggcacatggcagttggatctatttacgacgctgaaagtgcttggtttcttgggagctttcttgcttttcgtgggacacagaattctttcccatctagcctcgtcatcgaccaagttgaaatctgcttgagagaagaaatcaactttcttaattttctagagttttatccaattttgtaggactcgtgtttatgttattataccttaccagaacagtattaacaagaaaaagaatggaaatctttgcacatctttggggtgtaattttaatgtgagcaacttaaaaaagaagaaagaagagaagagttcactcatctcatgttcatgtttttaggttgtttaatttaaattaggttgcctttggaagtaactgagtaattacacatcataataattacactacattttcaaatataaggtatatttagatatgagatgataaagttttatgggggacatggaaatttgagagtataattgaaacttttcaattactttttattacttaaaattacgtgtttaaacacataccaattcataaaacaacatttggtttgtgcaaaagcatattcccctccaaaggcactcttaatgttagattaaagtaatgatgtgctgtttagatttttattcttacagcttttattccttgtttaatatatagaagttaattccaataattaaaaaattaaacaaaaacgaattataaagagaaatgtaggtggttttaaaataaagaaaaaattgtataattgatgaatttttttttaaaaaattacaaaaatacatcatccaatttttttatttattttttttattttcatgctttgaaatttcagtagcaatacattatttttattttttttagttgttttatagttgtttatttttcttattgtctttgttttataattgtcatatcgttgatttttctttgttttcttacctttagttgagaaaattttatttttataattttaaaattttacaaacatatttttttaaataaaaactttagttcttaaaattgcaaatgagagttctatttataccccacaaaatgataaatacactccaaaatttaaaaaaattaagcttataataacttttaaaattactcttaattttttttaaatttttttctcatatcattttgtgttaatttcaatacttatattaattttattttttataattttttttctaataaaatttcgcattattttttctcttaatttttttgttatttttatatttttgttgataaattcctatgttgtactgtttgagttagcccaatatgagaagcacagtccaggcccaggcccatttatacaccc

SEQ ID NO: 38691 - DNA, 1722 bp, Cannabis sativa
ccgccactatcaccaatgaaactcatctcctaatcatcaactttatggtcaggaagactttcccctaaacactaatcttcatcttatattgttgaaatcattaacgggacatgccacttgaccaccacattatcaggtagacttttgatacaaggcaccgtataaatctttaatcgcgaggtcatcacattgaaagcttctcctacacatcgcaaatgtagctcactatctcaacgttcttgaacctttggttctaataccacttgggccccgttattctaccttgttgggctgccaccttaccttaactttcacattagtatgatattttttgctttgggcctaagctctcacagttttatttttgagcaccttcccaaaaggcctcatgctaatagagtaggtggaacacttatattctaggcaacttttacatattcttctgatgtggaacctataggttgataccccaacagttaccggacatcctagtttgtcgaatcaagtggtgagttctttgtttcatgttgagagtaaagattgggatgtgaatttaattcgagatatttttaacaacagagatgctaatttgattatggggattccaataagttttacagctacagaggatttttgggcttagagaggtggaagtttgagatgtttctcaattaagagtgcatataagatgcttcaagatcagaaagaggaaaggatgggagataataactcaagattttggcaaaaacttcggcaattaaaatttcgccaaaggtgaagaatttaatttggagagcaatcttgggttgtcttccaacaaggctgaatttgagagcgaaaaaggtggaggttcctattgtttgcccactgtgtaatgcccactctaagcccactttacatttttattgacttgttcttttattgaagaatgttgagctcgaagtggtataggggtgggggtgaatggtgcaaaaacttttggtgctcagttctttcagtttttttctttgaagagaaaatgtgcaggattgcaatgctttgttgggctttttggaaaatatgtaatgagctcaattagaataaagaatctctttctgttgatgaggtggttgttttggctaaagtgacttgggacaatggagtaaagctcagtatagaagcattcttccatcatgtgatttatagtacaagggagatggagctgagcttttgtctacacatgctactaattcttacaaagtcaatgttaatgcagctatttttgacagcaaaagatgttatggttatggcattgttactcgagatgacataggtgctcttgtgaaagttactgcatattatttttctgggagttagctgcagaggtgattgaagccataagtgtgaaatgagctcttagttgggtaaagaaaatacaaatggcaaagtgtggagattgaaattgacaacagtccgagcaatttttactgaattgtttatgaactcggttttcggtctagtgatctgtgattgtcaaaaaaaaattatcttctttaaagaatgtttgtttagattttgttaagcaatctgccaactaaattgctcactatattgctaggagttctcgtgtttgtgtcgattgtcgcatttatgagtatgatgtatcctgccaaacttcaagccttattgtactttgatgtttggtaattaatgaattcagcatttttttcaaaaaaaaaaaaa

SEQ ID NO: 38692 - DNA, 1945 bp, Cannabis sativa
aattaataaagtttgatctttagggaaaaaaaaattaataatcaagccgacaataaacacattaaaataataacacaccataatataatgacatgcacaaacttagtctttttgtttgtactaataaccacttattagaaagtttgcattaccattatgcataataataaaatattatatgtaagagttatatggataacatcttaacataataacacaccataatataaaacaaagctaaaaaaattggcacattacacaggccaagttatttcacagagaactaagccaagtcaagcaaatcggcacaaatcaaaaccaaaagaataatacaagacaaagaccaataataagcggctaagaaacttaaaaaaatgcattatttaacacctaatcaaataaaagttaaaacctacttgtcaagagaagagagttagctagctgttcaaactaacttttggttgtattctgttatctggtgtaacaaactttctgttgtttctaacttctcttatttttgtttttcctttgcttgattcgtgtatataaaccaaagctctggctttccagattaatgaacagagttcttttctctctgttttgtcaattactttacatggtatcagagctgtttctttcaatttctttttcctctcttcttcttcgtttgttttctgttttcttgagctttcgttcatggctgtcaatggaggttcgtctcaaaataatggttctaatcttcctagatcttctcctgtaactttttctcattcactttcggttagactcgatgaacacaactttctcccctggcagcatcaggtttttgttgcaattaaaggaagtcgtctccagcatcatctcgatcctaccagagctcctcccaaatttctcactaatgaagatcgcctgcagaatcgactttcactagactatgaatcttgtgatcaataggacaacatcttagtttcttggttactatcctctatgttagagaaaattctcacaagaatggttgggtgtgaatcggctgctcaaatttgggacacattgagtacctactacacggcattaaaccgagctaatgttggcaagtataaaactcaactcagaaactcaaagatgaaggcctctctcaatgatttcttgctgaaaatcaaaactctggtggatcttcttgcctccattggtcatcctatgtcagctcaagatcacatagaggctatctttaatggcctttccagtgagtacaatgtatttgttacttcggttaacactcgactggacacatacactgttgcagaaattgaagcacttcttatggcttaagaagtaagattggataaagattcggaggatcttgatattgccaaaccagaagcaaatttggctcttactaaacccttcaaaggtggcagaggtactttctctactcactattatccatcttctaatcctccatctcaatcttcaatgttcaggggttctcctggttcttattctgccaattaccctccccttggctttggaactcatcagtatcatgttcagactagaggacctcctcctggccgtggacaaatgcaacagaatagaggtggtagtgtacaaggtcgtggaaaatactcggcttggggacaaaagattcagtgccaattgtgtcacaagatgggtcacactgcacagaaatgtttctacaaatttgataagtcatttacagactcttcaaagcttcaatggaagtgctaatcttgctgaatgttcccacctatatgcttctcctgaagttgttcaagacaacagttggtatcctgactcgggtgctacccatcatctcacaccaaatgcccaaaatctgatctattcaactgaatatactggagatcaacaaattcatatgggtgatggctctggcctcaatattcaaagtattggtaagactttc

SEQ ID NO: 38693 - DNA, 2453 bp, Cannabis sativa
gaactttgaaggtgagatctcgagtgcccatcaccatcttatccattgaaatccctttaatcttgtttagtgttttaggaaaaatgtttacactacaaatccaatatatttcggttcctaagggtattatttagtttatttgtttcttctgtagttatttagatagtaatttgcagtataaatatttaagtttaatttttggtcgtaaataaatatttaaatttagtttttagcgacaataatatttgaattatatttttaaaattttataagtatcagattgttaaatgttaagtaaattattatgtggcaatttttgattggtccaatttatgaatttttattattttttttttaaaaaattgatttaaatatactaatatgaaaatgagacgtggataacaacttgacatttaacagtcagatacttacaaagttttaaaaatatatttaggtattattactgttaaaaatttaatttagatatttatttacttaaatttctgcaaattactctatttagaatcatatgtatttattttttttaaaaaaaggtatgaataacttatagtgcttagctttaagttcatgcaatgagtaaaaatacagtaatacgtgtaataaaataccaaagtaattggaattttatgaaattttataaataatttaaagtaactaatgtatatatcttaaatatcgatacgtatattaaaacacttaaatattatttgacctaaacattaatgggaaaatctataatatgctcaaataatttgtttcttacccgttttggtatttaaaaaaaatttatagtttaattatttttactggttttatgcgttgtaattaattaggagcacttgtaaatttttttaaaaaatttcaaataattatttttacttactacaagtgtactttatgttaactattcttgtatttggattgaaggttgaacattcttttatacatatttaattacaccaaacataatattttaggttcaacttcttaatactgtttgaatgaatcttaaaggaaatttcatgttttgtgggatgtgaatggaagaaactatttaggtaattgggttgcattttagtattgaggtgagacttaatacaatcaagtttcattttgattgcgatcatagatatatgaattggggtgtgagcttgacactttgttaggattaaaggatattttgttattaataataaagtaaaaatttgatgatgagtatatttgtgaatttatttttgtagattttatttaattgctgaatattagtgtaggaaccaattgaacaagctgccatattggagggtcttagtggcatcaaagcaacattttcctccaggtatttttgaacgtcggctgtggaaatgtgtttttaatttgtaaaagtagtattttgatgttgtgattgtaaaaaatggtacaaaagtttaaaattaatacttttgctataattgttttgtttttatgtgttagaatgtaggatgtgaaagtgagtgtacgaggttctatctcaaaactaaaaaggtggaattctccaatgtcgtctttaagatggtgattttttttcaccaatcttgcacggatcaataacaattgactttttgcctgacaacagttgtttttggctcaccatacttgaatcacaagcgactcttttgacttcttttggaccgattttgggatttggcttgttagaaatcaatttggctctgataccatgttagagtttgataaggtgcatggagttctatttcaaaatcaattggctatcagaggagtagctcattgatattatgttttcaactatcttatataaaatatatatatatatatatatataagatccatgaactactcctctcgtaaccatttgattttgagataaaatttagtccatctacaagtctacaaagagaattatggcagaaaggaaaagggaaggaggttgatttattaaaagtggttgtagtggatgaagtacttgaacttgaatgttgaataagaatccaacaagggcaacaataataggggtgtcatttaagttgcttgtcataaattgtcctgaaaccacttaaaatgaaagaaaaagagaagtaatattttgagatatataaattatcatggtgaagtggtggcaacgatgcccacttatttatttagtactatttagtaaaagaaaaaaaatataattaactaaatggaaaatgtaatgtcaattaagtactaaattgggtgcttgggttaaaaatattttactattaatgtttttctttaaaatgattttgactacttatataattgagttatcattaaagtttacaaatccttaatcatgtgggattgggttaagttcttatgggatctcaaaaacaaaggaattaatgagcaggagacctttttatatgcttcgatcatcattgacacaatctggcgga

SEQ ID NO: 38694 - DNA, 6740 bp, Cannabis sativa
  modified_base (6673)..(6676): a, c, t, g, unknown or other
  modified_base (6708)..(6711): a, c, t, g, unknown or other
ttaaggcacaaaacccaacaccttgctcgtgttatacgcctcacaaggatggggtgagtcgttccctcatgataccaactggctgtttgacctgaaatcaagtcctaagcaaaataggttagggtatttctacttctcttagatcgaggagtcatggttgacgggcaccacgaataccgcagtgaaaaaataggtggctttatggaggaatactattttgtcaaggggatggacactaatcataccagtgttcaacacattttgtcctactgctgacccccgttcacgttggaacttaagaagagggctccaaaaattctccaactctcttttgatgaatggaacatctctctcctggccactaacatcaactttgtcaagtacaaactctatccggctaaatttgtactaaaggttgaggaggcagcaggagaggctatgcctggactggaggatctgagctacacattcatatgtggtggttagagtaattgataagctggataggccttgtgataattttgaactagggtttggaaccctattgcctagcagggacttggttatctccaaaaggcgtattaggtctatgccagtttagtagataatagggagttgagtgttgatatcgtagagctagaactagtagactctgacattattctggggatgtatttcctatctaagtatatggctagtattaattacaaaaggaaaatggtgacttttcagcctgagggcaagtagccatttatttttgtaggatccattcaaggttctcggatccaagttcttttagtattaaaagcttgagatttactgcaagatggatgtgtagaatttcctgctgttgcgattgactccaacacagccgaaacacttgggcctaaggatgtcgaggtagtaaaggaattcttggatgtattttccaaggagttactgggattaccaccgtagtgggaaattgactttgttattgatttggcacctagagcagagccaatttctaaggcaccttatcagatggatctgacagaacttaaataattgaaattacaactttaggggatgcttgatctagggtttgcctgacctcgtttatcaccatggggagctctgaataaagtgttcaaggatttcctcgataaccatgtcatagtgtttatcgatgacatccttgtatactgtcagtcaaaactagaaaatgagcaacatctatggatggttttacagcgactatgggtacacaaactttatgctatgttcaagaaatatgagttttggttgtcacaagtgttctttctaggccacattgtcagtaaagatgggattatggttgatcaatggaagatcaagtcagttagaaactggctgagactgaagacagttacaaaagttagaattttttttgggactagctgggtattatcgacgctttatggaaggattttctaacatttccatgcctttcacaaaattaataaagaagaatcaatggttgttatggatatacaagtgtgaaactagttttcaagagctgatacagctgttgattacagctctagtcttggctttgccatcagatcaagaaaaaattgtagtttattgtgatgcctccaaacaaagtttggggtgcattctgatacaagctgatagggtcattgcttatgcttctagttagttaaaggagtatgagcaactttacccaactcatgacctagaccttgttcctgttgtgtttgccctgaccatttagtgacattatctctacgaagagaatgtgacatttacacaaaccacaagagtctcaagaatttcttacccacaaagatttgaatatgagacaaagatggtggttaaaattagttaaagactgactatgagattctgtatgatcccaggaaggccaatgccctgagtaggactggccctagaaaggttttcaatgatacgatgatctgtcttttgttagtaatggacatggtcaagacatgtattgagtttatggttggaaaactcaataatttgactctttagcccgatttattagaaagaatcagatgtacgcaacaggaaggttctgagttaatcaagtttcgggaggaagtgttagttggtcaagctaaagacttctcagtctcaaatagtgggatgttactttacaagactcagttgtgtgttctgaacaactttgagcttagaaaagagattatggatgaagctcacacaacaccatactctttgcaccctggtaccaccaagatgtatcgggatttggaaccttattattggtggtacggtatgttaacaaatcaaagttgaacattaaaaacctttagggttattatacaacctttgacacttaatggaaatgggaggacgttactatggatttcgtggttggtttgcctaggaccacgagaatgtataattcagtctgggttatattggattatttcacaaaatcagcacactttctatcggtaaagataacatttatgttggatcaatatgtggagttatatatgaaggagatagtttgtcctccacgaagctccaaaaaatatccattattttagatagagatccgaagtttacctctaagttttgggaaagtctccaaagggccattggcacgaagttaaaattcactacaacattccagtccgagaggacgattcagatactgtaagacatgttatgagcctgtgtgatggactttgagggtttgtggagtaaatatttttctttgatagaattttcctacaacaacagctatcaaagtacaataaggatggctccctatgagatgctttatggtaggaagtgtcattccccgatgcactgggatgaaaccgagaaaagaaagtattttggtccagagttagttcagcgggccaatgaggcaatagaaaagattaaggcacggatgcttgcttcacaaagcaggcagaaaagttacactgatcctaagcacaaatacatagagtttcaggtaggagaacatgttttcctacgagtttcaccaatgaagggtgttaggcactccagaaggaagggcaagctgagcctaaggttcttagggccatttaaaatactcgagaaggtcgaacatgtagcatattggctagccttaccacctactttatcagtttacacaatatttttcatgtatcgatgatgaggaagtacgtatctgatccgactcgtgtcttacgttatgaagccctagagttacattcagtcttgtcctatgaagaacaaccagttcaaatctttgataggaaggataaagttcttcaaaataagaccataacgttggtcaaagtactttggaggaatagtaaggtggaggaagccacctgagaattggagttcgacatgaggacttagtatatagagttattcaggtaagattttgagaacaaaatccttttaaacaggggataattttgatgaccgcataattagaatatgaataagtggacaattagcactaattaattaattatatcatatgatgtgggtcctattttcaagaaatagacatttgagttataatttctcaatttcaaagattttattaaactctacatgtattaaatatgataaggatgaaatttgacattttgtgttttaagctcagtatcggtagaaatgcgacgatttgttcaatagagtcacatgggtttggtatagaatcttttatttagcggggcaagtattattgatatatatttagaataacaggtttaggtggggttgtagttttttaccattttactcctaagcctttagattacttaaggtgtaagtaaggggaaaatggtaaatttgctctaatattgctattatcctttaagtgggaattagttgttttatttagtaattatcctagctaaattattgagggaataaagcaaaagggaaaatgaaattatctcatttttattaattagaaatttgactctctctatcctaaagactctctttctctcttgacacctatagaaccagacctgaaactcaacaatttctcaaggttttcaacaaagtttgaaggagaaattggatagaaaagccagaggtaagccctagaccatctttctctttgttttcggaagaaagggtgttagcttgaacatgaaattttttagaaatagaatctgatcaaacctagggtgtttatggattgctttctggggtaatttggaactatttacagcttattgggttagtttttgatggctgatttgagagttgagcaagtttgagttcatgaactcaaacttggctcaaacagtgctgtttttccattctttgagttttagttgctaggtatgcttgaattatgttctacatgttgtaattaggtgttctagagagttacatttgagttgggataaaattgagcttgaaattaggtttttgggatttttacagaaaaacagtccaccgtttttctagaaacggggactactttcccaggtagaatcccaaaaaatggttcaccggtcggagtgatttttgcaaccccaattttcattttcttttcaatatatagggtatttctacgctatttatcgataggaaaacttctagttttgaatttaagtcctcaaaagtgtttacagtaacacttacctattttgtgtaaatgtgagatagggcctccgttcaacgggaaatatttctacttaggttgaccaacacacctgaatttgtaaacgaggtaagattagtataaaaatatacatatgtgcatatgatatacatgttagattatatgaattatatactaccaacactagtaaggttgaggtacggagtgtgtggtacagtataatattaaggggtatgacatagcgttaccaacactggtacttaaagagtacagattgcatgtggtataaatgatcaagtgtacttatagtatgaacaaactataccaacacttgtattagaaagatacttagtgcatgtggtacagaggacgtgttatcatcaaaaatattcgagactcattatacgcgttggacgctcgtcaaacttgtaactaggtgtatgggtgcttgagttatgatacaaattatatgattatatattttatatttttcttattgagtctgtcgactcatagatatgtttacatgcgtaggtaaggtcaaggcaaatgttgagcagcagtgagtctagaactagatgaagattgtacttattgaggctgttagacctggagtgttcagatttttgggacagttgggctcatattttgatagtcagtaggcgacaatgttatatgtaacattttgaaaattattgtaaaacaaaaatgggatcccagaattgtataattttatatttatttattataagtttatttaagttacgaatttttttaattaatcatgtttttcaataaaccctttaattaggaaataagtacattgtaattaaaataaatcactgtagcgtatctaaattagtagagtgttacaattaggtctgaacattttgagtgagtttgacccggacccgtttaacccactcggacccgacccggtcaacccacaaaataaaataaaaaaaattgtttaggcgagtcgggtccaactcggtactccactgggcgggttcgcaggttaggttttcatggtcaccgagttttgggttggacccgaacccgcccaccaacccggtgaactatggactatatagactacggactttggatttttatggactatggactttgaaatattttagtttttacttttactatcatgattcatgaacatgaagtttgatgaacatgttgtttgttggttggattaatttttgtattttaatttaagatttaaattaattcttctttttttcttttaatccaaagaataaggtgttatattatatatgtttaatttaataaataaatataccaaaagaaataaccatttgaccatataaaatttgattttttttaagagttgaccagatcaagtcaacccagttaacccgtgacccgccaacctgtgacctgccaactcgccaacccgaccttatctcgggtctgggtccgagcctattttttgacccaaaatttgcgaactcgaaacccgcagacctaaaactcgatcaacccacgcgatgttcagccctagttacaataatactgaatattatatttgtaatgaaaattattagaaaatataaaattaaaattatatgttaatttgattgtagagtgtgacttaaaaatttgagtagtaaatactcaaactctaataattataataattttttatatgactatctatatagtatttttgaaaagttatataaaaataattgaacttataaaaaaaatacacatagtttagtaattagtataatagctgtaaaaagaaaaatacaaaaaagcaaagtacaagtttaaggctagatacgaaaactacttggtttgagtaaagcacattacaaatccggacatcatacaaaaatactagacctataagtcgtgtcggacctactcttaaaacatgttagcacaatgcggtacgacccatatttttgtatggtacgatagaacacgatctatatttttgaaaagcacaaaaaaaaaaaagagttggaccaactcggcgcacccacataggggtgtgcataaatcgannnnatccaatgagaaccgaccgatccaattacaannnnccgccaaacattggatatctaattgtgat

SEQ ID NO: 38695 - DNA, 2268 bp, Cannabis sativa
gataatcattaattttaggtttttttttgttgggttgtaataaatttatcacacaatataatatacattttattattttttttatgataatgttgtcaataatatttaattaattataaacaatattagtatatttgcaattacaatattaattattaattatttttaaataataattaatttattaatttgtattatttattaattatataaatatattttgtattttataatgctatatatattgtgcattagaccatatttccaaatagtagtcttagatgatttattatttgcaagatgaattactaattaagtaaaggcttagccttaagtaaattgcaataaaaatttggctcattttttcttttttgaaaaaaaatatataaaatttggtatgtcaatgtggcggaaaattaatctattttttctaaaaagacacctcaatttctgtaattaaaacataagaataaaatttaaatgtatatcttattttatattaaaatggtcttttattatatttcaaaatagaataattattctattaaaatatataataaaaattaaaattattctattagaataacattctaatattttataatgcaatcaaactaaaatgataaaataaaaattatttcattactaatattccatttcattatctttaaccaacaccatcttatcattaatagctaaactgcctctctgttggatgaagatagttttagttggaagataatattccatctctaattaattactccctttgtaaattatggttttcatcagtagtttatacctaaaacaaacttggaataagtgagaaacaacatggtgcatttttcttttctggctggaattaataccaaaaaggcaaaaagtattctcaaatgtatatggtatgtcttactatataatacgatatataatgtgagatgtacggagcaatacccattagccataacaattttcatatttattaattttttcttatataaaaaaattatatataattattgaaaaatgttaaaagacagtatcatatcactattgatgaaattaagtaataagaggtcatatacaattaattgtaataatttttaagatatattactaactaataataggattaataggatgtcacctttaaaagtattgaacactgctgtaaaagacatagaaatgctcatatttatttaattgataaaattaaggcttatttgtattgcatgtctttaaattatatatattttgacaagttaattagtccctaaatattattttttggcaaactgattccaaactatataagttttgacaagttagttctcaaatttaattttttggcaacccacaaacttttattttcttagaaacttaaaatcttcactcttaaataattgtattttatttattaatttatttatttttgtatttattttaaatagttttatattaatatactatcaaattaaataaatatacatattttttatttatatgtttttttttcaaatataccaaaattaaaaaaacaattgaaaaagtttaaataataatattatattttataaacctaaattatgttttaaatcttacttttaagttatgttccacagcgaacaatgatattttaccaacattgatgcaaaatttaaataattaattaatatacatacaattgaaaaaaaaaaaatataatactacacattcataaattaataataaaaatataatatataagtgctaaaatataaattatttggagactaaaattctctctagcaagtgtatgagttgttagtatttatactctttttttattaatagtatatatgaataaagtatatcttaaatattttcttaaaaaactaaatattataattatatacattatatgaatatttaaaaaaataaaaaaaatattaatattaatataattatttttatcaaaacattaaaattaaaaaaataaataatttttaacacaaaaaattaattaaagtaaataaaataaataaaaatgttaatatctaagagtagggactaaatgttgctaaaaatagaagtttagagactaatttactaaaaaataaagtttggggattaatttatcaaaatttatctaattaaggactaatttactaaaaaataaaaattgaggatcaacttatcaaaatttatataatttaaggacatatggcaaaataagcttaaattaataagttgtgttttgtgaggtgggtaccaaattatccaagtttt

SEQ ID NO: 38696 - DNA, 1807 bp, Cannabis sativa
aatctcaatagttcaggggtatttttaacgaccttaaaagttcaaagggcatgaattagtatatatcagaattcaggaagtaaaattcctaattagcctaataaaaaatatgctttaatttgcaatgcatccctaaaaaaagtttgttggtgcaccctctttctgtttcagtttatgggagaactttttatcctaattttttttatagtcgtgtatgttgtagttattaattaataaaataacatagttcatcaaatagtctacgcgagactctttcatttaatttcatggctttaattgctcttttcctttaaggaaatttttatttacaactggtatattttatttaggaaacttatcttgcaagagaatgaattctctttataaaaagttacctatgtttggaaaacttaactttccattttttttaattgttaaatttggttttgtcatgtttatagcaaatcaaataatttttatttggcaggtattgaagaccaaattgtgatcttggttctttttggaaagcttcctgtttgggcttgatctgttacagcagagttcgaacttgatactgcaaattagggatttttttaagaaaattgtgtacagctgggacaacgtgctttgtttgtatctacggtttctatgttctataaataggacctagagagcagctaaatattttctacctcttctagtttcgtttttcatacttttatctttgtgaggagagattttcttttgtaaaaatctagagtgttcagtaaggttttagtttttatttattgttcttacactattattagaataggttgaagagcttcattgaacaagagaatgatcttcgggagaagacttgtcaaagccttacttcgggaggaagtaaacactcacacatcaaaagacggagggattttattgtttgttggtgttcagaaatcagattggatttacaaaggattgcggcaaaactttagatggagtctaaacttgtttaagttaattgtatttcgtaattgtttgagactttactaattgatttcattctctgggcgtggtcccatggactaagagtgtttgaaagaacactaataccacgtataattctcttgtgtcaagtttttatattttacactgttatttctattatgttattgtaaatctgtgttctatagtaacaagtttctaatatgtaacgcatatctttacagtcgtttttttttactatttttcaaaaaaacttattggcatatgtaaaaatataatttttcaaatcgtgtaaactagtattgatcctgatgtaaagaatttaaagttgaaactgctaattttcatcgactatatttgaaataacaatttgtaaaaatgattaagcaaaaaaaaataaaagacaaatttgtaaaaaatgaaagatgtcgtatatttatttatttatttattcttgaataaattcatggaattttattaatgataattaattaaaataataatctataatttaatcaggacatctttctcgttggacacacaactaggattaaaattagaaaaacaagtaaaataatcagcagcctaatttctagattatttaacaaaaacactaaaataaaattagataaaaaagattgtagcatcgcaattaactttaaaaacacttatattctgtttcatccatcgctcaaaagatacaacagtagaaactgttgcatcaggttcattcaatctcgtagcttgatcactcgactattatgtaaggtacgtaactgcacaactaacaactccttcaatagcaaaaaacttatta

SEQ ID NO: 38697 - DNA, 2122 bp, Cannabis sativa
tgtcccgccacttcattcgttggtattggggcagaacgcccgaccgctgcccctcgaaaaacaagacggctttggatagcgcgtcttggtagtcgtgggcattggctgcaggtggctcgaaactcgagaatgatatgatgagaatgaaaagtatttgagtgatcatattgtgtttctgtctgcgcagtgcagtgaagtttgcggtttgtatgggaggattggaaatgggggtgtgggtttttttaatttggttttgttgggtttatatattgggtggaattggagagagagagagaggcttcacggggaatagaagtgaaggattggatttggagggaagttttttgggtttgctattgctgtttttttaggtatatagatatatagatatagagagaagactctgagagagtagaaagtgtcagtgagaatcacatgggttttgctaagttaaagtgtagagagtgcaaaaggaactataagagagagagagagaggcttgggtgggttgaagttgaataccctttttgtggggtccttttatgggctttatatttatataagttaggtgagttgaaatgggtgtttgattgaggtaaacataaagaaagaaaaacattgaaaataaagtattatatagacattaaattgaggttaaaagtttaaggatgatacgttttttgtgggtgaaaaaattggtgttatgtggtaaaaggatgaaaatgaaaatgcagtaatgcaaatttagttttaagtttaaggatgtgatgtgattattttactaccatgtataatgttggtgatttttgtgttatttaatttccaactattttcttttaggttgtatatggaaaaattaatgttgtttttattgctcttttgagttttattattatatttttatggatatagatgacaatgtattgtgccagataattttgaacaagtatttggctaagctagcttgcaccttgaatatagtaagctagctttttgtacaagtgtattcaaattttaccaactcctttgaattgtgtcaatttatatattatatatctttatatataaaatgtttttatttaaagattttttttagtttaacaaaatatttcattatatttaatggagttagtaaagttaattttataaatatataaatttaaatattttatttattttatttttatatataaaatgtgtttatctaacaatttttgttaatttaacagaatattttaagaatataaaaatatttcattaaatttaacaatgatagtaggattagttttataaatatataaatattaatattatttattttacattaatttaaatatacataaaaattaatattatatgttttaacttgattgaacttataccaattttacattaatttaactatataaatgttaatatattatttgtaattttattattttttattgttatttttaatattaggagtatgttcaattttaatatccttaaattttacatatttattttcctcaaatatttataactttaaatattatttttttaaaaaaaaaattaataagttgttttttttaatttataaaattttaaaaatacacataacaaaaataaaaactaaaaatacgtgcaatgtgtacgtaacaacaatctagtataactaagtatatgtacaatacacgtaacaataacctaatatatatatatgtgaatattttattttattttttatttttgtttgtattctttaaactagagttttattgtttgaagaagggaaataataatgccgaaatggggagagactttataacttgctaaaattatgtgttgttattgtgttataaatggggtatttactatagctatttagtccatttcgttttgtgtttaaagtacaatgataaagacaccaatgtgatagtatgtgactcattattggataatgaaagataatgcatcacacatatatactatatataattataaatattttatcactatctttcttttacataaatctttaccacattctggattcatccaaatgagattgtttttcaagacccattacataaattgcaaagaaaaaaataaagaagattatataatttttttttttttt

SEQ ID NO: 38698 - DNA, 3079 bp, Cannabis sativa
  modified_base (1622)..(1622): a, c, t, g, unknown or other
aatgtgtttgtggacaattatggtaaactttacaaaagattaaatctgtagactaagacctagtttagtatagggccaagagtgccaggtttgttgagtgctcaatctgtgttatgctgtcagattgaggttaaattcctccatatcaccccagtagtaaatgacccctgttcgatgctttattgggttcaagattcagtaagtgcttcagtttcataaccgatggtggtggctgcgacgccttcagggcaccaagggtaacccaaattcttggttttctttttccgtcatcttaaccaaatcatgaactaatttagtgaacctcttattttattttaagaggttttctagttcatcttcttgtcttatatatcttatcatttaaaggagtactttgtttaatttttaggaataattgagctattttgagcagaacaactgtatttgttatggagttaatgctcataataaggatagcctcaggcaggtatgtgattcatagcttcttaagacgaatcatgtctatgaaaaattatgtctgttaaattttttttttttttttgtgtgttcattttttatagtttttgaacttcttacaagctcgagttagagaattgaggaagaaagataattcttttagacaatattgttattggttgggattcttagtgttggtaaatcagctcttgctaactctttgcatcaaattgggaggacaagtgcagcaggtactataaaaaattcagagtatttttttctgaataaatatgcaattttcttttcaagaaagtttatttgggtatgactacaactaccatttatctttaatttgtaaaattttagatgtattttgaatttaaagtgcattgcttctttgtagagagagagagagatttaagcatgttaaagagagtccacagcctggtgacaaaagatatcagcagcttaaatgtatgtagccgtattctattaacattgtatgctgctatagtatgttttacaggaaagaattttgagttaccaatatttgcttagatttattgtgaaaatatattaagattccaaatttactaaatataagattaactagtggtttataactattaaataaattagaatgagaggataaagtttgagttataaatccatgtttagtttatagtgattatatatgtatatgtgaccaaattaaaataagaaaacttatgaacttgatagtgcagtggaatgtttgataggaaataataatattcagtgtctattcattaaaatctcactgaaagaaacttaatttattttttgttcttctattttttattttaccgacaagggtgttgattgtttatagtctaattaagtgttgagacttacataaattaggcgagaatcttatagtctttattgtttatcaacacttttatcaatctttctttgtgtttgttttgtatttgctcaatcatttatttagctctctatgtgacaaggtctgatttgtctcccaaaggctagaattcaaatattttatcatatactttagttgtttatttttctgggattaagaattggatagttctatctcaagtctcactaaaaatactacttataataataataataataanaataataataataataataggcaattgagctaaaatgcaattattttgatgtgagtttttgaatcctttcctaaggcaattgaggtatcaatatggagattctgaaattaataaatgagttattagggtcgtaaatggtgcatatttgcaggtttctctttttctttgtactgccttgactgctcatgctagatagtgtatttattgttcttaattttggggttgtcgttcctttctcttcaaattttttctccactatgcaaatgaaatttaaaattcgttgagaaagcctttgagttttgttgattgagctactcagtattttgaatcaaggactttctttatgcttatctgactttgctagcctaagttcactcttcactttagtaacatattttttatttaaaaaatatagaatgaaagaattttcaagactggttaggaaggaatttacataataatatttataatgttggatttttgtagtttgctttgcttcttttactactgtacaaaaaaaatttgctattattttacaaaaaaataatagcaaataatgtccaatacacacatattgagttacattgccaataaaatttcagaaaatttatcaaatttttcctcaactctacttgctctatgttgtttcatacttacacatattgattgagttaaggaaatttcatgttattgtcttatttacaagttttggtattaattgaatgattctaattatttgtttgtaattattaattgtcttatttgtttctgttttttttatccttttgctgtaatttagtacttaataggatatggcatcacacgagaaggcaatatatacatatataattaacttgtttcctaaactattttcgaaaaacaaacttttcattgtactaattacttatttgattttttttctgtcgtgcataaggtggaaagtgaatctgatctaaaaggaacaagaagtggcaaatcagaaatgagtcctctaaatctgctcaatacaaggtataattagtaaactgactattttcctttatcaatatttatatttatgatatatgtgtattacaaatcaaaacacattctacccctgtataaatgcaaagtgtatgtgatataacctactagactaattcattttgacagatcaaaactttattgtgttgattctcatccaataagcacaatagccatattgaagaaaaagtttatagaataatttattagaacacactcatgtatttttctagtatttcaattatggggataaagcttacagagatgtttgtacgtacgcccttgacaaattttttggatgtgtaatatttttttagtaagcaatgtgagtaccttaatgattataaaaataattattttctattatagatgtttactaatatttaactttttttaaatttcagtgttgactttgacaatagaaatacaatatg

SEQ ID NO: 38699 - DNA, 1215 bp, Cannabis sativa
tgttccactgcctgaaaaggtgagcccgtgacatttggcgctgttggtcgagaatgtaaaaattgcttcttattttgagtgatatatatttttttttcataattcaaataatcaactaatatattaactcataaatatgttagactttctaatttgtgtcatgatcgtgaattcagtatagggaatgtctctactgattttcttattatatttggtagcaaacgttgatagttaatgaaatgttctattttcatttaggaaaaaaaaaagctttcattgtctttgcatttgaccaccatttgggtccttttctcaatgtgtttaaaaaaattcacaaaattttcgacgtgtacacacccacaaatttcttgatttggcttgtgagattcttccaaatgtggtattcaatcgtgtggtctcttaaaagtcattcattatatccacactttacaggcccaaacccaaagaaagtgtattagaaatagtgtcatagtgtaaaaatataatactatatatactatgtatgagctattcctatcataactaatttattttcatcataaaatgttacttggataaatgaattattatggatatatgaaacattgccatagtggctaaattagagtttaaatatttatcaataattattcattctatataataattaatgtgtcattttataattaattattggttgttttatattatttattaaaataaaatgtatatgattcaatatcttttaaaatagttgagtaaaaagttttttagttgcaaaggtagttaaagattactattagtttaaacgaaatagcaacttgtagctcgttcttgcaacttgcgtaactagttaaatgcaacacttgtaaccaccgtccttcaattcgatcaatacaaaataaattttatattttaaattcttcttcttgcttcttagcatactattttattgtttttcttttatgatatcaggtcataagattattttcttattccgtaattttttttttcgatcttttattctctctcaccatgcttcgaacaagaagtggaggaagtgttcttgaagcttaacatttaattgatacctctggtaatggcaaaaatctaagtgttagttttgatcaatctgattggaactacaaaggcaaaactatcaatttacagtttttggaaagattctatgattgtggtgttggaaattattttacc

SEQ ID NO: 38700 - DNA, 876 bp, Cannabis sativa
tcggttctgtaggaagtagtgattatggaaagaggatgctttgtagccaaatatgacttcggcttggctataccattgagggatcttgtgatcatggcatgagtgtgagtaaaggcagcttgtatggttgttcctgcacaaggtaaagatgaagcatatggttctggtgcagagacagtaggcacagaaatttctgaagacggggcagtgtttattgtagtggtgctgatgggaggaggtactggtggatgaatgatgagatttgagggtgtaacatgggattgggatggagcggatgtggtagggataataggttcagtaacaggtgtaatatggggagtagtggaaactggtgtggctgtttcagtagctattaaattgggtgagttggttggtaatgtctcagcaccagatggttgtattgcagcatcagacacaagatttgtattaggtaatggacaattagtagtaaagctagcagtaggaggagaaggagaagaaaattgtacctgatctggtgcacattgtgaaagaattccaggatagcaattttcattgaaaaccacattgcgtgctttaaagattcgaccttgagcattttcacatagaaaacatttgtgataggacgaataaccaataaagagacattgttcatacctgaaatccattttatgagaatgatacggcctgagatggggaaagcattcacaaccaaaaggcttcataatatgataatcgggtggtgtgccaaagagacactcaaaatgactaatgttgttgagaacaactgtaggcagccgattaatagtgaatgtggcatattgaaaagcatgccaccaataagttaagtccaatttgctttgagcaagcaaagta

SEQ ID NO: 38701 - DNA, 2425 bp, Cannabis sativa
  modified_base (2021)..(2021): a, c, t, g, unknown or other
ggtaaaattcttttatattttaatttttatgtacacttaatttatttttttttagtaaaatttcttttatctttaagagaattttaataaaaagttaaagtgtataaaaatttaaaaaaaaaataaaaattctccaggtatatataattggtcggaggcaatcatatcatacatatttttatttatattgtaattaaataattattagtcattctgcaaatctgcatgcatatgcagttcacgtggcacaaacatgggtaggtcgggttgatcctttgcatgatacccgcccggtgccctatatattatacattattattatttttttatcaaccaatttttctctattaatatttgccacaaacaaaggctgctattctttaatttagaaattatgaataaattgtttgctatttataataattgtgagtgagactgtgtgagagtgctacaagtgattgctgaaaagaaaatatgttatgttgtacaattttcagaggtcatgatcgatcaatatataattcatagagcaatatgaggatacagacaaaacatttcttgtcccaaccaatgggaaaagtattagggtaaacttctactttggtgtaattgaaaaatatagtctaatttattaataattttttgtaaaatatagaattctaaatagtatttgagatcaatatttaatagaaaagaaaagtaccagaaagggagaatatatagcctttattattctttgataatcaataattaatatatatgtaatgtttcagacttattattttctaacgactataagatctacgctattattctatatatcacgcttttctttttttaaaagaaaaatgaataattaatataactaataattaaagtaaattttttaacgtaattttcctctaactcaggcctgaaattgggattaataatcgtgcatatatatgcatgtgaattaagatggccccttttttttttttttgaaggatctatacatttctctcaagaaagatatgtttattattataggactatttaaccttccatgattaatgaacacagataaagatatggttttaattaattatattgaccaatctttaaaaaagtagatgtacataaatgtattaaatgaacacaattaattaactgattaatttaagttgaagattgtactgagaatatataaaattcttaattccaaatgtcgctttgtttaactttttatactttaattaagttgacattaatttgcattaactaaaatatgatcgaattataataatggacaaaaaaagcatgatactttcggtttgatcaacctcattggattggatgcatcgatagttttcatgcttaattaattaattaattaagttatatatattttattctgtagtgacgacagaagctgtatatgtgattattacattattgtacgtactatatatatattatatataataattattcttattatttatatatattttatataaaatagaatagaaaacggtggatatgtcatgcatcaaaagcagtatagtagtttcatgcaactaaagtacttgtgtctgccatggtagaaaaacattaaccatgctagctaagctatataggaataggatacataataagacaatctacaaaaggcttcaatttgacaataacactaaactatatatattatattgcacgatcaattttagtacataagagagagagagagagagagagagaacaaaagtactcatgaatcaatatgtatattcattttatttttttaattaatattacacgtcattattatatattaattaaattaatgagcattattaattaggagatcaatgttatataaattaaatagttagcggttttatatgatttttattgaagtagaataaataagattaaatattgaattgctttccatagtgatattacgtatcataagagtgttaggtacactacaaaaaattttgcttttagtcacaataaaagtaaaaaaattgtaactnattataaattattattcttacgttgtgactaaaatatttgtggttgaaagcattagtcataaaaatcacaattttttgtgactaaatgtgtttttagtcacaataattgttatgactaaaactaaattagtgacaacttgtatctaacctatgttttagtcacaagtaactttttgctgtgattaaaagtcacatttagtcacaaaaaaattatgttgtcattaaaagtagcttttttgtagcgagcactaggttctctttggcatccatttatttaatcgagcattgttatgaggcaccaaggtgtctagcaccattataatgtggcgctctataaatacgtagctagtgattttctgtaatttttattaaactaaaacataagtggaactcgatattaaatt

SEQ ID NO: 38702 - DNA, 2693 bp, Cannabis sativa
  modified_base (2646)..(2667): a, c, t, g, unknown or other
gaatatttagtattgataatagttcaaagacataattttttcagtaataatttaagaaaaataaatttatttattcttataataatttaagttgaacaccatgaatttaaacataatattaaaattatttttaaatttattgattttgattgttttcttttattaattaacaatgaaaaaaatagataaaaaaatatcaatttaaattcacataggatgagacataaattattttaaagttcatatttttgtttttaatttataatgtaaactacaaaattattttttaaataaaaaaaaactaatttttatctctaataattttaaccatttaaataatttaaacaaaacttacaaaacataaaaataagaagatgataaattataataaaaaatactttagttgaaatagatatgttttgtattacaaaattgatataataaaaaagtaacaaaaaaaaataataataataaaatgtaataaaatatgataaaaaaatacttaaatatatagtcatatacacggtcactttttaacttttgaaaatattgaaagtatttttagttttttttttaaaaaaaaaaaaattaattggaacaaataacaatataaaaatttaaaatattaaaattaattcttaaactaaattaattttataaatatatataaaattaaaaattagtataaaaatttaattattaaagagtaaatacctatttataaaaatttatatatatataaaacttagataagacattaatcaatcacccataaaaaaaaatatttcttagacaatagaaagtaaaaaagataaaagtttatttataaccgacatgaataacacctaaaaggtctctaaacaatgtgagacttttaacttgtatgtgtagtttatttttcaaataaaataagagaatgtatcacaaaatagacaaaataagaagaaaaaatagtaaaataccacctaaactatttctttatatatatatgtatatatatatattgattgttataaggcactaaggtgcttagtactactagagatgactcctataattcataagcgagtctttataaatttttattaaattaaaataagtagaatttaatattaaattacaataataacgatattacacttaacaaatgtgctaggcacaatgagtgtttttaagcgtttctcaattatttataccaactaccaagcgatgcattcaaattagaagaaaaatgccttaatgatggatcgataattgaaaaggattagttgatggaacaaaattagaagattttgcatataacgaccaaaaatcaagggaaagcaagctctttcttgaccacacatgtcttgttaatcaaatttagcaaatctaattagagcttttctaataatctatggaaagacatgttccacatgtgatgacaaattattgtgtctgctaatcgatcttatcatcataaaaagttgtggacaaacattagcaaccgcttcaaatgataggacaaagagaccccagcagacaagattatgttactacttacatggttgtatgatgggcctgtatgttaaaggaacctcattggttaacattagaggtagctaataagaacacgaaatgtgttaattgtgaaggaaaattcagactaaattagctaatcagcattgttatgagacaccaacataacatgatacaaattcatgtagtttttattttaattttatataaattatgtgaatctcatattttattgccaaatagtaactcatcttttcgtattattctctataaatggaattaaggaccctttatcaattaggctgtttttaatttcatttggttaagcttttagtttgcttatagctaaaaatatatgaaaaattataataaatggcctaaaattatatcataaatgttcttataaatttaaaaacttctaaagaaataattcttttaaaatatttattacttttattgtctttgctacatagaaaaaaacttttatttttttaattcttgttaacgcaaattttcgttaactaaattaaagtctatttcatgatagatttgcacagaaataatagtagtaaaaagaaaaaaaataacacaaaaattcttaacgtagttttgctgttaaaattctgtatagtctgcaagtctatcttactagatttctaatacaaaactagggctctttctctaaaggtttttccgtcctttttttagtgtatcctatccctatttatagttacataagaggacagttaattacaatcagattgatatcccacaacactaattccctgaaattgtgggatttgattacgtcccacgtaaaataaatgcggttattacttaaaaatcacacaactgtgatttatccgcttttactgggtcaatgttggtgtggatttaaacacgctccaaagggtatctcgtagagttacctcgctaggatagcaacaataaccatgacaacgagctgaagcttttcccatgtctttccgaggtggataataaaaatgccgttgtttttgctactgaagatataacgctccatctgacaatcgcagttcttggtgacaaggtgaacctcaacagtcataatcatttgaatgtctgcttctatctgagagagctgactcnnnnnnnnnnnnnnnnnnnnnnaaagatgtctgaagctgattagtgaa

SEQ ID NO: 38703 - DNA, 4147 bp, Cannabis sativa
gcttttatgaatcggttgggttttgttaatgtgattggtattccttctgtgggaattggggggggcttttgtcttgcttggagacagacgggtttgattgaggttcagcatatttttgagtcggggttccatgttatcatcccagagatgtacggtttggcgaagtggcatttgttctgtgtttatggcactccctatgtggagaaaaaagcagagttctggaagtggctaacggatacggttttggaatgtggggagccatgggtggtgataggtgatcttaatgtcattttggatgattccgagaagaggggggtaggaaatttgtaccccgtgaggggaatctcttgcgtaattttctggatgatacggggggagttgatctgggtttccaaggggttcgatgtacctggcagaatgcgagaaaagggatcaaaaatgttcggaaacgtcttgataggggcttagttgattcctcatggtgcactaattttcctaatgctaaagttataaatcttcctatccttggatcggatcactctccaattcttttgatggatagaggcgagcagagaaaactgaattatcctttccgtttccttgaagtgtggacgtcgagttcggattgcgagaaggttgtggattctgcttggaagattgaagttaggggtaggaagaatgagagagttcctctgaaattggcgaatacaaagcgagaacttaagaaatggaatcaaaattcttttggtttttgtgatcaaaagttgaggagtcttaaacgagagcttggggtgatacaaaacaaggtgccttctagagagaatctggagaaggaagcctcgattcagttaagcattttggagatggaagccaacatggaacgaatttggcgtcaaaagtctagagagctatggataaagaatggtgatgggaataccaagttcttccacgcatccactgtcattagaagaagacgaaatgctattgaaagtgtggaaaagaatgggatgtggcttcatcatcgggatgagattgggaattattttaatgagaattttatacaagtatatgaatcccaaaatcctgacattggtgctgagtttgattccctcttcacagaaggtgtttcggcggaggaaaatgctagtattagtaggtgcccgactgatgaagagattagaagtgtggttttcactatgcatcctctaaaatcgccaggaccagatggattttcaggcatcttctatcgtaaatattggcgtattgttggggctgaaatctgcaagatggtgcaaggtttttttgaaaaccaatcggtttgtcctaaccttaatcatacttttttgtgtctgattcctaaggttaataatgcctgccgatttgatcaatttcggcctattagcctatgtaatttctgctataaaatcatttctcgtatcctaacggacagattgaaaaaagttattgacagattagtctcccctttccaatctgcttttgtccctggtagatggatagcggaatgttctatcatggctcaagaggttcttcagagctttaagagaaagaaaggaaagcaaggggtaatggcggtgaaaactgacacgagtaaagcgtatgaccgcttggaatggaccttcctccttcgggtgttgaaagcaaacagattcagtgaccatgtatgctctatcatcatgacttgtgtgacctcagtcacttattcggtgcttcttaatggagctccgttgactcccttcaatcctaaacggggccttcgtcaaggggacccgctatccccgtttctatttatcctttgtagtgaggttttatcgaagctaatccttagagctgagattaatggggagtggaatggggtaaaggtgtctcgaatggcaactccgattactcaccttttttatgcagatgatgcaatctttttctgtaaggcaaatgactcgaatgtgactactcttatgaagtgtatctctcaatatgaggagtggtctggccaaaaggtgaacaaacaaaagagtggagtggttttttctcctaatacttctcaaatgtataaggatgagttgaagagcaagctcggcatgaatagcttgaggagggacgagaagtacttgggcaatccattcttcttctctgcgagcaagaaaaaggattttaattttctaaaagaaaaatgatgtctcggttggaaggatggaaagctagaaacttgtctcaggcgggtcgaacgactttggttggctcggttcttcagagtatcccggggtattatatgtcgactgccttgatcccaaagacattgtgtgaggatttggataggattgttgctcgcttctggtgggtggggaattcgggtaaagaaagataccgtgctttgaaaagttggcaggagatttgccaacccaagcaatgtggcgaattgggtttaagaaggtttagtgacattaataaagttatgttggctaagctgtgttggatggttctaacgggcatggataaggcttgggttaagttggtggaggatagatattgccaggttgcggatgcttggtcagtagagaaaaaaactggtgattcgagagcttggctgggaatgttagaggctagacaaatatgtttggctggggctggtattttgattggtgctgggaattcagatttgtgggagagaccgtgggttccggggaaatctatggaggaggttcgtcttagtttccattactctagaagacatgcttttgtgaaggtctcagatctttttttggaaggctctagagtgtggaatgaagagttgataaaggactgttttgatgaagaagtggcattggccattctgcgaattaggcctttggagacaagtgaagatatcattttctggaaaggatcaaagttggggacatttactgttaaaagcgggtattggttgagccaattcaagagattcaagaccccgaattgcgtttgggagaagctttggcggtctaagattcatcagagattaaagttttttctttggaaaacatggtccgatgttttgccttcgaaacagcgtcttggaatggttgaaaacaactgttctctctgcaatgttgctgcagaatctgctctgcatctctttggatcctgcagtgtagttcgtgcagcttggtttcagagtcgatggggcattcgtgtggaagagttgcattgggaaacaatcatggattttggagattggtggtctcaagtaaatgatgaggaacttcaattgtttgctgcttgcctctgtgaatcggtttggcattggaggaataaggtaatttttaaaggttgcactttctccttaatgggattgataaaggacattggaacaagagttaaggagatggagatgagggttgatcctctggaagtggccgatcgggttgaagtccttggtccagttgtggagaacttggatggattacaatgcttttactgtgatgcttctgttcttgatgagactgctggtgtggcggctgtagaagtggttgatccgttggttggtgattcgtgggtggctactgaatttcatgcggtctcgggggttcttgaaggggaatttctggcaattcttcttgcgctggaaactgctcgtaagcggggtgttaagaagatcaaaatcctttcggattccatggtggcaatcatggctttgaacaatgattgtttgccttatgcttggggcacttatcctgtatttgaatcttgtcgatctgtttgtaagtgttttgattatgttgcctttgctcattgcccccggtatttaaacggtgtggctgatgctgttgcgggctgggcgagatgtgccaagtcttgtacttcgggtttgctcaaagttgttgccccttcggtagctttgagtttgttgtagtttccctttggtttcaataaagttggttccttatcaaaaaaaaaaaatatatatatatatatagtttgtaattattttatttaaattaataattagttataggttatacaagaaaaatgatattattgatgttaacaagtactatatatatctcgtgacaatgatcaaattatgacaagacaacaaataagtccaaaaaaaaaaatgaagcctttctttttagttgacaatcaaggaaaa

SEQ ID NO: 38704 - DNA, 8155 bp, Cannabis sativa
aatttatgaaaagaaatatttttccattttttataaagtaaatagccaacatttattataaaagaaaataaaagaatgattcattgtggtacatattatttattaaaaaaacgaaatttcaacaaaaaatatataatttaattaagttttttaattgttagaaaaataaacaaataagtaaatagaattacacattttaattattagtaaaaaataaaataacttaattattagtttaaaaaaaaaataaaaaaagtaaatgagatgactcattttaattatcattaatgaaaactaaataaatgtataattgtattgtaactatttttaaacataatttagatgattacacatgtcactcaattagaaaaacaatgtaaaaaagagtgcaaaagagaatttcctagcacttttctaaaacctaaataaaaagctactaagatttcggctacaagtgtaattttgacttttatttttagttatgatgtggtgaatgattaatgaactagcatagtcatttgtagatcttaaaaatgtgtaaaagaaaatattgtaaaatttattgaaacgtgggatgaatttaagtttgagattttattaatttatttatttattctgatgaataagtttgagattttatcatataatatatattttagctaaataattttagatcaagttctcaattttggagagacttatataagaaatattatggtataagtgatattaagttcgttggaactattttaaaacaaaatttctaacaacatattaagtttagaattataaaaaaaaaaaaataataagagtactctgcaatattaataacaaatataaattattcaagtttggtataaaattttcttttattattcataaataaattatataaaaaaatattaatttaaaatcatgttgatacaattttataattttactatcgttaaataaatacatattatatatattgtttttaaaaaaatattaaataaattaataataaactcaagatctatttgtatataatataaaatacgataaaaatatacaataattaggtatatgcgtacttgattgatccatagtaattaccgcaatttgatagtgcaatactatcaactaagtctttcttcctaaatctctaaattagaagcagtttatttatttcattatcaaaagagattcaatcgtgatgagacaatatgtatttatagagttaaggagggaacttagctacataactatagttggactctgtctgctcatcaaatgcttcaattaactagaaaatcacacacttttgcttcacctagattttacacatagatactaaacccattaactattgatcaccaacaatatgaactaacatagaaaagaactatccagtcaactcaagttttaataaaatcaataaaatttaatgtaagtcgaattaaaaaatctaacaaaaaatacatattatataattaaaaattttcatgaaattttcatgccaatcacagtatatttcaaagttgagtatatataatttatatattaaaatgtttactttttattttttaactaatattttttttagcaattttctttaataatttaaggtttttttttttttttggcaaggaagaattatttgagtttgagggagtccttcatcatttaaattgaattcggggggttatagtgacaaaaaagaaaaaagaaattaatgaaagggtagccttccttttatgaaacagacacaagaatggtaggagaaacaaaacaaaaataaatgggacattaattggagaacaagggaacactaaactagtacgtagtctcatcttactttgggaataggaaagagaatccttcatttcaaataacaataataaattaataatagagcattccttttaaattaaaatcagtaaaattcaatattaaatgagtgagcatttaacattgtaatgaaatagttgattttagtgttgagttaagtttgacaagtggatgtggaattattggtagcttggatgactccaaatgaaatgctgctattttctctttcctatatttataagtccaactcccagtctcctccattacctaatctctcctactctctctctcctctcctttcctcatactacttcttatctctgcagcttccaaacaccaatcaaatccattatatattagagaagagagagaactcaattcacatctaacaaaatctcctcacaattccaacatatatatatatatatgaccctatctctataccgtataccgtccggtagaccgaccagtcaaaaaatcaaaacaaaacgttttcttttcttcttttctttttttcttaataaattcctataacatctctttcaacaaatacttctctttctttctctctatctccaaaatatatatatctccattttgactccacccaacgttctatcttatgatccctttcattatttactaaaatttgttttaggaaaaatctcatcatatacgtaaaaatcttcctcaaactgatcatccttatatcctaggcaactattttttccttactttgattctcacctactttttttcctttcctttcctttccaattgatatttatctatatccttatttattacttttactccaccatcctttccaagctgttgattattagctctaacatctcaaaccatatccttctactatgctggagagtccctctacagttactaattatgatgagaattcgtaccacaattaaattcctttcctaaattttcatatttttggagcacattttttttttcttgttttaatataaaaaggaatttttattttattatttgtgatcggactcgaaaagatagaaattaaagagcaaaaatggctgcaccgccgagtagccggctccaaaatatgctgcagacggcggtgcaatcagttcaatggacttacagcctctactggcaattatgtcctcagcaagggtataaatataaatttaattaatataatgattatacatatatatgctattatattttattattaatataagaaatttaattagttgagtaatttatatataggatattaatatggggagatggatactacaatggagctataaaaacaaggaaaactgttcaaccaatggaagtgagcgctgaggaggcttcacttcacagaagtcaacagcttagagagctttatgactccttgtccgtcggagaaaccaatcaaccgcaacggcggccttgtgccgccttgtcacccgaagatctaacagaatctgagtggttctacttgatgtgtgtctctttctctttttctcctggtgtcgggtaagttttattatacgtattagtaattataatatttaatttcatttaaaagttaatttgattcaaaatattttgattttttatttttctgttaaataatgcttcaaaaaatgtattattagttgttgatcatgatgtactggttcggtaaaaatgttaaccaacaaccactgtttataattatctctgccaaattaattataattaaagtatttttgatactactatatatactcacaacgatgtatgatcacaaagaatgttaattagtcacaaaaattacaatatttttagtgataatatattttattacaatatatataattaattgtgattaaaacaatattattagaaataacttgtcactaattatcatatctttaaattatacacgtttcatatatatatatataatatcttatggtacttgaaaataacacatcattttgtgtgatttgttgatgttcttatagtgttattttcatatttaacttttgtttgattctaataataagataacaaagaaaaattgaaagcactaataaatttattgaaaaaaaaaaaaaaatcattaatagtattaatcatggtgtattattgataaaaaaaaaattgttgttttacgtacccagcccttatttcgtcgatcgaaaagagaaactatttcactttctttctctcttattcaaatttcagttaaattaattatgtttcttttcataggcacaagcatttaatacactgagttatacacataaatttcctttctataaaaagaaaaataaagttaacatttaagtgagagaattctttcttttgttagtgaacaacactaccattgtatataatctactggaaatgaaaaattggagcagttgggggtgttataaatgccttataccataaacatatgaggaaaagctgctaacaaagctatagtgatgagtgaaatttataactatatagccattaatattatagttattaacaatgtaataatgagggctttgctgtgccaaaatctatacataagatttaatttacagtcgtcatatccttgaaaaacaaataaaggtaccgttgtcttgtttgtttctcatataaggttttatacattagagacatatagggttatgctacatttatatgtagtcttatattatacatatttcacatgtatatatgcactttaaaaaaaatgactttatcatggttaggtgaaaagcatctgccttttttgttttcgacaagatcacaaatttatagcttcttttcgaccaagttaatgaacaagatatctatatattaatgttatgatgatttaacatagatattttactaaagtacttttgactaattttacttaatagttgttccctagtttggaagactgttatgatcaggaatatattgttgggatggatgatcatgatggtctgatataaattaatatctagaagcttctcatatgagaaaatagacaaccagatcatatatattcatttccatatagtcatcacaatataatgctagctacaaaagtttgattgatcgtagctcgatcaggatgatgttcgtgccttatatacacttatatattacattaattaattattaattaagaaagctaataatataataattgatggatcaattatatttccaattaattatttgagtgtgtgtgtgtagtaatgtataggtgtgttgtgtaggttgccaggaaaagcatattcaaggaggcagcacgtatggctcacgggtgcaaacgaggtcgacagcaaaattttctctagagccattctagccaaggtacttatatctctaaactatgtattttgtaatatgtcttagaatatatatattacaaaatgttgtatgaaatacaaatattatctcaacatatatatatatagtagctggtcaactaacatatatgtttcttataattttgcatatggctggggttatcattgttataccagagtgccggcgtacaggtacatatattaatagttttgcatccaattctttcaacatacattattaattaactgtgtaaatattgctatctttctattctatatttcaataatattttccgtttttcgcttaatcttttctgtattattgttttttctttaaggttgaaaacaaatcaaagttttttttttctagatagtgtaaatttggccccataatttaaaaattatttttgattttgaaaatttatagttgtattttgaacacgggcaggaatattttaccatgctttcataaaacaatttgtaaaaacaaaatacaaaagataaaaaattctgagcatcaaagagttattttctaaagttgcatcccttcatttaaaattattttatttcattactacatgctttaaaaatatttttataaatattctatttaaattttttttaaaattttaaaaactgcttttagaaaagattaattattcatttttattaaaaaaaaaatacaaaatcatttgatgtacttattttttaaaacaaaaacatgctctaatcgtgtaatatgacaaaaatttgcagactgtggtgtgcattcctctactagacggcgtggtagaatttgggaccacggaaagggtatgtacacatagtgcatgtcactactacttacctattaagactctgtttgatttgaagcaatgaattatcaaatgaaatgaaaaaaatataatttttaattaatttttacatttaaaaatattaaaatatcattctaataaaattaataatttttttactattttcatgaaataattatttgataatttgaaaatgaaaataaatggtcattccatatgttaatacaaaacttaacaaaacaaaattattaattttatacgaattaaaagtataattttttttagtaataagtcattgtattagtcactcaatatgtataaattgcaacaaaccaaataagaatcaagatccccttgcaaatgtataccccataattgttatccaaccaattaaaacattatattcccatattgctgtatttctaattttctaaatcataaatacaatggcatcgaaaattaaaacaaaagctctccttcgagcctcactaatctttgctcttcaaatccaatatttcagcacccctttaaattggtactgatttgaaccaaaaccagcccactgccaaaccagtaaaccagtttaacatatccttgtgctatacatgcactgaaaacacagaagctcatgcgtcttttcctctaatagggcacttggtttcatctataatctccatcatgtgcaacttgtgagctgtctttaatctatttcatacagcaactcatgttatgtacctgtgcttttgaatgctttgttgcatccaaatcttgtctgcagtaccatctctcatttgacaacccaaacatcttcttgaaaacttctttaatcgagtagttcattgactccagatacaatttggagtaataaattttgattatatctctcacttgcataactttgtcccaatagcacccattatcttggtgaattttgtaatcccactaattttccttcttcatataaacttgataatggacccattccacccataaattgtcattctcttgaggaagagttcacacatgcttccttattgctccaatattccactcttctatattcctaaactccaatagtccaacccccatgcatgtttgacttgcacatattttcccaagcaaacagtctgggtttgtgagaatcagccacaccaaactacaagaatgctcaacagattttatcgataactctaagaatccttttagggagaaccattatcatgtgcccaatatgtatggatcgccactaatacagagttcacaagaacagctctaactgcatatgaaaagtgtcgagctaagagctccatattcgaatccttgcaaccatcttctctaaaagcaattcactttcaagacttgaaagttttttggaacagataggaatacccaaatacttgaacggaagagagctgatcgttttgtatctcgaagcatcaaccacctattgtacatcttgctcattcatatcccaacgctatatatcgggttttcttgcattttctttgaggtccgaggtgacagagaacatcttaaagcaattcaacaacaacataatagacttcacatccctatatagctaaataaaagaagatcatcagcaaaacacacgtgtgttaaccgcagcccttcacatctgggatgaaatctgaattctcttgttttagtaacataagcaagaattctggataagagtataacttttatcatataactttataatgaaattagaaaaggatcttgaaaaaattaaaccaacaaaatattatctaagtttaggataagttaacccctttctttcattttttctgtgtcataaaattttgaattttttgcggctaaatttttacggtaaaactctccaaactaaataactatttgcaaatttaaggtgtcatccactttctacagttaactgccaacatagactacttatatgtatactcttatacacatttatattggtacacctaatataattatttaaaaaatataaaaatattttaaattttaaattttttattttttaaatattttttttattttataattttatttaattttaaatgaattttgaaaataatttttaaataataatattcgatgtaccaatataaacatgtcacgtgtacaagaatatgcatataaacagtctatggtggtagtcaattggatgataccttaaat

SEQ ID NO: 38705 - DNA, 2034 bp, Cannabis sativa
  modified_base (795)..(805): a, c, t, g, unknown or other
tagcatttgtgttaaagtaaaggagagaagcctaaaagcagggctgttggagtgaattgattcgtaatgaaaaagcgacactaagtattgtcgttttgatgccacagccaacacctcacctgctgcaccacccacacacttccctactacgcatgcacacaatcattctctttcacttttgtttaccatgtttaattaattaactataaaattaaccaccatctttatagtgatgattaattataattattaaccgaattaattctctacctatatgtgactaccatgattgtttgtgtgttgtgtggtgcaaccaaatgtcacacacttatacacttaatggtggttcattattttcatcccttcaattaaataatgtaccccttaaaagagtttatcgatatattttaatatctgttttggtatctgttatttatgttgtagttatttaagacatcttataaaattttgagaaatttaaaaaatttaacacaccaaataactataatgcagacgaccataaaaaaaattaaactaaaaaattctaccgaaacaaataaaaaatgcatcaatagacccattatagtattttatggccatccacaattattattattattattattattagagtattgttattagacatggtgctatacattttttataagtggcgttctataatatagttattaatattctctaaaaattattttctaaattgtatgaaattcgatatttaattacactcttagtattaagcatcagtgatgtcttttattattattattattnnnnnnnnnnntattattattattattaagttatgattataatccagcaccattaaaccaagactgcacaattagcacattctattggctgatctatatctgtttcctcagctttataataattaattcattttactatagttaataataagatacactaaccaaaattttaattaattaaccaaattttaatttttattctggtaaaagaataaagactaatcaatttcttgattggatttgaatgtaaaattgctttttttttatagttgaaaaatacccaaaaaaaaaaattaatgggccagggtgggcttgggccggctcatctcaacatgatttatccatattttggcctcgttgaaggcagtgggtgggtctgccagccagggcaccattacagtggcgtttaaaccactaattaattttcataaaaagaaaaaccactaattaatgaatactattgctgtccaataataaaataataaaatattttgggagaaacatcgattcttttagttaaaatttggaaaagagtttttaatccaaatgaatgtggggatatatacattttttctcctcagattttcagttttaattaatcaattaattccaaaaaaaaaaattaaatggatcctaggaaggtacaaaatttagtactgaattaattaaagctggaaagaataagaacattaattgaaaggaaataaccattttgtagaagagccacaaccagaaccagcaattgcaaaattgatcataacttaatacagacacattaaattctgatagatttatttcactacttcaattcttcaattccttttcctgacaaaagaaaaaaaaaaccaccaattcctttcatttagaagaatgctaacactggatatctaccctatattatactttgagtttgacacatgtaagttgtaatagggtgtttataattgcacttaattaattcattttgttaaaataaaaattagcagaataaaggtactattatgagtctcaaattatagacactaaattaggacacagttttaaataatatatttgaattatggttggttttaaattgtattgtattgtaggtcttatgtatagacttagttcgtttatgtctaaaatcaagttgcatatataattttgtataaaatacaattaaatataatactatagagtacaatacaatataatacagcgtaacaaacaaatcgttaaaattgttagatgcattagt

SEQ ID NO: 38706 - DNA, 1632 bp, Cannabis sativa
agagtgatcactaatcactatatataagaaattaacaaaatgtaacaaacttaacctgcacaacaaaacaatatattataatcaacaacagttactatagcaaccctaccattaatttttttttttttcgtttgaccaatcttattagtaattacgtagggatgacatctaatacttcacactttttattgtttaatttggtcaattgaattacttgtcgcgtcttcttgacttttctttttaatttattaaatatgctttcacttgacaaattcaaagttgccatgtccaaattaatacgtgtgaccttccatattttggacaaattctcattcatgtatttatcaatttctcacgagctatacggctccaattaacgtgcgccacaaaatattatatattaacactacccaaagaaaaagaaaattgaaccaatgataaatagtccagtccttcattcgccttaaaaacttcgtagcttcattgattcaaattacaaggaaggtaagataaaagtgagaattatctttctactgaaattaaggttaaaaaatcattacaaaatgattaaataataatataaaattatattacactatactataacccaacatgttatgtttaaatatatatatatatatgttgtgtgtgaaatgtcatgcacatccagattccatgtatgaatccgctagtaaaattgagtaatgttatattttattaaccaccaccaatatattttagaacatgctatagagaaaaggataggcgtctctttccttttcgctgattgatacagatatgtgtagtgtacagaatatcgataagggtattcaaaagcaatattattaaaaggtccttttgttttttttttccagagattaaaggttcttttgttataaaaagagaaaagtggctcaaaagtacatgtagtaattaaatggttggcgatagacagatcatattaatcttgaaaaataaaaacctttaatggttcatggttggtaggttttatttattatatggtgacgggtggcgaaagtatattcttcatgtgataaatattgagttttgggaccaaaaatgaagaggaccaattggaagttgtaacgctagcatgttgcattgttattggggatacactttttacctagggctgaacatcaagggtgttttccgaatttcaggttcatgggttttggttttaaaaaatagtacttgtatttgcccataaaatagggggctaataggtttgcgggttgaccgggtgagtcaacttggtcaactctctccctctcttttcttttttaaactcaaattttatattttaaaatagaaaaaaaaaaaaagaaaaagaaaaagaaaaaaatttgctcctgctcgtgtggtggcagacgatatcatggaggaagcagtggtgggttgttggctccggctcgatgagacactggtggagacaaggaggagagctctgtccggaagcaactaagtcagggtcttccatccagcggttgggtcgtcttcgtcaaggaggagggctaatcttcggcttcctagcaccgtcgttgatgccagggggaagggagagggggatgggtggttcgtctaggtcctgaaaaagggagagggagaggg

SEQ ID NO: 38707 - DNA, 2564 bp, Cannabis sativa
tgtttagttcatttgtcttatggtgaatatttttctttaattcattgcattattgtaggaattgaatgttgcttacaagcacaaatgttcttactaaatgttttgagatagaaaattcaaatgtttgcttagaaaatgtgtgcatagctattgcttcttgttattgatattcaaatcctataatcttccttgtgcaaacatgtcgttgtatcttcgttatatctgataagtttttccatcacatatggaacactcaccaactgtgttaataatatcttcatcaccggcttggccatactacaagattgtgttcgcactatagatttctaggtggtcttgaactactgtttgaaacttatttgtttgggtcgcgtcttgcattcttggttttttcctttatgtaaattgcatcctttttaaggctatttttttacaacaggtaaggttcatttggaagctctagaaatggaggacattgaagatttgttagttggaagcattagcggagctcctcctggatttcggttgccactgacttcagttggattgaacctaaagaaggcaacaaagaaacctcctctcgattatgctaacaccaatggttttgtccctaaaattcctggcacccagacaatttacatcaaaaccttcgggtgctctcacaaccagagtgatagtgagtatatggctggtcagctttcagcatttggttattcattaagtgaaaatcccgatgaagccgatctatggcttataaacacttgtacagttaaatctcctagtcaatctgcaatggacactataataactaagggaagaagttccaaaaaaccgcttgtggtggctggctgtgttcctcaaggaagcagagatctaaaagaattggaaggagtcagtgtagtaggagtccagcaaattgacagggtggttgaagttgttgaagagacactgaaaggtcatgaggtgcgacttttgaaccgcaaaactttgcctgcacttgaccttccaaaagtaagaaagaactcatttgttgagattcttccaattaatgttggttgtttaggggcctgcacttactgcaaaacaaagcatgctcgtggtcacttgggtagttatactgttgatagccttgtaggacgtgtaaaatctgttgtagatgatggtgttaaagagatttggttgagcagtgaagatactggagcttatggtcgagacattggggtcaatctcccaattttgttgaaggcaattgttgctgaacttccttctgatgcaagcacaatgcttcgtattgggatgacaaatcctccttttattctagagcacttgaaagagatagcagatgttttgtgccacccatgtgtctattccttcttgcatgtacctgttcaatctggtagtgatgcagtcttgtgtgctatgaatcgagaatatactgtgagtgagttcaggactgtggttgataccttgactgagcttgtgcctgagatgcatattgcaactgatatcatatgtggatttcctggtgaaacaaatgaagattttgccgaaactgttagccttattgatcagtacaagttccctcaagttcatatatcacaattctatcctcgaccagggacgcctgctgcaaagatgaaaaaggttcctagtactgtagtgaagaaacggagccgtgagttgactacgctcttcgaatccttcacaccttatagtggaatggaagggagagtggaaaggatatggataacagatattgcaaccgatagagttcacttggttggccataccaagggatacatccaggtgcttgtagttgccccgcagagtatgctaggaacttcagccattgtgaaaataacatctgtaggaaggtggtctgttttcggtgaagtgattgagactatcaagggtaggagttccaaaacatcttcaaacacggggactttgtctattgaagacaaatgtagcccttgctccaatgcttgtagtgatggttgtgagtcaagagtgcaagaagaagcatgtgattgtggagcaggaggttgctgtactggaactactatcaaacaaagtgctgcctcaaacaattccatttcgcaaaaggatgaaagcagcataaatcttgttgaatggttgcttaggaaacgaaaaaaccatgtgcagaagcaaatggagactgaaattacaactgaatttgataacaaacaagaacaggctgaacaaagtattgcttcgtggaacgcgatggataaagttcttctcggtggaatgcttgtgagcttcttgacaatcttagttctactgattcatcttggatttaggacttcgtctaactaataaacaattttgtttgaaggctgcttttgttgttatttccatttggatccgcttttctgatatggttgttattcaatttgtaaacacttgaaagtcatttcacttttctataaaaagcaatatgcaagacccactgaatctttttctatcataaacatgtcaagactcatttgtaatagatatagagttagtagtataaaatgcattagtatatcagatttgat

SEQ ID NO: 38708 - DNA, 2402 bp, Cannabis sativa
  modified_base (227)..(244): a, c, t, g, unknown or other
tcaatcatagtgagtaagatggtggtaaccaaagccgaaggggagaaagagatcaagcctcagatcttgataatacacttcgatagaaaggaacaagtgttagagatctgagcagaaggagtcattatattccactgcaaccatgtaaggttttgtaaaagtcatatgtatttaatttctttattttcgagatactcatatgtaggatgttaattcaacatacttgnnnnnnnnnnnnnnnnnnggtaaaatattcccaacacacactcccccacactcgcacacacggctcgcatgtgagccccttatgggctcgcatgcaagcccccacacccatcttgcacatatgcgacacgccacgcgtgcttttgcacttctgtgctatctttgcaggattcacggggtaactctcgtgatggtgcagacgcgtcttgacatttggagtactacttttgagaagtaggcatcaggcaagtatgctaacttggcgcattttcacgggtctttcttctcttaggtgaataattccaaaaattaaaggtgcagatttttggagttaacaatgctttttaagggttgacaaattatcccttaaactcaacaaagatgacatgcaaatttataagacttttggcattggtaaaagttgttttcatgtaatgataatggttacttcgagtaacctatcctcacaatctaattgttgtgttgtcaattaatcatggaacaatgataatagtgaatttgctctaggaaattgatgaggtgattgcatgcatacatgttggaagaatgtcacacactacccaaactcattgttatgtctaagagtaataatatgtgaactcacaaattatatactaatgtcacacgtgacacaagtcacttaaactaattatttttatttaagagaatcttacttataaaaatcaacttgctccttagtatttgtcatatttgtgcgtaatttatgtgtgcacatgtcattattctatgtcaaagagtgatgatatgtgcacacaattacacacaaatataacacacttatgttggcaagtcaattcaaccaattatttttatttcaacgcatctcactaatcaaaaataacttttaatataggtgtttgttacatttgtatgtagcttatgaatgctcgtcgataaggttatttccatgaaagttgaattaaccagttacttttatttcaggatatctcacttatcaaaagtaacttgtaattaaggtgtgtgtcacgtttatatgtagtttataagtgcacgttgataagatcacttccatagaaggtaaacttttccttttgtttgtcaggtaaaacccctgtcgtatttggttaaagctatggctatatttgattacacaaagtagtgtaaagcacttagcaatttttcacataaataagaatgtgaaatttcaatatattaagagtgtccaagaacattggaaacatttggagatgtctaattgtggtatttccacttatttgaaagggaattgtcgcgaatataatgttttttcgaaaacttgctgcctacgagtttgagaacaaggattaaaacatgtctaatcattttttttcaaaaagtgacgagtaacatgtcgcctgtggctaagcatatgggaatttcaataacgtgttttagaagtttgaagctccaaaactttaagcaaatgttctaatctcattagctgaacttgatggtagttcttacacgataattaataaaagttattaaagttagggctaattagcaatttttttcctcgaattttgaaatgtattaaattatgccccctgaattttttttgccattaaaaattttccctgaactattgagattattaaatttaaggacttttgtctatttttattcaattttactgtttcagtgattgtttatgtaataatcatgccccttgaactttcatccatgatagaatttttttactaaaattatataaaagtccttaaatctaacaatcttaatagttcaggcgaaatgttaacgaccaaaaaatttcaggggatatgatttagtacatgtcaaagttcgggaagaaaaattactaattagcctaaaattaaaaagtttaatcacacttttccattatttctctcctagttcgccaagattaaaagttctctcaaagaattcatcaaaaatgattgaatgatgagttcaaaggcgtgttgtcctcactcctcgtttcattgttgtaatctcaaccatcaccctagtgattgcaataaatagtacaataaaatttctttcatgtgaaagtcttgatggtcttaattggttgaagggtatctcactacaaccaaccatgagtatgaacaacggagtattgtttctcctgtgttctgtgcttcgattcatgt

SEQ ID NO: 38709 - DNA, 1856 bp, Cannabis sativa
cataacaaataaaaatatgtaaataacagagaaaaaaaataataaaaatctatgaaaaataccgtaaatgcatcaacgaataacctgttcaatattcttccacttggtgtctgatcaaagaaatgaacaggcgcattgataagctttttgagcaatgtattgtgcaccttaactgctgatcttaagccgccaaaagcaaatgagaatgctcttaccaatgtaagacaagaatttatgacacaaaagatgcagagtataacctgcattaaacccatggtagtagaaaacagatctcaagttttttcatgctatcataagaaaacatgcaaagtcacctatttaattgttctaataaattgtgtgccaaaactaaagcagtactttcaatgtattgtggttctaaggactgtaaagatatgaagatactgccaagattgagttacatgtgtccacaaaaaagctcattaccaggtagaaggatgtggaatattctttatgatgtgtgccacttgttgtatcgacccaataagaaagccacaaatcgtttccattacgggaagcttgcatcagtattgcggatacacatattataattgttattaaccaaccagagaatgcagcatatttcctgcaattttgaggttaccaaaaaaataatgaaaatgtgcaaccacaaatcccaaattcaaataatatccaatatatgaaattttgacacgcaaacattttacccacttgtagacaataatttcaactctgccctcttttcgcacctcatcttcaatgatttcttgagcttcctctgaagcagacacaatattttgttctaaaataagcttctgtttcccttcagtacaagtgcccgtgctaccttcttgtccgcttatgtgtgttaccgtatcaagttcattcaggggagagaaagctgcataagatgacgctgccaaatcagcggaacttcctacccacttcacatgtcctttatccatcaaaataatcatgtcagcagaagatattgcctgcaaagtggagatatagaaataaaaatttcaatttatgagaagaaatagaaatgtgactcattttcaaacaaaaaaaaaaggttaaactagtgcctcatagagtaaattccccaatagttttaatcaaaaccaagtttagtcatatttcacaattgattggtgagaaacaaatatgcagcagacataattcttatgttattgctattgatatatattttcctgttaagtatttactaatgataaccctgtacttcactcttaattttcccaggcaaatttcagatgacgtgaagaatacttgaaaatggtcaccattctattcataaattcaatctaaaggcacttgtttttgacacaaataaacagctagaagagtcaagaggattcataaaaatgacctgaacattatgagtacaaagcacacgggtctgatgtttcataagaggacccagaataccattatacaaaatccacctagcaacctgagcgtcaaccgcactaaggacatcatcaagcataatgatatctgagtcatgatacatagccctgtattgaacaaaaaaatataagaatcaaagaaagaaagcaattaaagctggttggaaggtagctgcattgggtatatcgtaacatattgtaccttgccaaagcaagccgagctctttgtccacctgacaaattcactcctttttctccaataaaagccatgtcacctccgtccatcagtgaaatatcaatgtccagcgcacatgcccataacgtgtccgagtatctactcaaaatttaaaaaaaaatgaaaagaaataaccggtaattaaaaaaaaaaaaaaaaaa

SEQ ID NO: 38710 - DNA, 1590 bp, Cannabis sativa
aaaagtctacctttaagatacttagcacttaaaaccttgcaacatattgatcctcggtatggagagcccaacctcatttagcaagaaaggcttatttccaaagttctcctgaatcgaagccacgttgagactttgacacaactaatcacatgcctttaaacaaataccacagttttcttgctcgcagccccaaaaaaaatctctagccatgcaagtgattttagttggaagtttctttaacaacttcgtactttgcatagaatagactggtaaagaaagccccactgattttatcaaagtagaacgactagttttagagaaggattttaacagtaacccagccttgaccctagactttgactcgattcccaaccttgatcccggacccgaacatgtaacctggcctcagagctggaatcctagaccccgaccatgatgagagagaaagtggtgagagaaaaaatgatgagagaaaataataagagagaaagtggtgagggagaaaatggtaggagagaaagtgatgagagagaaaataatgagagagaaagtaatgatagagaaaataatgtgagaaaatgacgagacaaataatgtgagataaactaaagaaaaaaaatattgaaaaaaagtaatttttttgctctcaaaatttttgtctttagcaactttattttttgaaaattattttcaaaatatatggcaaaacctgctaaattgttttgaaaaacagttttttaattataatgttaaacttgcacaaaatttcattggccaaaaattaaaatgagagagtcttaaccaacaaggctacattacattttaataaatcaaatcattcatttaaattcttcccataagatcaatacgaggctatagcaaaaaacagataagatcaatagaataaagctaaacaatccatacactaccgatgaataaattactctcatcagaataaccccttcgttattacaagttaaaacctactattgaaacacataacaaatacactgaaaagttaggttctaaactaaatggtacctcaattaacaattcacgagagagttagccataatctgagtcattagtagttacatctaatcatctaattctaaatggtcatacattagtagtacacataattatacacaagggtcctaaactagattagaattagataattacttaaacaattccctttcataacttcagttttcctccgctgtttgagagtttggaacaaatttcagacaggaaagcaaagaaagctgcaatgaagcacataacccaagacaggacaaggatggtccagtccaaaaaacttctcttgggtaaatgagttctgtctgaaatgattagtgctctgtaaatcgcctctgtcaatgcataagctgaaactggatctgaatcttctgcaataaatccatactcggttaagcagacaatgtcatacacaccacttgtctctgatatatttagccactcacttatcttgatcctcccttcaattctttcctcagttgataacatgtcaccatgtgtcaatattagtattgggctctcaactacaaaataaggttaaaaagaaaa

SEQ ID NO: 38711 - DNA, 1233 bp, Cannabis sativa
tttttaacggctaaaaaaattcaatgagcataatttggtacatgtcaaagttcagggagaaaaaaaatcttaattagccttctttaaaatagcaatactagtgtattcccctcttgttattaaacataaataagtatattttaactttttcttatataacagtataaatcataattatttaaaattttattttcatcacaaaaaaattattttaaacaaaaaaaaatatacaatatattgtaaataattataaaatataccctcatatgaataaactaaaattgtaactattcaagtggaaaaactagaagaaggtgcacccatatatctttactatttttttttatttattatttaaacaattttttttttattattaactaaaatgagatcatgtggtgtaaattctttttccatttccctaccttttcggtcatattgacaatcttatagattacatttaagttataggagtctcatatctgattttactatgattcaatcttcggcaataccttaagagttcttatcacacatatttaaacacttttatttcctcaaattatatcttaccaataaattcaagcaataaaaaataggcacatttatttgccaacaagatttttatttttatttttgagcaataagataacctattcataatggtactagatacattgtacccttttagattttatctttaaaaaaaaaaaaaaagaaagaaaaattgtccccattagctacatattttcgatgatgtttttctgttcaaccatgttatatgtctcaacaagaacctttttcaatgcaaatcaaatcactgagtctgttatcatggtttcacaaacacaagtcaaaacattatttattatgtatcatctcctcctccacaagttatagataaaataaataaataaaaagtagtaattaattaatgaatatttccataaagttcattattaaaagaagagtaaaaagagtatggtataatgataatcaagtcaattatgattgaaaaagaatgtttcttatttttggaggaactcctcaagtcttggattttagtaataaattgtactatataaatgagaagaggaagaaaataaaattaaatagtagtgagttagttattgtgtggtgctaataaattatttgttttgctttttcactcttggataaaagtattaaattattcttatgacttacttgtacttcaagaagagaaatttttta

SEQ ID NO: 38712 - DNA, 2632 bp, Cannabis sativa
tatgtatatatacatttacaatgtcttccgtaatacatgatcagcttatttgtcgaacacataaatatacatatgtatatattgggttgctaataattagagttaagtccatttgtaaataatatcagctttggtctgatttctaccctctttgaagccataaattccatcattatgagccctccaaacacacttggaggcacatctgtcagaatccctgcttgctttaaacaactgataggatccagttccaccaatccatgtaagactacagctatacaaagttgtacctgtaaaattgattctaaatttgaactcatattcttgattactagccaaaacatgagcacctaaatcatcatcaccagacctgcaatgaaccgtaagttggacctcatcgttcaagttattaaagatttgaacccttgttggccatacaaatattcctccaattttctcatcattattattagctgatgttaccgctgatgatgatgatgaaatgatcactagtaaggtaataatgaaggcttttttcacaaactccatttttcgagtgcaagaatttaatatggagaatctatacaatgaatgttacctctcttaaataatctgtatacttatatatatacacacagacaatatctttgtattgtaaggtgatgatgataaggtggtttggaaaagattagatgattaccacgaaatgaatgggtcaatatattgttaaaatgggtgtagttttgttcttttttctttccacaacagattttttattagtattctcaacagtttttagtttatgtatagtatgtaatttatttttagtattgaaattgttattaaatgatgatgggattagaaagatattattagtaaataaggtgtgctatactatatgcgaggtatttgcgttttggcagaatagttgtacttttttttttaaaaaaaaaaaaattaggaataaacttcattaagagcaatcatgattggattagcttatttaagctatgttttttagcttctagaattaagaaaaacaaaatccttttaaaagtgtttggataagaaataatttgttttttgtattttttttaaaaaaaatttaaatgtacttttggagatgttaagattaaacttctcccaaagtcttttctgaaaagttatttttaaaattaaaatagcttacttacttcctaatttacttgttacaaaagatcttttattaattatatccaaatatttttaaaactattttttatagaaataaatcttatatataatacttatcctaaatacaaaaattaagtcaaaacttgtatttagctcatacttttaattataagtaaaaatagaagcttacccaaacgagcctgaactcatttcaaacattatttttactaggaaaaaaagaaatagaataaaaagcgctagcaaaactataatagccatcatgtaagcagaattccaataataaataaacactaagccaaaaagagaacaccattgaaaattgatttggaataggctcctcaacaactagactaccaatctcaagaaaaactcatggccaatgtcaatccttcagccaactcaaggcctcatggcgccccatcatcacctcaaaaaactcaagtacagaaggcccatcaccacaacgccccgtaggttctcacaccaccaatgccaaaccatggtgtattaatgacagtgtgattagaataaggattagtaaaggcgactagcattaattattgatattttataactatgcatgattttatttgttgtgggtcccattttttagaaagtgggcattagagttataatttcttaattttggagattttattaaactctgagagtattaattatgttatatgcaaaatttacaatttttatgatttttgctcggtgaagatagaaaatgcgacggatgatcaatagagtcacatgagtgagtttagaaccttttatttagtagagtattcatatattaatatttggaatatcgagattaggcaggattatagttttggactactttacccctagacctataagttgcttaagtatgaagcaaggggcatattagaatttgctcttttattgagattttgtcttgtcgtggggttggtagaaactcccaagttttgttttatgctggtggtatgatctagttcattaaggaaatagaaataggaaaattaagagaaaatcttaagttattactttctctctctttcaccatcgttcctagaagaactaaggaaaacccaaggttaggctttcatttttcaagccattttcaccaaggattgaggggaactgtaagtcaagatcaaaggtaagccctagatacttttttccttattatttatgaagttataagcttagttctcttttgtacttttgggaattcgggagtttacttttatttgaggttgaattgtgttagagactattttaaagcttgattttagttgtttatagcattttttaaggtgtaataacagctgtagaagatttgaagaagtttggttgagataggaggcagtcgaggaggtcaagatcctctgaattttcgtggtcacaacaggggccgtggcaggtttcaaagaggttgttatga

SEQ ID NO: 38713 - DNA, 3288 bp, Cannabis sativa
attgctaagttaatctggcttaaagatggggattctaactcagcattttaccacaatatccatgctagaagaagtcagaatcaaattttgtctatcatggactctaatgggataagaatagataatcctcaacttatatcctctatgtttttatagtattacattccatagcttggtagtaagatgtataacaagaaatctgcaaagaaaagtattattaagcaagggtctgttctctctaaggaccaagctaagatgctagtttaacaattcataagagatgaagtcaagaaagatatctttgatatacctagcaacaaaactcctagacttgatggtttctgtagcttcttttttcaagacaactgagacttggtggggaatgacatttatgaagccataacctctcttttgcatcctggacaaattttaagtgaggtaaacactactgttttgatcacttatttccaaaactaagtgtccaaactcagttggagattatagaccaatagcatgctgcaatgtattgtataaagctggtataaagataatttgttcaaggctcaaaatggtgcaacctgatttggttttacagaatcagagtagttttgttaaagggagattcattggccataacataatgatctgtcaggatctcataagacatcatggaagaaatttagctaaggctaattgtatgataatgttggatttgcaaaaagcatatgatacaatggaatgagacttcattgaagaaatacttttggctttcaatttccagctagctttgtcaagttaataatggtttgtgtcagaactcctaaattctctctgatgtttaatggatccatgcatgcatggaattttttaggcaaagaaaggactgagacaaggtgacccaatgtctcctctcttgtttgtactgagaatgaaatatctatccatgattatgaagaaaatagggcttaaacagaaattcaaattccatgagagatgtggagagttgaagcttaatcaccttagctttgcagatgatgtcttgttgttttgtaatgtggactacaatagcatctactacatgctttagggccttgacctattttcacaaacatcaggtttgaagcctaatcccaataagactgatgttaattgtaataacatgtgtggtacagaaatccaaagaattttagatgcttctagattttcaaaatataatgtcccttttaaatatttgagcattcccatatgtcttaagaagatttcaacaaaggagtgctctattctagtcgaaaagatggttgccaggatttgaacatggagcaccaggaatttgtcttttgctggaagggttgtactccttaattcggttctgatggtactatattaattcttattagactcaaataatggtgcttccaaaaaacattattaagaaaattgaggctatttgtagaggctttctttggaatagcaagcaacccttaataggggctgttgttgtagcttggtgcaaggtatgcctttccaaatcagctggtggcctgggactcaaatctgttgttgaatggaacattgcagcaatgtttaaatacgtttgcgctgttgcaaagaaagaggacaacctataggttaaatgggtacatagtgtgtatgtaaaagaagaagattggtggttttatagtgctaaatcaagtgatagctggtattgaaggaaattagttactttaaaagaaagaatgaaggaattatttgatacaggggaaagagaagatatttgcagcaattataagatatcacttgggtatcaaaagctagttcctacaggtatgaaagagcattgcacctatgtaatttggtgcggtgcgggcggtttgatgaacacccctagtttaaactgccccaaacataacttcattttatggttgtcaatgctgcagaaactcaagaccaaggacagaattaaaaagttcaaaccagatatagaaacttgttgtttgctttgcagcaatgatgaggagaccattaatcaattgttttttacttgtccttttgctcaagattgcttgagtttgaccaaaaactgacttcattggaggatgaatgcatcttttttgtctcgttctgtcatttggttaggaaaagcaaagcttagtaaatttaaaaaaatcaattttctactgttcttgcagctttggtttatatcatctggtgcaatcgaaatatcaagcttcgggaggacaaggctatcaacagttatgctgtgtttcaacaggtacaacatgttatcaaaacccggataacttgtatatggccaaagaatgcatctagtagtgataaagtgataaagtatatatggtttgattcattgtaaatattatagagattaaaaaaaaagtcatctctttttatttgaggatgcttgtagatttgtacaaattgaatattggagtaataaaacatcatcttattcataaaaaaaaaaaagaaaaaagaagaagaagaaaaaatgcttgagaaatctacgttaaaattaacttattatttttatgtgtacttctgattgcacatgtggtggatcaatgattttcattaaaaaaaaaaaaaaaaaacttattttttgaaaagctagagaaatacatttgaaaatcatccattttgaccttgttgttacttgtcaacacgtaatatagttaaaaataatatgttagcaagataaaaaaaattgcccatagataaaagttttgagtgtagaataagtatctcactgaatatggtctcaccattaattttctcctccatgatcacttgaatatagattgaataccttaacttgtctagaaataactaaattaaaaacataaaaatatgtaaaatcgatcaaataattagggaaataagggtcacggcttttgccttgtcttcaaaattaataaaataaaaattataaatttataattctaccagtccgtcatacataaatcgcagtcaaataattatatatgagttcgttatatataaaccgatgcacgtatacttctcacgttcattacaaacccatatgtaattttatatgtcaattcaaaaaacatgaaatgtgtgtcagttttcaatacatttctacagaataagaagaaaatctgcgttattacaaatttttttttttttgggttgaaacatatatagtctaaaaatggaacttagtttggaaggacacgtggttgaaaattagagaatgttcatataaacgaaggtgtgagatttcatgaagacctctctctctctctctct

SEQ ID NO: 38714 - DNA, 1732 bp, Cannabis sativa
  modified_base (50)..(59): a, c, t, g, unknown or other
ttgtcatttaacaaaatacaaggtacaatctataacttttgcaaaacacnnnnnnnnnnatagtatttaccctaataataataataattcctattttttcttttatatatacagttggaaattttggagtatggtaaaagtatgcatgtataatgttttggaaattgatgattgaataatgtttggaaaaagttgaatttggttataaaaaggctaaatatattgagtcggttttttgttgtgcaaattagactgatttgatctttctttctttttttattttggtcaataatataacaatctatgctgactcatagttgtatttgtacataatagaatagtgaaaaaaaaagtagtagaattacttagttatgaatcaagccgtttaatgggatagagaaagaaaacggtagagactagagagtatcattcaaaactaccaattaccaaaaccaattatatccaagtccaatcaaaatgagaagaaaagaatctttttattatcgagaaatgttaagtggcacctgtagtatattattgtgatgtgtataatatattagtgtaatttaatatcgaatcttacttagtttattttagtaaatattataaaaaatcgctaactaattatacgacgatatttcgtcgtgtaactaagtaccctgagtgtcttatagcaatgcacgaagattttttttttacttttttttagtcattttgacaatttcagtatctacgtgtcagttataatttataggtatcttatatctcatcatattttaattaaatcatcagtaactacctcaagaattctcatcacacaaatatcaccatttacgacaagctaatcttcaaaaaggtcaagccttatatcatttcgagaagtattatacgagacactcttagaaatccttttattatggatagtctgaaaatctggcatcatctttattattaatttatttaatttgacagagcattaaagtgtctatctttatggtctcaatgtgacgcattattctctattcttaaatttattactttgatggatggagtttgagggggtttataggtatagttttcactttcctaaaagataaaaccctcttatctaagcaaatttcaacaagtacatccaaactcagtttttataataataaataaaaactgatgctttaaactgtaagtaacgtgacccatactattctcccctatcacaacactttcggtttctcttttttattttatttatataattcagtaataatagtctatttttatgtctaaaataaatatttgataattgttaaaaaagacaccaatatataattttaaccatgttttagttaattaataggtgagtaaatatatatgaaaagagtttatatagcttaatctgtataaatatagtaaaacatattaagttataacaacacaaaacaacttataaaaataatgagtaatgttagatacatattcaaattgttcacactaactaaacatataatgatgttaattgttagttatttatatttaaaaaaaaatgctaaacagcattagaaactgtccaatacaatgatagattgcatattattttagtgtattcagtattgaatttcacacatgatttaataaataatataaaaaattgataaccactcacaatgtatcgtatcagtgtaatattaagtattttaagataattaataggaatattctatttttaagtgagact

SEQ ID NO: 38715 - DNA, 2660 bp, Cannabis sativa
ttataaaatttccggctgctaaaaaaaattaaagaaaagttgaagtggagacaagtgtaaattagatggaattgaagtatgtttaagtttaattttatcttaagttaataattattaaaatttgtgtttgaccgacccgtataagagcaatgttagaagtacttatatatttaattagatgaagttgttgtaattagttggtagttaaaagttttttaagttttcaaccttcaataacatgaaaattaattaggataaaatatcaaaatatatatttagtatgctatattttatttttttaaaaagaatgtcaattttattaatcaattaccttcaagctataacaatagatcaatacaataaactgtcttgtttatagaatatttaacaaaaattaaattaagagattttaaaaaatctaacaaactcctacactcttgaatcacttgactagcaaccactaagtaatttgtctcaagcagaacatcaagacactgtttcattttgatccaacttaaagtttatttgattccaactacctccacaaaaaaaaaccttaacccgcctttaaaaactcattgaaaatccttctaaaaaatttcaataaagtttattttaatttcaacttgaaactttatactcaaatattattaaaattttataaatatgattatgaagtttcaaattcaaattgaatactaaattacatataagtgaaagtaaatgaataaaatttatttactaaacttaagctccaaagtaccaaatatataatttcaaattataaaataccaaaataaaaattattaaaaatataaaatgctaaattaatattttgataaatcatagtgtaccaatagcaaatgagcaattaatttgtacactaaaataaatcaattaatttaaataaagagcaatgatatgaagttttttgtttatataatcaaattaattttataatgtgtaatataattaatttaactatacaattaaatatggtatgatgttctttttttttaaaaaaatatttttggaattaattacaaatcatatttaagtatacaaattaaaacttgtaaatataaacaagtagtgttcacactatggtaaaacgccgtagatctttttcaggtgtcatattattattggtgtaattaattattgagtctcatataatttaatattaaaaaatttaggtaatattgttaatcaatcataggacactaccttttaaaaggtgttggaaagaatcattggtgctcaatagcaatactccaaaatatgaaacctaacacttaactacactaatatagcgagataatacttcgtagtaaagaagatctttagcatttttccttaaataaaaaaataaaggttacttgtcctcaccaataaattttgtatgataagaactatctcaatatttatgaaaatagccacattttactgtaacttcaagcctctatgctcttttgggtcatgttgtactcactttaccatctccaaaagtgacttgtaggtacacattgttatggtaaaagctcccttctaccttttagggtttttatttatattgttttacttttaaataattaaataaaaaaaaaaaaaaactaacaagatataaaattatttgatcattaataattaatcttaattaatttgtggacatgttggaatgtgtatggatatctatgcatacatgacattatgaaaacaagttgtatgtgatgatcttaagtttgtcttatatattaactagaaaatgttaatgctaatattgaactatttagtaccaaaacatataaaactactttgtgatatgatgtcttatattatggatcaaatatttttattagcatagttaaaagattaattatagatcatattttaaattatttaccttaatatacacaccattaattaggagtacactttaagagtctaatattttcttttcatgtccctcacttttcgtgtccaatgaaatgagacataaatatgtgttccacaaaatgagacattaaaagtcctctaaaccattttgtgatccttgtattatttgtgaggcatatattaaaaaaatactaaaagatattatctagatgtgtcaaattattactaatgtaattaagtatcagattccatattattaaatttaatacttattatagaatatcgttaactatttacaaggtgctacatacagtgttaagcatcacaattgttttagagcatctctaatggaggttatctagaagttgtcttgccacttatgtaatgtaatttaattttcaatataaacaatggccacatggtattttttttaatttttttattaaaaaaaaaagttattttttacttaaaaaatcattaatttaatgtgatgaagaaccatgtatgatggacaatttttagtgttgtcaattattgaaatattttttaagaaaatgtgacaaatgttatatgaataagaaaaaaataaaatatatatattttaaaataatatatgtattttaacaactataaatattgtgttaaaacttttataagaatactaaagtgggttgctaaaacacaatttttgtagaggtgtgtacttagatatttattgtagttaagagttagtaatatataataagttagtgctaggacattaa

SEQ ID NO: 38716 - DNA, 2723 bp, Cannabis sativa
  modified_base (37)..(47): a, c, t, g, unknown or other
tttaggatgttaataaacatacttttgagtagatctnnnnnnnnnnnaaaataatttccaacatacacctcataatcaatgatgtccatacagagtcaaagcccatcttaagcatgatagcctcaagatattgccattcaaccctatcaaacgccttactcatgtctaacttgagtgctaaaaatccaattcttccttgtgtcttatgacgaagatgatgaatgagttcaaaggcaattaagatgttctccgtgattaatctattggagagaaaagttgattgtgtttcagagataacaaagggcaataccttcttgaaccggatgacgattgtcttggagataagtttgtataacattacataaacttatagggcgataatccgtcatggaactcgggttagacactttaggaatcaaagtgatgatagacttatttagttccgtcatatctagaccttcattaagaacaccaagtaccagattagatactgaagtgcctacaatattccaataatgttgaaagaacattgcagacattccatcacaacctggactcttgtcaggactcatagactttagagcatcatacacttcttgacttgtgaaaggttgaattaatgattgattcatgtcttgtgtaatggtagttggaacagcattaagagtggttatgttagttaataataggattgttgattaatgactttgcatataattgtttcttcacatgtttcctatcttcttttatatatatatatataaaaaaaaaatgttaagtattttctatatatacaaaatattttaagagttttttcatttttacactttaaaatagattttttttttgtacataaaagtcatcggaacaatctaaactgtaaatttaaaaaaaaaaattaaaaaaaagatatataaagtaattctccaatattttattgcactcgtacttgtttcgatactatacacacgtgcaatacattgtttgaatcatgatttttacatcataaattatctaaaatttctcgtgaaattgtgaacatggtaaagagatagattttgacattgtttgtacaaggagtgttttcttattatttcatggttttaatcttcacagccccaaatattttctatgagagaaatgaaagccaaaatgatgaaatggagcttccattattctacataaatacaattaggactgccactaataatttttcaaatgataataagttgggccagggtggttttggacctgtatacaaagtaagattctctctcatttacctgtttcagaacgatctctctttttttttttttttttttttttaccaattatggatatttttatttgatgtaagagggtaccttggaaggaggtatagaaattgctgtgaagagtctatcaatgaattctggacaaggagtcaatgagttcaaaaatgaaattgagctaattgctaagtttcaacatcggaatcttgtaaagatatttggttattgtactcatagagaaatgaaactattaatttatgagtacatgtccaacaaaagccttgactatttcatttttagtaacactctttcaccactcttttaacacatgtaatgttctgtgtaaaatttgccaattttgttcgaataaaagaaaaacactaacatttgcagatgaaagtcgaagcatactattagaatggcctaagcgctaccagattatatgcggaattgctaaggggcttctctatcttcatcatgattcaagattgagatttgttcatcgagatctcaaagctagtaatgtgttacttgacgatgacatgaatcccaaaatttcgaactttggcttggctagaacttttggtggagaccaaatagaaggaaacacacacagagtagtaggaacctagtaagtcatcttcaaaaactcttttttctttttttgaggaatttgcggcgaaacactcttatgttctaatttttatacacttaacccccttacctttttccggtagcaaaacccccttaagtttattattctttgcaaatttaaggtgtcagttagatattaccgttaaatatcaactggattactactgtatcgacttcgagattttactgttacatatacacaagtgtatacagtggtcatccatttgatatttaacaataatatttaattggcgtgttaaatttgtaaagaaaaataaacttaaggggatttcaccacgaaaagagaataaaaaagttaagtgtataaaaattaaaatataagaaaatttggccgcaaattgctcttttttttctaatatatgtttattgtatactaataaatattatgatgcaaatgaagtggttatatggcgccagaatatgcctctgatggcatattctcaataaagtccgatgtattcaattttggcatattgatcttaaaaattgtaagtgggagaaaaagtagacctctttatgaagaaaattgtcctctcaatctcgttggatatgtaagtgtacataccaaaatacttaatgaatgttacatcaataacgaatgttatctatttatttatgttctatttaataatttgttgggcatggactttgatgaagaaaggcagtgaaattaagcttattgagaagtgtttactaaggtgccatttggtaacacttttattttctaattttttaatcacaaaatgaaagtacaatttttgtttttaaaaattttgc

SEQ ID NO: 38717 - DNA, 5117 bp, Cannabis sativa
tacagaatgcaatattatttaaaacaaaatttttactttcacttttgtgattaaaaaattaaaaaataaaaaatgttaccaaaagagcattgttattgggcacattaaggttaaggtgcccaacactacaccgatgtggcgcgtttaagtggttagcaattttttatattatttattaaatcaaaatgtatgatatcgatattaatttgcaccaatagcgatataccactttttgtggtgcttgtgatctcgcagcttatcatttttctaccaaaaaccacctttctgtatccatttccactccatatttattattttaaaataggatattggcagtaaaactacgtaaactcaatgattagtgacacttaaccacataaactaattttttcgtggtaaaatcttccaaacctccccttccgttcaaaagactctgttaagtgctacggtggacatgccacagtgtacacaagtggacacgtggcaaattttagtgggagatattggcggaaaaactacttgaactatatgattagtgacacgtaaccacataaaccaatttttttggtggtaaaaccttccaaacctcacttctgttaagtgccatggtgggcatgccacaatgcacacatgacaaatttttaatggtccacataattttaattaattaaatattttaaaaataattcaaaattataaaaaaatgattattttttttcttttttccctcttattctctttctcttacatttttctccctgtaaccctaatgtccacacacactccctctatcttttgtcctccttctcatacaacttcgaaaagtcacctctggccaccttcaacctaaataaacccaaaaactaacttcctgaccttacagatccaacccttcagcctccctctaagccccgagacccaacccttctttgaagtttctctttctcgcctcgacctcgccgggtctgattatccctccatgcaactcttcgttgataccactgtagttggggggttcattgggttttttggttcgtccttgggttcatcatggtctggtgggttcgtcgcagaagaagaagaagaaagaacagggaaaggggagattcgatggttccaatcccagagcacttaatagagtcttttgaacgaaatgagtaaataactaacagaagtgaggttgagagagttttatcacaaaaaattggtttatgtgtcactaatttaagagttcatgtagctttgccactaataacctccgctagaaatttgccacgtgtacacttgtgtacactgtgacatgtccaccgtgacacttaacattgctttttgaacaaaagaagtaaataactaacaaaagtgtgatttgaaaggttttacttttaccactaaaaaatcaatttagatggttaaatgtaattatgattacaatataatcctattacatcacttttaaaagcaaaacaaatattgtaatggataatttgattccatcaccattctcattagaacaaaccaaacatcagattttaatacaaatagacgaaattttagtttggcagcctgttttgggtttttcttctgagaaaaatgcacgcgttgggcggtggaggaggcggcctcggcggcctatggggttggaaccttccaccgaggaaacacgaacggcttcgctccaaaaaccaaagaagacgacctaattccaactcctccgaatctgcccaggctactagcagagccggtgaatggttccccttgaagcaagccatgacggcgggctcccttgctctcactggtgacacaattgctcagctcagtgagcgctggagaacctcaaaggcttccaagaaacattcctctccctccgattctcaggtctctccttttttcgctgttcgtcttatatttatttattttgcggggagttattcaggctaattaattgctctggttaattttggagatgaggaaatttggctatgagttttccgggcacattatataatcttttacgaacttcagaactcgttttactcttacatttgctagaattttattttatgtgcgctgtttggttcccaagaaaatgcgggagaaaaatatatgatttgtttagtatcttcttattatgcgatgtgggaaattatcttttcaattcgttgggtgcctttacttataattaacaatttttttgttggtatatgttgtttttttcttctttaatattaataatattctcctatcggttgggtttcaagtaaatattataattcaaccgattaactgttaacgggagtgttggtttgtagaagggttttgtgcttttgtttggtactcgtaagagctttaaaggaatctcaatggaggcctgcttgtttggttatgatagcaccatatggcacaatttccctgcttcgttttcagagaaagatatatatcatttagatagtaactgttgtatcttcacttctaaagggacatattgcgtctatattgtgttctcatcaattttaataggtttaaaaaatttgttgaaaccagttggagggaactgtaagttttaggcttgacattgttttgcattatggtttgatgatactatgtaaaagaaaaatttaataaataggaacttatgctttctaatttgtgctattattttcaaataattggttcgtagtgttttcgagtttaaaattgactggaaactattctataggatgtggtgcagactctcctttcggaccataattggcttcgttctttgagaatggcatcctatgggtttcttttgtatggccctggttcttatgcatggtaccagttgcttgatcgttgtttgccaaagccaacagtgacaaacgtgatgctgaaggtttagtctccttatcttctctgttatgacaattcacttcattgtacttagcagtggctatctttttcttgtgaaggttagataactgtataacgtcttccaaaatttgcttctacttgcaggttctattaaaccaaatagtgcttggtccatgtgtcattgctgttatttttgcatggaacaatttgtggcaagggaagctctcacagcttccagacaagtaccagaaagatgctcttcctaccctactttatggtaaaatttaagttattatctttattgctttcttatttatttatatatttatatcgatttcaaggaaaaagaaagacttatttaaattggcttgattgcatgattcttaccttgtaattttatgtaactgtgtaggttttaggttctggatacctgtgagtgtattgaacttctggtatgtttttcggttaaattttgctcttgtctttttagtagtttcattctcatttgcaaatcggtgtcctgaaatttgttaccaattataggacagaaaattgttctcttttcttttctacatatgcctagtgaattctaagagaaagaacatcagttgaagactgtagattttccatatttttgattctttagggaagagaaaatagtccattttcctttttgtatcagttctgagaggtaaaggaaacaacacatcgatccatgtatttgtagacatttgcttgaatctgattggtgtacaactgacaggataggtcataaactgaataaccaaaacaattctgcattcttttcagtaacaatttaatttgagttatgaatagtatagtataaggccatctccaacgcatggaaaatatggtggcaattgtatgctttttcaatccaacagtgacactatacctgcaccaaatatagtgtggtgtatatagctgcactatcaattttcattttttttatattattatcatattatatttaataatttttaaatatatattaggaaaattatatggtgcactcctaagatattgaggagaatattttagtttatttttctttatggttgtgtacattagttacttaagatatccggtacaattttaataaattcagaaaaatttaacacgactattttataagcttgttaaatagactgttgaaacaaataatagagaataatgttttttttggtgttgtggtaagaatgaaacaaactataatactatatttggtgttagtgcaacaccaaggttggtgtatatgatgggagatgacataagagaagattaaaaaaataaaaaataaaaactagtataagggaagagagtggattgtgatggcagacactgacacacttctgctgttcactttatattcttagtagtattttcatttggtatctttggaggccttactgtcttatcttaaacttgtgaaatgtgcatggcatctatacagggtagtacctcttcaagcacgcgtagccttcatgtcaatgggttcaatattctggaacttctgcttgtcttctacaatgaacaagtagtttagtcattgggttgtatggtatcagctcagaaattttttgactggaggtataatatccaatcttctatatccttttgtgtttatagtacttcttactgtacctttaaaaattctgcatatttgcggatcttgataggttaggagaaatatttgggagcctgaggtaaatggttcaagttgtgctcttcacttttgctttaaagtaaatttttttatggaaatttgtagacacaattttggccttaagaaaggatttgaattttcggtgacatttgcctttggacttcacttgaaatatgtatagaaaaggctgtgttcttccaatttgggaatgacatatgttttacttggttactactttgagtattttttttttttttgctggagtactttgagtagttaatcatggcattttggagcagaatcgttgagttgtcacgtaaattgtggatcaaatttactttctgttccctgcgaaaatgcatatgtattagttgagatgaatggcatgtaagggtcctggccattcagtggcagggcatcgaagttgtcttggtaccttgcaatgaaacgaagtttaccttctggtaagagtttatgcctcaaggtttagaccacacactcttttcgtaagccattattcaagaaagagaaatgctaaaagatacttactccttccaacatgtaatatatcgattgatat

SEQ ID NO: 38718 - DNA, 2628 bp, Cannabis sativa
aaagaagaggtagaaaagctacgtaataacaagttcatcattgcagctttctgcccggtgtggggagctaacactgtactagtacacaagcccaataaaaagtggtaagtatgcattgactttttcgatcttaacaaggcgtgctccaaggactgttttccacttccaagaatagattagctcgtggatgcaaccgcgaggcacgagatcctaagcttcatggatgcttatttggcgtataatcgaatcataatgcatccatcagacaaagaacatacaagtttccgaatagatatgggtctatactgttataaggtcatgtcgtttggtctaaagaatgatggagcaaccaaccagagattggtgaataatatgtttaaagactagaccagatgaaatatggaagtatacgtggatgacatgctcgtcaaatccaggaatgctggggcatatagaggacatggatgaatgcttcaacatcctcagaaaatacaacatgaaacttaatcccttaaagtgctcatttgtagttagctcgagtaagtttcttggttttattatcaatgctcggggtattgaatccaatccagagaaaatacaagtcctcctcggtatgagatcgccaacaaaaacaaagaaagtccaaagcttaactagtcggatagccacactcagtagatttatttcaaagtcaacagacaagtgtgttcctatcttcaacatcttttgaggtaacaagaaatttgaatggatagaggaattcaagaacacctttcaagaattaaaaagaaaattagcaaagcctctcgtactctataaacccctggacggagaagagttaggaatatacttagctattacataatacgctataagtgccgtgctgattaaagaagacaaaaacgtccaacatccagtctactatataagaaaaagactcattaaggctaaaggattgtatctattaataaaaaagcttatttactgcgtaatcttagcaacaaggaagttaaggccttatttccaagctcatcctattcgggtatacaccgaccaaccattacgccaagtattgcaaaaacctgatgcttttggacgattactgaaatgggcgatagaattgattcaatacaaaataatatttccaccccgaatagaagtcaagggacaggccttagcagactttgtattttagtgcacgagcaaagaagaaagtagcacaagggacaacctaaagccaatacaagaatccctaccgacaacaacgaagacagacctacctgcaaattatacgtagatggataacctacaaatcaactatttggtgtaggaattgcccttgtcacaacggggggcaacctctgcacggcgcagtcaaatttggatttaaaaattccaacaacgaagcggagtatgaagcctttattgctaggttcaaactggctcgggagctatatgctgaatacgttgaggtctatagtgattcataatttgtagtaaatcatgtgttgggagagtacgaggcccaggggggagaaaatgataacttatctatgaaaaatataggattttctcgcacaattcaagggttacaccctcaggaaaatcccaagagaaaaaaatacaactgttgatgccttagcccatcttgtgagcagcacaatagctgataaggccaatctagtcctaattaaattcttagaagagcccagcatcacttttgcagtggaaatcgaaatgatagacatagctccgcactgggtgacaccaatagcagcctacctcaatactggagaacttccaaatgatagaaacgaagtttgaaagatgatgaggaaagttgtacgttacatcatcgtggaaggtgcaatgtatagaagaggattctccatgccattacttatatgtgtaacaaaagaaaaagttgcacggcttctgtcctaagtgcatgactgattctgtggcaaccatgcagcagagcaaagcctcttgaagaaaatactaaggcaatgatatttctgggcgaccatgatggaaggttcaaagacctatttacagaaatgtgataaatgccagagattttttaaaatactccgtccaccacctaatgacctagctaagatgcagagtccttggccttttgctattttggacatagacctgatcaaacaattgcccaaaggtaagggcagggtacagtatgtagtagtcaaagttgattatttctacgaaatggacaaaagccgagcccttggcaacaattacatctaaagaagtactggtctttgtggtgaagaatataagatgtcggttcggactcccacacaaaatcgtctcagacaatggcaaacagtttgatagccaattgtttacagacttctatatgactcatgggatcataaaaagtttctccacagtagcacaccactactagaaaattgggttttagtgatacacattgagtaactctaaaactatatagtgatacttcaacgcgcgtcacttatgagagtgactggaaagacagttttcagtgacactacacacctgtcactgaacccttttacattaattttcttcgcgtcactataggcatatagagtgaggttttgtcagattgaaaagata

SEQ ID NO: 38719 - DNA, 1157 bp, Cannabis sativa
gtcctatgagtgggttgagagggccatcgtcttttgtgttggattaggatttttgaaacatgacccaaatggataatttatttggcttatttgttttaaaatttctgctttaactatactattatcttatatactctctgtaaactgttggtgaggctgataaataaaatcaatattacattcaacagggataatttatccgttacaataaaatattgtgcagtactgtttgaacacattgtccttgagaaggtaaaggtgtcatccacttcaaaaattgatcccaataggcttctggtaataagatacgaaatgtcaagcagctataattcataacaacatatcataagagcagagtgatttcctctgagcaacattgtgtatgcatgatagctttctattactttgcagagacaacaagagtgtgaaaataaataaaagagattttatatcccaaggggtggtctagtggtgaggagtgttggaaagtgctggttggcatttgttccaaggttcaaatccacacagacaaaaaccttggggctactgtgaggtttctggtcgagaactgccagggccaatttgtttaggaaataatataagagattttattacatcttacagcatctctttaagtcacctttcacatcttagtcactcatggctcaacagggaaccataatccgtaatatactaaattaatatttaggttattgaatcatcacgacaattatctctacccaacttgtttgcttcacaatcgcagtctaacattgtgctgttttcacttttgtggtctaaggtcagttcagacctcgacttttcattcaaacaaacaatcatgtatattttaaaggggctggagctgggccgaattaaaaaaaaagtcaaccaatcggccttaagattctattttctttacaagcaccttgtttatttctttcgacgctgttgtttatgtttttctatcattgtattcaggtttgaactggacatgttgctagagtctgtgaatgtaacaaccaagcgtgtggtagaactcttagaaaagattaataacaatacagtaaagacagatagtccaatccgtattgaagatcacttcacaggtaaatttttagtcttctggatgtcatgtatttctgttatgtaaggtc

SEQ ID NO: 38720 - DNA, 2940 bp, Cannabis sativa
  modified_base (27)..(66): a, c, t, g, unknown or other
  modified_base (2868)..(2906): a, c, t, g, unknown or other
aacataaaatgttatttttgatctttnnnnnnnnnnnnnnnnnnnnnnnnnnnnnnnnnnnnnnnntagggcacaaaactcaacaaaaacctgtgttatatatagcttgaataaaaaataaggattcccccctaaccaactaacttaactgtctttcaaaagtggcaaatccaagagtgccacttcgcacactttgacttatgtcaaaaatactacaattatctacctttttgatataagtcatagattcttaaacttgttgtttcactgtacctccaaaggaggtctatctttgtaaagttttgttgagcaagtttagacaatgttaaactttgctaaagttacacacttggtcatcacacctacagggttgtcatcactcttaattttcttcacttgcacttcaccacatgtaatgatctctctgatgtagtgaagtctaatgtcaatatgtttgcttctttcatgaaacatttgattcttcatcaaatggagagcactctaattgtcacagtagactgttatgtctactgcattaactttcagttcctgagtaaatcctttcagccatactgtttcatttatggcttttgtggctaccatatactctgcctcagtagtagacaatgcaacaaccttttgtatgttcaagttccaacatacacatccacccaacactgtaaaatagtcctgtgaggcttcttcttgtgtctatgcttcttgcatagtctgaatccacatagcttgtcaattcacaaggtgagatgttgtctttgtgacattttaatccaatgtccagggttccccttacatatctgagaatccattttattgcagcccaatgttcagttgcaagattggcaatgaacatactcaccacactcatagcataggccaaatctggtcttgtgcatacaattgagtacgtgaggctatcaacatgtgatgcatatggtattctattcatatatcttttgaccatttcagtttgtggtgattgagcttgtgagtttaaaatgaggagcaatgggagtggttacttgtttagctttatccatgctgaaatggtctaggactttctgaaggtaaccaatctgagatagcataatatattctagtctttttctgacaatgtcaatccccaagatcttattttctcttcccaagtctttcattttgaattcactgctaaatttcatcttaaccttgtctacttcagctctttgtttacctatgatcagtatatcatcaacatataggagtatatatacatgatcattgaaatagacacaaggatcatacttgcttttgctgaaaccaattcgaatcatgaactcatcaaaccttaaatttcactgtctttggtgcttactttagaccatatagtgactttttgagtagacagaccttgtctcgtagattgtctacttcaaatccttctagaagtatcatttgaatttccttatctaacataccacgcaaaaaggctatttttgacatccatttgatctacctcataggcaaattttgcagccactatcatcatgattctgatagatgtttgtttcacaataggggagaagatgtcattgtaatctataccttctttctcactaaacccctttgcaactatccttgccttgtatctgatctgacctgttcctttgtcactttctttctctctgaatatcaatttgcagcctataaccctttgacctttaggtcttttcaccataatccatgttttgttcttgattaaagagtccatttcttcattgatttacattaaccatttctctagggctttgctttgaattgcttctgcatagctaatggggtctgtgctctcaatttcttctgcaatagtaaaggcaagagctatgcattttgatgtagaataatctgcatagccaagtctgtcaagagcaattgttagccttctttctctatctcttgcaactcgataacttcttagattctcttctgtgacatgtgtttcatcaacatattcaatctgagcctctcctatttctggcagaagtgctttctgtgtgttagttgcttgtctagcttcattatgatccacctgaacctataccttactacgccttattgaattctgagcaggtttcattgccatttcatcctccttgaataccacatccctactgatgatgcatttcttctaaccatattctcgacaccacaatttatagcctttcacaccatctagataaccaagtgtttactgagttttttggcaaccgaataatattagagcttaagaaagtattgaggctgtaaataataaaataatagacaagagattttaacgtggttcaggcgttaattatccttagtccacaattccattttattaggctctttggccgataattatttatacaaatacaaaaaggatggactttactccagaatactgtgtcccatttaaagaagaggaagattagtaggaatattccagagttgatcgtagggttgcagagatgtgtttgcttaggatgatgaagaatgagtcttcaatccagaggttgtcgcttgaaaagaggatcagaatcccttgctttgtgtgtcttcaagggtatttataggtcgatctcctcgcatgggccatctctagtggatctttcgacggtgaaccctcaccgtcatattggtaagtggcataatttccatgtttcctttatgaatgtcagatcgtactagctgtaccgatcaggcttcgaatgcgtgtcacccgactgtcgtagtttgaatttcttttgcttctagctattggatcatttagctatgtacacaaggacaatcacgctttggatgataacatagctgttgggttttgtgccnnnnnnnnnnnnnnnnnnnnnnnnnnnnnnnnnnnnnnntaataaagatcagaaatcacattttatgttgcat

SEQ ID NO: 38721 - DNA, 1793 bp, Cannabis sativa
  modified_base (1353)..(1355): a, c, t, g, unknown or other
tatattataattatttatttaattttatggggcttttttactattttagtccatagttatcaaactaaaaaatttatgtttaattttttattagtgagggctatagttttatttactagttaactaaataaatagaatgtacctttgggacttcagcatagacatcatcaccctgtgaattgttgatgttgatcctctgtctcatagtcagggttacttaagaaggctatgcaaaattggattgggagacacttattgcgtcacaaaacagagcaaattaagtgtcttctgtgtcgcaataagtgtcttcgaatccaatttccacaccatcttaattactccataatctccaagactaatcttgtttcttcattacatttttactgtggaaaaaattaataatgaacttaatttcaggttaaagaatcgtgaaggaatgttatctttatcaatattttaatatgcagaaaattactattaatttcaagaagaaaagaagaagaattagcagcagcaatatacttacctattgagagctgaatcttgaaacttcatctctgctcccagcgtacatttaaagcagaaaactttcatacaagtagatatcttttatatccacttatagttgcgtacgtacaaagcaaccagtacgttatattgcctctaattatgtgggcattattttcggattaatttccacataatttgaaaagatcatacatatcaacctttacaaatatatataggagattttcaagatgatattaattgaaattggaattcaaataaaataataatttatacctaacttaggaaattaggtgaaaatcaaacaaacgaaattaatttggcattatatttttctgaagaaaaaaaaaaaaaaactaactttaataaaacatatttttgcgtagctaattattgggcagtttccacatgttttttttttttaataaaacaaatcaatctttagaaatatgtataaaaaaatacaagataataagaatataaattaggtgtttaacaacttttgtaaatatctaggtatgaggaaaagctgagaaaaagtagttgtagaacttaaaaaaaaagctgagttaagtgtttgttaaattataaattttaaagtgctacgagttgttaagattctattataataatgataatgttataatctaatcaatatatagggacaaaattttgtcccatgacagattgcaatccgtgatgtacggtaaccgttggatgggtagttaattttatcttaaggctggggttcatctaagggtttatgtaggggtatttagggttaaataaatggctacgggttactttttttgaaatttaaatttnnnaaaaatggaaaagtgaaaagtgacatccatcaatcaaatcatattaaccgtcgtcctcctccactcttccatttccttcttcactttcattttgttttttatttttcattttgtcatttccatttttcgtctctgctagggtaaaaccgaagttcttccttttccattttctttttcattttccattttgtttttccattttccattttcgtttgaggtggcaaaacccatattgtacattttgttcactatggtgtacattactcgaagtctgccattttcgtttgaggtggtaaaacccatatcaatctttacaaatatgggtatgctcttaatgggtattacccatatatgggtattttattcttgaccattggatcaaatatctaatggttgatatttataatcattaattaaatattaaaaaattaatatttc

SEQ ID NO: 38722 - DNA, 4038 bp, Cannabis sativa
taccacttccacttcaacttcaaagactacttttttttttatatatattttaaacatgaagacgttatttatacttatttaaatattcagttatatgtgaaacgtgggcagtaaccacccatcaattgtaactttttactaagataagattgagtaactaccatcctattcctataaataggagttcactcaaagggaaataaggagaggcaattctgatttacaaaaattttgccaaattgtaaacacaatcaaaactcaaaataatatggactcatggagcatgtaaattttaactacaaaactacgtaaaaatatctggtgttcatttattatttttatctcttcttttcttgaatttattcttgaattaataatcttcttagattaagttgacaaaaaatcgtgtcaacaacgtggagttcaaataaaagcttaaggcccatcattgggaccaaataacataaactggattgagcccagaatccattatgccttacgggggaacaacaatgtaactcgcccaggagagggttcgccaagcaaagtcagcatttggaagtcctgtctccgtgtatctagaagagatcctttgcgtgtattgggaagattattatagtttcctgtatttttctaaatcacacaagattagaaattactttctcaaaatcccagacagagactaatatcttgctaaaaatggaaattgaataattggaaatcaagtaattaatatgtcatcaattacccatgaatatgagacacaatatggacaactatcgtcatgataagtcctccacgtcagcatacacaagatcatggcccgggcttcaccagataagcccaaagtcaatgtattatttgtaaactccctattagaggaaaaagggaaacaagtatgacatctataatcctaaaaatactcaccgaatctttcatacaaagggttggaaattcttgacttacttactcaagtaaagaatagaatgctcataccttactgtaattcgttaggctattctatcctacttaataataatactgacttgtggactgaagctcgttaatactccaacaatgtaaaaactttgggtgtgttcttcatatatttcttcttaatttatattttccttagctcttatatttaatatttagtttttttgaaaaactcaataaatattttggtgttttcattgagagctgaagagagcagtgccatcaaatattacgtttagtaattatggtactcacctgaacaaaatttggtcttcactaccacgacacctcaaaggatgatgttaatcctaatgccaaaacaagatttgatgaagattccaccaaggcgaccagtcgccaaagagagaaagatcaacatgatgagacaaaccttcatgatgatctcgtcaatgaaggagaagaagaagacgagtttgaggattagatcatatggatccagaagataatgacgtcaatgagggagatgaatgtcatgagccaaattttgaggtcattgaaatggccaaaaaaactagaagcagctgaacaaaaattagcagcataagaagagttttctcgattaatgctcgagaaatttatgatgttggaagtaatattttgaggaggaaaccagaatcctgataaaaatatacctgatgatactaatcctcaggataacaatgccaggaaaatgaatgctaaagatctcaacacctgtaaccctcctaaggataatgggaaaggaaacataggagaaaactccaaaaaaagttgctcccagtgatcatgggatgtaaaaatgcatcggtaggggagcgttccgcctagagggaagcacctgcgcgagcagtggtagacgaagcggaagcaaactttcgttattgggttagccatatcacgtggggaaggtcaagtggggaagattttgagactatgtaagtatgggactacacagttgaagaggcttaaatgaattgattggtactacctatatcagcaaggtatatcttgtattttggtagcccatcacgaaagaactccacggttaagcgtgcctaacctggggtaatttcaggatgggtgacctcctgagaagtttttctaggaagtgtacgagtaaggataaaatacgctggaaacactcatgttagtttgtagggttagtcatcagtccatgaaacagctagagtggcgtactcgtatataacaccgtgtgactttagtgtcaaaagctggacccttaagatatatcctatcaaagcccgtattgtctggatgactggccaagtggtctatgattttgtaagaattcaaaatcaactttgtcttgctaaaagcaataaaagggaaagcattggcagattttttggcagcacacccgattctagatgatatggagttacaagaagatcttctagacgaagaagttttcatggttgatacttcatcgtggtaattatactttgatggggcagtaagaaatagtggagcaggggctggaaatgtctttgtgacacatcgggaggcctgataccttaatctttccatattctagctatatgtgccaataatgtaggaaaatatgaagtgttagttatcggccttgaaattgcacttggaatgaaaatacaatcattggaattggcgattctcttttggctattaaacaaatgagtggtgaatttgcagtcaagcatgagaatttagtcccttaccatgaaaggctaaatattcacttggtcaattctaagatataactttaaatcacatccttagattaaaaaatggtaaagctgatgcattacctaatttagctggatggttaacacttcctagagaaagggatatccaaattaccataagggagcgccatgtattatcccaatccacggaaagagctgaagaagaaaatacaatcaacttgataactctcaaagatagtgcgaatgaaaatgactagcgttaaccaatcaaagactacatccaaaaaggggtcttgccaaaagactcttcagcaaaatagaatcgtgtagaggttcaacaaaaccattctgaaaagggtcaagtacatgctattgagtgttggattacccaaagtgttataggcggagttatgtccactgcagtttatatgataaataagtatccgtcaatagcactggatttaaggatgccaaatgatgtgtggtcaaggaagccaacaagatatgaacactcaaaggtattcagatgttttaattatgcacacattaggcaagacaaatatgaggcaagggctttaaagtgtattttcttgaggcatctagaaggtgtcaaatgatattaaacggtggtgtctggatcctagaataagaaaatatataattagtagggatgtgacttttaataaatttgttataggatttatcaacaaatttactggaagtcaagctaatactggtcgagatgaaatcgaagctccaggaactgaacttaaggtgaagcctccagcaagagtggtgactgaaacacctgtagatcatggaagtgattattcaaataggtgcaaacatgctgatttaatcgcatttacattttatgttgctaattagattgtgcatgaagagcctaccagttatgcacaagccacgaacaacaaagactggaagaaatggaatggagcgatgtggggagagatgcattcaccgaagaagaaccagacatggtatgtaatatcgatgtcgaaagacggtaaattcattagatgtaaatgggtgtacagatgaaaagaaggtatttcaggtgtacaagaggtacagtataaagaaaggttggttgcaaagggattctctcagactgaaggagttgattattatgaggtattttctcttgttgttaagcacaaatcgattagaatttaattggcacttttagcgtgttaagacctagaacaattagatgtcaagactgcctttttatggacatctggatgaaaaaattctaatgaaacaccctgaataatttaaagagactgaaaaggaacactaggtgtgcttgttgcgg

SEQ ID NO: 38723 - DNA, 2755 bp, Cannabis sativa
ggctcaggcctaaagaccaatccctaggcgccacatggatcgtgaacccgttttcatcaagacacatattaattttaattgttctttaagaaatttacacaaactaacaaatatatatagtgatttaattttctctcctagagtattttttattttgtgtttgcatccaattttacatttaattagtccaattgatgtggattatttcttaatattttttttaatagttaaaaaaaaagcagttgcccttctaaaaaacaatataaccggatttggtttatataaaataaaaaaaagtcttctcatgttaaaaattatttcttattaaattcacactatataacaaaataattaattctcattcaacacacacataaattcaggacagcctatttttgctcctactttaacgctagcttctttcttcttctaataataataattattatttaaaatcttaataaaaataaaaataaaaataattatttttattattattatttggggtaccaccccctagaaataatgaaatctttagtaaaaagcataatttaagcctgaaattctatgtgacaatcattatcgaacatgggtgccacttcatacactttgacactttaccaattccaaaagtccaatccaacaaccactctaaacaaataaagtccaaacctttatatatataactatacctctttgacacattttcacataaaaatggctatgcttattcaaagctccatagccataacatccacaattctcctcctcttcttcattatctcaacctcaaaccccgccgcggccaccaacatccataatgtagccaagtacgtgagtcaatctacgagacagcaatttctcgggccccaaaacactgcaagggcgttcctcagagtgccacccttgaagtgggatacgaagctcgagaaatacgcgcagttgtatgccaacaaaaggcgatacgactgcgcgttgcaacactcaaatgggccttttggggaaaatatattttggggaagcgggcgaggttggactccagtccaggctgcttcagcctggattgatgagcgtaaatggtataggtacgggtcgaattcttgcgcccggggccaaatttgtggccactatactcaaattgtgtggagaaagactaggaaaattggatgtgcaagggtggattgctttggtggtaagggagttttcatgatttgcaattatgaccctcctggcaattattatggcgaaagaccatattaataatactaataataaatattattattagagtaatttgtgaaaataaataattttttttagtgttattttacaaaatattattgttttgataattatttgtaaaatagctcttgaattcagatatagtgttatgtggagaatgtcattttgcaaaataattatttttaaagaatatatattattttgtggagtgatattaaagaatgataattttgcaaatgctctaataaattattattaatttaataaattagtgaatattgatttataagaaattattgtaaagaaacgtgtggtttggtgtggtgtttttgtggctattgacacactttatatactacttgataacacctctgagtttatatatatatgtatactctgatttctaatttaatgtttaccaaaaaaaaaatatatatttatatatatatatttcattctttactattgtgcttctattgtcctagtttgtatatactttatgtggatcgaagtaattttttttttttggatttttattggatatatatggaaatgttgttaatggaatgggtagtaattgaatttttatgtttaaaattataattaataatttttttttcaatattattgtgttttgtattttataaataacacttcaattaaatattttttaataaaaaatatattgtttattgaataatatttaagaaaaaaaaaactaattatacaattaaaaatatataatcaaaataaaaataaaaaatataaataaatatacgtgcaattcgtaatatttcgacacttccttactgtccagcaattagaaaaatgttgtaatatcattaatagtaaaccatgcctatatgtgtattataagatacattgtatgtttttagcgactttaaggtgcccaaaattaatattgatgtggtgcgttgtaagtagtaataatttttatattatttattaaatcaaaatatatgagatctagctaatactaaatcgtaccaatatatagcagtatgtcacctcttgtgatgtttggtaagtgtcctttaaaatttcttttataaaataactatgcatgcgcgcatgttataaggtactaatagtatttagcactaactataagtagtcccttacgattaattattgatatttcataaaagttattttattaaattatacacagagagtattataagccaaactaatagggtgatatattattattggtactgaatattggatccagtacattttagttaaataaataataatataaggaagcgtttggtatgagatgttcaaaataatttgattataaaaaatattatgaagaataatatgattatagaaaaatgtgtaaattggacatatataaaaatccgttagtaggtaaccgtgtaaacgtggctaatacatgtttatctataactaatctataattaattaactaattaatggctaatttacaaaatgacagccacacaatacgacttttttttttttt

SEQ ID NO: 38724 - DNA, 1920 bp, Cannabis sativa
  modified_base (1155)..(1157): a, c, t, g, unknown or other
tcagtccataaagtagccagagtggcgtactcgtgtataagagtcatttattctgtgagtgtaagggcccaatagagacttaaagcggggaggttacattatacttttatactttatacttttagtattagactttacccatacctttactaatttgatattcttttcaattttcttttgaaaaaataataattatataaaatatatgtatcaaaattattatcattttgagtagtattttgtttttagacgttttgataatgatgacactattatattttgcttcttttctttttctaaaggattatgtttttttgcttttgagtgtgggcaggcaaaacctagttggctacattaattattaggtcttcatttttatattggtttaaaaatgttaaaacttgattttttaactatactagcttttagtgaaaacgacaatacaaaatagaaattgacggttattagattattagaccaattttaagagagttgatattggtgcttgtaagtaaagttatatgacattataaaataatatttttatagagaggggacaagaaagaatgctctatcttggcactaatgtcaaactaatttgttatacataattctttttccttttttcttattggttaacttaagtaaaataaaatttgtgagatcaatcaaacaccaaaataaagtgctccattggagttgcccttccattgtctcatttcatatattaacataaatctaactatgagtttgtatactaattggtcttgaaactacatatgacaatatgaacatcaacttactctcatttcttgtcgatggtttatcaataatttaaaatattgaagtgattttctcttagttaaatctaatcgttttgttgtactactttgttacgagtactaactactttttaattgtaagcttaaatgaattacatatttttttttaccaacaatatacttaatttttgttattgatttttatatgtttaacttttaaatgtatacttaagattaattatattataattttgtataaaagaatgtgtaaaattttgtgtccctatgacaacattcaaaataaattaaatctcatttgctcatcatgtaatcgcaaagtcatccatccatgtttattttatatatatatatnnntatatatatatatataaattatgaaattttatcaatagcaatcaactaaaataataacatacaatttaatcgggacatctcctccgttagagacaagaccgagattagaattagaaaaatgagctaaacaattaaccgcttaattctcagatcgtttgacaaaaactccttttaattgcagataacttattattcccaaccactaatagtaatttgatggcaagtcatcaaagaacaaagaagaactaacaatgaaacaaaatcatatcacacaaacaagattaaaacacttaaaattatatcacagagacaagactaaaatactcaaaactatgtcacaaagacaagactaatcgcaatagcaaaaatcgaattgaaatagcagaacacaaccccaaccaaactgcatcaatgtccaaagaaggccaacgaacctatagctataaatttaagagcaaaaaatcttaattttttaaattagttcacaactctataatgtgattagaaaagtgtaaaataatctatcaattttgttttaaaacatctatgtctattaattggatgttttatgaaaagtctacaatgagaaaacgacataacacccacaaagccaaaaacgacatcaaaagaaaataggacaccaatataaacgacatgcaatgtaaaaaggaagaaaattttgaacttatgttaaaacggccacaacaataccataaatactaaacagacacacttataaatttgaaaaaacattggctatgaa

SEQ ID NO: 38725 - DNA, 2644 bp, Cannabis sativa
ttagttatatcaataaagaattaggacattgctaccatgccctggcacaggatgaatgtaactagaagctcttcagtccgctgaaggagatgatgatgaataggattttattgttggaagagttcttgatctgccaatgatatgacaacatttgaatagcctttgtttcaatttgtttttttgaaatggagagttccaatattaaaatatatattcatataaaaatatattatcgaaagatataaggtgccttctatatcagaaatgcatagctgaacttaatattttttctaaacgattgtttcttctcactaagtgcacacacttttccctttcattttacattttttttttactgaatttattgttgagaactaagtatgatattaagcttaggagttgtcttttgtgttttccagcttcccgtctcacatcccgagataaatgagagtttatgtagcaattttgcatttgattactctgctggattggttgcattaagagcagagaactattgcgttcaattgtacagcttgcttgaagaccgtgaagtttctgaggtgagcccaatctatttttgtgtgatatttcaattaataaatgtcaattatccctaatgaaggatcttcatttttcttggtttgtaatggttagggtgcctcatgcataaccccaatttgtttcttagcctttatttatttttattaaaaaagaacaaaagcattactgtttatgaataatagaatttggtgctttattatatccaggaaatttaggtgccttacatatgattgattgtcggtcacaggcaatgcataagacttattgtcagttttgatttatttcagattcaagtctgtgagagaaatcatcaacctgtagatgaagtgactgtaagttgttgatttgcttaattgcttttctagctagtcatattatcgtttgtttgattaactttttgttggggttgcagatgggagtaactcgagtggctatttccaaagatggttctacagtgtgtacttctgatgttaagcttcctgaagatggaattgggagtcttgtttgtcttaagttttgggaatctgatacattgaataaaaattttagcttgtccacaatcgtttatgaacctcacaggttcgtacctggctcaactttatgattctgattatattgcatatgaaaagtttatttcattgtaaatgtttaatttcttatttatatgtaaaatatatgcacatcttgttttacagggatgctggtgtctcttcagttgctttccatcctagtcgccgaatggctgttagcacatcaaatggtggcgacttcaaggtatgttttgaaatgttgcattttttttaatgagaaccttctagcatgatacaatttaattttgtgatgttgcagatatgggtttctcatgatgagattaagaagaatggtgagacagttaagaattctggttggatgtgccactctgtgggttcctacaagtatgctctttctttgctttatttatagatagtgaattctgcccttctgtcctttgtgctgtagactgaagtaattattgaaaaatttgtccagttcgatcactttgtttgtagtaatgcctttttctggtcctaggttttagtttaaactctttatttggtcatttgcagaaagaagccaatgacagctgctgcattttctgctgatggctctgttttggcggttgcagcagaaactgttatcacattatgggaccctgaacacaatgtccttgttgctgtactcggagaaattcagaaggtaaattttcatttcgctctctttgccatttgattgtttgttggaaggtctgaaatttggggcatgcttgcaaaatttccaaccaccacatgtttatattgttgtgtgtatttgtatctttatttgcagccaattaggtctctatcgtttgctggaaaatcagactatcttgtgagtgtgtccgaaggttcacaaccacagctgtcagtatgtagtatgtcgaaactctctgtatcctggtcatacaagcttcaagtagaaggtacggacacaagctctccaatgataatatgtattgtgtgtgtggtaattaatattgttgtttttggtttttttttctgtagatgtagcttgtgctgttgatgcatcaatgtttgcagttcttgttgttagtaaatcgtgtaataatgagacaacagtacttaaaggaagagatggggtaatcttattattcaatgtcacagatccacttcctgtggctacttggtctgtaaggaaggtactattattattgtcttcttatctcagttttgattataattgtgttggtgaagattggtaacacaagttttgatataataaattgcaggccaaggggggaggacttggttttattcaagcaaataatcaaactaaaaatatattcaaagcaggcaagccatcatctcaagagttgcttgtgtatgtagatggtgatcacgaatttgttgtatttgacccgcagagtagcgaaacacatgaacttagcctaactggacaacaaaaccttgctaccattgaggaaacaggtggacattaattccttgcttctttctactctgttttataaaacatgtttttactataa

SEQ ID NO: 38726 - DNA, 1644 bp, Cannabis sativa
agagagagagagagaagagggagattggggttttctgtcttggaggaaaccgacctagactccggttggcggtgggcgtggtcagagcacggtgctcttggcctagactttagtgccacacaggcggttggcacatgctaccgagtagatcaagactcattggctaccacgatcgcagacaataggtatggcacagtccactactgctcctccacaagcacatcaccattcggcaagacgtcagtaattttgaccaaagagaggcttgtagagatggatccggtccaacaacatttgatgtacgaggctagatagagagagagaataaggaagaaaagaaaaaacttagaatatggtattttaaacttttttttacaaaagtataggatactgtctactttcagttccattaaaaataaattgtagtaatttttattagatgctaattttttttatgtagtttactacatttggaggaagtagaacaaccgactattaatttaggagtgaaagatggagattatatgtaattcaagcatattgtttgacatattattagtaacattggatagtttttccttcaaagttcagtaattgtgtttgcctttattaggagatattcttttttcagtgacataggatcattgttaaagaatgtaacaagtatgttatctgaattttttagagtgttcttaatcgatatatattgtcatatagattagttgtgcatattctttatatgaataaataacttatttgcctatttttttattatttaaaatgtataatcttttagacattatttaattatcaatgatattggtcattgcttgaaaaaaaaaattagccatatagttaaagtggacaccatcacattgtaatttgagtttgtgataatcattattgttttggaaatttatccatagaaaattcaaattcagttgaaccactttttatctatttatccatagaaaatttaaatattttttttctcaatagctaattagatcactgttgcgctgtagggatgcacataggtcgggtttttgggtggtcgagtttgggtttttggatttcgagtcttggaaatacacaatcaaacccaatttttgggtgttcgggtatgtcgagtttcgggtcaggcgtagtcgggttgggcatggtcaggttttggtattattgggctgagcccgaatattttatttatgggataaaaataatttattatataaaaattaattaaataatatatataaaataaaaattataaaatcatataacttaaattaacataaacattaagtcattaacatcaatcacgatgagctcaagattttgcaaaaggtaaactctacttttaatatatatatacatatatatatatatatattatattttgatagatttaaataatcagatgagaccatttattatgttgacctcgctttgaaccaacgacattgaatcaaataataagtgattaaataatgtaattaaaagagaacaaacatgataaagtaaaaggaacaccaaatttaaaaaggttcggcctcatgagtgtggtaatagtctactcaccttgtattgtattaacttaagagaaggaacaaagtgttcttcctctttaaaagttcttacaattga

SEQ ID NO: 38727 - DNA, 2369 bp, Cannabis sativa
ttccataaaaagatattgcaccaattcacattccctttaccttgacacgtgtcctccagtcgaatttcgggtataacaataagaataatctcttacttacaatctttttatataaaaagaaacaccttttgatttcagttacgatgatataaaataattgagataaaatttgggaaaattggagtgaatttggaagtacaactgatctctgtaaatttaactaaccgagctacctacatacattttttgtgagcaatgaagccatttgtagttcaaaatgaggtattttagaatttaaatataaaaatttcttaatctcatttttggagacattgagtttattttggattaaaactcatttttttaatctcattttaccaaatttcaagatcaattgaattgcgaaattctattttaatgagaattttgaaatagttaaaacttacttgattttgtgtctttataaagtaatttgaatcttatattatggaattgaatctcataatatttaagagaaatatctttgataaaaatatattaggactatatttttagtcaattttatattttgtcgtctttgttaaatatacccatatatatacatataaatatagatatatttcaagtgtccgctttgtgaccttttagttttcaaatgttgaaattaatattcataatttagaattttctaaaatcttgatatacatatatagggataggattttgtcccgttattgtattttttggtatacaatccatgattgtactgtagccgttagattgagtctagtcattaatcaaatggttgttactaatttgtagagttagtaggctttagtaggggtattcagatttattaaattggtaaccagttatatgagattaatataatattaattgtttggtacttttttaaaaaataaataaaaaagtactgacctgacatgattgatgtcagactctgataatacactatactttttaataatttgtcaaattatattgattatattgtatttttttttaaaaaaaaaaatactataaatcttaatttcaactgttattcatgaacttcttcaatatatttttttataaatgttaaaatactaaagctaacaataaaaaaaaattattaatgatataataaaaaaatattatagagtaaaattatttgttacgtaaaaaaataaataataatttaaactatacttgtaactatgtattttcataataattaattaaagtaatgtaaataaagtatccaatccatctcaaatatttctaatacttattgattttacataattttaaattctatattttaattttataatatttctttcctgttgcaggatcaagcataagcggcaatggccccttattcgccagcctacaagtctctaacggtatattactagcaacaccacgaccttttcttttgggcggtggtgctgcctcgcaagttgagggtaccctactaggatctggtggatcgcaaccatcaccgtctcccccatgagaagaagctatatcggttaacattatgactctttaaaagtaaagttatagggctaaattagtatgaatgtagattagcaaaaaaaatataattagtttgaattacaattaacatcatcaaattcatcgcttataaaattattacaaaaaattaaaaatataagtaaactaatagtcactatcacactcatcatttttcagaaacaatatcgtcttcacatcgatcaattagcaacttgtacccttcatcagctattacatcatcaacgtaatcatccacagcgttttcatcaacctgattaacatttaaattttgtgtagtatcaattattttcgccactttaggaggttgcaaaattaactctcctagatccacagtcaaccgaaaatttgaggagcttaaatcatgtacaacattttcatcatcttcatcctcctcaatgttccaaatttatcgatggcttacattctcgactattttccaatatctacctctaagcaaatcatcgagataaaatactttcttagcttgggtagcaagtataaatgggccatctttgtactattcaccactaatattgatactaatgatattattctcaatgattgttttcttcctctgtggattggtattgaaccatttacaccaaaataatgccactgaatacacactagtaaaagttaacaacatcacatgttccagcgttccataataattaaatccttctgttctagccacagagacaccgttattttgcgtagtatgcttcttattacgttcaactaccatgtaacgaacaccgttcactacaaccccttcataatatgttactaagtgatctgacccacat

SEQ ID NO: 38728 - DNA, 2371 bp, Cannabis sativa
taattttccataattaaatcataactaactgctaatttctaaattaaactaagcggtctttacatgtatagaattatgtaattatattttttttgcacattttttgtatattgtgcatttacttgtatataaataaaaattgcccagtaaatatgcaaatcaatctgacatgaacacattgcgtcaatctaaaaaaaacttaaaaataacaccaaaacaataaataaaatttaaaaacaactataaatcatctatacaacaacttattgtattaacaaaacaaatacttaactaaaaattaacttattacaatataatatctaataaaataactagggattagaaataacctagatacgatttgtatttcattgtcaaaaattgcttgaataaacaacataataaatttaaaagtaactacaaacacttgcacactaacttaaaaatatatagacctatgaaaaactaaaattaattctatttaactttgaggcacattaaaaaataattaaaaaaaaaaagcaaatgcattttttaaaaataaaattaaagaaaacgcattatattaattgagaaattatataactccaaagcccatttctaaaaatggggcccacaataatataaaatctttatataattataaaaaactaataattaatatattaattgtctttactaatccataatctaacatgcggtcattaaactaatcaagatagaaaaaaattgaatcgcaatagcaaaatacaatctcaaccaagctgcacatgcccagggaaggctggcaggcctggccggagaaaaaagacaacctcctatagctataaacttaggaacaaaaaactttaattttttttttatataaagttaacataattaacatcttgtctagttacaaaaatttatatatatacatatagggcaagactatggtaggacctagcaaaagtttcctactcgtaaggtacttttattaaccattgattttagatcgtgtagtcattataatataaggtgtatactcttacgataagactgcttgtatacaattaaaactttacgcattataataatatttaatgatatttttattttaaaaaattaaataatattaataatttataaaaaattattaatttttcatttaaattattattatgttttaaaaaattagtttatttttttttatatacgtatttatttttaaaaaatagttttagttaccaactttgctatcaatatagtgataaaattcattttgtaaaacagtcagcaaaccgactaacaaatacttttgctaggctagatcgagtctattgtgatcgtagcatttatgagtctaacgctacgactactatgttggatatcttatattcagaatgttaaatttaataaaattattatttctttcaaaaaaaaaaaaaatttacttcttaataatattttcataaaattaatgtaaaaaactaaaagttcaaaataacttttaaattttaaagatttattttgatgagcttttacattagatatatataatatatttttttcttttcaaataatacaaatttataatgtatttactttcacttttatatataagttaaacataaataaataaataatcacctacacaactaaatttaaataaaactaaagaataactcttaatgtagttttattagttgaagttaactacttatataaacactttgatggcaaaccgaaaaatagtaaattttgttgtaattagtggtctatatatacaaatattttaaatttagaaatattcataatattaggcatttattaatttttaattataattaatattattctttttcaaaattaatttcaattatttttatataggtatttaattgtaaaaaaatatgggaattactccgtatactattttttttaacttttttttttttcaaatttatggtttgggtttctaaagtggtttctccgatagtttttacgtgagttgatatacgattttttgttgcgatttagattgctccgctagttgcgataaggatttttatgtagaatttcgtaaaaaatataagaaaaaaactattttgaagtgtaaaaataaaaaaaaccctaaaaatatttacttaggaactttgttataattttcttatactagtagtgaactacaacaaaactaatcatttaagtaccttcctcactaatttatttacataaatagttaatggtaacaaatgaaactaaacaacgagttttgccatgattatctttcaaattaatttgctctaatatttatacaaaattacgtatttgttataaaataatatataatagatgagaagaaagaagaagaagatgaagagagaaagag

SEQ ID NO: 38729 - DNA, 1378 bp, Cannabis sativa
ggcccttcgaaccagtggtcacggccaacggctggcttccaggggtagcagagatcaagttcgcacggtccactggagtcgacgacggagtgaaagtgaaagctcctgagaaaacgtcttgatatgtcgactccagagatatccacggcccgtacatagggaaaggaaccccgctaacgctcgccaccgtgatcggagaagacagagtgcaccctcttctttgatgtcccattacaccgcagttataacagaagatgcccatcttctcatatttgaactgaatccacctttgggtgcccgattccagaccgaaatagcatccagtaaacaggggttgattaacatttaatctaatcaaaactttgagtgccttactccggagtgcaggtattccttcatcagctttcacatatagcacctgaccagcttttgcccccaataatttaccattatccgctgagaagtagtccctagggaggttgaaaatatgtatccagattttcacactgttaaacacagcagatagatcctttagaggctcccaaaccttcaacagaaatgtatacccacgaacacaccaagggccattctcaagagcccaaatacggttccccgcactcgtgaaaccaagctcaaagcagttacggttgttggcaccctcattaacagctaccacagatacattaaatttccaaaccttttccacaaagtcaataatggtggcttcattaactaccatcggggccaccactttcccaagaagacaaaaggaatgtaaagcctgctgagaagatgcacaaggaatgagtttgacagaagcttcctcacacgtgaagcactttccatgattggaggagtaggtagcatttactagtgccattgaatagaaaaagaagaggaaagcagccaaacaagaaacacccacacaaagacaaaaccacaaaaaaacactaaaaaaaaaacactaccaacacagagacaatccccacgtgaagcccaaacctttacaacacccaaccccacaaacagaagacccccccctgagacaaacacaactgaaaatcaagaatttttgaaaaccaagaagaccaaaccaagcccaaccaccaaaagagaaagaggataactcaaagacacagccacacacccacagacatgaacactgaacacctaaaagaaaaggagaagagataggacaagaaaaggaatgaaatgaaatgggaactaagactcggaaggaaagagagagtggtagatgaccattctctcaaattgaaaactttagctgaccattctcttgaaaatgttcccttagtgcttagagataggggaaataagcttttggacaaaggtgtaataccttgttcaagtcatggtg

SEQ ID NO: 38730 - DNA, 1906 bp, Cannabis sativa
attaaggtgaattgagtaagagtattccatgactgtaaattgtaaatgatgtatcatcactctgaattgttgacttggctatggctttgattttagtgtggattaattatccaaaactaccacccttttgcacttttgtttcagccaatgaagttcttttttatgcaaatttcagccattgaagtctctaacttaaccttatttgctgctaagtaaaatagatgacttgataaattagtgaatagtaaccataatttaatacactactttaactcacttaaatctagctctagtagtagtagcgtgagggagtgtgtatggccccattacaaagtagaagaaaacaaatattctcctatactattattacatcaagaaagatatcacttgaaattagcataatacaaaaatgaggccaaaatcgagcctttttgctataagatttaacatataaaatgacaattattcttcttttcttttcccacttcaagtttttttgaaaagaaacatagcaaaacaatacaaaaaatggataataatggatggttcaaaccttaaaagtctcttctatcaagcatatccacaaaggtcattctcctagggaatctagggggaagcctcaaaaccatagcatcatcaatctcaataggcaaatgggtagccaaaatcacaatcccacctttctttctatgctctgcaatgatatactcaagcagcttaactccatcatcatccaaagccacagaaggctcatcaagcaaccaaatttgcctatcaatggccaacaacctagccaactgaagccttttcctttgacccattgaaagcattttggccttctctttggccaatctaccaagtcccatcaactccaatgcaggcaaagactttccttgtttcccttcaagtacctcgaaccactgaacattgtccaataccgtgatattgctcttgattgcatcctttagggagagccagtttagttgaagcttgtattggtggaaaatccctgacttggttatgtcgtgaccgttccataggacttctccggctgatggcttggaaaacccagccagcatccggaggaaagttgtcttgcccgacccgtttgtgccagtgaggacaagtgaaccaccgtcgtggatggtggcattcacgttacgaaggatttgctgagcgtttctcatacacgaaacattgttgagaagaagccgagggacttggggttttctcagagacattttattccagagctttggaatttctcagcgggtctccgaagggggagagagacggtgtatcataaattctaaactgtaggccatgaaacaccaaatgacagagcatttaaacgaaccataataataagagaaattcttaacataattgcgaaatatttatgataaattcaatcagacatttcatcaaacactaaacatacatacacaatctccaaactgaatcagacatttcatcaaacattatacatacatacacaaattctaaactgaattagacatttcatcaaacaatatacttacatacagaatctacaaaatgaaaatttcctaaaaatttatttcttccaatgtcaatttatctgctaccctataaaacaataacacatttaaatatatttaggtccaatcaaaccagaggcaattactccattactactttttctccctaagatttgaccctttacaagaatcaagtataaccattgtaaattcattaaaaaaaaaacaacccacaaacaatagtttaacagcataataaaagaaaacccaataaaaattatagtcggaagaaacaagacttacaagcagagtttagatttgtggaggaatatgtgtcttcggaactaaaactaagccaccgatcaaatcacaccgccgccttcttc

SEQ ID NO: 38731 - DNA, 3682 bp, Cannabis sativa
aaatagaaataggtggcaattattgattggagggacagggttgggatagggaaatttgggacagaagatttttttccatcattccatgtgtgattccttttaatttttttaagatttttattgctaagaattaagatacataaaaataaaaaattatatactcaaaacattttcctaaaagatataaggagaaattacaatttagtggatgttgtcatttattcgcgttttcagatagaagatactagacaaatgacatctaacaaaggtttaataagcttttgggcttacttttaggcccaggaagacttatgaggtagtatttttcctttataaatataatctcggatcatttatctagatctcatggaatactctggatttgtgtcattcgagaatggaagttcaaaaggtatctaggataacttatggtcctggagaatgcttacgtggccccccactgacacaattctaaggaatctagcgacttctcccctctgtcaaattccagaaaggctcaaggcaaaaaagtggttacctttttgtgcattgcaccactactttgacattctccttccctacaacagtgcacaacaccaactgttactgtcaacagtacctattattgggtcacacctacctaactcaatagcttaagagaacactaaaacaatctattttaccccatctgtgggattttttctatacaaaaaccctaaatgtggcctgaatctgtgcggctcaataagcatggctgtctataaatatggcattttctcttccattgaaagggttgacaagctgaaaaataacactcaagctgtaaaaatcccatagctaaaagcttataaaactgtatcatgaaataaagcttgttgacgcttacgtaaaaattgtatgttgttttctctttactcttattttcttttaacttaatctcttttattattattttaccaaaatctcgataaacatcattaacgataacaaataatgtgaatgaaaactcaattcaaaatcaagttcttcagatattaaaaggtacaacaaagtacactcagaaaaattaaaaaaaaaaaaaaataaaataaaaaaagttcattcatagaaagtgagtttttattcttttctttttttagtagttttgtcaatttaaaacccaattaatacatttacaatataatggctacatttctatccatggtgtaattttttggctaacaagtaattgaaactaggttgagtaagtgatcttttaagaaacatatcagagaccactttatacatgccttcagtaagatgaactccatcccaattcacatactgagatgggtttcgacatgctctaacagaaggtgtcccacaaacagaaaacacatcaagattataaggttcgcccgtcccacaacacgctttaaatgtctccttcataccaaacttggtcggactttgcatgacggttttgtaggcagtccaataatcagcatatattattatagcttggggaaattgtgttcgaagagatttgaccaactttaaaatggctaggttgtgagtgtaactttgattgttcacactcttgacacaacctatgttgtccctatcatcttgggaagctaaagtcatagccaaaggtaagcatcctgacattggaaagccttgaactacaacatactttgcacctttctttaacaatgcctgtaatatgagaacaatacaagaacaatgagatttttctttctctttcttctttttgaagcaataacaataagataccattgggtaagtggtagatacaggaatatgtatttattatacaaaatttgttttagacagaaatcacaattctcatacattaccaaaattagggcgtgtttgaaaagtcgtggtggaattagatttaggtgaaattaagcagcgtttacttagaggtaatgaaatggaatggaatggaatggcctttccaccattttggtggaatgattattccattttgaaatggaaagaaagaccattccaatgtaagatttgagtattttaaattttattccattctattcctattccaattctcattcctattcccattcttatattttcattcctcccgaccaaaccggcaccttaggtaattacacaaattaaaattatagctaaacaaggtaggtgatatgccaaaaaactagttgcacagctaaaaaaaaggcacaaaattatatttgccaacttacaaagctcaaaagttcactaggcataaattttgataattcttcccaaaaaaaaattctaatcccacttaaacatatttgtaaagtgataatattaataagggaatttattttaattgattactcttaaacatcataatttaagtaaatcttaccgttaaaaattgagaatagcttttgatggccaactttcgaatagtgtcactagaaatagtggatccaatagtgtaagcataatcattgacaccaatctcaccaatccaaaacaaagtatctttaaagtcagcaatttgcaattcctatcttgagttttacacccaacattttttttcaaatacttattgaaccaacgaaactgagtcttaatagattgaggggtaatattaagagtaaggttgttcttaacaaagaatctatgatttatagcagtggaaccagccacagcaaagttgaccccattaggtgaatttctcttaacatttttataaggaggcaagaaaggcaatgatagtgattgtgctacgaaatcaatcaccaatcgtccatctgagtatcgatttgttgggtggtgaaagaaggtgactccgtacggtggtttaaagccataattaaaggtacttggcccagcacccaaccttgtgttgcctgtgtcggtaaaagagtcgccaaaggcatagattttcttgaagggaagtggctttgttttggttatggcattagaggttggagaaaataggatcaagatggtgactatgatgttgatcatagtcatgatttgatgagaaagcaaatttgaaatcataattagaaactttaacacatgtgtagctatttcaaaatctttttgccttagctacttatcaattaagagaaagttttttttttttctgaatttagtgagaatggtgttgagtaatatcttgattaaatagttgaggaggttctaatgagcatggttgacatgcattgagttaaaaataaacatataaatagtaagatatagttgctttgttaattttttcgttttttgtttattaatacatgcaaaattagaaataatattttttttcttttaatttctagcctcatactttgagtgtacacgcgtatatgttcctttttgttttttttttttaaagaaaagcaaaaataaacaaaataagaaatatgttgtaacttgtaactatatcttttgttttttgaacataaaaaatgtttcccaacattatctattattatttagaatatttgtcccctgaactataacatatgtattattgtacctcatgaactttttagcccattaaaaatggttcttgaactactcacagtattgtaaattggttcttctatcaagttttgtcacatgtggcaaacaaaatgatgacatcactgcttagtcaattaccacgtcaatatcatatcaacgatacgtgagtaattaatttgaaaaa

SEQ ID NO: 38732 - DNA, 3106 bp, Cannabis sativa
  modified_base (2653)..(2661): a, c, t, g, unknown or other
ttctctaattttcttacagctctctaactttataatattttattagttgccgaaaatctcgatcaacacttatattgagggattggtatatgttttaccagtatatatattttaacaatgtaaatagttcaacatgcagttgtttctttgattcctacaaccccgacaatgacatattcaattcaggtctactaaattagttcaggatcccataagactcgatttttataatttattttttatttgagattaattttaattaattacacaattttaaatctctatgatactatattaatggatcttgttattatggaataattcatatatggaatattttttttttgaaattttgtaatttttgtgaacaataaaataagatgtgcgataaggtattaatatatcatcgaaatgtaataatttatgaaaactttgaatagtaagatattttttagacatattcaacaatcgaattgttaccttgatatctcaaaagatcaataattgtattataattaaaattatttgtgttgagttaaactatcaaaatgatccaatcggtttagaaatcgttgtcgatcaaactcgtatgtagtagcttctagtaatgctagttgataatagactctaattagtgtgtgatataattaattttcttttcctatttatacttaatttcaaagtttgacatagccccaccatgtcatgagtttgtctcttacgtcagactcagggagtgcgtgaaccactaaaaagaaatcatatttctattaacaaaactcatatattaatttatctaatgactttttataattttcaattaattatttttttttacttatttacttgaatatttataaattttaattaattattttttttaattttaaatatatattaatttttaattaattttattttccactcaacaataattgtagctagaaaagtacaaaatattcaagttatttaatcttaaaataataatcaatacaactaacaatataatcatagtgtaagtgataaagttatcttacattaagcactatgacatgagttcaatcttttgaatagacataatttttttattttatttgtttttaatttaagcttttaaattaatttaataatttaatttttttaaacattaatttaaatttctttaagatttattaatatataacaattcttatactataaaaattttaaagtttataattattatagtgaaaagtcttaaatttttatttgttaatatatattgatgaaactattacataaaatataatggtgaacaataaaataacacatacaataataataatcaaatgaaaaattttgtcaaataaaaaattgaataataaattttgttaaataaaaaaaatacataataaatagatgaaaaatttagcgctaaaaaatatttgaacaatcttgattgccgctaatctcatccaaattttatagtctatgacaactttagataattataagacgtgtgataaggcattaatatcatccaagtataatagtttattgttgtaaaatttatttgttatgtaagtgcacacagtagcaatttatttgctatgcaagtacataaagtaaaataaaactaaacattttttttatacatatagtttttttccttctcttgtgtttattgtttgttatttgttattttatttattttaatttgttgttggtgatataaaataacaaaaatttgtttttattttattgtaagttatgtgaaaaaaaaaatattaagtaattaaatattaaaatttaaccaatttaaaataactgatctaatccacacttttgcagattgaattggattgaatttgagttattgtgcgaacttgattaaattcaaaatatatatgaaattcgcacttagtacgaatcaaatgtactataatcaaaatagtatggaatggattgaatgagcaccgctattgagaatgataaagatgagataaaaaaactcttaaaaaaaataataaacgaaaaaaatataaaataggaaaaataaaataaatggtataaaattatcaaataaaggtatcaaatattgaactcatatcacttaacaagagataggataacttaccaaacatgctagaataattttattgtgtacaatgattcttattgatttatattttgttgtgtataaaatataaatacatacatatatgctttctaatgcacatttactttttccaactatatatattactaactagttcatgcatgatttatatagatagtgtaattaaataaatatttaaaaattttaaatacatacatttacctttaactaagttaaacaataagtatattatgactatgtattatttactattttatgcatgattatataaataatataattaaagtaaataattaattatatatctaaaatttttaaatacattcaacattatagttttaaaaagtaaataaattaatataatatgataaaaatttgaaattattaaattaattaaaatcttaaaattaaatataaataaagaaaaaaaatattgcttctaaaggattaaaatcatgacgtttaattattttaagagtatttatattgattattataagttgaatatgttataattttctataagtataattnnnnnnnnnaaaataaatttaattaaaatatttttctatataaatttgaaatttaaaaatatataattaaaatgaaatttttaatagacataaaaataaaagtaataaaaattatgatttggagttttgttagttaaatcaataattaataatattttaaattaaattaattataaataaataaatatattaattacgatgttaagttgagttattagattaaatcaaaggttagaaattactatttttattggtagatattttaccattcttaccataatagctcatatatatatatatataaatatataaatatgttttagcaatacaaaaccgatctctcccactattagttaaaatgctcatatatataattttaaggctaattagcaatttttcccctcgaattttgacatgtactaaatcgtgtctctgaacttttttagccgttaga

SEQ ID NO: 38733 - DNA, 4281 bp, Cannabis sativa
  modified_base (1374)..(1378): a, c, t, g, unknown or other
atctcctcgtactccttgtaggtccatttgcatttcaaaatatttgagatgtgataagggatcttctttcccagtatacatctttcaggttagcatcttgaacttgtgaggcaactctagaacattgatctctagagaaaaaggggatccacgtgctcggtccaactttagattgttgttcttctgaccggctaggccttggaacatatttttcagttcatccaactgtgcctgcacagatggatgaacttgttcggtctcttggccgaccaaggccacatcaggatctctttgagccagattttgagcatgggccccgggctaagtggctggcgagacatacggctcgtctaaccctctccttctgtttagattatccttgagatcatgagttgtgcccagtctattaaatattgatgcattaggttatcttagtgactggttggtttggccgatcgcttggccagtttcgttaacctgggtggagttattaggtataacctctcttgacaaattactagataaggtatggctgcctaccacttggcccacatgtggaacctgtgaccggggattgggcggctgaccgttcagagattgagaagcgttcccggctagatcttcgtctgactcgcccagcgggatgatggttgcaggttgatgattagtagcctgataggcccttcgtatcagtatggtggcctgtcttgttcggttgtcaatggctgcttgttgagccctcaacgtttccacctctttatccctccattcagcgaacagacgcctttgctcttcaaatgtaaggttcactgcaacacggagctcttcctgatcgtgatgcagagtgttaatatggccttgcatgagtccaagagcatcaccgaggttctggatctcggtgttgtctccaactgttgtttggatatttgttgctggcaaaattccagcgctgggaataccctgattggctgctgaactggtatttccagtctcttgcacaccaggcgcgattccattcaaaggagacgtcacaccctgacccataattggcggttgttcaggatttgtggctggtggaacccctgcatttcctggattctacaatgcaggatccactactggtggattcgctggatcgagcatgcctctacgagtctgtaccactatcgtgtttatgagtaaatttgaagtaaagagcgagtttgtgaccctagctctcaatgaaagtaccaaaatgttgatctcgcttttagctaacgacaataagtcttaattgtaagcaataagtgatataatttaaatataatatgaaaagataaataaagaacacagagtttttaaagagattcgaccccgagcagttcggtaatagcnnnnnccccttgatttgtattgacttaagaacaaagaatacattgattcttctcttagagctcttacagtgaaatctctaagtatactctcttagataattctttcgacccttttgcccagtgagaatagatcactatttatagggctctgtgcttgagggaaggtttccccttttgtttacaatgtctataattggtaagattacacattaaataaatagaatacactgattgaaggatttggacagcttgccatatctctgtgatacgatcccagatttatagggattgcttttatgctctatgatgcaaatgctgaagttgctaagtgttgacatgctgttccgtttgtccactgctcggctaggaagacttcgtccgtccagatgtatgtggtgttctgttcagaacatctttttcgggcagatatggggagtcaattcattatgtcaccagcctgtgatgccacgtcagagtgccaaaattggaataacaaaactgctcattaatcccaaaactttccaccaactccaagagtgtggaagttataatgttaagaggacaactgttaaagaaaacatgttcatcaacaagatgactattcaaaaattataagagactgattggagtgagatgacgatgacaatagatgagatacgatatttaatgatacaatgatgacaatgagcaagatacgatgagagacaacgggtgagatacagtgataataacaggtgagatacggtgttgaatgattatatataaaaataatacattatattatggaaaacacttaaatttttcctagactaccctatttacttatttttataatagtaatatttttaataatttaaaatgttatatgtaatatatacattagagtataaatttaaattttataaaattaaataaaccaattaataataatcaatactattgtgaataaatatatttttttattttttaataaataaaatattattaataatatgtaattagatgatacaattttattattattatatattagagtaattttgtatgtatattaaattaataaatagttttttattataacacttatggcgcgtttactaaattgtaattggaatcagaataatcaatgggagaaatgtatcggtttaaaatagaaaataattagaaaaaatattttattatattgtttactaaactgtccggaaagaaaaccagaatcatattattttgtttacataactaggaaaggtaatcgaaatgctttaatttgacaaaaatgccattattagaacatgtaattagtttctatttatagatttttaaagggcatgtttgtctttatcatttttaattaataaaattaaaataaaaataaattaagttttttttttagatgaaaaataaattaagttaggaaagggaaaggtattccctatcgaaatgggaggagaacctttcccttttttctccctaatttgtgtgggtcccgctactttctctctctaaaaaatttagtaaacaattgtatgggaatcaataccatactattcattcccattctctttaagtaaacataaactagcgacacacgactatattgtctagttggaaaaaaacaattctaagtaaaattaatcatttaatctgttttgtgaaactaaaatctttgtgggttttcgcagcacctggtatttgtagagacccgggcaaaggagagagaaagagaaatattaggattgggcttatattgggtttattttattgggctttgtttaggtttttaccactttgtataaataccattttttcccttttttattgagtaaagagaaatataccaatttttaatatcctaatatggtatcagataaaattgtctattctctctcattctaaacccatcaccttcatcaaaccctaaccctaaccctagccatggttcagacaagaggtcgttcatgccggcggtcgccaatgccgtcgacctcccttctctggttgaagcttctcatcaggttcctcgtgcgactccacctctgacgatcgtgccgcctcctgaaggtccgtcttcaacagctccacctcattcgatgatcgcaccagtcgacggttccgtcgatgcttctcattcaccgtttgcttctctgccacctgagatcttgaccgaagacgctactccgaccattctgctgccaacttcgcgtccccctagactttatttttcattgccgatccctacgacggctcttccaacggggttcgcaccagtctcctcgctcctctatggttttccagcaccgcctcctgtggctccgatggcttccccttcttttccacctgattttggtttctttgacactccttgggtaaatcttgatcgaccttccattgatgaacgcaatccgtatcatcttggaattggagacaacccaaattttctcattgttcccttccaattgactggccaagacaatttctggtcatggaagcgcgctgccacgatcaacctggctgccaagaataaaactccatttatcgaaggtactcttcctcatcctccagttaatcatccttatcgatctgcttgggatcaatgcaatagtatggttatggcttggatattgcgcatatgtctcacgtgaaaatgcagcgagtattatgtttaaagattcggcccttgctatgtggaataacctccacgatctgttcaaccaaagtaacatccctcaaatctttcatctcaagacctctttaactcgcatcaaacaaggtgccaactccgtcaccacctattttactcatctgcaatcgctatgggacgagctcaatgagtttcaaccgttcacgccatgttcttgtggttgtacttgtggtgcgatgcaaaaaattcaagatcactattctcgtg

SEQ ID NO: 38734 - DNA, 2969 bp, Cannabis sativa
  modified_base (2327)..(2328): a, c, t, g, unknown or other
accgatcataagcaacccacttccccacaacctacgccatttgtttcttttactatttttctcatctgggtttcacaggaatcttttgttttgtgctcttttttctttcttttttatcaaaaccttgaattcggctgtgagtagagagaaaaatgagtaatcgaagcttggagaagatgacttccattgatgctcagctgagactgctggctcctggcaaggtttctgaagatgacaagctaattgagtatgatgctctcttgtgtgatcgcttccttgatattctccaggatttgcatggcgaagatctcagggaaacggtaatcattttttttcttctcatttttcttaactgttagtcttctgataatcaagtggaaaggaaaacctctgcttttatgttatattattattttcttttgaaaaggaaaaaaagaaaaattgggtgatgttttgtaaaatatgccctttatcttaattaagtattctgttataattgtgtttgttttctctttctaaattacaaatttttagctcgtgggagaggagagtttttaaaagagatataatgttgtatagcacaaaataatttaatatttgttattattatcacttctttatgttgcatcattagataagagaaattagagctgaatcattgtgttcttatgaaatttctatgaaaaaaggtagtgcattgtgaatgtgttgcggtaaatatgaagtgggcatttattgcataggattgaataaatggttagtagaagtttgttgacattttaatgttgtacattcaccaggttcaagactgttatgagctttctgctgagtatgaagggaatcaagaccccaagaagttagaggaacttgggaatgtgctaactagtttggaccctggggactctattgtggttgctaaatcattctcccacatgcttaacttggccaacttggccgaggaagttcagattgcttaccgaagaaggataaagcttaagaagggagacttcgctgatgagaattcggctactactgagtcggacattgaagagactatcaagagacttgtggggcaaatgaagaagtccccacaagaagtttttgatgccctgaagaaccagactgtggacttggttttaactgctcatcctactcagtctgtccgtagatctttgcttcagaagcatggaaggtatactttttcgcttgtttttagttctctttctgaatgaagaaaaggaaaacagagtattttgagtctaatcttaaatttacatcattgatgattatggatttttgtgttaatgctgtgctctattcttcatctttcaggataaggaactgtttgactcagttgtatgctaaagatataactcctgatgataagcaggaactcgatgaagctttacaaagggaggtatgtagatacaaccaaattcaaaagctcaattgttttccctttgctaatatgaaaaggcataataatttgatgactatttgtagttgtaatgtaagtaagatcatgtaacatggaattttcttaatctattagattcaagctgcatttcgtactgatgaaattcgaaggactgccccaactccacaagatgagatgcgagctggaatgagctactttcatgagaccatttggaaaggtgtaccgaaattcttgcgccgagtggacactgctttgaaaaacataggaattgatgagcgtgttccttataatgctcctcttatccaattttcttcgtggatgggtggtgatcgtgatggtatgtttattttctccaactttttgacaatcttataatctgtaatataaactcatattcttgtatgcataagtaagtcatcacataatccaatcataaaaagtgtcttttggctgattatgatatttttgcgaattaatgatcttcctgatgtggactccaggaaatcctagggtaactccagaagttacaagggatgtttgcttgctggcaagaatgatggctgctaacttgtacttttcccagattgaggaccttatgtttgaggtattactatcataaaaaatataaccttcttttttccccactttttgaggggtcatgctttttcattttcattgatgattcctttttcttttccttatttccaactacagttatctatgtggcgctgcaatgatgagctgcgtgctcgtgctgctgaacatcacaggtcctcaaagaaggatgcaaaacattatataggtaatcaattttaataaatgtttgtagttctatattttcctgtctgtgaaacctaaagtatagtttttatataaatatatatatatnnatatgtatgtatgtatgtatttattgaaaatagatcttattgctgttttaactttgtcaaatgttaaacacttctttctgcattacagagttctggaaacagattcctccaaatgagccctatcgtgttatcctaggtggtgtaagggacaaactttattacactcgtgaacgtgctcgtcacttactaaccaatggagtctctgacattcctgaggacacaacctttacaaatgttgagcaggtatgtctgtgctcttgagctcattaatttagagtgggtccacaaagtataggcctggtatgtagaacataatcaaaccgaaactttataccagaatggttattttcttcccgaaagataaattaagtaattgaattctttgtactagtctgagaatcacaatagttaattaaagactatgttgagaagattatatcatataaaagactgatcatgcattgtaatccttttagctcagttggctaggtttgtgctttgagtaagaggtctggggctcaaatccccgctgggttagtttaacaaaatgggtattaattgattccttttgtttttggagcttttatattaattttgtttttttatttctgcaatacagttcttggaacctcttgaactat

SEQ ID NO: 38735 - DNA, 3950 bp, Cannabis sativa
aaaaaattcgaattaaatttttgacaatcaaagtatatattgtaactatagttcaattttagtttatcctttttatatttaaattttatgaagttattaatataacaatttaaatttaaaattattactaatcacaatgatcaagtaatatgtaatgtcgctacatgtaacttctggtattatgtcgcaaatggcttacatttttatatagaagaaagttttagtttcataagtaggtatattattcgatattatatgtgtgaaagaaaaattatgatattgtaattatcttttgataaattaaactatttacatgatataaaaatttatataatatatattaacaatctaaatatagtttaatataattaattttctctgttttgctttgttagggcagtgaactttagcttctagttgtggccatgaagagttgtggctgccctcataaggttgttcagggatctaggaatagttctgcaaaagtaaatagcatgagaggaaatgggaaggtaaaagtaaagatgaaaagaaggtcaacatctttagatgctgtgaagaagatgaaagctcttacataactaattggtgttgagcctgttgatttctaagaagatggatcagaggtggagatggatgacttgaactcgataagggaaggtatttatctctcacaaaaattgacaatgcatcaattgtaaagagaacaggagattcaacatgatttctgttcgtttcttgaaactactaagtggtgtgagcaacaatcaatggttggtaaggcttcgttactcctaatgcttagatttggtaatttgattcataatttaagtgaaaattttgagaattataacgttttgggctccgggatgacgttaggagttaaaattaatatggatgacatttttgatgaaatcaagtattggaattcaacactagtttgctatgtgttaggagctaatccaccaattgatgtatttgatagttttttcaaatgaatgtggaaggaataggtgtataaggttggtttaattgcacatgtaattttcattattagttttcatgatgaagaggctcatatcaagttttgaagggaggattaattcctattttttttacaagaagcctatcattatgaaggcttgggatgcttctatgaatttcaaaaaggagaatgtgagatcaactcctatttggattcaactcccatgctcagaatggaagtatttgggggagaaggctctagccaacatgtttcggcaattagagaaacttgctgcttaccgagattttaagaaaatgattatttatatttataagaactaaagaataataattcaaagagaaagaggacaataataagtaggatttttacatagttagggcgttaacgagccctagtccacaagtaaatattattattgtaaggctagaaaagccttaggatttacaagaacagatgaactctctctttttgcatgagcaagtgagtaatgaaattcttacccttttcatgtagggttctttgtatatttattgtattgagatatcataatcattacccttttttctattgatgggatatttactaaaatatatattaactttgggcttatctggtgaagcccaacccatgaagtgccttgtgtatgctcatgtggatgccacatcatgataatagttggcaaaaccgtatcctatcttcatggagaataaatacacattaaattcttgtttgccaattactatcttttcatacttagcaaaatataatcttatgttcaagatcttcgggaggcaattcctgatcttgtgagttcttgtaataaatgggaaacttctgtgtgtagctagatatttgctaattacttcctctagatagatggtttaatgtcttctagatttacatcatgttgcatgggatcctgcctggacgggtcactcgttcttcacccgaaaagactggtcatttacggatccaacctagttgttttatttcggcatggaatatttaagttgtattcattatagaacttttacgtgtccttatctggaaacatggataacatttaccccctaagccttcggaactctgagggttgtggatgtttgcaccatactatgtggatggatagatggaggctaaaggtaacacctttaggcattccaaaatagttgtgttagtggctgacaactttcctttttcaaaatgaagcaacatgtggtatcgctttactaatccgtggagataattattaccgagaaggtgcgtgaagtgaagttgatgaaatgacagttaattacttcaatgcgagtttcaagaagaatatcatcatttagattttcccaattcaaaatatcacattaaattctcgactggtggcattcccagaccattgaatctgtctttcttttttttttttttgaaacttgatcttggctcttgatttgaggaatgcgtggatcaccatctttatgtataaataaggtgcgaattcaactttatatcacttttactaaaatttcaaactaaatttaaacttgcagggagaagttgacgatgaacaaaataattctggatcactacatcgataactacattcgttttcttctttggatcaaacctcatgaattttcaggtgcaccacccccaaccattgtttgtgactctttgggacaattatcaacattagatttcaacgcggagactgacaaactcattaaccaagtccatgtcctgcagaacatacttgtacgtatcaatcaaccttctttgtcaggattttctttgatgcttgagtttgacgttacatttattctccgagggcttacctttatttgagttctacactgccaccgagttctctaacaagtaaatttctttcttcgaacttctcaaatctcgatgcatgtccgagactggtattttgattgagaatttcatgtgcattatatgttgttgaagagtataatttaagcatgagaatgaaactgattgacttgcagaaatagggtattttaagttctatattgagaaggttctaagtcttataaaaattagactattatttgacttcttaataaaatagccaaattggattagtaatgctagcaaaatttacttcctctatccagaatccttatggttccgaatgatatttagtctttccttcgattttctttccatgttcctgatctaatcgtctaggattaatattccctaagagctaatttcagacataagatccgttgggaacctctccaagcagttatagaggagaaaactctcatgtccctgccatcttccttactatggatatttaactgctttatgattttttctttcttattctttccagaatgtactatggcaaaaattgaccatcacgaagaaatcaaagttgaggaggaggaaattgttgcaaaagaggttgtagctttaaaaatagtacaattcatcttaatgggagatggatcagtaccaaaataagttctgagactatgaaaacctttgaaaatatgagaacaattggggtcttcagagtattccaagatttatttggaacaggctctccgtttagggagagttacccagtaaatgcgtggatggaagctttggcatttggagacgaggctatgtagagatgggcgcacatcttctacttaggagcttttttgtgggattctatgtaatagttgggatagctcctttgcactttatctcccaaatatataaactatttgcgggatggtacgttttgtgcaaaactaaaaatgtggaggtccctactccagaggaaattctctatttctaccaagttaagcctcaagctatgaggaaataataagagcaaggtaggcttctatcaacttgatagatattccaaatccatggcctacccagtcagctccgtgaagcacactcatgaattctgagattacttgttcta

SEQ ID NO: 38736 - DNA, 2372 bp, Cannabis sativa
atcttaaaacacacatttttttttttataatttttacagttttgttgaagaaaagaaaattgattatgcattttttttaaattcctttttttttaaaaaaaaattgatataataataatatattacttatgttttttgtactaatttaacataatttttctgttataattggacttggacttggactgggtattttccacaacctataataggtaacaattcaaactcttgacttattattatttatgacattacaaaattttgattttgacaattgacatgttccctagaaattataggaaaaaaaaaattaaagtgaaaaaggggttttacttttatagcaatgctttattatataagatatcatataattgctcttaaaagtgtgtaattttattgcctctgtttggttaccagtaaagccggctggggttgtccttgcacagagctgtaacaaccttattcctgtaaccaaacaactgtccaaacctccctagtctgctcccctgggactgaaaaacctttctaacctcgaaagtgttgagctttgtgaggcacaactcaaaaagactctatttttgtgcttatttttctgaaatggcaatggagaattctcgaaagaagcaggtgtatctcttctactgtgacgagtgtgaagaccttgcccgaaaagttgcctcccaatcagacttcatcaatctccagaccatcaagtggaggtctttactctctctctctctttttccattgtttttaagtgttaaggaatatgggctatggcttttttttgtgctttgttctatctttctacccataataaaacatgggcacttttcctttgtgctcaatcactaaaacaatagttgggtttttatttttgggtgatgatgtgaataggaaatcttacatgtgacatagatgtaataaaacccaagaagaaggaacagaaaatgttgtgaattgtaggaaacgttattagagtaattgggtagtgaaaaagagtttaatgacttgattggtgtaggattagtatgtgctgattactgaagtgaaaatgaagcacataatctgtttgtggaattgtttgactgggctgggccactctcttctaaatgttatgctcattatgatagctgggttgttggggaaaattaaggagatccaatgagaagaagatgttttgacgttttagttattatgactgtggtccaaaatcaatatttacgcacgcattttttttctactcagtctcctaaatgtggtctctcaactctgtctgtctgtgcattgaaataaagttagttaatgtattaatgttttcccccacaagtccagctattgtaggaatagaggtctatgtatgtatttataacttaattctttactttcagttcagccctacaatttttagaaggctaaaggttcaatcataatgcatattacttgttaatcccatgggaagttaaatctcatacatcatgaaaacaaacattgggctaaccactctacagaaccttgtggaaaacacttacttaatccttaatataagttatcaatttttacgtgatgttttcgatattgatgttggattgtactagaagattgaaacagaaagtatggaatcaacacaaccttcacatactttcttggctgaacgtaccctgacatttctctaaaagatgctagtctcagataatggagtatgatagtgtattttatggtctgacactcatttgaatgcagagtttatgttcataacttcactcacttgaatgcagagtttatgtctatttaacttcactcacttgaatgccgagtttatgcccaattaaccttgaaagaagagtgtgtagtgacgacatgtctgtcattaatatttactcatatcatttctgactttactgttccttccattttcctgtgtgtgtgtgtgtgtgtttgttgttgttgtatgttacaaagctaatgagcttgactggagaaagatgtgattgttctaaaatatgagtagcaacacgaagattgatttgtattcctgtacaggagttttgctgatggatttccaaacatatttataaacaacgcacaagatctcagaggtcaacatgttgcttttctggcatccttcagctcccaagcagttatctttgaacagctttctgtaatatatgcactgccacgactttttgtggcttcctttactttagtattgcctttctttccaactggttcttttgagcgaatggaagaagaaggggatgtagccactgcatttacccttgctaggatgttgacgaatattcccatctcaagaggaggtccaactagtttggtcatatacgatatacatgctttgcaggtttgcctatgct

SEQ ID NO: 38737 - DNA, 2287 bp, Cannabis sativa
gaccactcccctaaccccaacctcgccccagatgccgaaaccaacctcgaccttagactttgatcctagaccctgaccttaaagccaaaccacgaccttgaacctgatccccatccccaacccccaggccctaggctcgaccctggaccccaactttgatcccaaacacttgccctaagccaagacccgaaccccgtatcctaaccccaacttcagaccttttcccatgccccaacctaaaccttaactttgagtttactacaatacaagttcgtaagtacgaaaaatattaagatttttaattaataattaggcaatataatagtgatttatgagtatttatttattatattttttaaggtgtgaaatttagttgttagtagaagagaaagagagagtagcatgaagggctaactcatacaccaagagttttaattcataatcatttttaaatattgttaagaatattttcacctaaattttggttggctggtttgtcttgtttctcctctaccaacatgaaaaaagaaaacaccacttaatttgaccattaataatccttaattttcttgacaattttgatcggttattatgagttagcattttatatatatgtgattgttaatatacaattatccatttcgttgaccaaacctcaaatatattatatattaactaattggttattttggatcaaaagttataggttgaactttgttttgtcaaataacaaaataaatcttgtattttttaaaatggtagaaatatgattttgaactcaatttttgactttttttaatataaccaacttaaaaacaattcctaatacgaatagatacaaaaaatttaattattttttccataacatctctaaggtgaattattattaagttttattttgacaaaaagttagttcatagtcctatttgtattattttaaaaaatatagtctattttatcatttaacaatacaaaatgttcaatctacaatttttacaaaaaaacaggatccaaaataatatttacacttaactaattaatgtgacaaaacaacaaacaaacacacttatttattattaatctctcacacaagaacaaataataatctcttaaaacaacatattttcgatttgctcgaactttacattatcaatgatattcatattagtatagtttttacaaaaatcaatttattaatctaataaacaagtaccacatagaaatgtatggaaaaccaatcttaataaaaatgttatataaactattaagtttaacacatgaaattgaaaattggttattgaaaaccaaaaaaaaattatagaaaatttgtaaataaattagaaatagaaatatgggaggttgtctatttttggatatataatatttaaataatatatatttaacataagtgtacattttttaaacatttaactatatttcagataaatatccttaattaataacatagtgtatatttaatttagaaacaaaacaagtcagtttagatcactctccatagttttttttactctatcctaaatcacaccatatatcaaattttttatatttgtactttatattattaaaatattatatatttatatattatttatttattcaattaaaaaatatgagagaaagaaaaagaatagaaagaatacaaaaataataaaataagtttaaagaaataaatattatgtacttatatttaaagaatgaatagtgtttagctaaattgcttagttattttagctcacttgatggagagtgttttgtgaatgatcctttaaaaaaaattagcttatacctcacttgttgagtactcacatgacatgttttaaaatagagatatatcaaatattctgaactcctctattttaaagtttttttttaaaaaaattattattcgtactctacatttatagattactattcattgttctaaatatattttattaatttttttgagttttaataattatttttgtatgaggatatgtgtatatataaatattatatatttaaaatgaatgaaatttgaaaaaataaaataaaattttggtgatgtattttaaagaatctgatatatggtgtaatgtaaaaatttgaggtaagataaaaatagtgaaattttgatgatgtattttaaaaaatagaataaaaaattatgataaaagtgtttggagtgttttaaagttgtaaaaataaataagatttttaagtatctaaaatttttaagtttgtaagtgacataaatttaatgtttatttttaacactttaattttt

SEQ ID NO: 38738 - DNA, 5233 bp, Cannabis sativa
ttattattattatatgtacatttctatctatgcagtcatttgttgatttgcaatttccaaatgggcaattaacttatgtctctggtgaggggttaagcacaagtgctttcttacctgtttgtggaggtcttcttcaagcgcaaggtcaatatcctggagaaatgagatttagtttctcttgcaaggtttggaaactgattgcttactttcagatttttacttccttgctgttagtttaatttgttttcatactcattagaactaagaatttctggttaaatgttttattagaataaatggggaacacacatcactccgatgatacaatggccagacaagtcttttacattaggtcttgcacaagccttggcttggcagagatctggtctcatggtgaagcctacagttcaagtcaggttagtttcttctttattatacttatttgagatttgaaaaatgtggaaaaataaaaagaaacatggttgggctcaaagttgaagctacttaactctttggtggtacacaaattgcgctttgggctaggttctgcctgtaggctatattttctatgggactaatatgttatgatgcagaattggttttatttggaaatgttacatgtcagatttagatgcttatattctgtgttgtgatcttttcccccttatgtaagacaaatcttagaatactatagcacttggcttttatgctcctatgtcatgtcctactgtgcgaattcttgcctgtatgggaactctactatctggttcactatgtcaatactgtataattatagctgggtctgtgggcctgccacatggtatgatattagaaaaccgacatgagtagtaaccatcatcttattggtctacctgagcgattggtagctcttttcaaatcagaagctgggcctgtaaattagtttagccatgatgtatggacaatttctaaaattatgcagtatttcgtgctcataaatggtcacttgagtagttggtgtgaggcttcatatatttggttttactagggatagttagtcctaggctagttaggtgtgataattggaatcatgcatagaactgtaaccatcttcgataggatgtagtacatcaaatttcatgttccattggagattttataagataaagtcatggtttgagtttgtaaggttgtttgttatgccaaggatcatcaagttgtctctaaacttgttgttcaaaaatagctgtctccaaaattgtgaagtcatgatttggggctatttgctactgctaaagatcacaaaattgataagttaagatagcatggccatcttttattttttggcagtctgtttttgtccctggattatgttaatggaaaaattttagtacacttggtgtttatatttttcctgttctatgatttgtaacgatcagtttatatccaactcttgggggaagcaatcctggagtacgggcagaactcattcattcagtcaaagaacacctgaaccttatttgtggttatgcactaacggcacatccttcagcatacgcatctgtatcagtaagttacttttgccaacttagcaacgtgctattgatgcttcccgttttctcctatcaccacagccaaaacataggctccatcgttatttacagttcttaattgtttattttaatttgtttttatgctggttactcagattggcaggtccaagtggaatggaaatgttggtaactcaggtttggtggtgagagtggatgctcctcttaccaatgttggtcgaccttctttctctgttcagataaatagtggtattgagctttgattatttactcctgtactctccaatctacaatagaagtgtatataatttagtgtcaatctattaaatgcaacatatctccacatgtaatgatgtaaataagattgttgaaagttgatttactgatctcccctttttcctatgtagggagttcattttcttgttataactgtcttacattaaatatatttatataaatatattatttttggtagatttatctttttagacccatcattcatgtagtgttatttttataatttttctttatgggttataatgcatggaaaactgatgcagggcgaattgtttagaaatatacacacttattttgttataatctagaatggtctatctatgcctttgttaacatctttttatttgatttattttctataattcttatgttaaccataagaaaataaaatgtatacgcagatattgatttatcgaatagatatagagcaaatattcaaataaactagaggacaatttaactaataaagtgacgaatatgattatttcctcctcacacaaatagaacaatatattagtactgtgctaattgtatgttcaatatataccgaatgacagtagtctaatatttatgcaagttattaaaattgttgttacggggcaatagtagtaaagttatgcagaaaagaactagcaagttaaatattacaattattattgatgtcagaattttattcagaagaacctacaaaaatataatcccatgatggaaaagaattaaagttctgaatatcttgtgttgatgaagagttgttatgttgaatggaggcacataataatacattagaactggcatatgcttgttctcacattcgaaacttagtttcttgtcaacagcttcaagattctggcctttcccatagagttcccacacccactcaaccagtgtcaccttgcttggttcttctttcaacacgattgatcttcttccgcagctgatctcaagggccaccatgccgaagctatacatgtccaattttttagtagccttgccagtggtatgtaacaatctttggcgccatgtaccctccgttccagctaacacagttgtgtccgattcccttctgtggtcgactagtcttgccaaaccaaagtctcctagcttggcattgaagttcgaatccaatccatatcgcatcacttgacttggtatctctatgaaccacgcactgttcccattcttcatgaagatacagaagggatgaggccaaaccaagagctatcttatgccttaattcccacggcagtttgagtttcccaccaaataggtgtgtgtcatcaaggcttccattgggcaaatattcatagacaagaagtaacttatcgcgtttgtgacaccaaccaataagttgaacgaaattcctatgccttaaacgacttataatcttcacctaaaagatatactcttcccatgcgttgatcctttagaaactttttaacagcaacttcggtgttggaattgcttaagaggaggccccttgtagacacatccaaatcctccctctccaagcttcccttcatatgaaaaaccgtttgttgcttcacttagttcttcgtaagtaaacctgtatttcacatctaatctattttaagttcatcttaaaaaaaataaaaaaacctaattactatgtttatgatcttttatgttcttatctttttcatataatccccaatatttttcatttctcttaagtttttatctaaaaccataaaggctacatccaatcgaatttaattgaaccgaatcgatccaattataaaatattagatatactattataattgaattagattggatgttaaaagttggattctaagatcatctctaatgagagacataaaagttgagctatattttgtacaaaaagtagttttgtaatatttttatattaatttttactattatactccaatgcataattataaatttgaggaaattagaatctataccccttttatattgtcattttttacgtgactctattatgttagagtattttaggtacagtacatataaaagaggtatgtttcaattaaaagcattgctattaggcaccactgcctagccccttctcgatatgtcgcattgcgattggctagcgatactccataaaaactattatattaaattatatggggcccgatacttagttagaccaatagcgatgttgacacataggagggtgctagacaccactggtgccctttagcatttctcttcaattaaatataaattaaaggtagatttggttaatttataaataaaagaggtattttttaatttacccttataaattttgatgtaaaatttaatatgttatttaatgtccacttcataatttattaaaaaaaaatataaaataataataatgcaaagttaaatataaaatttaataataaaataataataataatgcaggtcatttaatataaaggagtatgttaactaaaatttaataataaaatattaaaaatagtataataataaatataaaagtatagcatttattgtgatataaattttgcatcatgctatattgtgatgcaaatttggatcacttttggttatgcgagatttttgcatcataatttagcacaccattagagtagacttctaacaaagtgagctatattttgcttttgtattacttatttacatctccattggagatgctctaattgaattagattggttattggatgtcaatcttaaaattcaattaaaaattgatctaatccaattacatttatatatattgaaaaaattatttatatttatttagataataaaaaaatattaaaaaataatatatattgattacatttttagtagatttcttttgtgttgaatttgccacttgatttttttttttatattattttcatgatattttaaattttattacttatacaatagttattgttttaattatttcaaacttttagttgcgtatttttttttttcatatttttaatttttaagttaatattaaaatttaagtgtgtaattgaatacccaattaaaaaattgatctaatcgtggattagattagattggattttgaggcctaattagattggatctagatgatgaattttcaaattcaattatttataattggattaaatctgatggaattttttttttttttttggttggatggatgccagcactaattttctccaacaaataaatagagtatcatcaatacttttaatcaaagcttaaacagattatcaccagtcaaagcatataatcaatcacttatgacaactttttgagcatttaatgacgacaaagtcgtcactaattaattttcctcgtgttattatttttaattctttgaccttttatttcgtcgatatgtattggttatgtacgaaaga

SEQ ID NO: 38739 - DNA, 1783 bp, Cannabis sativa
tgtatagtttaatgtaattttaaatcaattgtaagaaaaaaaaaaaaaaaaaacaaatctaatagtactagatataagaattgttattacttaattattaatttatataataataaaattaggcttaacaatgtattatataattaaattgcttattttttaaaaaacaaaataattggtttgaaattattaaactatacacaatacaacctaaataaataggggtcaaatacaacctaaacaattggcctaaaattattaatcagaacaaaattattttttttaaaaaaataagcaatttaattttaaaccaattgtttttataatagtaaagtagaattgtataagagttattattatttaattattaatttaaataataataaaattaaattaataaaatttaattatagtttttaaatatataaaatttaatctagttttaaatttatttataagaaagctatctaattaaatttattaaacaacaaaataataaaataaattttaaataatataagtaataaatttattataaaatatgattaattaattgaattaatgtctatttaaatttaaattaagatatatataaaaataattatctgactttgttgacattgttaaataattatgtgaattaaatttttagatatttaaaactattttttttaaaaaaaaataataattaattgattgatttaatggtgctagttttaactgttaactttaacgaaaaaaatcgttaaactaataatttttattaaataacctcatttaatataagagagatatagtagagttgttcatataattaaaaaaattagtttcaaaccctaatcaattcagaccaaaccatttaggaccgaacaaaatgaatcagtgtgaatagtttgatcaatccgaacagtttacaattttctattctatcacgattttaaactttttgctaataatgcaaactaaactaatccgcataattcttttatatttacttaatacataattttttagatagaatagtgatatttgagaataattttagatcatagaatattgaaattggtttaatttcgagatttttttattattatttatataataaactaattaaaagaaaaaaaaagaaattatcgaaaaataaacaattaccttaaaaaaaaaaggagcaactaggaaatacaaattataaatttaaaccaaatcaatctatattttttagtggattgatttgattttaaatttttaagaaactataaataatgatttggtttaaaaaaaattaaaatttaaaccaagttaaaccctaaagagcctagacaatatatagccattactataaactttttttttcatcaaaagccaaacaggcattaatgttttttttcattaaagttttgttttttcttcccggggctacataccattaatgttttttaagatggaaatttgatacatttgaataataaataaatttttttaaatttttagtatataaaataatagcattgttattggatgtagtgttagcacttttgataagtagtgtcttataattgattaacgatatttcataaaaattatttagaatttaatatttaattacactaattgtactgtaatactaaaaaatatattaaatattgatagtatcttttaacaattctcctaacaaaaaaaatagaactcgttttgaatgggtgtgattgtgaattgaatttgatgtgtatcgcccatcaaattcggtgtgccaaattagtaattacaaataataataataata

SEQ ID NO: 38740 - DNA, 2393 bp, Cannabis sativa
gtccccgcagaggataacccaacagatatggggactaagattgtgactattagcaagttcaagcactgtaggaacttactgggagttgacacaggttggtgattgagaaacgaactcaagcttggacccttagagacaaaggaaaactaatctacgactgcccatataaaaatttaggcaaaaattgttgttaaattcccatataagtagtccctttcagcactatcaaccacttattaaaattacataacaaaaccagaaaggtacaacaatattaaaattagatacaactaactgcccaacttaagaacagactcattcacttgcatctaatagttctctacctcgataaaatgaaaagatgctttagaagagagtactatgtgatcaatcttgcatctcagttagagagagagaggaaagagatcgagaaagaaagaaagaaagacagagagttaaagagggaaaagtttgagagaaactttgtaaacgaaaacagagagaggattttgagattacatgttgtaatttgtagatggaatcttcatctgattcttgtaacttgttgatgattgatagtgcacgatcaagcatctaagacgagtttgacgaagacgtagccctaactttaaggtgagctctgagatcaaatttctttgtgttcttgtgagtttgttctgtttatctttaaccaacgatgatcatctaaatctttgttgttgtttagctcttgttttgcttttgggttttgctggttcgaaggctagggtttgaagctcgagattcttaaagaaggaagaagatgaggtcgtattcagctagggttttggggttgatcgaaagtattcttaatttttcgtgtctttgattttatatatacattgtggttttggggttgcaaactcaattccgtgaagtgtttgtaaacgtcattttctaccttgatgtttaatttgttggtttagttggtatagggttattctcggtattgaatttcctagtgttctcttactacttccatacgtgattagcttttttgtaaaaaaaagaaaaatatagtgataaaaacaattggtatcgaacaggactaattttttcattttttcgcttcgaaacttttgcaggtacaatatcaatttcgacattctcaaatgccactaagaaacctctttttctaccaactttaacagaactactactaatagtatttacataatcaaacattgagctaggaagctcttccaattgaactcccataaacgacatctctaaagtgtcgtttatatcacaaaactcatcgctttcttcaacgacattactcctaactgtgatccaatcttggtccgaagaccaattcgaaattgtaaagacagagtcaccaccaaccaatctttctattctttcagaagcagagctcaaagaagaaatttcatggttctcttcatcaaacgagtcccaaacattgtgatcaaaaacactctttggagaagaagaagaagaagaagaagaagaagaagaggctacaagctccttcacttgctctgtctcagatttcatctcctcaaaaaatggatgtttcagaagctcagcagctgccattctctgtttcggatcttttttaaagcaaatttccaaaaaatgcttagctttctcggaaaaccagctcggaaacactggtaaatcatctgaaaacccgattcggtaaagagctgataaggggtcatctacctccggccaaggattctctccagtggccatttcaatgactgtgcagccaagagcccaaatatcagcttcaaaaccctgttcttctcccctgactacttccggtgccatgaaaactggtgtaccggaaaacttacccaagcccgaatctccatcgccggtaactttcccgaccgttgtagcacagcccagatcggaaatcttgacgttcttacttcccatcaagatattcgagctcttgatatcgcaatggaccaaaccattcgagtgaagatactccaaaccatggagaatctcccatgtgtaccttctgatcttggtctcgtctagcttccctccttgcctccggatttcgtctcttagagtgccacgtgggagatactccatgaaaagattgtagaaaaggcagtcgttctcgtttgtgatatcaaagcccatgtacttaacgaggtgaggagagtttaggtttgagaggaaagattgctctttttgcaagagtttggagaaagaaagctcggtggatttgactgcgaatatgtcaccggaagatactccggcggcgaggtatacagcggcggtggagccccggccaatcatgtctcctcttgtccattccataagatcaataagagaagaaactgagaattgggagtgtttgaaagtctatt

SEQ ID NO: 38741 - DNA, 2194 bp, Cannabis sativa
  modified_base (1624)..(1624): a, c, t, g, unknown or other
taggggttcaatccatcatgtgactcctacactgaatactagtctagtacaaagtacaaacaactaattaatcaaacaatgacaacttggttgaccatctgtaaataataaataccctatttaactaattaaacaacttaattacagtcactcaaaactcaaaactttcttcaccaaacttcgcttcatcataatcacttgaggttagcttaaataaccataagagagtgcgtatgtgttgaaagacatatgttcgagtcccaagttatacattgtaaaaaaaaagcttcactttatcattttcatcaaactatgtctctagcacaagatgaaatgattttgtacaaaatagtacgactttctagttttgtatagcataataagtagtttaactgtaaaataactaacataattgacaagctagttatacagtttgcaaaaatgcaataatatttattaaattattatatataagttttcctaaaggagtaatttgataactaacactttaataaactaaaattagcacgcaaacttatttaattttaacaattttaagaagctactttcccaaattatttctatagcataactcattgcaactttgcaaggtaacttatggtgtccatattggaaggagtggcttacattttgaaggcttatactataaatttgtgatttgcatgtaaaaggcttgtggttgtggtatccattttggtaagattgattttttttcttacatttcaaggcggttttcactttggtggaatgagttgtttctatttcaaagttagagctagagaagtaaaataaggatatcaaatcttcataatctttacctcaacttctaactcataatactaaattgaatggaccttaattatcaattggagaaacgctaattgatgattgaatgaatcccaacacatcatgtggtatatcaaaagataaaattacacttaatatgagatttaaaaaaattacttaagacaggtttaactttatctattttgtatgactttttttttgagctttttatgggtttaggtttgtcatattattataaatgtctttctaaatttcatatttaatgttttaaagcttctctctttgttctctctttgtttgaagcataaatcagagaaatcaaatatatagtattcaagaaattgattttttcaataagaaattagttttgtttatgtagaagtaaaatttatatatgaatttttaagttttttgtggtattcattcttatttatgatgatttatcttacatttttaagttttttcatttgaaaaaaaaatattatatttgtacaattaagtttacatgttatatatatcaaaacttttttccctatatttttgtacttagtattaagattgtcaatctcaatggttaaggtttaggcccaattacccaataaaatattttaggactagaaataggaataattacataagatactatttttttgtaaaaaaattacatttttatgtttaattttttttttttcatatttttacggtattctatagaataaacacgaaaataacaaaaaaaatacataaagtaacatgaaaataacatctaaataatatcaaaacaacaacaaaaaanaacatacagataacaaaaaatcaataacaaattaacaagagtacaacattaattaaatcgtattttctgtaaataaaattataaaaatcgtaaaaatatttaaaattccatacaaccgtatttttgtattttttttttgttgcttttatatatttataaaataatctgctaaaaatatcgtaattgttgctatataatatgatctttcttttgcagcataaatgccactatggaaaggttttaggaatgtttgaaacatatgaaaaattagattatagaatttgtataggctttcgttctaattctcagccaagcgttatttattttttttttaagaaaaactatatattcttcaaaaataaattcaattataataacaaaaaaaaagttaataagctaaaattaataaaattcttccattgttgtaactttgtattcagagtgtagacagcataattcacatatatatggggggccttggtcttcatgcacaatgtaatgggcctcacactaaggaataattacaaaaacatgataaagaaaagtggaaattacatcatggaaacaaaa

SEQ ID NO: 38742 - DNA, 1464 bp, Cannabis sativa
  modified_base (1411)..(1412): a, c, t, g, unknown or other
caactaaactatatttaccatgtcctatcagaaatgaacaatagaaatagaattgttagaagcaccattcaacactctactatactcataaagtgtaacttcatgatctcttcgttaccttaagataccaaatagcaacaatagtaaaacgtacccagttgaggtgttggagatggaagtcccttcaatgatgagaaatccgccttgggtagacctctatttgtagtagtcagtcagggccggtccagagatttcatctatagctctgcaccttgtcatgggcgcaagcaccaccctggccaagtgccaaccacaccaaaagtaaaagcaaaagaaaatcagttcaaactcatatctaagtcctctgagtttttcaaactaacaaaaatctattgaagtggacttgggtgactaacctgtgagataggttgaagttggccatcttgcaaggggaaaacaggttggtccccactggtgaaatgctttttgccatttaaacactacacaatgcactacatcatcgttggtgaagaaggaatggtggcaatttagagagtagagaaagagatgccatggtgcgactgtgtggctgtgtagagagagagagcgagcgagaaagagagagacaggtgcggctgtgtgtgaatgtgatatttaggttaagtttatattttaagttagggttttttattgggcccaaagcccattataaaatttaaatcattttgcttcagtggataacagtcgcaaactttttaacttttgtttacaactgaagccaaagaaatttgcgtctcttttccaccgaagcaaaatgtaaaagacaattctcaaattttttactttttgcctcggttcgtcttttagcgttagtgtagtagctgacactaattatattgattttgcttcggttatatactgaagcataaaatatttgcttattttttgcttcggtcaaccattttatggagacgcgttgacaaacgcaaattacacattttgtagtagtgtattgtaaatgaacctaagaatcatcaagattcatcataaccacaacaattatatctatggcatgtaacaccctaactattataggcgtgttagcctgcttttaaacgtactgtgcaggtcgttgctaatcaacgaggttattaaaaattgtaaataattaaaatttgcttatttaatttaaaacataagtaatacatttataaaatccaaggattccggttacaaatccatgaaagttgcaggagcattggttagtccaaacgacataaccagaaattcataatgttcatacctagtacaaaaagccatctttgggatttcttcctctcggattctcaactgatgatagcccgataggagattaatctttgaaaagatcgtcttcccctgaagttgatcnnaaagatcatcgatcctaggtaaaggatgtttattcttgattgttagcttatt

SEQ ID NO: 38743 - DNA, 3196 bp, Cannabis sativa
tttaatttctgcgctaattttattagtaatcccttttaggggattaggatttcttaagtttattgggtagcgtgcctaatagttagggcgctacatcactctttagaaaaatcactgttgaattaatatctttttttccctccaagaggtcccctttacaatgagttcaagggctctatttatagtgagctcttcacactttacaaccttatcagatctgtaaatcttaggatgtcaagtcactttcacacctaataatacaatatctcaagtagcctaatgtatcaaacatcctaagttacactaaagcttcctcttctacttgtaccttggattaactgaaccttgtctcctataccaatatgcattgtgtagttgctatctggtctgcgatccctgacttaaacattagcctcgatatcttctccttactttcatttgtatgagtagaccagatatgtgggaatcgaaggttgcaggtgtgcaagttgaggaggttacttgttgctgcatggagaaacttgtgcgaggagctgccttcagctgcgtggagaaccttatttgaggagcctcctcctgctatatggggtagcttacgcgaggagctatccttagttgctactcaaggagggtaggcgcatattgcgtggagcttcttgttgttgtgcgtggagttgtaatggatggaaaaatctaataggtagtggggatgtgacaacaaaaaaaggacaaaagagttggggacctcctcttgttccttttgtttgtctcaagaatcttacatgatccctccctcttatttattatccataggaatacttgctttttaaactttgcagttaacacttgcccccattccaaaagaacacttttaagtgatctttttagctgcaactgagctattctctaagctctttgcggtgcacctcgtctggtgaaacacttgatatatcgcaccgaaacattgataagacccttcaatgaggtaggtgggtcacatgtcacttcttatgtgttcatgtgactaaccctatcctttgatctcatctcgatttaacggttgtcgttcacctcccctccttataaataggatcccactctttgcaattctcatctcatcttcacttcatatcagttgctatcttccttagtttctcgcttcttctaaatcctccttacacctaagcctttcgacatttttctctttctttgagtcttgacgttgtgagcctttatctacagcttgatagggagtataggcttgcacccgtaagccaaagagaatggggtttctctagtcgtagtgtggggtggttttataagcccacaacacattagggaactccttgacccacacccctttgagtttctccagcttggtcttgaggtttttcttgatcactttgttggtggcctccacctagctgttggcctgggggtgcaccacagttaaaaatcctctttgtatccccctctcctcacaacatgatcctagtaactctctgtattgagtaccattttcagtgatgattttataaggaactccaaacttccagataatgaacttgttgacgaaggagactacttgtttaatagttatgtgcactagcagttttgcttcactcacttggtgtagtagtccaccgccacaattgcatactttgccccatcccttcccattggtatagtgctcctattagatccatcccccacatggcaaaaagccaggggctggtcatgctggtgaggtcgacaggtgcacgccagctgtagtttgcatgtttatggcacttgtcgtatcttttggaaaattccttggcatacttctctagggaggaataatatcactactttagaatattacgacacatggaatgccccctgcgtgattgccacgttctccttcatgtatggtgggtaggacttattgtatttctcctttgtctatgcatcgtaggagggggttgataatcctctaacaccccatcaattaccacgtaacgggtgccttatacaatatcctcatgacctcctttttatctgttggtagctccctttcctggatgtagctaaggtatggggccatccaagagtctccgtcagtcactacacacacttgctcctcaatggtcgaccttttgaggtactccacgggtattgattctaaggtattaatattcctaattgatcccaattttgccaatgcatcgacgttggtgttgttatctcaggctatctactttacaatataaagctgcagctgttccaaataacttttcatcctagatatgtatgccatcatcctactccccttctccaagtattctcccttgacttggaacaaaactagttgggaatcactaaagatgtcaaacttggtgatcaactctcttcccaagtataggccagccaacaaagcttcatattcagcttcattattggaagcctcgaacccaaattgcaccgcataatacatcttttacccctgggtgaggtcatcactactactccttccccagatcctccatcattggacaccccatccacatgtaacttccacctctcctccccatctgaggtgcttccctccaatactccttgacttccttcttcatcgagctgataagtgaattcaaccatgaagtcagcgagtatttgcccattaattgctatctaaggtacataaaaatgtcaaattatatgcgttcaattgtccacttcaaaaggcatcctgaagtttcgggcttgtgtaggacttggcataggtggtggttggtcaacataattatggagtgggcatggaaagtatggctttagcttcctggaggccatcacgagtgcataagccaacttttccattttagggtagcgagtcgcagcatctatcaatcttttactaacgtagtatactggttgctgatgctttccctccccttttactaaggccacactgagggcgttcctcgacacactcaaataaagaaataatttttatcctttttctggttttgccaatagcggcagcttccccaagtgttctttgagtttcctgaaggcctccttatagtccccactctagaaaaatggcttgtttcctcttaacacgtcaaagaaaggtagacatttatttattgatcgcgagataaacctgttgagggctaccacccctccctgtgagacactgcacctccttcca

SEQ ID NO: 38744 - DNA, 1965 bp, Cannabis sativa
  modified_base (81)..(85): a, c, t, g, unknown or other
ttttactggtgttttataaaaacgcagtatttttgaaaaaaatttcgtgtgacagtattttgtaaaagttaacccaaattnnnnnatttttgtaagtttccttattttttctatatgattcgttgaaggattttttaatgttggatgcaagaaaagtagcaagtgtgcaggagacaattttcttttttaaaactcaattgtgtatatacctgcaacatctttgaggaaatcagaattgttggaaaccaacagtgatttaatttttccaaaaatattttcataaaaaaataagttaattttattgtgaattccaatcatataagaacttacatgtgattatttttttaaacggttgttctttttttccgatcgtgcattaattggctcaactttatattaaaaactctgcatatgatatcaatccgattctcataatctttttggtcaattaaattgatgatgttcatttattttcttgtcactttgtgttgcaagtgaattagtaagaaataaatcaagatattcaacccatttacaaatagtcatatcatttcgataattttttactttatatcatggttccatgtgagtgatgaaggcaaaataattgattttctcccatttgaccaatctaaattaacatcatccattaaaccagtaaagatttgtcctgagtttttcttagttatttcatatccgtctaaatcattcttcctcaattattatataacaatccactatatattgttgcagcagtcaatcatctcgaaaaatagtgtgaccctcatttaatctttgttacagccttaagcaaaaatattctctcataattgtcaacattttttcttagaatcactctcatttgcatttttaggagtgtgaagtctatatccatttttagagtatgttataaacatgaatattggatggaaatctatgattctttggagtcctttagtttgataatctataataacattaagttcggagttctcttcattgaaatatacaaactattaagcctaataacattaagtttgaagttctcttcattgaaatatacaaactattaagcctgaagaaaaatattttaggggcaaatcactaataactatgtatatatataatatttttcttctttatataattggaaatttatgttttaaatttggaatttcggttcaattttcaatttatgttttctggaagggaagttttttactctagatcattgttgagtatttgtttcctttatatagtcttatttgattttccttcaattatattttaaatgtgggatcttcatttgttttaattaatgttgtaaattaatcaaacacttaaatttatattttgatgtaaggtaaacttattatataaggattcttccttgggagcagttggtggagaatgactcttaattattggagaatttgttggggggagaatgttcgtattttggagtaaaaaaaatggctactaagatccaattccttttttctctatggggaatcgggcttggctcaaggcttaaggtgattgatcgttgtacttgtccatgaggatagaaaatggagttctgttcattaaaagaatttcgatggcttcccactaacaagttcctttttctttttttgcaagaaaatgtttttcttttgtatgatttttgcaagaaaatgactaacacaaatctgtgctagtgttgtgtaaattgtatattagttatgttatactagtgttgatcctccagtccaggcaataatacaaatgagtgtatgactattacatatgcaataattgtatcagaaagcttatctcttttggtgaatatgaattattgtattgctcaaaacatccaaccaaacactttgaatccccttgaatctcattacacccctgtatatctatatatattactacaaaatggttcaagctaatctctatctatacacttgactttactag

SEQ ID NO: 38745 - DNA, 2376 bp, Cannabis sativa
  modified_base (277)..(287): a, c, t, g, unknown or other
tctcggtcaaaccatgtcacataatctacaataaatctaatttaaataatgtttaactattatacattatttaaatagcatatcataaatcatatcataatgatatcataaatatattataatcatatcataacaatataataattattataactacataataatcatatcgtaactatatcataatcatatcatattcatatcatgatcatattataatcatatcataaccatttcattatttacataatgcaaatccattgtatcgtccattatnnnnnnnnnnnaactagtttaaataatgcgaattcattgtaccgtccattatccaaacaacataactagtttaaataatgcaaagccattgtaccgaccatttattaatgaatcattgtaccgtccattattcaaaccacatattcatatctattgtttaaataatgcgaaccttactccacactcctttgaacatcatttcatacagaaaaggtaaaggtttctacttaatttccttaactcaaatgtggagttctaaccttgattacaatgagaatgatgatccttgagaaataattatcttacggaaaatctaaatttcttattaattagagtatataataagggtatatatgtattacttatatatatatatatatatatgaagctttaactttgaatttacaaactcaaaattataaaatgataccttagtttctaaagaaaactagcagaacactaaaacttgaatgtggagatagtggtggtgacatcgatatcttgaaagatttatatatatatgagaggaggattattttgtttggtgatactgatataaatgtataggagaggacaatggtggtgatattaatattgtggctaagatagtgtacctattatcaaaggagagatgaaaacatgaaaaataattggagatatcactaatcttttgtcaagaggttctttaccttttaccttaagggtgaaccactaatgatcctaaactcatctatttataggccaaagttcaactcaacctcacccattgacctttcaaaatcctaacctccctcatttattctctccatgatttcatcttatatttttaaattgtttaaaactcataaaaactctactctaactagcttggttggccacgtgtaattgctttttccacaaacacatgtttataaattcaaatctaaattcaaaaagatgctgaatttaaaagagtataagatttaaactattacattcaccttacaaatttgataacatagtttaggtaattaattgatttccttaaaaagtgaaccaatatttctatcatttaatctctactttgttgattgttgacaattttgaatttcttgcttctagatagttccatgcactcctacacgtatgaaaggttcctattaaacctcaatgatataaggattgagtatttgtttttgactaatgggagcataaccctccatagctcccacgtataccaagccttacctttccacattactaactaagccactaacttcactattttcatgttagcttcttatatgaataggtatacccctagtacctttattgcttctctttatttgaatcaaataacgctctataattttacatatctaatacatccaagcttactcttaacattaagtatcatttatattatattatattactccatcctatgcatgcatcaaaataatcttatattgccactgacacaaaatgtttaattcttactatatatcatatctcatatttattcgtaacttaattctcatataagtgtcaattattcactagtctacttaataaaggtttagagcccccattaaatatttgtgcatgaccaattataaaataaatagctatctcgtaataataataacattcttattttcacctaaaccaaattgtgaaatgaattatgcccaaatcccacaataatatttgaaaatctaatttatcaaaattagataattttcataacttaagaaaatacaataaaaataatatattctaagcaatcaactattttcacatcaatattactaaaactaagtactatagaataatagtcaatagtttggttattagtactaacaagtatgttgaattaacatcttaaatattaattctctaaaacaatgaaataaacagttaagggtttgagaaaaccttacattcactacaaggattagcactttcgcgggcgcaatttagcgtctgcaaaagtccaatacagctcctgcaaaagtattgcagacgaattttcgagcgtcctccagcgtccacaattgcgcgtctggaaaaatccgtgcgaacgggagttggagcgcgtacggaaagttaaaaactctt

SEQ ID NO: 38746 - DNA, 2043 bp, Cannabis sativa
cagctaaaaatctcaatgcattaatgcagatgaagtttttctttatgcatcgattgttgttgacactatcttgtgggttcgaaatgacaaggtacacaataataaattgaataatgtgaaacattcaattgactatattcattacacttatgtagatgctaaagcttctcttcttcctactcctaccccaatcttgttggatgagtggcgtccttccccgagattagcttaagctgaattgtgatattcaagtagggatgaaaagcacgtgtattgtggctgtagccaaaaaccgctatggtgaggtggcttgggtgcacacgactaatttagagttttctgatactctttgtggagaggcagtcgtttgttgcttggctttagaagtgacaatagataaaaattgcaaatttattattgtggagagcaattaaagggtagtcattaggagtcttgttgggcgtttcaaaacgttttgttaaagaatttctctttatttaattagctgttttttttagtattattttgttacctataatataactaagtgcacatttactcactaatttacttgtatcttctattcattgctaaaatattttgtaatgataatgaaatttaactttatttgatatatccacgttttttcttttgaaaaaataataataataataataaaatgatgcactattttttaaatctctgccctatttttctttttatttttctattactaattctgccttattctttaaaataattacacttcaaaatgattacaaacatgtaaggacaaaggaagggacagagagcacccccggtgaggggtcaaccaaaaaaaatgtgtataatgcatggaataatgagattaggagaaataataaaataatgataatataatgatatgatggataagtagatgaattaatggaatgaagaaggcaatgaataaggagagttagatggaggtaggatgactggtattagagttagtctcatgttgctaatgtgtggaaataaattgtgatatataagatgaatgtgctactcttcccatcattaattgtttttgagatggaaccccattcaccttatttccacattctaacatggtatcaaagccacttgtgatccgttgtgagctcaaattgccaccggttcaaatacttccgcctcccctttaacctctatttgacacctttcggctaatgtgtgccaatttccagtgttggggtctttgacttttttcaaaatctacaaatttatcgatgtgtacacccacaaatttcccgatatttggccttgtggtccggccctgtagtttcttaaaggtcgttcgttatacccacactttctaggcccaaacgtgagggtgggctactcctcctattgccaattaattttgaaatggaaccccattcaccttattccccacattctaacaactagttccactatttgactatatgagtgtgactaactagtcaaagtatttgataccaagtgccttaaaggtatttcatcaaaaaaaaaaaaagaaaaattccttaaaggttccgttccattccacttccttttatccactcacatgtttgtattgtaatatcaacatatatgagaatggtaatatatactcttgtgcatgtatatctacctgtatatgtatgtacgtacatacgaagacctaaactatatatcttgaaaatttgaagactctagtcagtaataataatcaacacttgaaaacatacaagagggaaatcaaaccatagtaccacactctctttattgatataacatcattgaatataagcacgcttttcataaaaaaaatatacacatatataagtataacaccattgaatccttcttacatatctgcctttccagctactacaacattttccacagataatgaagctttattattgtccgtgttcactgtttccacacgaaactttttatagatatcaccctgataaaacttcctcgtcctcgccactaaaaaaagagaaacgacagcaccaaaaaccgtaacgacag

SEQ ID NO: 38747 - DNA, 3537 bp, Cannabis sativa
  modified_base (2427)..(2436): a, c, t, g, unknown or other
  modified_base (2856)..(2876): a, c, t, g, unknown or other
  modified_base (2997)..(3009): a, c, t, g, unknown or other
aattttagattaacataaattaaaataattatttagaatttattttattaattcaaaattttatttaattttaaaatacatgtagattcgaattatgattattatatttacagaaaattaaatttaagttaaaaattaattcttaattaattttagaccaacttaaattaagtaattttcacaatatttatttgaatgatatatatactaaggatgaaaaataaatttttaatttatttttcagatctacctaagtaaaaaaattcaataaatattaaattaaaattcatatttagttcaactaaattaataattttaattaaatatataaatataaaaataaatagattgaaataaatatataaaatgaaaatacaatttatttaaaaaatattagctttaattttaagatattcgatctccattgttaatcttacatggttattatttttaatgggatctcgtggcgcttgacgtctccctgaaggaaggtcatctgttagacataacaccgtaagatcttgaaagataagtattttcatggattcatttttgaatagattcatccctaaagatgactgcttaaaaatgatttatgagtatgaaacaatggtagaagttcataaaataagaatgactctgactctcgcctaaatgagactactctatttgattaatgatatctttaacttttgcctaaatgggacattatatcaatttgttgaaaatcttagaaaatatttgagtagagatatgtttgttttgtattttttttttcatatcttcattacttgttgaatgtttacaaatttttaaaaattgtgtataaatttatattgaaccagcattagtttctgttattaatcatgtagtatcaatttcgaacttcattggtgatataacttggttgattgtttttaatgggacctcgtggcgcttcaccttcccctaaaggaaggtcatccattagacaatctaatagtattagatctcgacagataagtatttgtaagtaaaaaatctagttgactcatccctaatagataataacttaggctagtttttacaatgtcgaaataatggataactcgtaaaataagaataactttaactctcgcctaagcgggacatcattgaattttactttaatcgaaattgttctttagttttcttctatagctttttcattaagaaattacttaagatagtatatcattggacaataagatttataaaatatctgcttatgatgtcactcaattttattctataaaaataagtggtatgaatgatcatattctagatattctatcccgtaatgataacaatcctcaattttagaaaaatctcgtacttataaatgcttactaaaggcaacttaaacttagagttaaattaacactttagtggtggtccaagctagaataattactcattaaatatttggtataaatttatggttttaactttaaattttagattccaaataaaaatttaatttcagtttctataatacttgtacactacggtataactttcacaagttgttaatatctattttctatcaatgcatccaaagtgtatgttaaatttatggattatgagttttatattttgtgaccagaatcatcttgaactatttattgtaactaagcctaggaatcacaaaagaccacaataatacatctatgacatttacatcttgttcatagtagttttgacaagattattctctacaaagagaaaacatgccaatatccacttgaaagtgtgtccatctatattcgaacatatagatgtacattcagaggtggatatgagtaatcattaaattatgagacgatcactgtagaatatacattattcaaagaaatttgaaatttttgagaaatttcaagaatttctagcaatggcgaaaaccaataaggtaagtggttaaagatcttacgaactgatagaggtggaaaaatattttggttatgcatttcaaagatcattaagttgaacttcgaattatatctaaacttacctccgtagaactttggaatcgcataatgatgaaaatagtaaggtctataattagttattagcaactgccaaagtcattctagggatatgtcttatgttgaggtttgtgccttaaataaaattttatttcaatataatctattctattcaattattaataaagacacagatttattttcattacttatttaatgtgttatttagttcatgtaatcatttatttatttgatttataaattcatccaaatccttatcattgatattcttatttattgtgttatcaacacagtagaaagtaatcaagattgtgtgattaaatataatcctatgatttattagtacacatggtttaactgataggataatctacaatgtatttacttgcaccttggataagtnnnnnnnnnnttccaaggcattggttaaagtaagattgggttggatgtatggagtatgcattggaagagactgatattgaacttgaatcagatataataaacttaccgtaatatatattcaattcagtatcaccttgtttatcttagatcaaatgatctcaatcttgatatggttaggttctagttcagttgcattatttatgttcattaatctattcgttaaaatcaaccaatggatcttctcgtgacatataaattaagaatattgtagttcaattgagtgggagcgctaatcataaatacggaatctatagcctctatccatatatagaagtcaaacaatgatttccttcgagcttggctttatagaaataaatggttgagtactcgtttcagtgattatattagttcactggaatatcatttatannnnnnnnnnnnnnnnnnnnntaaaatacattgaagggtataatggtaaatttgtccctactcaatgtagatcatctatagaggatcattaattattaggattataacaaatggataatctcatagcttatctatatcgtgnnnnnnnnnnnnnattctatataattgagagtgtaatcctaaatttatagtggtgcgaggacgaattaataagttaggaaatttacttggtaaattctagatatgcttattggaagctcggttatataggatactaatggagacaaactgcttgtaagactcagttaattgattttatttaatcaaatataattctaaattagactatgtcttatttataaatttttactaagttatggcttgattatgaagaaataggattttagggtttatttgttaattgagagactttgtagagtctaattaataaataatataaataataattttatttaataattaattttcattattaaataaatagttttgacatttataggattagaatttaaaaatatggtatttgtgaaataatagataaatagttgagaaaaatggcatgaatataattagtgtagggcccactatgtggccgaccattaagtgtattttttgctattattttatcattttctattccatataattcaatcctaaccct

SEQ ID NO: 38748 - DNA, 1579 bp, Cannabis sativa
aattttcattaaaaaacaatcattttaataaaaacaattgttgtatatgaaggtgcacatgatgtaaatatttattctttagatctgcaaaataaaagaaaaataaattagtggatatagacctttcgaacttttattggctctcttttatagtaatttgatagaatgaatgtgacgggcttaaagattaataccctatatttatataaattaataaataagattttttttattaaaatttctgacacaataagtaattaataaaatattttaataattaatcaaaacaaattgggtggtaacaaaataaataatgaccatttattaaaatattttatcaattaagtaaatattgactttattatattgaatcaattaaaatcaataaatatattaataataatttaatttaatattaccttatataaatattctaacatcttgttcatgttttacattattgtccaaattaataaataaataaaattgattttggttcatgttgtattagtaaaggtagtttcttttgtttttaattcttatggtctagaaaggatatggaatcaattaaggaaagcaatgcttaagttgaccatgattatttaaaccctaccaagtttaaagcatgggaagaatcaaatcttgtacctttcaactctttttaagttgattatctcactttccatttttatctaatgtaaaggattatttcataaagtaggtgatgtgtgcaaaattctatacaaatttgccgcatttagattttttttataatagaagtaatagcaaaaattgatattttaaaaaccatattcaacaagcttattattcagtattttcattcatgtttctcaatttatatatagggtaggtctctacacatactttattacactttatttctatatatttgttttgattagtatttcatttaactaagaacttgtttttattatatcatgtgacttttgaagactttgtattcaaattaaatgtatgtttaatgttaaattatattattttggactctgtattttgtaataattacatattaggttctattttgttaaataacaaattagatctttttatttttcaaaatgatacaaaataatactcttagctgattttttatcaaaataaaacttaataatatataacctgatttagatgtgttgcaagactggttacatttcgtgcatatgttcatgatataaattatcttcaaattggttatactaaaaaataattgccgaaaattgagcttatagtattatttcatgatattttaacaaatacaaggtctaatttattatttaacaaacaaaggacttgaataatttttataaaatacagtatttaaaatggtattaatcattaaattaaatatttatatttttattaattgatgttaattacaaattaagagaaacagataatattagtttaagattagctagagtccaactcaaaacactcatttctttccactcttaaaaagatctttttgtttcttcactaacagtgacgaagccaaaaatttagttgagtgagggcttgaataaatattaaatcaaaa

SEQ ID NO: 38749 - DNA, 2649 bp, Cannabis sativa
atttacttagagaaaagagatataataaagcatcaagaaaaaagaaatttttactaacataattattatttactaaaatggaaaaatattatccccaactcaagttctaataagcaaagtaagtgaatttttagaaagaaaataataaaataaaataaataagtgtattagatattacattaacaactaacggttgtttaactattgaatttttcctttaaattcttcaacccttcaagatacttcggacaattcatttttctgtgtcccttgactttacaataaaaacattttcctttaggggttgacttagcttttttgttacttttctccacaagtatgttcttattaggctgattatttccctcgaattgcttccttttattaattgtacatgagggaaattcattgtgaacaacatttgcttcatttcccttttgcttaattgtacatgagggaagttggatgtcaatatttgcttcaccaccattttgcttagtctcataaacaacatttgcttcatcacttttttgcttagtttcaaaaactacaattgcttgatcgcccttttgcgtagtttcatacacaacaatcgctttatcatccttttgcttagtttcatgaacaacatttgcttcatcacttttttgcttaatttcaaaaatgacatatacttcatcagccttttgcttagtttcaaaatcgacattcgcttcatcaccctttttcttagtttctgaaacaacatttgcttcatcatttttttgcttagtttcataaacagcaattgtttcaacaccattttgcttagtttcatgaacaacatttgcttcttcattactcttttgtttagtttttgaaacaacatttgcttcttcatcatccttttgcttagtttcataatcaagaagcgcattcaacaactcataaacactaaatttacacttattgataacatagatggttcgaaattcatcaaaaattgatggcaaagcatgtaagattatagccacttgggtggcttgatcaattttcgctccattagaaagaacttcatgaaaattttgtatcatagaaaatacatattcatgaacatattgacccggcttcatcctgttatttataagatcatccatagtctcatgtatggctatttcaggatgagcaaacatattttctaaagatttcataatttcatgtgcagtttccatgtgttgatacatggttttaaacacgtcggacatgctattcaacaagtaagagcgagcaagctcattagatctaatccaatgatcatatttctttttagcattgtcagaatcatttacaagaggtttctcaggacaattctcaataagtacaaacatgattttctcaagtgtgagcacaattttcatgtcacacttccattttctaaaattactaccattcaatatgatattatttgactttgttgtagaagtttcaccaaccatattttctgaaaataataaaaataaacaaaaagtaaaaaaaaaatgatttatggcttgtttaatatgtaatattaaattattgttttatattaaataaggtaacatattatatttatataatattaggttaaatttagttaaaagtactcaagtaagaatttgtaaataatttctaaactaatacctcttaaatattatgattagttattaccaactcttgaaaataactagcctaatacacacaataattcaagaattgttattttttgtagaatttaatatttgaaaaacctaaaatataaaagaaccccatgttatattaacttattcatattattacacttgtcaaactcttaactcattataatagatcaatcagcaacaattatcactaagaattactattaaaatctcaccaagatcacatcacattcattcatacaaaattgttcgcataattcataaattatgaaaatttcaataacaaattctttataaacacaaatatcaatcatattcattaacccctagcataatatatatcttaattatcatttaaaatatccatccctattataaaatcaaatatatattattgcataaaaccacaatataatataacaaagattaaacatattaactcgatcataccttaatttgcttttcttgaatgttaatgatttctttggccttttcttggtcttctcttcttgaagacttttagaagggttttacaaataatattaaatggttcttctagggtttggaggtaaaaggctttggggttaagatatgtatttatagagttccttatatatattttagacgtgggagaatattacctaaaataaaagttaccaataaaattcgaatttgaatgtaattagagaaagtttcatgttattatcttttttttttcagaaccgactttattggttaaatttttaatatatacaggtagatatttttttatttttttttttacttattgttatctttttggttttaagttctaaccgataattccttttcaaagttttttttttttttgaaaaattcctttaaaaattgattttaatcttttttttttttgtttcaaacatatatatgggtgcaatctattattatctatatataggtattattagaaaaatttgaatttctataataaatt

SEQ ID NO: 38750 - DNA, 3156 bp, Cannabis sativa
gttatatacaaatagatcttggtttaattgttaatttatctaacagtgccacctcttatttacatatattatatattaatcaatggacattccgatccatatgtgtcattaataaattaattaatttactttaaaagtacatttgtcctaaaaaaatcgtagctaataaaagtttatatcccacctgacacatgattaatttttggctaattagtaatttttttctttgaactttgacacgtagtaaatcatgcccttgaactccttaaatttaacaatctcaatagtttgaggagaatttttaacagccaaaaaaattcaaatgcacaatttaatacgtgtcaaaattgagagggaaaaatcattaattaaccttaattttttgttcatcatgatcatgataaagcaaattcacctctctccatgattaattaatagtttcatattatattataaattttgaattgttaaacatgtataataatttacacgagagttggatacatatattccatttggctgaagaaaattaatttggaccaataatttggatttgacgtatttttggcgtgttataccttgttttccccaattttattatggctttcaaagaaggattgaccaataagtaattatatttgttggtccgtcaattctgaatagtttcataaagtccttttcatgaacagattttctttcttctttaaattgttatccaacgcactgtttaatgtttaattaatatataataaatgaactaaattatacagcaatactattatataatttagggtaatgctgatatatatgtaataaattacagcatttctaaaggttcatcattattccactaaattttattgcgttagattttaaatctacaccaaattaaaatataaatattcatttgttttagaaaatatatgtatattatttaattagttgaaagttaatatatacttattaattatattataaattagttactacataatataaattatgagatattttaaacaaattatttttatataaggtaatatttagtacggaaattaggacataaacatcaaatttgaaatttattaggaattaaaataaaaccttaatttgtcaatagtattttctttatggtaccaatattatttgtcaataatttagagatgatcaatataattataaatacattcaacgaatacttctatatattaatttgttgcaatagtagttagtgacagagaaaaacgtcaaacaaaaaaaaaccaaaaagatcaatcgttccgaaagtacagctgtatactttttgaactaaagagaattcatttatatacgtataataagtacgtggatcgaaacattcgttattgaccacgtacgtacgtaactgcgtatagtcccacacatgaaatcattcaactcatttgtgcaccaaggtccaaatatatatatcataaattaatatacatgagtcagctggtcctttaatttccagctccaggtaatacacatatacatataatattaataatagaaaaatgtatagatataagttcagggttattagctcatgcatgcatgttatatatcacataataattgagcgacaaaatgagtggcaaagtaaagatatatagatcatgatgaaattaattaaatgcgatcgataagccttaaattagagacaacgagacaaagaatatatatatatatatgataagaagtagacatttcaatattcaacgaatcaacatgtcgcgattatatatcactagacatttcatattatataattagaggccaacattgtttatatatataaattaatatatatatataattagtaatacgttatactacgtaaaaatacgtacctatatattgcttttgttttttttgtcgtttcactgcgatattcattagtaagatgatgtgtttgatgatccattaattgttatagggaatctggaaacatttttagaagattgattatgaactaaaaaaccatcaaaattcctaagaatataacaatggatcatcaacacatcatcttataggtagtaaaatttcaatatattgtgattgatttaactaagtatatataatatagttgtttcaaaaaaaaaatatatattatacaaatatggtaagatattcttctactatatatagatcaaaacgtgatcttataaatactaatttataaattcgaaacgattttttgtgaaagaaataaataataagaaaaccaaagattttatgtaagaaactagccgtggaaaataatttgatggtattactaatacagagtcagaattcaataaatgttttgcttattctagtgtagtttactctgttttttcttgattattaaactataacaagtaaaaacattcaattaatactaacgaatcacctatcttattcatatcaccatcaatttttttcttctcctataaatgcaaacaaactttcagcagcttttttccacttcatttgagaagcctccttcaaattaaacaatctttcatgaactctgattttacagaatgaccacaatactgctcacatttctccaaacacctcttcaactcgtctatcttttgttttaatattgttgggatttcatcttcaagtctttttgcttgattacctaggccttgcgcgcgttttacaaaagacgagtggaaatcaatttcaaagataaatcttagtaatgtctctgacttttgaaagaggccacttatcttagaagaacctcacttgtgaaaaaccgtggtaagcaaaagtataagatattgtatcacaaaaagcataaaaacaccgtataaacgaggaaatctctttcctagaggcagaaaaagagaaagaggccactcagtatcttttttcttctggtcgtcttttgacctcatcataataccatttgtattttttcttaaaccaatacggtcatcatgattcatcagtaaatgcatcaattataacctttaacgtttaaggactcggctacccctttttttctttatatttccagttatcttctcctaaatctttgaggtccacatctctaagatctcccgtaagcacctttataatctattcaagttcaatatgtgattaaattaagaattctaaaattttgctaataaattatat

SEQ ID NO: 38751 - DNA, 1917 bp, Cannabis sativa
taaatagaacaagatgatgcaagtggtcagggtaagtgatgatgctaagtgtttgtattttttcctcactcactaagtttgctgaagattgatagaagagattagctcccaaatcgatctatatttggaaagagctgcagtctggctttcggaagcaatttgtagctgcctgagactatgatataaaggtggggtcgatcactaatgtcaaacaacaggtaggaggtaggttcgacaatggagttctctagttctgaatttgttatttataattttaatgaatttaagagaatttataggtttttaatttaatttggtccattcacgcgctagccaaaatggagaatgttgtgaattgtggaagtttgagcgctttccgatgatggaaactaattctattagatttgcgctataaaatactgaagtagcacagtatatatacaccaatttttaattgattcaacgataattttaatgtaaatttaatgtttattatggatattaataaaaatttcccaacaacgaacaagtgtgaaaatgaattgtttttgtatttccaaactgattgggttataatgattaggttgtatagatataacaataaaatattctctacagctctacatttgacacgtgtaggaatgattccatagtatatggagctttgtgtgatctggatagaattatctagtatagaaaatagttatatatattctgtaataatcttttaattattttttcttctaatattaaagattttttcttctactaatcttttcccaattgtctatactttttaattgggtggggtttgatagttggtcaaggaactttgatagctggacggtttggttgggcaatgcaaggtctaacattgtggatagtgtgagaactcttttattagcagccgtggtttaccacttatggagcaactgaaacacttatttattctctttttactctaactcgatcatttgtatagtgaacaaaattaaaaataatgtgaagtataagttcttgttgatcaaagatagaaaaggtactagagtggagaagaatttactacaaagattgatttgtaactaataggttttgtgattgtgcttctcttggagaagtttatttgtttatattggcgagttgattaatgaaattcctcttcttcttgataaaaaaaaataggattagaattataaaagccaatattaccatattaatgtcaaaacacaaaagcataacaaatccaattaacatttgataattggactatatatatatatattaatacaattacaattctcatgaaattattaatttgagaccaaatatatatagtaatatatatgtggtgtggtgatgttatttttaagtagcatttgaattatataatggttgagtttgtagccatccatcttgattaatgaaagtgtttatattagtcaagaaactcctttcagcaggtgataatttcttctcccaactcactcttttagatttgtttgatccaggtccaaaacacatctcctcataaaaacttatgtccttcctattaataatacacaaacaaaaaatacatctcacattaatatttgtgtgtaaaaattttaaataattaagaaactacttttagctataactaaattataataatatgtgtcacattagcatattaaatactggattccaaaataataattaataccaaaattggatgaaaaaattcgcaatctaaaaattttcaatttttataagttatataaacaataatattttagttggttgtaataccgataagatatttactttttaatgaaaagatcagctttaaaataagtctttataaagtaacaaaagaacttatcacaaactttgtagatatttaattgtaaattagttaatttaggttatgttatatat

SEQ ID NO: 38752 - DNA, 1921 bp, Cannabis sativa
aaaagtgacatttcttgtagtggtgcttggaaatttagtggtgttaattggtggtgattgataaataatgttgtctgatgattttgattttatggttttgtggatttggggctcagcaatgacaatattaaacggtggcttcgacttaattaggtataaatatagattttttatataaaaaaaaataccatgtcttcagttatttaagatagatcctttgtatgtcttcaattttttcacgacctacggcttcgtctcaattatattcggagcgaaattttatttaactgaagataaattggcttaaaaccaaaaataaagccaattcttctagtaatatctaaacaattatatatgtatatgatcaaaggacgtttgcattctatatcaagggaatattcaccaactaatggactcaaggccgactcaaaggtggggtagtaggggcccacgcctaaggctccctacccaagcccaaaaaatttttaacaaaaaagctttaaatttatttttttaaaatacagtattttgtattttaactattatttattaaaaaataactatttaataaaaaaaatacttaatttattttttaagatattacatttaatattttattgagataaaatgcctatttatatttttaaaatactatattttagttttttaccactatgtatacaagaaaaaaaaatataaaacattttatataaaaaatgctcaattaaatttttttggctcaaggcccccaattagtttgagacgggcctgaatggacccaatcacaaacttttttaaaagtaaactagatagatcgaactcttactgaactactatatttatgtgtgttctttacttttttctttgcatagttgttgtttattaacagttttttttttttaattttattccattcgagtattcattaatctaaatgaatagtcactgttatattttggtgttgtttatttttttttttttttttgaacaacaatgcacatatatgctcaatactataaagtaaataaatttatgtgtagtaatatcttagtttaaatagtatatatgtactaattatatacatataataaactcacatatatataaatttattaagctaatattacgtgtaatacacgtatacttaattatatttttagttgtataattagattttaatttattatgtgatttagtaaataacatcatcttttattaaaaaaaaatattaaatgtaagtgttatttataaaagaaaatataataatatttaaaatttgttgtttattataattttagtttaaccataatatttttaaatttatttttataatattttttatttttctaagaaatattatacacttttttatttcttttttaaataataacaaaaaaaattgtaactgcaataaataacagtgtcacaatagtgattcgctaagaaacataaattccttttttatttcattgttttaaataataataataatagaaaattattttttttggatatatagattgggtaaaaaatgataataaaaagatattttttagatttgtacaatgaatttaaatttgaattacaatgtccaaaaaaaaaatttatattatataactacatttaatatatgataaaaaaaattaaaagagaaatgtataataaatttaaatttgaatgtaatgtattctttataaacatgaggagaatctttctcttttttttttatctctaatttaaatgaaccctactaatctattctattaattacaatatttagtaaataaatgaatgataatcaataccatatttaccttaagggcatttctaacgctagcaacgttggtagagcttatttttattttttaaaaatattaaatttaaatataccaataaaaaaaagggaaatttgaatttctat

SEQ ID NO: 38753 - DNA, 2304 bp, Cannabis sativa
ttttttttttttttttcactaaaagttttgttgaaggcaataacagactcagagaactaaacccccaaatccttaaaccctctccttacctcaatcgcaagccctaaagatggtagctttgatggctcgtttaatccgagcttctcaaaatgcgattcgccttcgttcttctcattctccttcctcttcacccacaatccaattctataattttcttcaccattccacaattcctctcctttcgccaaaatctcattcaactcctactgacatatcagggtctcttcctacatcacccctcgatgctaacatcgttagaatcctccgacacgagatcaagtaccaacctgagtacgctcctatacacgaggttggtttggttcccacttttattagcttcactgtaaaatcctgtaatggagtaaaacgatattgacaacaaggaaaaacattctagtgtcgcttgaaaactttaacaaaaatcgttaatcaatatttttattaattattgatgggatttccatgttttgctttgatattcattaaaaaatgttgcttgtgctgggaatttatgtgtagcctcctacgaaattcaaatcatttaatgtgcaagatcgaccttgtgagcaatggataacaatgagaggaaaatttggtgatgatgaagaaattaagttggaaattaccatgtttgatggttatgaactttgtcccaagcatgatggtgatggggaagatgtgattttacgcctcagtgtacttgttagtatttccaagagagatagttctgatgatttggagttcgtatgttcagcatggcctgatagttttgaagttcgccatgtttattcacttcaccgtgatcggaaacttaacaggcttccttatttgggacctgatatcaggtgtgaatctcattcattttcatttctgttgtgttaattaccatacacaatctttgattaatttaaatttagagaaagactgaaagaaaaaactcaaatccatatggttataatcatatataaaatgctagttgaggctagctctaggtatttgggtgtgttagtttgtggggaggggacatggattcattcaattcaccattgtaaattgataggccttaggataataaataaaaagggtacagatattggtatgatttatagagtggaggttgaatcagatagtctcattcgtaattcttttataatgctttttggttttggcttagtggtgaatgaatttgtactgaacagtagctcttgtctttggctttgggagaatattgggtctctcgaatacccagtggctcattgtttccttacttttatcttttagtatcaatatagcagcacttagctctatttttctgctctatttgctactgtccttaccaaattgatagcaagttcccatcataaatcaaatgcatcttaatgttttgtggacatgagtttcttagttactttgctggtttgatttttccttttttttttttggctttttttttttcttatcagggaattgaataagaattttcagaaggcatttcgtgactacttaggagcaaggggaattgatgaggagctttctttcttcttacatgattatatgatgaacaaagataggattgaacttgtacaatggttaacaactgttaagtcttatgtggaaaaataaggtgaaaatctttgactgtcttatgtgagatttcttaacaattttcaataatgtggatgattgggaacaattttgagtccttaattacatgtcttacgagggagcatgaatatacatgctattacacatgtaagcattggttagaaaaacacaatatagccgtttaagaatgaaatatcagtttcttattagaaaatttgtaccctctgttactccaagaatgtttaagaggaaacaagactattttgtaagtttaggcttttttgcctttgtatctgtgctataccttgtaaacttttgacctatgtaattttgatcagtagaaatatgtatttttttctcttatacattgtcgaacagaagattaaattaatgttggttactggagtactttgtcatagttactcaaactagtatctgttgatgtacttgaaaatctgtattgaaagctttgaaattcaaaccactccatgttatggttgaagttggttctttacttttaggccattattatggtaaaactcagaagactactattctgtcattgtggttgaaattgaataattggcttagtactagttttattcatctagagagtttatggacacatgggtggtttag

SEQ ID NO: 38754 - DNA, 1482 bp, Cannabis sativa
aactttttataattttaattaattattttttcaattttgaatttatatattaattttattttctactcaacaataattatagttaaaagagtacaaaataatatttaagttatttaattttaaaataatcaatacaatcaacaatataattatactaataatcatagtataagtggtaaaattctgttacatcaacaattattataagttgaatatatatatgttcatatagaaactaggtctcactgtcaaacattaaccaagaaagagctataacatcgttttataacttttctttggaattatcgtttaattccctttgaaccctttttccaaaaaagacgaaaaaaattggaggaaaaaaaaaagtatgcatggccatagcatgggaaaaggtaagagtgaaatttctgtcagaatggaaagcagcaaacagtggtccttaaactgagcttttcacaataaagtactagccttgttgtaaaaaaaataaaaataaaattgtattaataataaaaaaaaagggtatgagataggctgtttctgggtctggggtcacttttggttttggcccatctaaaatcctattggaaacttcaattaatgctattagaacccacaaaaagcattagtaagatttgggtgtgtgtgaaatagttaaatgtgatgtgattttcttttcaaaaaattattcttaaacattggcgaggatggtaaagttgcattgattgtatttttctttcttcctttttctttttttggggtattaatttcaaaagtggcactgaaaatggttatgtagaaactttgatttttaagggtagaaaaagacactctgactctccagataagaagggaaaaaaaaagttattttagaaacataaagtactgtaatgggtccaaaacagtgaactactttcacttccatatgaaatatagaattttgtaattaccttttctgatgagaaattaaaacaacaaattatccaaaattttaactgatcttcagttaaaaatatctatatcaataactagtggcgcagggtatggttgattgcaccaacggctcattttagcataatgcatagagcaggtaattttagtttttcaaggcacacaagacaaagagaaacaggtgcctcggtttcggttttgagcagagagaaaagagaaaatgggagaaattaggggggaatattcgggtgtatttggaccagacaaaaaggatattcagaggggcgatagagaagaatattacgacacgtgtcacgaggagaatctgttttcctttctttcgaaaatcaccaaagaagaaagagagagagagagagagaatcttgagaggaaagggaaaagggaagggttggagtattgtactagaagactgattttagaaagtgaccaaccatcattattattactatcatagccacaccactcctttctttttcttcctcttctttctctttctttctttctttc

SEQ ID NO: 38755 - DNA, 5713 bp, Cannabis sativa
  modified_base (5400)..(5414): a, c, t, g, unknown or other
  modified_base (5590)..(5598): a, c, t, g, unknown or other
caaggtctgcacggcatggctgattttcacaatacacccctcagggtatggccagccaacccctatcttttcagaatctacaacctctcgaaggagggccaatcaatcatgtccccacagaaacagatccttctgtgcaagcactattggaccaacttgtggacgtgatccaaggcatagctggaccgaagcctttagacctccaacttgatcgctcaaggggatcaccattctcggcatatataaatgccatacctctactggacgagaagacctggttgctcacatcaagtacttcaagatgcagctcgacctccagaaggtcactggtgatgcgcattgtcgcatattcccagccacactgccagagagagcgcaacagtggtactttaaactcaccccgaggagattcaactcctgggttcaattctcacaagaattttacacacaattcacatccttgagacttgtaccatcgcagttggaagaccttgtcaaagtcaaatagtgaaaaagggaacctctgaaggattatatttagcgatttatggctgaggctaccaaagtcgaaggccttactgaagaaggttgatatacgaccatactgcgggcatatactcccgctatgcgacttctgtaaagatatccgaaggatatttagcaacaacatgaaggagttcctcaatagaatagacaactttatcaaacttgaagaagccatacaacatgcccaggcggggcatgtcaatagtaggcagtcatgaggcgcccaacagcctcatgacccaccaggcgcacaggcaagcaacagcagtgctgtccagacctctagtggtaaaaacactagaaacacgcacacacaaacaactttgggaggaacaatggcaaaaaggggaagcttaacacgtctcccacaccacaaaagaataaggaggagaagtacagttgcttcaacctcctaagtcagaagccagataccatctacatggccacccaaggaacggtcccataccgaaagccctttccagaagggagatgggaaagaggggcatggcaaagttttgtagatatcacaatgacttcggccatgacactaatgagtgtcaaaatctgaagagggagattgagtacataataaggcgtaacaatccccacttgcgttgttatgtgcaagacgatcagacctaggcgcaaggaggtcaaaaaggagattcaatgccaccacccatggcagaacatttagcggtcatcataagcggcccccacattgttggcgaaaccagaaaagctcagaagcgctatgctcaaacactctgtcacgagcccaaaggcaaagtcctagttgttgaagaccagagctcttaggagcagaaacccataaagcccacaatctcctttggcaaagaagatgcagccctggtcagtttcccgcataatgatcccttggtcattactttgcaaatcaggaatatgattgtggctagatgtatggtggacgacgacgcctcctccaacattcttttcaaatcaacatatgaaaatatggagctccaactcaccgacctggcgccttgcaaccaagtgatgtaaagatttttcatctggcatcacacctgtcaggtatattagatactcctcacaattggagagaatccaacatcaaaaacattgatggcatagtttgttctgatcgacgttccctcggcttttaatgccatgattgggcaactggccctcaacaacttgaaggcagtgacgtttatctaccacttgttcctcaaattcccaacaaggcacagagtggcttgcatgagggggagaccaacagtctacccatcactattacaacttggccttatctaaggccaaaaaggagaagatgccaaccagaagtcaagaagatgagcctttcaaggggcaatgaagtctagcaaagtcggggacacatgcatagatcctcacattgaggattctatagcaagcttctgaactgtagaagagttggaagaagtggaggttgatcccactcatccaacaagaagactaaagatcggtcaacgtttggctccagaaattaagtcagtcttgacaaaatttctaagggcaaacctacacctattcgcatggtcacatgaaaacattgatcccaacatttggcctgttcaaccaaaaaggaggttgctagacaaggagggtttgcatgcgctaaaagatgaagttgaacgactgagggtcaatgacttcataatagaagcattgtaccctcagtgggtgtccaatcatgtgttggtacctaagcccaacaagaagtggagagtctgcattgaatttaccaacctgaacaaagcatgtccaaaatagtgcttcccgctgcccataattgaccagctagtggatgccacggctggccaggaagtcctagttttatggacgcatattcaggttacaatcaaataaagatgtatccacctaatcagaagaaaaccagcttcatgatagacctaggcctatattgttacaaagtcatgcccttcgggctaaagaatgcaagggccacttatcaaaggctggtgaacatgatgttcatagatcatcggtcgcaacatggaggtgtatgtggacaacatgctcgtcaagtccaaaaaggcttgtgacaagtggatgacctaggtgagtgcttcaaaatctttcgccgctacaacatgaagctcaaccgcctcaaatgctcttttggcataagctctggaaaattcctttagtcaatgctaggggaatagaagcaaatcaaaaaaggatccaatcccttttgaacatgaagtcaccaacaattgtcaaagaagtaaaaatcctaactggacgcattactgcactaagcaaatttgtgtccaagtctacagacaaatgtgtacccttcttcaacattcttagaggcaacaaaaaaattgagtggacagaggaatgtgaaaacgtattctcggagctgaagaagcaattggcctaaccaccggtgttgtctaaacccccagaaaattaagagctaggcatgtccctagtagcacaaagctcgctatgagtgctatcctcacgagagaagaaggcggtgtgcaacaccctatatactgcattagcaaaaggctagttgatgcagaaagttgatacccactcatgaagaagctgacctacaacttgctcttggcttccagaaatctaaggccctatttccaggcacaccccataaaggtgtacaccgatcaaccactgcgacaggttctacagaaaactgaagcataaggcttactactcaaatgggccatagaacttggacagttcgagatcacataccagtcaagaatagccttaaaggattaagcccttgtagactttgtggctgagtacaccaacttaactcttgaggtctctcaagactcatgagaacagcaagagccagagaaaaagcatgagcacgagcaacaacagcaccatgttgactgaagttgaactgaccaattgtccgatgcaggcattgcccttacaacacttgggggtaagaactacacgaagcaatcaaattcaacttcaaagcctcaaacaatgaggctgaatatgaagccctgatagttggcctcaagctggcgcaagaagaacaggctgaacacctggacatattcagtgattctcaactagttgtgaatcaaatcatgagtgaatacacagctcgagctgatagaatggtggcctacttgagaaaaatcaaagacttgttaagtttgctcaaaggctacacaatcaagaagatccccaaaaaacagaatgcaacagcaatgcacctgctcccctagcgagcagtaccatagctaacaaagcaaacttggtgcccatccagttcctagaagaacccagcattgttgtcccaaaggaggtcgacatgctggatgacactccaacatggatgacacctagcacagcttacctccaaaccgaagccttgctagatgataaaaacgaggcaagtaaactaaaaagaaaagttgctcggtacctgatcctagacaggataatgtacagacagagtttctctatgcctctcttcaggtgcatcaccaaagccaaagctgaacgacttatgatagaagtgcatgaaggcttccgtgagaatcatgccgggggcaaagcttgtcgaaaaagataatctgatagggtcagttttcgccaacgatgatcaaagactcaatggactatgttagaaaatgtgataagttctagagattttcaaagataccaagagctccaccaaacaagcttacaatgatgcagtctccttggcccttcacagtgtgggggatagacctaattggtcaattcccaaagggaaaaggagtggtacagtttgctgttctcactacagactacttaaccaaatggatagaagttgaacacctggtgacaatcacctccaagaaggttcttgactttgttgtcaagaacatcatatgccagttcggccttccccaaatgattgtgtcaaacaacgacaaacagttcaatagtgacatgttcactgatttttgcaaccagcatggcatcatgaagagcttctctgtcctggcccatcctcaagcaaatgggtaggtagaagttgtcaacaaaaccctcaaggacacccttaagaagtgccttgatgaagcaaaaagcatctggcttgaactgctcccagaggtcctaaggtcacatagaacacgatcactaggcaaactccatttgctctagcttatggctacgaggcaatgttgcctgctagtgccaccgtctcacagaagaacaactatgaacaacaaacaaatagcaccctactggcagggtcccttgacaaagtagaagaaagaagagaacaagccaacctaaagctgcaggcctaccagcaaaaggtagcaaggcacttcaacaaacacgttaagagcaaaaaattattcacaggagatatggtgcttagaagagtgttcttatgcactaaagactcagtagtaggagtacttgtacctaactaggaaggcccttatcaagttataaaaataactagtaagggaagcctacaagttgggaaggtgcaacgaaaacatggagctcggtctcctaccaagatactagaatggaaagcacctccacaaatactaccaataacaagcatacagaactctactccactgtagcggttctatctgctcaacattagagtacaaaaagtgctagtacccacgacccttcttgggcatggtctcccactgttctccaacagtggcctttgctttggtaggcgagcaggggtagccacttgacatttacaagctaaatttgtgtaacataggcttgtagattcaatttgttgacttcacttttagccannnnnnnnnnnnnnnttttataagcgataaacgatgtgtagtaacatatgataataaaacaataataagacacataaattttatagaagttcagccccgagcagttcggtaatagcctaatcctcattttttgtattgacttaagatcaaggaagaagattcctttttttatagctcttacaacagtatcnnnnnnnnnataattcttagataataatatagtcttagcttaggtgcgtttcgactttccgatcccccatgcccagtgaatatgcattactatttatagggctgggaaacttgaggaggaagag

SEQ ID NO: 38756 - DNA, 1700 bp, Cannabis sativa
tcaggaatgatatcagtggcaccatggggaatcgaactcttaaaaacaaccaaatgagggatcttatactaataaaattaatctattcaaatgtccaattatatatatttatttagagcaaaataagggaatgagataatcattgaaaatacttaaaattgacttgttttaaattaacttcttacttatcatttgcgtgaaagtttactaaatgcttaatttcacatctaaactaactaataacctcaaaataaaattgtatttcatacgcaacttctaataataataattcaaaatgataaattgtatataattaatttagaatataagaaatcctatcatatttggaaatgaatttcgattctcatgcaaaaaccttaaaataatttccatcaaatatatatatatattttggtattattagtctcttatttgacttgattaatctcactaaacaaaattaattattcaagctaagttaagaaaataataacttgagaacaaataatctcattgtagaagtaataataatattatttgaagacaaaaatatatatagtctaattttggtcaatcacggcatatatgaaactcacgtgattgattgacttgtaccaactgcaattcacataaaataaaataataataaaaaaaaaacatatatacttttttttttctattaaaagaaataaataaaagtattttattttttttattattattattatttctttttgtaaggaaaggaaactatttttaaacactaattatcaacttttgcaagaaataatactatataacaaaaaatcttgattctttgatagaggaaaatcatgtttaacattctatgatttgatttgatttgctttgtactctatgtctatccacatctttattgaggttgatacaaatatatctaatatattattacgtatcaaatttaatatattttaatttaaaaattattatcaactaattatttataaaatgataccagacattagtgtctaataacacaatactctataaataaatatcatcacgtacgttattattatttttataaaatattaggagtattcatataatctgtaatctgtaattctaaacctcaaccaatttggactaaactatttgagatcggaccaaatgaatccggtgtgaatgatttgaccaattcgaaatattttaaattctttgactcggtcgtggttttagaaatctcaatagcggtttaaaccaaactaattcgtataattattatatatatacttaatatattttttttagacaaaatgttggtatttaaaaataactttaagtagaatgttgatattgagtttacattgttacaataataatttttttatcgttacttatgtattataaacttattaaaagtaaaaaaaaaaatactaaaaaatatgaacaattattgtgaaaaaaaaaattaaaacaactaggaaatataaattatggttcaaactaaatcaatccatttttgagtggtttggtttgattattttattggtctggtttggttttaaattttaaaaaaaattgaaattagctagtttgatttgaaaaaattgaaaatctcgactaaatcaatctatgaacacctccatgaaatattatattgttattaaatattaaatttcatatattttaatttaaaaattagggtaaatagtggcata

SEQ ID NO: 38757 - DNA, 3886 bp, Cannabis sativa
ttgattaattgcataatgttgtgtcaaaagtattaatttaccgaaataagcttaattttctaattcaccccttcttggaaacatatcttaggttaacaatattttcatgttagtatcaagaaaagaagagaaggcaacaaaatttttaatttcataaatgaccaaggtacaattgttgatgaatattctgatgtgctggatcattttttatcacattttaggagcattatgggcagccaaagttcagcaactattaaaattaagtcaatgcattgaccttggttataagtttttcctggatcaatgggttcaattgacaaatcctttttcttttagagaaattaagaaggttggtttcagcatccccaacactaaaagtcctggccctaatggtttttgttaagttttttgaaggagatgtggcttgagattggtcaagaagttagcaatgacattgtccatttctttaaaacaggtatgatcccacctaaaaatcaatgaattgttatatctttggtcccaaaaattaataacccttcttaggttgttgactatctaatatcccctttgctttttgttctaatcatgaaatatcttacaagaaggcttcaactagcaataacaagaaaagctttaagtatcaccctatgtgcaaaattttgaattcataagtcgctgctttgtatatgacttaagaggtccctatgaggcctactaaatggaaaatgattgatagtgatgttattatcaagaaattaagcttagagttcatactagggctagtaggcatttatcgtttactggtagaattcagcttatccatttcgtgcttcttaggcttcaaaattattggatgagtatttatgtgcttcctcaaagtgttcttaaagaggttgagaggtttgtcgagatttcctttgaagtcagaatggaaatagaagcaagatacacattgcttctttgggagaacgtatgccttcctaagtcgcttggaggtcttggctttaaggaaggtttgaagtggaataaaggaatccttgccaagtatttatgggttgtgactgaaaagcttgatattttatgggttaaatgggtcaacgctattgatcttaagggattagatttgggaggacaacttaaaccagatacaagctggtattgatctaacctgtgccatttcagataaatatttgacaagaaaagcattgttgttgctgggaatcatggtaagttcaaaattgaaaaattgtataacaatcttctgcattagattccagtgagccacaagagtgcattgcagtgtagacttattctttccaaacaaaggtttataatctggcatgtagtgaatttccatctcttaacacgagaccttcccaagttccatattcttattgattctttgctttgtctagtatctgttttggtgaataagagttatgctcatttgctctttgagtgttccttttctcaaagaatagtgtgcttgttttttgcttggattagtttttcggcttggcctctagattttaataatttgaaaatatggttaaactctaaaagaaattgaatgaaagctgatattattaatgctaccgttgcagcgatatgtattgcatttgcatgaacaaaaattaatgtgttcatgatggttactcgcactgtcttgtatatccagcagaaagtcaagagtacttcaacagagaataacaagtctaaatcattggaaatgcaatatttttgaagaaaggttcattagtcatttgattaatgtgttaagctttataccaaaaaaaaatgtaagtaatataaattgtgagatgttttaactaaataatttttttgggtgtcgtacttcatgtgatgtctagtgttaaaccatttgacttgttgcacaaaaagtaatatattctgcctcgcattagtaaaaaatgtacatcaaaataatataaccattattggagattatgtaagattgaaatgaagatagaaaaataaaaagaaaaaccctttataatttatcttgccaaaagtagagaatagggacaataaattattatattaccctcgttaatagttattacaatcaaaagtaaacaaacaaaacagtaatctttcttataagaactactttttccttcttaagaaaagtaattatttttttttttcatttcaaaattttccatctcttgattctttatccctgtgctaacattataaacatctatttccatcaattttaaaggaaaaaaatatttgttagaagataggttaaaaagtcaaaaaaaattatatttgttatgcccttaaactcagctaagcattttaccattaagtctatgcgagccttcacatttgttcaacccaggagaagagatctttactaggattaagaaactaagaatttacaaggtagccataaccccatgatgccaagccataattctatgatagggttttggtaattgaatagcgaagcacaaaaaggtgccaccactaaactattctgcgagccatctttctggtcccttgacttccctttctcatccgttcaggatggaaaaatgaaacaccatccgtgcttggtgctgagtccttcatgtctcctgaaagatcccaaaaaaataaataaataagatagatgctcacttttaacgaaatggcaattggtaaattaaggaacactagcccttgatgaactttacttgcattgaccaaattcactaaacctgaacaatgcacttaatgagcatcggaagcagagataaggttatggttattggaatttaattatccttcaaatataagttgaatgacataaaagtacaagtaaataaagatcacaggaagaaacagatgccaatgattattttgctttaatcattaacatacaaaaatatttcaagataatatttctttaacaatcatttatgtgacaagccaaatacccgacttcattattccataaattccaaatgaacaatttcagacctgaggtatctaatttttgtaggcattacaaatgattattctcgtgtcacttggttgttttttaggaagaatcgttctgaattgttctccatttttgtaccttttgtgttgaaattcaaaatcactttaatatgtctattcgtactttgagaagtgataatgcaaaagagtacaaatctggtgtctttcaatcttacatggattaaaacggcatgcttcatgaaacttcttgtgttgatactccatctcaaaatggtgtagccgaacggaaaaatagacatctgcttgaaacagctagaactctcttatttcaaactaatgttcctaaaccattttgggccgatgcagtttctactacttgtcttttgattaatcgtatgccatcttctattcttcatgatgaaatcccttacaaaattcttttcccaataagctattatttcctattgagccaaaaaaatttggaagcacttgctttgttcgtgatgttcgtccacatgtcaataattagatcccaagtcattgatgtgtgtattttttaattagtctagtctccaaaaagggtataggtgttattgtcccgatcttaacaaatatcttgtttctatcgatgtcacttgcatcttcgtcgtcaaattcggaactcacaaatgatcttcccattgcactacgtaaaggtatatgctaatgtactttcctcttcttcttgctcttttattgcttctattgattctatcactattcctataacagttcgtgaagcaatatcttaacctggttgccttgctgtgatgatagaagagatgaatgctttaattgcaaatggtatttgggtcttggttaatttaccttcaggaaaacgggtcatagagtgcaaatgggtatttacggttaa

SEQ ID NO: 38758 - DNA, 1835 bp, Cannabis sativa
atcactaagctacatcgccatttagaggtagaatgaacttatatatattatttattttgtctgatttcaatctattttttttttctatagttaaattttgttaaaatcccaaaaatatatacaaatataaaaaataaaaacattcaagtttccaacccacaataaattcattcatttattaaagagtaaataataatcattattaggatagtactttttatttatttttgggaaagaaatgtatttgggtagtacatacaataacaatacaagactatgtaataaagtagtattagtaaatactaaaatagttattgttacaattttagataggtcccaatcccaagtctatatatatagtccatacaccatatgaccccaatagattcagccacgtgttaagtattttccaatgaatcacgtctccttaagatgattcttttttttatttatttattataaaaaagataatgttataagaaatagaagtgctaaaagtattactgatccttagtatatttttatgtgttaacgtcgctattagtttaactaagtatcgaatcatatatagtatgatgtaataatttttagaaaatatcgctaatcagttaaaagacgacatgtgtatatagcaccactaatatctaataataatactctaaaagaaactaatgtgattgactataatattttgatggatacaattaaatttatttcaaccaatcatatttatttttggcgagaatgactatgttaaaaaataatatcacatgttttggtacataatttttgaaaaaaattgtagtacactcttttaaaaaaaaagtattttgatataaatcttctatttattttgacataatttttagtatgagtgaaattcgatcactgaacatttataaattataactgtataaaattaatcatatgattttgagcaatttttagcaactggtaggtttttggtagttttgatttaactattttttttttcaaaaaacaaaacagaccgtcatgtcaaaaaaaccgtaaccaaaactgattattgaattcggtgatggcgtgcctccaaatattcaattacgatctagtcagttttaattttttagattttatgaacacgtctagtttttagatttttttttatgatcgtatatattgtagttatttaataatacttgtaaatttttaaaaacattaaatagtttatagtgctgaaaatagagatcaaacaattatttaccacacataataaaaaataatcacacatataactaaatatttaaatttattttccacattataaactactccaacaaaaattccataatttttacacacatgattattattagtcttcctctcaaaaaacaaaaaagattatttatggaccatatattatgtatagtctctagtctatatggtccatctccatatagcccatctatcttaattaattcctactccatgaaccatcatatacatggaccatagtccatagctacaaaacaaaccacctaaaacaaagaaagtctccatattaagaaaaccaaacatgtcataaaattgaatcagtgatgttatcatagtgatgttaattgtccaataagtgtattccacatgttattatcataaataaatgtgtgtgaacttataaataaatagaattagactaaaaaaaaattaaaatacaaaaaaatattaatataacaacaataattataaacaatatttaatattatatcattaaaaaattatttttaaataaatataatatgagtttttttataattaaacctctcaactatcactctacttgcacttaattctctaag

SEQ ID NO: 38759 - DNA, 4314 bp, Cannabis sativa
gtctgttgactcatcagtttgctaccttgtgtaggtaagggaatggctaaagcagaagaacagtgagatggaggctcgacaatgattgtacatatcgcggcagtgtaacctaaaggtttcgatcatattgtattttgggatagattttgttgtcatcatgtgatatatgaaatatataaaagaaaattatatgtatattttgtattttccaaatgtggttttgaatgcgggatcccgacttataaaattttatgtgtatatctatgaatggttataattggttttatatggttaaagtcttaaataaatagttttcaagtttgggttttacaatatgatgcaaaaagaaagaagcatatgtaaagaaatcaaatggaaaaaataaagagattaattagggaaaaaccacttactagtttgacggaaaaatttgggtctcgaagaactttctaataaaaactcctggtttgagaggcctggaccttggtgattttgaggttgagaaatgcaatcggttgaaatttgaataaaataagtaagagacagtgagggcatgcaattttagaaaagaaagtggctgatatttttttgagttctaagggcttcgtgggtgagaatggcgaaagtgaagggattttgaaacttatacccaaaaggtgacaaccgttcgatcacgatgatgataaatcgaacacatgggaactattgaaaagagaaatgttggagtattaaatgctaaaatgatttaccttgatgttttaaactaccaaaataaaagcatgcaatttttaaatgggaaaagtacaatcgtacccgtaattaaaaaatcatttatattttaaaaagcagcttttagggagaaattgttatactcatattttgagcaacaatatggtgctgacacatgtaatatagctggaatacgaaccaacacaaattatgcattaatatatgcattcagatgactcgcctcgggaagtacaattgatagaaatactcaaactcaccactttgtagacaatggtagacacgagtactaactatcgatcgatgagaccgacgagacgagtaaagaaagtccatcttgggttaaatagaatacattacataattgtttggaaagggtagataatgattttgcagctcattgacccacatacacttgagtatgtttaaagaaagacaagaactttcaacatgatacatctcgcttttgtcatactgtaccaagcatctcgcatatacctcactcaacattaatagaagaacgtgaggaatacttcaacatatacttagatgctggctcacgatgaagtgcttagaaaagtattgattgaattgtgagaagtatgaagtgtagtcaacataactgtctatagataaagacaaagagcaattacaacggttatttataattatcccttgtgatgtaaatatgaaatgtggggaatgtctacgtttcatgaacagttataaatgataagatcccaagagaataactatcatcctagactcctataaatagagacaaaattcagggaacatgggacgactatttttagggaaaagagagagaattatatccattattcattctgtaaaataattaattatattttgtatacaattgatcaacacaaaataagatggacttgtgaactatgaagaattaacttcaaaaccacgtaaaaaccttcttgtcatttattgctattattattattaattattacttaattaattatgaaaatcatttattacaaaaaagacttatttattagttaacaaaaatctgcgttaacaaatttctttatgtgttaattatggaactagaaagttgcgcacaaatttagatgagaactaaattatactttcactagtgaattaatgctactaaaggagaaataagtaattagaagagtaaaatggtaaattgaccaaaactaattacgaaccaacacaaggagggctaatcactggaattgattgtatcaatagacaatgcaataaaactcagtaaatataatcctatacttactaagacttcaatttcatatttatagtagagtaattatggaattaataaacaagattatttagttgatgagactcaataaataatctagtttattggagcctaaaattataggtctatagtccccaaatcgccaccttgaacactatcaagggtaaggatagatagttgtataatgttgtttggaaaaatctatttagtaattttttatttttgtaacaataatttttcaaatttaaatagaaaaaaagacaaaagttgtcaagacaaaaagcacattcattttcttaagcaagacatcagaggcgccacatgcgctgtgtcgagaaactgtgcatgcgccccatacagtgggagtctttattggttttatctttttgggttaattaataattaattaattcaattagataaatattttaatttcaaaagtagttaaatatattttcagttgattaattctcttaaagtagttgagatattctctcgaagttggttgagatattctctcaagtagttgagagattccctcatcagaaatattagtaaccgattcagttatagatacttatttgaataattatatatgatttaatttattaaatttattattataaatagatgtctaatttgagaactcagaacacacttttatatacactattttcgatacactatttttgaaatatacaaagaaagggaagattatttttctctcaagaacagttcttgctcatgtgttgaggattcaacaagaacaaattatacactttatcctagtagctctcactactccatgtgtgtggtggattgatttggaagactacgatgtgggatttattagatccaaattacgagaagtttcgaggatatcctgatagtcatcaagatgtatttattcctttcatgtaatttattttttaagatttaatgtatatacatgtggagatctttggactatgatacaatgataatcagataattattattctactacgtacttgatttagtactataaaactaacacgccgggcctgaccccaatctcggccatagatctcgaactctgtccccggtcctagcctcgaaccctgtccccagtcctggccccaaaccctagctcggacctagacccgaatcctggccctggaccttgatcttgctcccgtcctcagcctggccctgaccatggcccggacccgaactaaaaatgaggagagaagtgatgagagagaaaataatgtaagaaaataatgaatgagaaagcaatgagagagaaggagagagagatagagaaagtgatgagagagaaaatgatataaaaaatgatgtgagataaagtgaaaaaaaaatattgaccaaaagtaaattattttttaaaacagaaaacaacatttcgttgttatcaaaattcttctttttttttttttttaactttgaatctgaaaattattttaaaaaaacaagaccaaacacaccttattgttttcaaaaaaataatttttatttttaaaaataaaaaacaattatttagttatgataggaaacattggttgattattttataaataatttaatcgctaatgacacatggcaattcttaataggatagacaggaaattagacacccttcgttgacagaggatccgcttccaatatcatatacaacattggctttttttaaaagaaaaaagaaatattgcatacaacaaacaaactgcgagcgaagtgtgttcaatacttctctctctgctccctccaattctaagatggcctcttctccctaccgagatcgaaccttcgagttccgatctcttaccgatactctcaaaaagatcggaggaatctcagccgttaataatgcagaaaactattcgtctacacctgaaacctccctacatgcctcgccttctagttctagatcccaatttaataagaaagcctcgctgatcgggttgggcatccatgaagcctctcagaaaatcgccaagctcgctcagtgtatgtactcgttgctccttttatttgtctttgttcttatttttctgttactacgtaagaaaatacaacggaaaagataaagaattggttgttgaattttcaattcaattattgatttatgtgaaaatagcgattgcaaatttacatgtggactcacttttgggatttatttgaatccgactgtgattgataacaagggtagaattgaatatgagtaaaaacttaattaagaagattttatcattcggtgttgaagatttttcgaattcaatttccat

SEQ ID NO: 38760 - DNA, 2496 bp, Cannabis sativa
atatatatatatataattttcacaataatactaaactatatccatgtaactctaatatccgtccgacatattaacactgttactgggcataaaaatatgaagatatgaaatttcacacatagtatgcataagaaattgagaaataataaaccaaatgcctacttcatgagaatatgactcaaatgacataaaatataaatttaatcacataatacaattaattagtgttaagtgtcttactaatatcatgtctaagtatgtcggtcattacaaagctagtaacgaacaagtcaaaaatctcaagcaatataattagcttaaagtttaaccatctcaagattgagatcaaattgatctatgatcaactaattgatattgacttagaaaagatatgacggtaagtttatgatattttttctactgttaatatcgctccagtccaatgtaaacactatacgtcagatacaaatctactttactaatgtcttggaaaaaacattccacttgtctaagtgtaagtaaaccacattattgattatcacgtcagtgtaaatttggagaactgataaatctcagacttaataagttagaacttagaagcatataatcacaattatttttcactgtgatacatcactataattgcaaataactaaatgcttaggatttcatagaacttgtatattaaaaatataatcataaaatcataaaataaacatgtaaacaaagtatatgacaagatcgaaatataatttctgatctttattgataatagataagattatattaaagttagattttatttagggcataaaaccccaacaagggtggcatctggtgatgcagcgcccgcagttgtggatgtggtggttagactggtgtggcggtcgtgtgcgtgatattgagaaagagaagtgaggcgcaagaaaaatgagagaagacagaaatattaaggttgacagattgatcgtactaggaattttatgtatttttcatttttcaaacgggatatagttgggtttcacaagttgaacccgtacccttgaacttcatatgtataaactcaaaactcgttcgttaagttcatggatcaaacccaatctgtaatttattcccgtttcgtatgacatgggcatacaggtctaggtctgggtctgggcgagtggtacggttctggctactacaatttttttttaatttcttattaggggtttaagtgtcactagctgtgaagaatagggagttttcatgaccaatattgttgtattaaaatttaaatttattaatatgtagatttattaggaagtttttatgaaaagatacattctattctaaattattttatttatttatattgtattggaatgtaacacaatcaaataaatatttatcacacttatgccccacttatatcttggagcataccttgagtattctgctgtagtatatgtgataataataaagtcataagaaagtgtttaacgattgctaaaaataatgcatttccaacatggagtgcaatgtaattataatctttcatgactatttaagaagttgggaattgggatatgaccttacaagttacaaaaagaaaaagaagttagtgtattgacaaggaatgttttatttacaacacgctcaacaaaggtttgctaaaacagaaggttgattgagccagagctacttcgattgcaccacctactggttgcctgtattcattttgtaaaactagatatgatgtggtggttaagagattttaagggcaaggtggttagcttagctatttcagaacatggtaaaatgaattcaattttttattttggaagcaaaggcactgcagcaagcaattcaatggtgtactgcttttggtttgcttatctcaactcaaacatagaaatgaattgcaaaattattattgataagttgagaaacagaaaaaataatatccccaaccacatttctagtttctgtaagtggcattattgcaatcttgaacactttgtgccgcaagggaagatggaagtagcatgtatctataactcaacttttaaagatgctattcacctctgcagtcagcatgaacgaaacaccaaaaacaaaaaaacaccatcccaaatcaaaagatgagattttaacgggaggccaacttcaaaacatcatactgttcattttccttattatgatattcttttttaaaatctttgatggctcagggaaactgaattggttcaggctgcacagctttctgcacaagctcggattgttctttcacatgaactgaatagaaaccagtagcagtagaagctgatggagcacgaccaacatattttatgtcctcgacagtgcctctgttcagtgctttcatggctgtgtagagccgaggtgcaatgtaatagtatgcccccatgttcattggctcttcctggcaccacacgacctcagcatctgaaaacaatattcattcaaatgaaatgttagcttcaaaatgtcaaattt

SEQ ID NO: 38761 - DNA, 1438 bp, Cannabis sativa
ctgactgtatagtcttaagcaagaaagggatacaaaatgattgaaacttgtattgacaagatacatgtctgcctccgaatacacagatccaaggagctaatttattaatacaaaagaatggacatagttaccccaaagcaacctcagactacatatagcgagacgtccaccttgctatttaaaagaaacttgacaagacgaatcatttgttaaacacttagcgtatttttcacattacagtagctaaggataacaacttggaaacatgcaagatgctattgtccaaatcagcattaaccatcgacaagtcaagcgagatgttattgtccaaataggcattgaccatctttaaggataagaataacatgtagttaagcagttatctagtattatccagcatacgatttaaatgaaacgtgatctattcccacatttcattaaacgattataatttgaatttaaatgtaaataattgacaatctatattcctataaataggggcagatcccatagaaaaagggacagagaatcttttggagagaaatataaacatacgatcaaatatatattgtattgaatactaaaaaaatatctggaataagatagatacgtggagtatgcagatttaactgcaaaaccacgtaaaatatctggtgctcttattatactaattattcttttatttatatcttatttatttctgtgttaaatttattacaaaaaggcttattattggttaacaaaaatctacgttaatatccgtgttatcaggaagtaacagtagtggttaattgatgattggaataatgtcaaaaatagtatagaactttccataggttgaataattatctattagccttctgtgctactttaatattcagtctcactggtagattaaggaacttcagatatatttttacacttctccaaaaatcactacactcctagattaatcactatcgcagatttaaactttctagcattaatgtaaatctagaaatttgagtcagtgtaacctaaaggattttaagaacacaacccttatatactaacatataggtcctccttaatcttaaaatttatttgattgtcttccaatattcctttcctggattaaactgatacctactcttaactcctactcagcagtaggtgtctggtctaatgcataccagagcatacacgagacctctctctgttgatacttaaggagttctttccttggcctttatcttttcttgaatagttgaaactgttccttagataaataaactctatctctaggagccaaaagatttcttttagagttagcaattagaaaaatactctagcatcttactaaagtaagttgcttgcaccagagttagtgaattaccaagtatatcacaagccataggtttagataatctcaaaactatgatactaggatcaggaagtt

SEQ ID NO: 38762 - DNA, 1332 bp, Cannabis sativa
taaatgaaaaattagtgcatttattgtggttaaattttacattatagtaaatattgtttcaaatttagcacaaaatttactatgtgccaaatttatactactttttggaataccaatagaacatattttttttaaaatgaattatattttatttttcatcacttatttacattttcattggagatactctataaaatagtgtttaattaattaccaaattaggtcctaatctaaaccatataattggtggcgccaagtgccaatgcccttgcgttatatatatatatatatttataagaagttttgatttatgtttccaattccaaattccagcccctttgtttgactaataattgcatggcacttaactttaacaaaatacctcgacaaacattaattaaataataataataaatatagcattgtggctagctaagctagctatgataaaatgatctatataaataaatatattaattataacctttttcaaagtatatatatattaattataacacaatcgttccaaaccctagttattacacgtacttataatatctaactactataccagagtagctagtaacaaaattaattaaggagaattatttgtatattatttttttaattttttttaatttataatttgagttatttcagtgtagttgtttcagtaattatttttgtaagtttttacgtagattttgattgtaatttaagttgttactaagtaattttatgtgaattttcgtaaaaataattaaaaaaaattattttaaagtgtgaaaataaaaaaatttaattaattaatgtcttgtactttatattacatatatttttttgaatataatatacgttaattaaataattaaatagaataggtttcaaaaaaaattaattaaaattagtggttaattagagtatgaattatatatataagaatctttaagatctggcaacctacagaaaaataaaatagcagttacataatatataaatataagatttattttatatatatatatatctttttaaaaataaggttaatattggagtgtggtattttatgttaatcggcaacaatattattgtaaataagttagtaaaataggtagtttcctaattattttagactctaataattataaaattgtataattctcccaataaaaattgtgatactaaaataatattgttcaaaataataccattttctacaattttattatatcatatttacttacatttcaataaaatagaattttaaaataaaaatatttttaatactcattttaaaataaaaatcatgcatgacataataaaaaataataa

SEQ ID NO: 38763 - DNA, 2111 bp, Cannabis sativa
  modified_base (1476)..(1482): a, c, t, g, unknown or other
  modified_base (1549)..(1552): a, c, t, g, unknown or other
  modified_base (2086)..(2086): a, c, t, g, unknown or other
caaacataatatggtattaaataatactaatacaatacaatctaacacaatacaatatgaagtaccaagtgagtccttagactcatatttgggcacatcaaagcacgctaagggactaatgtgggattatgggttggacttagtactctcaaaatatggacctagtagtactacattgctttattattatattgattaggtcgagtctttatatttaaaatgagttttttaaaataaaaaaattacaaaattatggagaaaaagtaaaatttcaagtggttaaactttataacgcttgaatatggtggcattaactcaaaattaaaactttaacaatatgggattaggacagtatataacaaaaaacctattaaaaacattaaaattggaaataagttttttctgacctcacatcctctctcatcaatctttcacttggagtttctctctcttcttcattcctctcttactgtcgtccgatttggatgatctcgtgagacctattgcaattggacttcctctatcatcttattcatttctctctcctgcgagatcagcttctatcactcactcctctaccacaacatctcgacaactccaatcacctctaccaaccactattacacatttttcatcaactccaatcaactcagatctcatcattttctgatcacctacaaaaatgagtgatcaccgttgtaacaacttacattgtatacataagaaagaggtaatacgtttttcgatctaagagtttatttagcggctttaagctactcaaaattaagaatttgcataaattgatcttatctaattacaagcggccgattcaattacaattgactgccgtatatctaacagatcagattgaatgtagattgaatgttaattttgaatatctaattagattggattggatgttggattaggtgttcaaaattccaatacttctaatatccaatcgaactcattagtatttttatttagttttgatgagcaattaaatttatataattacacttaaaatatacatgcatatataaaaattaagatcaaaatttattttttctttatccaatccaataaatactagatttaaataatttaatagatctgatctgatctaaaaaatattaggtctaaaataatagataatttgaatcaatacaatagatatacgtgaaatacatttactggatagaaccgatctaatccaatatcaaatggatgttggatcgattagatgactaaaagtaattggatcagatcacatagtaaaatctaacatccaatattgggtcgaatctggataggtctaaaacattagatgtggtcctatgaacacccatacacgaaatctaatttattgatatttaacatacaaatattaactctaagaatacacatacatatcctcacaattcatcattagattaatacttttgcatatttttttttgggtaaatagcggcatannnnnnnaaagttttgagtttgtaagcggcataaacccaatgattttttttagcagcataagtacccaatgttnnnnaaactgtaatttttctttattttcgtagtacaagcttcgtgttaaatttataaaaaaagatttggaagtaactaatactacatatttttcgttcagaccaaataatctaaaatttgggtcttatatgtgttctgtttaagacaatagcagagtctgtactgatgaaactggaagaaaattatagttttataaacatttgggtacttatgccacaaaaaaaaatcattgggtttatgccgcttacaaacctaaaattttgggtacttatgccactatttaccttttttcttttttgtttaaactcttagttatattgtcatcatgttagtactatattaataaattatttaaagaaatgagttgaatgtagataaagggtgatatttacaataattttattagttctacaaaaattttgtaacaaaaaaatgttcaaatatcataattcaaggggagggaaaggacaaattctatttagtttttttatatatatagggacacgattttgccccgtgatgtactttcacggaatgnattccgtggtacattagataggtct

SEQ ID NO: 38764 - DNA, 3585 bp, Cannabis sativa
atttcatggtaaactgaaaaaaatgaaggatgtactattaatcatctaaagacatcctatgataaagagaaaaatacagcaaccacccattatcagagtatagtacactagagacgacgagcttggcatgacaacacgcaagcctgaagtgaaagcaataaccattccaaagatggaaatgtaagtaagagtggctgcgattcttgtaaaccgcaggagaagataatagttatgctcaattgagctgaagaactgaagcaagactgaggctgcagagcaataaaaggcaactgaatctgcaacaacaaagactttgaaaaatatcttgtttgacagaactgccattcccttactggtatgatcatcgttttcgtaccctccaggtaaagtaaaagctgctgtgaatgtaactgtggcaataagagcagctaccagcaaatgggtgtctgagattttcttcaatcggtcggatttgatggctttttccatggggtgatgatgatgatggtcaacgtttctaaccaactgattccattgttctactctgtagatgattgattgtagactctcttgaccaccttgctgttccaacttctttacaaaccaacactgaaatattaattaaaagaactagttgataagaagtaataaaaacacaagcacaataagagaacaagacttttatagacctaccctgaaaaattcaccaatattgacattagttaaaagtatgtcaattggcttaaggtacttgagattagtagccctcttgtcaactctgcagtcattcactagaacattgataatccttttatacttaaaaccggccgctaaatgcaacggagtattgccatctttatctgcagtgtttagcatgaagtctagtcttgcggtattgagaatgtacttgacaacactaagttttccattgacaacagcaatgtgaagaggtgtccagcctctgttgtcaaccaaatcacaagcctctggtttatgaaggatgatttctctcattactgagacatggccttctttggcagctatgtgaagtgctgacatgccttctttgtccttcagataagcaactgaactacaattctggtgaagaataagtttggttgcttcaagatgacccaaacatgcagcaaaatggagaggagtccattggattatgctgtcctgttcttctagtaaatcagccttttgactttcttccctctctagtagtacccctattatctctaccaacattaattgtggaaaaaaaaaacatttgaatatgaccaatattaagattgaaaaaaaaaacattttttcctattccattatccaaacgtgacctttagacacagtcttaatattagtggatttttcacaatgcaatattaatcttaatattggatattgaaatattttacaatgcacgttgggttgaacgagttgatgaagaatatcattaccacattagtcatatgccaaaaagtacctatttcagtttgttcgggtaatcttccaaaacattcttccaagtgtaatagaaagctccttatcagacgccgcaagttctcgagtgataaatctggcacttgatgctccaaaaatctagctaaagacaagaagaaaaaaaaatatagttttgagttgtgaagtaaactagttgaccagaagccaaaagggtcaacttaccatggtgaatcctaatcacagctgcatgcaaagcattcatgccattagagcccgagcaagaggctggagatgaaaaacgacacttttccactatgtatttagcaatagaagaaaagccaccttccacagcaagaaaaagtggagactcattagcagcattaagcacatcaagcaactcatgttctgcatcaatcaacaacttagccacttcaaagtgaccatttctcaccccaacatgcaaggcagtgtcttccttagtcaaatcttttattctgagaagacttcccaggtcgatttgctctctctcaacatcaccagcactgtttatgaggagctcaactaactcatggttcccaactcttgctgctatgtgaaggggagtttcaccagcagtgttttctttgagcaacagccttggacagaagtggataacttgttctgtgaacttcttgttattgaatctagcggaaacatggagaatggtgctcctttcgggtgttaataagtccataatctgctgttcactatgaccctgaaaagggttgaagtctcctgaggctgcagcctcgaacactgttcgatccattagaaaccaaaggtctttcgatctatctttcacaccttttatttttgtgtgcgtgcgtataaatttgggcaagtgatcttaagaaaagatgaactatcttcaaaacacgtggtggagaaaggaagggattcgtgactcgttagtttggtagttacttagaccttttcaaagttggcttaggactttatcgctgcatcccagaagtttactgggaaaagtcaagtggtgtatccaaataaatataataatattccatgaacttgacttggaagttgactataatgctgaccatacattatgagacgagagttctttttacgagcaacatgagtgattctgttcgtagacttagcccaccgcctcaaaaaaaaaaaacaaaaaaaatcattagaaagaaaatattttttttgttaattataatgcaagtaaaactaacaaatattgtcaaagtttttctttgatagtttaacttacttttatatcttcaagaaacgatgatatcatattctattacgatattacattcagtctttcatgttagttaaattactgttaagccgttataagactcaactagttaggttgtttataggctagctaagttagttacttccctaactaacttagcttatgttatctatatatattgcacctcctgtaattgaataaacaaagaataataacaatataagcttctaagggacttttggcttcataacttaaaaattattttcagttttaaaaaatagaaaacaatttttaaaaactaataggaatcgtttgataaaaaattttaaaacatttttttaaaaattcaattttaaaaaattagaaaacagaaaacattaaaattttatttttaattttcaaaaataattttttttgtctaacatattatattttatatttttttcacatactcagattctaaacccgaaccaaacccgaacccggagtcaaatggattcatgtcatggtatgatgttaaaatattaatttttttagtaagaaaaaatttaagaatagttttaaaaaacttgtgccaaacactattaaatttttagaatgacaaaaatagttttctattctcacttttaaaaacacaattttaaaaactaaaaattgaaaacacagccaaacaggctctaagctttttctctcgtactctgtttttcctcacatgatattagcaaaaattttggccaccgcatcaatggtgagaccctccctccacacgctcttaaaatggtgtccccccatccacaactgagcataatcaatcagagtctaatcctgatgcaacttctgaacct

SEQ ID NO: 38765 - DNA, 1351 bp, Cannabis sativa
attcactactattaaagttcatttattttataaacataaactaaaaaaatacatttacactatatttataccactaaaattctctaacaccaaacaactatcaaaaaacgaaaaaaagaaaaataacaatccactccatccatcacccctcttccttctctttaaactctctatccttccaacattctttcattcttgccaaacatagtgtaaatactaaatattgctttacctgcgcctatgcaatgaaagaaaaggtgaaaattacactactttatttgtttttatttttatctttacttttatgattttatttttataatattctcattataccttttaaattaatataaatcatgtgttgaaaacaagagtatattagacaatatactcgtaagagtaaataaattttaataaaatataatataagaatatttctaattaatagatactttttgaagagaaggcacacgcagtaatcaaggggctgggccttataagcctatatagtaatattattgtcccgtttaatatatatcattaaaataaattcaacgtactagtggaagggatgaatttcttaggtcaatcaaaccaaatgtccaagtaacaataagcttattggaagaaaatgaaggaaatcaaagttggattctgggaaggaaaaaaaatatagagaataccactaaaatagaaaaatcatgttccatataaaaaaatttgttcaatcaattattttcccatacaattctttctatactaaatatgaaaacttgattttatttttttattatttattattttattttcttttgcaattttttttcctcaacattttcctttacctctttctttcccaccaaaccaaaatccaacttaaatatgaccccccaaaaaaagtaatcctcacaaatatgaccaaaaagttgaagaaaaccatggctgttctgccagccacaagaagcagaggaggaagcaaatctttcaagttgaaatatcaccacggcctgagcaaaaggaaaattttattaagttggttcaacacaaaaattaaactgaattggaattctttaaaccatgagaaaccagaaagatacctgtgtcatttagccaccttgtcatccttgtggatcttctttggtaaattgttgcagaggggggagacaagcagctaaggttctcctaagacaaaccaaacccagtattaatttgagatttaatccccaataccatgcagccataagtagaaaattagtgccagtctacaaagacttcaaaaaacagagatattaaggacatgaaaagggaaggtatgacatttccaggacaaataatggctattagaatttag

SEQ ID NO: 38766 - DNA, 2468 bp, Cannabis sativa
agggtatgaataaacagagagattgaaaaaggaaaagcttgaaattactttctatttcttatgtcatttccttgaacgtagaagctattgcatataaacatatacacaattactaggatcaagccaatatcgtgatctcataaacttagtaattaaaatcgaacaaaacataaataatgaaatacaagcaaatcagagttcacaattgtaaaccaatctcccccttaagcagggttgtagatatcaataatacacaacttggatctttgtaaactatgttttgttatttgcttcaaactgtatagtttagcttcccccattatttatacaaaaaagtttctttgtcttttttcttttcttttttttttttttttttgaaaagagacatagaccaaacttgacctcctccaaaatttattagggagcctcacttatggccgaggaaaaccatgataacaatattgatgttttaataataaagctcaaaacagaaaaagcttagagcatacaaagaagtttctttttaaaaaacttttaaaaaaataataaaatcatgtatgtgttcaaggaactcacctgtagaacaacattgtattgctctaatttgtcaatcatttgtacggattcaaccccataaatatgtccagcgtgatcctagccacagaacaaaacaattaatatgctcaataatagcctacatcattgaaggtttgttaggataagtaagttgaggtgatttacttgcagtttgttgatttatcatttcttgctctaggtacgtgaaggaattttattaacctaaacaagattttagaagtcctatttaaggggttaaaaacaataagaaaaagcaaaacacgtgagaccaacaaagtgcaaacaataatttaaaattttggatataattgggtgagtgaccctaacaaagtctgccaataagatcctccaaaggaaggataagtaatcatcttttgacttgaaatgaaagcatgtaatgtaattctaagtttaatgagaaagcaagacatccataccacaccaagaaaatgagcaataagaacatcccagtcttcttgatacaatgacggaagaaggtgatctatgcatccattatctacctgatagggcatagtaaatttaaagtaaacacataaaagcagttttagtaagtaatcaataactggagtaaccaataaaaaatgaacttgaaactcattcatacacaaacaaagcagtaatacataccgtatgtagatctttaacattaaatgaggggaaaggatgagatttttcaaaatgatgaggaaacaactgcatccatgtatcatcccccatcattgtgactcgttttccattttgaactagctaagaggagataaagcatcggttaaagcacatcaagaaattaaatctctcaagttcaaattatatgtatatgtatgtatctgatgcaagaatttaggagcaaatagataaagacacgaacagaaaatttaaaaaaaaatacacacttgatgaattaaattgtcttcaataattgcaggagcaccaaagctattcccaacatcgataaaagttggtagcccaccagtggttaaaccctgaaagcattacagtgagaaaaatatgatcatgttaaagtgatgatcttccaccagcttcatactgaacttaccataactagaacaggatataatccaaatcagaaactgaaaaatttgaaatgataaaccatcaatagaaaggttgaaagtggttaagtaaaaccttacacgaagatgagtaaagggattttgtgtcaaacactaaaagaaagcatagaaccactgaccttcaaacgctgtaaactagtagttggcgggtcggcaatggctttaaagattctagccgatgaggggttttgagatgccagttcttgtaacacttgtaatttgtccatccatggtttcgattctgacaccaatttaaaattatcatctgtgtgtaaagagttttctggaacataattaactattcctaatcgtttatttcgacatgctaaccttgaaagaaggtactcggagcaacaaaatcaaatctgagattgaaacaatataaaaaaaattaaaaaataaagaagaagaagaagaagaagggaatagggattaacctgagggcatcgagaacaataatgattactcgggtaacagcaggcttggtccaacaatggtgatgcgtttgattgagattagcatcatcaatgtgagaagtgaaaaagcaaggggattgggtaacgtcggagcaattactgtaatagggaagctcagttcgagtgagaagaaatcctttggtgaaaaagagaatggcgaggagatgaagccctaaaatcatccaatacacccatatggttcccagccatctccaccccactcccattttccactcactcctatgctccgacagttcgacgtagacggaggaaacgtatt

SEQ ID NO: 38767 - DNA, 1064 bp, Cannabis sativa
taccacctagcagtatttttataaaaaaatagcaaaagttagtataccatgtaaatttccctcagtatgtaatctgctttttcacaagtgatcccttcgtatattccattttattattttagaaatgcccaacaacaataaaaaaatttacttttttttttacggaattcagttttttttatcttttttatatttttagcgttttcttttcttccaaacagttttttttttaagtacagaccgttatttttttagagcatctccaatgaaaatacaaataagtgatacaaatgatacaaatgtaaaatataactcactttgttagaagtctactatcaccagaataagaagctctactagggttcccgaatccctttcccatttgattcttttttccttcttcggcgttggtcgccttctgcccaaggtgggatatgctctcgtttttgacgaaaagcctattgattaattcttcttgagagatgtttcgatggaggacctgtcggagcacacaaaacaattgaatgtaaatgatgaagaaagttgagagatcaatgaatccatataggaattggtgggcaagctctgcctccttggccaactgtgtaccgagcaagaacactgtaagtccttcctcaagcatgtcctatgacacatctagaatttaattgagaaagatcgggatttcaaattcaagtggaaaactaattttagtctttttcttattctatctttcaacaatctgagccacttggattgaatgctgacaaagatgccctgggtattgcagcacaaatttctaattcttgcaaaaatggaccacattccccttaattgggacacagaattgatctggtttcccttggaagggcgagttcttcaattactgaactcgtccatgatgaagaataacatgacacaccttgcaagactcgctggcaaagtcatctctgttcaagaactagatgttactaaaatggcaataaatggctactttcatttcaaagttatgagcgccattcattctaagatttgtcctgtttttgtattcctgactaaaggca

SEQ ID NO: 38768 - DNA, 1957 bp, Cannabis sativa
ggtaaaatatattccaacacttaacctcccattgttgaagaagcgcttgcacatccagattggaataaagccatggaagatgaaaacattcctctaaaaaacaacacttgggtacttgtaccaccaacatcagacaaaaactcgattggaaataaatggattttttgtgaaaaattcaactgcgatggatagttttcaaaggtatgaagcctgattagttgccgaaaaattctattagagacatggcattgatttcgttgagatatttagtccagtaattaaagcttcaactgttaggaatattctaaccattactgcagctcgaggttgggagattaaataattggatattaacaatgttttttaaatggcacattggaggagtatgtgtatatgttgcaacctaagggatttgaggaacctagaaaagaagactatgtttacaagctgagcaagtcattgtatggcttaatataggcccctagagcaatgagacatcttaagattacatatcagttgtgatgaacaattaaacattacagggtactcaaatgcagattgagtatgttgccctgatgatagaagaatagtggcaggatattgtgtgtattttgaaaacactctaatgtcacggtcatcaaagaagcaggttgtggttgcgagagcaagtactgaatctgagtatatatcgagccttggcgtatgttgcagctaaaattgcatggattgagttcctcgtgaaagaacttgaatttccaacacctacaactgttacttggtgtgacaacataggagctagtgctctagcatctaactcagtttttcatgctcgaactaaacatatagaagtggacatacaattcattcgtgacaatgctttgaacaagaagtttgacataagatatgttccctcctcagttcaagtggcagattgtttaaccaaaggtctatcaagctccaaatttcatttcttaattgacaaactaggactgattgttgcatttaagaggggttgtgaagaaatgaattgaaaagtttttctccccttgttttgtattttgttatgttttgtggttctgattagacgggtgttaaatattttgatccctaggcagattgtgtcattagtactacaatgatgattgcattataaaatattttgtgattcctttttctgttaaaattagtgccaactgtatttgagcattgtggtttttttttttttttgaattaaacatttatatattacaatgtataatttagactcaaactcaagacctccaatacacacgtactctagatattttgtaattggcatttatgtccaagtatactattggctctgaaatatttgagctgagttttacacaaattgccttttttccaaacctaacaatatatattttttaaaataaaattaaaaattatgaatattagtgatgaccccatgcatgtatcatggtgactaacatgagtgaccaaactaacaaaaatctaaagtacgtatttgcatggctttgatgagtcatctatataaaattaggtggtgctacaaaattatagtgacacatggtattatatgatacacatatatatttttggacttatcgtataaaattaaattaacttccacaaaatattccttttaactgataacttccatatggggaatcatatcatgattcttctaccctaagaaaatagagctatcaaaaacttgatcacatcttatattacacgtttccaatttatagatatgttttcggctcatagatatttttttttcttctttacgatcaatatacacgtatatataagctaataataataataataataatgtctgcatactaacatgctgatcaatataaacaataataataataatatatagtgtctgcacaccatgatgatcaatatacacgtacatatatacaagctaataataataataata

SEQ ID NO: 38769 - DNA, 2366 bp, Cannabis sativa
aggagaggatgcaatgtcctccgagggtgctgaggatcagatgaaaccggccttcttcttgagcaaaccggatttcatgctccatcattcacaacttggtggcagccattcattggtagtttggttgagttgttggcttggcttgaccaaccccggaactttgtttatctcttaaaatgttaacttgggtttcctgtcttgcaggctagcgttcaatacccctatgctgatccatactatggtggttttttgacttcatatggcccacaggctcttgtaagtttttttcgtctaatttgctttttccttgttagagatgagattatattatatgcattgtttgcaacataatgatcaaacctcttattatatctttaaagaggattagaggttatggtcattaaattagtacattatagtaatggcttgaaagccttgccttcttttagtttgagaacacaggcattaagcaacccaccttttgtttttgattgtgttctattttcttctgttacaagtaaagtatatatagatgcgtatataatttatgtgatcaacttactttgatatgaatgtggcctcagatggtggggttgcaatccacacgagttccactgcctttggatcttacagacaatgggcccatctatgtcaatgcaaagcagtatcacggaattctcaggaggcggcagtctcgggcaaaacaagaagctcagaacaaactcataagaaaccgcaaggtgatgcatggttttgtattggaatttcttttgatgcatttacattgtcactctagacatgttttgtacgtagaatttcatctttgtcgaaataccagcgtgttttctcgttttatgtaatctatttgatgcatttactatctaatctaaaaatggaataaaattggaaaggaatacatatttgccaagctaaaaataggaaaataattgtaaagtgaaaggttttggagaggtaatgggaagtgtagactgagtgagactgacctgaaatgatagaaaagggaaaccagttctttatttccaatcattttaatattttaagcattagaataatgacctacttagagcttgaatttagtatacaactggttaaaggttcaaagtcattcttgactattcttgagagcatgtgagttttttcatttttggtagaattggtagtaaatactttattggatggatttttggaagagtgattgttaattaaagataatagatttttaaaggaaaaagattgggtttcaaatccttaagagggcataaatatcccatcatacaagaagtaaaagtagtctcatgttatttatttcttccttggctattaatatacttatgccttcctattatatcttcctagtttcttctatctctacacacagccttaagtgtttattatagtggaaaggagaaatgattttttttttggtactaaacaagcatagtaaacatgacataatcattaattctaaccattttacttaatcacctttttgcagccatatctccatgagtctcggcatctgcatgccttgaatagggtaaggggatctggtggacgctttctcagcaaaaaacagctccaacaccagtcttctgattctaactcctcgtcctcctcctcctcgaagctgctgcatcagaagaatgacagaatgaactctgggtatgctgagtatgtcacctcagttaccacctgctcggacaccatgagtgtttccgacagcagtgggctacggttctctggagcaacgtcacacatgggcggggccatgcaatgcagtgagaggctgttgcatgggggaacccagcactgtgcttcagttgttcggtgaaacacaagaccatgcatcgtccatggtcgggcaaatcatccttggcttttgttactgtttacgttctatatttgctgttctactttggttcaagcaaaagaagaaaaaaaatgctgtttgctgaactttgttctggaaactggaccagagctactactgcctactgtatcctatgttgtttataatcatgtcataaaaaaaagtgcttgttgtactgctcgaattcctcaatttgtgactactttctgtgtgttgttatcttactacgaatatcaatgttttagtatgcactttggttggttggttggttgttgaggtcgcttgtgaacattttataatatgtaattttttattttcttcgttttaagaatcagaatttataattggttttatttcttgtgttttcttgaatggaaaataaagagaactaaggtggtgtttggttgaaggtaatgaaatgaagtggaatggaaaaaaaataatttttattccattcttttgtttggttgcatat

SEQ ID NO: 38770 - DNA, 2446 bp, Cannabis sativa
aaactcctcacacaagggacatcttgtattcaccgggacgcatttcgttgcaagttgtgcaagtgttggaagacaattagaaccggccctccacatcagattttttatcttcagaggcatctttaaagaccacaaacttttccaaaaagcggaagcatttatctcatcacacagccctttcaaagattgaactcaaatacttattacaattgaaagttaaaaagttaagtatttatgtcatcaaaaaattataactaaattattcaaaaaaaaaaaaaattataactaaagaccagtcataattatgagttttttaaagccacgatgggcctgggctgggccaaattgttgggcttagtacgtagatacaaaagtgtaagctaaagttgtttagatatctaccatttgcttttaacaggttgatgataaatggtaaatttatgtacaaaagaaaatcgtaaacttattttttataaatatgataaaaaaaaaattccaccaaaatattttttttgtaataaatgtgtaggtactaatatagaattagttactactatgaattttttattttattagtgatacgatggtaaccagttattctaaaaaaatgtaaaaaaaaaaaaaagtggaaaatatgagtttgtgattaaaagtgtcagtagtttcttggcatccaaacagtccttcccctcaaaattgttaagccattttgaagacgaagagtgtgttctaactcaaagccttgatcagattttttggagatggcagataaagaatgaagcaaactgttctttccacactcctttcgaaattccaatttcaaagagcataacttttgagtctccaatattgactcaggagcactctgatatgatcacacattatatatttaatataattaaccattaatggtaattaattatatttgataaagattataatgatattattaattatgacatgtgttaaatacctgaaggatccagttgatatacttgacatggttcacatgttgattaacatccaaatcagtccacttaggctgcaaaaatgaattagtgtatttatatatattactgttatttaattaataaatttaattaaccaatttatatatgattcataccgataaatctttaataacataatgaggagtgtcaaaatccaagtcccttaactttgtggcatcgttgattattggatcacagtagtccataaataaaggcttggtttcttgtctagtttcctcaatgaacttggataatttccttgtcttcttattcatcatcacatacacacttgttttccattcccccaattacaacaacaaaactatcaatttattttacaataaactcgatcatcatcgaaccaataaatattcaatacttcacatttttgctccctaaactatttatattattaagttatgtcccttatagtatatagtttttttagtaataatcctcgaaatataacttttatacagtaacatattctatatattttttatcacaatttatttaattttatcataaaatgagtggcccacatagcaaccgacacatcgatcaacctatattgctatgtggtattttatataataatattgcaactcacatagcaaccaacagaaatacacatagtaactgacaaagtaacttaaattgcaactaaaattcacataacaacccacataaaaactactggagcaacccaaactataaatttaaaagaaaaaaaaaattaaaaaactatacatgaggtaatttcccaaaaacaagttatacttctactttttgttatttaattattaatgtaaaaagggtgaaaagcatttacttaatttgtattcatctatcaattattatttattatgtcacttattttacaataaaatataattgaagaaccatattaatataaaaattgtatttcaaatgatagaatcatatattataaagagtataacttaattgattgagtaaaaaattaggagacaaaaatcctaattcttctacttcattaatactatatatatagtgatgattttatataattattagatagataacctgacagctgtaaagagagtttttcgtgtgttgtaatcacggcctagccagtcacggcgcataccatttcttcctgatgcacaagtccatgtctctacttcaacaacatcactcctattaatttatacatgtataattatttgttaattagtactacaactaattatctagctagatcatttaatatgaaggtgtaattaattataataatttaattagattaattaccatgaagggtacgtaggtgtcaatgagaatgtggatgttgtacaacccaaatcagatttttgaggcacatggccggcgtccaacccaaaccttccaccatcaccccaccccttatcaaatggttcactgctgattccttatat

SEQ ID NO: 38771 - DNA, 3471 bp, Cannabis sativa
  modified_base (1071)..(1072): a, c, t, g, unknown or other
aattagtttttacaaggaagcttgtgacatactcttgaaggggctccccgaggtaagattgaacatttttatgggtggtctccaactgtccttaaagttgatcgaaattgcctggttaaattttttgatagccaatataatttttacatttagaattgaattaatctcatcgcacataggtttgatagttggtatctcaattttcacgttcaagttacaagcagcaactcatattatggtattccagaccaatatagtagaaatgggtaatgggtcaaaacttaagaaatgcgagataaagtgctttagggagtatatagatacttgagttgatcccccttcctctaacttttcagataatagtttaggtgagatttatcttgtttgttcttgggtgtcttaccctttttttcttttctatctcgcttaagtctaactcatttgttctctttgtagaaatggtgaattttactgaattcctgggaagcccaactactatcctaatgaaaaaaggaaaaaatgtaacaaaaaagacaatcaagatactttggaatctcaagtggcccttatgaaacaaaagtttgaccctccagcagcaagtgcctcgggtgatcaaaatatacttcgcctctaatagatcttctagcttttggcttgcaaagagttttggatgccgaggcaatcttaaaaaagcttgagaagagaaaagacacccttgcagccaaaaagaccattacctttgatgcttccaaacccgaggttcatctcctccattcatcccttccactggactcatatgccggtgtagctggggctaaacttgtttcagagcacattaccaggtagtctcgttttttccatggcttggaaaaaggtgattcggaatttttcaatcacgggaacatttttgagcttatggatagaagcaagagcctcatgtactcagtaaatataattatataattactaagagttcaattccatatttatagtgaagtaagcatgaatttaataaacatgattatttggttgatgagattcaataaataaatctagtttattggagcttannattataggtccatggtctccggatcaccaccttgaaacaatgtcaaggggtggagttgtatatgaaagttcagaaaaatctattttgaattatcaaaatagtaattatttatttttgtaataaataatttattattcaaataaattaaatagggtaaagacaaaaattttcaagacaaaacttgtcacgacaaaagacacattccttgtctttgacaagacataggaggcgccacatgcattgtgtccaaacgcagtacatgcactccacatgtccagggcgtctctcttagttttatctttttacgttgattaattcaatagataaatatttgaatttaaaaagtagttgagatattctcttaagtagttgagagattccctcaatcgattattagatgtacatatctatgactgaatttggttataatattttattcgaataattaaatatgttttaataaataaatttaaaattaaataattaactaaataaaacttttattgggtttatatttttaaaaatatattttgtataacaaagttctgaatacaagttttagggaataaaattttcacgcaacttttctgaaagcctaaaaagggttttactagtacatatttttctctctatcacataagaaatagttcttactcatgtgttgagatttatacaaaagcttcatatacactttgtcctagtagcccacactactccttgtgtatggtgaatcgatttggaagactacggtgtgagattactggatccaacttacaaaaagttttgaagataccctgatagtcatcaagaggtatttatttctttcatggaatttatattttgggtttaatatatatatacacgtggagatccttgggactgtggtacaatgataatcagtaaattattattttactgtgtacctgatttactaccataaaactaacatgaagaacaatggaagatggtctatcagttgccaagtcctggtttaaagtttttgacctcaggtttgtcatcttcgtctcccttccatcataggaagatgcaggttatggtggacgctgctttctcggagtcctctacttctgttggagttgtcatcgtggatgcaaaaggccatgcaaaggaagtttttgttaagaaagttgatgtgtcattggttctccatggttaattgttggtggtgtggtggggagctaaggttatttttgactttcaaggcagagattgggatttggttctctggttgaagcaatcaaaaaaggtaaaccccctgagtggaagaaggctcttgagttctttgagctgttggagatgcttttttcttgtaatatttctgtgtgtttggtttaagagggattgtaatgtagcaacccatgttaatgctatatggggtttgtctaatagctataacgggttgctcagtttctgggaagtgagtctctttgtgctcaccaaaattttggcttcttcttaatgaatttgatgtcgttttagcagaaaaaaaatattataatatcttttgtaacattattggatcctgagtgtagttatgcaaattaaaagaattttttttattgaattttcataattattataattttgttttcatagtaacacaatttggaaattatcttaattagtaagacttgcactattcacgaaacatacgtagctttcttataaaattagacgttgcagacaatataataattcattcacttataaatgcaaatgtacattggccatatttgaaaataattttactaaattttactttaatgtcttaattttaacctattttttagaaaaaaaaaaattatttatatataaggtccttatattaaagcgtagggtctaaaataaactcttattataactgcaagatatttttgttatatttaaaaatattttgatactaaggtcttaaaagtaatttttttacaagaatacatgatccaaaataattcttttaaataaaaaaaataaaggtaaactagaaattagtcaaaacataaaactcaaaatagtgttaggtccttttttggcaatttagttgtgaaatattttttaattaatgaatgcattttattgaccttttaaattatttttattacattgattttatgcattttattactcttttctatcttaggaaagaatcattttttcagctggctttttctttgtttggaaacttcttgtaagagaagaaattctcttatggaaagttgtctaattttgggaaacttgactttccctttttctaatggatgattttgatttcgcatttattagaacaaattaaattatctttatttggcaggtttgaagtccaaattcgtgatcttggttcaatttggaaagtttcctttctggtcctgatctgctactgc

SEQ ID NO: 38772 - DNA, 4348 bp, Cannabis sativa
  modified_base (3614)..(3618): a, c, t, g, unknown or other
tagcgccgcaacctaaattgcaacaaaaaatcgtataaaaactcctattgcaactagcgctgcaactactttagaaacacaaaccgcaaatttaaaaacaagttaaaaaatagtatatggggtaattccccataactcataatttaatattattttatctttttcatttcatttttattaattatttattttattttcttattattaaaatatatatatttctgccattttttctttaattttctactttctctcatttatatcttttttttttccaaattttaaaataataataataatagcattccctatttaaataattttaagcattataaatatatattattttccaacctaggataaatctatatatctataaatatatgtttatatatataatcttgatgttaagatgacatgacatcctacatgtatatttatttatattttatttgctccctttttttttttaattttcttttgttaattttttttttcatttaaccatttatgttcaataataatatagttttatttaattgaaaaagttagtcgcctttcatttttataactctaaattctaatactattttattattataactctttttttatttattattttattataaactccattcaattcataaaaaaatataattaatatcggttacaatacaactatttcactcacctcttttttttactggattgaataccactatatatatatatatatatatatatatattgggatgtgcaatatgtaatagtttgtaaattgttatatcttttaaaatataaattcgtagtttttattactattttgtttagtgtttgtttatatgtttatagtatgtattatttttttctttctttgaaccaatcaaaccatctttatcatttttttaattggagaagttctttaatgctaacactttctttcagtatacattttgtcttcgatgtagtccaccacgactccaagcacaaagcttatggcctccccgacaagatttcatcaaagactcccatttttggtagctcaagtaaaatatccttttgggctttttatatccaacaatgttagtaactctatctactatatttacatcatcgagtttaacaccaataacgaaatcatgaataagaattaagttattgtatatctataattgtgatattaaaaaggcgaggtgatatcttctctttttaatttttttaaaaaaaaaaaatgtagtgttttctaattttttctatttaatgataataataaaaaatgtatcatccctaactctaattcctaacaatactattagttataaatttaaacaacagtatttttaattcaatttctctatttatatatatatatatttttttttttttgaaaaataaaatatcaacttcattgaaattagcattctaaatacaagatggcatgaagatcagcccgaacattatcctcaaaaatgctacgatcagagtaaaatcgagagcgtctagccacaaaatagaccactcgatagttattggtgtaacttataataataataataataataataataatagtagtagtagtaaattgataaaaaaaaaatatatattattacaattaaattatatgcacataattaatgtctaactcttatttattgttaaataaaatttatttatattcttattcttataactaacatacatgcatgaaattcattaatatatattgaaaaatatagatatattttataatttaattttttttatatgtagttcatatattgaaaaaattgatataaatttctatagattttattttttaaaagatttattattaattaaataatatatatttcttatgcatataattttctaatactacacaaataagtaaaaggcggttatattttctaaatcacaaataagtttaagtgacatattatattcatttagttaaaattttaaagttttgagaataacacatatatttggtcccagaaaaattaaatcggacatgcattctgatattaattttataataacaattcaatgtatatttattttattttggggggcaaatataaaataattacacaatattttttttcttttacatattttatatacaagattgtgtaattttttttctctacagttctattagtttggttgattacaagttctctttttattattacactttaagatacaaatttcatatttatatcatttgttaaaattaatgctataatctaaaattctaaatatttatatagtaacaatctatttgtaatatattttttagtaatttttttttttttggttcctttattcattgagtcaaagatattaagttagttacacaaaaacagtattgcaaaataataaaagataatcattctttgtgttgaaggaaaaaaaggttttctgtatcatcggtcataagaagagtttattaaacttataaaaataagagtttactataaaaacacatgcaatttctctgttaattctactatttttaatatttatcataaaattaccatctttttatatattttgacaataacaaatttcgtttataattttaaaagtgttatttcatttataatacacacatcaaaatattatattttatattatatcgcttaattagtacaaaaaaatcaaaatataaaaagattataaaaattggacaattaatattgcgcgaagcttagttctctagttttaaatatactatgcaaatgatacaagcaaaaaatacaatataaagaggtgaatcaaatccaccatcaaagtaagccttcattttggaacaagaataatattgacaaaaccaaaaattgaaacattataagagtaaaatctgaaattttaaatgaatagaagattgtttccaattatataagatcctaaagtatggtcaattgagtactaaattttgttaattaaggtggcttttattaatattttttattttttatttttttaatcacaaaaataaaagtttaatttgtgttttttttttaaaaaaaaaagtatattttataaccactttatttttttattttatttaagtcgagtctaggtttggatccggaccggagccgcgttccaattccgaacctggggtggtggctagagtccagattccataatctaggttggggtcggagtccaaaatattaatattaattttaattatgaaaaaaaaaaattgtttaaaaaaaattttgaaagttattattttttcaaaatttttaaaattttgactttcaactaaaaaaattgaaaaagtgaaaatagttttatagaatatattttttgaagatattttcacttttctaattacaaaacagaaaaatgattaaaaaagtgttaccaaatgcaccgtaaataactaaaagattgagaaattgctattttgtacatccaataaaattttagttaaattaattaaatgtcaataaattgagtaatttaaagagtaatttgcggtataaatatctaagtttaactctcagttgttgataaatatttaaatttaattttttatggtaataatacctaagtccttatttacgtgttatttttttattagtatattnnnnntaatttttaaataaaaaaaaaacaaaaattcaatgacttaaaccattcaggattcaccacgtgatcattaacttgacacttaacgtttaagtacttacgaaagtttcgaaaatataattaaatttaagtatttataccgcaaattactctaatataaattagagctagatagaatataaaatcaatgtatatatggaatgtacaaaataaagaaaggagaatgggagaaataacttcattaaataaataaaaaaaaaaaaaacaaattcaccagtacaaaaagaacagaaacaatataaggaggctaacaagagtccaccaaaatgctgacaagagaatcttcaaaaatggaaaatgagtagaataatcatatttctgaactccttcgcaatggcaaaccatggacattgacccaaaaaagaataaacttaatgtcagcaggatttagctgaaccgaatgagggggctcagtgaagacaacatgtctttgtaagaagtaccaaggttgcccttccaaaatcctaagttcttctgctacagagccatacgttagcattagaagggccacccgcataactatctatagcaagaccatttcttattttgcacaggctgatctagtattagagagagttagataaattgtgatatataagatgaatgagctactcttctcattgccaattggttttgagatgaaactccattcattttatctcaaattctaaca

SEQ ID NO: 38773 - DNA, 1701 bp, Cannabis sativa
ggcatatcagcccttcctaagaattgatacatgtgtttaattgttcattcattgttcataagtttactagtcctcctcaaatcctaacatgaaatccaggatatacagagttgaatactacattggcatctcagcccttcatagatctacacctctgcatataaacatagtttctttcctaataatcttccttcatttccctcgatatgccagaagacacaacaccattcatccttagctatctacaccctactccaataactacatggtaatgtacattcttcctattgtttcatctttaaagctaaaaagactccgctaaattttcagaatttttttgatagaattccatagcaaattttccaacaataatcaaaattctctttaaagcttggcattgaaaatctgtgggaaacatgtttctcgggaagagatgggaaacatgctcaatatcatgattaagtttatttttaagaaatcaaacaatcacaaatcaaaacaatagaatcccaaattattggaataacccatcatcgttattcctaaccattacaagctcaaatccatataaattaacagaagaataatcccatttaagtttttatgccaataaatttccagtcagcatatattatattatgccataccatattaccaatacaaatctaaaaggttcactaattaaaagttgcagttaccataaacagtttggataagtaactgagtcaaaaacaaaaaaacagaagtaaataacccatttgactttactgactttataaaaggtaaaagtcagatgggttcagtaagattctaaaagaagcatataatgataactgaataaccagtaaaagtaatatgaacacatatttcagacccacctcaactctatctaaccaccaaaaggcaaagaagaaagaaaatgcctcagcaaagaaaaaattgacacaaaaatggaaaaaatttaaaaataaaataaaaaaacatttgttaaacattcaatcaagttgaaaaaaaaaaaaaaaaaactaagcaggagaataatccaaaactaattactaaatttgcaaagaccaatataaatttcttcatacccttcaaaatcaaattaaaaataaagctaatttaataataatgcattccaccacaaaattccactaacatgaagaaaaaaaaagattcaatttttaatctcaaatcatcaaaatccacataataatcctcataaaaccaataattaagaaccccaaatcaacagattaaactctaaaacaaatcaacaccgtattaactctccataactcgatcaaaaaaccaaaccgaatcgaatcaaacccaataaacttcaaaaaaaaaaaaaacatatatatatatatctaaagaaatcgcggtttttaaaaattgatcaaaaaaaagagattacgtaccgacatgaattcgtgcaaagaaggaactttttttccgggaaaagaaaatgactgtttagagagagaaagatgagagagagagagagagagagtaaagtttgggccagaaaatgggcctaatatgaaaatctggtgagaatttaggttaacggtttttaattaacggagttaatataaacaagaagagtcaatacacggcgtcgttttagtgtttgtttgcgttaaagtgaacaagaagagtcaataaacggcgtcgttttaatgttggtttgcagta

SEQ ID NO: 38774 - DNA, 1228 bp, Cannabis sativa
atgatttgagttgagtgaaatatgtaataacattgttagatcctcgtacaagagcatgtttattgtgaattaattcaaagacacgaggtgcgttcttttgatgaaaacgttctagaagatcaggccgaattgctgtagcatcttccaaatacacgatgctctccgctatgtctccatatacaacatgtaatatccacgaaatcacaagattattacatcgatttctcatgtcgttagcttcattgtcttcatcagaagctggtaatttttgcaagcaattagtgcaactgttgtagctcttctccatgacctgtaattttcacatccagataaagctttaagaactgaacttgctccaggataatcaccattatagagatgataaggacttcgaacatcatttggagttggttgattattttgatctaaagcaacaaagcgatttgaagtttcagaagaaatttgagtttgaattccttctccatgagctagcacaagaaggaaagcaagaaaacgattaagatttaggaaaaattctactatggtaccatgttagttgagagagtaaaaaaagaggaaaatgtgattctcaataaaataacttagaattacatagaaagagttatatatatagggacatgattttgtcacgtgatgtactttcacggaatgtattttgtgatgtacgacagccattaaatgggggagttatttgatctgagggctggcgttgatctaggggtaattagggttaaaaaaataataacgtacctgaagacctatctaatgtatcctgagactcatctaatataccacggaatacattccgtgaaagtatatcacggaacaaaaccgtgtccctatatatagttcaaattacaataaataatggtaaattagttgtaactaactctccctaacactattaactaactcatataactcacaattatctaactttagattctaacatgattaataatctttctcagtgaatattttaatttaataaatattatagaaaactattaattatttataaagcaccatctcaaaataatgttaaataccattaatatctaatatcaatactttttctaaaaatattgatacattatgctaatttatcactatactactatttgtacatattttttatgtgtgaacttttggaaaaatgaacaataataattatttctccatgctcaaaataaaatgttgtagtcat

SEQ ID NO: 38775 - DNA, 3255 bp, Cannabis sativa
taaaatttaatatacgtgcctcgcacgtagctttttgctagtatataaatatatgtgtatagatatatattaataatgagctttgtctctccaattatacacaccgaaaagaaaaggaagtacacttccttgcaaacaacagaaatttatatatttaacaccttattttttatctaattatcaaaaataattttgataacattttatttgtttgggtatttacgctactcgaatactcgaatgagcttaaaaaattttaaaatatgagaaacataaattttttttgttgctatttctatacatataagaaaccatttaattattaatatatagtgattagttatcgttttataatatttttaaatcttagttaataatattcattttagaattttgttaattaaacaatattatattatacgataattaattaactttcaaaataattaaaaagcatataaaataattaatatataataaaaataatagcttgttatattatacaacgtattaatttttaagattatttaaatgtattttaaattataatctactataatataatttaaaaataactaattaattactgaaatataattttatgacgtcagtttttatcaatactatagtaaccaaaatataacttttaaaatataaaaaataatacgaaaaatgtcaaaaaaaaacaataaatttgattgacatgacacgttaataataatagtaataatattaaatacaaaataatatatattattgtaaactgtcattaattagtactacgtacaaattacatgcatgatcactacatgtaaattttggaatgcatgtatccaattcttgtaatttgaaatatatatctcttgtgaggttttcaattttgactggctatgttctttctttcaacatcttaagcccgatatagctgcataaattaagaatcaaattgagaaaaagaaaaatatttgattagtacaagttaaatagaataaattaatcacaagtaatttaattataaattaagaggaagctatatatactacaaagatttttatttttgtagtcataaatcatgatgaaagacataaatgagttgaatgtttatatataatttttagtatgtgtgttgacgctaaaaaatgaccaattcggtcatatgtatagaagagatgacagctagaaataactaagtaaaatagagagcacacacaagaatttatattcactccccatgtcgcgttggtaatagaattacgtttatttcgaatttttattttttacaagaattacaaaaaaactggttgtctgaaagctctaacttctagagagagatgctctgaccttatggacagttttttgaatgtgaaaaatgagctagatgagctctccttttatagggaaggaggttctattaaataatcataaaatattctaaaaaatatagaaaaatacatttaggctattttgaccaatgatgatgatctaacagtaaaattgactttggaggtcggtcttcaatttccagagcttgagtcgcgttcgtgggatccactttgagtaagtggtagcttaaattcgtaactctcttgaggacaaaattagagttaaaaactttagaattgcgattagattaattatgagacatgacttgatagatcactgaaatagcttcgaaactcaaattgaattgagtcaatcgaatcaatattgagtgagttacaactgttttattgaaggttgttctcggactagagcctaagttgacatctagcgcccaggttgacatatgatgtcaactggacattaggtgagtaggaaaatatgttggggatatttttttttatgcctaagtgatattttgacatcacctagtttgtttctacgttcaagtgaagctgttcactagttctcggaggtgttgttgttttgcgaaatcaggagacttgaaactgcccaatttgcgagtgagtcacttttctgaaaaagtgaaattatgaagttgtgaatttgatttttctgatttcatagctctcggttacaatgaaaaactagacgaacgctcgagacagaattagaatcgggtaagcaaaacacaacgcaccaggtcacttgtcaacctaggctctgggtgctatttttggagcttccatgatgttgtttttatactttccagattcttgaaattgaggacaaggtctcctaccctgtgtttgaccatttcagagagaattctggtagcagaatttacatttggatgatcaaaactagcgcactaggttgattgctaacctaggcgctgggctttgttttcatgcccctagaattcttattttcttctcgagtttacttgtatcttcattatttttgctgatgggaaaaatgcccgaaatacttttttggaaaacatgattggaaacagcccaagttgacaaaatattaacctgagtgttgggcccagcactaggtgtcaacctgagcgccgggtccagtttcaagccactaaatgattttgtttaattttcgaaaatacttgtatcttaatctctgacgaaaatggaggatatgcctgaaatacttcttgaaaaaactcattggaattggcctaggttgacaaaatgttaacctaggcgttggacccttattctggctcccagattggtccgtttcttccatcgtaagtacttgtttcctcacttttgatgaagatgacgacaattcctgggatagttgttgagcttgatgcttggaagtagcctaggttgataatatgtcaacttgggcgctgggtgcctggggcacctggtgctctaggtgctctaaaatgaaagtgcttcgaatctcaatctgatgcctcatatatatttgtgacatgtctaagtcatgtcacagtataaagttttacccattggcactaagacaatctcaaaaactaaaattctagttggttgtcaacttgggcgttgggtgaaaccctaggcccttgagatgatttccaaggtgctatttcgtgtgttttcagctcttgcgccttgaatttggattcttcatgtcttcatggtacaaaatactgaaagatagtgaattgaaaacaacttggacgtaggactagggaccttccctaggtcaacttactatgacccgagactactcaatttcgaaatgttttttttattggtacatgttaaacattgatgtccacatcatcaggactacttttggtgtaaacagtatgaatgtttatgctatcttaattta

SEQ ID NO: 38776 - DNA, 2396 bp, Cannabis sativa
tgccatatatcttccaaacttggattcttatcctggttacgttgtgattcaacccgaatctcttgacaatgctgaatatgaagaactacctggtggagataatatttgtcctgaaaggcatgctaattttttctcacgtaagtaatttaagcttgtcattgtcggtactaaataatttctgttttggcttttaacactggattagatagcagtaagaaaatggttatggtgtcctatatactcttcaatcctttaactgatatcataccatgctactgcagatatatattttggatggataactccactcatgcagaaaggttatagaaaaccgataactgaaaaagatttgtggaagttagactcatgggatcaaactgagactttgattaaaaagttggctttaccttatcttcttttaatatgttacatacatatgttttttcttttttcataaactaatgatatgaattatgcttttcatttttcagattccaaagatgttgggttgaagaatctcaatgttccaaaccatggcttttaagagcactgaatcgtagtcttggaagaaggtattgaactaacactctttttttttttttttttccttttttctttgaattctaacttaaagaagagataataattttatttgcttcttttacaaaatgttgtatgtaggttttggtatggagccctattcagggtaaagatcttattcattgttattctttctaggactttttattgtcacaattgtttttaataaagagtatttaatgattgaaacttaattaaaaactgtcaaaaacaatctttgtctcatgtttgatgtctcaagatgcttatttatctttcactgaactctttgtagattgtatatgacctatcacagtttgttgggcccattgttttgagtcatctcctacaggttagttcctttttatggggtcttttccatttataattagtctgcatatctttttcttttgctctgaaattaaaatacttatttcttatggagaaaatgataaattgtaaaaaataatataaggaggaaaaatgacatgtcttttatgtgaataattctagaatcatgattggaactgataccattgtgatcatggttggaactgaagacaatggtttttgacataagtttttcttttctcattatagaagctaatcgagcaatataattgacatggtaacaataaattagctcaatgtgaaatgaaatctggttcaatccattttaccatcatatttgttttatgcattgtagagtgtagtttttgaatttgaatcatggactttctatttgtcttgttacgagctgcagtcgatgcaacgaggggatccagcttggattggttgtatatatgccttcttaatctttgctggagtggtatggcttctatctttcatctactcaagtaaagtaatgtgctttaagcttaaaattggaattcttctgtacagaactagtggcaagttgaactctgaatactgtagtttactgcttattccttggaaggctgacatagacgttcctttaatttctttagatttctgacttcttcgcgttttaattcatacaagataggaatggaaggaaactagagttgttgattgtgttcaaagagtaactttgtgacgattaacttgtttattgactagttgatttcaacctttttcagtctattggggtgttgactgaatctcaatattaccagaatgttatgcgtgttggttttcggatgagatcaaccttggtaaaatcctctcttctatgttacacttgtaaattatgttgtgttgtctaattctgtcaaactttttaggtggctgctatatttagaaaatcattacgattgactcatgagagtcgcaagaatttctcaacaggaatgataacaaatatgattacaacagatgctaattcacttcaggtaaagatatactacagataaattctattttgctttgaaagaggttgcttcttgcttgtatacattattttctttggttggatgagtgtggaagattggggccaaaggccattaatcaaattataactatgccatgttcgaaaatttcagcaaatatgccaacaacttcatggattatggtcatctccacttcgtattatcatagctctggttcttctttaccaacaattaggagtttcatctctttttggggcactaatgctagttctcatgctcccggtccaggtagatacactttcggtttcggttgtttcattgctaccttgctaatcctttaaattcttagtttcttcatccaaatagtgaatctcactgcagcatcaagggctgtgtattgtatttggtttgatattttcgttatcaaacatatgctcatatctttca

SEQ ID NO: 38777 - DNA, 3616 bp, Cannabis sativa
  modified_base (1240)..(1249): a, c, t, g, unknown or other
  modified_base (3434)..(3435): a, c, t, g, unknown or other
aaattataaaagggtataaattttgatataagttatattattaagggcaaataatgaaatttcccttaatatttgggtagttgggggtcttgaacacgtgaagttgttatttacactcttctttgtatatatattaaaattattctttttaagaaaaaaacgatcatattaaaactttaagagtaaactcaataagagaaatttcaagagaaaaaagagtgtcacacaatatcatcaatcataagagtgtctgcaaagcaacaaaaatacaatcagggcgactacgccaccaaacataatgataattcaaagacagtgttaactttgctaaagtgtgagccacactattagcaatcctagaatagtacataaaagaaatatcaataaaatagttacaatgaacaagaatatctctgataatacaacttaagtaagactgatcaaccttactataaataatggcattgataaaagtaaggcaatcagattccaacaccactccctgaaagtcaagacaacaggcaagtaagaccctaaagtagatactcagagcctcagcaacgtcaggagagaaacaacaattctaattccaagtactagaagctaggacgaaaccattatcatcatgaaacactgccccatccccaaatttgtccaattcggaattcaactctgcatcacaattgattttcaccacccaagaggtttagactatttaacaattagttgagtctcagaaagattaccaagacgaggattacaactattgatagaagagtagcattgtagataatccatactccaattaaacaaaaggtcatcattcacacaaatttttttattcacccatttattatgtaaattctccaaagacagactatgaacttcttaaacaaagtaatagacataacatcttgacaaacataaatgaattcatagatatgcaaggatgtctcgggacccaacaaacaaaaagggtaggtagtagcaaaataaacaccacgatggctcagattatcataagcaaacaaccagttatgagagaccttctaaaaaaatatttgaggaataattacataagacatcattttttttaaaataattatatttttacgctcaaagaatgtttttttttttttacatttttacggtttttcaaaaaatatcacgaaaataacataaaatcaacaagaaaactacataaaaagtaacatcaaaataacatcaaaataataacaannnnnnnnnnacaaataacaaaaaattaacaacaaattaacaagattacaatataaaaaaaccgtattttctgtaaataaaattaaaaaaatcgtaaaaatatttcaaattgtgtgaaaccgtaatagtgtaatttttttttattgtttttatgtttttgtgaaataatctcaatatttaaccttcccacggagttgtagttgcaaactttattccataattcagagttaccactagaactatagtaaaggtccaaacccatgagttgctatttagtaaaggtccaaacccaactaaactggtcttgtactatttgtaaagtggtcttttacaaatataccaatacagcatgaaaatggcattagttcaatgttaattttcaatgttctatatcatttagtgaggaagatctgataatggaattattgttttcttagagatttttttcattaaataaataatattatttaggtttctttattttagttttatttaaaaagttttttattaaaaacatgtagtggataataatttgttgatacgtgtcaatattaatgagtctagttagtatttaaaaaatcatagtaatagaagtgaaaaaaaaatatataatattaaatatttaatttgtcaaaaagaaatataatatagtatataagtttatgaagttgaaaacattaagtatgtcgcaaataacttaattgcatattttaagagttttttttttttataaaatttgtttaataacatgattttcttttttaaaaaaatatattttatgggaaaaaataataaaaataaagtttaaaaaaatataagaaaaatgatataaggtatctgattttcctaagtaggtaactagttaccttaaattgttttttttttctccatatatattttattttttaaaattttcccaaaaaattatttttcaaaaaagaagaagaagctactcttgtaaattttgccaaaaaataaccataaccaccttttaagtaattagaaaaaagaaagcaataagaaattagatattagtttcttcttttggaaccctattaattaatttaatgacttctatagtatatatttgaggagtacttataagctctatcacctaataagtgatgttgataaagaagaaaactacaaatgaaaatcacaagaaaattttctgattatatatttctcaacttataattaattatcagttgacatatataagaaactcaccaaagtattataattgatttgtattggtcttaagtcaattttaaaagtcttataaaatgagaaaataatttctatttaaatactttaaatttgtccctctcatataagtgtttgatgaattttgtttcatattagtaagtaaaaacagggtttatggttgtgtaattaattaattgacatgtatatatacataatatctatatatatatgtatatatgtcactttcaggtttcacaataagacacaagtcttaaagaggattaagatttatctttctgaaaagaaacaaaactgcaaaattagaatcaaacaaatttatgaaaatgatataacatcaatcccaaaacctttaagtgatgcagctttttattctgaaataaatatggaaatttatatatataaattagtttaataataatatatatatgtatatagagtggtcttaatattatccacgtacgtaccaaaagtattatacaatgacaacctcccgttaatagtcttttctattgaggtcccattatgtggatattgttcactaatattgaaaatcatctattatttgattaatctcaattctgcttaattttggtcgactatataataataataataataatatatatttttttttgaaattaaactcttattaacaacaatcagaatttaatacatcaataaaaaaaattgggaaaatcctcaatccaataataataatattaataataataattttgcaacttttaaaatttcaaataatagattatttcataaatattcttgtttgacaaaagtatatatttttaagaatttatatagtttttcttttatttatatttttactgattttttttttttaaaaaaaatataaaatattatctttatgttgttttcattgatgtttaataaacgattattttttgtaaaatttttacaattttacatttaatttttttttttatatnnttacggtattttataaaaatacaagaaaattatataaaaaataacaggaaaacaacatcaaaataaatcaaaaaataatatataaataacaaaaaaccaacaacaaaataacaataatgcaacataaaaaacatcaaaagacagtatttttaaaagtcgtaaaattatttaaaattttata

SEQ ID NO: 38778 - DNA, 3024 bp, Cannabis sativa
ttgatgctggtgttcgacgaggtgagggttgttctgggacgagttgtgtggtgtggaatagtgtgggacgggtcacttttgcctctatcacgacagtgcagcatgaactaggagttcaaacgaagacttcaacattttagcatcgaaactgattgcttggaagttgtccatttaatccaaaacaaagaagagaggtgtagagaagttgatggtgtgttagagaacatacgaagattgctattatttgataatgttgataatatttcgtttgtatatcgtgaagctaataaagtacgagctcatagtttagccaattaagctttgattaacaaaattagtactatgtggattgggattgatcccccttgtgcaagtcaagctttacaacttgacttgcctaatcctttgtaattgttgttgtggttgaatgaattttgtttcaaaaaaaaattgtagagaaataattccttttggcccttactttagtcaagttctccgatttctttttttggtaaacaataaaatatgaattattacaaattctcattctaaataagtaaacataatatttatattaaatgaaattcaagggaagcttatacaaaatatttaagaaactaaggactagaagtctagaattataaaaattatttataatttttcatcctaaatattatactttataatatcttttgtggatggactcagaacaaattcaccaatattatttatttattttttttttttaaaaaaaaaaaaagagattacactagattcactacttttattcttttttttaaaacaacaccacttttattcttatgtgtagagatatttttatttttagcattaaagaaattataacttaatttttgtttatataactgtgtacattgtgagtagacaccatttgtttttgaaaatttagaataatttactgtactgaaaaacaaggtttaaatattcaattggatacatttttcttaacgtgcaattgacaactttaaactctaatttcaatattataaattgttcaaaatatttcaaaaataaattaaatgcctactataattataatacaaacaaccaaataaaaaaattagacaaatatacaaacaaaaaagaaaaaaagacaatactattataattgctctttattccttctatccataattgggaattaaaaggtattctagatggcattaattccatattgaatacataatgtggagagagttctattttttattttttatttttcttctaattgttttatttttataagagaatccttaattttcataaattatggataccaatttccattgtttgctacatgaagaatggtataacctcaaataaagtttccactatatttagaagtgaccaagatagaacaaattctttaaaaaaaacaattgagccacttggaatgaaataattccaattccaataattttgacctcaattatttcaatgggacatttcccaagaggaaaaggaacaaatcaaagttagatattgatttgcccttcttgcataataaagcaattaagcctttaataactactattaacataataaaaagagcatatatacatatatattgatatgaagtatatctcaactcaaatttaagtgaataatgttaccatcactttagtacctatgcctttataaagactcaaaacacaagaactaaattaaccacaaagagaagaaccccataagcctaatattatttactatttaaggctctctttctcctaaatattatagttgttttgccatggcttcaatgcagtgtgaaaaaccaactaaggagattgagattgagattacccatgaaaataccaagaagattaaggagaagaaagatgatgtgaaaaaggagaagaaagataagcatgacaagaaagatgatagcaaaaagaaggagaagaaagtagatgatactaaaaaggagaagaaagatgatagcaaaaagaaggagaagaaagatgatggcaaaaagaaagagaagaaagatgatggcaaaaaggaaaagaaagatgatggcaaaaaggaaaagaaagagaagaaagatgatagcaagaagaagcacaaggatgacaagtagagactaagtctagcaaccacaggcaagttctctttttgttgaaaacaaagtgtgagtctcttttatgttactatcaattgactcaatttcaagttttctaaccatgatgtactcttacattttccttttgttttacagagataccaggaagatgtagcatatggtgaataaggatcgaagctcattataaaagggttttacttagcatgtgattactcctatacatgtaagaaagaattatcctctaatatctatgtcaagagaataagactaattaatgataagaaaagtgcacttttcaccaatttattggagatgttacaaatatccatagaaactatcaataaggcaatctaattaaactcagccccttcattaaaaagtttaaagtaatgtaaatatcaacaaagcacatacatgtctggcacagcttgcacaagcatataatattgaggtttgagacaccataattctacatataatataagattagaaccgagcagtcctcgacagagaacatggacagtcagcatcagaaaggtttagcctcatgaaacatattatatacagcatgagacagttcaagtaaaaacttgaaaaccccctattgtcctttgaaaaaaaaggtgtcacctgtctttgatagagcctgacaaaaagtctgcaatggccttaagagcctgatcttcagctccatcttgcgttgacccattggtttgcaggtgtttctttccaatcttgaaagagtgatcacccccatcaatgacatgcaaatcgcttaaggctttcatctttttacgagtagactccaacttttctagtggacagagcgcatccttgctacccttcatgaaatatatatgtgtataaccttagcatacaattagcttataaaagttcaagga

SEQ ID NO: 38779 - DNA, 1132 bp, Cannabis sativa
ggactatcagagaaggaatagggtgtccaaattaaattaaccatagatgaggtgatgtttctagtcttctttttcaaattcgaacaagatttaaacatgatattgacatagaatccttagttcctgaacaatgggacactgattatggctcgaatgaagagggtacctacagattggaataagaattgtgttgtttcccaattgttgggcgagttttacagatacctccacgctctatttcacaacaaaatttggatagattagttgggttagcaggagaaataatcaaagtatagaaggctcatattactaaaattgtgattaatggctattttacatttaaagtgtagtgtgacatctcaaaacctctgtgcctagggtttctttttcccagtgagggtcaaaatatttggctaccatttaggtatgatcgattaccctatatgtgttttaattgttgaagattggagaatgaggctagatcttgtatggagctgataacgatggtaaaagacggtaatgggaatcgattgtcgggttatggagtttggttaaaggttgatgaacgacacgactactttgcttaccaaaagagaggttctaatgatcaagaaaccaataaagttactacaaagttagacatgggggagttagggacaagttcgaaatagttcttgactaaattaactggcaagattagtggcgtgatgaagtagagggaagaactgagggagtattagattatgggaatggaagagaataattcaatgttggtagtgggtcctcaacgcaattttttaagtaaccattataaggagaaagaagtagtgtcgatagaaagagcaagggaggtgataagtggtgcaggttcaatccaagttggggagtttgatgatcggcatggggttgaggaaggcagagaccaatcaaaccaatgtaagaaaaagtgaggtggttttcagggtaagggccagacgatggggaagattttgatttaggattctgcaagattctaaaggaatgtgataccaaaggggtcaaaaagaattaccgctggctcaagcaccaattttggttgaagttccaatggctttcaatataggatgttgtgatccaagtcgaggagaaagaa

SEQ ID NO: 38780 - DNA, 2365 bp, Cannabis sativa
  modified_base (1159)..(1163): a, c, t, g, unknown or other
  modified_base (1464)..(1475): a, c, t, g, unknown or other
  modified_base (1627)..(1628): a, c, t, g, unknown or other
gtcattacaaaagtttaaaaataaactaaacattggaattgtaatatgattccattataatgttgattacaacaaactaaagatgccattagttcattcttgattgttgatcgtcctttaactcaaatttttagtgtattgttcttgttgtttgttaattcttgcgggtgttttgacaccacagcagagagatcatatttatttatgcatttacggagctaaatactttttttcctagttttgtttttgctacatagcaataatatatggaggagatatccaaataggccattttctttcttgtttttgtttttcttccataaaaggacactctcaacacatagaaaagaaacccttcattaattaaacgcaagaagacaattaagaaacatatacatccaaacaagaactcacataaacaaataaaacaagacaaacacatacgagaaataccctaaagtcataatgatgttaaactagaccaaaccagcacaacaaatgtcccaagggcacttgtgattatttctgaaacaaaccacaccagtacacacacctacattctcaaagaacataacaatcagaaacatacaagactacgtactgtagccttgttacatagttttctaataagttaaagtttttgatgatggggtgttttgttgaacatcatctaaggccaatccaggggtataacattctccctgcgaggtagctgagcaaatcattgggtagcaacagggatctgataacaaagcacaaccttcaccagcttgtttacagcctgagacaggttcacatcttcgattctcaccccatccccgctcaccttcacatttcagtcctccacagcaaatcttgccttgtgcccaatgacaatattcaccaggtaccctacaccgatcattaccaggtaccaaattcagatgaatatccggttgtagtcgaccaaagcaccccacaaccatcacacccactaccaacgccattaccaaaaacttcttcatcatttactctcctatacttaattaatatttttatttcttttgtaattcgtttacacacttgtttgatgcaatgatggccactgtacttataggagaaagaaaggaattttccctttaatagtttcacatatttgaattgcacaaagtttggtagnnnnntgtgtcaatgtaatgtatgcatgttttaattgtgtggttcagaaggtcattatcagcttctgaaaagttgagcagggtcatggtgattccttcaataatgttctaggcccacatacaaatacaatgttagaaagatatttgaaaattttaattacttttttgtgtgaaaaaaaaagagaatcacattatttaagtattaaagacgtacgaatggtcagttgcatgtctactttattataaaactagtaaatatttcacgaatgtataaaatattttaaattatataaaaaaaaaataaatnnnnnnnnnnnnttaataataattacttaataaaatcatattaaaattttaactttattcttaaaaaatttgtgacataaatacttaaaattttaaatttgttgctaataaataccgaaattcaaaaaatagtaacataaatcttcatttatggtttaattttnnttctgatgtgtgtgttaagttctgtgttcaaattttattgtgattatttttaatatttgagttttagtgttttattgaggttctaatatttgagtttgtatttatgtgatcattttttatttatttgtttatttatttttatagattttgagaacttaaaatttgatgttgtttctattgattattaggattgaaagtttgatttttcatacgggaattaaagtttacctttttgtttcattgattgaaaaatattagtagaaagtttatggaatgagaattttgaatatataaaagtagaattgaaaaaatagtatttgaatcaaaaatcaaattttattgttaatctccttacaaaaaaaagtttattcttaatctgtaaagataatatggttggaagaagatagaaaaaatatttatttcatttaacatgtatataatgtttttttttttttgaataatatgaatttattttaattattttttgttattaaaattatttttcgtaaaagaattattaatttggctaatactatatttacatgtggcactttattgatcaactaacacaacgatagattgagtgttaagtttaaaaattatttgaggataggaactacaatgatgacatcaacttcatatgattagaatatataaaaataatacgttatgaaaaaaattgattcataatctcagacctgtttcttcttctacataatctcacacttgtttttttt

SEQ ID NO: 38781 - DNA, 1513 bp, Cannabis sativa
ccacgtgtcaattttttattggtcaaaatcataattttaattaaaaataaaaaaagaaactaaaaaagttattttaaaatcatattttttctaattctttgtcttcttcacccatccccatccccagctcgaccctcaccccacccccatttccaaccacggtcgccgtctaccgtcgacgtcaaagaccaccagaaaacaaaacaaaacaaaaccctgtctgcagaaaaataattaagtaaaaaaatttccaaaaaacccagaataccctatatatatatttcactgcagttattccccatctttggtcgccaggtctgaaccactggtatcacaaccccaggtcgtccctcacatcccgtatgtgatcgaagaccccaaccaaggccaaatccattagaccattaccttgcaagaaaagagagacaacgagagagaaaaagagaacaaaaaaagaaaattaaaaaaaaatgaacagataattgattctttcacatagcctttcttttcaattaacactctctaaaacccctttttgcgataatttttcttttgggctttcgaaaaaaaataagaaagttacaagttttttcaatttaaggtgttgttttgggtgattgtggtggtggtctttccaaagcttcatcaacaagtgggtcgatctctaaggtgtctaaagatgacaatttgattttttcttctgaggatttttcttccccagatgagcctgagctcgagttgggccttgggttaagcctcagtagtggttttattatgaaagctcaacaaagtatgagaggttaatatgctaggatcttgcctgctaaggatttcccttcaacttcttcttctttatcatctcctttctctttaagcagagctaatgtattaatattcattcatagtgtgatctgggttttgtataaaaaaatatttctttgattgtttggtttggatttgatatgttaattcattgttcaatttctataattgtgtgttcagtatgtgtttgtgtttgaatttgtctataattgaaggtcgtggctgggaatgggatgagggcgaaggtcgtggctgggaataattttatgattctaaaataattttttattttattttattttaaatttaaattattatttagactaataaaaaattaacatgtgatattttattagtatctaacagatcagttagaaagagagatcaacggacttataaaaaatgtgacattgaagactattatcgcaaattttttatgttggagactaatctgcatcaaccttaaattttttaggatttttatcgcaattatcttttattaaaattagaaaaggtaaaactttattaatatagataaaagaaaggaatacttccctctactaattttttaaagaaagacattatgacttttattaatttttattttatttttaatattaaatatacaatgacaattttaacctttaaaatatgtcttacaaaataaatattatagtttaattaaaaaaga

SEQ ID NO: 38782 - DNA, 2313 bp, Cannabis sativa
gggttcacgttgacattatgaggatcatgtttcttttgcaggatgactctgctcttagggcctccaagctcgggcaaatctattctacttttagctctggcagcgacttaaaggttagtatacttgtttagttatttttcacaggcaccatatggtttagatgtacccctaatcctctagcgtagtcaaattttcttctactttgtttttttaggttcgtttgattgaaacaatattgtatgtttaccaaagcaacattggaagttttgcttaattattgaggctttcagtgattaggttcggttaattttttgtcagcaatgttgtgaaaggtctaggccttttgcctctttgagaagaggtgtaagctttaaattttataaatctgaaatacataaaaattgtggctaccagagtgcttcttaatcatgaagatacataatttaatcatttcaaaaaaaaaaaaaatacataattcaatattagacttgtaaataagaatgctacactttttgttttctttcaaatagtccatttaatacttgatttttgatatcagaaatctgggaaaatcacttacaatggagtcaaactgtcatagagactttggacttcgcagctaggtgtcaaggtgcaagtgaaggatttggaggtttgttctcccattgttaatctttcctatttaacagtaatgcaattttatgattatgtagtttctgcaatttactcgtattttattatgcctcaaaagtactctggttctgcattttcatgattgttaatatttgagaattaattacacttgctccattttttcttctttcacttccttcaatcttttagcgtacatggaggatttggctcggttagaaaaggagaggaacatttgtctaagtcctgagataggcatttatgaaggtcatcaattgaaatctaaaaatgaattattcttggcatctagtgaaggtcggggcctttgtaacatcaatcctttggtaattgcagcatcttttctttcttttacatttttttgagttaatttagtcctcctttgaacattaactttttaaatttagcacctaaattggctttctgttaggatatcattttcattagttattcaagaaacctgttatttgcagcaggtctgtgtaccacatgttttggtttggaccttttgttttttttcttaaaactgaagtattaggaaactcttctttttcccgctacatatgatggcattgtattttaacattagaaggacacacaattagatagttctgatggtcatcattattgaatggtctttataatctttctgtgtctaatctattggacgctcattattgaatcaggaagctatttctgtaaaatgcaatgtggtattgcatatcaaaagatagtagaaatctccaacctacagatgaagagcttaaagtggtagactatatatttcataattttataccgatcaagagcattcaagagtaaaaattactccatcactcataatttttctatttcctgccactatatatgtaattgggtcattaatatattagaattaatttgatctgttattgtaggattggttttaattcttttgttcattacaatcagtgtaattattgctacaatcaaagtagaaaatatcttaacataaaatttaatatacgtgcctcgcacgtagctttctgctagtataaatatatatataataatttgagacttataattatgatcctaaatgaataagaacaacagataatgaagttattaaattagaaatacaaattcaaagaagcatcagttttatttgatcatttccaaccaaaattttaaatttttaagaccacaaatttcacatatttaatccatatgcattttctattgcccaaatcaacaaactatttaaattcaaaatcataatactaattaaacatatgtatttttgataggagaggaagatacagacaaaatagaacaaggagagagacaaccttgaagtgttgtgttttgctgaagatgacgatgtggccttggtcaaaaggagaagagggagacgagagagagggaaagtgagacgaagctttggttcgtcgggctgttggtttcaacgatctgcgaatggaggtggatactccgacgatatattagttcgtcgggcagagggaggcgctagataataagaggtgatggaatttttttttaaggaaaatattcagctttaacataccctataagaactgcttaaagaagattgagacgcttaatattactgtgaagactttgaaactaaaattctcaaaagtt

SEQ ID NO: 38783 - DNA, 2873 bp, Cannabis sativa
tctaattatttttagtatattcagtatattcagtgttagttgctttgcctttctactaatatttatgtatatatagaagatttagtgtatatataaattcaatagtagtttattcaaaagtaattcgaagggaagtgtttctcttcatattaggggattaagcttctttaattatgttcctatttattttaaagtgattatttatttgtaagtaattattctatggttagatactcattattcatacatgtttttttggcttttgtaaggatttttgctgttatccagcaggagcagtagctttaatagttgtattggattggtcttttattcttgaattacctattagtttgtttgaatctgactgtttaatattgatttcagttttttcgaagaaatctttttttataatgagataagttctttacttgataatattgctagtttattatctaatttttctaagctatctttgattcatgtttgtgttaataaaactgcatatgaattaacagtttgtacattcaaataacagttcgtgttcttaagataaatgataaattagtttgcatgaataattttttattgatattaaaaattaacacattgttaatgtgttgaaataaattgtcacatgtataaaataaatgtactactctttttattctttttattgctaactaattttgcaatgtaatttaatttattttattctcaaattctactacggtggtaccatagcaaaaataaattcttatacatatataaaagatgaatataaattcattcgtaaagaaaaaaaaaaacagaagagagatattattatataatatataaatagaatgaataatgcactgaatctagcggtgtatgagtctatgcactgtatccggcgctggttctccgccggcgccgaattccgggaatccctaaaagaactatatgcatgtatctaatttattacctcttcctgacgcgtgttctttttatcgaaattcacatacatgtgtctatagagagaaacagagtgtcagagtgacttcgtaacgaagtaaaacccagaaaagagaagaagagttctcatggcggaagtgaagaacaagcaggtcttactacgagactatgtctctagtaacccaaaagaatcagacatgtatgtaaccacttctactctcaaactcaagcttccacaagcctctaatggtgttttggttaagaatctctatctgtcctgcgacccttgtatggtaaattgtatgaagaagcatctcaatcctgcttcttatgtagattcttttaaaccccatttggtgagttaatcaatcactcattctctcctcctttttcttcatatgtttagttgtttgatgcttcatatttttgcagccaattagtgggtttggagtggctgaagtgttggaatctggggattcgaatttcaaagtgggagatttggttgggggaattactgggtgggagcaatatagtatcatagatcaaactgagtcactttgcaaaattcacctcactgatcttccactgtcttactatgctggtattcttggtaagcttactatgtgtttgttaatatttccaactgaccccttttactattcattacactgatttggtttagtttaaattcagtttggtattacagtcataacagttatgttagttattcattttgttatgataagattgtatacttgtactttgtatcttcactagctataactaatgcatcttttaaggtcatgtttggttgaaggtagtggaatggaatggaatgaaaaggaatcaagtggaaagaccattctcattttcattcctattcccgtgtttttactcctcctaaccaaacatatcctatatagtttttgctttgatttgctatttcagggaataactttgtatgacacaatttcttgaaattttcataataatgtattttatgtaggtatgcctggtatgactgcttacactggtttctatgagctttgctctccaaagaaaggagaatacgtctttgtttcggcggcatcgtgtgcaatcggtcagcttgttgggcagtttgcaaagctgatgggttgttatgtggtgggcagtgctgaaaacaaagaaaaagtgagtattattatatactgcagacgatatagtactatacagtacaagtaattctaaagtctctcttttccttctgtttgaaggttgatttgttaaagaccaagtttggatttgatgaagctttcaacgatgaagaagaggctgatttgggtgcagctttaaaaaggtttcatatatttttttcacaacccaagttgtattctatactaatgtcatatccattgaaatgaaaagtgaataaataatctgttttcaactgtggcaggtactttcctgaaggaatagatatatactttgaaaatgttgggggaaagatgcttgatgcagtgctactaaatatgagattcaatgctcgaattgctgtgtgtggaatgatctcacagtacaatcttgagcaccctgaaggtgttcataacttaatgaaccttattaccaaacaagctcgattacaaggatttgtagtgactaactactatcatctctaccccaagtttcttgagtttattctacctttcatcaaacaagggaccatcatctatgtggaagatgttgctcaaggcttggacaatgcccctgcagctcttgttggtctattagctggctgcaacattggagcacaaatagttgctgtttcatgatttgtggcctagttgggatggttctctactagctaatctgcaaaccccacctaatcatgtatctgcgtacattgggtgtattagtactgtttgtgttgtgctgcaatg

SEQ ID NO: 38784 - DNA, 3337 bp, Cannabis sativa
tatgatatttgaccactataattgtattgtaaaaataatttccaaattgtactcttttctacaaggtaataataacacaactcatattacttgaagggctaagcaaatcacttcaattttttagacagaaaagagtatgatttgtcactagtaataattttagtagagtttaaaccaacattaaaataataataataataatttgatagacaaaaaatcatcatatttataaaaataaaataaaaaaaagtcaaattgtttgctataacattggcctactaactctatctttttcttttgtaaaattatgtaaaaataaaaataaaaatcaattgagtaaaaataaaaagtggaaaagggatgagttatgtttcttgtgttgagtgtaaaacaaggtaaggtaatggaaatttaatctgaaattggtaccgcatgcttgattgatgggtctctttttgtgtgattgttatgtgggccctaattcaaatctaattcatttttgtaacaaaattaagcaaacaactagtcattatttttagcaaaaaagggtcattaacttacaaatatttcaatttagctcaactaaattcatgattaattaacttaccaacacttaaccctcttattgccaaatgtgacttgtttcgtttcgatcaaagattaattttgtgaacttaacttgaattcagtagcgatgtagctctcaaattctagtggatcaatcattcgagtaataataaaatattataaggtgacaatttttttaatcaatcacatttatctaaaccgatcaaattcattatttaaaaaaaaaaaaaacaacaacactaagtcattgtatgtaatatttagatacatattttgagtgtacgtatcattattggactaaaataaatggattaagtatcaagtagttaactaaaaaacaagtcaaaactcaaatatatattaactaacccaatgaatggtcctcacttatgttggttgtagtaaaggcatgatgatgatgatgatgatgatgagccgtgcatggaagttttggtggacataggttttttcttttttttttttttctttttgaaggaacaataagttttggggttggggtgatagtagaagggtaaaaccgtaaataagtaattataggcgtgaggaaggtcactatgatgggagccacttgggttgttgcatgggaacatgatgctttgcccccttaaaccccccaaaatcactcaaaccaaactaacttcactctctctttactttctcaatttacatttctacccccaaccctctaactaccatcaacttctttcttaaataattacgacattatacttacactccaatcactcatgtaaccacccaatcttttttttaaaacaaaatttagtgttctttcacattattttgtataaattttgttaatttattttcatattttccaaataattattttttattctaataagatttcatgtatgttttttttattttaaatatgtgtgtgttttctaatactagaaaggagatcaagtagtgcacattctattcctaatttctttggctttatagtaattctacagaccatcaaggagtaagttaaggcttaaacatagttcttaagatggatgccaattaagaccctcctacacagggaaaccataacttacccaaaggacacccagacactgtttactcccaaggagtgccacatatttaaatacaaaagagtgttaattataactttttgttataatctctcagtcaaccttcatgttcaaaatcacatgttggagttacaatactatctcggtaaattttttttaattttttttatagcggtattcgttgtagttacaatactatctctgtaaatttttaaaattttttaaatagtttacagtatcgaaagtagagttcttaatattctagtttaattaccgcacatattaataaaatttcaaacatatgtttgacactgtaaactattcaaaaattttcaataacgatgatgttataactataacaaatacaactataattttttttttatttgaaaaaaaatattccaatatgtattttgagtacaaaagttgataaaaaattataataaaaaattgacgatagcaccttaaatatatgtttttagaatgtaagaagaaaaaagaaaaattatatatatatatataaaaaaagagtataaattttaaaaaatatatatttaacacaaaataaaaataataaaatgagaagtcatgtcttcaatcttttttaactttctgaatttacatttctacccccaatccaattgaccttattatatgcaaatagtctctttttggcgggttcgggtttcaagttttattactctcccgcctccaaaacccgaataacacttttttcttttattattatttatttttttttttaaaaaaaaaaaataataatctactctcttgtcttgagtgtagtgtatttgactttttctgttaaaatattcaatggtaattaacttctttttttttttaatgagtagttcatctttatccaattaaaataaatattttttgcttaatggaccaaattatgtaagtaatttattttggtaatgaattgataagctaaaggaatgaaactaaataaagatgttttgactatatattagtatgaataatactcatcataaatgtatataatattagtcaatgtttaataatgataaataaattagacaaatttgagagctaaagttgctttaagtgtattaagtactaatacgtactaacctaaaaggctgtgaaaatgtactatgactttaattagaaggaaaaataaaaaaaatacaatttttagtcttattttatgttttaactaaatattatattttaaaatacaaaataagactatgttttgactaaatattatacttttactctatcatataattttgataattgaataaattttatattttgtgtaattttataaaaaaaaattaaatattatatttttgctaccaaaaaaattgttttgaaaattgaaattttaatcttttaatttgtgtaatctaaaaaaattaaccattataaaaaaatgttatatgagattcatacaaataatagcattaatttatagataataatgtaattagaaaaaaaaaatgtaatgtattttttaaaaatagagtagaaataccatttaattaaatagagtgttagtatatctctcacatttaaattataaataaaaaatttataaatatagcccttaaaaattaatttgttaaagattaattatattatttgcacttcattatttaaaagtcaaataatag

SEQ ID NO: 38785 - DNA, 2463 bp, Cannabis sativa
agaagccatgatttgtttggtcattggagaacttctctatttcttttttcaatgcttttattttggcttgattgtcccttctctggttttgattccattgatttaacaaattgccacaaatctgaattttttccccaaattctgtagccgatcctctagaacagccttcttgtcaactgtctttaatgattcttttgcactcatctacatcagcccatgccttttcgtaatggaaccgtgaacaccatttctgcttggtcccttcccctttcgggtattgtattgaaagtcaaccaacagtgggcaatgatcggaacaccatcttcctatatgtttcactttggctactgcgtaaagtttccaccaattattatttaccattactctatctagccgttcaaacaccattctcgcttttcttccattgcaccaagtatagttacttccttccacttcaagttctctgagagcacatttgtctatggtggcgttaaaatttttcattagataccccggtttgcctcctcctcccaatttctctttgatacttctaatttcattgaagtcacccccacacatccaaggccccacatcgcttcttgcaagtcttttcaaaagagtccaagagtgttttctttgagaaggatccgggtccccgtagaatcccgtaaagcgccaatttagatcgtcctccgtattgatccaagcatcaatatggaaatcattgaacgatcgtaattggaccgagaaaggagccttccaaaggagagccaaccccccacttttacctttggcatccacacaaaagcaaccatcaaaccccaaccgaatacgaatcgtctccatgtaatggcttttagaccgagtttcagaaaggaacacaaaacccgggttaaagtctctcacatgagtggcaagagcgttcacagtccaagggttgccaatcccttggacattccagattagagaattcatagtcctcggcgaccctgctccgcagagttcgccgcttcgttggtctgctcaggagttgaatcacatggcattgaaacttcccctgctatagcatcaaaactgttcccccattctttggtctcggtgacttgattcttggcacgagttgctgactttggcacaaattttctccttttctccctttgttttttcggttgattaattttcccagcatcataggtgatggggacatcgaaaaggttgccgcttgattcaaactcttctcttgctgtttcattgaattttgccttgcaatgtctattcttatttggactcattgaagcctccttccccaattctgatcccattctcttcctaattgccatttctgcctgttgctgattggattccatagtttcttgaacgcattcctcagcccgaatttgaaacggaggagtagagtttatggttagaatggaatcctcattatttatgctagacttttgataattattaatgtaatgagcatgtataggattacctttctggttgtttagttgtggaattaaactctctctctctgtggtacgttgttctatcccccgagatggaattggtcttcctacgccttggctattagatggattcatctgttgggtctctttatggctagtggattcgattctccctgtcatgtctaccttcagccacgctccatacgccggttctatctcgccattttccttcattatcgtaactttaacttctggacattgccgcacttcatgtccgatcttcccacagttaaagcacatatagggcagcctatcatactgaaattgaagccatctacgtcgtccttcatgagggaacaaataaccaggaaatattttggattgaatggagttcttgactgtgaatttaaagaacccattaattgtgattctattgatatctggttcttgtatatccaccacttcaccagccatcccagccaatcgtaacatattagtttttgttattgctttgattggtagatttagaattctccccgatatagtgaacgatgtcaatgttgtctcccattccgtgggtacgccatccattcgttcaagtagtaagaaccctgcattcaaaacccatggggttcttcccaaaattctttccagtgtagtgttctgtttgaaagaaattatcaagaagagagcttttgctgttattttcttgattttgaggtcccattccaattcccccaaattccatagtcgacataggatgttcttcagtaaagaacgggtgaatggtttcatggtgcaaagtcgcccaatgagacacagtttcccaatatccgctgccccttcctcgttgattttccagccttcctcgtcggttaccgtcaatttactcgttcgagagagaagttcttccatttgtgccatgctttcagagcacctctgttgaataggctcttccgaagagagcatgggggaatcgccaatcgccattttc

SEQ ID NO: 38786 - DNA, 1243 bp, Cannabis sativa
acactctacttattaagggtgacttttagaggcgacaattgtcgccccaaaaagttgtttcattaaaaatcatttcgtcttccccgagccccattctttgttaccctaaaaaaatctaaaaatctctctctctctctctcaaatttctttattaccaccaatggtggtctcttaccaccggtcgtcgtcccctcccaaggcctgaacgaagtcctccaccaaatctaaaacccctcgaaacgccgcccaaacttcaagtcttccctcccttacttcgttctctctcgtttccttttgctctgccgcccaaacaagcccacaacggagtacgatgatggacgaacatcgagctggggatcacgaatgtcagggcttcgatggatcaggtaagattgttatttttcttcttttttttttcttactcttctgatttggggctcgataggaattttttttttcttcttctttttgggttaggggactctgtatatatgaattttgtcaaggaaactttatcatccataaattttttggtataaaaatttctgtcatttatatatatatatatatatgttaagattgatttgtttttttattaatttcattaggaaggaatgcacccattgcagccaagtctccgtctcaggcggcgtcctaaagctggtgcaaccaaggtcattaatcttttattttgactttgattcttttttgagattctgcttttttgtttcttttttttttttttattttgcctaatataataagcttttttttttaaaaaaaaataaaataaaaaggatatatgcttatgaggtaattttaactttagtgttttgcattatatagaaattttgtggttttggtaattggttgtatttgtatttgtttttcctttctaaattttattataatccttttaggttaaacattagatcgagacccttgttttcattccatagtgtaactttgtcatttgatttttttgtttctataagatgctctatggatttagtagctgcaattaggagtttgaattaaagtgaattgggaagaatattttttttttatgtaagtcaaattattttttgaaattatatttattattcttacagtatcaaatttgcttcttttattctcaatccaatttacatgaattagtaatgaatattgtttgattttgcttggtatttaatgtggtgtgctttgattcagtgtattatcaccaaatataattataataaac

SEQ ID NO: 38787 - DNA, 2661 bp, Cannabis sativa
tgtctttatagtctttttttttttgtcttacctatatctataaatacaatcatgttatttatttcttttatatataaaaaagcttcattaaaacctcttagtaaaccgaacaggaaaaatcttgtgttgtaagttgttttgcagttaaaggttaaaatattagtgggctagaccagcacatttggagttaaactaattgtcctagcttattgacaaagtttataaaacgtttaaaaagagattccaaaaccattacctaccaatattatgcaacaaaccacgaaatagttaccaagtgataatctcacgatagaattttattaattgaataaatactaatttagtgttattaaatttatcttaaaaaagttatgcaacaaaaatccataatcctttaaaagataatgttagagagccaccaaaaattcaagccaaagaaaaaaaagcacccaaaaattcaaaattaccgatctaaaaattagagcaaaaaaatcacttatgattaaaaatagtgagccaaaaaaaaaaaagaaccgcgcttatgatcgagctgttcaagatggtgaacaaataaaatagctaccatcttgaaagaaatgttagagagtatcacatattgctaatgtgtgaaaaaaataatggaatatttaagatgaatgagttacttctcttattgtcaattgattttgaaatgaaacctcattcatcttattttaaattctaaccatcaccatgccttttagctgagcgacatgtactacctaaattagcatataatagttattacatctatatgcttagagagtaagtatttcaaaaggaatgttaataaggatatctcaaggtggtaataataggtgacataatgttattaataaattttaagaatttttacatcacatactgaaattttttatttttttattttttttttattctggggtagaattttttcttcaataatccgatctaaaagtgttatgacaaaattatttacattttctgtatttgtttgcattaggaattatttttaagttgattatattaaaaaaaaaagttgtcaaaaattaatcccaggtcctatttttactattttggaaaatacaaggtccattttgtcatttaataaaacacgaagtccaattagtaatttttgcaaaacacatggtctaaaatggtatttactctttttttatgaggaaaagtgtgaaatcactaaactatgcttacaaccctatcacttaaatattttttattatgctttgtgtgtgtagaaatatgtgagttttttttttccttaaataagaagaacaaaacaaagaataataattaataatggagagtttttgttatgatttctttatgtaaatgctagatgtaaataaagataaagaatcacaagaccagagcttaattataatttatatatatgatcatgttgatataatgttattaattgatgcgatatttggtgaagtttgattattaattaggcgcgcagtcggtgtacatctatacattatattataatttgtattaatctaaagtcaaccttcaaaagttgaatgttcactttcgaaacatttagtagttatttggtattcaagcagtttatatacagagttcttttatcaaaaaaaacttttttttttttttttgtttctcttttttagtatttttaagtatgtattttattgttgtttcttctgggcacgtacgagacacactatataatgctcacaaaatcgtagatatataaacatctaattattagttgaaagaagctttcatggcaaaatcaagctttgtccttattgttcttttatgcagtttaataattccaacaaaatgttatggtcattattctgaacaatcagcagatgtagctgggagcttgtttatcttgggcgattcgttttttgatgcaggaaataataactatatcaacacttcaggtcaagctaattactatccatacggtgaaaccttctttaactacccatctggtagattttgtgatggccgaattcttcccgattttattggtacgtaattaacttattataaggttatatagttattattttttattaaagcattgcttatcttaatatacttaatttatagattcacatcgagggaattggcggtgagcgcttcccatcctcatctttaagaattttaatctctattcccgtttattttttatgtggaatgaaatggagaatttcttaatgtaaaaataaattttattatgaaattttacatatataaaaatattaaattatataaaattttatttattatttaatttaagattatataaatttctagttaaataaactaataattgttaaaatatgtacctatattttttttgcagctgagtacgctaatctgccattcattccaccttatttattccctggaaatcatgactttaaatatggggcgaactttgcatcaggaggagctggtgctctcaatgaaactagacaaggatttgtaagttaatatagccattgtttgattttatttttcttttttgaacaaaaatatagccattgctgtaaaaacagaaacaacttttttttttttttttgacaaatataacatagaaaacatgatcatttatgtttaattagcttaacacttcaaagt

SEQ ID NO: 38788 - DNA, 3463 bp, Cannabis sativa
ttttttttttttttttttactgtgataattagttatacttttatagagaaaatatatgaccatttcttttctttttaataaagaagaaggatgatctttgaatagtcatataatcatgcatgttttggtacgtactttccttgagaaattttggcgttttttttttcattgattagattatgaatggaatgtttattgtgagtttatttcttttcaaaatttagttaccgtagtatccatttagtttttgtgttactaaaattgcttcaattttatacagctaatttggattttaaataaaatttgtccttaattattgagatggttagatttaaattttttatttaattttattaaagaagactttgcgtggataaatatttaagaggtaaaatttcattcttctgaaagtttaaaaaacatgatttagtagatattaaaatttaagagacaagatttagtatatggacaatctttatatcagtaaaattgaatgaaatttctttaaaatttaacaattttaacaatttaaaaaaaaaaattaatgacctaaaaaaattgagtgcgcataatttattatatgttaaaaataataaaatttagaggaaattacactctataccatttttatattatcctcttttatttttaccctcttttttaaagtctattatttttatatctttttttaaacattgtacaaattttgcctctatcacttcaagatactctccatgtgactctcttatatcagggtattttgggtacaatacgtataaaaagaggtatgtttcaattagatataaaattaaaggtaaatttaatcaactgattaataaaaatggtatttttcaacttatccctaaaatttacactcaactccttaaaatcatgttttaaggtggttagagagatcacaagttttctagttccaactccctcaatagatttcaaacaaacaaaaaaaaaaaaatcccccctcaatattaaaaaaaaaaaatccttaaaatcatctaatagtattaaacttaaaatttatatccccacactagattaaattagttcaagagcatttacaataactctaaaataatatctttttttaaaataaataaataaaataccagagaattgataaaaaaaaaatgagaaaattatacttatctatcaattgacatattttaaaaaacatataataaaatcatgtaaagaattaattagtatatatgtatatttatgggtaaatgttattttggatcatgtgttttgcaaaaattacagattgaaccttctgttttgttaaatgacaaaatagatcatgtattttccaaaatactaaaaataggactctgcgtttaattttcgacaactttcttttttaatataatcaacttaaagacaattcataatacgaatagatacagaaaatgtaaatagttttgttataacacatttaaattggattaaaactaaattttattttgagaaaaaattagttcatggtcctatttgtattattttacaaactacataatctattatatcatttaacaaaacaaagagtctaactaataacttttgcaaaatacagaattcaaaataatatttacattatatttatatatattggaagggatttgagcttgaaacctctattattaagagaatgtaatgtttcttagcatgtggggagaagtaataaaacttaaatgtattttattctaattaataatgtgtgttatacattaaatgtgtatgtatattaaaaattgatatatgttataatgtaaaattttcatttaaaatgaaaaaaaaaaaaatagtaatctattttgaataatagagtagaaaaagtattaaaaatagtccaacaaataagtgcatacctaggagtgctaacttagtaaactaatacttatttttatactccaattgaattattactttataaaattacattataaattattatcattattaaaataaatatgttgattattgatttgagaaaatagcaatataaaatgaatttaacatttaacaaacaaagggaaatgaaatttattagtgttgatgactccggccatgtgcaactaatgaaacaaagtagaaaatttgtttgttgccaatcaaagagctatagcaaggcaataacttccatttattaatttgatcttgaaacaatctataataggcttagacactactgcaagtacattctccatagaatcgtagagtagtagccccaacccaataccaacctatttcattttaggagtcaaaatttctgttgtgtagaactttagtggtcctaaaagaggagtgaataactaaacaaaactaaagctagttgagaaaaaagatagtgcacacccttgttaagtgagagtgagagtgtgggccatgtcatcaaaaaggtgtgggataaggaaaatattcaactccttcagaatataaggaatcgtcaagtaattattagataaaaatatatgtgaccttaactatttgactacatttccgtaacgatatacttcttgttattcaaaacaagagcgtacgtacgtacttaatgatgttagtaccgcacacattcattcatattctttcaataaataattagaactgaactagagcaaacactataattttttttttaatctaatttagaatatacattaatctaacttagaagtattaatgaaataaattatgtaacatcaaattaattagaagttttatggcattaaatgggacgttaggagtgaaaatcggtggccatagtctttcaattacatttattagttctcaattactttgccatttgtaccatataatatgaacacccagcagacaattcagtaagtcaataacgatagttatgatggagactcataaagagaccaagagtagcttgtgccactacactccccatgtgatcacattcatcataaaccataacattttgagtaaaagatttaatgtcactacttatctgacctcttcacctctcaaaacttgttatcttttctttcttttgaatatgaacctgaattccattatgttgcttctaaaaatacatatattatatatctcacgagcttttcataaatggttcagaactcatgactcgaaattcaataattatatatttattgacattttgaagtatgtatcattaatatatgatggaattcagattcatatatttcaaagacagaaagaaaaagaccttaaaatatgtagttgcagacagcaatgataaaaataatgagcccaaaatttagttgggctataattgaagttcgctttacaaaatatatgaacatatttatgggttaatttcacaaatgcacaaaaacaacaagaatacgattttacagaattttaagcatttttatgatttttttaattttatttacataaaatacggtctttttaagttaaaattttgttcatttgttgt

SEQ ID NO: 38789 - DNA, 1649 bp, Cannabis sativa
cacttcaaaatagattttttttttatatacgaaaatttacatagcaaccaacgaagtaatttaaatcgcaactaaaattcacataaaaactactggagcaaccatcgcagcaaccgaaaccgtaaattttttaaaaaaaagttaaaaaatagtatatggggtaatttctcaaaattactattttttttttataaatttatacaattatttttgttggcctctaggttgggtgagtctaggtgcaggcttaacctgttttagctcaaggccggccctacatccctccttttgcctcataatctcagtagtgtaagttgtttaaaatttcaattctctatacaagttggggcaatgtttcaacaaatgaagtttaacttccaaagaccttttgtaaaggatagtccttgccactgctttccattgtgacaaaagcaacagaatcatgtaatatggtgtggctcttgacactggcattgtgaggctcaacgatagcatatagcatagcaacagaggcataacaagctttagtaagaagtaaaagcctctaggaaggtgaaaccatatctcagacattgatgtgaggaaagccactgtgttaaaagccaagaaacaaaaccatggtgccatgtattggaaatcaaagagggagttactatgcctaataagtccacctggtgggcttagcactgcttggaaagttgttgttgctgtcaatacagctaccactagaagggcatttctattttcatttgacatacaagattttctgaggtaagtggatgttatcaacttttcaagtgttgacatctttgtggttaagaattctgctaagattgttactctaggaagtgaagaagctcctaaagctccactttggtgtagcagattctttatgtttgcgtcgcacattggttgttcggaaatgtccagagctgtcaagtccttgaaattcttcgcgtttatgtcaatcctatttattagtaatttgaccatctgtattgttaagaatgaagaatcatagttgaaacagtcatgatgtgtaatgttggaatggaacaagggaaaacaagaacagctaaatagattttctttctatctgttgagactagcattgttttctttttaattacatgttatggaaaactagagagcttcctacttctgatctctatgacaaacaccttgtgaaatatggactatactaaccttttaacagtttaacttttgttttcaacattaaaagttcttcaaacaatttatgatgagtctttgttctaattatttttaaacacactagcataatcatttatccacgaaaactagggttgcgtttggttggagataataaaatggaaccagtgttaccaacaccttctataggtggtccccacgattggttagcgatattccctaaaagttattttcttaaattatatgagacccgatacttaattacactaagaacggtatgacaccgagaaaagtgttaggcaccagtggtgtcttttaatgattccctttaaagtattaaaataccattttggtggaagactattcaattttgaaatgaaatgatagactattctaatgcaaaatatattttttgtttatgcattttatatatcattccattctattctcattccttc

SEQ ID NO: 38790 - DNA, 5638 bp, Cannabis sativa
tcatgttcccaagttgtacgtgtttggttatgggtaggcttgacatgaaatctagaattatatctttgtataattctctaaggacctcgaagtacgaggctgcttctttgcttgctctggaacgttattctgtcatgttgccattgtttttctctctgttgggtgtttatgatgagcttccttgtaccttaccagcatttgtgaatcctactgcacctttccttattgtcaatgctgaagtacttccttaacaagtggataagtatgacattttattgtttcttttatgtttttattttgtagttttattgttatttttatatgtcttatgttgcttcttgtttttgttttttctagtgattgtggggcgtttgtttctacttgtgctgagtattttattgaggggaagaatattcctgttgactttgatgttgaagagtatcgcctaaggctttctgtgttgctatacaagtttggactaatgaaacaggttgagaatgttgaaagtgagcgagaaagcccacctaagtctccaaagaagactaaggcaaaagcaagagggaaaacgaaaacaaaactgaagtgatttaaagccaagctgcaaaatactttatgtttatcttttgttgtttagccaagatatgatatcatattttgataacttgcggtaggtttttttttaatttctatttatgttgtttaacagaacttaaagcaaatgttggtttcttgctcatggctatttttatgttcttttttgtgtttttagcctgaacgacacaacattgttagtttattcctaaatcttactattttatataatgttgattttatacatagttatgatcaaagttttattattattttttttcattttcaatgattattaacatttttttatacaatattaaacaaaaaatcaacatgtaatctgtttcctaatacttttttatatgattataggtaaattaagcttgaagtttttctcaagcacacagtaactaaacaccaatttctagctatcttaagagtttgttcttaaagttttttttttaaattatttttattaacagtaaagaaaaaaaaatcaatttcatataaaatatgtttaatttaaacaacattaaattttcatgtttttgcaacattaatcaagccatttaatgaaattcacggttaaactattcaatatcaaatcaattcatttaaaatgtaattcagagttgatatattcaataactactaaattcacagttaatcaattcaatatcaatcactatttaaaattcattgtttctattttctcctctttgcctctgcaaaaatgttgtatttatgttactttttttattgttgttgtgttttgtaactgctgtttgttcaatctagagatgggttcttggatgtcctcatgttgtgtccttttcttccatatttggtgcatttattttgtgtctttgtctcccaatttgatcttgttcttttcttttttgatcttcccgctttcacccgttcaagtggtggcaatattttaatatctttgatctcttgtggaatgtcccaattgcgcttatttcctatttggtatacagttgcttcataggtttctagctagttttttgtactgtagtaatatggacagtacttttgtgggtcgacatacatctctttcaccactgctaaggcatgcgcacatgacatttcatctatttgaaacctactgcatgtgcatattttttcttctagattcaccatccacgatctttttactttgtacacttcaaatatgtgttcatttgatgctctaacttgagaacaaatatgttttgtatttattttggcattgtaacatataaaaaacattaattcaatattatgtaattatgtttattaaagattatgtacctttaatttcaaagcagctttgtagttgcccttcatcttcatctctgcagctagagtcaattttgtgaatgttccttgtgttattttcttattttgcatgtccattcttggattaaagtcctcaaagcttccattattattgttattgttagttctctagctgccaggtttgctgcatttaatgattcagcaacatttgatgtcatggtactgtatcttttgtttttagaatacaatcttgaccatttctcatgtccaatattttgtagatatggtcaaacctgtttgtctaaggcgtcgagctctttcatgtgataattgaattttttagcagtgtatgcctttgctgcatgagaaaatagcttttcaaagagccttacatgtttcttgaatgttgttttcaggttgttgagtaggtgatacacacaatatccatattgtacttcagggaagactaattaagctgatttgattatactttcatgtctatcaaatataacacactgttcttgtctaacgccaaatgtggctcttaattttttaaagaaccattcccatgagatatcattttctaaatctgcgacacaaaaagctagtgggaatattttacttgatgcatcttatgcactagctgttagtagtgtcccccatatgtagcttcgagaaagttccatctactactattataggtctgtatttttctcattctttcagtgaagtgtttagtgccatgaaacaaaacaagaagttgttgttttctttagtttcaatgtgcactacagatcctgggttttttttttttttggagcatatagaataactaggcagcaactgataagactccttaacttttcctctaactatgtttagagcatgttctctactcctccatgccttcatgtgattcatttgtaacccatatttttcattcatctcaaatctaatatctactggtgtaactgttgtttttatgttcaaaaacttgtatttaacacagtcccctattatctttcctgaagcttgcctttgatccccaaatttgatgcttagtgagcaagtgtgtttttcattatattttcttactatgaaattctctattgcaccattccttgacgctcttagtgaccatttgcaatttttatccaaacactcaattcgaaattcctttgtgcaagattttttcaccttgtattgaaattgttgttttattgcaaagtagttgaggacgttcttcaaagtttccttatctttgtacatctttcctttctcaatttctagatgttgtttatatgtgatgacaaatgcttctaaatcattgatttattgctaatcatttgtctgcctagtcagttgaaccatcatttctgcagtagttatttgtgcatagtcaacaaagtcaaatgcatcattgtcttcttttgtgttttttttttgttgatgtgttggtgttccccctgactgagtaccatattcaagcatgtagacttcttgccatgtgtcaaccacagtaaaaaaaaaaggtatttgtgatgttgtatttgtgttgaggaccatatttattcacaaagtatgttttgtcatgtccttttctcttaattttagctgcaagtgaaactcaaggctttcatcattcgtgatcttcaacgctgtatatctagactatacttgaaattgcatttgtagggtagttgagtttctgttgcagttatgtttttttaacagtttgtccactaattttgtatatttgtagtttttctgtgtgaatatctcagtagcttcaaaaccaatgtactgattgttcacttcccaatgtccattgctttgaattagaataagtattgattccatttttttttttttttttgcagataaactaaacattttccaagaaattaaattaaattatatttttcatatataaaaatattttaattacattaattaactaataaatcaacaataaactttattttttaaaagaaaataattctttatcaaaccaaaatttaaaatttctaacaggcaattaaagaaatcaattttgttccaatttattattaacaataaatcactaatttctctttgtttcaagatatatgtaactcaattttttttattttatacatgaataaattcaacattcaaattaattacagaaattaaataattaaacaacaataaacattcattgttatatatttttttttaaaaaaattcaaatcaaatatttcaatcattagcatgcaatcatcaacatattatccaattaatctatttattaagtagtaattcaataccttgttatttttttttttttttttttttgaatttgatagggagctccgatcaaaaaaatttcaactcattctagtatgatttgcaacatttaaaaaataattatatgttatgtagtaaagatctttctctgttcattttgagttttatgcctctgtcttttcatacttgttttcaatatgaatttggatttagtaaggagctttgatcaacaattttataactcattcttgtatgatctgcaacatttaaacaacaattatatattttgtactatagatctttatctattcgtttcgaattttgtggttctgatgttaatacatgttttcaatttgaatttgaatttagtagggagtttcgatcaacaatttctcaactctttattgtatgatctgcaacattcaaatgacaattttaggttagatagtgtagatcttactccgttctttttgagatttgtgttttgaatgtttgatacttgtttttaagcagatttgttctatgagattttgttgttgatcgattgacgtttgttggtgtttgtttttcgtttttgtcaacctgaataatcgaataggtgagtttttttaggatttttcattgagttgtgaatttttgtttcagaaagcttcatcgagggaacagtggctactctgaattttttttcttgggaagagactgtcgaaggtgtctaagatgatgacaccgtattttatgtaatttaatatagggatattggcggctaaaccacttgaactttacggttcgtaacagctaaccacaaaaactaaaattttggcaacataactatctaaaccctggttccgttttgctctgtatccctccacccaaaaatcacagttaagtgctacggtggattgtccacgtgtacacacttgtacacgtggtaaatttttagtggtccacgtaatattagtttttaaaaataattataaatattttaaaaaaattaataatcagaaaaaaaaaaaaaaatttctttttttcttttttaaaaaaaaaattaaattttttttttcttttttcttcttcttcttcttcttcttcttcttctttcctcttctttttctacagaaccctctcaggccctctttctctctcgtctcaccagcagagccgaagcactaggccggaggcggaggaggaggttaggattttgggtttcgaggcttgggggttttgggtttcaaggttttggggttttaggtcgagagattgaggagaggaggaggtccgttggtggttccgacaccgcacaagagggtcgggggcgtcgccggcgttagggttggctagggtttgctaaggtttttgtgtgaagaagaagaagaagaaaagaaaaaggaaagggaaaaaaagaaagaaaaaaaagaaaaaaaaaatgaaaaaaataatttttttatttttataattt

SEQ ID NO: 38791 - DNA, 1555 bp, Cannabis sativa
ataaatttttctaattgaggatagatttaacaattgtaattatacgtcttacgtcttgttgtttagcaattcaaaattatacaacgtttctataatgtacatttatatatattttttatgataccgctctttatttaaattttcattgaatgtgtataaaaatatgagtccatcatctctaattaaatgttacacagaatttttaacaaaacatttggtggaagatggcaataattggttcagtgactttgatttagctattattcccacatcgataacttgaagttcatgtctaattttttaatcttttataattgaagttaatattttttcttttatgtaatatagtaatatcattccaaattgaaatgtcaaaaatgaatttgtaataatatccttgacaagccaacactccaaattacccgccaaagatgtaatgttttgtttccttaaattcccttttgaacttcatccacagccatgttgttctctggcattgtctgcaatggcactcttgtgctcttctctagttcttgcttattcttttggttgcttagtttttctttgagaattttctgtagctgccttagattcttttcttcataaaacataattttctgttctttagttaatatttttttttagatcatacaaatataataaaattaaattctatcatttaactttatgtcaaacttctttaaccgattgtagacaaatttgatagattgttaaaatttcttgtacttttaattctttcttgaaaaagatgagaagctaccttccttgtagcaaaaagagaagaaaagctatgcagagaagttgttcattatgaagcaaaaggagaagagataatgtgcttaattactttgaatggttatgaagaatatgtactatttatattgaatgcctatcaatttattaagagcattcacattaatttctctaaaatagagaaaatttaaaaaattttaaaaagcgtactaaaaatatgttacagtagatattttaaattctttattcattttaatttttttttaaaatttactattcacgctctacatttgtagaaaattattcattgatctaaacatatttattaattattttgagttttaataattatttatgtatggggatatgtgtatatatattaatattatatatttaatatgaataaaataaataattttttttaaaaaagtagatttttggaattttagtgacatattttaaatgatagagtagaaaagttgttgggagtattctaagttacacctcaaacttaataaaattatctctactcaccaattacattatatgaactggaaagaacaatgaagatataaatgaaagtttttttagatggacaaaagtggaagttgaatcaattagaattttttttatttattaaatcatataatatttaaaatcatatgaattatttaaatgaggattaatctagtcatactagaaatttaagtctactaaattcaaagtgatggtactaaatgtgtaggaattataaataaagggtaccaagtgatcattatta

SEQ ID NO: 38792 - DNA, 4635 bp, Cannabis sativa
ttgatcatttcttactttcaaatgcaaatttcgggattagattataatatatatatactatatatacacatgtttatatatgtcaatccaataatcacataatgtggttggaaaaaattttgctgttaaaaatgttatgttcagcatagtttgtataatttttctgtcaaaacatataacatgagtataatacttttgtaatgtatgttcttaaagagtaatttattcattaatgcttttaatatattaactagtttatatgtatatatgatagttttatttacctgcataatgtagggaggaaattcaaaggattaaagctagtaaccctgatataagtcacagagaagcttttagcactgcagctaaaaatgtaagatatatatctcaatactataaatatataaatatgcatatctactactgtgtgtgtatgtaggaatattgttcatttattgggatatatatgttatttttgcataagggtctatcccaccattatatgctatatgtacttcaaagaaattaaacaagcttatattatatagtatatatatataaattaatatctgtataagatacatgaaatatataggtagacaaattgttatacttaaactaacctatagatatcaataaattaattagctaatttagtgagcatatatttataatatatatatatatatattatattttgccttagaaatgttcctatattattgaaatttctttcacgagagaataatttgcattatatatatagagacgtacgagaggaaaaatcattacacaactaacgtagaagctaagtatacatcatctttttcttttataaattttaagagaattattctcgttaaatttgatctccacaaccatattataaaaaagataactatagtatataaaacgtatacataatacatatgtatatgtatatatatatatatgcgtgtgtgagtggagaaagagagggtgctggagggaacacaaaaactaggtacagaaaataatataatctctcattattataacttttattagtaaccaaagtaatatagagttgtctttatagccctattatatatcgatattcttttttttttttttttaaggagtttaagtattgatttgttttgacacagtgggcacattttcctcacatccactttgggctaaaactggatggcacaaacaacaagcaggcaaaacttgacaaaacaattgcaggagatcatcatcagggaacccaaaagaccaatggattctactgaaaaacaaatggtacttctgtgaatatatatatatatagctatatatatagctagctatatttagctagtattgtttttgtttttggtttaatttttttttgttttgttttcatttgtaagaataatttgaataatatatatgcattatgtatgtgtatgtaagcaccatatatttggcaaattatgaggttgttggtgacgtttcctaataactatttaggaatatggcatctttaaaaaacctttagacttttacgtgtgcgcactctttcttttcttttctttcccctttcaaacgttgtttatgtatgtatgtaattcaatttaactttatcatttttaagtaataataatgtttaaatgtctatatttatattattcccatggaataatgtgcaattttattatttatttatttattttattattttttgtgtaggaatgtatattaattcctttgctttctcttttctgacgaattcagttcctttgtatgtatggatgataagacattccatgatttggggatcccacccaatgagccgtgggtttatacaatcaatcttctcatatttggaccgactttattatgttttgacagtatacccctgcactgcacacacatcaccaaaagctatcaaaaatttcattataatttcgtataaatataaacaatatatacatgatacaatatacgtaatgcctagcaataattataatatatatttatcttattaatctatatgaagaaaaaagaaataagtgtcataatatgtccaattttgctgatgcgtaacatcatttgtatatagatatagatgtatatatataatggcaatcatgttaaatatttatgatgaaattatagtttactatttgttataattaatatttcttggttctttgataagttcggtatatcatgcatgtagaataagatatatagcgtattacaagtgggtaataattttttatattatttattaaattaaaatgtatgagacgatattaatttgtattaatagcagtatggcatctctctcttctcctgcttagagttgttttgatctagttctgtaattatatatgaattggaaatgactccttgcaacgatgtgtttattttgtgaaaaacagctgttttgggatacgtaatagtgtgtcatcagatcagtagcctcaattatcatttcttttatactctgaaaataatggttttgggaaaaagaaaataagattcataaatattgaaaactttaaattgtgtttttgcttttctcagaagtacttgaaagcatttgattcattatctatagaaattagatgaataattttctatttcctaagattaatattgatcatataataaatgtttaatatatatatatatgtaatatagcgctgataccttgaacaaataaaataaatttatatatattttgaaaagcaaaaaaaaaaaagaaaaactgtattgatgagatattgacatacactgtgtatgatttcctcaatcccataatatctaacaagcaaatcaagcaaacattcttcacagatattatcaaagggaaaaatgaaacattctccactgcctgcctacactttatactatgtacacagctttatatgatagccaaaaaagaaaaagaaacataaagaaaaacaaaagcctaataagtattattattattattattatggctagtacttttacgaaaattcgaataaaaatcccatctttggtggttatatgttttttttttcttggctcgattacacgcttcttaagcaaaaattactatcctataacttgaatttaatagttacgtactaaacaataattaacttaagagaaatgctaaagggcaccagtagtgtctagcaccctcttatgtgtcagtatcgctattggtctaactaagtatcgggtcccatataatttaatataatagtttttaaggagtatcactaaccaatcgcaacgtgacatgtcgagaagatgctagacactaataatgccttatagcaatgctcttaacttaaagattcaacttaagcaacttattaatattagtgtactcttgtcactcagtaattaatttaacacatttcatgtatacgtacgttggtaccttctcactataattaatatgataattaataactcctcaaggaaccacaaaaacataataatattattaataaagtagaaaacacgtaatgattatatatatacacaaataattatgatcattttgctatgcatgtacttgaatatgatgtgtagaattatatatatatatatatatatatagaaaatgcatgtaatattcaaatgtatatggtgggtttgtacaattatttgagggtttttggtatcacttatctgtaatggaatcataatacttgcacaaaaaacacatacataaatacagaaaaaaaagaaagagaaggaaaacttaacataaaaaaaatagagtgagatcataatgaaattagagagagaaatagtgtggtgggggatggggctgagagtacagaatctgaaacgtcaaatcatgcagttggtggtttggatggatctgtggcctttatttcattcacacacataaacataataacatatatttatatatctcccactgaaagtgggtcttactttattagtcgtattatatattgcttttgtaataacaccatttaataagtgtgaattcggactgtcatatcacataaaactaaaagcaccaaacaagaaatatatgtaataatctatttatttatttatttatacgatcgaaaaacaaattaatttgtgatcatgagtttgtaggataaagcagtttcaaaaaaaaaaaaaaaaaacttgtaggataaagtaggtagcatgcgttcctggttcttgaatttcataaacaatcgtgtcaacgtaaagttataaattataatgtatatataaatatcgtaggggggtgcatgtacatgtcttttgcatgattatatctaatattttttttttaatatgtgattaattttttaaaatttacaataattttttatgttggaaatagaattaaattttgatttgggtatattggatcctaatatattatttatatatatagtattttaaaatacaataggatatgtatagtaatattatgttgattttattttagtggtagcgtaatggtattataatatcaactaataagttaagagttttgagtttgaatccatgctctctttctttttctctcatccctccttcaccagccttagtgttataaattatgtagattttcttttttgagtgtagcataataatattacaatcaactaataagttaagggtgaa

SEQ ID NO: 38793 - DNA, 3556 bp, Cannabis sativa
acctaaaccaaacaagtcttgaatcaaaactattctaagtttacatctaagttctttagagctatcttgtatcaaaattctaataccaaattaatgattgcgagccaacttactttttgattcttctaaatcccattgcttaatgacaccattagaagctccaccaaggactaaaacttctgttgaatcaaaaccaacacactcaacagggcttgtatgaccagttagacactgcaatgcacattcataaacaaaaatcatcatgttttttattataaatttgcactaaattcaaatataaataacaacaataaacttacagttaaggaagttgattttccaattggccaaacattaactttctgatcatcccctcctgtcacaaaatgtctacaacccttttttccaatacttagacaatttacattccctgaatgagctgaaaattcctctttaatttttttcataattagtcaaggaaaatacatttatacacacacacacacactatataaatataaaaagaaaactctatttttagaccctttttttttctctttagatgaaaaaatctaactacccaaatcaatagatagatttattgattaaaaaccttatcttcattaaactgaaaattaattaaagtccaatactttcaccattttcctaacattttctcactaaccaaacagaaaattaaagttcttccaaaacaaaaacaacaacagattgctctgaacacaaaacactgaaacatgaaaagaagattatgaatatatcgaaacaaagctcagttttcagctaaatcataacttcaagaaaataaaaaggatacgtagcttatatccacgcttcgccatagaagaagctgtaaaaaaaacccttccggcgtcggagtctgagaacaaaaaccttccggcaaagataagaaccgaacaaagaaagattcaaattcaagcaaagcaacgatactctttagtactcttctttatcacacttgaattttccactggaaagaaaaaaaataaagtaaccaattggagattcaacaaagaaagaaagaaagaatttttcccagaaaatttttgcagattcagctcagagagaaagaaagaaaaaaaaaataaaaaagtgatttttatttttttatttttggattttttttttataattttcttgagaaaataaaaatgggttctttcttctttctttctttcggctttggggggttgtgggaaatgacgaaaataccctcggtttattctgtggtggtgatgatgtggagaaagaggagaagagtggagacccaaaaacttttaagaagaaaaataaataaatattttgttatgtaatttgcgataaaaatatttaagttgaatttttgttgtaaataaatatttacggttaagtattaagtaaatttttacgtaaaaatgattggtttaggccattaaatttttatttttttaaaaaataatttctatatactaataaaaaaatgacacgtggataacaacttaacatttaaccgtcagagagttacaataccaaaaaattaaacttaaatatttatttacagtttggagttaaatttcgatattttgctacgaattactctttattgtatatataaattaatatttatttataaatttatattttcataataagctggttctggtggcttaggttgtttttataattatttattttattttagataaaaaaatgaaaattttaaaattttgtatgttagaaaatagaagtggtagactttgaaaaaatattgtattaaaggacaactagatatgagtgttttgtgtttttttttttaatttggataaggacctgtcacttaccatattattattcttttttattattattttattttaataaaatcacttactatttaattagtttaacaaagaaaatcaaggttttgcttaatgtattattttaagtcttgattagttgtattacatgtaatataattctatataaggaatgtttagtaaagtattttctttttttcacaaaattattattttttaaataggatcgatatcttgtttaatactagaaagctgttgaaaatccgaaaaaatctttttagagactattttgtaacaaaattaaaaataatttagcataaattgatattgaaatagtagtatatttttactaattactcttctttatgtaatatttttcaatgatttttaccatattattagctttaaaaaaaatcaatgttttttttatcatatttttattactcttttaagttttgaataattaagttataaaaaaaaaatgttttgaatacattaaatacatttcttttcgcaaaatgatattttagacacgctcgatatcatgtttaatactaaaaaggaagctgaaaatcttcgatatttttttgaggccattttacaaaataaatagatatatatatatataataaatcattttatacctttttttaatgaattttttgtatatgtatatctagtgtgggataaaaaaaatcaataaaaataaatatacttttatttttgaaaaaccctaagattattatggagttataaaaaattatgatactttcacataatatttattgaattgcatgtgatgaagtcaataatatggttttggaatattaattaatttttactcatgtgattacaacaactaatttggacccatgaaatgatgttatttatggtttattatccaataatttacttcatattgaaggaacacacaacaaactatcaatccttttaagaaaccaaaactattttctatttatttattaattcatttataaatagagagaaaaattcttatggtattatttattattattattattattaattctaacttaattaataaaatgggtatttgattagttagaattgtgggtcataatcatagattttaattattaacaataattatagtttgattaataaaacattgtacttctatatatgtctcatattaataccatttaattatttagttaataaatatgagaacttgatgtatgagtttcacatacattccaattaaagttaggtatgtgtccaaatcacaattagttaactagaagaaaacacatgtcaattttttttttataaattaccaaaaaaaattgaataataactttcctttgccaaaaatataaataaagaaataataactttcctttcaaaaaagtaaaaaaaaaaaaataataattaaatttggttggtacccttgtttattagggcatgtgaaagtcttctatcaaaattaacaactagcaataataactaattatatatatataaaaaaaatagttgtacctattgacttaaagatcattatccatatttattttgctaatatttttataaaaaaatatatattctttatttttaaaaatatatatttatggaggggtatggtagacttggtcactttagtggctatgcatacaaaatataatatatattatttattttttaatgatatattataataataatttttttttctttaactt

SEQ ID NO: 38794 - DNA, 2362 bp, Cannabis sativa
  modified_base (2290)..(2336): a, c, t, g, unknown or other
ggtctagaggctcccaaaattagtctcagcagttgattactacttttatggaagaataatgttgatgttacgcttttaaactatggtcattctttttttgattgttttatgatttttgaagaagactcgagcttccatttcactagcttttatggtgctccaacatcacataataggaacgactcttggacccttttacgaaggctggctgatgtctcacctcttcaaccatagcttgtaattggtgatttcaatgagatcttatcaaataacaataaacagggtggatctttacgtaatgaatctcaaatggcagcctttcatggtttagaccactattttctgcatgaaaattcctataatggtgatgtgttctcttggattaagaatcagactaaagttcacacaataaaagagcgtcttaattggtattttgtcaataattaataggataatatttttgtggtttcacagatatcccactgggattatttccactctgatgatcgtgtttttactgctacatttactcccaatattaaatgaccttaacaaggaaaatgaaggactcgcttccgctttgaaaagctctggctatctgatctagagagctaagaaataatctctcaatgctggcataaccaatctacatattaccctataactaatgttctcaacaacctagagtcttgcgctacaaatttacaaatatggcatattatgaaatatgattgtatgaagaaaaatattgtagaagcccactccaaagtaacaaaccttaacaactctttgtctcgaaccagcaatgtgatgaaggagcttaagtttttggaatttattctcgatgacttattggaacaagaagaggtctattggaaacaatgctcacatgtcaattggatgaatttagggaataaaaatacaaagttttttcacgcaaaagctacagcaaggaattccaataacaaaattaaatttcttttcaatgaatcaagccacaaagttcaatcataagctgatatgccagctgtaattcaagattattttcagaatattttttaggcctccaatatcgacgaagcgaccttgttcatggtcattgacaccattccttcaatggttactactgagatggaaacatggtctgatcaaactgtttgttagagctgaagtggaagacacactacaacaaatgggtctggatgaaagcccgaaaattgatggtatatctgtaatattttaccaaccaaattggaatattattgataatttggtcaccaaggcagtgttggggattctcaatgaaggtgttgatcccactagtttgaaaaaaaaccatcatcacgctcatcccaaaaattaaaaaaccacaaaatatgaaagacttatcgacccattagcctttgtaatgtgatctcaaagatagttactaaggtccttgttaccagatttaaggtcgtcctttcgctggtcatttcgaagacgcaaagtgcctttgaaccaattaattatagacaacattttcgtggcttttgagcttgttaatgctattaaaaatagaaccactaaccgcaatggaattgtctctttgaaattagatatgagtaaagcctttggctgagtggaatggtgttttcttcaggaagttatgagaaaaatgggctccgccgaccaattgttaacacttatcatgacctgcttatctacaggttctttgattccctttcgtggtctttgccacgggtttcctttatctccatatatgttctttatttgtttggaaagcttgttaagattactaaaacatgaggaacgagttggttgtctccatggttataagctcactagacatgctactcttatttctcacttgctcttcgctgatgatagcctctttttttatcatgtgaatgaaagctcttgccttgcaataaagtaagtgttagacatttaccatcacgcttctggtcaagtcgtgactccgttgaatcgattatgtctttctcttctaataccaccttggttgcccaagtttttttccatcgataactctctatgccaatttgtgaatgtcatgaaaaatatctgggcctaccatcatatttcggaagagataaacaacaacttttcagcaatataaaggagaaaatttggagactcatgcacagtacgagtgaaaatatttttttagaggggggtcattaagtgctttttaaggctgtagttcaagctattcccacatactctatgagctatttcggactgcctataacaccctaactagcatagnnnnnnnnnnnnnnnnnnnnnnnnnnnnnnnnnnnnnnnnnnnnnnnacgaggtttatggaaatcgtgattta

SEQ ID NO: 38795 - DNA, 3754 bp, Cannabis sativa
taacacacatattgatgattatccaaagtaagatattggttttgttcctcctaatcccgttttgcaggataatactgaagaaacatcagtagcaaatagtgcagagcaatctgaatgtccagatcaactcgattcatcaccaccacctgctactattcctagaagaactactcgagtcacacggccacctagttacctacaagactttgagtgttataacttgctataggataaaacttccacatcttatcccatctcaaaatatctttcttattccaaactttcaaaagcttacaaagcatttatttaagcagtaacgactgagttcgaaccacaaagctacaagtaggctattctattcaagaaatggcttcaagctatggataatgagatcttgagtctcatcaccaacaacacatggactgtggtgcctctccccccaaacaaacgggcaataaggtgttgttgggtatacaagattaaatacaacagtgaaggtatagtgtagagcaactcaaagctcgccttgttgcacaagggtacacacagcaagaaggattggattttctttgacactttctcaccagtggcaaagatggttactttcaagctcctattggccattgtcactatcaaacaatggcaaacattgcaactcaacatcaataacgcttttctaaatggcgaagaagtttactgaaaattccacaaggtctcaagcttccttcaactgtcacaggcgaaaatcttgtgtgtaaacttcataaatcaatctatggacttcgacaatcttcacaacaatggtacaagaaactcatttatgctcttttagaaggaggattcactcaatctcaggctgactacaccctttttactctaggaacacacaactcatttgtggtccttctcgtctatgtcgacgacatcatacttgctagacccaacattcaggttctacatcaattacaagattctcttcagaccaaattcaagctcaaaactctaggtcctctcaagtattttctcagatttgaaattgctacagccaacttcggtcttttcctttcacaacacaagtatactctataatatcttgctgacacaggatacactagcagcaaactaggcaaagctcctgtggaccctagacaacgcctcaatgatcaagaaggtgacattctcgacaacccttctcactatagacaactcattggccgccttctctacttgaccctctcacggccagacatcacatttgccatcaacactctcaggcagttcatgtcttgccctcgaacacctcacttgacagctctacatcacctcctccgttatttgaaagggtcatcaggacagggcatactctactcaccaacatcctctcttcatctccgcagattctctgactctgattgggctacttgtccaataactcgtcgatcaacaataagtttttgcatttttattggtgactgcctcatctcctggaagacaaagaagcagctgactgtctccaaaagctctgctgaagcagagtattgtgctttagctgccaccacgagtgaaatcaccaggatacaatatttactcactgatcttcacatagatcaaccaactcctgctttcatatactgtgacaacctatcagccattcacatagccaacaatcctacttttcacgaacgaaccaagcatatcgaattagactgtcacttcattcgtgaaaaaattgccaattcgacaatacgactcatcccaatcagcagcacactttagctagcagatgttttcaccaagcctctcccctctaccacacaacttcacatttgtccaagatggccatacatgacatcactaagactatttttctttcattttgctcttttgattagttagattagttgactgttattacagtttatattgttggttatcagtctgttattacaatttgtttattcttgattttgtggtggttagttactatcttgcctatataacgcttcatttctttgtacaaatttttattcaatcaataaaatactttttttgtttttcatttcttccgcaatacttattttgaaattctatgagcttcctttatttttttcttttttttttgttaatctatttagtttaaaagatctgaacattcatattatgaggccttgttttcttaaatattgctggaacagtttgccaatttattaaattttcaacgttgttaggcccataatttagcaaagtttggtgtcaagttctgttggactgggtctattgccaattgtgtgcatcttcttgtgtaaaacaataggccacatttttattttttaaaaattactttcaaatttaaacttattaccaatggtttctgttatacgttttggagttccaacttaattattaattaatattgtttcttcgtatattgttggagtttatatacaactaaaaataaacccagtgcaacgcattacatctaaactggtacgtatataggtatgttacttgtaatatacaataattattgttaaaaggtataaatagtctctagtacttttttatataattttgatattatacattaatattaagggaaattatttcatatactaattttttgatatttttttaaaatttacggtttaggtttctaaaatgtttacagcgctagttggagtaggagtttctgtacgatttttaattgcaattagattgtaccgctagttgcaataggggtttctatacctaattccgtaaatatgcaataaaaaaaactgttttgaagtgtaaaaatgaaataactcctaatattaatataattaacttatataatttaatttaatatttttaaaaagagaaatgttaaagggcactagtagtgcctagtacctttctacgtgtcaatatagttatttgtccaactacaaatcgagtcctatataattaatataatagcttttaggaagtatcgctagtcaatcacaacacgatatgtcgagaacgtgttagacaccactcttttaaaaatatataactagtaaatgggaaacccggcacttatagtaggtacagtagtcaatatcaatgcactcacttatatattaatatggttgactaaaaaatattgtatatgggtggcaaagtttgactaagttaagtatatactatatatgactgaaatactaatcagttcagtaattaattattgactacgaattcacaacgactcaatgagtatgaaacatcgtgtgctgactggcatatagcgatatacaagatttgaatgataggtagcattacattattataaaatcatgattcatattgtccaatatgtacgcacacatatatataaactatccctcctataaatctacctagtatattttattaaaaagaattgttgtatatacattatattttacgtatatgatatatatatatatatggatggggtaaattatatagtaatttatagtttttagtttaatttaatagttcaatttaatttttaaaaattacactataattaatatatttatttatttataactaactaaaaagtaaatcgctcattgcgggctatttaaattttatttttatttttttgaaaaatatactttatagaatttttttttaacaaataccaagcacccataattaagctagaaatacccattttttgaattcccaaccgataacaattaatcggagatcatttcttgagcttgaagttttgtttctgtatttg

SEQ ID NO: 38796 - DNA, 9968 bp, Cannabis sativa
gaacggacacaaaggtatggaatcaactgcaatagaattgtccgtgatggcaattcttcttcttcttcttctgtgatgagtttgcgaagatcgtatccagatgatgatgaggatgaggatggtgatcagggtgttgttagtttgagggatagctttgtggctttgaagggtcagttgttgcaagaggaggatcggcggtgcattgtttctattgtgggtatgggtggattaggtaaaactactcttgctagaaaagtttataatgatattgatgtgaagaagcattttgattgttgtgcttgggtttttatttctcaacagtatgatgtaagagatcttttgactgagattattatccaagttggttttcaatctcgaaggaaagaagaaaagatggacagaagtgaggttttggaattatggaggaagacaaatagaaaggagttgttagaaaaactaattcaaggtgaaagagagagattaaatacagcaaacaccaaggagttaattgaccggcttaaaagagagttacaagaagaccgatatcttgtggttcttgatgatatttggagcattgaggcttggaacacaatgaaaagtgcttttcctaaaggaaagattggaagtaaaattttgtttactacacgaaataaggaagtagcactgattgctgatccctatagcttgcacattgaacctccatttttgacagatgaagagagttgggagctcttgcatcttaaagcatttccaaaaaatgttttccctgatcatgaatgtccacaagagttggacaagttgggaaaagagatggtgaaaaagtgtggaggattgccacttgctgttgttatgcttggaggtttgttaagaactaaaaattctctagatggatggaagaaggtgcataggagtgtcaattcacacttggtcaaatccaaatcacagcaagtacaatatggagtggaagagatgttagccttgagttaccatgatctaccttataacttgaaaccatgttttctttacttaggaagcttctcagagtattgggagataccaaaagggaaattgattagattgtggattgcagaaggttttattccaacagagaagaatgaggtagaagagacattagaggaagtaggtgaaagatacttggaagatttagttgataggtgcatggttcaagtggccaaaagggaccataatgggacaggggtcaaagtttgtagagtgcatgatcttatgcggaacttttgcgtttcaaaggcaaaagaggacagcttctatgagatcattgagcagccagagatgaagatgatgaccaacacttcaattttttcacgcagggttgcagttcatctcggaacccatttcgatatccaccaagtacattcccaactccgttctcttctttggtctgacctctacaactgtatagatacttcactactaagaaataagaagttcaggctgttgagagtattggaacttggttccactactagacacaaacaacctttgcgtcaaatgccaatggaacttggcaatttagtccacttgaggtacttgggactaagaaacgccgaaatttctaaattgcctctctccataggcaagttgaggaacttgtacactctagatcttcgaatgcaaatgctggcatactcactacccgagtcagtttcaaggctaattcatttgaggcatctatttttacctgattataggcacacaacagatcttagctggtcaagttgtcgttctggaatggagaacttaacaaacattcaaactctaaagcacattagagctgagagttttatcaaatatggtatgtttatcaagctaacaagtcttcaaagcctagtgatacaattcaaaagtattccagaagctagattggtcatagagtcccctgcttttcacgtaggtcgacttcgatccttggagatgtacatgcataataacaatgcatttccaagtctaaagtcactctctcattgccagtttctctccaaactatgcttagctgggaagataagatcaggatcaggctattctgaccactttttacagtttctaccttgtggcctcaccaaattaattttgcgttacacagaaattaagcaagagggtattgcggttctggagaagctgctatgtaatctgagatatcttctactaggttatgattcttatagtgattctgaaatggtgctctctgctaatggatttcccaaactagagactcttcaactttttgggctatttcaactagaggactggcaagtgagacaaggctcaatgccaagccttaagagattagatattgaatacttgcccaaattgagcaatgttccgcatggactgatgtacatcactactcttcaagaattgaatgtggtacgcatgaacagattcaaggataaacttcaagtcacagatggaattgaaggagctgattactacaaagtcaggcacataccctccatctcattcctcaccacttcggtacgaattactaattatatttggattttggactatttgttatcatgactttcagttaagctctcctgcataatttatattctgagagataaaaaaatttacaatatcttttttactggatgaaaaattattctaaccatgatttttcttgatttatgtttacctgctgtgtcaaatatttccgtgggctgccttcactcctgggcttggtcaccttctccaattttgggcttcaatttggtacacatcacataacgcccactctactataattttcgacaacaatggaataaacttcgcatcctaccaatcaaattagttgattactcctcctcatcacaattattactagacttgttttgttttattgggaaagtttatatgtactctaaacatttatgaatttgataggaataatcatagcattaatccatattggacccaatattaatccacataaatccaatatcagtgtagtcaccacctgtggttttacgttttagcatttttctaaattatcatacctcttgcaaccgtttgccaacacaaagaactaataaaataattaaaaaaaaaaaatactgatattcactactaaagaagtcgatctcatttgcaaaaaaaaaaaaaaagtcgatctcattagctttgaaattaaatagtagaggaaactatatctcagaatctttctagtcttgtcttttctcaaaaagaaaaaagaatctttctagtctgaatactgaagctttattttcgtttctatcatgcaaattggaaaattccattccatcaaactttccccaatctttcattcttttcctcagtcggctttttaattttgttctggaatgttgcttggatctaaaaaatagtttataattggcggtaaaaaagaaaagttagactcgtagaaaattgaagtgcacaaagaaaaaactaggtataaataatatgtcactgatttgagagagaaatagaattgaggataatgataacaaatctactactccacaactaggagaagaaagtagaaagcgaagaagaatgaagaaaaatggtgaaaatataacttgcagccatgaaaatagaaaggaattttaactgctacagagcttttctgattttttttgaagaaggtgatttgagggttaataaagttttcacgtgacaatggtgtccaaacatatctcactgccttttttcaagcgatcactatttatttatttagtatataataaaagaaagatttgtctcaaactcaaagcttggccaaaatgctacttcttcgctcatcgccctttcttcatcatcttcccactccaacttctctaacgtccataacttcccacactcatcatcttcaaccccatttcccgctacggctcccagtcccaacgaccacgacgacgaccacgttgtcttctcaacgacatcgtttatttccatccaaatcaatacctctcctccgctgctccgctctttcatcatctcctgtaacctctcaggtctacctttgctcctttctatctctttctcaaattcattacatttgcatcgcatgaaaattggtgaacatttgtgttttggatggttttgggaacagttgaaggactgtcttatgtattcaagagcttattgggtgagtgaatctattatcgcctgggatgtggatgttggaatcaatggcagcttatacttatttgccagcgaaacagcttctttgtcaattacagacggtgattatggtattcaaggtatggtgtctgcttccgtttatgtatatttagttcaggactgtcgattgctttaatttaggtgaacaaagtgatttagaatgttgtttacattttgtaacagggcatgatgtgaagtttaaacttgaagaagatacccatgggctccctcaaaatgtatgaaaaatattctaataggtaatttgatgtaatctgcagcttcttgagaagtttaattttttttttgttcttgaaaattgatgtttttaggtgatggaaaagtttcctcatattaaagactacagagcttttaaggtgcctcctagcttagatgcaaaagtcttgctcaagtgccaattagctgttgctgcttttgatggtaagaaaatagttgttaatgttgttgtgcctttttcttgagttattagtatatggtgaatatgttgaggaagacctatgataagcaaggagactaatgatgactcatccagtactgcatttgcattgtaggactgataggaaatagcttcaattttaatttgtatgctaatgacatctagtatgattagttggttctttgcttacatgttggtttttgttatgtagatgttggaaaatgcagcaacattactggtttgcagttacctggcatcctggatgaattgttctcgtacagtggtcccctaggagcagtttattcaactgaagctatagcactttttctatgggcacctactgctcaagtatgccacttctggaaatattatttcaatgtctattcgtacttgcttctcttgatctgattaaatgtgttatattggtcttgttacatcttcatttctactcaatttacttctgcattagtataggcagtgcgggcttgcatttataaggattcgtcaggtggaagtcctctagagatagtccagcttgaggagactaagggtgtttggagtaccaaaggaccgaagagttgggatggatgctattatgtgtacgaagtgtctgtttaccatcctagcaccttgcaaattgtaaaatgccatgcaaatgatccctatgctagagggtatgtatgctgattgtctcctattgaaaagtttccaaaaatatatttaagaacctttaataggaaaaacaatttcttgtaatgacaggctctcagcaaatggtggccggacactgtttgtagatcttgattctgatactctaaaacctgatggatgggagaagttggctcttgaaaaacctgacttactctctttttcagacacaagtatatatgaattgcatgtaagggatttcaggtaactaatcaagccatcacttttctgtaaactgcaccttgaatcgttattgcttgaacttaatttctgaaaagaagcataaaagaatatgaatccatatagtcaaagatagactagaaatcggcttcataatttgaaatttcatgtctacagggttagattatgggggtctttttttcttaactaattattttatactgctaattgggaggcacacctttctcataatataaggagaacatgaaacttcctgaaattctacttcagcttttttgctgaaaacaggcttaaagtgacatgtaaaattattttggcgttttgagtccacctaactgtctttgttttaatatactgcagtgccagtgacctcactgtagataatgaattccgaggtggctatttggctttcactttgcaggtatttgtggcttctccttgattatttatgtgttcttacttcttaagatgactaaattttatctacctttctgtctcttgatagagcattatgcaaaattaagattgaaagctataatgtgtgttgttttgtcactgggggtgttgaagattgcaataggtcattggttatgttattttgaacttggaattattggtaacatgaaatgttagcagggcttgttacaaggttggatgtcttaggacctgaccaatgcatctgtacccataacacactttcatacacataaattcttccccattagacatacatgatgaaaactctatgatatgcaaggatggctaagatcagatatgtcgtcatttaatctaggttactgattgccccaaaagctaagcttcaagcatattaatgcacctaaaatcataaataacacaaattctgcttgaagtaatatctgaatacgttgggctttaaattatgttattttgatatctctttaaaaaatctgaactttctctccattgtgaattgtgatatatacatgcttaaatggtacctttaaattttgtatgatgacaaatcacaatgtactgtgcatattcgtgattacattcattagtactatagccaagctttatgtgatgaattctcaaaacattaatgttgtgagtgtatattatttaccagtgaacatatactacttgaaggattctgcaggtatccgtcatttaaagaaattgtcagatgctggtcttactcatgtccatttactgccagccttccagtttgctgatgttgatgatgagaaagagaagtggaagtctgttggtatgtatatttcttacttaggtcaaatttaagaacaagttttctgccacttggggttcactcgaatggttggctgatcaagacttcaagtctggtaaatgtttatggttaaaatttaaaaaatacagtaaaaaaagtttaatattttaaattaaatattttagagaaggaaccttattgtgaattttagtttcgtgtaattatttttgttttttggttgcctatttatattagaatgagggtactatttttaatctaaaaggttacaagaggtccactgttattgacatttgccatccaaaattgccataactttttcatgcagatcaggtcttaatttgagtgtgactggggtcagattcacacaattattgtgcaggtggcagcattaatataaatgactcatgatttatgtgcttttgcccttctgcagacactgagatacttgaaaagttttccccagattctgctgagcaacaagctctaataacagctatacaaaatagtgatggctataactgggggtatgcttctgacttctattggatattgtgatctggtttagatgctttgtgtttctaaatgaattaatttcttctcttatgaaggtacaatcctgttctttggggagtccctaaaggaagttatgcaagtaatccaaatgggtcatgccgcataattgagtttagaaggatggttaaggtcaggatattatgtctttattgaaatggccaactaaactgaccttcttccttcactctcagaaaaactgagaaggaaatgtttagaatgaaatttttgaaccctcgttcactgtagtcattttccctcttgtcttttgtaatcaaacagttactattaagagtgaatctctctttggtctcaccttgtctagtattctgctttcatggcccatgtttgcatattatccattggcatctactcatttgatttttactgataaaaacaatatcttttatttgcaggcacttaatcatattggcctacgggttgtactcgatgttgtctataatcatttacatgcaagtgggccctatgatgaaaattctgttcttgataaggtcgtattttgctataaattctctttgacccattgtgcatgctgaaaaagtatagttacttaatgattgtagtgttctaccatgtatattagtattcttccatgttgaagatatgtagtcttctgttgtgacatggacttttgttacagattgttccaggttactatttgagaagaaacactgatggatttattgagaacagtacatgtgtaaacaacactgcaagtgagcattttatggttgagcgtttgattattgatgatcttcttcactgggttgtcaattacaaggtgattcctatattacagaatgatacattatattctttaaaagctgcctctcttactcacataaaaagctttcccgtatgtattcctctataatatggtatatgttatagagcaaactgaacttaaaacaggcttatgatttctatccatcattacacctttgcttctaggtttttttggaggttctaagtcgttgagattaatcacagtaatgttctatttcaggttgatggatttcggtttgaccttatgggtcatataatgaaaagaacaatggtaagcacttgttgaccaattcaataaggtgcatatctatgattataaattacaaagaaaataaagattataaactttccttagatgaaagcaaaagatgcgatttccagcctaacaaaggaaaagaatggcgttgatggttccagtgtctatatgtaggttttgcttggtcacttaactttttcatccagtagtttttctttttattgcttttaagttttttttccttttacttctaatgaactagttatttaagtgataattttataaaatttctgtttcacttttcgaagatatggagaaggatgggactttggtgaagttgctaggaatggacgcggggtaaacgcatcacaagttaatctttctggaactgggatagggaggtattctttgttatataaatgataatttgtttaacttacttttctgttcccagttcccatatgttttaaagcatattttggacaaaatacaatagtagttaaatttaaattttaaaagctatttttcccttcaagccaaatagcttgagcaatattgaaattgtccttaaaagaagggccaatatgactgctgcgtgagcactctgcaatatttttaaagtcactaacgaattgggcacttgattgccggaagtcttaaatttgtggatcacattgtgaaaagataaatctcaaggaccagattgtccaatgtaaaactgaggatagtttgtatttgcacacatacatgacacacacataaaagtgtcggcatttaatagctatccaggaaaatgagctattttatggtgtgtgtgtgtgtgtgtgcggacacttttatgaggactttagacttttagtaaatgttattatttttgccactgtttgtagtgtctagaatcaattttttcccttatctctatctaactttcacaaataactgaaattcatcttagtttcaatgatcgaattcgggatgcaatcctcggtggatctccatttggtcatcctcttcaacaaggatttgtcactggcttactattgcaggtaaatttattttactttagaaagtatatcatcatatttcttcattacttgcatcagcatgacaaccattttttttttaaacagagattagtttcttaagttgccagctccttaagcggtgatattttgataaatttcataccagtgtttgtattataaaggcaatattttatttgcagcaatctatctaatcatgtttatgttgagcttttaatcataattattactaatagatgaccaaaattttgtataacaaagtattattactattacttttatcatgatgtttgaaatgttattgttataactatggtagctacttactttgttcttctctcgcagcctaatgatcatgaccatggcacagctgctggagaaatgcttgcagcttcaaaggatcacattcaggtttaacatattgatgcataatttcttgaaaattactttattagtaattcactagtttctccatgaaatacatgctaa

SEQ ID NO: 38797 - DNA, 2644 bp, Cannabis sativa
atatatattttttttaagattgtaaaaatcgtaaaagaaaagaagtaaaataatttgtaatctactaacaaataaggccacttattccacacataattattagaaaaaattcaagttgtagccacaaacataattgggccaagcacacagaccaatagtatatagtacctctcaatgtaacaaagtttttgtgatcaaagcaagagaaacattattgtaaaatatagagaaatatataatctccaaatttagagaaacaaccaaatcaaaaccacacccaaacttacatatttttttgaaagtaactaagagacactacattcaaatcatcaagtgttgtagaagactcccattagtatggtcgaggcatctgaaataattaatacaataaaataataacaaattagaagtgatagaagtacaacttaaaaagccaattgaataaaattctcaaccgataattttagacgtaaatattgcaaattgtttcaacataaattatattgcccaactaaaattaaaccgataattaaggattgacacaggttgtcttaaacattttggagtcctgttctaatttcaaaacttgggcccgagcctaacaaataaaaaaattacaatttataaataatgtttttaaatattatcatacaattatatttttcacaagaaaccaaaaaactcaaactattttattaaaaattgttattgatttcaatataatttcaaaaaaaaaaaatgattgaaaaaaagaatatgaaatgcttaaaaataaataataaatagcaatcgatcatgtttttttttttttttgcttaaaaacagtaatagaattgaaaatgggctataggaattgggataggagtgaccaacgataacttgtcagccccttgaaaagttgggttcataaaaaaatttaaaaaaaaaagtgttaaaagaaaaaatatattagaccctttatttttttaaaccctgtacagtaacccaactttgcattgacatcaccatttaacaaggcatacacaattaagatatataagaggattaatgaaacaaaacaaaatatatggaaactatcctttttataataatttgtttagtgtctttattagttgtctttcattctggagagtagttcaaacataaaagactctacctaatcaaatttatctaaagcaatatggttctatggattcaagatggatgaatcaaagtccatggatgaatttaccaagctggtatcaaattcaatatccatgaaggtaaaacaaggcttcttctctctcggttcttgcagctctctctgagctggtgccatggctaaaacaaggtctaagatgcaggggaagactcaatcgacggtgaaatcgaatgcgaagaagaagaaaaaaggcccgtcgtcgtccattgatgaaaggaaaactaaaacaatggatgaggttttgggaattgaaccaatagatttctcggatgaggaagaagattgtactctgaaatctccacaagctaaatcgacttcgcagggttgtcttcaagaggctctatcgcccagaacctctctgaacacaattctgcagaacgaggaggttgtgtgagacttcaatttcttcatggaggctaatcgcaggtgttctgaagagatgacaaaaggagctcatgtaactcccccaattctgcgatctgggaatgtagtaaggaacctctcaacaaccttcgagcataccaacaatagcagtcaggtgaagattactctagatgatattcatgaggaggtaaatttctggaattcatctcttgtatgctatatactaggcgctaatcctcccttaaatgtgcttgatggttttgtgagaagattatggaaggataaaatagataaagttggaatgctttcttatggcatcttcttgatcagatttcatgatgtggttgatagagatgtagtactgaatgggggtatatatttttcaataaaagaccagttataatgaaagcttgggatccaaatgttgatttcaaaaaggaagatgtgagtgtcggtttggataacaatggatgatttagagttgaaatattggggggaaaagtccttgttcaaaatttttgggcagattggggaaccaataatggttgatgctgtcacaaaggaacgagataagcttagttatcttcgggttcttattgaagtgtctatccatcaagagtttccacataccatttattttgagaatgagttagggactacagtaccagctaaagtcacttacgaatggaagccgattctttgtaaaaattgcaagggtatggggcacgagacatttgactgcaggaagagagaaggaaagacacaagagtgggtggttaaaaaggactctaagaaaatagagggaagaatagtgaaagagggcctgaaaaagaatttatccaagtcagaaatggatggaaactaaaagagaaagaaccccctttccaaaccaagatgaccaatgcttttacagttcttgaagctacggataatgctgatattgcagcagggaaagtggttatggcagcagcagttcctactggtgtcatagcaaatggagaggctaaagcaggcagtaaaaaggaatatacaagagggggggaggaccctctcttgttc

SEQ ID NO: 38798 - DNA, 2348 bp, Cannabis sativa
tttcactaccaaaaattccacctgcgatatctatttcgaggtgcatttggcggtttgctacaatgtagtggtgttctaatacagtgtacaacaactagacttttctatcttagggacgaccggtaatttttgactgcttacacattcctagacagttgatacaaacgtcttaaagagagtgacctagtgcgcgactcaaccaaaaaattttcttaggtaatatcgttcctattttgttttcagtagcaatttactcaataattttaagacgttcgatttgctatgattgctaccaatgctttttttagttctattgctgacattaacaagtctttttattttaaggatttgcattttaaacgttggagacaaaagatgttgttttttctagctatgaaaaaagttgtgtttgtgctgactgttttaaaaccagttgtgtatgagactccaccacatgccaagaagaaggatgaagttaaaaagtacgaatcgcaggttaaggaaaggaactcttgggtagagaatgattttctgtgtaagaattttattttgaatggtatgtctgatgatttttatgattattataattctgacaaatttgtcaagaaaatatgggaagcattacaaaaaaaaatgataccgaggaggtaggaacaaagaaatacgctgcgagctgctacttgaagttttaaatgaccgatgataaattagtcgaagcctagtctcacgagctttagataatagctagcaaaattttgtctgaaggtatagctattgatgaacaatttcaagttgttatgattcataaattactctctttgtggaaagattttaaaaatactctcaggcacaaaacaaaagagtttttattggaaattctgatcactcatctttgaattgaggaggaagcttgaaaataggaccaaaagaaagaggtgcttgttgttggaaacaacaacaacactaataaaagatccattaatattctgaaaccaaatgggaaaaaatttaagaatcaaaattgcaaagtcaatctgaactgcaacagtcaacctcaaactaataatagcaatcagaaatggaaccatcaaaggaaccaaaataataggcagcaagtaccccctaatagaaatgattgtagtttgttaatgtgttacaattgtaacaagctaggtcatatggcacgaaagtgtcaggacaggcctagttctgctccgtaggctaacttgatagaagagatgccatttgcagctataatttcagagatcaacctcattggtgaatctgaaggatggtgggtagatactggcacttcttgccatgtttgttaagatagaactatgtttaaaatatatgttgctactactgaggattagaaagtgttgttgggtgactcccataccactatagttgcttgtactagaaatggggaattaaactttacctctggaagaactatgatgcacactccagagatgatgaggaagaatctggtcctgggctaccttctcaacaaggcggggtttacacatattataggggttgatttgtttaatttaaccaaaaataggatatttgtatggaagggctatgcaactgaggaatatttaaattgaatgttcaagttaataaagttaatgcttctgcttatatgttgtgttcttttaatacttgtcatgctagattttgtcacgtaaataaacacattatcaagaacatgagtagtttagacctaattcctaaattatccttaaatgacttttaaaaatgcaaattttgtagccaagccaagattactaaaacatgacataaatatgtgatagacaaagaaattgaacctctagatttaatccattctgatatttgtgaacttgatggaactttgactaggaatggtaaacgctactttatcatttttattgatgattgttttgatttacctttgtgtatgtaatgaaaaataaaagtgaagctcttgatatgtttaagctatttgaggctaaaattgaaaatcaacttagcagaaagatcaagaagttacgttgcaatagagacactgaatatgattctacagcttttgttgaattttataactcacatagaaacatacacgataagattgcaccttattcacctaaaatgaatgtaaagttgaaagaaaaaaaaatagaactcttactaagtctattgttgctattttattaaatcctggtgttgtttctcattagtggagagaaattttattaaatgtgtgttatgtgcttaatagagttcgtaaatgttgttgaagaaacttttacaacaccaaaaataaataataatattacgatatgaagaatacgtgcgag

SEQ ID NO: 38799 - DNA, 5616 bp, Cannabis sativa
tgagtttggcttttcctctagctctaactgatacctctaagagagaagttattcccaagttaaagtgggggagaccactaattcatatattcgtagaattaggctacttttttagttttggtttgtgaatcaagaggtaaacactacaaacagattcgttgttcacttcgaagacatgcatgattactgcgagctgcaaatagaccatatgcatgggtgtagactgagatcaagattaagctattttgcgacatgttatgggcatgctttgtgttgatgagaatactggtgttttattggacactgtaagtcgaatggttcagagagcatatgtcgatgggagatagcagattggggtgacttcaagccttaagagtaaggcaccatgttatcaagttcgtcacaatttagtaaatcgtcagaggatccagggttgatttggagattggacttgtgacacaatgtcgaagagtcgacatgagtagaagccagaggacgaatgcgttgtttcgaatgatttctagatcattcgccatttataaaatgcttagaggaccaattttgccttcggtcggacagacctgttgcatgaattcgttggtgtgtaatagggccggagggccagtgttgggtacttcatgaaggttttaggtgaaagagtgcacatggtgctacattaggtgcagctggcttgcaagccttgtccaagagggacactttaaattttgaccttcaacaagagtgttggggccggtttccatcaagaggatggtgcgccatggatttgacatatgaagtttcaggaggaacttgtctagagggacataagcatgttgtgtaggtgtcgttgggtacaatgggttcgcgaacctcaccccgaggggtgcaccatacttaatccttatcaatcagagtaagcattggacaattatcgagtgaactactattggaggatgtgtttagctttggggtcaatgttgcatgggttgtttggttgactttgtgatggacttggaggagttcaagttgaaggaagtatttgagtgcacatgcactactatatgggtgattttaaataacgacagtatcataagttctttgatctagtccaagagtaggtgtggaagatcatcactgagaatgtggttctacggaaggatagggacaagtacaaacttaagattaagaagaatcttggagtaagcttaggagtcgagattaggagaattcacctgttgtccgtcgatgaaggcatccacatgttgaagtgggggagaatgtcacgtgccagccaagatggcacgatacaagctaggcggatgtccatgaggtggagtgatggccaagtggtggtgcatgttggtgtgcatgttggtggcatgttgatgccttttgtgtatggcagtagcatttttgtaaatatctttaatattttctagatcgggacgggacttggtattcgctatttatttgggtctaaaaatacaatggtacaattgtatttgatgagctgtgagaattggtatatgttgatgaccatatgtctatggagccaaattcatatatattcctagtagaaggctaaaagcttacaatgctccttaagcgggcaaacttggtgttagctctctaccacccctagcaccttggtgctaagtgagctactaatagtcactgagactagtagggcagtcataggacatttttaaagaccttaaaaatttatgggacataatttaatagatgtcaaaagacaaaactcctaattagccttaaaaaattccatattcaattctaaaaatttcacctattataaaaacaaaataatttccttaaatatccttcataattccattaaaaattagatattattaatgaactttattagatattattcccattacaattataaaccattagcaataaatttatttaagcaatattcatatttaaatctatttaggaatccggaaaagatatggtaatggaagtacttgatctaaaatataaattatataatctaattttacgaagaaaaaataaaccgactgaccaatccacatgattaaaggttggtactcaggtataatttgtttaaaaatgtctggtgtgattatggtatggatcactcacctaaaatatgtatattatatacaaggaacattgaattcagacctccttgactatctaataattttctatatattatttttgttaattgtgtcatagaaagatttgtcattaagccgtggtcaaagccttgtccttcaagatacttgattaatttatcaccacacagtcacacaccttgtattgtaatattattctcttggacccaaaataaagacatttctggctctaccataaatataattttacattgggtaaatgacaaaataaaaaatttatatgatagggaaagaaaacacaccaagcttttggtccaaaaaaagtgactgcctcaacgatcgacataatttatccgagattatgatatgatataatctaaagtgactgcctttggcttcaatcaatattagattaggtggtggcggctgctacctttgtttcactcgttgggtaccttccgagaaggttcttcactataaaattctctccttaaaagggttcaacttgatttatcttctttctcattagaagggttgatttttattttgtctacttttctcaaactttggtttatccttttttttctcgaaactttactcactggtctctcttactcttaacagttggtcttgatttttctctctttctatttctaggttctactagttttctcgaggttgtttttcatggatacccttttcgaagatttacatggttccatgaacaataatttcagatttgaacatgaccaccataatcttgatcatggtttttataaaggtaatcgtgaatttatcgaccctgtttcaccgcccaccaattcagatcttcagggtgagccttctccatcttcaggctcaggctcaagttcggagggtgattctgtagaaagcagtgagtttagcaatgctattattctcagatttatcaacgaggtacttatggatgaacaagaagacctggaaaagaagccctgcatgttgcacgattgtttggctctccaaactgctgagaaatctttctatgatgtcatcggtgaagagtacccctctccactcccttgtttggatagaaattttgatgttccaaacgatcaatatgttcagagcttcagtaccgacagcagcattgaatctatcacagctactagtctaagcaacctggatgtcgccgaatccaattgggcctggaatcaagatgaagttggaccctttactgtccaaaactccattattgagtcacctgaagatacccttttaaccccagattcatcttggcatctgggaggaaaagctgttgcacaagggaaatctggtttctttcttccaacgaaattgaacgggacagcttttgccatccaagaaaagaaccaaagccattcaaccacagtaaatggatcagaaggaaagaaaggtcatcatcgtcatagagagtttggcagtgatagtccagaagaagaagaagaagaaggaagaagaaccaaacatacagctgtataccccgacttctctgagccaacagagatctttgatgaggtactcctctgtcctaagccaacactacatgacaaagagtcttgtggtttggatgaaaaggaagacaacaagccaaggcaacagaggaaaaagcagcagcagacaaagagaacgaagcagaagaaacgaaacagcaaccatggattggtggacttcacctcacttctaacgcaatgtgcacaagctgtggctagctatgaccaaagaacagcaacccaactccttaaacagataaaagatcactcttctcctcacggcgacgaaagccagagattagcttattactttgctaatgctctcgaggtacgcttatctggagggactccgtcgtataatcatcttggcagcaatggagcttcagcttatgatctcttgaaagcatatcaagtctacatcaccgcatgcccattcaaaagaatgtcacaaatttacgccaacagaactattctaaagctctcggagaaagcaaatagacttcacataatcgattttggtgttctttatggcttccaatggccttgccttatccaacgcctctctgaaagaccaggcggccctcctatgctgcgcttcacaggaatcgagtttcctcagacgggttttcggccttctgaaagggtcatccagacgggtcggagattggccaactactgcgagagattcaaagtcccttttgagtgtaacatgatagcacagaaatgggaaactgttaaaatcgaagacttgaagctggacaggaatgagttgactgtagttaactgcttggaccgcatgaagaacttgcctgatgaaacagtaatagaggattgtcctagagacgaagtgttgagactgataaggagaataaacccgactttgttcatccatggcgtgttgaatgggaatcacaatgcgcctttcttcttgactcgtttcagagaagctctgttccatttctccgctctgttcgacatgtttgaagcgagtttaccaagagaagaccagcacagactgatgtttgagcaggaggtgttcggtcgagacgtcatgaatgtggtggctggagagggtataaagagagtggagaggccggagacttataaacaatggcaagtgaggaatttgagagctgggtttaggcaggttggtttggatggtgaacttgttaagttagtgaggaacatggtcaagaaacattaccatagggactttgtcgttgatgaggatggaatgtggatgttgcagggttggaaaggtcgtattttccaggccatgtctttttggcaacctgcttaatctttcgagcttccatagcagtactacgtagtacgtactacgtagcttttggaaatgagtgcatgccacaacactacacgttggctcggcaactggtttgagaatacctggaatattacaagtgatcaatcaactcatgtttagctctggcactgatatcttgaaatggatcctcaaccccagaacaattttggcaacacttctgtggatcacaaccactttgcccatttagctggtccgttttttgatgcaggagaccttagaatctttgtggatgcagcaatacactgcatctccccgtttagaatctccatgcaaatccagtgcatcttcaccgcttggggctgaaactaaagccctcttctcagctctttctagcctgcttggccttttagcttccttgtttctttagtgccttttcatttcagttaaagttgtttgagaacctagagctagaaacaggtcagctttaatcactctgggtttgattcagtaagggaggtagattcttttatatctactatttaccatatcctactttgattttctctgaggaaaaataaaaaaaagaacatcacacgttgtgattatgtaacatatttaattcatgatacaatcgaacttatttgcatgcatcattttattatagtcagtgcaatccaccaagtcaatgatt

SEQ ID NO: 38800 - DNA, 1241 bp, Cannabis sativa
aattataaatttttacctaaaattcagtatttttataaaaactctatttagaaaaaagatagtatttttaaactaagtaaaaaaaaatatataattataaaagaggaaaacttatttttgagcctttaaactaagtaggctctaaatacaggtctagtctgcctatacacaagaccgagcctatataaattttaattaatttacatttgctataatcaattcatttgtatctacacctttcaaacaaaaaaatataaataaattagagatttcacttttcaacatattttataattttatggattagtgtgttatgaattacttagggctggtgttgagatttattgtgccttagctaacaataaaattaataggccattttcaaatgataatgtagtatttttgaaaattactaataaaatatgtgtatttttaaaataatttttttgttttgtgcttctaagctgggtgggccctaagcgtaaaccaaactcgccttaacctaaactcgaccctcatcgtatactttactacaatcgtttttctaatatgatggaagatgacaaatagtgtaaaagtttatctctcaataatgtcaatcgaaattattatatataaatatgtgttgttgaatggggtaggattttttcagtttttgtgctcctgtgcttgggctgagtgagccttaaccgtaggccaagctcgacttagtccagacccaaccctcatcgtacattactacaattgtttttctaaaatgatgggtgatgacaagtaggcaggggcggatgtacacatggggttatagtggccgtggcccccccttattttttacaaatcatacatagtaattgatatacaattagaactaatatacatagctacaaacaataaaaaaaaacactttgaaaagtcaaagcaaaatcaatatatagaaatgtatgtgattgcatttcaaaagagtaaaaaaaaataatattttaatatgaataataaaacataaattttattttttttttaaaaaaatattagttaaaatcaatctttataactattttttttttaaaaaaaagtaaatataaatataaatatataatcgagtaggatagggtaggataacaagaaagtgtacacatataccagtacccaaccttatacatgtatcaggtacatattttcatacccttacacctaccctaattcaacaggtaatatcgtaataccatacacatacaggtagg

SEQ ID NO: 38801 - DNA, 2366 bp, Cannabis sativa
taaaataatttccaacagaaatggggaggtggaagttgcatgtggatggggcatcaaacgatggcagcgcaagcgcgagagtagttatgaccgcgcctagagggaaaaatatgtattgcgcagtaggattcgggttcatagcttccaataatcatgctgaatacgaaggcctactagccggcccgtgtttggccaaggaattaaaaatcactaagctagatatctatagtgactcgcagctagtcgtgtgcaaatttgaaggagaatatcaagcgaagaggaatagaatggtggcatacctagccaaggtgaaaaattatttaggacagctgcaacactacgcaatggagtagataccccatgatgataacgtccatgttgatgcattggctaagttggcatcaacacgagatattgacaccttagagtcaatacctgtggagtacctagagaagcctgcaattgaagaggagcaggcatatgtggtgaccagtaaggactcttggatggcccctaccaaatctacatctaaaaaggagagtttcccaccaacaagaaagaatctaggagggtagtgtataaggcgatctgttatgttgtgatggatggggtgttgcacaaaagaggattttccaccccctcctgcggtgtgtcggcgaggatgaagcactacgaatcttgtctgctatacatgagggggagtgtgggaaccatgccgggggatacttattgtcacggaagattttgaaaaaagggtactattggccctccttagagaaggacgccacgaaattcaccaaaaagtgagacaaatgtcagaggcatgcgaattacagtcgacgtccgcccgctgaacttactggcatggtcaacccctggcctttcgtagtgtgggggatagatctaatagaagccttacccacgggaaggaccggggcaaagtacgatattgtggcgatggactactacaccaagtgtgtagaagccgagcctctagtgcacatagcagccaaacaatttgtttcctttatcaataggttcatcatttgtcggtttgggtcccccataagatcatcaccgataatgggactcaatttggtgacttgctaggagaatactgcaatgagaggggaatacgtagaggatttttggctgtggtacaccctcaggccaatggttaggtggaggccaccaacaaggtgatcaagaaataccttaagacctggctggaaaagctcaagggagcatgggtggaggagctcccaaatgtattgtgggcttacagaaccaccccctgtacaactactggagaaaccccatttgccttagcttatgggtgcgaagctgtactacccatcaagatgcaggtaagctcccaccgagtgaaaaactttgaagaagcacggaacgaggaggtgatggtaggtaacttagacctattagaagaaaagagagaagaagcgcaaatgagggtcgtagtgtaccagtaaagggcggcccgatactacaactcaagggtgcgactttgtgcctttcgagttggggacttagtattgaggaaagaacttccaaacaccagggatcccacaacaggtgtactggggaaaattgggaggggccttaccgcatcgcccaagtagttcctccttaaacgtacaagttggcttgcatggatgacacagtagtgccttgagcgtggaatgttgaacacctgaagaggtactaccagtagaaggctctagttttcagtcaagaaggagagtgactaccctctagaaggaagtaagaagtttttttttatttatttaggtggctagtgtacaatcaaagaggacatttgaaatgtccaccatttcgatgtaacttaagcacgatgtaattcaaaagctttattgcaatgtatgatatgatgagttttgttaagataattgtgcaaaccatttaaacaaatgagtaacacaactcaagcatctactaacatcaatgccagcacacgcttgggggagataagagtaaaacacacacttcaaaaaaaaaaaaaacacagaatataggccaaaggttcttccttaggattatggggattagctacccctaacaatccgagaaaagaaagagcctagtaaaggcatgtcacgtactctctaaagtacaaacatacgtaaaaggtcgagttggttcacagaaccatcatctcccttaaaaataataaaaacacgcaagaggtcgagtcggttcatggaaccatcatctccctcatgaacaacaaaacaaagagaagaaaaaccacacagtaaagttaaaaagccaaaagtagtgagataataaccaagaacaacgagtaaagtaagagccgctagcaggag

SEQ ID NO: 38802 - DNA, 3143 bp, Cannabis sativa
agatcctggtaaaaaaaattccaacagtaaagcctatgaccgtgttgagtggaattttttgcgggaaatgatgtcgagaatgggttttcataaccggtttatagaactcattctagctactgtgtctactgttcggtatatggtggtccatgatggtaaggagttgggtcccatttgtctagacagggggattcgacaaggagatcccctctctccctatttgtttctgatttgtacagaaggtttttcccaactgttgaatcattttgaaagaaatggagatctaaaagggtgtaaagttgctaacgaagccccaattatatcacacttgctattcgcggatgatagctacatttattgtcaggctaatgaaagggaggcttctaatgtgttgcgtctccttcaaattttcgagttagcttctggccaaagtgtcaactttaccaattctagtgtcttttttagtgctaacatctcgaatgccatgaaaacaaggctttgtggcattttgggtatggatagggctaatgaacagagcacttatttggggctgccttgtactatggggaggaacaaggatgcaattctaggctttcttaaggataaaatgcagcagcgcatacaaagttgggagggtaggctcttgtctaaagctgggcgtgagatcttgcttaaaacggttgctcaagccctccctagttatgccatgtttgttttccttctgcctaagaagacatgttctcacttggagggtttaatgtccaagtattggtggggttcttcatcaaatacttctcgtgggatcaattggatgagctggcgtcatatatcgcggcataaaaacactggtggcctaggctttcgtaaccttagagactataacatgtctcttcttagaaagcagggttggaggctcttgttgaatgagaactctcttgtgagttgtatttataaagcccgttatttccctcgagaatccttcttgacaacttctttggggtcaaatccaagttttatttggaggagtatacatgagtcataagctttggttaaagcgggagctagaattcgtattgctgatggtactgtaacaaatatgcttaacataccttggctgccatctgttgataacccgtgtgtatcttcctctcaccctgctttggttaattgtaaagttcatcagattatgaaaccggggttaagggaatgggatgaggagctcatatatgatgtcttcaatccaagggatagcagtattattattaatatcccactgagtatgtcgattgttggagatagatggtactggaatatgaagccatctagtatatattcagtgaagagttcttaacatcacattcaatgttcgaaaggggagtggagcacacaactggaatcagacttgtggaaacatctctggaagctccaaatttcccaaaggttgttcattttgcttggcgggctctaagaggatgtctccccactcgttcccagcttaaaagcaaacatgtacctgtggaatggcaatgtgttttctgcaataacgatattgaaactatcctacatgttttgattatgtgcccctttgctcaatcgtgctggaatagatctaccattgatcttattccctctgctgtagtgagtttccatgactagtttgcagagttctggtctaggcaaagaattggtgcggttgaagaactcctgatggtgggatggtctatttggaaatcccgtaatgaatttctttggaagaatcgttcaaggtctgctgctgaagttgtttcctttgcacatagtgttcttgatcaatggatttgtgctcagtctcgtcgtactgaaccgctgctttacgagaatgatagtgttggcggcaaggatttttggtctaaacctgaggaaaatatgatcaagatgaatgtggatggggctacttttacagcagagaatgcttttggtacgggtgctattgcgagaaatagtgatgatggagtcttggatgcatttgcaacctattatactggtggtccacatgcttctgtggcagagatcatgagtataaaagaggcattaagctggataaaaaacaagtgctggaacaatgttgttgtggaaactgattgcttagtggcaattcaagcattaaatagtttggttgacatgccttctatatttggccttcttgttcaagagtgcaaaagtctccttctgtctttggaaaatgtcaaaatttgtcatgttaaacggtctgctaacaaagccgcccattgtctggcgcgtggctcttgtttcttgtctgaccgtattttctctgagagcagtattccttcttcacttcaaacaattgtaatagcggatttagctatttaataaagtttctacttttattcaaaaaaaaattgttgagctatttttaataatttaatatgtggatttatttatttgagctaatattctaaattgagttaaataagtgatctaattaaatgagcctaataaatatcttattttttatggactttgtaatgtataatactcaatagtaaacctaattagggtttatggggctctaattagtttgttattagtagaaattacactatatagaaaaattataagagtacttttttataacattaataaataatgctaagggattatggtttttttttttttttttacatttatatggactttttttataccatatttttgttgaaaaaaatagaaatctcatatttgtaaataatgataagttttgccaaaaaagttgttggcgccagaagtcaccgaaaaagtcaccgttcccgaaaaagttgcgaacaaagtcactggtgccggaaaagttagtgtcactaggaaagtcactgaaaagtcatcgttgccagaaaaatcaccgaaaaagtcactgtcgccggaaaaagtcacaagaagtatatgtctcaaatataaacaaaaatagaaccggttctataatataatgaatgaaataaataacacaaaatatctcaaaaccagttatgattgaaatataacaggttctgtaacataatgaatacaaaaataaaacaaaataactttaactaattataactaaataagaactagttttataatattgttataatgaataaaaataaata

SEQ ID NO: 38803 - DNA, 2802 bp, Cannabis sativa
ttatagcctccatcttccacactcacggatagaaccaccacaacaacacgagaacacccaaaaaataatcattaattccggagagatggaacaagaacaatgaaatcgacatcaaaaaaataaattatggaaaataatcgtaaaacaacattaaaacaaataaaaaataaaaagaataaaaaaatgattaaaaaaaaaaactatccatcttctttacagtttcaaccctaaatgcaatagaggttatatttgcaagctcaattttaaaaaattaaaattaaaaagtcacactaactcttatctttttcaaaaacgtgactaaaaacttcaaaaattaaataaaaaatgaatagaaaatgaagaagaagaactgaacaagaagaaaataaaaaatttatatattaatggagaaagatagagagaagtgatagtgaaaaaaaaaatgttgaataatggagaagtgatattaaagtaaaaggaacgtgtattaatatttaagatatcaaatttttcatcatcaattttaattaaagcaaaagccactaaggctagcttagtagtaaaagagaaatgaaaaaataaagagatcatgaattcaaaccaaaatttttaagtgaaataaatagtgcactaaaacaaagtgaaattaatagtaaccagatgaaattcattctatgtgaaatatatgttcagcaccacaacaaacacacgaatccttcacataagaaaaaaaaaaaccacacttgaatccacacatagaatattcaatatactaggacttgtgatttgcttccttcagagcatctccaataatactaattacatattatttaaaaatataatattttattttatttttcttttatattatttttagtactcttacttttaaaaatattccaatgtacaatattctttaaaaatactataattataatttcacacattattatttaatatatatattctaatttttagctacaataattttttagctttaatattttattaaaaaaaataaatagcatcaataatataacataacatctatgtaaaatgtttttacttcaccaaacatccattaatgagagcccaaagtccatatattatatatggtgtatgtgagtggtaacttacattggggttaacccactagctagataaatctaataaattatttttaggcggcggtgactatagaataagaataagaatttattgaaatttttttctttttgacaaaaaaatttattgaattttgaatatgagcatagaagtaacaccattggagactatagaagaagacgatggttttttattgttaagatttattttcagcccttaaatttaagatcttagaattaaaaagaaattaaaaaggaatggttgtactaatatttattattaataagtattttaatatggattgaattgagttttatctaaattaagaccgtaaaattgtatataaaaattaattaaaatactgtgccttatatagattattgcatatattcgatttgctcttttttatactgtgggctctaatcaaaattcattttatttttattttttaaatataaagaacttattaattacatttattacactaaaatattcattgctaattgataatttaaacacgagatattctttggagtgaattaaggtaacagtaataaaatggctttaattagctaaaatttgggtcaaatagaggttgcatgcatggtttaagaaagtattattataaacttaattaacttgtttaaaataatatgtactgtcaatatgcatgtcccacgttatcttaaattagttaattaacataaatggtgtgactgtgaaatataagttacaccgaggcatatagtacatattacagaaattattttaaagaaaagaagacaatagatttcaatttgaaagtaacgcatgttcctaaattaattcatacaccaaacttttacatctaggattgggacatctatctatttattttgagaaataatagtgtagaattgtagattgtgtcttggaataccaggctgttttcactgtcttgataaagaagttaagattttctttttgtgggaatttaaattttgaacctttttttaagaaaaaaatatgaaactattaaattatgttgatgatcgctctttggaaagttaaatttgataataaaagaaagaggatcgttagaaaaatataaaaaaaaaaaatgtggaaaaaaaaacataagaagatttttttttttttttttttaatttcttacatttttctttttctattaaaatccaacctccaaacatactcacttagctgtacatctgaaaaaaaaaataataagaaaattttctggaagaaaaaaaaaaattacaagccccacaactttaattcatccatgaaatctatctagtaattataatagtgtaaccgtgcccacaaaatgaactaattaatggtgtttaagatttagttgatctaatttaatatgcacaatctaattcttatttgtgatgattgaaaattgaatatattataaaaaattattaattattcgcacaacgagattttcactattttctctcattttacatgcatttttcttatcttaaataaataaataaagaaaagttactaaatgtatttttgccttttgtttttaaaattaagaaataaaaatagtttaaaacatatttttatttttcaaaaacaaaaatttaaaaatctaataaacacaatttttttttactaaacacaatgtaactgatctaaagtaataccaatcccattcat

SEQ ID NO: 38804 - DNA, 2690 bp, Cannabis sativa
tcacttgccatccttgatctttcctataatcggctctctgctggttcagtgtatcaaatgatattaaacttcagtcgtagccttgttcatcttaacctctgggagaaccaaataaatggtttcataccagaagcttttcaaaacatgagtgcccttgaataccttgaacttggagctaatgaattagaaggtttcataccagaagctttaggaaagatgagtaccttgacacacttgggtctcaatttgaatgagtttaaaggctctattcttgaagctttggggaacttgactgatctcacataccttgatgttggcagtaatcaattagaaggtgaattcccaaaatccctttggaatttatgtaagttgcgtacattaagagcaagagaaaacaatattcgtagagtaatgattcctgagcagaatcaattactgtctaggtgcccacaatatcactctctagagtatttggatttcggttggaaccgaatcatagggccattgcctaatcttactttattttcatcattgaaagtaataacactttatttaaatcaattcagtggaactgtacctgaaagttttggacgattaacacagttggaggaattggatctttcttcaaactctttaaagggtgtaatttcagaagctcatctttcaaaactctcaaagctatcgcatttgagtttttcccagaactcactaatttggaacatcacttattattggcttcctcctttcaagttggattttataggacttgagttttgcaagttgggtcctcggttcccaaaatggcttcaaactcaaaaagattattccattctgagtatttctaatgcagggatatcagattctattcctaattggttttgggacatctctaatagttgttattccatggatctttctgacaaccaactccatggaaaaataacagattcctcatttgaattcatgtattatcctgaagtaaatcttagttcaaatgagttagaaggttcaatacctcatttcatgttcaaagtgggtgcactagatctttccatgaacaaattctcaaaactagattccatatgccatatcactaatgataccaacttaatgttgctcgatatttcaatcaatcagttgtctggggatctacctgattgttggtcttatttcaaataattaagcattcttgtattggccaacaataagttatcaggaaaaataccaatatctatcggttccttaactccgattatagcactgaatttaggaagcaatagtttaagccaagaactaccctcatccttgaagaggtgcacaaacttggtggcattgaatgtgggagaaaatagattatttggaccaatgccaacatggattggagagggtctaccgaatgttgttattcttaccctaagatccaaccacttctttggtagcattccctcaaatctatgccaaatgtcacatcttaatctattggacttgtcctcaaacaacatctcaggaagtattccgaaatgtctcaataatttgactgcaatgaaggcacagaatgtgagctttttcacagccattgaccatgattattcatatggtactgaaggatctgctacatacatatcttttgatgatcaagtacaactcgtatggaaaggaacactttctgtgtttcgcaatacattgggacttgtaaggagtattgatctatcaaacaataagctcacaggtaaaataccaacagaaatcactgaacttgttgagctagtttctctcaacttctcaagaaatagtttaagtggagaaataccctcaaagattggaaggttgaagctgttggataatcttgacctatcgaataatcgcctttcaggtcaagttcccttaagcctttctcaagtggatcgtctaggcagattggatttgtcaaacaacaacttgtctggaaaaattccaatcagtactcaactacagagctttgatgtcagttcatatgcagggaattctcaactttgtggagctcctcttccaaagagttgtcctggtgatgaaccaacaattacttctaaagctcttgtagttaaaaatgatgaggattaggagaagttggtaaccactggcttttatgttagtttgggactcggatttcttgttggactttggggattttgtggaacattactctttaacaagacttaaagatacttaactttgttgaaaatctaaatctgtgagcattctctttcacatactatctatgtagcctttgttaacgatgttcaagataatgtctaaggagatttaacattttcttttcactttcatattaacatgttgaagaagattttgcacaaggaataaaagtggagttttttggaataataaaagaagtgttgtactagcgttgttgctttaaataagattttttttctttaccacaaaaatttggtattgtattggagtcttggagacactcttagcttcattaaatatgattttaattataattttacaatttagaatggtttgaatttattgattatgcacaaataagttgtcccatgttatattgttaagatgttccaggagatgacagccaccagagtatgatgaatccatgtaaggaacttggatttatcccaaggtccacttctccagtagggagttgatcaggtttggggtggagcctg

SEQ ID NO: 38805 - DNA, 1573 bp, Cannabis sativa
aagcttaaagatatgaaaataactctaattcttagagttatcagaaaccaagctacaaggccacctggccaagtagcaagaagcaatggtgaaaaaaacccaaaacccccttcctcaaaccaatgtccaagcagccaaaggaagagaggaagcctttgttgtaggtggtggtcaacttgacaacctcaaccaaccagaagaaccccttgaggaaaataataaagaaaaccccaacaatgaagataaccatgacgggtactatgaggacggacggggaggtggttacgacgtggaggaggaagacacggttaatccaaacgaccaagatgatcaagaaaatatggaggaggaccttccaaaagatcctgaagtaatgcaactaagacagaaagtcttagaccaagaagcgaagatggttgaacaaaaagaggccacaccaaatgcaagagacattgatccagcttcaagccctcattgcatcaagaggtcttaatccagaggccccattggcgtcaatcaaaccccagccattggagtctaaacttaaaccaacatgagaccccctttaggaaaatttaatcatcttggagttgtaccctcacaacctgcaagtgacaaagggaaagtcatagctagcgatccctaaaagatggaaaatctgacaaggccaaatctttcaagtcctccaattcccataaccagggtgtatcttactatccttcgcaataaaaagtgggtagaccaagctccaaggtagggtcacccaaccaatccacaagggtggatccttcagggcaataggattcaagatcaggcttcaagacctaaagcccagggaaggaaacaccacctcatcgcttctatgaacaaggcagacacatatgaagaactcagtttcaaggatagtgcctcaaccgttgacctctaggaaaacttgaacgcgtgtagaggaaaggtatgtcgtgagagaatacaatctcatggaggcaacttgagaagcaacatcaatgaccaaatttggggtcgtgatgttggtgatgacaaaactcaacaactaaagaaataaatagccacattacataaggtcatggatggcctggttcataagcaaaatggagtcgggtctgacttagaaggtgaagattcaaagcaatgtgttagacatatattggatgtattcctaccagagtgttttaggttacctttcgtagtcgactatgaaggaaagacggatctgagggatcatttgtctcagttcaattggctaataaaagtggaaaatgcaaatgatgatggaaagttcttatgttttcacttaccttatccaaattcattggaaagtggtggaaacgactgaagcctagatcagtagaaaattggcaacaactttagtccatgttcaaaaaatagttcatggccagaagagactttgatacggaagtcaactcgctgacaaacattaagcaggaaccaaatgaaacccgtaacacttatatgttagttttttattcatatagggtgtttagtagaagagtggtggggatgagaatacaataaaatatttatataaata

SEQ ID NO: 38806 - DNA, 3387 bp, Cannabis sativa
gataaaagcttaaggaagtggaaaaatccctctgttgaagtcgttatgtgaaggtgtgacagtataagattaacgtagaagcagcttcatttgagcagcaaggcaaatatggttatgagatgagcaagggtgggtcactgcgttttcacggtgtaaaatggggaagcttaatcctacagtggctgaagctattggcatcatggaaattttgagttggctgaagactcaaaacttttctcaggcagccattgaatcggacaatttagtggctaaagattctatttgtttagacattcaaattagtttttttagttcaatttaaaattatttgtgtattttttagaaaattctgaataatttataataaaataatatttaaatattttgctgtaatcgcaatagtttgttttttatacacatgttaggtaattgttttaaccttattttaagtaatattgttagaaataataataataataataataatgtaaagtagttctttttgtgggattaaaatatattgaagatgttgaactacttcaacaaatttagggttattttttcaaatattaaaattttattatttaattttcccggacattttttttttctcatatcaactacaactatgttttaatattgatgctgacaaattggctactaacagactataaactaacttatatgggaaaaaatacatttttttacttgtgcgattatctttattattttaactttaaacgtaataatatagtgttttattttgaaaaaaataattaatattttttgactcctgactttttacattattaagttgtctcttatagcataaaaaattaaaagtgcaaaactactaattatccttttgaaaattgctaaatataatatttatttaattttattattatttaaaaactgaacagctaaattttacaattgatactccccttttttgaaatgtaagctgatagtttatagttgagtaagtggtgttaaacagtcgtggaaaaacacatttctaaatccattcctattgtactacttattggtagttgcacttgcacattggttttcaggataaatcatggcaccaccccaccccaacccccttcccatacataaggcatatagactcagaatcccgaaaacacacaacctcaacaccacattctcagctcgagtgaattaatacaacaacaacaataacaatcacaacagcagcaacaacaacaacaccacctaatattttggttttcagccaaagggtgtttttatttttactttctggtattagtaactatctatatcagtttctggcctccgaaggtagtaacgcaaacagttcactagtacctacacattcaaaaacttcattagaaaattgaagggaaattgagacaccttgtcgtgccaataaggaaaccagagtacctgagacaatgaacttgggagtgccgcccctctatagctgacatgaaatttatctttggccaccaacccctgttagttcaaagtagtgaagttcagtaaaagaaaaagaagctaaattaagtgtttggggaacattattagaaagaaaaatggatgaaggccaatacttcagtatcaatctctgcagattccacgtcgatgttgacatcagcaatgattttgatgatttcaacaagcaatcctggtctgtctgcagtctctatgtagagcaagctgaatattcaaataacataatgcaaagttaagataatttgccaagctagaggttgcatgattaaatttcaactttatgtcgcgacaaaccttttcttgggtccatcttccttcacatgtatacgagttgcaacatcaacatcaagctgtaatcagcacatataccaagtcattacaaattatagagcaaaaatatgtgcctttataagcactgttggtttaaagcattcagtttatggtcattgtcaaaaggtggagccttataataaaacaaagtagttcatttcaagtttcagagttaaagcactgatgtaggaatacccacaaaatggtggacctatgtattataacaatagacaatgacaataaactggccatttgtgtaactatagatatacaaattgggtaagttattaatgtggatagactacaaaaggttgacagtaacccaaaccattcaaaacaaggctactaatttgtctacatagcagacagatgttatattccagcataataaataaataaaaacatcaatatatcttattcagactcagatatactgtgatcatcaacatcaactttacttggtccatttataaatactaaggaatgggtcaatacctaaagtgcgaaactcaagaatggaccaatgcaaagatgtacaaatttcaagactaataaatttgaacatgcaccttcttttcaggagcttcaattccaaaagcctcacccattgcaagttgccgactagattcctagtataaaccaaaatataaataattaaaacaggaaatcgagatacttagaccaatcaacttgatgagatatagctgttaagaaaaacttgatgagaaataataaagctaaattttaaaattttaattcattattgtatattttatttttgagtaatacggattatgtatcccattcttgtgtatagttgcctatctataaataggcttaactatatcagttgttgctaagactaagatgaacgaatgtaatgtctctcaaatttttcttgctagtatctctaaattcctttttatattgttctctcttctttctatattctcctatttttgtctaaaatcctttatttttctgttcttcctcttctcactccgctcttctctctctagttctacatcatttgcacaaagaaaataagaaagttaagcgaaaaggtatctcaatttgcatcataaaagatttccaagttcaaggggaaaacgaaaaatatttagtgtacttacaggatgatacttcaacagattattgatgacagtaagtcgaatcatctctaacatatcaggatcctcaactttgcgcccattgtctctggtatatttcattgaatcaagttttatgtttagataggagagtagcacatactgagacatatctacaaagcccttaaaaaagatagatgagcacaaacaaatacaaaatatataacaatagcctttttcataaaaaagaaccaaagcaaaatggagaaccatgtagaaagaaaagaagaaaagcagtgggttcattttctgcctcagtgcaatgaagaagaaaactacttttctatagtactgactaggtatttgaaaataagaactggagacttcttgcctaacacaatctcaaactatgtgggagcaaaacaaactatgaccgtttgagctaccc

SEQ ID NO: 38807 - DNA, 1542 bp, Cannabis sativa
  modified_base (397)..(416): a, c, t, g, unknown or other
ttatttatatagtttttcacatatttgacctataatatatatgtgtatatatttatatttattatcatatacattactctctaaaaccaacaaaatatgtaacttaacattaattattagccggtaattatggtataatatatatatatatatgtacatatgatatatcttctcaattaatccaattaatatatgtatatcatcttcaaatcgatcactatattcactaccacacacatttataattattacttttaaattgtaattaaatattaataaaaatactaaacactatatatatatatatttatatagtgtgtgtgtcttgattagtcaaaggagcaagttcagtgataattaaacagttttattataatttttaataataataataatnnnnnnnnnnnnnnnnnnnntaataataataataatataattcagttgcctaattaatatttacatatatttataatgatattctatagcatcatcgatcacacgtactctaattaattatagacaaaaacacacatacaatttttttttaaaaaaataaatatatataaactgatgaacacaagaatttttcttttgtttttgttttttttttcttatttctaaaacaaaacgtaactttgtcggttaagcaaccaacagtccaacataacctaatttataattaatagtaaaaaattatacattttttggaatataaataaaaaaaaaaattgatttgtacatataaatatattaatgtgtttttttatcttcaatttaaaattcttttgttaattaatttatagggagagcaccaataattaagctttaaaagaggggtccacaattgatgatcagttcacttcaatacttaattaggtttttattaattatgagctatagggtactcaataatttgaaactccaatgttttttttttctgaaaaaaaggaaaaaaaaataaagctacacaattagtactatataatattaaagcaaacctagctattaataattaatatttaatgtactataattagttaattaattagtgtgtttaaactttaaacaaataaattaatagtattttggtttttggtacttatattgtctggccactcttcatcaatcaagagtcattaataattgaattaaaggtgatttttttttttagatttaaaaaatttgttataggaaatgaatagatatgtatatatattattgttgaaagtacatgtataaatatatgtatatattattgtgtattgcatatatatttaattatatttttagttttattttgttatgtgtattttgaaaatttataaattaaaagaaaatgcttattttttttttaaaaaaataataatattcaaaaagttttaaaaatttaaaaaaaaataaatataaaatttaaaactattaaattaaacacattcttaatattaaaagtaacaataaaaaataataatattataaataatatattaatacttatatatttaaattaatctaaataattaattggtgtaaaagttcaattaa

SEQ ID NO: 38808 - DNA, 1215 bp, Cannabis sativa
  modified_base (905)..(905): a, c, t, g, unknown or other
cacaaagaaagttgcaacaatttgtatagttctgaaacttgagagggaatttggccagagaagacagagtttgataagtctagattggttagcatcgaaagtcggttgatagcagtgggtatgtgagagtagttaaaatggttgtttccaagattaaggctttggaggtgaaccaggttgaagagggtgctatttgagtcaatagagccataaagataactattgctaagatcaagggtgatgacatggcctgtgatctcatcacacacaacaccatcccacatgcaacaatcttctttcttgctccacaaggcaacctttgaataagcatcaggatttttagtaacagacttgttaataataaagctttccttaaacttcaatagagaagacttttcaaaatcatggcaaataggctgtgagaaagagaaagatgataataaagtgaggaaaagaaagagtacataataaagaagaagattattaccaacaaaactagagaattccataatgatttttagatttgcaaacaagtgagaattgagctctactatttatagaaaccaaaaccttattatcaattccactaaaattatttaaattatatgttattacgtcatatatgtccactaaagacttgactataaagttttaagtttattatttaaattatatgttattacgtcatatatgtccactagatacttggctatcaatttttaagtttattatttgaataaaaagtttttttatttttaaattttaaaataattttttttttatgtatttttacagaattctatataaaaactcttattgcaactagtagagcaatttaaattacaataaaatatctaaaaactatttttaaaacccaaatcataaatttaaaaaaaaattaaaanaataatatataaaataattcccgtacaaataattatataaatatagagttagttattttacattatagaattataaatgagtgatatgaattagtccacgcgtatataataatggataatacttttgtagctactttcttctatttttgtaatgatgtgtctccctgtaaatttttctttgcaatagtggtactactagggacccaaaaacttttaaatacatcttattttaataattttaaatttatataaaatttatatttttaattatattaaatttttttaactttttttctttcaattcatattc

SEQ ID NO: 38809 - DNA, 3876 bp, Cannabis sativa
aagtatattcctcatatagcaaaggaccatagattttgcatatgtatcaactcgttgggtggtgcaggggattttgaaaaacttttggcatttaccacaaattttcacgcaaacttttgattcttcaatcattgtcgaccgaaagtaaccctgccttagtatttttttggataaactttgcagcccagaatgattgccacaaaaggggcgaacacacatagaagcgaggtagggcagtcgcccttgaataaaatgaaaaaatatatatgtgtgcaatttagttagttacgatatatatttgtaataaaagatgatatttgtagacataatattaaatattaattttgattaattttggtgtaattttggtgtaatggttaagctatagttaagctatatttcatataagttagaggttaagggtttaaatctcactaagagcataaaattttttgtttttagtttacttttgcccctgccttacaaaataaaattacacacccctcactttaaattttgggtctgccactggttacaaccatctttgtgtgtcctgaaaagactcaaaataaagattgtgtttctttgctttcaatgaaagtacaaaaatattgaccttgtttttagccaacgatagtaagtcaaattaaagtgtgtcacctagatggatgtcatgtcaccttgtgtagctaactaatatttgccaactaggccaacttttgtctatttcttaaattactcctcccatttttcaacacactcttgcctctctcttcctttactctctcttgctctcttctcggtctgaatgactagcactgactcaagccctaacatcaaacatctcagactctctcaccaacccacgaccactgtagccagatcatcacaatgtcaaaggtaagatttcgggccctctttttttcatatcatttcattgtatttttgggttaaaatgtatgagtttattaatttaggattaaaatgtatgatgaatctccgtaatctgtgagtttatgttagatttagggttgaatttggtcaaatttgtattttgaatgaaaaattagttcttacgcatgtctttctattgttgaaataagtaaatattgaagatgtagatccgatagtggcccgaatctaccaatttttttacacaaaaaagaggtagcatcggaccactatcgaacatatattttaaacctttattcattttaacaataaaaaaaaaaaaaaatcaggcctgcatcagactaccatcggaccactcttgcggccggccagtgaccattatctaccatattcttattcatacaaattttagttttgttacgaactggatgtaggtagtataccataacagggcgtatagcaatgaaaaaccttattgaatgtttgagcttcctctgacataataaatatgtttcatttcattgttgatgatatctatttttttacaggttcctgttattgtagaagagtttgataacagtgttgtaaaaacatgagatcattctatgttctctgatgttaaaatgattataatttaattagagcacgaagaaaatgattatataaattaatgaatattctaatatttttcacaaccaaaagagattgatatatatatatatatatatatatataataatccaagtagttgcacttgttttatgtgaattaatataaattagttgttttaagaaagactcatcacttaatgacacgtttgggtgctaagcttagttgttaagacagaagtagagtcccacatcgaccatgtaaaagaaatatttgatgtatttatagtccaacctgtagttttcagtgcacgaccttacttgaacaggatctgttctataggctcgtacctctgtatccttgacttctaagaagacaggaaaccaaacctggtggatgaatcgtggccgtccgatcagagcgtgattaacggttagatggtcttcggattatcacggctgtagaggatcgttctcagttagttctctagctggggtggtcggtcggttgtctgacaggttcctatctttttttttattttttttattttgcatgtttttattagtaaattttcataaacaacagaggaattaagaggttattgttttcatttgatttctctttaataaatatagttttagtctcatcacccccaagttaagataagatgtctagtaatacctgtaaacaacaacaataatttccaaatcatatgtctagtataagtgtgtaacttggtccaaaccatattacaaactaaccaaacttcactataatttccttactggtcagatacctttacaaagaaaaaataaaatgaaaaatagtttctaatcaaatttgtggaaaatattttcttttcttgcatgattaacaagtatgaaaagaagacctctataccagcttctaagagcaataccctttagcctattttaagttcctatttgagattaagataattctgaaggtgcaaaaatgttaccaaagaaagaaagagcaatgaattatataaaatattatagtatcattgaataaagacaaaatacaaaaacaattttctattgcagttagattaatattgtatcccacattaataagctgcatagaataaatagtggtctataggctcgtacttctgtttccttgatttctaaggagacaggaaaccaaccctggtggatgaaccatgaccgttcgatcagggcgtgattaatagctagatcttcttcagaagattacggctgtagaggatcgttcttagctagttcttctaagccggggtggttgaacggttgtctgacaagttccaatctttttacttatttttttagttaattttcattaacaactgaggatttaagaggctcttctggtcttaggatcacacaattcagagtacaactcatttggtttctcttctgttgcttattgttgaaataaattcctctttaatgaaattttcataatcaccattaaactgtaaatatggctttgctagttgtagttaagttagttcataaagctcagactttaaacttcaaactatttggggaacaagacttatttaataaaacgtttatgaccaaagcaagcaatgtatgcttaactatatctggtttcatttttgcctcgttaaaactaagcataatgtcttgtgggattttctgcctcgataggcttttcttgtgcaattctcatttcttaatgtattgttgtttgtgtttgtgtttgtgtttaaatgttgtacagatgaatctgtgtaccttcaggactagctgttatcttcagttttggttcttgttaatgcagtagagttctgtttggtactagagaaacatttagttgtttttaccttttgaattgaagccaattgataacactgttgtaaaagcatgagaattgaaactattgttaaaataaatcaaatcatgttggaacactatttatgatgattcctttatatcccctaaataatttctgaagtgttgtgtgtttactataatttaattggcacaaatgattatattcgaatatttttcacaaccaaagagattgatatatatatatatatataataatccatggttgcttgcatttgttttatgtgaatttatatacgtagttgtcataagattaataatcacttaataatgagtaatcacttaatcacacacatctggatgcttagttgttactagagtcccacatcgaccatgtaaaagaaatatttgatgtatttatagtctaacctgtagtcttcagtgcacgaccttacttgaacaggatctgttctataggctcgtacctctgtttccttgagttctaaggagacaggaaaccaaacctggtggatga

SEQ ID NO: 38810 - DNA, 2401 bp, Cannabis sativa
aggggccagccatataataggcgctatagccttgtaaggcgccaaagccataaaaatggtgcaaatatagaacaaaccaatgataaaaagattacaatatatcccattataacaactcaacattattgaacaaaaccaaaaacaaacaactagatataatcaactaaccaccattttagcattcaacccaacaccaaactgagtgaaatcatccacgattaaactaaaagtaaaatttaactcaaaacacttaattacactgtgcaaatattcaagaaaaagtactaaaatctagaggcctttcactaactcagaaataaaaccagaataaatcaacaacataactcatatggacatctaaaaagaaaggaaattttaattaaaaattaaaaatctcaccatgtactcaagggtttggtccaaaccaatagaggatttgatatatccttcttcttgacccacatctctgaatatcaccgccatcttcatcagcggcctcttccaaaattagatttcttggtcctcatgttataaacagattaaaaactcaaaatacataaatgaaaaaaataaagcaattaaaaaagagaaaagaaaatcaatataacagatgaaaccaaaataatcaaaaccaaacaaagtgagaagactttgcaagataaaaattgggtgagaaaaatcaaaactgggatccagttttgtttccattttggtgaatctctgaatggtttcgcgatcagaattgatgaagacagataagaatggcctagcctatggaatcgataaagaggaacgaccgagcaacaacccatttcagcaataacccgtcaacctgagatcatggaaatggcgatgaaagccaagatcatgaaggccaaaaacttagccatgtccattttcttcgagaaaaaagagaaaagcttttacaatagtacattaattgatggtgatctatatacatgtataatatatataattgtttgttgttcttgagacattgtttattgttttattttttaaatcttatatatttatcaattttaatattttttttctctataacttttgaaaataaatttggtattgtatggtaagttctttacatatttttctatttgtagggttacttatttttttagatttcttatttttttttaccttttaatcctttcatctctactattatcacttatttatttttctactctaaattgtatgataatttttttttaattatttttgtaaagatttcgaatctgtcatattatatggtaagttttctagagatttttatattcgtgaattctttcaaagttttcaatttttaatctcttcttccctatactgttcgattatatctcttatttatctttcttctctagatttgatattgtttaatgagtttttttttatagattttttaatttcactagagatgtctcaatttttatttttttccttcaattttctaaatttatttatttattttctttttattttattttctaaaaaaaataaaatatttaaccctaaaaaatatttataaaaccaaaatctttctaaatctatttaactattttctcttttttaatctttcttctattttctaaataaaaagtaaaatatcaaactctaaataatatttataataaaataatattgatattaattaagtaatattctccaagcttaccctttctattcatttccctacgattttgtcccgttagtgtactttaaggggatttattccgtgatgtacgacagccgttggatgtggtagttatttgatctaaggactggagttgatctaggggtatttagggttaaaaaaaagtaaccggatatgtttttgaaattaaaatttattaaatttaaaaaatttgaaactgacctccatcaatcatatcaaccgtcctccatttttcactcttctacttccttcttcactttctttctttttcattttccattttcattttccattttctttttccattttccatttttgtttcaggttagggcaaaactctccttttcattttccattttctttttctattttccattttcgtttcagcttagggcaaaactcatactttccatttttttcacttcttttcgtgtaagtgtgtggtgtacattactcgtcttctgccattgttggggttgttacagtcgtaggtcttgacggtgggttgtacaagtaagtttctccagttctacctttcatatatttcgttcttcactgtgggtattaaaaaaaaaaactttttttaaaaggaatgtggtgttagtccattttcgtgtacttaaaagttttattttctctcaggtgttgacggtgaggtcttcaaggttgttaccatttctgtgttgaggtatttctctctctctctct

SEQ ID NO: 38811 - DNA, 3943 bp, Cannabis sativa
  modified_base (1126)..(1128): a, c, t, g, unknown or other
  modified_base (1303)..(1305): a, c, t, g, unknown or other
ttttagaaagttcatatttagcgtgttaataaacatacttgtgagtagatctcagatcctagtaaaataatttccaacagtagtgactccactaaaacactaagtcccttggggctcatgcaaaaactatactgcaccttcggctcggagagccttctgtaccatcagtgcatatgtgatagcatcatcaatcgtaattgtcagatcatgatagatctcgacattaagcccagttgccactagatctatcctatgaggaacaaccacttcaggtccttgacaggatggacaaaattctacgtaacaagactacatccttagtcaaggtactctggaagaacaacaaggtttaagaggccacctgggagttagagtctaaaatgaggattcaatatccagagttatttaggttagatttcggggataaaatcctttttaacagtgagataattgtaatgaccattatacttagacatgggattagtgggacacttagcactagttaatttgactatgtgatcatttatgcattttatgctttatagaccctattttcttgaaaatatatgttatgactattatttctcaatttcagagattttattgaattataggcgtggtatgcatgctatatgtggattttcatattttcacatttttatgcccgataacagtaaaaatgggttagatgatacttttactcacatagatataaatttgtattaagtattttatggggcaatatcattagatatcttagaataccagggtttaacaaaataatggaattggacaattttaccttagggttacgagataacttaacatggaagtaaacatattttagtctttttgccatatgtgattagtcattcttttggaagagataggtgtctatggctcatccttttgaggatgactagctacttaggaagcaaacaaaaaggaaaaataaagttaaaaggaaccaaaaacaaaaaccattgtcaaaagcaaaaggaaagtaaaaaaaataccaaatcaccttctccttctctatctcctttctgggtctgaaccagggctaaaaactaccattttcaagcatatttcttcctgaatttgatcaaggagttcaacccctagnnnctccaaacttctaaggtaaaacctaacttgaaatttactcgttttctaggatttttgttagttttcagtggaagtttgtagtaaaactttataaagcttaggaaaaacttcttaaggttatttatgactatttagaagttgtttgaagtattttgggtggttgtagcaaaagttnnncaagtttgagttcaaagaactcaaacttgacttggtggtgataacttgaattctgttaagaattgggttaaggtgtgttcatgaaaaatgttcattataggtgctttgcaaaatttggtaaggtttagcttagaattggatgagttatgggattttcaaactcggacagggaggtttcgaatcacccagtttatgcagttttaggatggtcatttaaattgatctctagtgagaatttgattgaaattacctcatgaaaaatgtgaattatgatatttttagataccttacgaaatttggcaaggtttggcttagaattgaatgagttatgtaagttttaaaattaggcagtggagtttagactgtctgatttaggtagaatgtagggtccgtttttaaagctgaccatcttttttgagacttttctcaggactccaattgagtattttctcaatacttagggtatttccatgatatctttcgatagggaaacttttagttttaaatttaagtccctgaaagtgttagggcaacacttattggtttttcttgaatttggacttagggcctttgattaccagtaggtatttccacttaggttgaccggtatgcctaaaatcaaaattgagataagactagtataacacacttacatgtgtacatgtttatgtttatgtttaccagatgcatgacatatccgttagaacgacagttggtgtatatataattgcatcttgatatcgtgaatatatgtgtttggcaatttagaaagtatgaaccaatgataccaacactagtatgccaaagtactaagtgaatgtggtattatagtaaattatactttcgaaagcataaactagtgctatcaacactagtacgccatagtattgagtgcatgtggtattatgactagttgtgtttgacaattcagaaactatgaaacattggtggatgtgatatcgtgaatatatgtgtttggcaattcataaagtatgaaccaattataccaaaactagtacgccaaagtactaagtgaatgtgttattacagttggttatactttcgaaagcatgaactagtgctaccaacactagtacgccagagtactgagtgcatgtggtattatggctagttgtacttattgtatggattgatgctaccaacactagtacgactagagtactgagtgcatgtggtattatggtcaattgtactatggtcaagaatgtttgagactcaattatatatgttggacatggtttatgacttgttgataggtgtatgggtgcttaaccacaggtcggttatatgtttatgttttatgattttcttaatgagtctgttgactcacagatgctatgttatgtgcaggtataggcaaagttgttgttgaacgacagtgagtttggagctgaatgaaaattgtacatatcgagtcagttacacttggagtattggatctccaggacagctagggctcatgattttatagtcgtcgtgtgacatcttttgattatgtacagttgaaaaatgtagatatgggatctcaaattttgtagatgcaatacagtacatgtttatgaaagtttaaattttatcacttttgataaatactttgattagcaaaggttgaatagtaattatgaaaagcactgtaacacgccgaaactagtacggtgttacatgttgtgtcgagggtatgggatcactaggcatagaaccgtagtgaagaccctagcgaaaaatagtgttactgaaaggatgaactgaatccaattgaacttagttagatctctgctgttcagttcaggattattgaaatcattttagggggaagccttagaaactacaacctaccttattaatagaagcccagaccgagttataggcttaaaaaccccttatgaaatgtggtacaattgaaccctaaacctaacacatttaagaattttgggatgagcagcatatgtacaccaatctattgacaagctggaacctatatctattaagtgaactttcctaggttatgccttaggtgccaaggggtatagaatttacatatccagaaagggtagaccaaaggttgtgattgctagaaatattgttttcaatgagttggaatatcctcacttgacatccgagaaaggtagtgtgtctccatgtgatataggaaaaataggaaataaaaacactacacacatggaaatggaatatggaacggaacatctagaagaaggttcacatatggaagctattgtggaactagaagacaatgcgcagactaaaactgatgctgagttggaagataatgaagaccaaatagaggttctggaaggattcagatagataggcctagaaggttatcggttggcacgagatagaactagaagagagactcaccctccaacaaggtttgcgaaagtaaacttaatagcatttgcactggcagtagtacaacatactgaaattgaagagctagaagctatgaataagcatttttgtgtggaaacaggtcaaaatggctccaggccatgtatgaggagatgaactcactccagaagaacaagaatcatgttgttgttgttggaaattattttaccaggatgttagatctgctcacaagtatgttgtttaaaca

SEQ ID NO: 38812 - DNA, 2739 bp, Cannabis sativa
tccaagattgccacctaagaatttatgaaaaagatttatgtgctaaataaaatagatgtcaaaaaaaaaaaaaaacattaacctaactaacattctctctttcttaaccatctctctcgaccctaagataaactccaaggaaaattaagtcaattttagagtaaattcaaactttctacaaggatttaagttagcataagagagaagaagatcaaggtaagctcttagtttttttcttgctttgaatttctaaagaagtttggtttatttgtgtgatggtggggttttggttctgtacgattttagtactattaaaaactatttttaagctttaattattgtagtttgtggttgttttcaaaggctagtaatggttgtggtttgatttaagtgagtttgagttttagaactcaaacttagctcaacaatggtgatttattttttagggggttttggtgtttttagttgttcagttttgtttagagcatgattttagggtgttctggaaagtttgagcatgtttggagtaggaatgagatttgaaagattaagttttttgaaactctagacagaaatggcttactgttactccaagcaagccttgggtaagtggttacctatttggggatccgattacccatttgaggtgatttttgggtacctcaattttcatgttttctcgatatttagggtatcaccacgctattcatcgacagggaaactttaaattttgagtttaagtttctgaaaatattttagtgagacacttaccaattttacattaatgtgacttagggccttcgaacgtcgagtagtttgtccactcaggttgaacaacacacttgattacggaattgatgtaaaattattataatagagatacatatgtacatgtttagtatgcatgttttagttgccattagattacaatattaggtgttatttgtatttatggatggaggacacgtgtaattttaagatagttttagccgagttgctccaggcccaactaagataatggactacatccattagcgaagtcaagcctttcggatgttggacaaatgactcgtccagacaagctacacctctggcacatcgtatctctatatgacctcaaataaatcttctagatgagtgattaatgggcatctggatatctagctctgtatcacaacaattcatggccaaatcccacaatattaaggctttctttccagtatcatgtccaggatttgtatcttttgaataaggaaataaagtaattgtcaatcaagcattaatgtatctttattatccaaaaaagtaggacacaatttgataaccatcaacgtgatatgtggcctccacgtaaacagaggattaaagccttaagggctggacctcaccgaatcggcccaaatgtcattatattatttgtatttaccccatcagtgggaagaaccctagcactataaatgtaagaaaatctattcatgtaaaatggttagaatctcattccttgagtgctcagataaattctagggttcaaacacttgtgtaaatcataaggtttttttagtcataacacaataatattgactcgtagactaaggctctttaactccccaaccacataaatttactctggtttcattctttgtttattatatttctttagctttatcatattttataggcttttgacaatctcagtataattttttgtactttcaatgagagttgaagaaagatgtgataccaaagaaggcgtatactgcaaccgtggtagccacctaaaccaccattaataaatcttgtattcgtgatggagaaaatcccatggacgatgtgaatcctaatactcacacaaaagcaagagtcgatggagacccgacaaaagagactagtcatcctactaagaagacctaacatactaaataatacgttgatgaaaatcccatcattgaagataacccaaaagatctaaaggatgatcctgaggacgaagatcatgaaggtgttggaaaagaaaaagaagatgagtattactattagatagatcctaaagtcacttggatggctaaagaactcggtgaaatcaaaagagagttggtggattagaaggaattctttcattaaatgcgagaaactttagcaagattagaggccaaaattgaattgtaaggagtggttcatgatgaaaatatttctgatgaccctgctccacagcaaaacaatactacgaagaaacaaacccgaaagaccctggaacttctgatcccgcaagggactaaggaaaagtatcatgggagagcctgcaataaaactactccaatagatccatggaataaaatgattactgccaatcaacctttatagaaaagaaggtggccaatgctccagagaaatgttgcctgattaatttgcaaggcagagttgaacaaggtgataaggtgagtactcaaggaaggaaaaactgccctagtgattcagttaactagagtgagggattagaggaggttcaccatgtgttagagggtggtttgtcagtagaggtcctctgggcacgtttagatgcaaagaaagaacgagctagcagtgagaaggaaaggcctcatggaaatgacctcaaaaatcatatcaacgataaagtttatgggcgtgagttctaggatgacaatataaaatgtctggaagatcaaatagccaaattgaccaagttcacggaacatctttcttggaagcaaagtggggtca

SEQ ID NO: 38813 - DNA, 4172 bp, Cannabis sativa
tgaagtccctgattcggtcgcgctctccagactttatttttctgaccgagctcaaagtggatgctactcctttggtacgtactcttcactctctccatttttattttcacattattgttccggctattggtagtgcgggtggtattatcttggcttggaaaattggctttgagtttgagtgtattgcttgttcccaaaaccacatcactggcattgtgtattcggatccccaatcgcatccttggctcttgtcctgtgtttatggtcccccatattttcatgcgaaaaaatctttttgggagaactttatgaagcttggggataggtttggtggcccgtggcttattttgggtgacaccaactttgttctaagtgagtctgagcgagttaggtccaaaggcagagaccagtttattccgatcatttcaaggttggttaatgtcaggggtctttttcctatgcctatccagggagacgagttgacctgggataaccatcgctctgggtccaaccatgttaagtctgcgctggataaaggcctaattaatggtgcttggggtagactgtttccgaaggctgtcctctgctcgtttcagacctccaactcggaccaccgtccgctgtgcctgttttctgatggtctgggggagaaaatcagaagaagctttaaatttgaggaagcttggacgagggatgagcgtagcagattagtggttgattctgcgtggaagtcgggcaggttcccctgggccccggctagggttttcaagaagattggagctactcgggtcgctcttatgcattggaataggtcccaatttggaaagcttgattttctaatccgtgatttggagcgaagactagatctcattcagaacttgcccgtgggctctagagagtgggcgactgaaaggtccttgcgaatttttctaaatgaggctcgagtaaggaaagaggtgtattggaaataaagggctagggtcaattggttgaaggaaggggaaaaatgctctaaattcttcttcctctccgcctccatcaaaggtagaagaaatgccattgagagcatcctcaacaaagataatatgtgggtcaccaaaagagagctaattgggcaggaattcatggaattcttccatggcattttctctggtacggagaatggtattgattttaattgtaacgacttagttcgggattgtttgtcctcggatgaccaagctgagcttattagaaggccctcccttgaggaaattagagctactctttttgccatgagtagtaccaaagcttcgggtccagatggcatgtctgttatgttctttaaacactattgggactcagttgggagtgacttctgtgaagcagttttggatttcttccaaactgggcgtatgcataaaggagtcaatgctactaatattgtcttaattcccaaagtccaaaacccgaagagaaataatcattttcgtccgatctctctttgcaatgtggtgtacaaggttatctccaagatcattgctaatcggatcaaacctctattaccaaaacttatctgtcccacccaagctgctttggtgcccggaaggaatattcaggataataatgtgatcgctcaggaaatagtccattcgttcaataggaaaaaaggcagagaaggtttttttgctataaagattgatctaatgaaagcttatgataggttgagttgggacttcattgaccatgtgcttgcttattttggttttcctcaagaattttgaaattgggtttctcaatgcatttctactacctccctcaatatttgccttaatgggggatccgttggtaagattctcccctcgtgcggcatgcgtcaaggtgacccattgtctccctagctttttatatgggctgcggaaattttgtctcgaatcctggattctgcccaaaagttcggaaccataagtgggatcaggctgagtagggggggccctattatctcccatattttctttgtcgatgacctcatccttgtaggtaaagccaatgcggaggaggccaaggggttctgggattgtcgtgagaagttctgtgcttggtcgggtcaaaaagttaataaattgaaatcctccattttctttagtaagaatactcccatcggtactaaacaaaggataagggagatgttgggtcttcgctcgcctgagggtaatgttaagtatctggggcttcctctttttagatcaagataaaaggatgcagactttaactttattctggatagcctaactgcgaagctgcatggttggaaggctaagaccctatctaaagctgggagagcaactctaatcaagtctgtgggtttatcccttcctctatatgctatgcaaactacaaaactttccaatagacttgccgacaagattgatggtctggtgcgtgatgatttctggtggggttcggagaagggtaaccacagacttcatctgaaagcctgggacaaaatatgcctccccaaatctttagggggactgggattccgtaaatctaaagaaatgaaccaagctttcattgccaagtgggggtggaaccttctgacaggtaaccagtatttctgttgccgtattcttaaagccaaataccttaaaggaaagtcctttcttgactgcgaaccgaaagcctcggactcggggttttggaaaaatgtggctaaatctagagatattattcgcaaaggtgcttgtaagcgggtggccgatggtcaggataccaatatttggttggacccttggattgcgcatttaaagggattcactccccacccaattgggcgggctgtgaatagggagttgaaggtggctgagctccttttggataatggtggttggaatattcaaaaacttaacagtttgtttgaccactaaactatctctgccatcttgaaagggggtactcctgctggcctagggaatgaccactggttctggactttggaaagtaatggtcgtttctccggtaaatctgcctatttggcccaggcagtggctagagcgagtccaggcgaggttgccccctcaatgtggaacaagctgtggaatagtaaaattcctgagagactaaaggtgctgtggtggtgtattctatccaaggctcttcctgttcgctcggtgttagggaaaagatttcctattgaggacgaaagatgccccttgtgtggactagaggtagaatctatggagcatcttttcctttcctgtaatgtcgcctctcacttatggcgggcttctccctgggaaatttaccccatctgtgatactggtataagaatgtgggactcggtaaagttcttatgggatctcaaaaagaacggcatcaatgatcatgaggtctttctttatgcttcgctcactgttgacacgatctggcgggcccgtaatgataaggtacacaataattgccctgtggatatttttaaatgcattgacactattcggttttcttttgcagagcatcatgctttcttgctcccttgtcccatcccgcatccgtcagtttcttggtgtcctgccccgcaatattggttgaagcttaactgtgacatcagagtggggttggatagcatgtgcgctgcagtggttgcaagggatcacgttggcaaggtggtctgggtttctacttcgaagttggaattttctgattctctctgtggggaagcggcagcttgctgtttggccctagaagaggctaaaactcgtggcgttgagtttcttattttggagagtgattcgagggtggtgatcaacgctcttaatgggatggaatcccgttgggagcttgataactacgtctcattttgtaaaaacacctcccccttttttattagttgtatgtttcaacatgttagtagacaatgtgtaatttcatcataaaatgtggtgttaagtgggctttttcccatcagaggtttggctccgtgcctctttcctctttgcccgatataatactttgtaatgaccgctaggtctaactgcttctattctaatatatgtacgcttttcttcaaaaaaaaataaagagagaaagaagtgtaagataaggcaaacctttctagaatttatgcattaattgaacattttaaaatgggaaatttatgcacttgtatctactgatgttgatgcttagtactcgtg

SEQ ID NO: 38814 - DNA, 3260 bp, Cannabis sativa
  modified_base (3018)..(3023): a, c, t, g, unknown or other
actcgaagagtgcgtttgtatcagaatcctgtaaaatttatttacaaaaatattacaagttattttgtacaaaccgatctaagcggcaaaatagaatttcaaacaattttctattggacccgactctcgtggtctagcatggttggaacatgtacatattatcctcaaagtcctcgatctcatggctaactcgatactgctttactcttgcctggacaatagagcactcgtaagccaaagtccaacaaggcaaaaaataatatagtatgataattataataataattatatttcattgagtacaccactgcgtatatatactgtgctatcacactttatattacattattccatataataattctactacaataaatatttatgtagcataaatttatgtgttacgctcacacgtctttttacatttaaggcattactagagtttgtttcggtcataatcaccgagtctaaccaagttatgccttacacgcataactctttacagatattcaatcaatagattattgcacacttataacaatacgcacttaaggtaataatcctaagtcgcgaattcacaataacaatcaaatatcatattactgccccactgcgctatattctatgcgcttggttcgctgttttacttaattttcaatgtatgaggaaaaatctcgaatcacaaggaatcttgaccaagtgtcgtatttttaatcacaattttatagtttcacgcaataggctaattttaaaatcacattttataatattcatatttaagattccaatattagactaaataatagaactcaaaacgaatttttcaataatataaaaaatattcaaattagagtttagagtcaaaagttatgactaggaacatcaagaatactgtagcaagagtgtggccgtggcgacacattctattatcattttttttctttaaatgaaggccgagtagaggtttgatgaggatagagaagagatttcaggtatttgggtgtattttgatcaataaattcttgtgttaatcgcatcaacacattttattattaattttttgtttgaaagtattcatctaatttaatacgtgttattttctaatctgtactaaatacgaattttattttttaaatcaaattcaatccaatttaagtttcgaaaatacaaattaaattagttatttttttatattaaattatatatttttttttccacatgtaacaaattaaaataaataaaataatataataaattaaaaaaaattatatccataaaaaaaatatttattttattttaaattttatgtaaaaaaattatatataaaaataaaatatatattccatccattaaattataaaatataattatattatatatatatatatatcaaattttcaaattattattttttttataaggattaaatcgaatcgtttattagattgaaccgattatttgacgaacacccttaaaaaaaaaaccttccctaaaaagtcctcattcgaaaattactccaattcgatcaaagattaaaattattaacacaaaaaaaaaatcatctcatttttaactttgcttttgtttttgttcagctaaaaaacaactttgctttttcagctaaaaaacaactttgctttttccttaactttacacattaaccttaaataatttcaggacacgatttgttttgctttaataatttacttcctcacttttcggacctcctgcacatgtattaatggtattaattactatctactatgtatttaattagtacaaagattatacaaacgaactcaagaaaaaacaccacactacaactactcattaaaacaacctaagtaaacaaaacaaacaagtacgtctgtaatcgatacttaaaatacttttacagacacacctgatatgtaaaactaggtgcatattaaaattataataatttaaactaaaaaacatgaccactatctaactaaaaggaatactatttatcagttttggttgtgaacttggactcgtcgatttggattccttcctcttcagctctatctccaccagacttgtctgttgtgctcagcccacctttacggcccatttcttgatacccctcgtggcccaattgttcgctcctcgtctgccctcctcggctccgtccttctcatccaacaaaaagcccaattagcccaattccaatatacaatcatccatttttttttaattttatattatatatatgtatgttttatacatcaagatcgaacaaaaaaaaaagaatgatgacagctccccaaatttaattaaattgcttaaatgtgacatattcattataaatatacaattaaggttaaatcaactacttatacagaatatatatatacatatataccttcagcaaggtgctcctgagcctcgaggctcttaccaccagttccacctgggatgacggtttcaccctgccttgccttggcatctaattcttgtctatgctgccgtgtgctcgccattattattattattatatcaattcaattctatatgtattttttatatatatatatgtgtatgtatcttattctatagagatgagataataattgtaagctactactctcataatgtatttataaacaagtccaactatttgagttgagaccatctctgattatgaattgcggtgggaaagaccataaactgacacgtcatggcagaggtctacgtggccaacgtggacctaaggagctatgtggttatgacacctaagaagattcacataacacagttcaaaatgaagctgtgaaagacacgtgtttcattctaaccaacgacatgtcgtttccaggttgaccgactccttctttgtttctttcttatctcttcttccttgtcatatcctccatcctggcctttcttgagttttctacactagataaagtatggctatttggcacttggtgcctaacccaaaaccatgtaatttgtaatattggttaatagtttttttttttatattatttattnnnnnnaaatatataaaatttaatattaaaattcactaataatatatgttatgatacttgacccattttaaagttccttttcttcaaaggaaaatattaatttataatatatatatataaatatgaaaataaaaaaaaattgctagtcttttaaaatttgaataagtattaaaatataattaattttgtaaaaaatttactctaatagtattaaaattaatctaaatttatcacataataaaa

SEQ ID NO: 38815 - DNA, 2949 bp, Cannabis sativa
  modified_base (115)..(130): a, c, t, g, unknown or other
tggaaggagacattattccgctgccatcaatggaaggttttcttaactttgtatgtgtttatttttatcgttttagaaagttcatatttggggtgttaaacaacatacttgtgannnnnnnnnnnnnnnnggtaaaataaattccaacactacacacctcctttcattcccaaacctcacaataacttctaaaatacctatttacacaataataaggagaatccacacaaaaacatcaagtaataaacccagaattcaaaaatgtttaccgagtttttcaaaaaccgaatatttttagagcttaagaatgtaatgaaggcacgaataatgaaataataaatgagagatttttatgtggttcaggagttaaccatccttagtcaaagagtccattttattaggctcattggcctatcatggtttacacgaatatggatacaacgaacttttactcctttccactgtgttcctcttgaataagaggaagcttagtaggaatattctaaagttaataatagggtcacattcaagttttctctcgatgaagagtaagtcttcaatctaaaggtgaaggtccaaaaaaaaggatccccctctccttttatctgtgaggtatttataagccaattctcttgcatgggccgttgttggataggtcaacgcggggatggaatcccaccgttggattggtaggtggtgtgtttcccatgtagtttttaagggtgttagatcgtactggctgggcctcagacgcgtttcaccgtagggtaattcttgttcgaattttcctttctcctagtcgttggattatttagctcagtacacgaggacacgaatgcctgtaggatatcgtgtcgtgggggacaacctctgacattgtacacgaaacagcctggtccctaggtttgtagcctgacacgcgtggataaaggtctcaagagcgaaagacgtacttgggactagcgcaacactatggcctagtcgtgtagatccacatccctcgcggcagcaaatagtctccgctcctggatgggtgagactttgactcatgaaacggaggaagaccatggttcgccagagtttatctcttggtcagcagttagggaaccttccttcaaagaagctttccccgcaaggttaatgcccttatcttcccgggatactcaatgaagttcttgggcggcccagtgatttcttgaccttttttgattaaaatccacgtgtcatgcttataaacatgcagacaacagttatgaacagacgcatacgttggttatgaacttatgcataaaattgtatgcgtctattcataaccaaccaaataatttagtatttgcatctatagtatatatgtcggttttggaaaccgacgtaattagattaaatgtcatttaaaaaatgatgccatttttaatttttgtagtgttgagtaccatagcatggcatgatctagttatttctcttatttatgatttaaataatagaattgatatatttttaatttttattggaagattatttactatttactcatagtcatatgtagttctaacactgtcatatgatcattttgtttaaaattcttatataattcacaattttttgttgattgatcactatactggacgttagttaagtttgatgttacaattttcttccattttattataaaagactggataagcacatttttatttatttgtctcattgaactatatttttatatagtgaactttgtctactcatatttacttctctctagacataaatttaaaatattttaaaagattacaaaaaagagtgtgtgaaaatagaagaacaccttgtaaagggactctttcatacaataatcacggtccaataataaattcaatgatcttatgtacatatcttaattggtagaaagtagttatgcgtataaacattatgacttagactagttcctaattaagataattaaataatatatgctttaattattactttattaaatgccactaatttcatgtacttaattatcttcgctcaattttctcgtcatattggatcggttttttcttttctctttttttaatgtcgtttttatttgagaaaattacacttactatgaaattttaaaagttgtttacttaaatatgacaattttaagtttgaccaatttatataatattttttttgattttaggtatttttatagtatttgatatggcatatatatgtaaattaagttttcaagtcccaaatttaatgtttttatttgtttaagcaattttatttttcactaatgccgaaaaagttgtcggagtttgctgctggcgccaaaaaaaataacaggagtagctgctggtattggaaaagtcgtcgaagttattgccgacgtcaaaaaagtcatcagaattggaattttcgccggaaaaatcaccaagaaaatggtttcttcatcaataaacttctacagcggctatgccaccagaaaaatcaccaagaaagcagtttcttgatgaagaaactagtttcatgatgaagaaaccagttgcttggtaattttccagtgatttttccaacgacaatatcaattctgacgatttttttggcgccgacaacagctccgacgatttttccgacaccggcaactactgctgcgacttttctgaaaacgatagcatactcctaaaaagtcattgcaattggcattgttactggaaaattattaaaaaaatcaccaagaaactcgtttcttcctaaagaaaccaatttcttgatgaagaaactaatttcttggtgttttttcttagttatttttccagtgatttttccgtcgacaatgccccttctgatgactttttcggcacacgcagcaactcaagcgactctcctggcgccgacatctacgccggcaacttttctggcgccagtagcaaactccagcgatcactgtagtttcatttg

SEQ ID NO: 38816 - DNA, 2939 bp, Cannabis sativa
  modified_base (1546)..(1548): a, c, t, g, unknown or other
  modified_base (2672)..(2674): a, c, t, g, unknown or other
  modified_base (2884)..(2892): a, c, t, g, unknown or other
aatttaaatcataaaacatacaaagtttactataaataaaaaatgattttaatatatgtaattctcaattgttgtaaaaaccgcgcgaagcgcggtaccattccctagttatatataaaaaaaatattggttctcaaatcacttatttatagttgagtacaatatcaaaatcttaaagctaatgggtgtattttaagtttaaagctttataaaaaaagaggtaaatgataaataaaaggtataattatatctttttccttctcctttttaaccatattttgaattcctatacaactaggaaaagtaatacaagtttaaaaggtaacaacaattcctaatgcgattggaactaaggaaaaattagagaattaaaggaaaaagataaaatgataagcaaaaggccaaaagtcttttctcttcttcctttctctctctaattctgaatggcatcttcaaataggattaggattccaattcaattaatcctaatgccataacaaaaaataagaaaatttcaaattttcaaagaaagagataaaagataagtgaaaaaaaaaaaaaaagataagatttttcctatttttctttgttaatttttgaaattcccaaggacgaatcaaaagtgctaaaagtcctaataaaattgggaatgcttgaagaatagatacaagtgcctaagtgtcaaaattgatgcctatttggtagtttcaagcaaaacgggtttggttcacgtcatcaagtcaactccacacaagtgtaaagttgacgtggggggaaaatgttaacccggaaactttctctagtaatgtggacatcaatggttgacatgtgggatgaaggatgacatcacagacttgagtagacccgagtcatagcagtcaacttgggaggggacattagccctgcgcccaagttgactccgggatctctgggatggaagttcggactttaataacttgaatcgaacccactatattttagtattatataccatgaagacatagagcaacttgatccaagccttgggagctgaaattacacgaacttgcaatgtggaagccaacttaggcacctagggttttacccgatccctaagttgacatcctcaactagggttttagtttttaggatcgtcttagtgaaaagtggtaaaaacttgcattgggacatcaactaaacataccatggacatatttgaggcaacaaaatcaaaatcagagcaagttgatttttgagcacctggggccctgagcacccaacgcccaggttgacaatctgtcaatctgggcaccttccaagtgtttgatcagagatcctacttttgcatcaaatctttcttcatcaaaaatatggaaataaatccttccaaaggaaaaaaaaaataattcctgagcacaaataacagggcccagcgcccaagttgatacttggggctagccttgcgcctaggttgacattttgtcaacctgggccatttaaaatggtttttttctagaattatttcgagcatcttctttgtctttagaaaatattgagattcaactannnttggggaccaaacggaatttttgaggggccaaaagcaggacatagcacctaggttgacactagggctgggccctgcccctaggttgaaattttatcagcctaggctgttttcgatcaagttcaacaaaaagcattttgggaatttttttcctcatcagaaataacaaatattctaataaacttggggagacccgactccccaaaaacagagcccatcgcccaggttgacctagggctgggcctagcgcccaggttgacaatcaacctaggttgctgcctttaattgcttaaatgccaaatatgatgcaatgattgaatccagaatgggcaaaaatggggtgagagaccttgtgctcaagttcagaagccttggaagtatcaaaacaacatcctgggagctcagttgaaagggcccaacacccaagtcaataaatggtctggtgcgttcggttctgcttatccgaatcttatgtcgtttcgaccgtccatctagtttttcacaattacaatgatctaaaaagtcagagaaataaaatttacaaatctacatttctcatttcaagcacaccttgaaatgaagagtttcgagtctcctatttccgcaaaacagcaacatctccaagaactggtgaccagttttgccaaaacctttaaatggactacgtggtgtcaaactatcacttaggcatctaaaaggacatcccttggacctttctacacttacccagcatccaggttgacgtcagatgtcaacttgggcgttgggatgtcaacctaggcactagatgtaaacttgggcgttgggacctaaactgccttcagtaaaacagtcataactcactcaatttttatccaattaacgcaattcaatttgaattttgaagctatttaaatgctctatcaattcatgtctcacacgtcggatgcaattttgaagctatcgttgtcaaaattcatcccaagggagttacaaaaataagctccgggttacctgcgacaggacccactgggcaccaaaaattgaccatcaccactagaagctaattttcaccgttagattatcatcaacggtcaaaatatcttatttgtatttttttcatatttttgtgggcctccttcacctnnnaaaggagagctcccttagctcattatttacattcagaaaactactcataagatcagagcttctctctctagacattctctctctagagtttagagtttctgatacttagtccattgttgtaatcaccatctcatgagaaataataaattaaagtagacataaccctattactattgcgatgtaaggggtaaatactattttggaccatgnnnnnnnnnaaagttatcaattggaccctctgtattgttaaatgacaaaatagacc

SEQ ID NO: 38817 - DNA, 2138 bp, Cannabis sativa
tatttatttatttttatgtaaattatttggttgtagattttgagcaatggaaaggtgaaaagtgttgaacacagagttgtgacaaacaaaaacaatggaagaacaacagttggaagcttcatttatccttgtccagattgtcaaattgagcctacaaaagctctcatcaatgagaataatccaccactctataaacagtttactttcaaagattttatggctacttatgtagctcacacttccaacagagaatctcctcttaagcactatcaactccaacctaattagattttagtacatatatataatatgttgctatcattatatttgctagtttgattattctgttttgatggatttttcataattaataatattattatatatcatacttataatgcttctttttaagtttttattggactttcttctacggacttatgaatcttacatacgagtttttcatagttgctttctggaataatgactagtcttcaaaactaatataagtgtttccagcatgttttgtcctcactcgcacgtttattcggaaaatttcttaggaggtcactcattctaagattattctaggtcaaacacgtttaacttttgagttcttaagtgatgggctaccaaaaataatatgtactttgttgatataagtagtatattcgtgtagttttattgcacttactttctccacataatgtaggattacacaacttcatttttttttctacgaattacaaaactactgactgtcacaaacaatacttttttctctcttgaaattttctcattgagtatgctattgtaatcttaatgaggcgtgaaattcatagagttgattggtatttttaaatattatttaaatttaattattaactatttaatgattaaattaaaaatataacataataattatatttttttatgacatgctataacaagttactaacaactaaaatttttatttttagactcaaattaattataattaactatatacttaaaagagtttaattttttaattaaaatatttaataagactttttttaccattatatttataaagactttttattttttatttataagaaaataaatataattaagttcaggctacaaataatttattaattatttttaatttttaaattaattacaattctttttttacctttaacgaccactttacttttctttttaaaaatgacactaacttaataaaacgacatatttcatgtaaaacgaccatgttcgttgaaaacgacaataaatcgtaaacaacatatacatatttttgaagggctagttttatgccattgatacaaaaatacaatcacatatgattaaccattaattaattaattaattataacttaattagtggaaacaaccacaatttttttttcttaagactttacgctcatttggaattgaattttgatattttatataaataccattcggcattaattttcgtaattttcaaaatataatctatattatgacaactatgcaaattttgataatatccataaaacatgattttggcattttgcttaaccaaaacaacttatatatatattcatgattgattgtttataattggataaattaagataagaagaagaagaagaagaagaagtaaaattgtgttgatatcatctctaaattaattaatggagaatttgttatcaacaaaattattattaggagagttaaaagtagtaccagagagttacatattaccacctgaagatagacctggaattaccaaaatacccctttgtgatacaattcctgtcattgatctcaaactcaaaggacaaccacatcatcaacttgttcaccaaatcattcatgcttccaaagaatttggattttttcaggtaggtttcattaaatttaatttgcatattaattaattttaggaattatttcagaaatagttctacgaaattttaaatatttttacgatttttaagatttatatacgtaaaaaaaatttattattggtttttttttattgtttatatattatttttgtgttgttttcctgttaattttttattgtttcgtgttatttttataaaataccgtaaaaatataaaaaaaatatttaaacatgtatt

SEQ ID NO: 38818 - DNA, 1733 bp, Cannabis sativa
gggcataaaacccaacaggatgtttgaggggagaccaatagtctgctcgtcactgttacaacatagccttgtctaaagccaagaaagagaagatgcctaccaagagctctgatgaatagcccagcaaagggcaataaagttcagcccaaagcgatgatgcagacttagatccttactttagggatcctgcagacaactttggacatgtaaaagaactagaaaaagtggagattcaacccactttcccagcaagaagacttattaagattaggaagggtttagtggcagaaataaaattagtattgataaaatttctaatggtaaacctggacctcttcgcatggtcacatggagatatggtcgaaatagacccctcgatgatgacccatgctctcaacattgatccaaacttttgacctatacaatagaaaatgaggttgttgaacaaagagcatgcccaagcgctagagatgaagtcaaaaggctgagggcccatgactttatcaccgaagcattttatccactttgggtatccaaccctgtgttggtgcccaaaccaaacaaaaagtggagggtgtgcatagatttcaccaacctgaacaatgcatgtccaaagactgctttatgcttccaaggatcgactagttggtaaatgctacagctgcccatgagatcctaagcctaacggatgcttactcaggttacaacttaatcaagatgcacccaccatatcaagagcacacaagcttcatgacagacctaggcctatactgctacaaagtcatgcccttcaagctaaaaaatgtagcggccacctatcagaggcttgtgaacaaaatgttcaaagatctcatttcccgtaatatggaggtgtatgtggatgatatgcttgtcaagtctaaaaaggctgggggcatgtggaggatctagatgaatgcttcaagatccttcgtaattacaacatgaagctcaatccccttaaatgttctttcagagtaggctcaggcaaattccttggcttcatagtcaatgccaaaagaatataagcaaacctggataagatccaagcccttttagacatgaagtcgcccacaacagtcaaggaagtacaaagcttgacgagacgtattagtgcactaagtaaatttgtgtccaaatccatggacaaatgcgtatgcttctttaacattctcagaggaaacaaaaaattttaagtggacaagggagtgtgaaaaagcattccaagagctaaaaaacaactggctcaacctcatgtcctatcaaaacctctagacaatgaagagctagacgtgtacctggctgtcacaaaacatgttgtgagtgcagtcttaataagagaagaagacagtatacaacttccagtataccatcagcaagagactgattgacgttgaaagtcaatacccactcatggagaagctaacctaaagcttagtcctagcatcaaaagagctgaggccatacttccaagctcacctaataagggtgtacaccgaccaaccattgtgacaagttttgcaaaaacctaaagcatctggtcgagtactcaagtgggccgttgaacttggctaattttatatcacatatcaatcgagagtggaaggccaagcccttgtagacttcatggaagaatgtacaagaatacctcctaaaatctctcaagatttgggagaaaagaaagagccagagaagaagcaagagtaagagcagca

SEQ ID NO: 38819 - DNA, 1225 bp, Cannabis sativa
atatttagactgaactaattaataaacttttaccgattgccattggttaccttggctagtgtatttgctgataaaggggcaataaccatgatatcagcccaacgacggagctcaatgtggagaacactatctccaatttgtttccaactggaccattcatcttcatcagtgtacaacactaaaccattgggaagtgaagctttatcaatgaagtgtaaagatgcttttgttgccacagcttttatttctgcccattctgcaaatgtacggcacaggttagcaaacttcatggctgcaacgcttccactagcagccagtaaaattcgaggctttcttggaagaccagcattaattggctgtggctcgttttctatagccatgagttcagacgccataacctatatgaaaaatccaatatatctttattattacagaaagaagtatcaaataagagatgcataaaataatcccaatctctaatcaaatccaagaaagcaacgttctttgaattcaaaagatacatcatcagttcatagatttgaaacaattaactaccacaaccaacacaatcaaacgaagtcaaaaaaaaaatagttctggcaacaattgttctcatgaaaaatcaagaccccctcctcccagaagatatccataatgggttaaaaagaaaaagaggaattgaaaaaagaattataaatattttcccaaaactacttgctcccccaagtctttcttagtggccaaacagatcaaaatcgaaaattctttcaggtggaaaacagggggatgaattaaaaaatgtaaaattgagaattaaattaagttttgggttagctttattcactgatatttttctggaatctcagccggtgaagattccggccggctctgaactccgacgtagagacaatcaccgttttgatctcccgctgtaatgaccgtgcttttaatttttgaatcgcacaattcgaagtagaaagcaattacgataaccaaggggacttgtattgtaaaacacagcggatccaattgggcttgggcttgggcttgagtttgggcctagccttggacttggtcctgggctttggtagatgggacagtgtctcattgatatttgggctatttacaaaaatatggaaaaataaagataagttttgatatatatggcataaaaacttaattacactaaatatggtatttatttaaaaaacttacaaatatgaga

SEQ ID NO: 38820 - DNA, 1383 bp, Cannabis sativa
  modified_base (1043)..(1046): a, c, t, g, unknown or other
atgatatacagtagcattgatgctattattattttcttaataaaaaaattattgttgctaaaaaataaataataataaataataatgtgtgagatcataattatagtatttttgaagagcgctatgccattggagtgattttaaaaataagagttaaaatgatgtggaagagagataaaataaaatattatatttttggatgatgagatttttagcatccttattgaagatgctcttaggcaacttatctcccaacgattgctgaaagatcttaggtggcgtttggttggaggtagtgaaatggaatggaaaggaaagaaaacaatcttcgtgtcattcctttatttggttgcatattaaagtgttagaatgtcattccaatgaaatggcctttctactattttagtggaatgactatttcattttgaaatggaagaaaataccattgcagtgtatgaggagaaaaaatttaataatttttttatcaattttttatgcattttaaattttattccattccatttctattcgtattctcattctcattcctatgttttcattccttctaagcaaacggtaccttaatattttgagaagtctccaaactgtgccataggttggattttcatcatgtcatcatggaatcgaaatgcttatttgagatccttgctatcaagaatagaaagatatatatatatatataaatatttatgtgatccctgtacattcctattgtatccgaaatttaatatttaggctaatacctctcattaatgatattcttctgatactctttcttctttgagtttttcccattaagatattctagtgaaatatacagaaataggttaaagtgttaaaaagaagcaaattcggtgtacatgcatatgattattaacatactttattgggtaaatactattttggatcttgtgttttgtaaaagttaccaattggaccctctgttttgttaaatgacaaaatagattctgtattttctaaaattatagaaataggaccctaaactgattttttgtcaaaannnnacttaataataatttgatctagatatgttatgacaaaattgattacattttctatatctttgtgttagaaattttcttaaacttgattttattaaaaaataaaatagttaaaaattgagctccatatcctatttttactattttggaaaagatagggtctattttgtcaattaataaaacagaaagtcaaattgataacttttgcaaaacaaagagtccaaaatgatagttattcttttggttttaattaagatttatacaattttcttagaaaaaaggattatactatttaatttaggatatatatatttaacaagttatatacttattttctttt

SEQ ID NO: 38821 - DNA, 2247 bp, Cannabis sativa
cggcaaagttctataagtcacactgggatgtggtgggccatcagacggtacaatttgttcaggaattctttgctgagggcaaattcacaaaggaggtcaaccgaactttcattgtcctcattcccaagaggagtaatgcctgtaagtttgatgacttccctattagtttgtgtaatgtttgttataagataattgccaagattctggcaaatcgaatccgtggagttcttgataatttgatatctccgtaccaatctgcctttgttaaggggagatggattgctgagaactcaattatagcccatgagattgtgcatgacatggagcgaagacatggtggggagtctttcatggggattaaatgtgatatgtctaaggcctacgataggcttgagtggaattttgtgagaaaggttcttcatgctttcggctttcatgagaagttctgtgctatgattatggagtgtatcaccacggtctcgtttcaagttctgttaaatggtggattgactaagatgttcagacctgagaggggtttgaggcagggcgatcctctttccccctatttattcattatgtgctctgaagttctttcccgaatggtgtgtgaaaaggaaaggagtgggttaattacgggttataagtgctcttcgaatggcccaagcgtttcgcatcttatgtatgcggatgacactattttctttgtgagagcatcgattgaggaggcaacaactctaaaggaggtgatggatacttactgcctttggtcggggcaacagatcaatgtggggaagtctaaggtcttcttttccaagaattgtaatgtgaacactggaatatgtatctcggattggctcgggtttgacttaatgaatggggacgaaaccttcctaggcaatccgctgtttgtctctgggaacaaatccaaggattttgaatatgttgtggataaagtcaaatctcgcctagatggctggaaagcaaaactcctctcacaggcggctagaacggtcctaataaaaaatgtggcctcagctataccaatctatactatgtcagtttttcttctcccaaagaatattagcaactctctggatgcgctggttcgccggttttggtggacagggagtgtggacggaggtaagtttttagcgcttctaaattgggataagatttgcaagccgaaggtgcttggaggtttggggattcggaaattcagggatatgaatctatgtcttatagcgaaattggggtggatgattgccaaagaccattcggctttgtggattcgtgtaatcacaagcaagtattcattcgaatcctttttttggtgtgacatgccccctcggggtgcgtcaactggggtgcgtggaatttggaagactcggcaatttatccttagtcacagtgcgtggattcttggccatgactcaaatattgacctttggaaatggaattgggtgtgttctgatggagtggttatggggcccaaggactttaatcctagagtttgctctcatctctccctgggcgatctgaaaaggaataatggaaacggttgggacagagagttgatagcaagagtttttctgcctgaagcggccaattctttggtaaattgtaatgctgaagaatctttagagaatgatcgtttgatttggatgtccaactcttcgggggatttctcgctcaaatcggcttattggaatctctgttgtaaggacttatctcctatttctatgttctcttctttgtggcggtcccctcttcatgaaagactcaaacttttcctatggaaagttgcacatgactgtctattgtttggagctagattgagcagaatttttgggaatgttatcggtaagtgccacttatgtaatgaggaaggtgaagattcggcctctcattttttctctcggtgctctattaccagaagtctttggcttcaaagcaaatggaatgtcagggtggatttgattcctctctctagtggggcagaggttgtttcttggattctgaatccaaatgtggtgggtgatgttatctctccttctgattgtaaagaattctccttgtatgcatctgttctttatcactctctttggttttttagaaatgatgctttccataacaatgtccagtggacattgactgagatgaagaaacggattgagaatcaatttatggggttctggaaagtgctggtgagactggatgctggtggggaggaaagagccattgttgtgc

SEQ ID NO: 38822 - DNA, 3276 bp, Cannabis sativa
  modified_base (30)..(30): a, c, t, g, unknown or other
actaattagattgtaaagagttttatttanggcataaaacccaacagttaaagcttggctatccagaggagtgggttgacaaagttatgagttgtgcgacttcaatgacattttccttcctagttaatggtgagatacaagggaaggtggtaccataaagggggatacgacagggggatccgctctcaccctttttgtttctattttgtgcaaaagctttctctagtatgatacaactagtggaggctgaggataaccttaaaggtattcagtttggtagaagaggactctcggtgtcccacctttttttgcggatgatagcatggtgttctttgatgcaacgttggaagattgccaaaggttcagaacattgctcgaagagtattctatggtgtcgggttaagttgttaattttaataaatctgaagtgtgttttgggaaaattgtggcagcggagacaaagcttgagttggcagagtttttggaagtaaaagtggtggataatcatgggaagtaccttgggtttccctcttttgttagaagaaatgaaagcaactgtttgatgtcatcaagaatagggtttggaacaagttaagagggtgaagaacaatatgtttttaatgggtggaaaggaggtgcttataaaggcaatcgttcaggccattcccacttatactatgagctattatcgccttccaaagagcactctcaatagtatacccaagatggcaacgagattttggcggggttcattggaaaagaagaggaaaatgcattggtgtaaatggaaacacttatgtaagccgaaagaggaaggtggcatgggctttatagatcttgaattgttcaatcaagccttacttgccaaacagatttggcgatgtcttcgacaaccaatgtctttatgaagtaaggttctcaaagcaagttattttcctcataaaggaatcttggaggcaaaatgtggggcacatgcatcctttgtgtggtggaacttaatgtggggaaaggaaattattatgagtgaatctcaatggagaattggtaatggttagaatgttagaatattggaagacccttggttacctaggccaaagagttttaaggtgtatgataaacccgaactgcaaaaacatctatattttgtagacttgacacttcaaaatgggaaataggatgaggtttttatgtgagctaacttctacgatgaggatgtggaattgatattgaatttaccgcctgttaaatatgacttggaggataaacttatgtggcattacagtaagaatggagagtattctgtgcaaagtggctacagcatggcagcagatatgaggaaatatgttgctacatctgatgagaaggtgatgaagaagtggtggaaaaaactttggaagttgaagctcccgtcaaaggtcaagcattttgtgtggaaaatggaaaatttgtgcctgcctactaattttgctctttctcacaggaaggtggctgttgattgaacttgtcatcgctgctctaaaggggtaagtgaaactatttttcatgctttatgggagtgtaaggctaataagagagtttggaagcttagtggttttaaagctgaaacacaaagattggggaaagaagaagttatcacttttctcatgagaattgcaaaaggtatgactcaagatatgtatgaatttttttctggtgctatgttgacaattatggtatattaggaataatactaagcatggggcaagggtgccacaggctgccaaagtcattgactggagtgcccagtatttgacggagtttaggaggccacttaatgatgggaaaagctgggatatgcggcagaaggctcgatgggtgcaacctcaacaacctgaaatgaagttgaatattgatgcgagagtgaagcggggagggggtagatagagtattagctgtgtaatacgagatggaggagggcattgtacttttgcatatgctactgtgctgctaaaggagtactcaccactccatgtggagcttctggtcattcaagctggcttgcaaactagtttaaaaaggcgtttacgttggtttagtatcgaatctaattgccaagaggtcgtccatttaatccataacaaggaggaaggttgtagggatgttgatgggatactaaattgtattaaggaattgatgttacatgatttagttgctgtcatttcttttgtataccgagaggcaaatgaggtagcacatgtgttagccaattacgctttgattaacgaagtgagagttatgtggattaggattattgtcccttgtgcaaggcttgctattcagcgagacttgcctaatcctttgtaatgcttctatcaatgtagaatttagtttcaagaaaaaaaattatttattaaaatatgatttaaataattatttaaaaatatgaacaaacgtagataattattttttataataaaaatataaattttaattaaacgttaattgaattaattaatcatatattttttaataaatttattagttatattgtttaaaatatataaatttatttactgattttataatttaataaaactagttagatatattttttatataaataaattgaaaattagattaaattttatatatttaaaaaatataattgaattgtattaggtgtgactttttttattattattatttaaattaatacttaggtaatagaaactctaatacactttaagcaaacatgtcttgtatgttactaatacttagtttatatatatatatatatatatcttctcttataataaatgtggttattgttgactcaaaaatttagacacaaatctttgggtcacacctgcttgttagattggctagaatgaattatgagttaagtataagtagagagaaatagcagtttatagtagttcactccttgtatcgcgacagtaatgaaactacgtctactttgggttttatttctcacgagatgaattacagaaaaatgactaagattggatgctttaatttctagagagaaaaacgaaagagagatactctaaccttatagctacttttctgaacataaaagatgagctagtggagctctccttttacaggtggagtaggtcgtattaaatgggaatgaaataatcaaaatatgaaaaaaaaaaatatttatgatatgttttaccgtacatgatgatctaatgataaaaattgacttctgaggttttttctttgatgaaaaattaatttttgaggttgattgtcaatttttggagtttg

SEQ ID NO: 38823 - DNA, 1782 bp, Cannabis sativa
catgaagacatggagtaatcaaattcaagcctagggagctgaaattacatgaaccttcatcccagaagtaaccttgggctcctaaagtttcagcaagcacataagttgacatcctaactagggtttcagtttctaggactgtcttagtgaaaatgagtcaagctttgcattaggacatgaaatagacatcccacggacatatttgaggcatcaaaatcaaattaagagaaagttcatttttgagcacccggggcactcgatgcttgggcacccagtgcccaggttgacaatttgtcaacccaggccacttccaagtgtattgaaaatttgactcatgtattttctttgtcttcatcaaaaatggggaaacaagtactttcagggaagaaacaacacttcttaggttgccagaaccaaagcccaacgcccaggttgacacctagggttggccctgcgcccaggttcctattttgccaacttggaccaattacagtgatgttttttgagaactcttagggggtatattctccatttttagcaaagattaagattcaattattttcagggaccaaacgagacttccaggaggccaaaaatgggacccaacgcctaggctgacacctaacactaggccagttccaataaatttctcaaaaaagtgttttggtcatttttttgtcataaaaaataacaaagatagaagcaaacttgggtaaaaacccataaccacaaggccctagaaactgagtctagcgcctactttgacaattaacctggtacgctaattttgatcacttaaatgccaattctgctcctggcgttccctctagaatggtcaaaaacgaggtaggagatctcgtcctcaagttctaaaacattgtaagtataaaaatgacatcctggacgttccgaaataagcactcaactcctaagttgataaatggcttggtggttgggttttgcttatttgattctgattttatctcgaccgttcgtctaggttattgagagccacaaagttagaaaattcaaattcacaactttacatttctcgtttccaacatggtaatctacttggaaatgggcagtttcgagttttccatttctgcaaaacagtattatctttgagaactggtgaccagctttgctagaacacaaaaatggactaagtgatgccaaaatataacttaggcatcaaaaaatatatccccgggatgtattcccactcaccttgtgtctgggttgacgtaatatgtcaaactaggcgctaggtctagaataacttttagtaaaatggccataaatcactcaatattgatttgattgacaagattcaacttttgtttcgaagttattgtaatgatctatcaagtaatgtctaacacttcaatcgcaatttagaagttattgacttcaaatttcactctaagagagttacaaaaataagcaacaacttacctggagtgggtcccgccgtcgcgacctgtgctctaaaaattgacgatcaacctcagaggttaattttctccattatatcatcatcttcagtcaaaaatagccaatttgttttttttttcatatttttggattgttttgttcctattttcaaggacctccttcacatataaaaggagagctcttctagctcatttttcatattcaaacaagtatccataaaggtcagagcatctctctctagaaattagagcataaacacttagccatttttctgtaatttcatctcgtgagaataaaaaatcgaagtagatgtagctccattac

SEQ ID NO: 38824 - DNA, 2208 bp, Cannabis sativa
tgtttgcttctaccatgaagaacatgatttttataaagttagttgagctattgtcacaataaatggctccctcttgcttgaaatgtaactcttcaagaatcttcctcagccaaacaacttaacaggcactagctgttgctgctacaaactctgctttagttgttgataaagtgacaattgcttgcttcttttaagaccatgaaactgctcctgaacccatcataaaaacatagcgagatgtgcttcttctatcatacaaatctcccacataatcactgtcagtaaaaccaactaaatctgctttttctcccttctgatagaagaacccgaaatcagttgtaccacgcaagtactgaaaaattctctttgcagcaagaagatgtatctcccttggacattccatatacttactaataagactcacaccgtgcattatatctggccttgttgctattaagtacatcagacttctaactatttgctaatatagagtgctgccaaccttctttccttctgaatctttgataagcttcgaactaacctctattggagtgcccataggattgcaattcttcatttggaacctgtctaaaatttcttggacatatttcttttgagaaataaaaataccatcattagtttgcactacttctatgccaagaaaatagtgcattagtccaagatcagtcatttcaaattcaagcatcatagattgcttaaatttttcaatcatggcactatcattttcagtataaatcaggtcatccacataaaagcaaacaatgagcgttttacctccatctccaaattcaataaaaagtgtgtgctcatatgtacatttatgaacatttttctttaaaaaataagttcaatacgactatactaagcccatggagcttgttttagtccataaagagccttttttaatttatacactttatgctcatttcaaatcttaacatagccagaaagtttatcaataaatacctgttcctccaagtctccatgtaagaatgcatattttacatccaattggaagataggccatgagttctgagcagccaaagcgaccaccaatctgattgtatcatgtctcgccattggagaaaagccttctttatagtcaacgccaaactcttgcttatagcctttagccaccagtcacgctttgtacttgtcaatttcaccattttccttcaactttgtcttgtagacctacttaacaccaatagtcttttgcccttttggaagctccattaactcccaagtattatttctttctaatggctacaatttcagcatccatcgcctttcttcactttgattctttagcagttttttcataagctactagatcacaatatgaaaataaacaaaaatgcgtgagtggatcctcttgagaatcatcaaaatcaaatacctcataatccatcatccatgcaggctttttcctctctcgatgaggcctttgttcagtgggtgcttcattagcatgtgaactttgagtgattgttgttgttggttgtgggactatttctacaggctgctgctgctgtcttttctcttcatcaccatcaaaatctgctggaatttgttgctgaacaatgttctcgttccatgcccatattctttcttcatcaaagattacatcacgactaataatgattttcttggtgttaggattgtacaacttataggcttttgattgatcacaaacaccaagaaatttttttttttctttgtcatctaacttcttccccttctcatctggaatgtgggcataagcaacagatccaaaaattctgaaatgatctaccgctagtcttcgtccactccaggcttcttctagtgtcatattttgaacagcaaaagtgggacttttgttcaaaatatgaatactccaattcaatgcttctggccaaaaatcttttggaagtccactcctcaatagaaggcttcgcaccatattaataattgcgcaatttttcctctcgcatactccattttttgggtcgtgtatgttgctgtgagctgcctcttgattccatgagtctcacaaaaatttgaaaattcatgtgagttgttctccaccacggtcagtgcgaagaactttgatggggctgccaacttgctttaaaagttttagattttttttgcaaaaaataaacccatgtctttcgactaaaaatcatcgatgaaggtaattat

SEQ ID NO: 38825 - DNA, 3732 bp, Cannabis sativa
  modified_base (2343)..(2343): a, c, t, g, unknown or other
aaaaaaaaaaaaaaagagagatgttaatgggttgaaccatgagatggcatattaattgcacaatttactattggctcttatatattttaattaaataataatataaaaaatcgttaactaattataaaatgtcatataactatagtaaaggacagttaaaaaatataacaagtagaaattacacaaattacgagaaatttttaaaaatttacttttttatggtatatatttttaattcacttggtttatggacttttaataatctttacacttttgtagatacactaatcatgtaatatttttgtaaaaaacttctaaaatactatatcttataattttccttttttttttctttaaaaaattattttttaaaagcctatgttcttttcatcttcttcctcgattggtatctgcaaccctcaccaatgtagtgggttagactagaaccctaaacccccataaccctaatttccaatgctttagaacagagagacctccatctgatattttcaacggaatcagcatccaaaacctatgcattttcttcttgagataaggtaatctcaatctcctgcttcccatttctcaactaggatttgtgtttcgtttgtttttgctgttcttgagataagttaatctcaatctcagtttctgtaagaaatgggatctcatttctttgtttttgttttcgattttttatttttgttctaactaaagtggcttcaattctatttgagattaatttgtatggacaaaactcggttctaatcaaatgaaagatttgagttctaatttagtttggaaatgggttttgggttttattgttttttttttttcgtttcaatctttttaacattttaatattcgtaatttcagtaaaaaggcaagctatgccgaaatctggagaccgattgtcaaggcctgttgacattgttggaatatttactcaacggagatcgaacagttttggcattctgattgatgagcccgtggtggctcgaaccttgattggatctccgcccatgctaccaacgacaatcgcgacaccaataacttctatacaaaaatagtttttcggatgtttttaattaaacaactgcttaaagtattcccgtcagtttctgtaactgttgccatacgacagtcgcaaaacgggcataataggcgacggttcaaaacagtcgctaatgtgaaattcttgatggtttaaaatcgtcgcctataacagggtattaaaacacgcttacatattaggatgttggatatagaacttacgtggaaatgatgaatttcaaatcatccggtacgtcgccattgcttgaatccaagtataccaccgtttgcgtacttggttggatgagtataagcatcccatgaaacattttcctgcacgaacaaatatgtgtaaaactgttaagaaataataataaatattatgaatacttataaatactgaaattatattcattttaaatctacatataccgattgttgtaggggctttaacccatttatctggttcggtcatcctagccatacgagtgactagtgcttgacaacggttactgtcaacccctgcttctatggcaatcgaaccccaatttaaaaattcatatactctgttcagcccattgatgtccaatgatctttctttcatgtgattgataaaaaatcataagtaataaccgtccctgtcgaaagaataatatcaagtttattattaagaattaaaaatcatacttgcactaaactcttatcggctgggctccgattcgattcaagtccattatcataacatcgttgttttgtgtttttctagatttatcacgggcttgggtgcaaaattgagtactatttatatagtacgattggtacttgagtacatcacatgaaggacctcgtggtatagaaagtagtgtgttggatacattactcggagattcacatattttcacatatacctatcaacatacaagttgattagtgagcaaaggtaaatcaatatataatgcgtaacaaaacagtaacattactagtaccttattttttaaccacgtactgaaattttgataatgttcatctgttgggaatttattttaccaggatctaaatttactaacatgtatgttgaattaataccctaaatatgaattctctaaaatattgaaataaacacataagcgtttagaaaaccttacattgatggcagcgaaataatatatctcctttcgctcagatttctaacccttgttctattctgtcgcaaaataataacaagatttgagcctggatctccttctctcttttaggtttggttaaccaccgtcttccacactatgattnagtacttgacttgctatgtgtaggtatgatactctatcactatgactcaaattgatgaagaacaatgaataatgtgcgaaatcactatagaaaggagtctctcatctactagttgtcagagaatgaaaactaggtttggttggttaagagtgttggatgagaatgagagcatcgtgttccttttatagtatttcaacaagggtttacgatttaaatatatggattaaaaaataataaaataatgagcaaaatacacaaagtggcaagccacactaataggcctcactaattacaattttgccactttatttcaaccacttatccttctttcaataatgtcatattttctgatttcattcctataaatgtcaaaagtatttatttaataattataattaattatcaaataaaattaccattataaatttctctaatttattttttaaaatacatcactaaaatattattatttttatattacctcaaactttaatatcacaccatatatgagttttttttaaaaaaattatcatgaaaaccatatatttttttatttcaaatataccttttatatataaaaaatataattatgcagtaaaatttttagttaaacgatattttaatatttttactgttaattttaatggagacttaagagagcttttagttatttttacaaaataatagattttggataaaagtttaaaattttattgttacacgaaattttttaacaaaaatactgtgcttttataaaacaatcgtaaaacaaaaaaacaaaatagtggagcaactaaaaaataactgtaaaaatacagtaaaaaaaatataaaatttacacagtattttttaaaaaaatctgccccacagttaaaaaaaataaaaaagttagaaactgtgtaaaattcctattaatttatactagggaactaagccgcgctttgcgcggtgttgcccaacttttgtaaattatataaatgtatgtatattatattgtacttattgagtgatataatctaaaatataacatttagatgtgtgtatatattaacaaatcatgtgtttgctattttctttttatttcaaaataaaaaatgaaataattttttattattttttatgtataataatattatatatattcaactaaaattaataatttaaaataaaaaaaaatctaatttttttttatttgttaaagaacttaaaggatttttttttttattttcaatatttgaggaattttgaaaaatgtattgctttcatttaaaaaaaatataagagtcactaagaaattatctttaattattttaaatatatttaaatgaaaattacattaaaaaaactcttaagaaaatactttttatatgaaatacttgacaaagatta

SEQ ID NO: 38826 - DNA, 1968 bp, Cannabis sativa
caagtactaaatacacagaaaataaaattaaagtaaataaaccctttacacagaaaaactttcccgttgttgaaaagctcttcgcattgcaatccaccctcgatcgttggaagaggaaggagggcgtataatctcagagaccacccggggtgactcctgaggaaaggaagaagtagatatgcaaaaaaccgaaggcgaatcattagttaagacatggacttcttcaagattctcagattgggcattagcttcaagctctggataataagctgctgttgtatgagtcgaactcccctctgacacctcggggccttccttgacttcctcaataggtgccaaaacgggaggaaaaatgccaaaaggacacaatgccaagggtggcgcaggctcaacacgagaagaggcataagtccctaagcctaatgcagcctactcaaaacagggacatctacaaacctccgagaagtgtaatgggggaacatggataggttcgaaatcgcgaaagcttgaaaaaggattcagagaaagaaaagcagggtccaaaggctgcaagcctgagaaaatgttggaaaaagaagagtggtcttttgcgtgatgtaccttgtcttttggcaagaaggccatagttcaaaaggaagaactaagtaccctaggaagaaaatgcttacacaaaagaaagtctctgcagaatttttgagagaaacggcaaagttacaacgtatttatatgcaaagaagcctggatgcaataagtatggatgccacgagaacgaaaacgaaaagccactgcggcattaaaaccaggatacgtgtcaatgaaatacacatacccgaatcacgaaaagcagctagagaagcatatatgtctttccactttccaaggtacctcatccttcatttttttatatatataaaaagtgcacttaatggagccacaatttctccaatcttttatcatatggattaggagataactaatacataaaaaaaaaagagtgtaataaaattgaataagggagcagtaaataaatactcgtttaaagatcgaagcccaaatgttccattggagattacaagacaaagattcacaaaatctagatgatgaataatataataacacatacacacgtatacacaaaaagagctacaagaaaaaggccttcgtgaaaaacttgaggataaaaagttctcaccatttgggtggtaccagcaaagaatacataaggagccagggatcataatggatccccacactaccctcttcgagcaccgacggcaacctgtaggaaattcagggggtagaaaggaaccccctccctcaaacattcttccatccacctttcattagccaagcgctcacgctccaagtctgcatcccaggcccaacggttcctggcttgcatacggcgatagtcacgacgacgttcagcgcgcaaccgaagagcgtggagctcagcaggatgaagacgcatcatcacgtctagcacgataggcccgcatcattctaccgacaatagcctcaccactaggttgatatcaataagaaaaggtcgcagggctaggaggagatcgatcccaatatctgagtgaaactgatctccacttgaagactgtggaaggggagaacctggagagtttgacatgttttagactaaagaaaaaaaaagtgggggaagacacatacaaaaggaaaacgtagaaagttaaagaggatgatacaatcaacaaggaaggatgcgtgtataaataagcttaaaaggagagggaaggtggaagggtaagcccaccagtaaccaaaacattaaatgccagtaaataaacacccctaagtgtcgagacgcctcgaaaaaagaccatacatgtataaataacaataattagggaaaaatagattaaaaatatcaatcaaatattaatccttacaaaccatagaataaatgttgttcgtaaatattgttccttaaaaaaa

SEQ ID NO: 38827 - DNA, 2849 bp, Cannabis sativa
  modified_base (2797)..(2805): a, c, t, g, unknown or other
aaacattgaagttggccatgtcaaatgtcactaggtaagaaacgtattcatgcactttggtttatctctagtggaggatcatctttagataagatcctatccaaaatttcctttcgcttggttcacaaaaacgtttattggttttataacttaaaaactattttcaattttttaaaattaaaaactaataggggttgtttggtaaaaaaaatttagaacagttttttaaaaactgagttttaacaaattagaaaacataaaacatcaaaatgttattgtctatttttaaaaacgtttttttttgtctaacatattatatttatatttctgctcacatatccagaccccgatctaaactcatctcttaatcttgaacccgcaactttaattcccccttttgtacatcaattagagcttttctcgtagccaagaatggtcttctccaaatgatgggaatattttcatcttcctccatgtcaagtattaagaaatcaacaagaaagataaacttaccaactttcaccaaaatatcttcaattataccccaaggatgagttaaagaatgacctgccagttgcaatgttactactgtaggcttagcttctcccaatcttagtcttttaaaaacaaacaagggcattaagataatgcttgctcacatatcacttagagcctttgtttccatcgaacacctatcgagcatggaatattaaaactacccggatctttaagcttgggtggtagtttcttttgcaagattgcactgcactcttcagtaaatgccaccatctcatattctttcaacttctttttcttggatataatgtcctttatgaactttaggtaagttggcgtttgttccaaggcctccgcgaacagaatgttaatgtgcaacttcttaaatattttaagaaattttgaaaactacttgtccaacttattcatgcagagtctttaaggataggaaatttttatatgatgctcaatgcttataagtggtgtagcttcttttgcttgcagacctttattagtcttcttttcttcgtgtgctagtgctggtgcctattgatcctcgtcttcatccacttattgcttagcccttgtcccctcatattcttttccacttctcaaggaaattgcttgacactgctcttttggattaatctttgtaggactgggcaagttaccttgattttggttggtcatttaagcagttaactgtcccacttgattctccaaggttttaatggaagctctagtctctaacatgaattggagtaataaattagttgtaatattcacacctccagtagaacttggttgctgaataggctgttgtggaggcctatttctctgttgaaagaatcgatccttactgaagttgaggttggccagatggttacacttgaatataccgaacgactccattgatagaaggatagtcaccaactcttggaaatccaatggcttaagcttgctccattggtagattattcacatccaccgggcaagtgtcatatgtgtgaggtcccccacatagctcacaagtaacttgagcctgctttacctgagcagtcatcaacttagtcaagggtagtcgctccaggcctctgtcgtcaacaacctcgtcttactctcctgcgtctgactccggccggtcttggtccacggaggcggacccgagatcaatctccggctcaaatagcttaacatcgagggtaactaccacgatggcctccgagtaaccgacgataagacaatggagattgtttctatggtcttggccggaaaagtgaataaaggcctagtgtctctgatcaaccaagctggggtcaaagcacggcactgacggacgggtcgtcacggctaggccagctgccaatgctgtcaaattggggtttgtgggagaggttgtccaggttgatctgaccatactctagtccatagtcaacgacgaccacattccggtgattacttcagtggcttctgatgaattcgggcagcagtacaatatcaatgctgacacgcttgctggagaattggcgaccgcattgggtggtgagaagctgattttgttgaccgatgtggttggaattctagaagacagggacaaccccagtagcttagtgaaggaggttgatataagaagggtgaagcagatgatggaagaggggaaaatcgggggtggaatgattcctaaggtgaattgttgtgtgtgttctttggcgcaaggagtgaggacggcgagtatcatcgatggaagattgccacactcgttattgctcgagattttgactaatgaaggaggtgggacaatgatcaccgggtaatgtttcatgattcaaaagaaaaatacaaggaataagagtttaatttagtagcggtgacctatttgttttttgtttattttatgctaatattatgagttattagtgatgtttctgaatttttaaagtattaatttttaaaatatttttattttatttgggacaagtttgtacattaaaaattattaacctaatctactattatgcttattaagcaatggagaatatgtgggatgatggcacgaattacccattccgtttccactttgattaggctaactaaaaattatgcaaactcttgaaatttgcccaagagatatgatatgtgttgtttgatttagttttttggtattacatttttgagttggattggtcttgtgatccatagagcccttagaatttggcattcctatgaaaattatgccagtaagtattaagaagtagaggtgattgttaattccatttttggnnnnnnnnnttgacaaaaatattttattattctttgtatatttcggctggcat

SEQ ID NO: 38828 - DNA, 4687 bp, Cannabis sativa
gttctcgatgtaattgtcccaaggttagggacaacctttctcgatagttttttgataaattcttgattatttgtcaaaatagtgaatgattttgcgtttacaaccattcttgacatgttatttacgtgttctcgattgtttgtcgatagttttattgatggtgtgtatcttgtccatgttatcgatgatttctcacctggttatcgattgtttcttgatgatttactatttattattttcaacagttattttttttttaacaggttcttgattggttcttgactgtttgttgacactattttctattattgtaatttttgttatttgttattctaattcaattgttttttatttgtattgaattgcaagatcgcctgcatttctggttgtattgtatgatggtgtttggagtattgagagatttaattgggcgtataaaagcgaagaaaatatgatattgatggttgaaaccgacacaactttacaaaaaatacacaacattttatataaagaattggaggttgtcccattggagtatgatttgaaattagtgataaataagtagtactacaatctcgaaattgcagcaactatggcggtttaggccacaacaaagctacatgaaaaactcatgtttgaggcatagtttactgttacttgggatcccttaaattgtttctgttatatttaatgctaaataaaatttctatttagcttaaatgtattttttaatagtttctcaatgggaaattgatgtgttctcgatgggtttttgataatctatgtgaaggttccagatgctgtcattgtaatttttaaaatttaacgatagtatatcgatatgttctcgatgctttgtcgatggtttgtgcaatcttttataaaatttagtaaatgtattctatgatgatttcttgatttcgataatatttcatatggaggctctggatattgttattacaatttttaaagtttaacttgataacttgttctactactttttagcatggcttttgaaaacaacaagttgggcatcatattaaggatgtgtctcatgacacccatctcaatcactatcttagtttcataagtgattgtctttacatacgtttcttcatctgggagaggaaataaccctctcataacaatcagttgctattcaagaaagaaaacataacaaatgttagaattctatcgaaaacatatcgacaaccaatcgaaaacctatcgagaaatagatagaagacaatagagggaagaaaacacaacttatcaatgatatcaaaaaaaagttaaacaatacaataataacaaaagtaaaatgaatacctgacaacaaaaaatgcaatactaaatcttatcaaaaacctgtcgagggccaattgatagtcaatagacaatcacaaaaaataacaactaaaaaactaattcttaattacatcgagaacctgtcgacaatatgtcgataattaagcaataataaccaatacaacaacagcaaaataaaattctcgcttttatcgagaaccttttaacaacccatcaataatcaattgataataactaaatttcctatttttttttttttttttgtaaaacttgaactatcaaaaacttatcaaatgcttatcgaaataatcagtcgataactatcgaaattaataatcactcgataatctatcaatagtcaaccaagaataactaacataacaacaataaaaagaattctcactcatatccataacctatcgagaatctatcgaaaaattatcgataaaggtcttccctaatcttgggatatttgcatcgagaacccgtcaagaacgtattgaaaaagtgtcgagaaaaatacgaacacaaagaatacactagaaaactagatctcacgatttcaacaaaaaatatatcaaaactaaaaaaatacaaataacaaccacataaaaactaacaccatatttcatttttctagaaccaacacgaccggttctgttttttctcaaccaacacagcaccagatcaaaaaataccataaccaccatttaacttatcgagaatcttttgatgaaataattgagaacatacattcttttcattttcctttcggttagaaagttcaaaacaccaaaacccccatataaaacctatcaaaaattaagaaaaattcatcaaaactaagtgtatttcaacacaaacaatatatattcgctctaaatcaaccacaaaaaaataactaacaacaatcttctttttttagaataatacctttctctttagagaatgaggcagatccaatgagacgggaggcgaatcagacaagagacaggctctgacagggaaggaacgggcttagatgggtcttttgcgtcggtggatgagtccttcatacaaggagaaagatcggcgaaggacggagaaggatctccgtacaaatgggtcctttgttcttcgtgcgagtaggcattgtggggtcggactgtggtcgttctttgcgcgggtgggtggatttggggcagagttggctaaaaggtatgggcaattgatggggctgtagagagagattatattttttttaggttattttaggttttagaatgtatcaaatatctaatatttagatattattatttaaacatgtattaaaaatggtaaaataatcaaatttaaatttgaatataattctattatatcacagcttaattaaattcaaatttaaaccactttcatatatatctaaaattaacaacaaacaataaataattaaaaaattattttttattaattgaggtatgatatttaggattgaaattgaaaatattaatattttatagttttttaaaattttcacccaatttttttaattaaaaaacaaaattttaaccaaaaataaaaaaatggcattggttactagttggtaacaaaaacaatagttaccaataactatatggaccatcaactccatttgcaccatgagagagacaccgatcgagcacgagtgcgcgggacccaaagactagccaaggggcttgacaacatgcactaatgggtgcttttagtcattttttcaaccaataactgtctctaaagcattttaaagactaaaacaagcctaagaaaaatatttttcaaaaaaacatacataaaattcatataatatcatcaaattacatgcaatacatgaacacatcaaaaaacatataaatcattttaaacatttgtaatgcctagttgcttaggcacgctgcacgctacactagtttttaattacattacatgcttctgttaatcaaaaagttttttgaaaatgtgataaattaaaacttttgaaattaaactttgataaatatataactttacataatttcagcgatcctgtttaaagtttacaattgtatctaaaatacttttttctcaaaagtatcgcacatcgattacaaaatagaagctcatgttgtcttgaaactaaacattctaaggttaaccatcccgatatatagatacacattaccgacttgcgcatctatgcgccaatacacctctctacaaggcttaatagataaattaagaacgttcttgcctttggtatgattgatcttatatcagtcagtaccagtactataatcgtgctatggacccgacacgatagttgtaccgctagcatcagtctatacctaaaagtatcatccataatatcactcttaactaatactatactcgtactgtcgactaggtactatagtttgtatcgttatatgatagtgtcaactaatactttatggaattaaatatcaatcaaaactagcactatactcgcattgctggcctgatactatagtttacactgctatgatactaatttattcattctgaccactaccaggacgatagtcgcgctgcggacccaatactatagtgtgcgctgctatgatactaatttatctattctagcaacataaaaatatatatatatcacacgcacacatatacatatatatacattttatactattcttaccttattttcaaattcaaatgtgtcgatcaacctgaaaagaaattttgcttattgaacagagaccctgtccatttacgtgaaacagataaataactcgctaaaaccttcccggggacttaaactcaaaaccagaagttttcttatcgataaatagcatgaaattaccctaaatatcgagaaaaaaataaaaagtaagacttcgaaaaactacttgaaaaatggcaggttgtttctgtaaaaacgacagattgtttttctgggtcactgccagaaaaaaggataaaaaacgatctattgtttttttgctgcagaaacacaccaactctcatttctacctcaaatcaactccaaactttttacaaccctccagaacacctaattaagaaccaacccaagcagtagcaacatatgtaacgaaaaattatgaaaaccaatattattgagctaagtttgagttcttgaactcaattttgctcaacactacaatcagtcatcaaattaaaacaagctttaaataactttattttatcctagaaatcaacccaaaataaacctaggttcggaaaaaaattattcttataatttgcatgttcaaaccaatgaaaaactactaaaaattcaaaaagaagagttctagggcttgttgggttttgtgccctaaataaaacccattac

SEQ ID NO: 38829 - DNA, 2670 bp, Cannabis sativa
agtgaggcgactttttgtttaagtctcggttacaatttcatttaaagaattgctaaaaaggtattatcggtgcttagcacctgccttagtggaattaagtattgggttctatataacttaagaaaataactatctttagtcaaagtacggcaagtgtttgtttaagtttcagttacaatttttattgagatctcatttgactattgcttttgactttaatcttctttggaagctctagtgaaaaagttactaaaattggtttatgttaaaagaaattttagagctgaaaatttaaactaactaattacccaattagcagcacaagtgtttttggagttttgataaactaggaaacaacttttaaaagcccaaccaactaaattaagaattgctatagagtataagagcatctctaatagtagtatcatttaaaaatataatattttattttatttctcttcaatatcattttcttacttctaaaaatacgtataacactatttaaaaatactataattatgatcctactcgttattatttaatatatattctaatgtttagctacgttaactttttaacttcaatttttcatttaaaaaaaaatgaatagcatcaatgctactacaacattgcaaacaaaattctagttggtgctagtatgttattttgaaaatatttcatgaagctcataaatcaccataaccagaagacataaaagaaaagaggtttgataaaatcacctggggtttcataatcaagcacattagacatgactctaactgagttctcatcttgtttagggccccaatcgctccacgcgttctcaccaaaatgaagatctgcaaacaaagcaatcttaaacgctgcactccgccgccctaactcttcccatttctcctctttcatccggagactcaccgtccatcctgaccgttcataatggtgactctcgatcttgttagttccgtcatctatttcaacggcggagattaactgaatgttaagacagagacacgtgtaatgtaataaaattattactattggtgaaagatttctcaacttcttcatcgaagtagaacaagaagaaatgagggctctgttgttgttggtgttgttcacttgaatttgtgtaattgcagattggtccaaatttttggacttgagtgaaatattgaaaatatcgatgacttctttattaatatttgaataataaatagtacatatataatatattccttcttgacaattgagtttttaacatttgaacccctgcattatacttggtttagcaaattggtccatagatttggaaatgtgacaattaagcccctacacgaggtttttcttctacttgacctaatttataagctttacacacaaattataaattacaaataataagcccatagtgtaacacattatgataaataatacactatgtagttgtacatctcattagattgatctaagtagaagagacattaaagagaagaagttgactatggacatgaccatcttccattctaatccaagattttatagagaaaggatgttgagtgatttgtagtattcttgaccctttttcccactcacctccatacccaccataaccactatgcctaccaaaacaaagccatagtttgctatagggacaacaccaatccaaaccatggttgtgtcctgaaaatattgcctgtcatcatgtataaacaacaacattaatatggaatctagaaaaaattactaaaaatataccaagacattttagagcttatttttctgtaaagagtaatttgaggcataaatacttatatttctgaaacttatgtaacaattcttgattggtccacgtcattaaatttatattttttgaaaaaaatagtttaatgacaaaaatataaaataaaaaatcatataataattgagaaagtttaatgtgaccttgacagatgacctttgaagaagaagtttcatgataccagtttcaacttgttgacgagccactttctcttcattaattgaacccacacaaggtttttgtatcacacccattggagctactttctcatatgcttcacttggtatatgccaaaacacaatctctagtactctgtcataaataaaaataaaaaaaaaatcttgatttctttctattacaaaagtccattgttacatatcacgagccccatctcgagactcgtaatagtaacacaaaattagttagaattattgtaaaattgtcaaacaacaactttgtaacaatctcaactaattttgtactgccaagtaactcgagaaaaggtcggtcttgagatttattggatcttttatagcaacgaagttattggacaacttttgaaagaaaatgtagttttttttttttttgttgataattactaaaaaaatgtgcggttttaaatttttttttttttttttgggtccctaggttagttgggtgggccttagggtagcctatcttaactcagacgactcttgagaaactaaacatttttaattggtcatgatattgtagacgatctacacatcttaaaccacaaattttatcctaagccatatggtagtacacgattggtcaaattgtcgaacaacaactttgtagcaatcacattctaccacgtggctcaagattaaaattggagcagaatacaa

SEQ ID NO: 38830 - DNA, 1463 bp, Cannabis sativa
ccctactatttttattaattaacctaaccatctgtcaatttcaactacaaacaatcagataacacacaagttttaattcttatatcagcgcagcacacaaattttacagatcctacttcactaaaacaggcaagttatcaaccttccattatcaccgcaacacaatctcagaacttactttactatggatgaatatataagatattcaaactcttttacaaatcatatgtaatataatatagcaattatagaaaaatatacctctggtgaatcaagattgaaatttccacttaactcagattcttttcaaacactcgcaaagcgccaaagcctataaaaaaaaattggtagaaaaaagagacggatgaataccattgaaaactgaaaagtaacataaaagctcgtgaaaggaaaaataaaggctttaatatctaaaaaggtgatttcccaattccatataaagtagataaaaaatcatctggagttgcattatataatctgtattaaaagcttgattgtctttagttctttacctcattaatatcagcataaacgcctgtttataagcaaaattgaacttatacatataatatgcatacttatcactatgctaaactctacaatctataagcagcaaagagcttgatcacttgccttaacctcatgtgtactaaatagtaaatattctcaacaaagactcgaattttcattttcatcacaaacaattcacattactctgcccattcccattgttttacaaattcgcactatgaactatgaagcaattattctctaatgtggtcagcatcactaaacatatcagtaattttatcccaattctgcttactctaatgtacaaaataaaatagaattgcaaaacaaaattgttttaaaccaacatttcaattttccatgtagcacataagcatcatcaatatcatatatatttatatatatacatatatatgctaattttggtgagaaggatttaacagataccaaatgcgtaaacatcgatgttctttaacctcaaacgctctttctccttaacccaataccgagaagtttccgagaatcagctaggatggaagggaacaataccccaatccaagaatcaacggctggatccgaagagttggctagagagagtgaacctcaaagtgatagcgaacgcttagcgaaggaaaactttagagcttcttggagaaaagggtgttttgggtttggggtagcggcaatgtctttggtggaagctgaggcagctgcagtggcagcaatggtggtcacggcggccgtggcagcggcagtgaaggcacaaaagggtcgtgagttagcggaggaaggcttgagcttgaggactgagaaaacgaaaagggtgttttttttttttttaattttatttgggaatagtattttttttttgtagggatttaggtttttttttgagatttttacacctcatg

SEQ ID NO: 38831 - DNA, 2153 bp, Cannabis sativa
tgttgatctgccttcattagcaggacagaaatagcccgcgtgtcaatggaagggagtatgttagtaaagcccaagatgcagttgctaatatgcttgcaaagggttccgctatcagacaagatgccgtgaacaaggctaaagcatttgatgaaaagcatcagttgcgagccagtgcatctgccaaggttatttcatttgacagaaaagtagggcttacggaaaaattgacagtcgggatttctgttgttaacgagaaagtaaaatccgttgatcaaaggcttcaagtatcagataaaacaatggctgcaatatttgctgcagaaaggaagattaataacacaggatcagctgtaaaaactagcaggtatgaaatcatttcccaagaagcataacattataattatatttcttttaatggcataagagcatcgcttggataagaaattaatgcttattttcatttcaatgataacaaatattgatccttaaatcaactatgtagtttcacactcatacaagtcacattataaccaatataaatcgatggactcatttgctgatatttaggtacgtaactgctggagcggcatggttaaacggcgcattcagtaaggtagctaaggcaggtcaggtggcaggtacaaaaacaagagaaaagttccatatggctgtgacaaacttgacgacgaaggtgtgtgtttctaatgtcaaatatcattttacttttttcgtcatttcaatccaatgcagtgaatgcacatctcttgcctataagtctattattcccctcttttgcggttgttgctctttgaatatcttcttatttcataggtcttaccaagcagttagaacaagataggagccagtgtttatctagtcttgagatattagctcagccaaacttgtaaccctgcctcaaaactgaaaaaatataacccaaatagatagtacatttgagtgggcaaggtaatcccagtctcaactccttatgcgaaggaagttttcagccagtcgcgtcccttttcctcaaatagatagtacattcaagtggggctttgtttgctttccatggcctaaaaataaactgaactaagagtgttatctatcattgttgatgtttttcggttttggctgtgttttaaaaaaaatatttactctggagtaaaacataaacatcattagctgctatctttagcagtaatcgaaattcaaaatagataagaaaaaactcaacttctatgatttgttctcattctcattaagtctgatgttcaagtctttcctgactatttgcaggatccgattgcagcgtaagcgaaaaataaccctgatgggctctgttctcatgaacacaatcatcaaatcaaccatgttggtctgatcaatgatcaacaacaagtcacaatcgtcatattatgtggggttgcaggtttggagtagtttatgtcaaatttgttgtttctttctctctctctctctatatatttatatatgcaaatatatcctttaggggtctggtctggtgtgatgtaattctttttttttttttttctgttcattttttatattaattttcctcgggtaatttgtgcctgttggtctccattaattttgcagcttcaagattagttgagtggaaaacaatgaaaaaaaaatatatatattattgatcgagtggaaaagaaattgaagttgttgacatacattttttacttaaaagaaattctctcatgttgtttttacatttaataaaatatacatatgttgtaactttagatatattaattataattttaggtatatcaattgtgttaaaagttccatttcagaaaataaataaatgtttggatttagtgtcatttggataaaaacaatgtttatttattttatgttaatgtaacatgcaagtagtccttgcattgttttgctcaattaaaaggaatgtgggaaaatacattcatttgaagataaagttattctttgagcgcacgtggtgtaattaaatttgtgtgtaattggatgtaattatatgatttgatatattggtttaatcgtgtaattatactataaggtgtttgattgaatagaatgaaattgaaaagaaacaatttttattctgtttatttgtttagttttattttaaagtattagaa

SEQ ID NO: 38832 - DNA, 1906 bp, Cannabis sativa
  modified_base (1806)..(1813): a, c, t, g, unknown or other
tataatattattttatatatatacattctaagtgcacccggatctaattggcttgatttgattagatgagtcaatgtataattgatttagtcttattttttaataattcttttttcatatgtaaatcttataatcaatatattttaccaatgataacatatttttggattgtaagaaaattttagcaaagttaattttttgtaagggtaattttaattttttttttttaaatttacagtttgagtttttaaagtggttgcagcgctagttgtaataaagatttttatataattttttgttgtaatttaagttacaacgctagttgcaatagagatctttatgtaaaattttgtaaaaataaaaataaaaaaaaaactattttaaaatgtaaaaataaataatcaattatttttatttaaaataatttttttaattattaagtcttgaaatttgtaacactcttgtctaatagcaaaaaaattgttgaatatttataaattaatagcaaacaaattgacttaaaaaagaatttttgactaataataagtactaaaaaaacattgatatggttggctgtagacggtcaccgactcaccaaagtctactcgtttatatatatatatgacttatgagtgtgtgaaattatgacttctaggaaatcaaattggaaataatatatattttttttaatataattgtttttccaacttttttacatattgttttaatttctttctttttttgaattattataattatgaaaatgtgtttgtctgttttaattttgagagatatgagtaataatttgaagaatgtaactccatagtttaacaatatattttcagggatataattctgtagtagtgataatactttagagtgtgaaataattatgtatcaatttttcgaaatatgttatgtttgttgttttagatggagagatatgataatttgggaacaattataaagtaatatttggtatttttgttttttttgagtgtagcgtaatagtattttacaatcagttaatagtttaatagttttaaggtcttaggttcgaactcatgacctctctctttttcccacccctcactcactactaagctagtcttagtagcttaatttggtaacttatttgatagtaaacaatatggtatacttacgaaaatttaaaaatataaaatatagtaattattttattaccgccaatttttttaataaattatttaattataactggaagttatttaacaacaaataaaaacgtcataatctattaagtaatgaatttaataatatcatatattgttgttggtgtggaactaacaagcactttcgttgtggactctaggaaagtacgtacaaaacattaggaggaaccaacccaatctcttctcttcctcatttataattatttataataattatacttatttatatattattatagtattaaaaaaattctacaattcacatttcaaaatgaatttattgatgtacttttatatgttttaatattttttaatctattttttgtatggtcgtctacattgtaaattttgataaatttaaaaaatttaatatgccgaaaataaaatttaaacagtttatttcacacctatataaaataaaagtctcacgtgcaacaaaatgtttttggcgtattaaatttttctgaattttttaaaattttgcaagatgtcttaaataactataatataaacaattatacaaaaattaaactaattttttttctaaaatgtcggtaaatcggtgtacccttcacccaggcccggccctgggcannnnnnnnctaggcctgtgcctagggcccacctatcccaggggtccaaaaaaaaatatttaccttttaaaattataccatttttttttactgattttgaaa

SEQ ID NO: 38833 - DNA, 2578 bp, Cannabis sativa
  modified_base (829)..(834): a, c, t, g, unknown or other
agtttaaacaagtagatattgttaaatagtgagctatcacaccgtcaaattttactttttgatgtacatatatttaaaaaggtttgtcaattataaaatatacatgtatatatttatataaattgtgatccctttgttattcttaaacttatcttaagtggtagggcaattattttttatataatggttttcattgtgaagaggttatcaagacaatgatgcatgcatttggaaggttgcaaagcaatatatgaaaaaaaaaatattttttgaggaatatgaatgatctatggatttctttatttggcaatgtatttggggtcattctttgtggtatggcaaaaataagatctcacacaagtcacaacactatattctccaagccacaaagacttaactttctattctttatttgtataaactcatgccctaattgtgttggaataatcttatggtaagtagtttaaacctaaactaaactacttattatgttattatgttgtgcaagacaacgatttcacaagtgttaggagtattattcttgaatcattaattttcgagttactaaattctaaacccagtcaaatttaaaagttaactcaattgatgattatgattctaacaaattattgactttttaaatatgaaattattgtcttgcctaaatatttattctatataaaatgtggttatgtaacataattcttcatttaagagtattttttagttttctgcgttaatttttacataatatactattatttaactaaatatttttattaattttataatattattatatacatttaaaaataaaaattatgtagannnnnnatataaaaaaaatttaatttaaatgtaaaataagtagatatttttaaccatatttttaattttataatacttaatagagaaaaaaatacaacaaataaaactaattattaataatatttgacaacaaaaaattattagagaaaaagaaattatgcaatgttgtaattttttttaattacttgagtataccattaattaaagtatgttaattgaaagtcaacagaatgaatcaaagacaaaactatcttaaattatataaactagcttaaatggccaataaacaaattattgagtttgaagggtcatagaattgaatcctaattatataactcaaaattatgtatatataatatgttttaattaaattttttatttaattgagcatattatatacatcatatttattgtatctataaaatacatatatataatcacatgtaaaggacataccaatgtagcagcaatagttaaaaatattctcaaagatcaaaatttcaaatttcatttcaaaattaaaaaaaaaataacatcatctaatttaacctaattaaaaaaattaattgtacttgaattatatgtaacatcagtatatataaatacatatatttaattattgataacatttaagtacttaattatctttgtcttcaatttttttagttaacaatattttttaaaaaaaactttttgaaataaagtattattattgtgttttacccctctcaaaaatattttatttaatttttttttaacataataacaaattttattgttgtaagtaaaacaatacattggtcattatataataaggagtttcttccaaccaagaaattttgttttccatttgtagtgcatatcttgctaatctatgtactgcaatattaccatttcgcatcatatgttgaaaatatacacccaaaaaaatataacaagaacctattagatctaataatataacctcattggaagacactctcacaagaaaaattgattgaattgacaaccattttagcatcactcccgacgaaagaaacgaaaaaacttaattctaaacactattttacttgttgcaataagttaatttcctaatatagtcttccctttttattcttttccctgttttttgctaaacaatttcctattattattaaacttttgcaaataagattattttaggacataattatgacttcatttcatgtcttctaaaagttaatttatccttataatgaatactcttttcctttaaaaataaaaatccaaattcaaagactatcatcttaaaaaaaaaacctttatccaaccacatgttatgcggtgcatattagaattatttatttgtggactaatataataccataatcacaatcattaattatgtgcctaatatttctcatacaactataataggatggttaacaactattaattatttagaggcacatgagagcacccatatgactataattggcccattgagttatagtccaccatctattaatccttattaacccaataaactacacaaccctttacggttagatgggtatgtgagatatatatatgtatatcaaggatggatagtttgtgttaaggtagatggttagacactaagtgggtttgctccacaattgtctcttgattactctttactatctagcatattgttagtgtattttggacttggatattcaacaatggctcaatatgaagggatgagcaatatgggaggtatgttttctta

SEQ ID NO: 38834 - DNA, 1558 bp, Cannabis sativa
catgggaggtatgtgtttttatattgtttgtgatgctctaaataaagtattgatcttggttcataatctgtagtagttaaacagatattgcattcaaaattacatgtcattatcgattaaataagttacacccaaaaaaaatgataatcacactaatttaatgtcattaacttttagatttttcactccttatcacatattgatgagtatttaaagtaaagataacaatttaatatttactaacaaaataatttaaccttcatagagaaaatacagtattatcaattatgattaaaagttcttttgtagcatttttgttgttgaggaaagatctctgcaaaacacagcctaaaaaaaataaaatactagtgttgactttgaagagtgtcaagacgatgtcgtctgataaccttcgttctgtagagcgcgaaaaaatagataattaacattaggaatttatagtagttcactccctgttcgttaattagtaatagagctaagtctacttgagctctcattgaatgattggtactcataacacttggtctaagtgttgattgaaataatgcttacaaatagcgtgactcaaatgtacgttcagtgtgaaattagaaaaaattacttaaaattttagatattaagttttctagaaatctcaaagtatgattgaatatttaaatttaaaatactaataaaatattcaaataaagagcatattctaggatattttctttgagttgatctggatcattgaatgagggttttccattcaaatattgactatagatattctacgcttgatctgatctattaatcttgtttcttgatgaatggtttaggtttacccatcttgacttgaatgatgacctatgatcttcgagattgaacgaggtctgttgatcaaaatttgaggctttgatacctaattcatactttcccttatgactcaaatttttaccaggaggagtctaaatttggctttcgtcatgaaacatcaattgaaagatatttttaatgaaattagaatcacgtaaatctcagttgtattcagcgagatatgcaaaaacactactgtagtggccaaaaattacaccagacccaaatacctctgcccaaattggaattacaatcctttaaaatcaagtcagtaaatataactcactcatccaaaatacattgggctttggctaagatagcccaaacgagcccagtagctataagaccaatctaatacaaagaataagaacgagtctataactgaagcataagaatcaatccttcctcttggaaaaggggaagaccacttcccacattcgttcttcagaataggggaattcaaccatcaaaggctctataaaagaagaacccaggagtcctgaaggaccatctcatcttcactcactgaacactcactcaagaattcacgcaatacattaccattattattacaagtccttctccatcactctacggtgcaaatatttatttttatcttctttatttacattcaactattcttcatttattttaattactgacttgatcgtcgaagtccctt

SEQ ID NO: 38835 - DNA, 2480 bp, Cannabis sativa
  modified_base (2426)..(2430): a, c, t, g, unknown or other
tttttttatggaaattaaaaactaataaaaattctttttttattagaaaatggtatcaaaatatctacggttggacatccgatccaatctaatatattttttctaatccaatctaatctaattagtaattaaatttagaaaatcatcgttccatccaatcgaattagacctcaaaatctaatctgattcaacccaactactaattggattggatcaatttttcaattagatatttgcttgaaaattttaatattaacttaaaaacataaagaaaaatacatataaactaaatatcataattcataataatttaatactttataaagatattatccttacaagtttaatacaactaaaaattttaaataagtaaaacaacactactaactaataaaatagaacaaaatatcttaaaaacaaatatacaaaacaatcaaatactgcaaattcaacaaaaaaacctcatgtgtaaatatatttttggcccccctcacatttaatgctggctccgtccctgactagaagtaagccactaccttattatacttagaatcaatttagtttattacacaattaattcaggttaacttaaaaatagaagtccaggcatcatggttaactcaggttaacacaactaaaatattctggttacttaaataaattaattaattcaggttaattaaatatttaagttcaaaaaaatcctaaaagcaagtggtatttaccaagaaaggtttaaattctaaaataattaattagctcaagttaattcgttatttaagtttcaaaaatcctttaagtaaaaatactttcaaatattcttcttcaaaacaagttgataccaaggttcatgttattggaatcatattccaaggagtacaaatgacttgttaacaagaaaaatatttaagcctaagcattttattaaaaatctaaagttttaggtctttagaacaagaacctcatgaggctaaaagcattaaaacttagtaaactctatagattaaaagctagatgtctaaagagtaaatcaaatagtactatgtacttaaaaactccccgacaagaatatcaatattatctttgtacacataaaaaggggacccatatccccccaaagaaatatatatataaagttgttaaagcaagacaagagtggatagatgtggctacagcaggagtgaatcctttggcaattgagtatcttcgggttgaacatcaagaaagacctttgagcattagttgcgaaaggaacatcaaaagctggaagagtggagtcatccaaattctcacccataggaagggtagttccaagatcgaccacttccacattctaagatgcttccttagccttatccgcttcctcaaatgcaaggatttgaggcattaataaatccctatcttcagcatccaaaaggtccatcacaaacttattgtgtttccagattgtgcatactgaatacacaaaggcatgttctaaagctttggtggtcttaacttcctactcttgcttctcttggattacttgttgagctgtcccttcagtcttgagttttctccttccagttcggtaattttattttaggactattcatgagctttctcggatgaatccaacttagtctcaacctctgcaggcctttggacagcctttttctcaacttcctctaccttctgctgcaactccgtatgatgcttcgcctttctctccagagtagttttgttaatgattttgtcatttataatttcaacttgtttatcatactcttgagataggacagtaagctttttttctttctcttggatgtccatctttgcctacttcaagttagcttccaggtctttgttcttagtgagggtagtggaatgtagatccttgtacttatctcaaccctccctcttagccttggtagccttcttttcgggagttatggttttatccaaagagtcggttaccctatacttaatgatgacctccatcctggtattggctacagctagagctttggtagccttctccctcatttgttcagcatttgcatgttctgccctcagcatctcaagttcataagctagttgggtgaccatggagcagttcctctttgccattaagcttacctatggaaaaaaaagtgcaaatgaattaaacaactgagaggagcataatatttatttaagttaaataaaagtcaaacttacaacattagcctaggtcctcataacatatgctatgtagattggatccctgctcgccatcatggaaaacgtgtcagcaccgagccacaaacttgtggtagcactctgatctaacagattagccagaaatagagccacgtcagttccaacttgaggatggagtctctctgccatttcagctctgttcataagggtagggcaaggctcatctgttaggttttatgccctannnnnaactccatttcaatgtaatctattttattcaacatcaataaagaaacaga

SEQ ID NO: 38836 - DNA, 2428 bp, Cannabis sativa
atggcagcaagacaattgttcacctgttgaacctcatgcttgacctcctggacatctacaggagcagaactcgaacatgcaccagcagcaaccttaggacgcttgggaaaggctccatcaaagtactctgagggttgaaatatggtgtccgtgagggaggctcaagtgtctcatgagaataggccacatccttttgagaggaaagaatcttatagattaaattaggaaaaacaagcttatgagtgtgctttttactcttagaaaagaaacaatctggtccaagatataagaagccagattactggatgcccacgaggtgatacgaaagagaaaagaggccacatcttgagacaccacagttttgttggaattgagaagccatttgctaagagaaaacctcatgagtgatgcatgagcatatgtgagatgagtaatgtgaagactctacccagatttctattcaactcttgcaccagtgagttcaatgagcattagatggcgatccatagacattatagcattagtcacatcttctggcagttgcaaagccttaaaaatatctttttcagaaaaggaaaaccaatgtcctcgaacatacactttacgaaagaatttagaattctcatcaagaaaaatcatcagacaagttagcataaaattctttgacaattccatcaatatatccttcaaaaccagtaagagtatttctccaatgatgatattgtacaaactttacaataccatagatacgatgagcatgcaaatcataattcctctcactttcaaactttcgggtagcataaagattccaatcatgctgattatcatgatagtaaaatctagaatttatagcttgagatggagaaatattaccaggactagagctcttcataggttgttttcccttgtcagcagcagaggctttggctgcaagagcagaacgaggaggagctgctgaagatttgggcattggaggttcaggctccaggtcagtttcctcactgtcagaggacactccaagatcttttggaagatcttttacagagagaagggactcagatttggtctcggagtcatcagaggacacttccattggttcttctttttcaacagaactcgaggaagctaagggaggattcatctttagtttctttgcagcaggaagtggtctgtcatggcttcttttggtgcgaagttccttctcgagtgaagcttgttgggcacgagtgtgagaagatgggcctgttggagtggatgtagcaacacccttacttgttgcagcaggaggcaatgcagtagcacgaggaggagaacccttcgacgatgaagacgatgaagtgcaaaatttcatgggggtctcacagatttcctagccacttgtttgggaatctgtttaggcttgggcttcacagtctgagttcacgctgaggaagtgatgaatctctttggagaggagtagttgctggagcaaagggcaagattggagcagcaggaggaacatttgagggggcaggtttggattccatcaccctttttggttgccctaggttctttgtcttagccatggagatctgaaagtgaaaaagaaaaacagagaagcaaagaaaaaagaagaggaatcgggtagatggtgcaattaaagacaaaggaagttggtttaaaaaatcatgtgagagtggtgcaaaaaaggaaaccaacttcaaatttgaaaaactaccagcccacgaacacaatgaaaccgccccactctttttccaatttttttttttaaaaaaaagaaacacgaaaaaaccatgatactttccaaaaataagcaatttaagaaaatccttcaagatcaatgacaaaatacaataaatatgatatcaaaatttaaaagttaacttatcaaaataaatcaatttagattaaatgttgatacttactaaacaaatcaaagattttcttagcccacaagtcacaaatacctcttttctttattatttttattatttttttttctcgaaaatccgaataaataaaaaataaagaaagtatgtacaataaatataaggtgttctagagcaagtaactaattaaatttcattacaagtgacaaatatacatgttatacttttaaaagagaataactaattagtatctcagaaaccaaccatacttaacagatgttgaaaaaaaatagacatgttacaaataatgtgaaccaagataatttttattagagtagaggagacttacacacttgaattcacttgtcagacataagtctgtgcagtgaaaatatgatcattgtccttggcaagatttttatttttcgcctttttcaaatagatcccacgactggatgctatcacaccatactgaaggtagcccttttctatggtagtgcatcctcatcatagttgctaattacaatgttccagcttac

SEQ ID NO: 38837 - DNA, 3659 bp, Cannabis sativa
  modified_base (2774)..(2781): a, c, t, g, unknown or other
  modified_base (3606)..(3606): a, c, t, g, unknown or other
ggttcgaccttgcacttacatgaacattatattccgaaacgattcgtgcacttgcgagtataaatattaaaacactcacttttgaggacaacattattgaatgagccgtttgagtgtttgagtaaataaagaagattgtatatatatctgatgcgttctaaggattctgaataacatataaacgacttgtagcagtagggaaagggccgtcgtttggacttatatacagggagtcaaataaagctttgactgggttaaaaaggtctaaattgaccttgggtttttctttgattctttctgctgtgtgtagggacataacaggaatgaattattatagttctcactataacaattacaaaagggtggtcgattcgacaactcaatgtcaacaatattttccttaatagtgacttaaatgaggagatatatagggttcatttttttttatatccattgcatcctatcaaagtttgcaaagtttaaaagactatttatggtctcaaacaaatttcacaagcttggtttgagaaattatccatagccttacttaattttggatttgtgtctacttaatgtgatcactcattgtttatctgagaaacttcaacacattgcactgatgtgcttgtgtatattgatgacattcttgtcataggcagtcatgataagattgtttctactcttatctctcaactgggtcagatctttgctctcaaaaagttgggtcttgtagactacttcctcagtattcaagttacttcaatagaagatggaattctattatctcaaacgaagtacctgaacgatcttttacacaaatcccaaatgcaaggagtcaattctcaaaactccccaataaatgatagtcttcgattatctttatatgagggtgatcctattactgatgttacacttaatcgatcagttgttggtgctttgcaatatgtgattattactaggccttacactgcctatagtgttaacaaagtgtatcaattcatgcataattcgctctccttacattagatttccgtcaagcgcattcttagatacttggctgtaacacttgattttgggttactcatctctaaagcttcacattttcatcttgaggccttttgtgatgcagtctgggattcggatcttgatgattggcggtctaccactgggttttgtgtgtactttagaggtatacttgtttcctgggggtctaaaaagcagtctactgtttctcggtcttctactgaagctgagtttcgtagtcttgcaagtgttatcactaaagtcacgcggattcaatctctttttcgagaactttattttcctttatttgtatctcctacgatttggtgtgactacacttgagtactgtcatgatggctgctaattgtccttcacgcacgcatcaagcacatcgagatcaatctatactttgttcgagacaaggtgctttagggtaacattcgtgttcaacatatgtcccatgctctggatcaagttgctgatcattgcttaataaaaccaatttccagctctcaaatttttttcttcttgacaaactcagtgtgttttctcctaccacaatcattttgaagggggatgttaagaatgggaatctgttagctttaatcagttacaatttggttagagtatcttgctgagatgtaccgttagttagatttttattctctttcttgtattgtatataatcaaggtctgtaatctcttttgagtttttctctttcttctttcgttctctatctttctaaacttcaaaaaaatgaaattaccctgatagagatattacacctcataaaagtattataaccaacatgattacactttagcatttctcttttaattaagaaacacacaaattttgatattgaatcaaatcccatacacaacccctgatagtatacaaccgccgcatagtaaacgattactaaccctttcagtttcctggtgctcatccaatccaacccagtcactaaaatcacaatggtcatatatagggagctcctttatgagacttattttataatttgtttttaaaagaaaccttttatatataatgtttatggtagtattatcaatcaatatattcaattcccttacatatttcaggtgtaaaactattatttaagaaaaagtactactactatttatttatatatatatatatgtatttataagaaggtatatatatgggttatattagattatacggagttagctataatttatagtattccaacattcatgacatcaaataccaacaactctgctatttatttaaatgaattaattaatcagtgtacgcattgcatgcgtttttactttttaataattaaaagtgtttctctacaataatattcagtatatatttatttgtttatttataatgttttggattaattattattattattttctttctttctttctttggtacgtcaactgtggaatgttgattttggatatatgtaatatgtatatgcacaaacatacaggttcatcttataggaaaagtggctattttcatgaaatagcctgtgtatttttggccaatagacccaaaaaaaaatcaattaatttggaccactactgctactactagctacactttaactttactatcaaccatattaatttacttggcaaaagtacaagaattatttctttaattttttccttttaacaaagcgggccaccctaaattccatacaagtgtttaatttaaccagtttacataatattattattattattannnnnnnnattattattattattattcataacaataacaaaatagcactaaccattccatcataatagatatccagtttggtaaataattaagttagtgtgtctcccttaataattacttcaaattttaagtttgtaagttacataaatttaatgtttatttttagcagcagaagtacttagtatttgtaaaattgtaattttcttttaattttattagttattgtcttaaacaggatacaaaaatatgtagtatcagttatttctaaatgttcttttaataaactcaaaatataatctgtattgaggaaactgcagaaaaattacagttttataaatattaagtatttatgtcgctaaaaataaatattaaatttataccgcttacaaaatacttttataccattatttacatactttattatgtacgtgactacctatataaatatataattaattgaataatacattaattaagacaattaatcataaattataatatatatatctatatatatgtatatacattatgaaagcagctttatagtaacagtatatcttgaaaagttgtcacaggagggccaataaaataagaggggaagaaggctggaagaaggtggtagttggttagtcactcatgaatatcaaaatttgtgtatgtggcatatacaaatatatattaaaagcattatatatcttgcaattttctacgtgtaaatattattattaatatagttaatgatgatatatgtaataatttttaagaaatagtagtttccagtagagtgccaaataataacaatactcatacatttatagggatatgattttgtnccgtgattatacttttacggaatgcattctgatgtacggcagctgtcagatga

SEQ ID NO: 38838 - DNA, 1343 bp, Cannabis sativa
  modified_base (72)..(77): a, c, t, g, unknown or other
attaaaataaaaaactaaaatattaaataaaactaacactacgtggattggcacgtaacaatcacctagtannnnnntatatatatatatatatttttggcaatcgccaaagaagatggtcgaagtcaaaagtaatattttaatttcgatcttttaaatttttttctctgttaattatttttttacgaatagatttaattaaccaacaagtaaataatattcaaacttcaacaaaattcggtatatataaaatcttaaaaaatattttgttattttatctttagatgttaaaagattatattgtaaaaataaatttatttttataaagcaattttaataagtttttaaaatagacttgcattaaaacttattattgagtcggatgctttgttggtagttcaagcaattaatagttcagtctccatgtcgtctcagtttggtttattggtggctgactgtcgctcaattttattatctttaagaaatgtttcaatttcatttgtttatcgatctgctaatgagaccgcccattgtgttgctagggggtcttgttttatgtcaggttgcgtttttaatgagctgaatgctccttctgtgttgaaaaacattgttatggctgaggccttttttaatgcataatcttcctttgttcaaaaaaaaaaaaaacataaaaacaaaagtgataccctagggccgcttctctctcttgtgaaaatctagcgcctcaggggatctcttctttgatctctcaatctggctaggcctgccagctcttcctgggcttagttgtggctttggtcaggttttttgattggtactttaaggtgggcttcaagaatcgtttcttctctcgctgtcttccttctctgttagtcttgctttgatttgttggtggtttgagcttgatctctgatctcgtatggagtcgtttgacagtaggtgtcttcactccggtttggtgttgtggaggtggcgtagtggctgtggctcgggctggttctgctcgggctagttctggattccaacacggggtttggcttgtattaggtcttgggttgtcggggtatggggatgtcgggtgtggtgttggcctttgggtatagatttgtggcgaaagttcctcatcatcttctcgatttaggagtttggtgttgattgatgattgttttgggtctgattcattattggtttgcccctttttgtgcctagtttcaattattttaattttaatgctattttatgttaatattatttcaataataatggtgatttgtcactaatttactggtttagtaaagtttttattgtttagatggctcgagcgagtcttgttctaaattgac

SEQ ID NO: 38839 - DNA, 1730 bp, Cannabis sativa
aaatccagtgaactgaaaaatcatgggaattaaacttttgaacagataatcatgattatattccactgtgctgacgatactataatcatgaacaaatatatatttatctatttacatacattactacaaacttgacatttagtgacactattaagtgaccaacatgaaaatgtgggtcagtaaaaagttaagggtgagttttagtgacccacacaaaaagactctaaaaaatcaatgttagtgtcctacaatttgtgtcactaaatatatgaagagtcactaaaaagtaactcctataatttttattatttttgttttaaaaaaaagatttgttaaccaatagtgacgcgccaagtatgactgggtaaatatgcactgacctgccaggcgcgtcactatatcatagtcttaaatgtaatatactgacctaccactgaagaaccttcatttctgtctctccttctcatctcgcactctaactttcaaatctgttgtttttcaatcttaggtgactttgggattaaaagggaataagcattaaggtcgtaagcggtgtctaaggatctcctagacgtggtgggagctttgaagggggatttttcagatctgaaatgttgttattttcctaagatatctatttttctttttaattttttagtgttacttttgggtcttgttttcatatgaaactttgttgatttttatggaattacgttgatcttgatatttattgaatttatttatatttgaaattttgttatataataatatttgtagtgaattaaattaatgttcatatgaaacttttatttggtactacaagaaatataagttttagctactaaaaaattagtaacaaataatctatatttggtagctaatactttttttgctacaaatttttttggtagtaaattggtaattgtatcatggtcgctaaaagttttttgctatcaaatatttggtagttgatgctatttttttagctactaactttttggtagcaaatcatctttattctagtagtaaaattattagcttttaatatccaataaaattattttgctaccaaaaattagtagacaaactaataaattataatgtccaataaaactatctagtattagtttttggaagtaaaattatataaaatagttatataataatgatatattgacatgaatggtaaaataatttcttttttctttatatattgaaatatatattatagtataatctttaagtacaacaaattattattttctaataaaaataacaaatggttaaagttattaaatttgtacaggcatcaattcataaatattgagtcacatctttaagtgtacacatgagcagatgtagaagttggcttcttgttttggaattgtatcttctggtattgcaagcctttcattgtgccttttatgattctaagcctcgttggccaatcactgattgctttgaattacgatgatttcctatacatatttatattaacatatcaacttagtcaaaactgctgcatggttagtattaagttgtcattttaaataaacaaatcttatatacaagaagtagtataccatgcatggataggtacattcatatataatatcttaatatattgattgtcatattgttgtagtttatacatgttgtgaaaattatatacgcaagtatacgcagtcacacaagtaataaagtgataagtaagatcgtctccacaggga

SEQ ID NO: 38840 - DNA, 3035 bp, Cannabis sativa
cgggtccaagtcccccatctaggtgtggaacctaggtcctggtccgagtctaggacccaatcggggttcaagtcctagttcgagcttgggttcgggtttctgatcccagtccgattccagatctgggtttgaatccagatccgggtccgggtccgagtcttcggttccaacccgggtctgggtttcgtggcctgagtccaggtcccccttccaggtccgggtcctacgtcccagtttgggtccatgtttggattggggtcctagtcctagttcaaatttcgattctgtgttcgggttcgggtctgggtcgaggtctaagtcctcattcgagtccaactcttgggaaagggttcaggttttggtctgggtctcgatctggatcaaggtcccaagttttgatcttggtttgggtatcggtccgggtttgggttcgagtccaggttcgtatccatatccatatctaggttcgagtctgggtttgggattgggtcccaagttcaggtccgacctgatcccagactcggaaccggaatcagaccaagactaggactagaaccccgacatgggactgtaacaggtcccaaacctaaacccaaactcaaaccaaaacccataccgggacctgtgccttgggacctaaaccaagaccgagacctggactaggacctacacccgaacccagatccaaaacccggggccgaactatggacccaagaatcatactcgggcctgggacccgaaacccggacccagactgggactaggacaagaattcggacccaaccccaaacaaggacctggactcagattggacccaaacccgaattggaaaacgaactttgacccagaccgggacctaagacccggatatagatgggggacccaaacctggaaattgggccctcgaactaggtccagaacttgggccttagaacttggatcaggattcgggacccaaccccagacccaaacctggacctaggacccacctcgagacctgggatcttggactcgatgcttggacccaacccgtagtcggtgtttggatctaggacttaaaccagaacatgaacgcaagctcgaactcaaactaggaccagacacataccatgacccaaacccacactcgcaaaccaaaaccaaaaattgtactagaactggaccgggaacttggaacaggatccaagaactagggcttggacccaaatcaggacccgaaccaagactcggatccaaactcaacccgaacccgtaccgcttgacatgaaacgtgaaccaaaactagaagcagatcaggacccaagaacaggaccaagacgaggacctggacccatacccaaaactataactggactaggacccagactcgaacacagacccactcggggattgggtccaaaacctgaatccaaacccgaaccgggactcaagacctaaacctagacctgaacccaagagccaaacattgaataggactcagaacccagaactgggatcgagacccagaactggaccctagtctcggtcctgaacctggacacaaacccagaccagaaccatggacatgaaccaaaaccagactaggacccgtgattgggatccagatcgtgtctcgggatctgagaactggggcttggaaaagacccatagtctctgtcttgatctgggactcagacaaggacccgaagctagagcaggactcagacccttacccagacctgcgacccgaaattggaacttgaaccagaatatgacaaggaccctagaactggaccgggaccgtgagcacgacctagacctggactgggacccagaactagacagaaacccagccccggaactcaggctcaaatctagtcccagacccagtctcggacccaaactaggactgagactcgaacctgaactcgaacccgaactcaggacttgatcctggacccagaccacggtcctgacctaaactgggattcggacttagatattgacactaacttagacccgaataccgacctagacccaggcccagaccgggatcgaaacacaggacttggacccgaacccagacgcagacccaaactcgaacctgggacccaaacctggaccccaaatcagacctggaccaagaccgagatctggaaaacccgtacccagactaggactaagactcagaccccaaccccaaccttgacccagacccgaacccggaacaaaacccgaacccgaaatcaaaactggaactttcactaagacctggacttgagacctgagaccagaaccttgaccgagaccttgactaggactgagacctgagaccaaggacccgaacttggaccgggacccatactgggactttgacctaacctgttcctaaaccctcgctgggacttgagacctgcgacctagataaggttctagaccctgacaaggacccgaacatgaacctagaccgagattgggaccgagacctagacccaaacccagactgggagctggactaaaaccatgactcgacacctgaacccgaaccaggacccagaccaggacctaggaaccagtctttgatgggagaccaagatcagggagctagggcccgacacccagacccagatgtcaaatccgtgactccaaacccttgaaccaaggacctgacctagacccgggaatcagaagtgggacccagagccagaccggaaacttcccttggaccaaaaccaagacaagaacctggacatgaacccataccaggacaaaacctgaacctgaacccgaacccaaaattagacccgaactcgggatccaaactcagacccaaacctagacctacacctggacacgaactcgaaccgagactaggatcgaaacccaagacttagactcagaacaaaacttggactcagacagagatcaaaacttgggactcagacccgaacgtagacccaaaccccagaccctatcccacacctggagcccgatccaaacctagaccgagatccagaccctaacccaaactcagaccagtactcaaaccctgaccc

SEQ ID NO: 38841 - DNA, 2005 bp, Cannabis sativa
  modified_base (60)..(75): a, c, t, g, unknown or other
  modified_base (1952)..(1954): a, c, t, g, unknown or other
tatacccacactttccaggcccaaacgtgaggagagtgtattaagagttagtcccacatnnnnnnnnnnnnnnnntaaattgtgatatataagatgaattggctagtcctcacattgccaactggttttgagatagaacctcattcatcttatccccaaattctaacagaaataataatataatattccaaaaatatagaaaaatacattcaggctattttttatcatagataacgatataacagttaaattgacttcggaggtcgatcatcaattttcagagcttgagtcgcacctgcgagacccattcagagtaagctatggcttaaattcgtaactctcttgagagtggaatttagagttgattacttcataattgcgattgaagtgtgatgcatgacttgatagagcattgaaatagctttgaagtgcaagtcgaatcacactaatcagatcaatattgagggagttatggctattttactgaaggttgttctgctcccaccgcctaggttgacatcccagtgcctaggttgacatattctagcccctaagttgacttgtgatgttaatctggacactgggtgagtgggaaaacgcattggggatgtatcttttgatgcctaagtgatattttaacaccacttaacctctttgtgttttggtgaagctggtcaccaattcttggagatgtcgctcttctgtgaaaatgggaaactcgaaactacccgatttctgagtaaagcaccttgtcgaaaaagtgaaaatatgaagttgtgaatttgactcttctaacttcatagctcttatttaccatagaaaactagacagatggttgacacagaattagaatcgaataagcaaaacccaacacaccagacatcatatcaacctaggcgctgagtgcttattttggtgcttctgggatgtctttttgatacgttcaaggctcttgaacttgagacgaaatctcctaccctgtttttgaccattttgaagagaatgctcaaagcaaatttggtatttgagtgattgaaaccagcacacatggttgattgtcaacgtgggcaatgggctcagttttgatgcccttaggattgtcgttttctccccaagcttacttgtatcttaaatatttttgatgatagaaaaaataccccaaaaactgattggaaacagccctggttgacaatatgtcaacgtgggcgctaggcccagtgccaagtgtcaacctgggcattaggtctagtttcaggcccttagacggttttgtttggtccctgaaaataatttaatctttaactttgataaaaaaggagaatattcccataagaagtttcagaaaaactcatcagaattggcaaaggttgacatttgggcactgggccaactctaggtgtcaaactggatgttgatccgtgttttgttccccatgttgatttgtttcttcctcaaaagcacttgtttccccatttttgatgaagatgaaaaagatgcacaagttaaatttttggtttgatgcttagaagtagcccaggttgacgaattgtcaacctaggcgctaggtgtccaggcaccgggtgctccgggtgctcaaaaatgaaaattctcttaacctaattttgatgtctcaaatatgttcgtggtatgtctagttcatatcctaaaacaaagtttgacccattggaataagactgtgttaatctcgcttttagtcaacgagagtgagtcaattattaagcgattagatatataattaaaatagagcaaaaaccaataagtaataaagaacaccaaattttgaagatgttcgaccctattagtgttggtttttatgccctaaataaaacccattacaatctaatctgatttgttatcaatcacagaataagaagtgatttatgtttacatgtagttttcatgcttatggtttaatatatatgcacaaaatnnnttaagtccagaacatatattcattaataattacagtggtgtcaacacagtg

SEQ ID NO: 38842 - DNA, 3580 bp, Cannabis sativa
gaagaaattgcagatgaagatttacacaaagcattagaaacacgaagagcgtctgtttcaatgaatgtgactggtagctgctgttgaagggcccagcataggctatgaaacattgcaattgcctccatttcatgagattcaaaacagcccacaactggtttcgagaaggctgcagcaacagtaccgttggagcgccgtactagagctccaatacctgttattttccttgaggtgtcgactgctgcatcaacattcaacttgagtgttccaggaggtggaggagtccatggaatcggatgtgcacttggtgaagactgcaaagaagacgctgctggtgcgtgagtccgattggtagctgtagcagtagaaccgtatttaagttgagcgctttgataattctgccagtagttccttgcaaaatttgcaagatctttggatggttttgctttatggccatgaatcactctattacgttcagtccatatcgcccataggatacaacaaaggtgctccatctccattttagagtatatagcagccaaatgaatcaaataatcacccttcctcattgtcatggtattgttccagtctagagtgaaatttgaaaagcaccaaacagatctagcatatttacaaccaaaaagagcatgccctatagtttcccaagcttgttgacagatggagcaagtggaatccgttattatttttcgcttcacaagggctgtagctacaggaatggcatcattatagactcgccacatgaagattttgatcttttggggtaattttagcgaccataaaaaattccagcttgctgtcatggaagaagaggaagaactgttgtcaatatcatcaagtgaagccgctaaatgatagcccgtttggacagagtataaaccagaggagctgggatgccatatgagagtgtcatcatgtcgaaaaaagcccaggggaatggttaaaattcggtccacatcaggtggtgaaaaccagcgatttagcaaagataaatcccattgtcgctcatccgtgatgatattcgaaacaactagatccgggggtccagaatagtggtaaggttgaaagctagagtggcccggaatccatggatctttagcacaaagaactcgacaaccttcgcctattttccatcttagaccagcagtaaggaggcctcttccccaatgaatggcttgccaagttaatgagggggagtggccaagatgagcttcaaggaaagagttgttaggatagtacctactcttgagaagcttagcaagtagggagtccggttgctgtagaagtctccaggcctgctttgcaagcattgcttgattaaaatgcacaaatgaacggaaccccataccaccattatcctttctttggcacataagcttccatgagcgccaatgaaccttgcttccattttcatttaagccccaccaaaagttggccatcatagactcaagttgattgcagaagtaaacaggtaagcggaagcagctcatagcgtaagttggaatggattggacgaccgctttgagtagaacctcacgacctcctgcagaaaaaattttctcactccaagtgtgcatgagtctccatatcttctctttgatgtcactaaacatctgctttttgtctctcccagagtaggaaggcaaaccaagatatctctcatgacattcacaaatcggcattgatagttgtcgatggaagaaaacttgggcagcaagtgtagtgttgggggagaaggacataactgacttatcgggattgagaacttggcctgaagctctgtgataaacatctaaagatctcttaattgcgagacaagaagactcattagcttgacagaaaagaaggctgtcatccgcaaaaaacaagtgagagatggactgagcatgtcgtgttaacttgaacccattcagattccccatcgcttcttcatgttggagcagccgtgataagccttcagaacaaattaagaacaagtacggtgagagaggacagccttggcgaagccctctcgatggaataagtgaacccgtgacctcaccattcaagagaaatgaaaaactgttggtacacaagcagctcatgattagtgcaatccatccattagcaaaccccattttcctcatgaccacctcaacaaatctccattcaacacgatcaaaggctttactcatgtccaatttcaaagttgccacccctttacgacccgtagttttgttcttgatggcattaacaagctcaaaagcaacaagaatattgtcggtgattaagcgattcggcaagaatgcactttgggtttctgagataacacagggtagaacatgtttgaatcggttcacaagcactttggtgattagcttggagataacattacaaagactaatagggcgaaagtcttgtagcttctgtggttttttgatcttaggaatgagggtaattaatgttttgtttaaccttgtaggatcagccccattattcaaaacacttaacacagtagttgtcactaagtcaccaacaacagcccagttttgctggtagaacataggggacataccatcaataccgggactcttatctggagccatcatgcttaaagccaactcaacttcagctgcttcgaaaggtttaagaagagcacaattcatttcaggtgtgactgttgtaggaatggcatttaaagtggtagcgagggcattttcatcaatggttgaagccgtgaaaattgaggcaaaataatcatgaattgcagcagccataacaggtttagaactaacccgattgcctgtttcagtaaccagaaatttaatggtgttgtttgtcttcctagctgaagcttttgcatgaaagaatttcgtgttacgatcccccgaggttaaccaatcaatccgagaccgctgctgccaatagacttcttcctgctccaacaaatcatcaagaacagcctctgaatttttcaaagaatccatagcttctgtggttcggtgtggagagttgttaagagtttccactctcttttgtgtctcagaaatctttttcttcatgttaccatacttgtgaatatgccatctttgaagttttgaagcacactcttccaaattctgaaggaccgaaccaataggatcaactgctgaagtagattgccaactagctgatataatctccttgctttgttcatccgaaagccataacttctcaaagcggaacctactacgtcttttatcttgctggagcagtgagtttactggtgtaaaagtggcagagattgctctgtgatctgagccaaaatagtcaagatgatgtacaagtggagcattgaattggttgacccaaagatgattcacaaaacaccaatcaagcctttctttaatggtgttgacacctgaacggttctttatccaagtgaagcgatctccttcaaaagtagtttcatgtaatttgcaaagatccaaagacttgcgaaaagcttccatttgtcgttcaagtcttaaaccaccaccgaatttgtcattgttggatagtatttcattgaaatctcctatagcaaaccatggaacaaaagggg

SEQ ID NO: 38843 - DNA, 4340 bp, Cannabis sativa
aagtcgattcatctcccgatcgactaacaagtgcatccatttcttcaatatttttttaaaagtttttgatcaaacctttcaaatgagaaagggatcaaaccatcacaaatttttgattaaaaacatgtctgacgagaaagaaaaatccaaagttataaatgagatataactcataactcgcgtgtgaagctgaatattaacggctcgcacagtaaatgaaagtattaaatgagacatcaatgtgtcttgataaatgtacttaaacctagtatatgaatagacaatctaactattcatataagcaatcaagaaaataaaaagtgacaaatcattcaaggtgataaatcattaataatatattcaagtttgcttaagacatattataactgttattgcgaggcagaatcgataactgcttgcaaatcaaaagtatggcagataataaactgctcacgcacatagtagattactaactacttaaataggaaaaatacgaggaatggaaagacggagagtactcccatttgatcaaaatataattatttgcattgtgaatgaaaacgcaagcaaacataaatatattaagcttgaatgtaaagctacgaggcatttaagacaaataaaagctaagttggccaacactagcttcccaacttgtctttacaaaaattccacaaggggcaaacgattgggcgattttcctaaacagaaaagaaaaataaataattgtacaagactaagtgtacattattataagggacttggcgagattttcttgttctgcgtcaacctcttcttccttgcaatattcttccttctgagtcttctcgcaataggcaagcatggtttcggccttatcacccaaaaaactaaagtccaactcggggttggctgaccaaatctgatagatggtcctcctaccgatattgttgacgctctctttggttccaccctccaactctttgagcttttgatcatggtcaacttgttttttaacaagattagcttgaaggaatttaaaagaattctgaagttctttaattgtttgttggtcggcttggtgttgcttttctgcttcatccttagtgcgagaaacttcaccttcagaatcgctccacttcttagctacgaaattcctatgtttcttaatttggcgaagctcagtctctagcatctcgacccattgagacgcccggtgatgtgtagcgtgaacaagagaaaaagcctgaggagaaaggacaaactgaagttagtaagaaaggcagagtagggaagagtaacctgatgctgaagctaatgacttcttttggtcaggtcctcggtattgctatgaatagcgagatcccaatcgcgagacccaagtgtcaagaggttgcaccaactgtttgtcgcgtgttgcgagctcacttgtgacccctcagtcccaacttcaaggggtaaggtacaggagggctcgaggaaaaccatctccgaacgagaaccaaagaacttgacttggtgtgttaactcggtaggttgcttctcgacgatccctgcagtagagacatcaatccccgcagcagatacctcattctctgccttaggagatttatcagcatcaataagaagctggttcgaggatttcctcatattggcctttgtcgacctgttaacttttttcttaccattgtctatgcttttaatgatagacatggtaggaaagagttagggaagcatctacaagaaattgtagaccaggaagcttggctaatcatgggagcttttaatgacatccttaataaggaagagaggattggtaataaagttagctatcatccttttgatgattttattaactgtattgctaattgtctcttggaggatgttaagtcatgtggaagttttatcacttggagcatcaaggaacaaggtgaagagagaattttctcaaaaattgacagggtgttagcaaacgtacaatggcttgacaaatatataaacactgaagaaaattttctaaatgaagggttatttgatcatacttcagctctacttactatttatctagaaacacctaatgggagaaaaccattcaggtacttcaggatgtggtccacacatcttgagtatcatacacgaattaaggaagcatggcaggcctcaataacttgcaccagaatgtttcaagcggtggccaaatttaagaagattaaaggagtcctaaaggagttaaacaatcaaagtttttcagatattcaagtctctactaaccctgcgacggagaagcttgatgaatttaaaagaaagttgcaagaagagcccttaaaccagatgctgcaagctgctgaattggaagctagaatcagatatgttgaacagctcaagaactacagttcacttttacatcaaaaagccaacctaacatggattaagaatggagatgaaaattcagccttatttcatttaagtatcaaagctcgaagaaggcaaaacaaaatactttccatccttaatcaagataacatcaggatagaagatccacagcaaataatggaaaaaaggaggccagtactgaccaaattagtacaggagggagcagtgatcacataacaacatgcatggttgctcactcaggaatatacaaactaaggaagaaattagagaaactgtgtttgcaattccaggaatcaaggctctctgagctgatgctttttgtagttatttttattaagataactggaaattgataggagatgaaatctatgaagccgtcaaatcatttatgcatacaagaaagctcttaaaggagatcaatgccactgtcttagcactcatcttaaaggtgaaatgcccaaacaaagtaagttaattcagacctattgcttgttgtaatgttctatacaagatagcaactaagttgatttgttcgagattgaagcatgtattacttgatttggtggctcaaaaccaaggtggtgtcatcaaaggaaggtacatagcacacaatataatgatatgccaagactcaatttgtcattatgggaggaatgcatcaaaagccaattgtatgatcaagttggatttgcaaaagacttatgatactattgattgggatttcttggaagaattgctcacttcctttaattttcttggacaactcattaagttggttatgaagtgtgttagaactctgaaatactccttactactcaatggaacattgcaacggtattttgattccaagagaggattacaacaaggggatcctttattcccaatactttttgtccttggaatggaatacctagctatcaagaattatggcaagggtaggcaagaaactagatttccaattgcatgatagatggagccttgaatctcaatcatctcagctttgctgatgatgttttgttattctacaagggagactttaaaagtttattcctcagtcgtatgcataattcagaggtgcaatgaatcattgatgcaacaggatactgcaagcagtaggtccctttcacatacttgggaatcccaatatgtgccaagaggatctcaggtaaagattgtgcacttctagatgagaaaatggctataaggcttagagcacaagaaatatctcttttgcaggaaaaacagtgctcatcaatgcagttcttatgtccatacatacatattggatccaaataatgaagttacctagaaaggtaataggagagattgaagcaatatgtaggacatttctgtgaaaaggacagaatcagatgcagggttctggtctaatagcatgggatctggtttgtctaggaaaaaatgcaggaggaattggctttaggaaagtgcaggaatggaaccaggctgcaatattcaaatgtgtttgggcaattgcaaataaagaggacaacttgtgggtcaagtgggtacacaatgtgtatatcaagaacacaagtaaatgggattacaaagtccctcctaatggaagtttatactggaaacaagttgttgctgctgaagaacaactcaaaaatctgactgatacacaagtattcactcaaacaaagtaccagatatcaaatggttataaactcttatatcgtaatcaaaccagagtcagatggaatcaagaggtttggggaaggctaaatacaccaaaacacagttttgtattttggttggatatttagaacagattgtgaaaaaaggacaggatgaagaaatacaacatggtgagcgaggatgtttgtagtctctgtaatcagcacctggaaaccagtggtcatctcttttttcgaatgcaacatctcactagtgtgtttacaggcagtaaaaagctggctaaattagagagctcaaatagtttc

SEQ ID NO: 38844 - DNA, 6068 bp, Cannabis sativa
tgtattgactttgagataatcaagttgagggggttccacttcggtatcatctgtaaagggcatggcccagattctatcccaccagaagggatgccagtcgcctcccaacaaggggaagccttcaccgaggcctgtttgttgtgaaacatccccaggtaatcacgggcataatgtacggtaagcacgagagtcagttcaatgttgttatggaccattttattacgtctgaactagatccttcacagagtcactataaccaattcagtcaggctcctttgaaataaggggcaataacttgttgaatgaaattaagaacattcacacaacgaactagagaatctcaacgcaaactcacagtgtttcttgcaataaaccaacgtaaaatacctctttagcatgatgagtaattttatcttctaacctacacaaaggataaagcccattagataacagataatgacgtgatcttcttttgtcaaaaaaaaaaaatgaataagattgcattttgtttaaaaaagttagtggtcttccaccgactaagttttctataaaatgaataagtgctatatgccaagattttctttttagcctaccaattgagctaaagaaaaaaaaaacaaataaaaaatcaactaacaaaactttaattattattattattatgctatcgttaatatgttttgtacctaaatattttacacacaaaataattttttaaaaaatgtaacattagaaatatatatgacattacaacacaattatttgtaattaaaagtaaaaaaaaaaaattatgaaaaattaatataaagcaagtgacttactaaaataatattactaaacccatgtcactaaaaaagtgtatggctataaaagtattagactataaataattagtaacatttatatttaaataataattttttttagtttgatagagagatactaatcggtggtaacttaaaatgttgtgtaagtaaatatccgtcctacgtaatttaatttaataattattataaaatatcattaattatttacaagcaagatttagatagtgttagacacttttggtacttaatttacagtaggatatgagtgttcatataatccgtagttgatagtgtaaattatttgatcaattcggaccatttaaaattttctaatttgatcatggttttaaaaatttcagtagtagttcaaacccaacaactacatataattatttaatatataatttttgaacaaaatattaatatttaagaacaacggtaagtatataatattgatattgacttaatattgttatgataagaattttttattgttatttataaataaaattacctgagcaattattattaaaagaatttagaataactacaaaatacaaattataattttaaactaaatctttttgagtggactggtttgatttggtttagtttaagcatttaattagaccaaattgattttaaattcttaaaaaaccataagactaatttaattttaaaaaaaattaaaactttgaatcaaactgaacatctctaaattatatagggtgaataattgcaagttaattgtgtattattaggaaggatgtattgttatccataatatatagatgtaacatcggctggaccccacctgtagctaactatatggccttgattacgaccattatttctatttgggtttggttgggtcgggtggttaccaaaaccaaaccaatgggggtcataatatacctaataaataaaggttacaaagttacttacacaaaatttaaatttaataaacttaattttacttttgaaattattaaggtttatacatattgattgactcgatccatatagtacttaaaatgtatgtgtacaatttatagtttggtaaaaaaaaattatttagtaattccatgttttatctaaattaataaattattttggcatcctacatattttatctaaatatatatacttggtttaattttataaatatgatcaaaccttcacttacgttgcattttaaatttaaatttaattaattacatataaataaattaaaaaaactatcatattgatgaaatttatttactaaatttaatctctaaagtactaaatatatataatttcaaattatcgaatactaaattaagctctaagaatgaagtggccttgtccccttcaattaccattcttgtttatatataagcttgttttagatgagttaattggtgccatatagtcttaattcttcttttttcttttttcatattagtaaataaaataaaaatcccaaaaaaaataaaagaagggtatcaaactagggattccaaaagaaagatcatgtcacaaagattcacaacgtaatatatatgaaagcaatgaattgacccaacatatttttttggtagcagtaaacagtcttattatttggcttcatattagtataatttctatttgtatttttcattgtcatttttattaatattatgaatattgaaaactcaaagtagagagagaatgaaagtgatattttttatgcactaacacacataatacactcgtacgtacacacatgtatatatatatatatatattatataagcatgtgatatctctttctatatggagtggggtttctctctctccttctctctcaactatgctatgtttgacgaagattagaccataaagctactttgtttttctctttggccaaacttttcaaacgaataatatatatacgtatacatatacatatatatatattcaattcatttaaaataatatttaatcacctttaatgtaaaaagtcacatacattgccatttattgattttctacaaattaagtaaaatttgggattttattttgtactcatataataatcataatttctgttttttttttcatgtttaaatgttaatttcaaatcaaaactcttatctttttgctcttttctattttacttttacatagtatttattgtagtagaatacccacgattttttatttttttttggaatatgttttaataatttacagtcatagtaagaatccaaacagtatattatttatctatttttcatatatataacacaatactattttaaacaatgatttagtaccataaattatcttggcaatttttacaatgaattctttttatatataagtttttctggccattatattcttaagtgtagtttacttttttttatgatacaatttatctttttctttttaaaaattgctagaaaattcaccatttttgtaagataaaggagctatatactttcatgtgttaccaccactagcttggagagaataaatctaaagtaagtattaacattcattattattttgttgaaagtatacaatacaatactattttattcattatttattagaaaatatatataaaatatgattttttttttatttttacattttaaactaattttatttttttttatttttacagaaactcacacaaaaacttcataacaagtatagagcaacgtaaatcgtaaacaacggaacaacttaaattacaaccaaaatgtacatagcaatccatataaaaaccaccgaagcattccaaatcgtaaattaaaaataaaataaaaataataaaaaaaaagtatggactatagagtaattctcttatataaggggtttagttttttttttttttttacatatttttatgaaaaattcacatagcaactcacataacaactaatacagcaatctaaatcacagctaaaatttataatttatattacaactcaaatagaaactacctaactaacccaaactaaaaattaaaaaaataaataaaaataaaacaatatatataaaataattctctaatataataataaaaataataataaataaaaaaggaaaactcttattacccacgtactactccacccgtagctatccacagtacaaaaaaggcgagactgcattaaaaggtgggtaaagaggtgcacgtggtcccaaattataacccaaaatcaaaatcaaatcaaaacataatgttcttcaaattataaatacaccaaaatccaaaccaaacagtttttccaaaatttctgaaacatcaaaaaattcaattgggtggtcacaataaatttaatgaaaaaggtttttttttttttctcttcatcttggtacctttatctttctttctctctctcttctgataaagttatttctttctctgtatcacagtgttgtttatattgagagagacgagaccctgtgcttaaccattccaactgtggcactgaaaaacatggtgtttttttattaattattataaaaaaaaaaaagaacacaaatgcagtgaaaacgacatcccatctttctcatcaccaattaaattaaattatttatttaaaatattatccaaaatttacgattttgacgtattaatttctcaggtgtcattgaactagatttcctagaaaaataaaatctttttttttttttataaaatgaattgaaaatttatagagagtagtgaagagaagagactattcaaatttatatttggtcacagtggttaagattaaaggaactttgtccttttacgccataaaagtgaatgagacaattctgatttccatacgattttgtagtaaaatctttttttttccttcttcttcttgtttttttaacttttttttttatttcattttaatactaaagcatataagaattgatatattgatgaaatattaataattaatacacaatacaagtacttttcttcttcgatctactacaagatattgttaagaggaatttcagctatatattcctgcaaacaaagcaataatctctcttcaaatattatcttatattatatatttgattattattattattattactataactactaccataaatagataacatagtacaatatagcaatttacataggatattcccctttttttctttatttatatataaaaatataattcaaaatgttacaaaacccaaatatttttttctttttttctctcataatacaattaatgaaaatatatttcgaaaaaaataaaagaccccaataataacacaacactacttaattatattcaccacccccaacaataatgggcagaaataaagagccctacattaacaacacaggaaaaaggaatagctttacgacaagagtaaaaaacaaagatcattatgagagagagagtttttttttttttttctttttaattttcaaatatatatataataatgttattatgaaaaaataaaataaaaattattattaccataacgtctctttactactattattactagcttagttactatactactactactactctccttcgccttcagtagtagcggacgacatataactcatagcaagcgacgtcgtttcatcagaaggtcccaacggcgtcgtttggaaatgttgtttacaagcttgacaagtgatttgtaaaattgttgagctgattttcttagtggcttgttctctaagcaactgagccttttctaactcagcttgagcttgttgccttatcctcttggcgttagtgaattccatctcagccatttcaataagccgtttagcttcacgccgagcttcctccgcgtatgtcttctcagccatagccaatttcatctcatcgttagccaaatctctcattctacaaacttccgccccttgattattttcaccaccaccggcctccaaattattattattagatccgatcgaaagcttcaaatgagtactagcgtaattctcttcagaagaattttgattcgaaacgccgccaacggcctctgatgaattagtagaaggaagaagctgaagctcaagaagactttgctggttcttaatgttgttattatttaagaacatgtttggtaataattcgttgggtttaggcaaattgatcatgagtaatcgatgatttcccttactattgctgaaattagcatcgctcgaagggctcgtactcgaagccgttcgagacgaacaacctgctgcggtggtagcggcggtggcgg

SEQ ID NO: 38845 - DNA, 6822 bp, Cannabis sativa
  modified_base (632)..(633): a, c, t, g, unknown or other
gacaaagacacaaatcaaatgcaccaaatgtggaagaaaaggacacaataggaggacatgcaagaatccaagtatagactgaaaaataacagtagctacagaacaatacaacaacataaaaacaacataaatagaatatttttacagatacaaaaaagaaaataagaagggctttaaatagtgattgctattgaattgattaactgtgaatttagttgctattgaataaatgaactctgaaatgaattttaactaaattgatttgataatgaagtgtttagttttaaattccatagaatgacaaaattaaatttgaaaactattaaaacaaatagatattggttgatgtataaaaatacattagaaatacagttatatatgttgatttatttgtttaaccattgtataaataatgttaataatcatttgaagtacaaagaaaaaacataataataaaattaagatcacaactgtatataatatcaacattatatacagggccggtcctaaggtatatggggcctaaggcaaaataaaattttggggcccctatatatagtttaactattatgaaaattatagttctagtacttagtttaatggtaaaatttttaaaaactcttaagagctcnnaggttcaatccctcataactacacattaaatattttttaaaaaattaaaatgtaaaggttagggattgatcccatgaccttttagattgaagttaaatattttatcactacaccaaacaatttttattatattttcttcttgtttgatattttatttatatattaatatttttttttcataatttcggggccctgagcgttcgggggcctgaggcgcacgcctagcctgcctaccctcagggccggccctgattatatacaatataaagatttagtaataaaccaatattgctgtgtaatttaggctaacaaaaaaaaaaaaaacataaaaatagccttaagcaatacaccaatatttgctttaagttctggctaaacaacataaataataataataaaaaaacatcaaaaagcctacaggaaaatatcaacatattatatcaaatcttgcctaaataacaaaagataaacataaggtattttttttaattcaaatcactgcgcttttgcttttgcttttgctttccctctagcttttgccttcgtcttctttggagatttaggtgggctttctgactcactttcaacattctcaatgtgtttcataagtccaaacttgtatagcaacacagaaagccttaggcgatactcctcaacatcaaagtcagctggaatattcttctcctcaatgaaatactcagcaaaagcagcaaaaaatgccccacaatcactagaaacaacaaaaaacaaagcaacaatgtaagagatgttaaaataacatgaaaataacaaagataaaacagaaaagaaacaattgaaattcatacttatccacttgttcaggaagtacttcagcattgataatagggaaaggtgcaacaagattcacagatgctggtaaggtataatgaagctcatcataaagacccaacagagagaaaaaaaatggcaacatgatagaataaggttccaaagcaagcaaagaagcagccgcatacttcgaggtccttagagaattatacatttatataattctagacttcatgtcaagcctacccataatccaatgactaacagtctttatgtgcaccaataacaatacatggtcagcctgactccaacgtgtaccacatcaaaggcgtttaccctttatgaaatgatcaatttggtgctttggttgaacaagagatatttgttcattcatacttacatacttttcatgcaatgacctgatgctactattgaaatagcaatctgtaattataatcttcatgtttgttgcagtagaatacttagctttctttctcaaataataaaaaattacatccatatgctgaaaaaatgaaaagatgaatgaacaaaaacataactaacaaaaaacaacaaaacaacaaaaaacttacagaatcactaagaaactgatcacaataaatcaacgagtgcaaccacatctttccctgaataaattcacaaccaaaatcaaaacttggctcaagcttattatcagcaggaccaaaatacacgaaatgacccgtcatatacttcctataaacacaaaaacaaacaaaagtattaatataaaatcacatatatatataaaaaaaaattctataggcaaataacatagatataaacataacaataacatacgtgggtctcttaagcaaaccggatttgaaccaagcatcaaaggctttctcatcttcatcattgacatcatctacaacagattgttccaaagcacacaaaattttaaccttacttgtaactacaacaaccttaaatgatgaactcaactgctgagcataaggagactgcaattctcctctcaacaggaggagtgatctcatcaacattaacaaaattctcgactgcaacattaggctcagactcttccacattaacaacaaaagacaaatcctacataaaagaaaaagataaaaaaaatatatctttttaaaaaataatatatatacataaacaaatcatttagggaaaaaaagttaccacattagcagaagttgctgattgtgaatcatatggaaccaaagcatatgattgctacaaaacaacaaaataacaacattataacaaaaaaaaacaacaacaaaaaaacaattaaataaattaaatgaataaaaattaaaatacctgaaatttttcaatagcttttaaactagtcataacaacatcatcatcctcaataagtagctggctataacctttgaaaaaatcatcatcaacattttctttttttcttaacgttaaaaccatcttttggtacctcgccatcattaccacaatctcctttaccattaccattactatcatcatcctgctcactaatgacacctttattatcattcttttcgcctcgagaaacatcctcatccacaccctattcattctcgtcctgttcattatcaccctcttcattcacaccctcatcagtctcaccctcttcattctcaccatcatcctcatcgtcatctttcacatcatcctcatccccatgtgaagcctcctcaatcttagcatcctcctcattatcatattcctcaacgtcatgagaatccttgacataaaaaaataaacatcaatcaacaactatttataattaaacaataattaaaagtttaataacaaattacaaacaaaccttgggaggaagttttgacaaaaacatgtaaattttttgtgtacagattctaaagaatgatcatattcttaaaatcttcttttaaaatgaaaaattcatcagagaatgcttccagcttagtagtaatttctgccaatctcttatgaaactcagcaaatttaaaagatgaactatttttgtcaacagaaccttgactaccaacatcatcaatctgcacagatttccctttccccatgccatctagattcttatccacaaagaatccatccaaatgtaaccttaataattcctcctcagttgggaacaaattcttgaccttaagctgaaacaaacataaaacaggaaataaaacataaaaaacacataaaaataaacatatcagtaacattgaaattaaatttttaaaactaaataccttggaaagagaaacaccgaagatagaattcttgaactgcttaataaaaggagcagtatcattacaccaattcagaattctaggaatacgatcatgcaatttagaacaatgaatgccatcaatgtaaggccaacattcattgaaccaaacttgaaaaacataggccaaacctctcaatctataaaaacctattctctctccattatcaactttatttattttaacaagattctttgaaatagcattccgtaccgaatcaagaaataaataataagactctttgccccaagtatattcattaagcctcccactatcgataatatccaactctaaatcagatacttttttagtgtctgaatcacttaagacaaaacagtgaacaaagtatgaaatagtaactttcaacgtaagcacatcatcatcaccaaaccttttcccaataaaagcattctcaatatcctacttgtttattttcttaaaaccagcaaaaatcttctcttttaacatttttttttcttgtttatacctcaacttgtcacattgacccgtacaatcaaggcctaaaccaaagcgaactcctcaatgctaaactttagcatccgaccagcaacattaaaccacatctcattttcattcggctggacaacctccctcaacaacaaactatggaacaactggtgttgcaaaacataaggagttcttaaaaagaatccaaaaacagtttgtccaaacaattctttctgttcaggggtcaaaatagaaatgatagtctaatgattttaaacgagcaagtagaagtcacccgtgtggtatgaaaatcttcattaccaaatttattatccgataactgaaaaaacaaaatagtaaaatcaatgaaacattaaaactacaacaactatgaaaataaacaatgcataaattaaaaaaaaaaaaagaactaagaacaaaaaaataaataaattataaactcaagaaaacaacaatatgtaaaaaaaagaaaaaaggaaaaaaaaacaacagaggatatacattagatttttttaaaatggaaatagaacttgtaacttaaaatgaacaactaatgtaaaaaatataaatagaaaaacctaaaaattaaaaaaaaaacaatcaaaaatagataattcaacaaaaaataaaaaaatcatataaaaaaattcacaatgtagataaaaaagcttaaaaaaaatctccagcaaagattgaacaaaaaatattgaaaaaaatatattacaaagaaatctctaagttttaacatgaataaaacgaaaacaatatataaacaaaaaagcaacaaatttttttttcatatagaacttaaaataggattgaagaaatatgaaaaaaattaaaaataaacaaataaactaagaacatagaacatagataactaatttgaaaagttgataggacatgcttactgtgtgggaaggaaaaagaaaccattgagcacctattttttcattgcgaatatagcaggaagtgtctattggaagtgaaaaagaaactaaactaggggacaaaggcagtcgagttgcggaagcttctgcaatgtatcagcaatatgaaaaggatttcagtaaccataagaagtatgatgaacatagtcttggctgctttagtatatcagctatggggagcaagaaatgatgtattgtggaataaaaaatagtggcaagttagtgtcattgttaatagtgtacaacaggatagcaaaaggagaatagcaggggtgatgccaagcaaaacaaaagaagtagataagcaatggttgattaaattgtaatttttgtaaattcatagcttcatattgtatagcattcggttatgtacataaactggggatgtcattgatagtttgagcaatacaactttccttattcataaaaaaaaactaatttgaaaaaaaaaaatacgattgaaacccacaacatcaaaacaactaagaaaaaatcctaaacccaaaaaattaaagaaataaacaaataataaacaaacaaaatatcagtcgaataaaaaatgaacaacaacacgaaaacacttctcctgcttctcccacgacgaagaagaagagggtcggacagaagcctgctactgctaccacggcggacattgaagtagatctcccttcaatccatgaagcagaagctaaaccagagttgatagaggagtttcacgataccatcgagaacctgataatggagaacaggatcgaacttgttgatgcagaggttgattgcgggtcttagaaaccagggaactgggtagatgaagtcgactaggctgatttccaagttgatgctagggatttatggagcaagttcaaaacgaatcaggtaccatctccctctactaaacttacttatactgaaccagttagagttggatatcaaattgtggctaagcttgacctagaagagattgaggttgaagcctcttactggaaaaatgcaattgtttgctttgttttaggagccaaacctccttttaaagtgtttgggggttttgttaagagaattcggggaaatttgggcattgagaaagtagttagaatgcattctggatgtaccttggtcaatttaagagatgaggccacacgagatcttattctggaggctggggtttaacattttgataaaaagtcggttgttcttaggccttggactacagatcttgactcgatgaggatgactaattttgtgccggtttggattcggttgaatggattggggttacaatattggggtaagaataatctaagtgctttagttagcactattggcaaaccgatcatgatcgataaggtgactcaagaacgttcaatggtgaaatttgctcgaatacttgtggaaattgagatttcagatgctcctcctaaaaccatatcattcattaatgaaagaaagcaattggtggagcaaacaattgaatacgaacggctcccatcaaagtgttcagcttgtgcgaatttaggccatacagtggctaattgcaataaagagaagaaagtggagaaactagctgctggaaaagagactaggagactatgaacaatgatcatccaacagtggacaatctagggaaaatttcagagcag

SEQ ID NO: 38846 - DNA, 1603 bp, Cannabis sativa
agtagctgaagatgatttatgttgaattagtgtgttgcatgtgcaaacaatgagtgatcatcttctcattcacttgtacagtctccttgtggtttgtggggtgagatttatttgtttccatatcaagcatcacctgttgtgtcatcatggttttgctctgagaactatgcttggattctgggaacccgtatggtgtcatttcgatttggaattttattcttgcggactggataaattatagatttgctccctggctatttctatttcagtggttatttgagtcatcccagaagcatgtaataattttgtctccaaataaggataatttgtgtgatctctttatcaactctataaagaatctgaatttatttacataacgtcactcttgaacacgcagtttactgttttcatatctaaatttttcttgtcacgttttatctaaagattctcttttccatttctcgctaccttttcttttgagtataggatgtttaccctttgatgggaaagctcctctgagatgtatgaccctaattcttatcttgttactttgctgcagattatcctctctcaggagaaaaatatacagaaacttaatgagcttgtacaaagtcttcggaagcaattgctacagtgcaagggtgaaaatgaggctgacaatggcactacaaccccgctcacagaacttctaactgagcttgagagacaacctgtcctggaggactagtcctgggcccctggctagtatgttttaattgtcaacataccctaaacttgtaagtaggaaagaaaaacttctctttataagaatctagctaaacccgaaattgcagaaacagtaattattgtatgttgcttaacttgtaagtatctaatctattctatattgagtccaagatgttttctttcttttttttcatgggggaaggtagtggtgtggtgctatatggaattacatacctttacagtttctgtattctagttcaatctgctaaagttggagacgtatcattactgtaatacctagtatgaaacttgaatttgaatttgagcatgacagtaatttttgaatttacactgagccctagaagttcattgtaggttggtaagttgtcactatggctttggtctcacctaacaacttaaggggactgcagcagatcttgtgttggattctattaaaattgactaagatttagttagaattggtgaatggcatttaagtgtgtatgttgatttcaagtatgctgacaatgcctttagtattagagtgtcagatgtcttcttcacttctcttgttttacatctagtttaataccaaatatgattatctgtttttaaaaattcaatttattatctataggataattttttttttcttttttacagaatttacaaaattcacaatgcataggattattatttttttttttttgaaaaaattacatttttcatagttttttagaggaaagattttgtaatttaccatatttatatttaattataaaactacggataaaagtttgttataattttataaaagtttattacaaatttacaattttcggtagatattgtttataaaattgaattttactaatta

SEQ ID NO: 38847 - DNA, 2923 bp, Cannabis sativa
tgagaatttattcaaagatagcattagttatggatagatccttgatacaatcaggacacgctggccactaaatcaggctgcaacttgttgttaatgcaagtttggccaaatcatgagcaatatcattactagatctcttacaatgaaaacaactaataactttgagcctattacaaagattaagaatatcatccaatactagacctaacgaagtgataatagagatattatttttaattttcagcacgacactcaaacaatcaaattcaataataatattttcatatccaaaggaaagacactcagacaaagcttttcaaatcgccaacgcttcagccacttcaggcaggaaataaccatctaaagaccagctcgttgaggcacaaacaaagcccacatcatctataataatcatgcccaaaccactgtaatttctcgaagaacatatagctgcatcaatgttgactttgagacaacttggaggaagggcggtccatttagacgctttaagaggggaaatatgtcgcagcaagggtatgccagaagagtcagccatcaccaaaggaggaggaagaggaggatggctagtcaacgaactctggttgttaagaaatgtccccagaagttcatgagtccaaaggacaatgagagtaggagataaattacattgttatggaccattttattaagtttgtaccagaatcttcacaagatcaccaaaaccagctcaatcatctctttcgactaaggattaataaatctataaataaagtcaagaaaatccccacaagagcatcttccaacataaatgcacaaagctttctgcattgagtgagagagctacaaccctaaagaacatggtgtgtagtttcttcccctatcccacgtaaaggacataaaccatcagataaaagaccatcactagcgaaattgatctttgttggaatccaattatgggaagtttgccaagcaaaaagtctcacctttggagggagatttaagaaccaaatctttttccaccaacctgacaaaacgccctgaagtagaagctcaaggcattgccaagttgtgaagagcaagccactaaccactcttcacagaataccatcttgactttttaaagttctaaattatcttatctaacacatcaagagaagctcacagaatagaaagaatagcctcagcttcactagtcaagaaacttgagcaaatcaagtctttgtcccatcccctcgatgcatccctaagtaaagagaccttacttgaaacatcgaacaggagggaggggatcaagacaaaggggggcactgacaggatccaaaaatctgtgtaaatagcaatatcctgcccattcctaacacgccatgtcacccttgaatcaaaaagctccttcccccataaaatattcttccacacaaaggagcctcttttggacttcttaatattgacaaaggacctctttcggaagtacataccttttaacacacagccagcgaaagagtcaagaacattgtaaatacaggatgcttgtttagcaaagggatcctgattaaataactagagatccctgaagcccataccactatcttccttatgcaagtaaagtttatcccaagtacaccaatacatcttttttttaaactcattaccccatcacatgccaaaaatgagcacatatacgatgactattttttataaaagcttttagaagcttaataaggttcataagataagttagaatggattaaataacttcatgccttgataagatccttacggccagccatggagaacagtttcaacatccaataccattaagttttgtccaaattctatcgctaattgtgtgaaacaaacacatcttgttatggcccgcgaaataagggaggcctaagtaacttttatggaaataaactcccttaacgcctaacaactccactagtttagctttctcgaaattcgaaatattggggctaaagcaaacaacagacttgtcaaaattatccaattggcctgaggctgaaccataccagctcaagagttgcttgaatctaacacaacacacatcagaagccttaaagaagaacatactatcatccacgtaattttaacgaaactcgaaagaacttcgacacaaagtaaaaaaagataagatgacatgggatccccttgtcgaagcccctattgtggaataatagagcccactcaccatttaataacaccgagtattccacagaagatctgcaatccataattttccttacccaattaccatggaagccatgcttcaacataacttgtttcagattacaccactcaacacgatcataggttttagacatgtccaatttgagggcacaaaaaccctcccattttttttttcttaagagcattaataacattcaaaaccaatgagagcattgtctgtgataagacgctaagggagaaagatactttgctctttagaaataatatgacccaaaagatcacacatgtggttagtcatagccttggtaataatcttgtaaaacacattacaaagactaataagacaaaattccacaacagtaattgggttatcaatcttcggaattaagtaaataagagtttttacattagttgtattcgttatacgattttatttttaaatgaactacattaggtgggtgagtatataatttatttaaataataataaaaaaattattaatctaatataaggtatcaattataattaaattaattattaaaattagattcaaaattaatagctacaaaagtgtccttacttgtaaggaaaaaagtaatactctcacttaaaataatattgtgtacgtctacctatataacttagtttttttttttttttttgaaagaagttataacttagtttgatggactatttatatttttattattattat

SEQ ID NO: 38848 - DNA, 2112 bp, Cannabis sativa
cgacacctatcaaagagttagccagttgcaagcgagaaaaatggtactcccagtcgtgaacaagaataagcgagcaaatgaatctcccagtctcaaaacaaacaaaaataagtgagcaaatgacactacttatgataatgtaattcaagattggtgagcaaaaatagccattatcttgaaagggaatattggacaatattttcccacatggatcaaatgtaaaaatattgagccatatataagaacatgggctactccactaattaccaattagttttgcgattgaactccatgattctcaatacctcaccatagaaagctacccatccagctcgagtttataccattttcgttcacctacacctaggatccagatacctgttttaactctagacttgtgtttctattttttctttcttttcttacctaaaatggaagataactctctttatggctttcaatttgacagatacaaaaagcacagctcataccttccaagattccacacccaaaactgaccccaataccctagccccgaacatttttcttgtggctaaactttttacagtaaaatccttcagtaggaaacacttcaaggaagccatgaccaagtactggaacacgttgtgtcattttccagttactataactggccatccctccaatatttttctggtggaatttgaatgtgaaggagatcgaatgagagatatggttcaataaccatggctttaccttaacaatggtgtcattgttcgatttcccgagttctttggaggctttcaatagagaaagtcttcaatccctaccgctttgggttcaggtccataacactccctttcttaagaagagcgaagagcttgcttgcctcattgccacaaagatgggaccattcctagaggtggacaagccttctctgaggaagacttagggacaatacttttgtcagagagtgatgttgaatacttcccaacttatcctgaggggaatcccaattgagttttagagcataaataaggttgtttggcttaatttgaagtataaaatgctcccaaatatctatttttattgtgatcgaatgggacatagttataacaaaggttgctttgagtatatgaaagcttgtgatgaggcctcaacccccggtacctttgttataacgaggacatccgaggtaaggtttgattttttactaatcccttacttgaaagttctaacaattgacattttactccactcacactggtcactttcatgtccaccaacccagctagtggtctgtgtgtctctaaccaagctagccctaccactactgcccctctccatcttactacatccaaagctttgactacttccactcagcaagctggtttgttcatgtccaataatgtcaatatggagcaagacctctcacattggagtagtggcagtcttacctgggattcatcaactgtgcccctacaagctagtgaacttgtaccaactttcacaacgcttcttaatgccactatgagtactctatttggaaaacatgtcactacttcttcaagcttgagccattcgtcgcactccaatacccctggcagcttaagcaacaacatttccagccactccaaggcccttcttcctgcttccattccttttcttcactaataatgctcttgtgggtgcgtcaaccacattctctttgagaattaccaattcttaaccaattaagcccacaaaagaaaaaagactttaggaggaggtaaagagtcctttaaaaggcagtccatttcagttgaaggagtgtctcaaaaggtgatcaagtgtgcccaaaccaattcacctcttgtcccaaatgttgattttttagaggcgagtcctgctcaagaataggactgccttgggccatgaagattgttagttggaatgtacgtagtcttggtagtgaccgtgcatttcgtaatctctcccaactgaatattttttgtaaccctgatattctgttcaaatccagacttgcttctggttctttggacagggttaaaaataagttttctaagggcttggaagttagtagaataggtcaaaggggtcttttgttattatagaataataatgtaactttaa

SEQ ID NO: 38849 - DNA, 2451 bp, Cannabis sativa
ggtttgaaaaaatggttaaaaaatggttaaaaaccgcaccacccgcaccgcgaacacccctagttttaatattcggtacttaaaataaaatatttcaatatgtgaatgttgactaagaaattgtaatagaaatttgtaatcaccttctaaaataaaaaaaaatatacataaaaaatctaccaaaacaccaaacggtagatttacccggaaatttatatgtcagtaattattattgaagaaaatcattttctacaatcgcccatgtgagtgttcttcttctatgaatttaagaaacagaaaaatttattaaaaaccgacttagattaatgtctcttatcaaagaatacaaaaccaaccctcaagtctttcactcaattacaattataataaatagacaaaaacaaaaatttgaatataccctttatcaaaaaaaaaaaaatctgacaaagggtaatacataaccaaaaagcaagaaaaaatagaaaaaattaacaaatgtgcatgaaattgaaaaatgaccatttttcatagtgacacttgcctctgcattttcatctcttcataaaacctttcaataaacttctcagctcttaaatcaatcgaaccatcatcttcttcttcttcttcttcttcttcttcttcttcatcatgatcatcccaatccaacgctccacaattgactttgatttcttcatcaacggctggaaagttattacaaagaaaaagcattgaataaactctttggaggcttattccaaatccaagttgattttgatgcttttgctttctttggtacccaattagaggatgagtcttagaaggagagaactcataatctgtaatatacccataattgtaataatacttcttatgattttgaacaaaattgaccttgaaactcctcaccaatttctgtgatttcataaacacaacaagctttgggataatgggttttctcatttttgccataaagattgaaactttaagcatttttgagactttgtgaaagatgggcaattttcttctaggcattttttggggtttttagacaaaaagattgaagctgtgaatttgagaggtataaatggttggagccatgagaggcaagagtggtttaaatggtgaagaaaaaggtaaaaaggtgggtgtgtggtcgtggtcggtggcactttggacttattatatatacatattgtatgaaatataagaaggtagccgttgaacccttgtggggttcaatcctttccctctaagttttcaaaatcaaaactttgcaacttttcaaggtcataactttatatgtggttattcaacctttttggggataaaaataagtttaccttttactgcatgttacttaagtaagtaagtgattttgcaggatatataatataggataagttaatactttagtatgtaagtgttttggtagatttcttatatgtttcggtacattggagagttatttaggaccatgtataaattttcaaaaaaattgggtagtttataataacaaaaataagatttatatattttattgtacgcgtgattatttttttatacacgtggtaattaattgtttaaacttaattccaatactctaaactatctagaattttttaaaaattttcaagtgatcctaaataattacaatatacgttatcataaaataaaaaaattaaagtaaaaaatttttctaagtaaacaatcaaataaaaaaaatctaacaaaaccataatgtaaagggtatatatattacaaaaaattggagtaatattataataatttaagcaccaacttttgatacgtgaaattgagtgcttatttgggttgtaattgagatcaaatttgaagtcaaaggctcaagggttattttcttaataatattttcaatggtggggttagccatcaacgtcaagaagcttgttattaaataataatttaggaataatattagagattaggaattaaaacagaatatagcattagaatttacaaacaagttgacaataaaaaaaattaccaaacattttttcaaaaaaaaaaaaattaccaaactatagctctctaaattgttagagatgatcttgattaaaacgttaacactttgaatttgcacaattaaataagaaaatactagttgagaacatttaaaaaaaaatgaaaaacttatttatcccacactttatcaaaatctcaaagagaaagaaatcaatgagcttttgatgaataaaagaagaattggtagaaaacaagtggaattgaactacatcatattattgttgattatataattatgtatagttgtgataaataatacatcttaatacgtaaaaaatattccataagctaattaaaaaattattgtagataaaatatgagcataacgtaagggggtgattgtgatccgtgatccgtaagggaaaataccaggtaagctgtgcaatccca

SEQ ID NO: 38850 - DNA, 3716 bp, Cannabis sativa
  modified_base (3519)..(3523): a, c, t, g, unknown or other
ccaacttgaggggggtgacaatcatcatcttggtggtgaccccccgagactccttgtccgttgtcagtagtgatagtgtaatgtggatgtccccatatacctttgagaatgtcattgtgtctatggtaaaatgcatgacttgtaccatgaaggtgtagggggtaggggtatacccctagactaaccctttagggggataagtggtgtacccctagactaaatcctatatagatcattgcagttgaggtagaagtagtagtatataccccctagactggtttgactcccgtaggtgtgtggtgattgttcattccgcttacgaaggcgttagtccatcgtttttccttcttggagacgcccaccttactcaagctaggggtaagggtgaccgtctgacttccatcctaacggttatgacacccttcatggttgacgaccatcccaatgtttatgattttacatattcttcattaatttaatcccagtatttttgtgtcacgtgttgctactcttgatacgtcatcgtcgttaaaatttagataaacagatagctaaaccaaaccaaaccattagtaattaactcatagtcacaacattgttggtgactaatgaggtaacttatagttacgcaaatttgtaattctcattgctctaaaaaaaattatttaagatatttttgtgatcttgagtgtaaaactaagaataaatacaataagaaggagaataaagtattaccgttaaaatgtgagctaaacctctataaaatttagtatcgtcattgttatttttgtctttgttgtcatttatttttcattttatcgtcgcttttgtgattccgcgacaattgactatttttcgggtcaacattacggaaaaaaaaagagacatttctatagatttgtaaagttttattattagaaaaaataaaatatgtaaatactattttactccttcatatttttgtaatatttttttttgaaatttcaaatttttaatattttaatcttcaaaaatttgagtattttttttttttataatttccctttattttatttatctaatgggccaaaggggtcaaaaaggtttagtattttcttgaaaaacaacattttatagatagaaaaagttacatcttttgatcattacaaatgatagtagtcggtattgaagaaaaagtccacctgaccacattatgagccaaaaacttacaaattatgaaaataaacgaaaaattacaacttaataacgttacaatgatgtgtatagtaatttcttataatcaaaatattaatagacttattctagaataataatgataatatataacctataatgatccttagcctggtgaatcaatgatcatgccttaattatggattatgaatataatttgaatataagaatatagttagatcttatatattcaacgaaaatacagtgatacaatactataccatagacaggggtggcccaagcagtttgggggcggccacaaattaaaattaagtattttattaaaaaaattatcaattaatattttataaattcaatttttttaaaaaaaattaagcaaagttatttagaattatatatattgagaccataaaattttatcattttgtttataagtgctaaggatatatttactcttataaatatttgttatatatactatacatacattatgcaaaaaaaaaaatacttattatattttatatagaaaaagataataaaaaaaagtcttttaaggaataaattgaagaataactcatgaaaaaaccttatattatatttcattaaaatatagtcacttttgtgagtaggttgttcaatatagcttcactctccacttaactctaacacataattacattaacctaagtagtataatgataacatcatctataaaagtgagtatatcttaaagaatatgaaaataaaaataaaaataaaaattaaaacaagtaaaataaaataaatatacattgtaattttctcatcttttaatataagaagtcttgtacaataactcaaactaccatatgttaaggttgggccactatgaccatagactatattggactaattaactagataatcaaaatattggactaaatatagtaaaagcctctataaatagtagaagctagcctatatatatttatatatattataggaggttggatatatttttttccctttgtacaatttttatatctcttatcaattttcatctgattacagcaatcttggtattactagaaagcttatttgaatttctatattttacctgaataaatgtaggttagaaagaaattaatattttgcaattgtatcttgtaatttatttctttagtaatgttctaaaaatttatttcaataaagtgtctataaagtgtttatttgtatttacaatatttagatgtatcgttttgtcaattatattcattaattttgaaaatataaagatattaccacatgaattggagaaagaaaagttttaggtttgtaaataatgtggtacaattgatgaattgaatttgaaatattgtaaaaaagtgtcaatcattttatgtattgctgtcgtaggatttggtgcctcaaatcctatcacaggctatgtcgttgtaggggaaggaactctcatgctcgcaacgtcctctttggggtcttcacggtctttttcgcttatcttgaacatgtcctaaacacctatttacaacctccaaagtttcctcaaaacacccatgtttgcacttcccaaagcgcccatgttttcacccctctagacaccttctcgttagtcttgcaacgctcttgctgtaggtcctctggaacactaatcttatgttcgcaaagaattatttattagtattttggttataaatttgtcaatataactcgaaattagacaattcaagatatttgagaaaactgagaaaacgagatctacaactttcatgtttatcaccaaatacaattttaaatataacgttgtcgaaatccaccaacaagttcttccttattatttggtctccctaacctttctcgtttccaccaacatccattagaaacacttcaaataatttcaaacacgtgattggcctttcgaggcctctcgtgaggtggtgtcttcgtaatttaggactacttcattcaggataacttcgatattaaactttataaaattaggttaacaaaaatataaaataataacaatttaattactacaaaatttttatatttaattctaactaaatataattataaaataataaaagaaacataaaagtaaagtatttattgtgatgcaaattttacatttatatatagagtaatttgcggcataaatacttaattaagtttaactttcggttacaaataaatacataagtataatttttagtgataataatacttaagttataattctagaacttcattacatactaggcttgtcaagtaaattaccatgtgccaatccatgattgattcagattattaaatttttatttttannnnnaaattaatttaaatatattaataaaaaaaataacacatggataataacttgacatttaatagtcaggtatctacagagctttcaaaaatataatttttgtattattaccattaaaaattaaatttaagtatttatctgaaataaaaaattaaacttatatatgtatgacacaaattactcatatatatatata

SEQ ID NO: 38851 - DNA, 1881 bp, Cannabis sativa
  modified_base (1852)..(1855): a, c, t, g, unknown or other
gatttgccagtaaactttccattcttcccattcccttgcttgtggttgttactggaacgcttaccacttgagcttgaattacttgggtggctaacattcccgagttattaattcattatgtgtgctcattttgctttgtttgtggaaaagaaacctttagcctttttgttgttgttgtatgtttgggttccaaattcgttaccacagcaggctacttcctggtagtaaccttgatggtgatgagtccaacggggacctctccaagaagtcatgtgggaggcttccctaggtaccttatttgtcatttggatgtagggtattgactacttggaaattccttccactttttcaatgtcttacgaaggcagcgatttccaactggccttagtgaatcttgaggagattcttgagacattgcccatagaagtgcctcctatagatgggaacctcgaagaccccattctagatgaggaatctgcagaacccattcaatctaagtgacgtcgtaaaggcaaaggcattgcctgcattgtgtctctggctcctctagttctcaatgattttatttgggagatagatcaaaggccatataaactaagcaactatggtctccttgaagcatattcaactgatggaggagtacaaaagattttaggaattatgtggcaccggagatcatttcttggggcatcaacatcgcaatgtgtggatggcttcgaagcttggagttgggcccatatctcttgcgaagctcaccacccacctaggacttattttgttgaattttgcatcaaggctggatcactcccttgcagctcttgccggttgcatacaagctatttattgggtggtttgtattttttaggtccctgggacaaactactctaaccctgagagatatactacatttctatgaattaaaactccaacccatgcatgaatatcctacaaaaattgggttttactgtttctagaaatacaaacatgcaaagtgtcccacgaaaacttcttctcattgccgagaccattgcgagtattgattttgcacaacagggtttcccataaggcgtgttgcaatactctccttggactttaaatttccaagtataatctttcactcctttttatttttatttccttgattgacttgaaagatgaccctattacaagatctaactcggatttgtttcttgcagagtcttttcccagaatagagctcacggatgagttaaggcaacaaatcactttctatgagcctttctccaaggaggagtagagggtaaaggaactggtgaccattgagttgttacgctaatacgacctcatagccacattctaacgcattcacaaagtgaatggaaggggtcaacctcagacccctagtgacctcaaagagcaaacttcctttgaactgttggttgcgataacaaaatttgccaaggatgaggaacttcttatagctgcctggaatagtcaccatctcaaaccgctcgcgaaagaagaggaaatctaggctaggttctaagcagcatatccacatacgagcagttatgaagcgagtactttgggaagaggtaatcagcccttccgcgtaattcgtaaccccaacctattttagctattgttgatagacgaagagggttttgaccattctttcctaagtcgagatcctcgtagatatgcaaggaaggattacattgatagggtagaccaactagctaggcactataagaaccgaggattcccccaagcattgttaaagtgggtcctttccttactatgttcttctcggacatcagggaacatgacaacttcattgatcgggaagaagtaactgttgggttttatgccnnnnataaaactctttacaatctgattagt

SEQ ID NO: 38852 - DNA, 2739 bp, Cannabis sativa
acgtgtccctgtctggttggtccacgtatattggacaaaatcaggggcaacagtaagcatcttccaaattgatgaagccttgttcccttgacataaacttgaacaaggtctctgccctcttcctttacatctttccccatatcagggatccaaccgtgagtccatattgtagggctacgagtttcatgccgtcgctcacctttgtcttggcgctacctccatcattccctgaataaacttctttaggttgtctcctgcctattatttaacattggtgatagaccctacatccatatcataatcttagacagctatgaaatgcttctataaggctgattgtaaccctttctaattatagattgacttgggagccaatctcttctactaatcttcatctgacttggtaagtgttagggaaaagcataagcatttggcatcatcacttactctggccacttgcatcatctaatatatttagccaggtggtccttgggtatatacgtccatcgtacaactcaatatggggcatcttgaagttctctaggagtggggcttccgtgataatcctaacacacaactctgggtcctcatcttctgaatctatgagggtcccactttgcttacagacaagttttgtcagagcggcaatctaatctttagtctcttcatgtcactcttcgggaggtcacatacgcgagtttgtcgtttagatggttcttgagatcattcccacgtggccttactttctctcccttagatttttcatacttgacgtcgagacactttcgaaggtctacaatggaccagctgttctcagagtactgtcctccggtcccactatcctggttaacagaatcattggggcagtttttccttcccctgagcctgggtacttttacaccaatcagttttgcacaataggaccttttagagcagaagggcgtccaagcctagaggcattggtagccttctgaaactgcacaagtcagttggctggatttgcacatttcttaggaggtacatgaattgtcgagttttgagggtcacctaccttctccttccctttatccttcataggagctgaggtttcagcgttgttttttcaacaagttccactgagggttcttcttctgaatcctcttctagatctccgaatttgtcttgaaggcaagccatcattctctccctcttttgagaaagcttctcttgacgggctaacttttcttgggtctcttgcagctctttggacacttgaatcactttggggtcctggccataataataaccatctgctcattataataaccattcttataatacctgctcttgacgtacactccatcatcatcttcctcctcctctttagcatcttagtctttttcaacatgtttaggatgcttctttaggtcaccctctcggtcgtcagcttctgatttatccccttctctcacattgtttggttgggcatgctctagagatagagggtttacatcttccatgacaacgttgaggccaccttgaggagtcttttttgtaattatttttcaagtagccaccataatttcagcaaaatatttaccgagattttaaaaaactaataaaataagagctaaagaaataataaatgcagtaataaggaagataaggattttttatatagttaaagcgttaatgagccttagtccacaagttagtttattggccttcagaggcttgtatgatgtttttacaatagtatttacaagaaactctaactctgctctcttggtgtctcttgaagaagaagaaagcttagaggaaattttacagagcttcaactatcttgttttttatcctcccttgtatggaaatcaagaggtatttataggctaaagtgctggtatggacatgcccatgacccacctagggtttctggaaaaagcccattattagcgtaaaatacatgtaataatctgactgttgggccccaagaaggtttttgcttgtgcgtagaagaagctgggcaatggaggaccacaattggtataggacacgtgttgctaaaaggtttcactttcaaaagaagacacctagatcaattgtcagacaaaaaggcatgttcagaggttgagcgtacgcactaccatggtctgacacaggggacaagatctgatcctgtgtcagagaaaggtataaccgttgctagggcgatctgggtctctcttcatggtagacgtctgccttcttttgggcggttagtgtctgtgacaggcccttccagtagcctttcaggtgtcgcttggacataccctgggcctagctttctctaaattttgaaagggtagtaaggcttccaaatcttggatggcaaggtgatgctaggcagatctccgtatcccggtctaattagagcttatttagtgaccttttgaggctgtacttttcttttcatgccacgtgtctctcattcgaaaacacggataacacatatatactatatataaacatacatacaaatatacatacattggtatacataatatatatacacatacacacatattacatatacatacacatacaaatgcacatacaaatattacataaatacacacccatacatccatacatacatatatatataatatacaaatacaaatacaatacacatatacatacacatgcacatactgttggtttttatgccctaaataaaactccatttcaatataatctattttatttaacatcaataaagaa

SEQ ID NO: 38853 - DNA, 4739 bp, Cannabis sativa
actttattgatatagaataatctagattacattgaaacagagttttatttagggcataaaacccaacagtttatagatctaaagtgctagtgcaagtgctctttcatggatccccaaagtcaaaaataaaataaaagcatcatcaattataaaaagctctctagaagcaggacgatgcatccagtagagattttcttattgattataagaaactctctcggagtgggatgctaccacagttgtggtattcttcagtcgtgaaactcctacaggcctaacatctgctactcttagttgaacttagcaagagtttagtacaatctttgttttttctttttcctcccttagagttttttctttaacaaggttcaatgagttaaaatcatcaagcaaaggttcttcaataacttatgatttcaccgttatacaaaagatctggctggtttttctacactactcttcgacagtgattcatctcacttatgatgataaagtgaactgatgcttgaacagtaagcacaaaagccataacccactataccttgacagtagtttatctcactactagcaaattgcgtcaaccaacaaacttcaaagcatctccctagtcactaagaaactgacgctggggggaaataacatcagaactaaagcaacctctgagctatccttttaactccctaccttcctgtctagttccttactacaacaggcagcctatctggttcccaatagcgacaagaactgattgcatcttcgattgacaaaagaacgacccgctaattagcaatgtttgaatcacgaacatgatgagggaaaatgtgatgattaatgatgaatcatcatcgaataccctttttaaacagaccctagaaacaatgggtttgtccctataagaatctagggccatgcaaacaactattgtatggtttcagaagatccgacattgctctttttggtgaaatcatattatcactaatagtcaaaataaccttgtagcagaacgccactatgagtaccttcatagtgattgacacaaagtctccttagaaggtcaacactctatgacctctgagctatctcatctatttaccacctatttgtcaagttcttgacaacagctagtatgatcgtctccttggaaaccaaagagtaggatgcaaatgttacaacacattgttgacatttaccaagaagacctccttagatgtgctaacagctgaggggatgaagaagacctcttctgctatgctaacagctgaggggatgaggaaggctaactccactgtcaagacagtcaaagggacagagaaggcctctttcattgtgaatacaaccacagtgatgatgtagacctctatgattaagaccaaggaaaaatagataccacacctactatttcttaaaggtgtgccaaagatagggaggatatcaccctctatcttggatacattaacttgggagttggccgtatctttaatcaaccaaagaacaaccagcgactactataacacttcattgatagttgctaagaagacctcctccactataaagttgaggagatgatgaaggcctcctttgttataaagctaaggagatgatgaagacctcctccgctatgaatctgaggagatgacgaagacctcctctactataaatctgaggagaaaaagaatacttcttctgctgtaaagccatggagatgatgaaggcctcctaggctgttaagctaaggatttcacgaaggcctcctccatgtgaagccaaggagataaggactacgtgagttgtaagcacaacctagataatgctaaagacctcaaaggatgcaacctgggagggaacaaagactacatctatattactcaaacaagtagtgtgagaagagaaccaatgctaaaaaatagccaaagatcaaagctagtgttgatatgatttcacagtatgtcaaaataaagagaatcactcaagaagacaatcagaagacatttgctaagattatcaaaatcgatgcccaattggaagtttagagagaaataggcttagttcacgtcatcaagttaacctcacaaagtgtaaagtttacttgggggaaaatatttacaccaaaagtaaccctagtgatgttgacatcaatgtttgacatgtggcaagaaggaaaacattcctagagttaaggaactcaagtcatatcagttatgttgggaaatggtccctagccttgtgcctaggttgaccttgaggctacgaattggatttttggatcctgccaagttgtttccaagtaaccatcctttagtattttgagtcatgaagaaatgaagaatccaagtacgaggattgaaagctaaaaatacacaaaaaaaaaacacctcgggagtcaactcgagcgcctagggtttcacccagtgcccaggttgaccacccaactagggttttggtttttggtactgtcttaggcaaatgggtttgtactgagacatgaattagacatgtcacaaacatatttgaggcatcagaatcaaattcagagaacttttgtttttgagcacccaaagcaccaggtgccccacgcacccaatgctcaagttgagatattgtcaacctggggcacttctaagcatcaaactaaagaatagtccaaagaattttctttgacttcatcaaaaatgaagaaacaagtgcttttgggagagaaacagaccaaccgtgaggctagaatacgggcctagtgcccaggttgacagctggagctcgcatagcgccttgacattttgtcaacttgggccatttccgaggagtttttttgagaattcattcgagcatattatctattttcgtcaaagatttagatacaattatttttggtaatcaaacggaaccatttggtggcttgaaactggatccaatgcttaggttgacacctggtgttgggcccagtgcttaggttgacattttgtcaaccttggttgtttccaaaaaaaatcttaaaaaagtgtcttgggcatttattctgtcatccaaaaaaaacaaggatacaagtaaactcagggagaaaaatagaattccaaggggcaaaatattgagcccagtacacaaggttaccttgtgctaggcctagcgcccaagttgacaatcaacctggtgtgctggcttcgatcactcaaatgaaaattctactccgagcattctctccaacatggtcaaaaatggggtaggggacctcatcctcaatttcaagaactttagaagtatcaaaacgacatcccggaagctctagaaagagcagccgacgcctaggttaaagtatgacctagtgcgctggattctgcttatctgattctgtctcaagcgtttgcctagtttttcatagtaaatgaaagctagaactcattcaagtcaaattcacaacttaatatttttcagtttttttggcaaagtgacttagttgcaaattgggtagttttgagtcagtctcttgatttagcaaaacaacaacatcttcgagaaatggtaaacaacttgacaagaacaaagaaattgactaagtgatgtcaaaatttcacttaagcaataaaaatagatcccgaacactattttccactcataccgtgtccaggttaacgtcatatgtcaacctgggtcctgtgatgtcaacctgggtgctagtatcaaagaaaccatcagtaaaacaatcataactcacttaatattgatctgattgatgcaattaaacatgattttttaagatatgtcaatgctctatcaagttatgtctcatactccaatcgtaattctaaaattatcaactccaaattttattctcaagagagttacgaatttaggctacaacttactcgaagcgagtcccccggacgcgactcatgctccaaaaattgacgatcgaccttcaaagtcaagttcactaccggatcatcatcaacggtcaaaaatagcctaaatgtatttttctatatttttttaaatattatatttttatttgaataggacctcattccctataaaaggagagctcctctagctcatttttcacattcaaaaaaagtactcataaggtgagagcatatctctctagaaattagagctttcatacttagtcaattttcttgtaattctcatgagaaataaaaactcgaagtagacgtaactccattactatcgtgacatggggagtgaattattataaattttttgtctctcaaattatttacttacattcattattcgtctcgccaatatagcaagctagtgttggtaacttttcaacgtcaacataatgcaagaattaaggatagagcaaataatgcttgttgaccttgaaaagtgatcaaccgataatggggtcatatgaatttgatgtttgccacgcgttacatagttagaattaaaaagtgaagaacacacagaattttatagaggtttgtccccttagatagcgggtaatgacctactccctttttagttgtattgataccgagggataatactattcagatcactataggtgggatctgatatagctctcttaaggatacaaagtgagaatcaaggttggcaaatctcaagtgtttagaatgcttgcatgggcgtgtgagagagagtgaggaagagagttattagacttagagatttaggcctagaggtttattacttggaggctagaatgagacttaggttttctaggttagagttaaggcctttatataggaaagcctaaa

SEQ ID NO: 38854 - DNA, 4280 bp, Cannabis sativa
aatattgtatgattgataaaaaaaaaaccaatatgtaaaaggggttgttatattaataatttatttaaaaaaatattaaggtatttttatttttatattttaaaataattttttttgtatttttataaaaatttatatagaaattcacagaaacgaaccaattaaaattgtaatctaatctttaaattaaaaaaaaaaagttaaaaattagtaattttctaaaaatatatatataaataattttttaatttactattattatttataaaaaaataataataataatattttaagataaagtgcggcttaacggcaccgtttagaacaatttacgggttttgcagatatataaggccctaaagaggaagtttgaaacccttggagtctagattgttaattgatcatcaccaaccaacagcgctgaaagcttctgaatctcttcgtcatcttgcgattgaagaatgatcgaggtggtgttgaacgatcgactgggaaagaaggtcaaggttaaatgtaacgaggatgacacgatcggagacctaaagaagctggttgcggcccagaccggaaccagagccgataagattcgaattcagaagtggtacaacatctacaaggaccatattactctcaaggactacgagatccatgacggaatgggtcttgaactctactacaactgattcatccttcttcttccgtaagtcgtcgtcttctttttcttcctaaaagtttttcgcttttgttacttatatataccctgctattaaatcaattttagttgcatcttggttgagaaattggtactgtgatcatgaaagaaggagaagtccatggaaattatgtggctacaatagggattttaggaaaattttgagtttatgatgttatggtaacagtgatttgttcttcttttattttaaaaaaaaaaaaaactttattaattgattagactagtttgctcagctataacaacaagtttttagtaataccttgttggaaggaatattaggaggcatactaaatcactgtaactcattcttttctgttttattttcttctttaaacaaaactcagtactatgagatcgatatgtgttgtgtaattatttaacatgattagttatgtaaagtaatcatggctgtgagattggaagtattattaagaattttggtgacaaaagaggctgggaaaataagagtaggatggatacaatttgcgtgaacggtacattgttgagtgtaaacacagtctcaatctcaagatcttcagagctttactatgctttctcacgcaaattgtacataagtcagaagaatttaccatacatatagcatttgcttttcatatagattgcttatgtttggagagtaaggttaaatacttttctagttagagaccaaggatttagggctaacatgggttctgctcaggaactcaccaatttaggtaaaggctaattaagatttttcgctccctcagtttgatatgtaccaaattatacttttcaggcctttataaatttctcccgaactattttagattgttaaattcaaagacttagctctggtcaattttactaacatgggagttatttatgtactaaattgtgttacttgaactttgatatctaccaaatcgtgtctccggaatttcgataggtaccaaatcgtgtaccctgaactttcatccacctcaactttcattagtaaaattagacaaaagtcaaattttcaaccgtctaaaaagttcagtggaatatgatttggtacatgtcaaacttcgaaggcaaaaattctaattagcttaggtaaatatccaatgcattcacctacagtgtagttatttttgttggggaactatgcatttttgggatataggaccttgtgattttctattgtgaagttggaaagatgaatccagaattttatcttatcaaatagagaacaatttacagtttaacatctaacttgttttctattatttaactttttgttgtcaaataatcaactttatcattcttttacattttctcttatattttttcaatttataatcttatcgaatgttacttcttcaaccaaacgtgactgtattgtgtaagagctaaacgtgactatataagcctgtgatgcagagatggaatgcagttagattgttggttttcttttttttggtcaattttgagttattgacaacttgtcttcttttcacagggttatacaccaacaccagtggaagttattaaatggatggaatttctccacctcaaacctatgggagtgaatatatgggtattgttttgacatgccaatatgtaaaaactgttggtcatgtaaagtgtagtcagatatggataataatattaataactgtgtctgtgtgtgaaagattagctatttagcctattttctgtgctacgtacttattgttatatgtggcgtttatgtgggtactagttaggggtgaagtaaagacctctttaaattagtctatgcactctatttctattctaacacaaatcttctaaagagatcctccacaaattaatcatctgaaaagagttattgcaaggttaatgagttttggtatggatttttaaagaatataacttgcgttacataaattacaaacaaatatgacatattttaagataggttctacttattaaaaacgacttcacacttattattactgttccttgtgcaatcattacttatatttaaaaaaagtttggtattaataattttcaccgaaatgctaatatgagcatctccggtaccaaaaatcatctagtgctaatagcttaaatgaataatgagacttacatatttatattaattaatttaatttgaattatgttaattagttataatgggtagtttttattagtaccatatagcttgtatcaatgccttatttaataaagtttgtgacgtaagaacataatcctaatttaaccaaaccattataattttggtactagctcaatatttttgagctctcaaaccaaattttgatggaagaaacttgaactatcataaaatttggttatttatttattgagtattgttaaagatatatttaaattagacaatattaattaatgtgtatttaattttaatcactgataatttcaagtataaattatattatttttttattttataggtgagattaataatacataattatatataaatagtgttttgtaattttaccgaataaaattctctcattttttagaggcagcagatccgtggtgggaaaaatcaacaagagcacaagagtcacgccttcagaaacgactgttatcgttcaaaattgaaaaggaccaattcagcaaccccagaacccaaatccaaaaaacgtacctaaaataatcaaagtaccctaccacaacaaaaagagacacatatacccatgtgtacaaattcactcacaccgttgatatcacttacacatgtactgcccaccaactcattttattttgtatattgttgtaccactaccaccaaaccaaaacactaccacagccgtcaatcattacttttgccaaaatttggatcgtccacttacaataaacatttttcaatgaatagttctcaactttcaataatttactttcgtcctactaatatgattacaaattcacaaacaatcaatatattgagatctgtttcataatgaacgaaccaaacgagtaacactgttatatatatgtatgttggcttcagatacaataattgattcaattatggaagttgctttgtttatatgtgccttaaaaaataaatacgaaaaatttgtggtttaaaaattaaaatttaagtaaatttatagctaaatatctatattttagatttactcagtacttaataaaatatatattttttaatggtgaaattactaaaatatggaataacaatatagtggcacgttatttttaattggtcaaaaataaaatttagtggttcacactgaaataaaaaaaaaatctgatatttttgccactattttttttttttttacatatttattgattagtaaatatttttccgtgtatgcacgcgagtcaggtgtgcgcataatttttagtgtagtggtaagaagtattattttaaattataaggtgaatagatctatttttaatatctactttttatatctttaaaaaaatatctaatataaactatgaagaatggagtattgaaatccttaaaatttacacaaattaaactatttacataggcaccaaaatttaaatttttcttaggccc

SEQ ID NO: 38855 - DNA, 2081 bp, Cannabis sativa
  modified_base (1056)..(1071): a, c, t, g, unknown or other
caataaactcgaccccaacactaactatgggttgggtttgggtctcgagtctcgagtccaaggtcatgggtcccgagttagggtttgggtctgaatttggatcctgggtccttggttccgggtctgagtctcgggttcggatccagggttatgggtcctagattcaggtcctaagtctggaccccaagttcgagttcgagtctcgggtctgggtctgggtctcgggatccaagttaagttttttttaatataatgaaacctaatcggattagatccgatctagaaaaacaaattacgaagcggagcgaatctgatctgagatccaataactatccgaatgtttcggatcagaactccaacccgatccaagtaaataaatctttttgacatacctatatttgataaccattgatatttattgttttaagatggatatcacactccatcatcaatcaattcgtaattgtaatatggttcaaatcaaacaattataaaagtactttaatgtgttacacattattaaagaaaaataaatggctcatactaatttttcctctgaagagtcagtcgaatttcgggtataacagaaggagagataattccaatgtaacatgagaaaaaatttaatgattttgatcattttttttttttttgcatttttaatttaatattattctcattcctattcccgttcctctgaaccctgaaccctgaacccaaaacaaaaccccctaaatccctaaaccctaaaaccctaaaacctaaaaaccctaaactctaaatcctaaaccccaaaacccaaaccccaaaccccaaaccctaaccccaacaccataattccctggcccattcccattcccatcccaattccaattcccgttcccatccccattcccattcccattccccggcccattcccatttctatttccattcctattcccattcccattgccattgccattcccattccccaaaccccaaaatcccaaacgccaaaatttgaaaaccccaaaccacaaacaccaaacccctattcccattcccattcccatnnnnnnnnnnnnnnnnattcctattcccattcccattctaaaactattcccattcccattcctattccaattctcattcctattcacattcacattcccattcccattctctagcctattcccattctaattcccattcccattccccgacccattcccattcccattcccgttcccgttcccattcccatttccattccctagcccattcccattcccattcccattcctattcccattccccgacccattccaattccatggctcattcccattttgattctcgttcccaatcccattccccgtcctattcccattcccattcccattcccgatccctaatccccattcccattcccattccctgatccatgcccaatccaattcccattccccatcccattcccataacaattcccaaaaccccaaaacctcaaacaccaaaactgcaaaccccaaaccccaaaccctaaacccaacacccaacacccaacaccctgaaccttaaaacctaatccctaaacatagacccttaggtggcttttggttagaggtaataaaatggaaggaaaaagaaataagttttattccattcttttgtttagttgcattttaaagtattagattgtcattccaatagaatgcccattccaccattttggtggaatgaatattctattttgaaatggaaggaaagaccattatcatgtaacacgagaaattttttaatgattttatcaattttttttttttatgaattttaaattttattttattcaattctcattcccattcccctaaaccctacccctgaaccctaacccctgacccctgatcccaaacccctacccgtaccccaaccctgcccctaactttaatttctaacctgtaaaccccaaccccaaccccaacccatccctaaacccaaaactctaatggcatgtttacttaaagggaatgggaatgaatggtatggtattgattcccataccattgtttactaaattttggaaagggagaaagtag

SEQ ID NO: 38856 - DNA, 2333 bp, Cannabis sativa
  modified_base (2306)..(2307): a, c, t, g, unknown or other
gaaggacttttaactccaattctagtggtttctcaatggatggcattaaatttattggaatcactccaagctcttcaaaacactttaggttcaatggcccataagaatccagccccaaagcgaattccctcgcatcctttccatcttggtcaacaaaatcctctcgcactaaagttagattgagagggtcttcattaggcttcctggtttccaccacatcaatcgagaaacaatcatcactagttatagccttgagtacattgaacactactttatctccttatactctcagctttaactcacccttttgcgcatcaattagaatttggtgtgtcgccaaaaagggtctccaaaggataatgggaacattgttattttcctccatgtcaagaactataaagtcagctagaaaaataaaattctccaccttgacaagagcatcttcaattacccccttggatgagccaaagaacagtcagctagttgcaatgtcacggttgttggcttggctgatccaagttgcaatctcttgaatacttacaagggcatcaggttgatacttgctcccaaatcacacaagttgttgatacactctattcttccaaaagtgcatggtatagtaaaactccctggatctctcaatttaggagggggtttatttgtaaaattgcactacactcctccgtcaatgccacagtgtcaaattcatccatctttattttcttagacagaatgtctatcatgaattttacataactcgacattttctccaagtcctccgcaaatggaatattgatatgcatccttttaaacacttctagaaacttactgaactagttatccatgttgcttttggggagcctttgaggataagggatcttgacatgatgcttaatactgataggagaagaggcttcttttatttatagaccatcagtagtctttttttcctcttgtactagtgcttgtacctgttgatcctgaccctcttcttgagctgacttctattgactcggcccgacatagttcttcccacttctcaatataattgccttgcacttttcatttggattgactttaatagtactaggcaaattaccttgagttcggctagcaatttgagtagccatctgtcccacttaattctctatagttttaatggaggatctaggatccattatgaattagagcaataaatatgttcaaatgtttgaccctccactagtacttgattactgagcaggctgttgaagacatctttgaagtggtggcctatttctttaatgaaagaaaccttgctgaggctagccatatgtctgcacttgaatataacgaagaactccatcagtagaagtatagtaaccaaccttcagaaatctaatggcttgagcttgctccattgggagactattcacatcaactggacaattgtcataagagtgaggcccaccacataactcatagattaccccggcttgttttacttgtgctgtcatcatcttggcaagggcttctacttgggctgttagctttgtaatggcatcaacttcatgtaaacctatcactttctttgattggcttctctcactcagccaatgttggttattcatggccatctcatctaatagctcataagtttcattagaaattttctacatgaaggctccaccagaagctgcatcaatgagtgtacagtttgtacttgtcaacccattgtagaagttgtgaacttgcatccacttctcaatcccgtgatgaggacactttctgatcaggtctttgaatctctcccaggtttcataaagagactcattgtcgtgctgaaagaagttattgatctctgatctcattctgacaagtttggccagaggaaaaaacttggagagaaattttagggtcaattcttcccatgtgttaatggagttaggtagcaaagacaccaactaattcttcgctcgatccttcagtgagaatgggaatagcttcaactgaattgcatcatcgctaacccctttcatcttgaatgtttggcacagctcctcaaagtttgcaagatgcatattgggatcttctgatggcaatcccttaaactggactgtggattaaaccatctgtaatatgactggcttgatttcaaagttgttagcttcaatggcgggtggctttatacaagatcaagcccctattaggtttgtagcacacagtcaattaggctacagtcagatgcattgcgaccattagcctagtcttctacaacacctttgttattgcctttattagccatatctgttgggttttatgccctnnataaaactctttacaatctgattagt

SEQ ID NO: 38857 - DNA, 2430 bp, Cannabis sativa
gaacaaataaaaatggaattgaggcttggttatttgtgttaatatgtagcaagtttttatattatttaaatttattttatatatatatatatgagatataagtataaatatgtgaacttttcaaaaaaaatatatatttatatattatctaaaaatttgtacattttatgttgtactacacgtgatttaatccaactaactctttaatctggaagaaaaatttcaagtagaagtatgtctgataggtccatataaaaggtgacagccataagtcccacgtcccttaaagcatttggccgaatcatcttcttgccgaccagagaagatgggagcaataccttgtaagggtgattttacaagcaaatcccataaagtaaacaagtctggtagaaggtctagccgggtagtgaatatgccggccaaaagaagtgctgccagggatagcagacaaagctacacaagccttgattttcacgtcagcaagcttcataaatatctcaaattgaatcctacaaattcggatccaacaaatcttttcgagaataaatgagcttcaatagatcgtaactgcaccttagaatataagatatttattctttgtttgctccttttatggagctaaatgtaataactttcccaatgaacgaatttacaagggaaagggacgaagacctagacctaaaattgtactcacacatctaagatcattttactaaaagatattctctataaatactttgagagtcgtaactagaatttactttatcttctttagtgatttgtccaagcattatctcataagaaatcaaacatttataaattctttgttctttttatttagttattattcttattatcttttcactgtgattaaccctcgattatttaacttagctatttttacagccaataatatatataaatgtgtgagatatgatatggatttacactaataaatattcaacattctaagaaaaaaataagtattaaaacaatttaaatgctgaaatacacccataaatcttttctttttcttaacaaatacacccataaatcttatttgtgaatttctctacgtcaacatttcttacaaatccattaattttttttgtccacactcggaaaaaaaaaaaaagaaaaaacttcaagaggcaacttagcgtccaagcgatacagtcgtgtacataatatatacacacaagatattttgtttttataaaaaaaattggcgaataaaagaaaatataaaaaaattaaataaaaagtgtggaagggataactgaaataaccagaagcaaggaagagaaggtctggcgttgaatttcccatttggttggagtttgggtgcaattcaataatggtctccgcctcactatcattactccactccactgctttctccgattcatcatcatcttcttcttccatacccaccagaagaactgggtccaaccccaacccttccctcagatattccaacattcttaaattcgctcccttgaaggtgaaggctgttgcttcctcctctgcttcatcaccatcgccactcgaggatggctctgctgaccagttctcgcagagtagttcaattgctgattttatgagattcaaacggggtgctgttgatgtcagtaatggcgaattgcagactgccgttgtttcttacaggaagaagtttccttggtcaattttgcagccttttcttcaggttttagctccacctttaacatttttcaattgggggttcttgtgtttctccatgggtttttcttcttcttcttcttcttcttcttcttcttcttcaattaattggttttgctttgtcaattttgtaggttgatttggtttccaccattcacatcgcggacaaagagtatgtctatgtatcttctttttcttttttttttcctgtgtaactttgtgattatcaaactaaggagtagagacttatgtatgggtttcaattcaaacatattgtactgaaaactgctcaaagccaattttaaataagctttatttcaagctttggtagcgaaatacttgctataaaaaggaaaaaaaaaaaacttattcgattggcttgtggatactacatactagaatgctaacgatgttagactaatatatgaatatgaggcacaagaagattaagaggttgatgaaggtctcaggctttaaagtgattaagatgattgttgaaatttatcactaggggatcaattaggtttgcctttttttgttttgttaatttattccaaatactgtgtcaggtactttaagacccttcaggaggaacttgagtcctatgattgtgtcctttatgagatggtagccagcagggagagtttagagaatagaaggaattcagctgtaacaaagaagctgagaagttcccggtctagaggatttaacattctaggatgcattcag

SEQ ID NO: 38858 - DNA, 5406 bp, Cannabis sativa
ttaattatatcttttaaataaaataaaaaataactaacataaaattagtatacgttatataaaaaaaaaaaaaatagagccagctgtcttctttttagctctgtcgaaaattaaagtgaaatatatcttcatttttgactttttagacaaattaatgcattgtgtatggagataaatcacatatttttacacacacataaattatcacctaattttttttttaaaataaaaacatgcgttcgttatacatatatatattcattacatgtaaatttaattagttaagggtttagtgcataataaaaatagtcgcttatatataattaaaaaaaaatacaagatgctattctttaaaaaaaattataataagagtgtctgccgtttttagtgctctgtggcagttagtgtacctatatggtttttttccagttttttatccacatcttcctttttctgggctcctttcttcattaacttccatccataactgcctcttttcacaggctatttccaccattactttgctgtgttccttctaccatggatcctctaactaataaaatgaaaggtgtcatcaatatgactgaagaggaaggatcagtatttgattttgttgaccatgaagctaatattgaaacccctgaaagtcatgtattgtatgcccgtgttttaacaaccaagaaagtttggctttcaactttacgaaatcagatggccgaacactgggatggacgattcccagttaaaatttctgagtcctctgacctgtttttactcacctttgtttgtgaaggggacaaagtgcgggtcttgtctcgtgaaccttttcacttccaaaatcatcacattgttttgtcttcaccaacgcctgggcagaataccacctctgaatcactcatttactcgcctttttgggttcagatatacagactcccatttcttagtaaaactaaaggattagcaaaagcattgggcaacatcataggtgaatacattgatgtatttgagatttaaatgaaggttgggggccttttctgcggattcgagtcaacattaatatctccaaacctttgctgcgtggaaggttgatcactttaaaccaaattcgagatgaattttgggtcgaatttcggtatgagcgcttgccagaatactgtatgaagtgtggtaaattgggtcatccatacaacaaatgtctgaagttcctagaattgcttgatatgggccaagaacctgaactggaatatggtccgactaagaagggatctgcactaccaacctctggatacgatcgctatcgcactgactttgctaagggtcaggcctggcctctcattactcgactggcaaaaaaatcccttacctctgcactaccacaaattaataataggacgcaaccaacaccaagacaattgttcccaggggaatcctctcagcacatcattaaggcagacaattctcacttggctgttgatcatgatcccaacactaacagccatgttagttttcctattaaccaaagttctgatcctttgtctgcaattaataactgtcatctgcatggttcttcaagttcggttgcagaccatttacatcatgctccgtctcatgttaaggatgtggacatcattgctgaatctcgtggaaaaaaagttatcactcatccagtgatttcattccctccatctacacttaacacaacataatttgttccatctgtggccaatagtaagactttatttcctaaaaataaactggaatattctgatctatcaagtgttttcactcctctgtctgctatggttaacccatcaaacacatttgccacttaccccccaactcaaccaccagtgcaactcagtaatgctattaccaaacagatttcaatgcaaatccctgtccataattctagttcttcatctgctgcaatatcttcagaacagttctctgctggcaaggaaaatgagtccccaaaccgtataataaaaagacaatcggatggttcatctttgagacattttctgaaaagatgcagaggtacaactccgacaactttctcttcaaatttgtttgctgaaggggaatttaaccagaatgttttcactgatttaatggattcaaatggtgatcaagacaattcagcggtggctgtgtctcagccccgcaaacagccatgaaaatcataagttggaacgctcgggggctggggaacccgagtgctgtccgtcatctccgtttgcttgtgtctgagcaatccccgtgtgttttatttattatagaaactaagttaggacctaattctatttcccgctttcgtcaaattttacatttcaataatggacttaaagtcccacgtgtcggtcgtagtggtggtctaatgttactatggaaagatgatgtatctataactcttttaaatcataatgcaaacttgtttgactgttacatggctgttggtaatgatcctaaatggcatttctctgcattttatggcgctccagctgctcataatcgtcacttaacctggactttgctccaaagacttaaagatgttgcacctttaacaccttggttagtcattggtgactttaatgaaattctatccaaccacaacaaatctggtggttccttgcgaaatgagacacaaatggacagatttcgatccactttagatatttgtcaactttttgaacaaccatttactggtgatccatttacttggatcaaggggaggcatacagttgacaccattaaagaaaggcttgattggtgttttgtcaatactcattgggctggtttgtttcaaccaattacaacacaacatttagacttcttcaactctgaccaccgagccatttcagtccaagtcatgacacttgctgcactacctaaacaacaaaaatcacatcggtttcgatttgagaaactgtggttaaaagaagaagaagctgcaacaataatcaaggatcagtggaagccttctcctgctggtaatgtcctggttgagtttaatcattgtcttcaaaaatgttcagactcgctgcaagagtggcatcaaaggaaatttgggaacatcaagaaaaaaataaaaaaccaacagcagcaggttgcttcacttaacaaccagcagactcgcactactactgctatcaatgaattaaagcagtctgaagcaattttagatgaattgttagcacaagaagaaacttattggcaacaacgttcgcgtgtagattggatgaaatgtggagatcaaaatacaaagttttttcatgcctatgcttcatcacgaaaccagcataacaagatcagtaaacttaatgatgctaatggtgtggaagtcactacaaaagaaggtctcacggatgtcatctcttcttactttgctgcacttttcaaagcttctccagttgatccccaagcactgcaaacaacactcaacaccattccaaccatggtcacagcagaaatgaacaattctttaacacaatcgtatacaagccaagaagtaattacagctttaagattgatgagtccagataagagtccgggcagtgatggcatgtctgcaatgttctatcagcaatattgggatattgtgggtaatgatgtcactaaagtcgtgcttgctgtgctaaatgaaggttattctatggactctattaatcgctcattgattaccttgattcctaaaatcaaattgccatctgacatgaatgcattcagaccaattagtttgtgtaatgttatctacaagctaatctcaaaagtcttggctaatagatttaaggaggtgctgccatcggttatctctgagaatcaaagtgcttttttttgctaatagactcatcactgacaacattttggttgcttttgaactaatccatcacttgaagcacaaaactcacggttccaaaggtttttcagcgctcaaactagatatgagtaaagcctttgatcgagtagaatgggtctacatttgtgaggtaatgcgaaaaatgggtttccatactacttggattgagactattcataattgtctaaactcaacaagtttctcatttatgttgaatggtgaggctgtgggaaatgtccaaccaacaagaggacttcgtcaaggagacccactctccccttaccttttcctgatttgttcagagggattgtcaagattattacagtatgaagaatctttgggcaatttgaaaggactccgattaacacgacattcaccttcaatctctcacctcctttttgcggatgatagcttattattttgtgaagccactcaaagttcagccagcgctcttaaaagaatacttgacatctaccatcgagcttctgaccaactattgaacaacaataaatcggtcatgtctttttctccaaacacaacacaagctgcaaaagatttattccatcatattctgggaatgccaatagctgaatgccatgaacgttatcttggccttcctgcttatgcaagtcgggacaaaaaagaaatgttcagtgatgtcaaagaaagaatttggcaaaaactacatgcttggaatgaaaaacttttttctgtaggtggaaaagaagtgctcttgaaggcggttgtccaatcaatacccacatatgctatgagttgttttagattgccaattacattttgtaaccaattggagtctatgatggcaaatttttggtggggggcaaataaagatggttcaaagattcattggaaaagatggaaattgctttgtaaatcgaagtttgaaggtggtatgggattttgctcttttgttcacttcaaccaggcactattagcaaaacaagcatggagaatttttgagtatccaaactcacttcttagccggttgctgaaacatcgctacttctccaataattctttcttagaggctagacttggccattcaccatccttgacttggcaaggtatacattggggaagagagctcttgattgaggggcttcggtttaagattggaaatggccacaatgttcaagctagaattgataaatggattcctggccattacaactttcaaccgatttcttttaatggtccatcatcactcacggttgcagcactcattactgaatcaagagaatggaatatcaatcttctgcaccagtattttcagcccatcgacattgacaaaatactgtccattcctctgagtttttttcccacacccgatcgattgatttggcaccatacaaccactagaatttatactgtcaattctggtttccatcttgcttgtaacattgaggaaagtatgaacacttctgcatcaaattcacattcagcttggtggaaaagcttttggcaactcaatttgccacccaagataaagatcttcgcatggaaagtaatgcaaaatgcattaccagtgg

SEQ ID NO: 38859 - DNA, 3040 bp, Cannabis sativa
aacgtgagacctacctgccgtacacggattccaatccgtgttttgcacatttgggcacaaaatcggctgcctatatatatatgttgaagtgtaaaaatgaaaaagccccaaaatttaaaggttatgtaagcatatttaatcaaatttcccaataaaaaatactcttgttcacatattgtctctcaatggggcatctctcctctttctcctcttcttccctttagaaacataatcgagaggtgacctcaacctctgctgccttattcagatacgccactgttttcggttccttcgatgacagccaacgccttctcgcttcccattttcgtttgccttagtcttaacaacatcatgtgcttcttcgatcttcaaacaaccatttattttatataaaatctcagttcaatcatagagccatggtgacctagatttgaaaatcatagagtcacggtgcttgccgaatatggatttggtctcggagcgtattaatttgcagtaccccgaaatccaatctaatctcacaactatattcatcttcttcatctttcgtattctcagtacccccaaatctaatctctcgcttgggtttatgatcaaccaaacacagctatggctttgcacgaccataaattattgaagctctccaagcaagtccgataagatcgttacatgaacactcaaacccaatcatcctactaattgatacttttgtcgtaaattaagctaattaattagcaaattaattcattgattgatatatttttatcaaaatagaattctttgattgatatatattttgatttggtcatgtactcatgtgtgtctattaagtttttgtttgacacatttgcttaaaggtttgaagcattcctcagacaattcaggagtcaatgagatttggaagaaactgttggcactcaaagtgcctcccaaagctaaagttcttgtttggagggcggcttcaaactgtcttgctactaaaggaaatttgtgtatcaagaaggttttggttgacaatgcttatcctttgtgtggagtgtttgctgagacggaatggcatattttggtgtcctgcaacttcgcatggtcatgttgggagtatgatggtttggctgctgctagaagagattgttcttccctttggtcttggctggccgatacattcagactggtagatggtgagtccataggcagagtggtgatgctgtgttgagccctttggtcagcaagaaatgatctcctttggaagcagcgggttcgaagtgtgagggatgtggttacatttgtcaattcgagtcttgatcaatggttgaaagctcaaggaaagggtaacattcccttgttgtctcctctcaaagatggagatggatcggagcaatgggttaaaccgatttcaggtatcaagctcaatatagatatagatgcaaccattttcgatcattccttcaaacatggtatcgagtgtgttgtcagaaactcaaatggagatctggttactgcctttgcttgggtcaaacatggtaaagtgtcccctgagttggttgaaatcatgggcattagggaggctttaagttggctgaaaattctcacttacacacaggctattgttgagacagacaacctagtctgtgctgaggcaatccgcagtgcagagatttttgcttcagctttcggtttggtggtggaagattgcaagaatatccttaataatttgttcaatgttttggttgtttttattaagcgttctgcgaattgtgatgcgcactttgttgcccggcattctatttctttagctgagcgtatgttccctattagtagtgttcttttggagttgatgtctattcttacgagcgattgctcgagttaataaagaatacttctttcaaaaaaaaatgtgttttttcagtattataatgcaattcatcatttggtaagtagtgtgagtcatctcaagaatttgaaacagatagggaccgttttgtatgcaagttttatttcatgggaataggttgattgtagagtgatgaagggaatgataaacttagaaaagcaacattaccatgtttggttaatattgaaatggaatgtgacaactttttctttacaataataattattagtttttttaaaatactaataatttaatattttttttctaagtgttcaaaataatttttatttattattttttatataatcttattaaaaaaattaacaataataaaagttataaagagtatatttatatacaaattgataatatattttataaaaagaaaaatacgtcctatatcattttttttaatttaggaaaattatttcatattttaaatattttgatatacattaggattcatctttttttaaaaaaaaaaataagaaaaatacttcatatttttatttgggggaattaatacttcatattttaaatatttttatatatattagtattcatatatataaaagaacaattttaaattgtaaaagtttgtgtgagactgccagtagcattagaaatcaattgcaagttaagtgaaaaccacattttcattgtgttttccttgccattaaactaaagcccaacacttttacttagccatataaaatattaaaaacctaaccaaacgcagtaaactttcagattcttatttccacttctcccaatactgcataccaaacaaccctttggtgtggaaaaatggcagaagaatggcttgcatcgataattttaggaaaacaaaaactgaccttattaagttatatatatgtccttgaacttttcctaagtttaattaattttcaaaggcaaatttttcataaattgtaatttcatgtctggagaaaaagtataaaatgaaaatattttttaagttttcttttcattttaatgatgattcaattttaatctttggatttgatgtaaaaattaatattaaaattaagaaactgctataagtagtattaattatgtggatgtccaaatcttttatttattaccattaatgtaatcaccattcccttttttttagtttcttaatat

SEQ ID NO: 38860 - DNA, 5036 bp, Cannabis sativa
tatttttgtaaaaaaattttgtaaaaaaatagtaaaaaaaaatagtaaaagtaatagtaaaagttaatataccatgtaaatttcccattaaatatcataaacatttttacattaataaataataaaataaaagactttttcctctaaagtgcttatataaggcaaatccactctgtaatattattacatcaataaagataataaaacagagtagagctttttactctgcgataactcatatggtatcagacgacataactcaatccattacaatggtgtgaagcactcgaggtcaccttagcgacacttcttctcagaccatccttgagccccaaatctcagtctgaggtgatgagcatgtccttgtcgactctttggtagctcctcctcgctgcaattcttcaagatctgatcgacccattcaggaagacccttcaagtcattacttcctgagtgccggagatcacttaggccttctctaggtctcttctgttcggactgaaatcaattactactcctggaaacgagccatatccatggcccttgctgcaaagaataagaccctcttcatcgatggtacactccctcgcccctaagctcgcgatccttttctttgatcttgggttcgttgcaacaacatggtgatgtcatagcttcttcaagctgtctccaaagaaattgcccaaagtatcatgttcttcgatcttgcagcagatatgtggaatgatttggctgatcaattcaaccaagaaaacggttcaagagtctttcaactccaaactaatctcactcatctttaacaaggcgatatatcttgacatcaactcatacttcaccaagttgaaatcatattggaatgaactgaaagaattttaacctgcgactacctgtacttgtggcgccatgcaaactctcctagactattacaatcgaaatcaagctctccagttcttgacagaactcaatgaatcctatgctttggtaagaactcaaatccttcttattgaccctataccttctatttctaagtgttttcaatgatggttcaagaagaaagacaacgcaccattggttttgttcttcctattgctttagttgcccatccaccaccagctccaaacaatccatttcatataaagaagcctcaaccatcttgcacttactgcaaaaaatctggtcattacatcaataagtgctattttttacatggattttcccttgtatatggtgacaagaagaaaattaagaatgacaaatctattgccaatcaaacctctccttcctaggatactactactgatccaacatcctctatcgacatcataagtcaccgttaagcaaaaacgtttgccatttatttctaatcataattttgctctgccacatttgatttgattcaccttgatatttggagacctttcacttccataagcatcgaaggctacaaatattttctaaccattgtcgatgataaatcccaattcacttggacatatctactcaaagcaaaatctgatgtccaaaatatcatactagatttttttttactttcatatgcactcagttctctgccaaaatcaaggttggtcgaactgataatgcaaatgaacttaatcttcattccttctttgctttaaagggtgttcttcgatatcattcttgtgtagaacgatcccaacaaaatttcgtaattgaacggaaacatcaacatcttctcaaggtagtccgagcacttttattccagtcccatataccaatttgctactggtcctatatcattaggactgccacatacttgataaaccgcaccccgtttgccctcttcaaagggctcacttcctttgaagtgctatacaacaaaactcccacttatgatcatctacgaagctttagatgtcttccctatgactctattctcttgtctcaacaacacaaattctcccccacaaagtcgtgcctccgtttttattggctatcctaatgggatgaaagcctatgctttgttggatctccaaatcaatcaaatatatcagtctcaaaatgttattttccatgaaaaaatcttcccatttaataataattcccccatctcatgtactgattttttttatcttaatgtgctcccttctaacagcatccctttaggtgtacaatctgacaataatcatcacacattcgcaccccatgcttctcccaatggatccacacaacccacacaaatatcttcaacctcaccaatcattactcgtactgggagattatctcacaaaccatcatatctcgatgattatgcttgttaactaactgttgctttagtttcaaccatgcatcccattgataatcatcttcattatactattcttccccctattttatagcagctgcccttgttgccaacactatcattgaacccacatcctatgaagctgcatcaaaaattgaagtgtggaacaatggcatggacaatgaaacacaagctttagcaaaagataaaacttggatagtcaccactcttcctccaggccataaacctattggctgcaagtatgtttataaagtcaaatataaccaacaaggtgaggtaggatgctacaaagctcgccttgtcgctaaaggttataaccagaaaccaagtgttgataacattcaaacatatgccctcgtggctaaattcaacactctcaaaatcaggttggcattagcagccatcaaccaatagattcttcaccaaatagatttcaatacgccttccttcatggtgacctccatgaagaggtatacatgaagcttcccctagttacaaaccaactcaaccccttccccctaatcatgtatgaaaactacagaagagtctttatggcctcaagcaaacctctaaacaatggtatgagaaacttagctctacctttctaattgatggtttcattcaatcaccattcgataattcgctcttcaccaaaaaaaaaaaaaaatccacaaaattcattgcactcatgatataatagtttctagcaacaataatcaagccatacttaaattcaaacaaaaactagacatcaaattcaaacttaaagatattggctcattgcgtttcttattaagatcagagattattcaaaccacttcaggcatatcgatatctcaaaggcccttcactttgcaattacttttcgagagtggcttccttggctgcaaaccaacccctactcccatggaacccaatctaaaactaagcaaagatcaaggagatcttctccatgacccttcctcctactgaagccttattgggaagcttgtttatctcaacatttcttggctcgatatctcttatgtcgtaaattgcctaagtcaatatctaacatcatcaagattaccacatctgaacgctacccacgtaatattacaatacttaaaaggcacccgaggacagggtttgttcttcccatcctctagtaccctcgcatctcagcatatgttgaaaccaacttatttccatctgcaatttgattgaaacttttttctgatgctgattgggggagttgtcaagatacgaggcgctctattactggtattatgtgttcttagaatcctctgtcgtctcgtggaaattaaaaaaaacaataaacggtctctcaatcctctgcggaagctaaatatcgcgatatgatacacgccacttgtgaagtcacctggatcattgccatactcatggactttggaatcactcccaccattcatgtccttctatattgtgacaatgatgctactattcacatctctaagaattccgtttaccacgagcggaccaagcatgtggagatagacttccacatcgtctgggagaaagtcaaccaatgcacactcaagatgatacatgtttcctccaagcacaacctagcagatgtctttactaaagctttgtttccctctcagtatctaaacattatctccaagatgggtgtacaaaacttgtacactccaccttgatgggggctattagacatgtgattgtattgattttgttatattagttagtttaggtggttaggattattaactaattctttctacttagtctcctttagctgaactgcttatataaagtaaatccactctgcaatatcattacattcaagtcttgtctcgggaggaagcaaccacacttcaagcagatagaagggagttcgagttcttgaaggttcagaaagattcattcatgaaggtgtaatgacatacaattagagagaatctacttatgcataagtcaaaaactttatatttttacgatcttactaatgaatatctctagatgtggccccatgaattagtaacaatctgcaaataaaaaatttatgtgtttttatttttttatacttttattatttgttagctttctggtttgtacttacaaaatattgagctgcagatacaaaatatctgtttagtatcgcattaatattcaataatattaatgagactctagaaccccaatcttctagctatattcagcccgaatttaaaattatttttcctacgattatgttttaaaatatgtatttaaaaacatgttgtgggactggctttgtgaaggttggtggtgtgattagtagggaagtgttgggagttgtttgggctgcttgggcagtgtgggtgttgttgagaatgagaagtcatgggtgctccttcaatagtttggttgtgtcgaatgttgtttgataattgagtgttgtaggtggtgccacttgtcatttaacttgaagtggcccatacacttacttctattgctagtttgtttggtaattgtaattgggcaaatttctgaatttttatgttgatgcaattgccttttataaaaagagtcatagactctcctattatctaggaagtcattttttcttcttacatagaaaacacatttggtgaaactactttcttaattctttccaatacttagagcttgtttgactgtgttttcagttttcaattttcaatttttaaaagtgagaatagaaaacagttttttgtcattttaaaaa

SEQ ID NO: 38861 - DNA, 3293 bp, Cannabis sativa
  modified_base (46)..(76): a, c, t, g, unknown or other
tattataacacaactatattttatattaaataaaactaacactacnnnnnnnnnnnnnnnnnnnnnnnnnnnnnnntatatatatatatatatttgtacagattattttttttctttgaatgctcaagacacttgtggctcgtgaacttataaacattcaccgatcgatcgatcccatttttcaaagcttcaaccattcaattcaaagcaaactgtagtggctggtccatcaaaacatgcacctctcatttctttaaaatttattataatttaattaaactcatgattaacattgttacatgtctaaactattaatccaaattcaatgtatcatttcttttttttttttgtttttgagcattcatcatctcgtatacatatcattaatacaaaaaaaaaatcatatatataagataaagagattagtaagagggaaaaaaaactagagagacaaattatagttttcttctaaaaaaattaaaaaattaataatttgatcccatatagtttattcattttttcccaccattcaatgaaagttgttgaacgatttttaatatttatgatttatttggttcagaagaaaaatggatgttgttaataggaaaagtgaagcgattgagtcgagccctttgatcggagagtttgtagcataaatttggtataccctattttcttaaagtcaaaacaaatcacaattgtaataatggaccaatttccgatgggaatgtttgatgattcacacaatattattaatattattcgagtggacgatatttataagtcattcattcagtggtcctattttttatatatataaataatttaaatatatatacatgaaaagtgattggaaatgcattcatggtttgattttgagtgtcgggttacatatatctatttaaggttgtcactacatatataatgacctcttttctttgagacccatattattagcatcaaaaaaatttatagtttacatcgtaattatgtatggtgtattcgtgttattgtttaagccacacaaattttattacatacattccacttttttttaaaaaaataataataaataatctaatctacatacttcatgtcattcctttgatgggacaaaccctcaaatttggatcactcaacaaatccagttgtaatagtttacataagttttttttttaatttattaatttttagagataaatagatcgaagacctgaccgaattaattaaataacacctcgagtgattaaacttcatatatcgatataataaatatatattgtgcatgtgtgtatagtgaaactattatatcttatatttatatatgtatatatatacgaggtcgacatgtgaaagtttggatgagatcaaaccttttacaaggtgggcaatagaaaaaaaaaaaaaggatttttaacaactgtatgaggtcccgaatgaccatgaaatctcattaatattaacgattttgattggttagaattcattgatagtcgttatcacatcgattgcgcgatacacccaactaattaatattatttatcataagtaatgacatacaaatatatataatatataattaatatcaatctttccagctgataatcgaccacgccaactactacataagtttctccctcttctctacccagctagctagttttgtgcatctaaatttacaaatacataataatattttaattaatttatttggacaacaaattaaagatcacatatattacgcatcttaactctaaattaattaattatctcaaaaaaaaaaaactctaaattaattaattaatatccgttattatatttatagtaatatattactaaaatatgaattgtaatatcatactgttaccagatagctagttagttgtaaagaagaattaagcttacgtggttccaataatcttggtcggaaattcatggttacaaaaattatatataaattaatttataataaagaaatataccacaaaataaaattccccgcaaaatgatcagaaatagacgacagtacattaaaatttaaaacatgacacatttcttggttttcaatttaatattttattattactattattgtttgatcaaagatgcatgtcgatttcaactcaagtgaaattcgtcatgtgttttcttgcaggctattttattttatattttttaagctgaaaacaggaatacctaattaatatatattttcctgaaaaagtaaaagcctaaatacgacgacagggaatcatttttggcaatgaaaacttttgctttataatactaatgttatttatttataattttgttgggactgtttttgtcgttaactaattataactttaattttgccggttgaagtcacaatccaattagacgcccactcacaaccaccaccatggtgctttggctttgctatttaattagtttgccatactcatttattaattaatgactactggattttggattcaaacacaatacacatctctctctccccacatatatatttcctattaattaatatttcttattaatataattagaaatcaacagtgtttattccatcaaggccattcacgaaggtgcccaatagtgtttcctttccaccactgtatattataagagtattgttattcgacactccaatccaataacttttattgatagtgttctataattgtttaacaatattttttaaaaattatttttttttaagttatataagactcgagttttaattacacttataacaaaattacacaaaaaaaaaatactaaacaccaaaaatagattttagcaattatcatattataaatttcagccttgagtagctaaatctcatgacttctttaattagttgagtgattaacaaaaaattatagtttaattatataatggcgatcatgacatcccacacttgaccctaatatatgtttgttacttacaaattcacattctcatatttttttcttctatataattggaaaatcataaagagtttagaaaagtaaacgactctcacatattttaatttaataaataataataaaaattgataattaattataagacttacatattagtataattttagccaccataaaatattcaataacaataatactcctaattacacatataaatgtgttggtagataatagaatttaggagtgataaacataaattgtagcatgtagtgagttgagatgagctgaaattatatgtggtaggaaataaagagagaattacaggtactaccatatttagaaatgtatctaaattcaatt

SEQ ID NO: 38862 - DNA, 1901 bp, Cannabis sativa
aaagaggaacttaatttttatatttttggtgtttacgtacgaaaattattgagatgagaaacaagataatgggaaacatgataatattttggcaatgatattgtgtatcacagcggatgtcctaccaagatctgtggatatatattgagaagtaataagatagatataaacattaagaataaagattactgaaccccaaaaaacaaggctcatccagcaactgcctctgttttctaatctatatatgaatgttgtgtctggtgacctatatagctagagatgagtagagaaaataagaaataatgagagggagtgagttttaagttttatccaatgctaagatgcagagtggctcaatgacgcatgtgtccctgatccacacgatgagttgggataagattgggtggctcatcaatgctacacgaaccctatgctctcgatcggctcattcatacatcgagccaccattatctggggcctccatatctcagatcgatatatagttgaattactaataaacacgttattatccttcaaaaaataaataaatgcgtgaatcacacggcttccatcgatatattgtagccaagttttctacgagtatgtcaattacgatttactaatatattttatttttttcaaaagaagggaaaatcatgacaattaacttattgaactgtatatagccacatatatagacgagagatgagaaatctatatttcgttctttgatacttaataatatatagtgctaaaacttttattagtggtaactaactttgattaattagcctaataagactaaattgttttttcgtcttagtgggcgttcagtccaggtgcattacaccaatataatttttcgagttctgtgaacttgacgagtttcatgcaaattaagataagtaaccaaacctaacaagatagtataaattaagtaattatatatatttttatatatacgcgtgatatatcgaaagttcctatctaaattttattcataagctcttgatccattttttgtagatatatatctatataatgtatgtctgtgaatgagtggacataattaaagatcaaattaagaacgcataaacaatatgatgataccaagttatttttaccggcactctcttaatttacaggtaaataaagtacaccttatataaacatagatatgtggaattaaccggaccgcttttacaatcccccctcttgtataaaagtaaaataaacaattttcattttcaataaataaagattatatatttatatatatgaaaaagaaaaagaaagaaaacaacttaactcaccggtccaactttgaataaaatatatactaataacttaattggaaattttagagaattggggttggctgattttaataaaggccaaaggtatatgtaggtggtaggatgtgagtggtgacatctgtcccgaccccaccttatttcccctatgctccacgttataaaacccccacccttcaccgctcactcgctcactcactcgtcacctcttctacttgttcaagttactctctgccacctctcctcattaatctctctctctctctctaatcccccctcttcatcatcaccatgcaactcccaccaccaccgttttccgatagtaatattggtccacagtcacttctaactcctcctgaatcattagtctcatcaaccatgatcgtaatcttaattcctattctgtttttgctcctcctctgcctcagcatcaaatggcagcaacccaaaatcaacaaacgattgcctcccggttccatgggttggccttacataggagaaactttcaagctctacaccgaaaacccaaactccttcttttcccaccgccaaaaacggtaaaagaaaaaaaaaagactgtcgtttccc

SEQ ID NO: 38863 - DNA, 2232 bp, Cannabis sativa
agtcagaaatgtgaaccttagggcagcctagagtcttaatctgtagggggatatcattgctattccagctctcgatccattctcatttaacacaccatcaacatacactctccatgtaggcatatcccaagttggtatattggcgttagcctcagtttcattgcactctacaataaaatctacgagcgcttggcccttaatcgagatgcggggaatgtattgtatgtcaaattgacttaactccatggcccacttaaggagtctccttgaggctttagggttctataagacttgtcgaagcgggtggtttgtaaatactttgatggagtgcacctaaaagtatggcctcagctttcttaatgcaatcaagagataaaaagctagtttttcgatcaaagggtaccaaatttctacccctatcatgtgtttgctgacgtaatacactgggtgctaaacctttccttcttcctggaccaaagctgcattgattgcattctcggagatggctagatataaatacaagtcttcttcgtgaacgggctttgacaacactggtggttgggccatgtgttctttcaacttcttaaacgcctcatcgcagttttcggtccattcaaacttctagcattttttcaaaatgttgaaaaacgggatgcacttgtcagttgaacgggagatgaagtgactcagggtggcaacctttccagttaggctttgtacatccttatgtcttcttggggagggcatactcaacaaggcctgtatcttttctaggtttgcctctatttcgcgctggcttactatgaaccccagaaatttccccgatttaacgctaaaagtacactttttgagattgagtttaatctcgtacttcctgactacttcaaagcatattgtatggttgtctgcatgtcccatgcttgtcttagatttgaccagcatgtcatccacgtagaccttcatgttacaccccaggaggcctttgaacattcaattgatcatgctctaataggtggctccatcattttctagtccaaagggcatgaccaaataacaatatacccccttgccggtcctgaagctgatacactcttggtctacgatgtgcatcttgatttggttgtaccccgaatacgcgtccatgaaagattataacttgaaacatgaggtggcatctaccatttggtcgatcctgggcaacaggaaacgatcctttagacaggctttgttaaggtcggtgaagtctatgcatattcgccatgtcccatttggtttaggcaccagaactagggcatcaaccttcactggatctagcatacgctttttttgttgcattgggggcatggccgggttaatatttaggatgtgagtgattatgtgagggcttatcctggtcatgtccccatgacaccatgcaaacacatttgtcgatgcctttatggtgttaatgattttactccgttccttgggtcaaggatcttaaccaggtggataactttagatggatcttgatcacacaccgttacctcttcaatatcctccattggctctaacgccgccttagaaccaatgtgagggtctaattcatcttgccctaccatagatgccgatttggtcccctggatcgccaagacagacaagtgcactgtagcgttataacactatctcgcctctctctagttaccccaaaccgtttctattcccgtttcctgggttggaaacttaaggcacaagtgtcggattaacgtgatttctttgaagtcaattagggccgagcaccctaggatggagttataagcagtgggacaatctaccaccaaaaaggtgcaatacttaaacctactttgtagggtttctggacataaggtgaccgggagcctaaccttccccatgagaatgagggtggtcccgttaaatctcgtgagctgtgaactgctgggggagagatctctattagtgagttcgatggctgtgaaagcctctttgaacaacaagttcactaagcttccgttgtccaccaatattcttgccacgaccttatttgcgattggagtctcaatgaccgaggggtcgtgatgcagaaagcgtactggctttgcatcttcctcagtgaaggtgatgggttgatccataagtcttggcctttaggtcggaaggtgagtgacttcctgttaggttttatgccctcaataaaactccatttcaatgtaatctattttattcaacatcaat

SEQ ID NO: 38864 - DNA, 3212 bp, Cannabis sativa
  modified_base (26)..(27): a, c, t, g, unknown or other
tatatttaaatgaatttttaaataannaataaaaatttaatgacttagaccggtcaagaactctcatgtggccattgacttggtatttaacaatgaggtacctacagaagtttcaaaaatataacttaggtgttattaccgtcaaaaattaaacttagatatttatctacaactgagagttaaacttaagtatttacgtcgcaaatcactttttatgaaaatattgacttcatcaaaatgttcgatattcttttttggttgtatactagcttatttatagttgtcataaggttagttttcttattattttttgttgttttattatttatttataattgttgtgaggttgatttcttgttgttttttagttattttctttatttatttttgttgagaaaatcgtatttttgtaattttaaaacttttaaaattatatttttataaataaaaattttaggtcataaaattgtaaataaaacataaaaaaaataatatttttgaaaacatcctaaaaactaagggatatttgcagtaatattaccttaattttacttattggtacatgtttacaccaaaagtagtcttgatgacgtagacatcaatgtttgacgtgtagcaagaaatatgacatctcagagttaagtagtcctgagtcatagcaagtcgacatgggaggggtccctagtcctacacccaagttgacttcaagaactctagaatagaagttttggactttaataacgcgttttcaactcactatctttcggtattatgtaccatgaaaacatagagcaaccaaatccaggccccgagagctgaaattacacgaagctgcacccttggaagccacctagcacctaggatttcacttgacgcccaagttgacattcccaattaggatttttgtttcaaggactgtcttagtgtaaatgggtaaaactttgcattgggacatcaactagacatatcataaacatatttgaggcatcagaatcagattcagagcaagttcatttttgagtacccagagcatccagtgctcgggcacccagcgcccaagtggacaatttgtcaatttggacaccttcgtatcatattgatgatctgacttttgcatcttctttgtcttcattaaaaatggggaaataggtacttttggagaagaaacatcacttcctgggtgtcaaaagtaaggcccggagcctaggttgacacctggggatggcttagcacccaaattcatattttctcagcctatgtcagttctaatgatgttttttgagaactcttctaagcatcttctctgttttcagacaagattaagattaaactatttctaaggaccaaatggaacttctgaagggccataattgagacccaacacctaggatgacatattgtcaacctaggttgtttccagtcaagttctcgaaaaagtgtttcgggcattttttctgtcataaaaaataataaagatttaagcaaactcggggagaaaatcacaaacttgagcccctggaaataaggcccaacacctcaggttgatctggtgctaggcccatcgcctaggttgacaatcaacctggtgccttgatttcgatcactcaaatgtcaaatccaattcgaccattaaacccgaaatggttaaaaacaggataggagacaccgtcctcaaattcaagaaccttgaaagtatcaaaacgacaacttgagagctcagaaaacggggtacccaatgccaggttaacaaatggcctggtgtactgggttcttatttttcaattatgattctgtttcgaccgtccgtctagtttttcacaataactaagatctataaagtcagagatgtcaaattcacaacttcgcatttttctttctagcatgggaaacttacttggaaatgaagatttcgagtctctcatttttctagaacatcaagagactaagtgatattaaaatatcacttaaacatcttaaagtgctttttacacttacccaacatccaggttggcgtcatccaacctgggccttaggacgtcaacctgggccttatgatgttaacatggtcgttgggtcttgaaataccttcagtaaaatagtcataagtcactcaatattgatccgattgacacgatttaacttacgtttcgaagatattttaatgatatatcaagtcatgtctcacacttcaatcgaaattctgaagctattgacctaaaatttcaccccaagagagttacaaaaataagcttcgggttacccacgacgggtcctactgggctccgaaaaatgattatcaccattagaagctaattttcaccattggatcatcatctctaatttataattttttttcatatttttatgggtctccttcacctataaaaggagagctccttggctcatttttatttaaattaaatactagaaattagagcttaaatacttagcctttttctataattaccatctcgtgagaaataaaaatctaaaataaacgtagttctattaccatcgcaacatggggagtgaagtattataaattttgtgtctctataaattatatacttacatttattattcatctcgtcaatctagcgagctggtattggctaccttttagaatcaacaatacactttttactatttttttctgaaagaaaaacatctaaactttgattatgttttggtttttaagtttttgtgaatcaatagttgttaaatgccaaatagacatgtgcacatggttcaaatttttaatgatttatcaattcaagagtaaaggatttaggtgaatttagttacttcatgagtattattgatgacgattgtgcgtgaagaaatacattgcataaaagatgaatataacacccatggaaatagtgggatgcatgttcaatgtgctagtctatagtagcaattttggagagattctcacaagacaacttgatatttggtgaataagtgtcttttagttgctattaactttctcaaaccacaagaaaaataggtcaaacttcagctaaaagttcttaaatgtttattcttaggatacttggttgatgttaatggttataacttgtggtgcttagtatatagttcacagagatattgtgtttaataagaaggaaatacctatgaagattagagaagtttcaagcaccatttctggtggaagaaatacatcgaaaattgatattgaaatatctcaa

SEQ ID NO: 38865 - DNA, 2226 bp, Cannabis sativa
ggggcgtcaactgctcaaaaaaggtctggtttggaagattggtgcaggtactaatatccctttgtctgcacccaactggatccctggtatttttcatcccaccctcttgcaccccatcgacccctctcaggcttttatgtccttctttatcaaccatgatactacttggaatgtgccaaacctcaaacactattttccttcttatcaggttgatcttattcttcaaattcccctggacccgactttgattgattctctcatctggggctttcatccttctggtctcattacagtcaaatcggcttatcatctagcttcttcttcagcctctaatgccttaccttcttcctccaacccaaaccctttacagcagtggtgaaaagttctctggtcacttcctatcccccctaaaattaagcatttcacttgaaaagctttcaatcatattttaccttgtgccttaaatttgtctcaaaagaacattatacctcaaccagcttgctcaatttgtggtaataatatagaatctgtcacgcacgcccttgtggattgccccagagcaaagaccatttggaagctttcaagattcaaaaaattttattgtgagcatcgcagaacagatatacaggaattttatctccaagcattgcaaatcatttcaaagcaggatttccctctctttattacattcatttggtatatatggaatacaagaaactcaattttatttaaaagatctggtgttcctaacaatgtagaagagtgtgtttataattatttacaggattacaatgaagcccaacaaaacaatcttgctggtcaatcgggttcagtctcaactcagatcactcatccttccccgttgttgccagttgaagactctcaggaggactctccatctctttttgttaatgcatctcttgatcataaacacggtttaacagggattggcttcacctttaagattggtcaccaccggattgtagcttctcaaaatcgtctcatgacaggtgcttccactcctatatttgctgagggtcaggctttgctgcagggtatatcgtggtgtattaattctcagttgcagccaaaattcatcttctcagattgtttaaacttagtcaccaaagtcaacagtgattggcaagacctttctgctctttctggccttgtgtctcggataaggttgctcttctccaacttccctgaagcctccttgaagtatttgcctcgtcagttcaacgcagacgcctattgtctggcaaaggaagccattaggttgagggaagaagcctaagaggaattactctaattcctttgttgctgttgcctgtgctttctgtcgtttgtcttgcagcttgttgtctatttcaaaaaaaaaaaaaaattgaaaaacgcaacaacaaaaaataaataatggtataataatattaaaatttgtaatactaaattttaaatttattaaagttattagttatggaagtatttaagttattgagttattggaatacatttttgaaaatttcgtgttgttaattgacctatttactttaagagaggaaggcattctaatctaaacagataaagttcttttatggtgtttttacttattctaaatagtttgtttatacatatgtatgtaaataatttctttattaatgtatactgtattttgtttatttacattcaaattacttgtgttttgtgcagcttttgatgatgtcattagatttaaatgataggttaaattattttatgtggatagataaataacttgttttgttagaagatattctcatttccttggaaatcttttgtatgacatcatgattattttcaatgaatatttttgttattgccttcaaaaaaaaatgtaatattaaagacgtgaaaacaaattaaaaaaaaaaattaagtaaaaaaaattaagaaaagtgacgatggaaagagaatagatttttattattattactaggtggatgttacgtggcaaaccacgtaaatgttagttttatttattgttttttttttttaattttggtaatttaagttgttaggattatttgaacgatttattttataaaaataaactgtatgtcagtgtatttggtaattaaaacatagtctataaatttatgataaatacaatattattaataataaaaaaaatacataattaagatgcagtaaataaaataaaccaaaaaaaacataaaataaaataaa

SEQ ID NO: 38866 - DNA, 1460 bp, Cannabis sativa
acaagccactctgtcattgtcggtgactcttataaaaattcagaatctatataatactgtcaagctttcataacgtccaggcctcccagaatgactagagatgcctgcttgcagaaccctccgtacagtggttccatccagtttttaacaacaactgacctcgcttccctcagacgcttgacctcttcctcttgttcattgattctagcttgcatagatgcaaacctaatctgcgaatcctaggcagcatgcggtgggttaacatctccccgaccgcatgccctgcctcttaggcctcttcctcggccacgaacattcaggggaaactaaacaccctgaccgacagtggattcgaccgaaatatcctggcttctcatgttccacttggcattcattctaatagaacaacctacaaaattaagaactagactggtcagattgcggtcaagaataatttactaattatcgcttattttagaaactaaaacatgcgcctattcagctatctggctactaacgtgcttcctatcaagcttttcttataacatacttataaaataaactactaaagaaataaaggcttataaaaccataattcgaacttatctttgatgatgattgtacatgtcatgacgatctagcggctttgataccaaattgtaacaccctactagcatgaggcgtgttagtgtgattttatattaactgtacaattcgttgctaatcaataggttcattaaaaatcatgatttattataacttttatttaattactctttaaatgcaaataaatattttttttacatatttaagatcccgtatataaattatttgcaaaagtaatacaaaatatataatacaaaagttattggctagaaaccatttaaaatacagcctattatttgaaagatagtacgctccaggtctaactgtccaaacatgtacaattttcatccgcctgctctcacggctgcttagccatagctttgcccttacgtacacatgtaaataataactgtgagtcaacagactcagtaagaaaagataatagtaatcgtaaatataatcggattacaattaggcacccgtacccccaactgtaatcaaatccctgcaccctaggcgatactcctcgcaccctacgcagtactgagtcaagaacgttcaaacgacagtactattgatcataatatcatcctatactcggtactctagtcatattctagtcgtactgatgtgatagtgtcaaatagcacttaagccaaacatacattcatcaatattcaatataattctaaatatattgataccgctattctaatgtatataacaggcttaaaaaacatgtatactaaatatgtaaacacatatacatatcattatactaatcttacctcgtttttaaattcaagtgtgccggtcaacctgagtggaacagctgctcgataatttacaggccc

SEQ ID NO: 38867 - DNA, 2494 bp, Cannabis sativa
ttttacaaaattctacataaaaacatctatagcaactaacggagcaaccgaaccaaaatccgtatagcaacccacatagaaactactggagaaaccacttgagaagctcaaactgtaaatttaaaaaaaaaaaataataaatagtatatgttgtaatttttctagaaatttcatatttgttaaactatatccccaacaatatataagtatatacatatatatatatatattaagtcttaaaaaaaaagtctttctatcttggtgaatcatagcacctaaattaaaggatcatatgacatatataggagtttatagtaacttcaggattaagattagtttgtatataatcatcgattaatgtatttgataaatactacttgacattgcttttagccaacgacagtgagtcaaattaaagcgattagaaataattaaataacaataatgataataataataaagataaagcaaagaaaacactgaggttattatggaggttcaatctcgtgatagtggtaatagtctacttctctttttcttttgactcgtgagaagagaagcaagaagttcttgatctctctcgaaagctcttgcaatatcactgagtattttactattaaatctagatttctctcttgtgtgttatctctgaatgaaattcgtgtccctttaaatagtgagatgagtctactatttatagggattaattacatcaaattaatttctcaaaattaataataaaacgagaaatctatttactttatataattacaataagcaaaataggaaactaggtaggtttcatttcctcttcaatactacgaatctatctcataaatctagggatagtgtcgtgtcttgcgagcttaaggatatataagatatatctctaaaattatttaacttacatcccctggtcggtgcatgcgagccacttgcttgatggaagctggtcgggtgcctttgcatgctcagcttggatgtcccaacttttatttgtgacttcaagtatcaatttttcctatactactcattaggagtagaattgcctgttcaggttatgaaatatcctccacgtattaccctattagatgtcacgtcaccttgtatagaaatttatataacattttgcctctaaatttacgtaggatcttcttggtcgcacgtggacttactcggccacaaagttgatcggatgagtgatgtgtgtctggttttcacctttgatctgatgggactgatcggacatctcttcgatgtttgggacatttaataccgtcttaaaaattgtacctctaatcacatagtgatggttgcacaataccgcatgcataatatttatactgttgtaatgagtactaacgttccttttggggggaaaacccaaaaatttaaattttgaattaccctatttatccctccaaatgcttataaaaggggatttaagcttcattgaaattcttgtagccattttagttctcaaaaaaccagagcgataaatttttcccttttttcctcaaatctttgaagaaaatcctcttggaagcttaattgctgaaaacttctgagtaagttatcttttcttctcttttatgtaatttcttttaaattcatgcataattttttatttctttcacatacctcttttgggcgttgttgctctctcccgcaatatgcgaccctcccgaaataactagaatgtcctctccttcaacaggaggaggttgtaacccctagttgtttggattgttgggcagattgggctagttatgtccattgccttactcttcacatactggttgaagtggccccgagcgatgagactttctatctcatctttcaactgacggcactcgtctgttgtgtgcccaatgtccttatagtatctgcaatacctggtaggatctcttttgtgcctcgcatgcctcatgggctcgtgcttgctgaaggcaaccttgtgctcacgcgagaggtaaatattttcccgagtttcattgagctcagtataaatagtataaaatggcacgtacttatcgtgcttcttttgtttctttttgtcctttgacgaccctttagaatcgtcttttctctttgagccagaggcccctgagttatcaactctagttgagacagtacttgttgaaacattgctgggtttgcctcctgagctagtttttaacaagttcatctcttttcgagcttccgcttttcggacgaacacctgagccttctcattgaactcagtgatgttcttcaccgaacgaccctataagtcgtcccacaattcgcccccagcagtagatagatcagtagcgatccctgcttgaagggcggtaagttgtgtactatcatcaagatttctaactcttccagtagccgttctaaaacgacttaaatatgccttaaatgtctcgcctagctgttgctttatattagttagcaaggaacgcctcgggtcgcctatcccttgcggcctggaactattttttgaagt

SEQ ID NO: 38868 - DNA, 2994 bp, Cannabis sativa
agggcataaaacccaacatgtgtcacatgggtgagtttagaacctatttcttagcggggaaaatatttgagatatttagaatgttgggtttaagcggagttatggttttggagcattttacccctaagcttataagttgcttaaattggacataagggtcttttggacatttatttttggaggtttaggtggctagcttttattttgatagctggcactaatatatttcagcctatgctattgtttgatgttggattttatctaattaaggaaaagacaagaacaattaggaagttctagcttgttccccatctctctttcgaccctagcaaaaaccaagagacatcttggtgtttttctgctgttctttgaggatttttgaaggattggggtagttcaagccaaaagtaagctctagaaacccttaatctttattttctctaggttgtagttggttgtggcttgcaatatgtggttttaggtgctattagatttaggtttgattttatgtcgaattctgagtttgttttaaattaattttggttgttaaatgttggtgttgttggtttgaaaagagattgtttgagtttgaaaacttaaacttgactcattaatggcacttttggttttagcttgtttctctttctgctattgtttggaaatcattttcggatgttagcacatgtattttggaaagtttggtggaaattgggtttaatttgagtgagttttgaactgatttgtggagcctggtatgaaccgattaactggttctacatgtcctgtaaatcggttaaccggatcagtggcaggattctcaaaaaatctattttgtcgattcgtgttattttcagagccttagtttgttgtttcctcaataaataggaaatttttttatgttatttatcgatagcagaatttatagttgtgagtttaggtccttggttcgggttttagcgtattatttacctatttacgtaaatgtgacatagggcattcatccagcacatgattttctgttcaagtcgaccaacacacttgaattccaaaatgagataagattagcattgaacatatttatatatgaatatatgtatgtatgtaagttgcataaaattatgaactgatatcacaacggcacaactatcgtgtcaggtcagcagtacgggtatagtactaggtttgactgatatccaattctagaaagtattaattgacgctatcatagcggtacttcgagcatagtacaagatcggtagtatgagcatagtacttgttaagagtgatattatggttaattatacttttggatattattaatgctatcatagcggtatgaacatagtaccggacccgcagtgcgatcatagcactggtagtggctgatatcatggtcgatagtaccaaatgtaaagaacgttcttactcatctgttaagccttgtggattggtgtatgggcgcctaaatacaaggcggtgatatattatgtgttatgtgcttttcttactaagtttgtcgactcacagatattatttctgtgtgctagtacaggaaagacgaaagctgaacaagagtgagttctgagctcgagggataattgtacatgtcgagacggcgcgacctaaagtatttagccttgggatgacttgagctatattttttagttgctgtgcgatatgtttgtaaaagtattttgataaaaattgtaaaaatttaaacacgggatctcaattcatgtaaatatatatatgtttataaaatataatagacatgatttttaaggaaaaccatttaattaacaaagacatacattaattagaaaatcaggcgtcacacaaacattaattacttatttactatttactcattttactttaataaaaattataatttacccctaacctatgctaggcagcccatggcttaaccgagtttattgttttgaataataaaaaaaaaaatattaaaagtgcctttttcaatttatatatggtgaagtaaaaaaagcaactactaataactgacttttcataaaatccaaactgcggttcccgacgtagaagttgactcatcgacttagttacattatgaaaaatgctattcatcccgagtaaagtgctagaattttttcccgaacagacgtgtcagccacatgtcatttatataagtgtctcatgcaacaaaatttataattaatttatttatttaatataattactttttttttatcttctttctccttctttatgtatttctctctcttcgtactgtaactcttcttctcttttattacctttttcttcactcatctcaatgcttttttttttttcatctcatctacatcctgagtaataattttttttttgttgtgtaaaaatagagtttaaaaggatacttaaattaaattattttttatttttcagagtgtaaattatattgttgattttgtgtttatgaacacggaaaaatcagaatgaggaaaaaaaaatatagtccaagcaatttttaatcggtagaaaaattattgggtataaaaatcacaagctaagcaactttaattcaagatcttaaggagagggctaaaacaaatgagtttgaaaaattcatacttttcgtttgggtttgattactattactattttaatttcagaatagcaattttttttactcaagcaactcttcaactaataattcaaattttatatatgtataatatatgtaaatttaagagttgcgtgataacaaagtgatataattttttctaatgaatgttctatgtggcaattaaaatttttgtttagtttctatctaggtttatgaatttcaatacccaagataattttccattattaatgtttatttagaaggtgtggttacaaattgttgagatttcactaagtccctttatttgagcccatgttccatgaatacagcagcactctcatataaataaagattgctacaattaaactcattgacatctgtttaatttc

SEQ ID NO: 38869 - DNA, 3819 bp, Cannabis sativa
  modified_base (2388)..(2391): a, c, t, g, unknown or other
  modified_base (2554)..(2556): a, c, t, g, unknown or other
gttgatatgatgtcttaattaaaagttaaatacaaatttataaataaaatatatatatatttatatttatttttattatatatagtttgcatataaaattaagaatatctttttaattgtaaataaatttttatgtacatgtaacataattaagtaatataatataaataaagttgtaaaattctttgtaaaatatagcaaaccaaaccaattaaaagatatcatctgtaaggatgttccttttaaaaatcatatgttcttaatgggaaatttggaaaagtttataattacaagactataagacaactgtcagtattatatatttgtggtccagtaagatattattttatgtggttctgcttgtatatataatgtgggtatatatataaataacattcgtacaagcttttaggcatagagtaaaggtctcagaagataaatttggaggtgtcagaaaggatgatttaacagtgttgatctcacccccatttaatccccatatagatgtagcgtggctttatctattctatgccttgttcccttcttcatgtactcaataacactgatcaaaggacaaaagtacacgataaacgacaacttgtgtcatgtcgttgattaggaccggtacttgcttttatgtatgtgttggaaaagatacatttatgtctatttgtatagatgtggggatgctatttagtaggggactatataagtaggggtcctcgtaaagtccctagcagtgagaaatttttctttgaatgtatatctaatggtaaaataatagttggattattttatttagtgtggattatcaactcaagtcccatatggaaagaatatgcaagagttgtcttaaatataagtattttaattagtgttggttatcaactcaagtgctaatgttagaatttgactcaaattatttatttatttctttatctatatttgttaagttttaatttttttggggggtaattattaattgtcgaaaagggaaaatcttagtggccatattttgatgagtcttcttaaggaagttttagaatgttttagtccccaagttgtcttaatgctcaagttttctaactttataaacatgtgttttttttgtgtgtgtgtgtgcatggagaaaaataatgagttgtaaaaagaaaattttgcgagtttattgtgtggtgagagtgagaaacaaagggtttattgggatttggatgaagagattaagatagagagcatatgtaattttgaagtaataagtgaaatatatcgctctttatgaatgaaagtatagtgatactctcaatatatctcatacttatcaagctcttgtgacaaggttagaatcaagtcgtggtaggagtacatcgagagaaagagacaatcgcaatcattcacactcttcaagagaagtgctactattgtcacaaaaaaggaaatgttaggcagaattgtgaagagttgaccaagcatctcgaagcaaatgaggaatcatgagtggaaagacacgtcagattctacaaatgttgctagtgtgactctgatgttctgtctatcataactgatgacaaatttttgactcttggattttggattctagtttttcgttccacatgtgcccgtataaggagtgctttgacacttatataaggcatacgatggttgtactattttgatcggcaatgatgttaagaatactgtaaatctgaattagccctaattaattcatatgagaatcaaataatagaattaaggaatatcggaagtgtaccggagtccatagaatcaattttgtaatggtatgatcttccaattttgcatcaaagtttttctctggaacttgagtttcttgatgatggggattcaatattagagttagttagggaataagttagttttttcctgttatttcccttctcatggcttttgcctatatacatgtatcattccttctgtacagaacacacaatatacatgtatcattccttctgtacatgaaaccatggtgcgcacacgggccacaagtttagctaccatttctgatgatccttctagagtcgaagctcccatggctcctccaccatcaactaattctgctgaaaatctatctcgagcacatctccctcctccccctactgttcatcgtcccaatccagttaatagaccagcctacgaggatgttcgatcaccctactatagaagcacaactgaccatcccggtttatctcatattactccagttctctctaacaaaaaattccaaccatggaaaagagatttcaagctctccatcggagcaagaagctcttgactttgtaatggtacggtcttctaatttttccatcaaagtttttctctggaacttgagtttcttgatgatggggattcaannnnacgatatgtgaagcgatgcaaaaatggggaccaatacctgtctattaataactgaataaacagtaaattaatcttttttgactatttctaatttggcccctcatcaaattaaatattgtctaattggtatccacatattaaaatcatgacaatcatgcccttnnntcataaactttattccaaaatagaccacataaatttgacttatttatttgatgacccaatacacatttttatatatacaattgtgaccccaataatttctaacaatctcccactgggccacatatgtatacatataaatatgttatccttattgagctcataactttttaatcattaccttaggcatgtacaatctcgtccattaactatatcaacataggatcaaagcaatttttgttgtatcaatcaaaactaaacccatcaatggtcacatacatcaacatagccaaatgacatagatcaataatgataatgtggtatgaaaattacattcatggtgatctattcatgtcaattttcaattggtcctactttactttatatagatcaaagtttagcttaatgtacaaagtaaaataaactgaataacataatttcttatcagaaaaatatccaaatacacatgtttcatgaaacaaataaaacacactaagaataataaagacaaactcccactgaatctagatatcctcataatctaaaacacccatacgaatagtgtgctcatgaaagatctttggtggcaaacccttagtaaaggggtctgcaatcatggagtttgtacctaagtgttctatacaaatctgtccactttgtacctttcttttacaacaaggaacttgatgtcaatatgttctgacttcgtcgagctcttgttattgttggaatacaatacagctgacttattgtcacaatacaacttaagtggtctttcaattccatccataatgtgtaacccggtgacaaaatttctctgccatatgccatggttggatgcctcataacatgcaacaaactctgttgccatggtggatgaagttatgattgtttgttttgcactcctccatgatatagctccaccacctaaaagatatatgtagcctgaagtcgatctcctactatcttggcattggcatcttgcaaagtaaaattcagaatatccaatgatctcaaagagatctgacctcctatatgtgagcatgtactctcttattctcttcaaatatctcataacctttttggttgctttccagtgatcagttcctggattacttaagtatctgtcaacaatgtacgctatatccagacgcgtacaaacttaaggatacattagactcccaatagctgaagcgtagggaatcttttgcatttcttgaatttcaaggcttcctttagggcattgcttaagacaaaatttgtctc

SEQ ID NO: 38870 - DNA, 4417 bp, Cannabis sativa
  modified_base (78)..(82): a, c, t, g, unknown or other
tatgtgtttattttattgttttgggaagtttacatttaggatgttagattataaatttataatcaaacatacatgttnnnnnatctagatcttggtaaaacaagttccaacagttatttcccagataaacacaacaaaaaggggagtagaccattaccgattcaagagtcgaacctttataaatcttgtgtcatttatagttctttattattttcattactcaaatactaatattatcttttattgacaataaataagattacattgaaattgagttttatctagggcataaaaccccaatactcccttccgggaggattggtgggggtcagttgtatggggtttgtcacttctggtggggttgttgctcaacaaatagtttgatggattgcagttaatcgttgagatttgtgggatcgttgtggtggtataaggaagggtccagatgttgaatgatatccatggttgagtgcttgagtgttgatctgggcctgatgggtttcaatttgtatggtggtgtttcaatttttaattttacatttttttattattttgtttatttttaattttatttgattttttctaatcgagattatccgccatcgtattagattgatagggtttattaatgtccttatgtgagatgcaggttttgtctactattggtttatttgtgtttgatcaatggatttaaatcacttcttcaaggacgtcttagtctctatttggtcgtcaaatctaggagatttttagatttttatattggccttttattatatggtcaaatcttatatgattgagcattacaagataattgggcatgttatttatttttttattcatgatttaaataattaggttgttgtatcataatttttattggaagatctgtttatttggtttgaaaacctaatgtacttcacaattttttgatgcttcaccgatatattattggatcaattgttaaaccctagccttcaatccttaatcatactgatgttgtcgccgccgcaatgtcgctatctctccgtcgacgtcgtcgttgttgctggttctagttctggttcttcatcaccatttttgatacctccattggctctctcctcttgcatctgaggtaatattactcttacattttcattttctttagattttgtcttatttttctaattttttgatcaaattttctatggatgattttgtgttctttctctaatcttcattcttaatttggagtcgctgctacctctccgtgatgtcaccatttttgctgcttctcttctccgtggatgacacttcaataattttggttattcatctcttctctctaagtttctctctctgtatatatatataagacaaccatatatcctgtttttggtagtgattgattctcctaggaaaattaaaaatcggtagttactttttcaacttttcttttcttgatttttagttgtttgatttacttaacgcctgaatagtgtattgaatttggtgttcattttagaagctaagaagtattgttgatttcaatatatatatgtctattattattggtgaataattgtgtatattctggaactctttttgtcaaattgcattaatattactaccataccatgagagaatgtgacatttttaaaatttgaacttaaagaaggttatgactttgctttcatagtggagttactgtgacaattttttttgcctatgattgtactttagttgaggtaatgagagatgagtttcattttttttttctgttatattggattttttatgtctgatcttggcttgatattcccttttcattgttaattctccagctttggcaaagttgaggaagtttgtgtctttatatgcataataaattgaggagtataatgaatatcataagaaatgttaatgtggggtcaatatatttacttgtgctgtaatatgtaattgagtttccgtgacagaatgagttttaagtcattctcggtcgtactgtaattgttgattgtcttgcaatgtcgagatctaaggaagtttgtggctttatattttgaagcacatttttgagtataatctcgaagaagacaatatatatgcttttatacttctgtatttattattggatactcataagaatcttacttttttgtattataaagatgttatgatggacaaaagagaggatttttctctgcttattagttataaaattatgaggctccttagaattttcttcttataaaattggcatgcttgcggataaatggatagtgacagtgtgttttctaatgatcgatgttattagttatatgcatttatatctttcttaatttatatatttataaaaatatgttatgtttgttcgtactaaataaagttacaaatcaattggttatatattatcataagagcaattttgctttgtgcttcaaataagtttagttgaaaaaaaaaaaaaagaataaaacatctactaataatagcataatgagtataataagattagttcaatttttttttttgacactagtataaaatatgtttgaattttattatttttttcttatgtggatgaactactttaaataagggtgaacaatgagattttagttgatgatgatgattttgaagatgataaatttgaagaatacgaagacgagaaaaattatttagaagatgatgatgatacatttgattatgaataataagcatataagtatatgtatctttttattcttttcaattttatatttttctattttaataacaagctagcatctgattatgtttatatcttttattttttgtgcattctatgaaagtcattttttttctccctcttgtattgcagaagtatgtcttcttcagcaactattcctcccgaaagttctaatgagaatggatttcaaacacgaaaaagaaaagtacgaggtcagtccaaaggtgctattgtggagaaaaaaattaagaatattgtattataaaaatatcatataaatgttatcacatcatatgaatatttgtgtttgaacttttgatatattgggttgattctctaattttgtctagttgtatttgagaatttaactagtataatgaaattttcttacaattttgtaaaatttacaaagttaaaaaacaatatcatgtaatgaacattttaaaagaaatgaatgcactattaaatttacaaatatttttgtgaaacaattagatttataaatattagtataatatcaagtatttgaattaattttgaaaagtatattgtattatacaatttttgtttatttttataaaaatacttttacgggcgctttaaatgcgtccataaaagtgttatcagctttttgtgggcacactaaaagcgcctgcaaaggtatttttttttttaaaaaaaaaattattcccaataatttttctaggtgctattgttgtgcatggaaagagttttttcttttcgtacgctcccccaaatcacgcctgttcaaaaattcgtcagtaatacttttgcaagcgctaaattgtgtctgcaaaagtgctaatccttgtagtggttgttgttaagagtttttttttttttttccttcattttaatgtaaatagcttggtaagatttttgatgacttttttctttactttattcgatttggctagatagttatattttctcaacaagaaaaaaaatatatataaaatgtaagatttgtgccattctatttttgtttctgtcttatttgtagcattttatcttgttttatgtttaaagtataaatgttgtattttttttaaatgattaaatgaattttcataattaaaaatatcatatattatatataatgaaatatttgactaaatgaaatacggagtcggagatatatataaattcgagagtgcaagttattagctgcacttctatacaatattacacaatataatctcttccaatcacaatgaaattcttttttatgtatacagtatatatatgtcctaaccctcgtaatttagttgatagtagaaacagataagattaaaatttatcacggtaggcatatgaaaatcactactatatggaaccttttatattgtatatatattattagctatacacgttttggtggaggagtagtataattgttgtattatatgtcatcggaccagtcagtgaggtcggtttcgtagaacaagccatcaacgatttggtcgatgagagtatcaaagaaggtgttgcaagtgaggctgaacatccgtccgaccttgtttcgagcactggaaaaccacgcgaaagtagctgcgaatgccacggctgccaagcaaacccctgctgcttcctctatcccaaccacatcaacctttctaaacaatgaatttcctgtcaccacttctgtccccacagttaccgcaaatattatctgcaaat

SEQ ID NO: 38871 - DNA, 2241 bp, Cannabis sativa
tgaattggctgaagaagttctcaaaatccaaatcttaaaggatcaatccgttttcgtttcggacatattttaccataggcaactcattttcaaaaagtacatatatttatattattttttcaacattgtatttttcgatattttgatcataattaccttatgattaaataatatatatttttttatatgtacagagagctacataataaggagacatatttgttatcatatcttgaagtgttgccatcatcatattttaatgaagaattaataataaaaaaattgtgtgaaaagggttctttgttccaatctccatcggcaacagcacaagctttcatggcaactgaaaattccaaatgcttgcattatttgcaaaccctagttcacaagttttccaataataacaacaataatatcattggaggtaattaataattaaaaaaataaatagacaactttttttattttgattatatatatttaattaatttatgcatgcatgcagttcccactacatatcccatggacaaagatcttataaagctttgcattatcaactatgtcgaaagattagggttagctgagcatttcgctatcgaaatcgaacaacttctacaacaagtttataagtaggtttttcttaatttttcttttttttgtactttttagtagttgtgacgtactatagtggtcatcataagtattcatccaatttaatttttactctattttactcgtaattcaataataataatttatatcgttgttaaaattgttgatttttttttattctaggaattatgtgaaatgcgatggagaattttattacgaaaaaagttactattcattggcaactttagagttacacctactcaaagaatcattagcttttaggcttctaaggatgcatggctacaaagtttttcctagtaagaatttatatctatacataatatatgagtttatattattattattattttataaatttgttaattaatattatatatccaatattaattgtatgtatgtaggtaacatctattggattttgaagaatgaggatataaaaaatcacatagaatcaaactatgaatgcttttcggttacgatgttgaatctttacagagctactgatcttgcttttcatggtgaatttgagcttgatgaactaagaatattttcgagaaaactacttcaaaagtctattttagtaggagctccacatacaaatccttttaacaaactggtaatgtgtgtatatattttttatagattatatattaagtgtggttataaaatagattttttttaaatgtggtttttgttttttttttttttaacttaaacagattattatatttatttaaaataagttgcttttaaataaataaataaataaataattttaaatatttttttatgatatttttttaataatttcatattaatgaattagacatagttagaaagatatttaaaaaatatattttttttgttatataatatttttcatattaatatatatagatataggtattgtgtagtagctaagtagggacaaaaatggaaaggcagaaaaatattttcttgaccactcacaatatttggtgggtcgtccaaataaaacaaaatatttacttttcatatataaacaaataaatcaagacaaaatgttatgataaactttttgagatgctgacatattaatttcctatacaatatgtactagatctgacagtaattaatccataaatttggatttttaaaatccacaaaaatgattttattatctataaaaaaaaatatatatatatatatatataaatattgtgtgtgaatgagacaaaaacgtggtagttgcttatttatacttattttattttgtgtaaatgcataattctttcttcttatttaaaaaaaaatacatatatattttcaaaaaaaatacatatataaaataaaatatatttcaaataaatatattaaagtaaaattaaattaaatattgaaccaaatatatatgtgtattaataacatttaaaaatactattataattaaattataaaaaaattaacttgatttttattaatatatattgtcaaatattaattgatattatttctaaagaaaaatataaatctaacttgtataattaatttcatatgtgtatataggattattcactttgttattgctatcccctcattttcttaatcaatcaattaattaattaatta

SEQ ID NO: 38872 - DNA, 2858 bp, Cannabis sativa
ataattacataatttgatacaagataccatttgactaatacacttaattaatggacacgaaaataaacactaaaaacttaaactaattaaagaaaacataatagtaaagtctaaaccacatgaacattttaaattttaaatcatcttattgccaacttaaaatgattaaatactaaagatcattagcccatcaactttcatcttgtttttgcatgtatcacattcctccaacacgttgttgttaggctatttttagcctaagtgtagatcgattttatagttgttttttctgtcaatgtatcttttggaatgattttatgcttaattttttttgtttcagatctctgaggcaatagaattcaaattctatcaatcgttaaaaagatagggcaactggaaaaaaatctactgaagctgacaaaaaatgcttcagtagtcgcaaccaccacaagctatggtcgcgaccctttttcatggtcgcgactacgaggcgtaggcagagcacgatttttggtttttgcctatggttgcgattaggctttatgtagtcgcgactatgggctaaacacggaaattttggacagttttaaattttcgtcattcagaggtagcaactttaatttctatttaaggggctcgtgttttagaaggaaaatagtcagaaattggatccgaaagtgaaagaaagaggcagtataagcaattgtggcgacccggagcacaatcaccagctagttatttctttaactcttgatttctatgttaatttctgttttaaatttgattatggatgctattatgaattttatgaactaaactcttatttacggagatgatgaatattgattgatattattgcctaagttaatgataattactattttggaaaatataaggtttattttgtcatttaacaaaacagatggtccaattaataacttttgcaaaacacaaaatttaaaatagtatttactcaatttttaaagggataagttgaaaactacatttttttttattacacaatacacattaactaaatataactctaaaataattttaattgataaaaccttcttttataatcaaagtattaaatataaactcacataacttatcaaaattagagtttccaatacacataatgggaatataacttataaaactaagtataaattaaaaataataaaatgatgataaaaattaaaattaaaaataagaaataagtataaagtttaatttcttctttttaaagttggtataaaagaaaatctggaagatcaaaaaaaaaaaaaagtggcaattaattgtagcgccaaatcaaaatatattaaaattttgagtggtgttctttcttttttttttttttaaatgggaatgaaaaattatatatacagtaaaaagagattctagattataaaatttcaatttaataatatgaattaataataataacaataacaattttataatgccataattaatataaccttaacaacattttaattaggttattaatactagtttatatggcattattttgtcaaatgttattgataatttttaatgacatttgttaatgatgtttttttaaaaaaacatgtcatgtaacctgactttttataacattaaaatgaaaatgtcataaatagtgtgttgtgaagagttctttttttagtaatactaaaaataattttgttaatgcaataagctaataaattcattaattacgtataataaaaactgattttttaataaaaaaaccaattacgaatatcaaaactcatatataagttttacacgcttctcataaactcaaaaacttgatcatcccactaccaaaacaatcactatcccctaagacgcgttagaattgtcgttgctaccgaaaagtctccagagctaaacatcggagttgtcaccgttggattttggagttgtcgtcggagttggacgttggaatctgagactgagaaatcagttatatttatcaactagttaaaaatatgacactaaaaaacaagttatgtagattaactaaatttaaaattaaatcttaggaccaattacgtaaaataataaaagcaataattacatacaaaaactagttttattatacattaatcaactaattatatgacacctaaaataataaaaaaaaataaataaatcaaatacgaaaactagtaacttaaaaaatatatacataccatagaagattttttaacaatgacttataaattaaatcacagaaatcaattacattaaacaacttagcaaaaatttttacacaaagaaaccggttacataatcaactaaattaaaaattaactcacataaaccaattacctaaataactaaaataaaaactaaatacaaaaaccagttaaaataaacaaatatttaacaactcacatattaatgtaatatgaaaatcatctaaaaaaaattgatcaaaaaaagaataatgtgaagaaaacaatatccaataataagtttcttaactgaattactgtataatataatatgaatagcctacaaaaatcatatcatacgtctaaaaaatggtaaaatttgaaaagtcatacttaaattgaaaaattgttaatattatatatttcgtcttttttattattataattgttgtatgcttatgtttaagattttttttattatgaaactgtctttttagtttaaaaaactgaattttgatatttttggaataccatatttttagctttccaagtttatgcttcaaacaaagagagaaaaaaactttaaaacattaaatattatgatatttagaaaatcatttacaataatatagtaaacctaagtccatcaaaaatctaaaaaactaa

SEQ ID NO: 38873 - DNA, 2853 bp, Cannabis sativa
aaaaaaaaaaacttaaactaaaaatatactaacattctcttaatttcatttttattttaaattttctcaaaaaattattattcatactttatatttgaagaatattattcattgttttaaatttaaatatattttattaattatttgaaagtttttttatatggtgatatgtttaaatattaatgttctatatttaaataaataaaatatattaaaatttgaaaattttttagtgaagtaaaattttagtgttatattttataagataaaatagagaaactgagagtgcttatgaaataaaataaaagtagcaggttggaagttggaacaaaaatcaaattctcatggcttttttttttttaagaatttcacataatctcatcttcttcttcaagcacgaaacaaaataatcaattcactctcaaattaaaacatcattaaatgtgataatgtttgtccaatcatattctcacttatttccttttgttttaaacttttattctttactaaatttgggtaagggccagtgaattagtccatcgcaactccacagcaaatgtcccattaacagaacgaagatacatcattacataataaaatggtgcaaccaatttattccgggcaccaatcattttcaccaactacagctgtgtccttcaaaaacacctaaatctggctagtcatgcactttgaaaggactatatatatatatacataaatgttcaccactggactggagggaccataatactaaagccaacttattgaagagctctaactttcaagcttcataattactcactttgaaagagactacatatacaataaaatgaattttcttttgaatcaaatttgagcaaagaaacaaatccaccatgttgagctagattttgctttcaatttattcatttatttttccaggagaaaacatggcaaatttactcataactcaaaaataccatttatagaacattctttaatggtttctagcccattttgtggcttgacatctacaatgtcgtttggttaattatttcatttgaaaaccaatttaagatgtcgttgccaagctggtacgtttgggctgtagtttaaaataaattctaataaattagtgggacaacatgtattgttcttgcattttaattttatatccaaaaattactgttggttttttctttgttagtaaactaacaatgaaaatgcacctagtgatttatcttgaatgttgccaactcagagcactaacctctgttttttttttccaacttaagagagtcaaattagttgtaaacatgataattagcattaaaaaaaaatcaagcaccagaggaagactatgatgtcatgaaatcataatgtgacatgttcatttgagaaaaaaaaaatctttacttgaatagggaatttccagcaaagaagatacaaaaggcattttgaaagcactagacaaaactagggccatggaccaattatgctaaaacagtataaagtaaccccacactttaactctttaccagaaaaaatagctaacatgatcttaaatattcataattataatcgggccatcaaacaataaaaataataaaaaaggattccttgtcatgagtgagcttttttacatgattatttgtctgaatagtatataagagaatggagaattttcatttttgtgcttgtttctggggatgtaagtaatgaatgtcaccattcgattagcttgaaactcattgaccttcattattataacatactaaaagtgttaatattaaaaaaaaaaaaaaactaatctagttggaataagaagttttcttttttatatttttgtgcaaaggaaaataataataataacaataataagtgttttaaatttagttttgtgaaagtgggcctaacacaaccttctgttatgggggcccattttgtgtcatcccttactttatattcaccgcacaaaagaccttttctacaaagttgcatattttaccctagtaaaatgcatgggcacaccctacctacttttgtaaactttttatatcacctccatatgagagaaagagatgctcttcattttgatgctgacccaatccactttaataagagtctcacttcttccactaacatactcaaggattgagagcagaaccaaatgaaatgggtttagatataaagaaaaaggatcagattctgaactatatattaggaaaattttgacaggatggtccatttgttatgtgttagaattcgggaaaagatgaattaggtttcattccaaaatcaattggtaatggaaggagaaggttattcattttatatatcacaatttatttccacacatattagcaatgtgggactaactcttaatattatgtattaaataatacaacatacattgggtaatgataatacaactcttatacaacgcgccaaacgagcccttaaagaatgtttaactcaaattgtactatgtttttttttgaaagaaaaatagaaaatatccattaatagtcaaatcgaataaaattcattatatgaaaataccactgaaatagcaaaattaacaataatatgccaaccaagttgttaacaataataagaagaaataaacactaccaacatcttcaatgaaaatactactgagacgccatataaagtaggaaaagagtgtaaagaatactaagtttgcaacttaaatgaaccagtaacgaaaaaataaaacgaccaaccatatagatgacgatcctaatgaaagacttaattaatcccaaaatatagggctaataacaatatggagatctcttagacttgaccacaggaagaggaagtcacgccggccatgcaaaagtgacatga

SEQ ID NO: 38874 - DNA, 1850 bp, Cannabis sativa
cagactgcaaacagaagttctagggctccctttgattgtttggactcaagccgttggcttcaagtaagtactctacaacttggtacttggtaatacataaatatatgtagttgtacatatatatttaactatcagcattcttttgtacaacacagttggagaatattggaagttgctactgtaaaaagggcataagcatttttgtctgctaatctgacacatttaatcttccaacaacttgccttttgagctttgaatagactataacttattaatctctctaattttcctacacatttcatacaacaatattccgtgcagcggtatgttgaggcccagtgttgcgttgcttcaaatgactacaaaggtaacaacttacaaatcctttatgtgtataagtgatagcctgtaaataaattgcttgggtaagttatatgttgttaattaatgaccaaaggttaagttttatatacaacaaatgtctaatatgttgagaaattcaaacatgacatatgcacttcaaactccaagtaaagttagaaattctaacaggtaaccaagatccaagtgtagccacttagccttaagtggttgtgctggtgagatgcctgggttcaagtctatgtaaatgcatcatataaaaattaaaaataatgcaagtgtcttaatttgaaccacagcattttgttttccatgtgtgtttgcaggtggtctggaactatttacagatctttcacagcgtttcccaaataatatacatttattacttgagattgcaaaggttagtaaataattacattgtgtagctcatattctacattagatagctatctgtgctttgtaaatccttgttttgagaggtgggtattggccttatttgaattggtcattattgagagtgtgttgagaaatgcctgatgtagttagtgactgtgtaaagaaaaatctaaatttgcgttatttctatgcaaaattaatgagaatacgcctcctttgttgctctatttcttcaatgacttctgtgtgaacaacaaatgttttgaaggttgaagcaatcattgggaaaaatgatgaggccatattgaattttgaaaaggtaaacatgtttttattatgctggagtgctcttcatttttctatcacccttgtaaaagatgaggagaagcccatcctcattattaaattatatatattggtctatgcaggctcgatcaattgatccatatctggtgacttatatggatgagtatgcaatgcttctaaagataaagtccgatttttcaaagctaaataaattggtacacgatttgttggtcactgatcctacaaggccagaagtttttgtagctttatcggtgctgtgggaaaagaaagatgagagaggagctttatcttatgctgagaaggtattttagttggtttaactaaattgactttctcttccattagaccatctctattctctaatgcgtagggtaaaaaatgtgctaaatttggcacaaaaaataagtacatgctatatttagcacactttttgcaagtgtgcttcaatgcataatagcaaattaagatacaaattgatataaaaagtaattatgattaataatcaataaactaaatatattttctaaaaaataatgacaatattgtacttaaagtgtttttaagtaactcattaatgctaaatgacaataatgtaaataaaaaaaggtgtattaattgtgtgccaaatttggcacaagttagcacacaattggagaaggagtttttacaaaaatatcaaaatatagcattgtactacttatttggcattccattggagatgctcttacatatctgacaagtatctc

SEQ ID NO: 38875 - DNA, 3363 bp, Cannabis sativa
accaaacccaccattgattcctatagtaggagcagctccaaccccattcaaggtatgtggaactccaccagcaaatgatggagccaaccccatccccaaaacttgattcataaccccaagagcaggattctggctcataagaacagcacccggattcatattttggggaaccaacccaactttcaaagctggcatagcaacattattaggagccaatgtctcacctgcccctgaaaccggcattgcaggagctaagttcttggtggcacggccttccgttgccacagaacacctcaacttaaacccttcaaaaaccttaagcggttcttctaaggctttcttcataccctccaagctcctgtaaacaaacatagcaaaccctttaaacttcccggtggccttgtcaatcccccatggaccatcctcaatctccccatatgcttcaaaaaatgccctgagcctctcggggctaatgtgtggcccaacattcgacacgtagattctacggctctctgatgacgaagccgacgccgaggcggcagcaggagtggactgaccttgcagggttcccgcgatggcgagctggcacgaagcaattcggttgccgatctttttctgaggctgctttagggctttacgtgctccggcgcgtgtcttgaagaggaggaagccgtatcccttcgatcttccggtgaccttgtcggtgacgacgttgcaatcctcgacggcgccgtattgcttgaaggcggagagtagggtttccgtggtggtgtcccatgtgaggccgtggacgaaaatcttgcggtgaatagggtcggactcgacggacttgactataccggagacaattgaggggtttgatacggcgacttctttaaggatgttgatgagttggtctttgctgaatggttcaagaagattcttcagggcgtctcgcttagaagctttatctaattctgaatcttcttcatcaccatcgtcggaggaagagtccgttgcttggacttcctgcttctcaacttgttcttcttctgaagaggaggaagatgatgattgttgccagtccaactgagggtctttggtggccatggggtttagaaggggtttggtctctacagaagaaggagcttccttggggatagattttcgctttctcgccattggagaataatggagaccagacacagtgagatacaatgcccaacgcaaccgctgaaagagccaatttctttctttttttttttttcttttaagggtaattaaccccaatccatacagctattattattttgttaatcaaagcgtaattggctaatatatttgtaacctcatttgtctctcgctatacaaaagaaattctagcaattgaagcatataacatttccctaatacatgtaagtattccatcaatatctctatagccctcctccttgttatggattagttggacgttctcctaataatcaaattcgatactaaaacagcttaagcacctttgtactctagtttgcaaaccaacttgagccgcttgtggcacccttcctccatgtttggtattgttcctaatataccataattgccaacataataccagaaaaaaattcatatgtatcttgggtcataccttttgcaattctcatgaggaaggtaatgatatcttcattcccctcccgctatgtttcagctttaaaaccactaagttttcacacccctttattagtcgtacacccccataatgcatggaaaatattttctcttacccttttagagcaacgatggcaagctgggtccccaattagcttttgagaaacaaggttagagttcgtaggcagccatgaatttgccatcttctagacaaaatgcttgatcttgggcggtaatttcaatttccatagctttgtccaccattctttcattaccttttcatcagaagtagccacatcttttcgcatatcagcagccatgtgacatcctcttcgtactgaatactccccgttcttactataatgccacatcactttgtcttctaagtcttccttaatcggtggtagccgcatgattaattccacatccttacaattgaaattagctcgtataaattcctcatcccactctccacttggaagtgtcaaatccacaacataaaattgttctgaaagtgtgggcttgtcatataccttgaaactcgtgttggcctaggtagccaggggtcttttaatattctaacattctgcccattgccaactcgccatctataccccttcaaaataatttattttcccacactaaactccgccatacaaaggatgcatgtgccccacattttgcctccaacactcctttattaggttaataacttgctttgagaaccttgctgcatagagacattggttgtcgaagacatctccaaacctgtttggcaagtaaagcttggttaaacaatttaaggtctcgaaagctcaaaccaccttcctcttttggcttatataagtacttctatttacaccaatgcgtcttcttcttcttttccaaggaaccccaccaaaatcttgcttccattttatggatactattgatggtgctctttgtgagtcgataacagctcataatatatgtgggaatggcctgaacaatcgccttaataagtacttccttcccacccattgagaacatatgacttttacgtcctcttaacctagtccacaccctattcttgataacatcaaataattactttttatttttgccaacaaaagacggcaacccaaggtacttcccatgattatccaccatctgccaattcaagtttcctctctgctgccacattcttcccaaagcacacttcagatttgtggaaattaaccacttgacccgacgctatagagtacttattaagcaatgtttgaaatcgttggcatgcctcccatgttgcatcaaagtatactaattataatacgccaagtcattgaggtattaggtactttggtacttcatagggctgttcatttgatccaatccgtaattattcagtcaaacaacatccaatccgtactaaatgcgaatttatattttggatccatttcaatctgcataagagtttaaatccaatccaatccgcataaaagtttaaatccaatccaatatgtgtaaaagtttaaatccattccaatccaatctacaatagtacatatttgatcgattattttggatagattactttctttaatgttaaattattttatattccaataaaatgcaaaaaaaccaatgtatataaaggaatgttaaaagagaggtgatgtggcatcttatgtgaattttctttgcttttcttttttttttctcatatttttttttttttac

SEQ ID NO: 38876 - DNA, 1919 bp, Cannabis sativa
gttgttgtgttgtgaattaattgtgctgcaggcaggtgctcatcatttggtatcagagccgacgcttctggtgaatgctgtcgacaagaatggagaaaaaggttgaaggaattgaagagggtctcgatagtgtgaagaatgatattcacattattaaatctatccttggcgagttcaaggaaacccaggaacggacggtatcgggattggcggagcaaatccgtttgtgtttgaatggccaagcaaggatggccgacgagatgtgctctctgcgtgaaaatcagggaccgatgatgagttcgggacgaaggtctgtcaacgaaccaccaccttctccagcagtgatgggttcgaacggacaggaaggagatctgggaagatgatcggagtttcgggccagaaaaatcgagcttcctgtgtactccggcgacgaccccgacgagtggacataccgagccgaccggtacttcggtttgcagcgcctatcgccgacggagcagttggaggcgacgattatgtgtttggaggggcagctctaaattggtttagatgggagaattcgaggcatacgatcgggtcttgggaggaattgaaggggatgcttatacgcagattccgatctacccacgagggttcgatttatgatcgattcttctctctctgacaaactgaatcggtgcaagattatcgccggaaattcgaatcactggcagctacgatggggacgatgggggatcaagggctgcaggccgcatttgtgaatgggttgaagatggaaattcaaggtccattacgtcttctacatcccaatgggctgattagagccatggaattggctgagtcaattgaggccaatcaagccttagtaaggaatcatagagttgggcccaacaagtcatatatcaaccggcccaattctctaatcttacctgagtcacgagctccccacgtgaccacgtctcccacttattttaccactactgtacacagcaaagcttcctcggcatcatcttcatcttcttcgaccagtttcaaacggttcacgaaggccgaattaagagaaaagaaagagcggggtgtgtgtttcaagtgcgatgggcgctggtttcagggtcatgaatgtaaggaagcggagttagtggtggttgtggttcaagatgaagcccaagaagagcctccagatgactttattgcagaaatggtgggattaccgcctacgggatcgacgacggaagcccaaactgttgaggtatcgctacactcggtggtgggattaactcttccaaaaacgatgaagatgttagggtctattcttggtcaagatgtggtagtgttatgggatagcggggaaacccacaactttgttacggtggacttggccaccgaatcggagctgccaattacaagcacagaagcttatggggttccattggggagtgggcaagcgatcaaaggcacggggatttgtcgaggagttccgttaaccttgcaaagcattaacattgtggatgatttccttcaacttcccttgggtaatacagatgtgattttaggagtgcaatggttgaatacgctacagaaaaccacccatcattggcaagagcacactatggaattcaatctcggtaatcaacgggtggttctacaaggggatcccaccttacataagacaccggtttcattgaagaccttaatggcaaccttacaatcagaaaagatgggagtttgggtggagttaggctattcggctggggtggcagcagaggaagagccttccgaagctatttgcgctctattgcagcgttatacggcagtgtttgaagagccccggactctaccaccacctcgacagcatgaccatgccattaccttacgggcggatgcagctccggtgagtgttagtgttggaatttatttta

SEQ ID NO: 38877 - DNA, 1945 bp, Cannabis sativa
tttcactaagcaaaggcttaattgagagacaagaggttttaaggtttatttgtcaattaagagactttgtaaggtctaattaaataagtgaaatagaaattttatttgataattaattgtaattaataaatcaatagattttacatttataggattgaaattaaaatatggtatttgtgaaagatacgataagttgttaaataaaaaggtaaaattgaaactattgaggtccacataggaagtcggccacttaattaaggagattttaagccattattttatccttttttttaaaaaaatttcatataagttccaacataggcttcattagataagcccaaaatctatgtattaattgcaaattccccattagaggaaaagggtaactaagtatgacttttgttactctataaatacataccgaacccttcatgcaaagggttgagatatcttgacttacttgctccagaagaaaatagagtactcatactcattgtaattccttaggcttttctagcttatcttataattatattgactcatatactaaggcttattaacatcccaaccatgtaaaaactctgagtatctttttgatttattgatcttttcattgtattttctttagctctaatattaaataattagtttttcaaaaaatttggtaaacaagtagcttagccatacctttgactgaagttattaagaaggatgttggttttaagtgggatgatgaccaagagaaggcatttaatttaattaaaaaaaaaattgactaatgcgcctttgcatgctttacctaacttcactaaaacttttgaggttgagtgtgatgcctcagggataggtattggaacttttctattgcaagagattcatcgtattgcatactttggtgcaaaattaagtggagtagtcttaaactatccaacctatgacaaagagatgtatgtgttggttcgggctttagaaatatggcaataaccaaaagagtttgtgattcacactgatcatgaatctttaaaacatttaaaaagtcaacaaaagctaaatagaagacatgacaagtggattgagttcattaaacgttttcttatgtcatcatgtacaagcaatgtaaggaaaacattatgggtgatgctttatctcaaaggtatgtcttactctctaccatagatgcaaaatttcttagttttgaatacattaaagatttgtatgtggatgattatgacttttctaatgtattcaatgcgtgtaaaaaagaagcttttagaaaattctttaggcatgatggttttttgtttagagaaaataagttatgtgtgcctaaaagttcattgcatgacttgcttgttaaagaatctcatggagtgatttgatggggcattttggtgtatctaattataaatcttgcatgaattctagagatgttgaaaaagtttgtgagaaatgtattacatgtagaaaagataagtctcaggtcaagtctcatgtatactcctttgcctattcctagtgaaccttgagttgacatatctacagactttgttttgggtttacctaagtctataaagagtagggattctatatctgtggttgtagataggttttcaaaaatggcacatttcattccatgccaaaaaacttatgatgcatcacatattgctgatttgtttttcaagaaaattgtaaaattgcatggcatgtccaaaagcattttttgagctattttagaagactttgtggggaaagctaggtactaagcttttgttttctactacttttcacccacaaaataatggtcaaagtgaagttgtttataaaacattattttctttgatgcatgccatattacaaaagaatttgaatgttgacttttagggttcatattagagtcgcagcgacaggttctataattttcgattgtctgattagacaatgacaa

SEQ ID NO: 38878 - DNA, 1504 bp, Cannabis sativa
ttgagtaaatataatatatatatacatatattatataaatattaattaattatatgtatatattttattaagctataattatttttatataaagatatgtttttttaatctgcgatttaaaaaatatataattaattataatttaaaaattattcttatttataattagtttaaattataacaataataaaatatttatagataatcaaaaccctaaatctcacaagagcattctaatcactcactctatggtgattattattcacaatcacatgccacactctattttttttttcttttgatttgagaaaaataggtctcattaaaacctcaatgaaaaaatatcaagagtaaaaaaagtgtccaattatattgattaaataatgtcatcctaaataatgacatcataatacactaaggtataatcagtagacttgtattggatttgaaacatattaatcacctcacaatcttaaaaaaaatcaaacaaaatataaaagaagaagaagaaagaagagtcaaactatatatatcataccttttaaatattttaataaaaacagaaaattgactgtgtcaaatgaggtagaatgttatgaattaatttaaaacaagagactacagtcacaacaaaccttgtagattttaatataattttatcaactctactctcactttttgaatccatacaagtctcattttcttgtatttaaaattgtcaataaataataaataaatagattgtgtcaaacatctcacaaccattaaattaacttaataattaaatgtagagcagaacatcaaaaaaaatataaagataaacctttgggttggggtaggtactgagatgcttctttcgatcaatatgctataatcacataaaaatgtacataagaaaatataaaatataaattaaaatcaaaagaagaagaagaaaaagaggagtcaaactattatacttagaaaaaaattaaagactcttagacatagtgtttggttgagaaaaataaaaatacaagaataatagtaaaaaataccaataaaaataaaaatagaatagaatacaataaaatatataatgtgaatttcatttttatgattaccaagttaattaattaaatactatattgttatcgagatgtttaaataaacatcaaaactgtttgaactgaacagaaatatgtttaaacagaaagcaaatagagagtaaaaagaacatgaaataaagaaacaatcacaaataaagatgccaaatctaaagacaaatagagtatcaatgttttttagagagagctttgacaacatcaagaactaaacgctaaagttcctcaaaagtcatcactcgaacagttaaagaatcaagagaagctcgacacagtagaaagttctacagaaacagtgttagaattttttggaagagaaacttctgcacgatggcattcaaagcaaaaaagagagattgaggcttagatttccacgaccaccatgaccacagacccaagga

SEQ ID NO: 38879 - DNA, 2178 bp, Cannabis sativa
aataaaataaatgagtaggtactaacccaaataaatagacatgaaaataaaaacaatatttaacaaactgaaaatgtcattactaacacatgtctaacaaagttccataaaagcagttccaccaaacatatatagtaatggttttatttaagctaacaataaaatgttatgtggaggccaatataagcaatggaactgaaaattacagtttgactgcatcaataggcactatacctttctgaaaacaggtataattgaaatgaccatagtttttgacagttttatacatctttggtctctcctcatttaccaatccttccactggtccaatctcttcttcaatatctggttcaataagcacagctacagatcctctcatatgctctgcatttgttgtcactctatgaactggactcttcattactccattagtcattatctgcaaccaaaagaattaaacataaagaaaatagatctctgaaatccaatcacaaataaatgcacttcacaacaattattgtagaggagtgctaattacaacctcttagttaacctccacgttcgaaattacatgtcgaaatattttttttcaaattttttttcatagcggtaatcgttatagttacagtattatccctgtaaatttttgaaaaattcgaatagtttatagtaccgataacagagttcctgatattccagtttatcacgagcgttcaaaaaacttcaaacgtattttcgacatggtaaactattcgaaatttttcaaaaatttacagggataatgttgcaagcataacaaacaatcccgtaaaaaaaaatattccaacatatgtgttttcaagcatgaaggttgactaaaagattgtaataggaacttgacggtagcacttctcatcttctttacagaatacacatattttactttaataccatttgtcaaacatttacgtttctttatctcacctccatttgatcaccaagattgacaataagagcatgaggtatgataggaactctagaccattgattgtctttgaaaacttgaagaccttcaacttctttgtcttgtaaaagaacagttactcctgatctatctgagtgtggtttgagcccaagaaccttatcagttcttggacaaggagggtaaaaattgactcttattcgcatggtagatttctctccaaaatgctttaagaacatatcctcttctaaattcagtgactttgctgtggccttaaacacaacatccctaacagaccttatgttcatggtgtactcaattaaagtctctctgcaagaaaatcaataaaagaaaatatggtttatgggtagtaaaatttgatgttttgggctcacaaacaaacccatgtgagaagagagtgaatattattacccaaaatctttcggattctctggccaaaaattgacttttctttgattttcagggaaaaccatgagaaacaaacgattacaccagtcaaaaacttggcccttggaaagtactacatcactaccaaacccttcattattataagcttcacgaaaacagttttctttttcttccattggaagtaaaaagaaatcttttgccatctcacgcaccttgtccaagaatgagcttgaaatcccatgaccaattgcctgaaaagaaaagaaaagaaaaaaagaaagtcaaatcatttctgtgtataaggttctagaattcaaaattaaaaggaaaaaaaaaaaacagaacaaaagtacctaaaacaagcttctttttttctttttcatgaaaaagatgcagaaacaaacctgaaagcatccccatgtgctgagagctgatcttagtttctccagctcagtttctgtagagagcatacttaaatcaatgactggaattggaatcaatggtggagatgaatccacagcaccaaaagcactctctttgacgaagaattccttaggtgggtcatctctattcatgtcaattccttgagatacttcttcatgtggaagaaccaagccagccattgttggagctatgaacttgttgctcatatccaagctctcttacttttatatagatgagatttttacaaagagcgttactgagtttctgagcaattaacttttaacacgtatgagctttcacatagaaagtgtatactgtttttgttttttgcttttcttcaatga

SEQ ID NO: 38880 - DNA, 3134 bp, Cannabis sativa
  modified_base (3088)..(3108): a, c, t, g, unknown or other
ttttctcaagtgcaagaagaatgatccaaacactgagaaatgtctcgataagggccagcaagttactcgatgtgtccttggcctgtgagttctatcaaaatttgaactcttttttctgaattagatgcttatcttcaatttaagttttacttaattctttgagtgtttcttccgataaatgagaaaaaaaaaaatgaagtacattgattgtgttatcgattttgattctatgtgaactaattaggtgagtgatgcatccaaattgtgtcaaaatataaaataaagcattgatgaaacggaagagcaaacatttccctaaaccctagacccaacctcatcagtctgactgattcagtcatctctgccatctgcagtcttcgttttcctctaactgtagccataatctatactcgatcagcagctctgctccctagttggtcactatcgacagttcttggtccgctcctcactctaggtaccatcattccttcgatttccttttcttttttgttttgtttttttccccgcggagaattgtgcttcgtattttagcttttcttttttttttcctcactgtaatcagggatttatttacacgaagtttgatccttgacggttgagaattcgggtataataagaaattgtttaaatgctctcagtacaatattactcggttggttgtagtcagggatttatggggcagggtttataggaaaccttagatttagggtttatgaatttcgccattttgatttaatcgcaattctgattgtttgatactaataccagtagtctagtttctttatgaagtcacaaatcagcttttttttgatatagaacagctgtgctctgttattgatttttttttttctttctgtattttggcatgtttttttatgtatatatatatatcacatactcattgtgttctagacttcaagtactgattttaaatagttattgcatgtctatttctttcagaatttgggtatattgtattctcaacgagattatgcatctttattaaaaaggttagcaaacctctgcatttatatattcctaagtcagctctaatactacaacatcaatactaaaaatgtccaattagaataacagtaataatattaaaaaaaaaagagttaatatgtaaatattgaaaatttatagcaaaaatagattgtaaggttgtattcagaataattcttttgcttcaagtaatattcattttatcataaatatttgctcttgcaactacaatagctcatgcatcttattttggtgttttatgctaaagactttggtcatttgatggtttagcaaatttcgtagcctgagaaagcagaggaaatatggtcgttaaagaatgagctctgtatttgagtccactccatatgctttctctccctagagttgcagctattggctttctacacctcaaattattatccatttaccaacttaaacaaacacatgcccaattgattgtcaatggtctcaactcaccctcccttgcagccaaacttatcaagcaatactgcaccttgttaggccaacagaagaactactgtaatgcccgtttagtattcgagcactttgacaagcctaatctgtttctctttaacactttgatacggtgttctccaccaaaagaatccattcttgttttctccagatgggcatcaaggggagacttagtgtttgatgatttcacctacatttttgttcttggtgcttgtgctcgatcaccttcagtccctacattatgggcaggtagacaaatacactcgtggataatgaaaggcggtactatttcgaatactatggtgcagactactttaatacattcttatgcgagtaataaggatgttggctcagcccgaagggtgtttgatgaaatggttgatagaaataatgttacttggaatgccatgatcacaggatattgttcacaaagaggaagtgctcatgatgcattggttctgtttcgtgatatgttggatgatgtttatggggcaaaaccaaccgatactactatagttagtgttctctctgcagcttctcagttcggtgttttggatcaggtacttgtatgcatgggtatatagagaagacaaattgggttcctgagattgatgtgtttattggcaccagtcttattgacatgtactcaaaatgtggatgtcttaatagtgctttatccgttttttcacgaatgaaggagaagaatatcttaacatggacagcaatggcaacaggattagccattcatggaaagggaaaagaagcaataaaacttttggattcaatgggggcttctggattaaaaccaaatgctacgagttttactagtttacttctagcttgttgtcattctgggcttgttgaagaaggactctgcttatttagtagcatgagcaagtttaatgtcaacccacagatgcaacattatggttgcattgttgaccttcttagtcgaaatgggctcttgaaagaggcatacgagtttataatgggaatgccagttgaacctgatgctatcttgtggagaagtttgctaagtgcaaccagaattcatggggatgttgcaatgggtgagaaggttgggaagctccttcttcgagtacatccagagcggagttctttgaatggcactagtgaagattatgtagctttgtccaacatttatgcttctgcagggaagtgggagggtgtggagactgtaagagaggagatgaaggtcaaaggaattgaaaataaatttggatgtagttcgattcaaactactactggtatggaccctcatgaaatgtatttatgaaaaaattcttatttgtaaagctttaatgtttcaaaacatgtcatgaacataacttaatgttgattacaaaggaaaaaagaaatcttagagagaaaaaatgttgatttgttattttatatttggtacatggaagatttttacattgacttctcaaatcttttgtgtacactgttccactgtggtcctttaacaatgatttggctatgatggccatgagctgaccttcaccatcacctaccaaattggtgttgtgttttgtgccctaaatannnnnnnnnnnnnnnnnnnnngatttacttattaataaagatcagca

SEQ ID NO: 38881 - DNA, 2066 bp, Cannabis sativa
aaattttagggcatataacccaacaataacaatttgagaagaagaaatacttacttgtagacagattgaagggaaaatagatggttgctagttgtcgtacaaaatcccacaagttactcgatgttctagtcacgtcttgctccaatagagaactcgccatatgggtaggtgtcgaacgttgggatatacaacaataaggtcgagaaaaggagaagaggtttttggttcagaaaaatgagtaagggcaaaggttttttctaagaaatttttttgggctaaggatttgttgcttaaggtgaggaagagaaaagtgaattcattcaccaagacttttatttatatggatggcaacggttcaaaatttttttgaaatatacggtccagatttcatcgatcagaagttgccccatccaatagttggggactcgaagagattacatttaatgcacccaaggaaagagaatgatgcattcattactcattatttcatggcagcatcaccaacatgctataaatctatcgacttttcaagtctagctgtcattcacttcccacgaggaacgcacttaagcctagagcgtaaaccccacgactccaccaaacagacaccatattttaggaagacaatagttgtactgcaggatatattgacctttcagttacccaaagtaatgcagaagacttcttccacatttcaacacatggttagcatgtcaggataataaatcaagcattcaaaaggaagctgcaagcttccatgactcgtaagtccaggagcttggggagtaaatgttatccgtattcctagatgcctgttatgtggcaatcatgggagggtaccatgtcaaactatttacaaatagcatgtatcttccacttatcagcaacacggaagaagttacattccaagagttagtcgaaggttctccatgtcagcaaggacgggaaggattctaggactcccactattcatctgctactgagaaggattagagtcccctaaagctacgagtaatccaggagggtagcaggttagtgtggtccagaaaggatgtgaccagatgctcctagaacctatttcgttgtatcttatccagagctcaatgcgttggttacatatcttctgacaccaaatcaattcttgtctcttacgttagaccatggtagtgcgcatatgtgcctctgaagccccctttttatccaaagacttgtctaggaaaaaacatttaaatgtgaaactttaagctacacgtgtcctcattgccacgaaatgccttacagtatctatacactacatgattggaaagcttcctaccgaccaatagttagatcatcatattgtagtatcagcccttgtggcgtgttgagtaagaaaccccaggtgggtaaaggttatgcccttacccacatgtgagcctctaaatacccttacttttcatatgctaatggtaaaaaaatttcatatttaccgaacatctaaaaaaattcctattaactttcttcttcttcaagaaaaacaatagaaatgcagggctaggtttatattgtaaacacttgttatattcaaacactcacctacaaggctaatataatggaatcatggactagggattattaacgctcgaaccatgtaaaaattatttgtttattatttatttttttacatctttcttaagttctaatttattaatttccaaaatcttagtaaacaagtacggtgaaccgtttttcctaggaaaaggtaaaccatttgtgaaatgctgaatcatttaaggtcagatttgcatggatttttgtgtacaatggctataaatagctagttttttcccaaactctatataaactcatttgtatcacattttttagatgggtttgagcatttattaagtataccaaacatattaaaagtgtttttctctctttataagtactaaatccaagtaaacacctttcacacacttgggcccaaacttattcttatcttctctagtgtgcttgcaattctctctaggatttcacattgtatttcatcttattagatagagtttgctttgtatttttaaaat

SEQ ID NO: 38882 - DNA, 2341 bp, Cannabis sativa
  modified_base (26)..(54): a, c, t, g, unknown or other
aatgggatttgttttatttttatttnnnnnnnnnnnnnnnnnnnnnnnnnnnnntattaaataaaaataaaaaatcacacccatgaatttctcgtaataactgcacacaatctaaaaaaaagtgtgttcttacgttatgttgagatgcatttgtcctaaaatggaagggaaagttgaccatcattgctgcaacataaatgaccatactgattttgttgggaaactgatttaaggcttccgttacgttacgaccccctatgctgtgacccaccagaattatctgtttccccacaaacaaaatgtatgcaccaagttagctctgttataacgaaatgggtagtaagtcttaattattatatgtaaatataattatgaccttttcattaggtggaaggttggacatgaaagtggtaagaggctcattgtaatctgcaaaagtgaatatggtattgtaatcagtgggatcgatgccagagcatttaaggtcgatgcaggtgaccttgtatccacaactttgtagaagaacacgtattttgtaccaacaccaacttccatgcccagccccatggactagcacaaagtgcacctcaccattattatttgacccactttcttcactactccccatttcaactactttcttcttcttcattaattcttagattatatgtttattattgacttattagctagctatatatgtatagctttaactagttgcattaccttatcttcatacattttctagtggtctataactatgtatgcatatccaactaagtggtcgctgatgatcatcatggtttcaatttggcacattaaagcttccaaatgtggccgagcctttggaggccccccactgccatctaactctgttattttgtgggttttaattattataattaaaaaaacgtgtgagagcatctaatatttttgtcaaaagatccatcttgaaaataaataaaagaaaacaagacctgtacaaacaacattgtaaattttatgcaatttgctttttaaatgatttaattaaacacaataaaataatatttatttaattattaaaatattattaagtttttaatagctactaaatgtaatataaagtctacaaatcattcacacataaataacacataaataatatgaaacatatataagatcgatatttttcattcttgggactgaaattttagtgggtgtcaaaaaaacctaataattagaaatttagaaatttagaattttagtgggtgtcaaaaaaacctacttcatgcaatctctatatttatgtataaagaataatataaaataaattttgtcattggtgtttaagaaatatgaatctctcagtttagcgattattttaatttattctaagaattttaatgtaatctattactcctctcgagtgatgatagaattaacttaattaattaacaatatagctctatttaatgttaatcaattaagcaataatacaacaatatgattctctttaaatgaaacttatagaattaatggaatatcttaatctcacattttttctatgtcatgcagctctaagtctaattttaaattatctctctcaagtgtaaaatctaaaatctatatactaattaataggaatcaaacattaaaaagatgataattaacacaaaattgcatcaacaaatagcaacaagaacagatatggaaataatctcaaaactttaattcataatctaaaatagttccatcaacactctagaaagagtatttagttcataatcgcaaatataataaccacaataatcatattcataattaaataactaaggaaaaaaaaaaagaagaagaagaaaataactctaataatgataattgatgatgattgcttgaattatcttctctcttgctctttaatctattttctaatctcaaaattggttgtttctatctctctccgccgccccaaaagttaaattacatcattctttatataggcccaaaagcgatagaaagaatccatttagaattaggatttaaattcaaaaatacacgtacggtagtccccgaggctttgttttagcgcaaaaaacattttttttttcaaaattagctctatagcgccacacttttggcacgatagctcattttttgtcgcttttttactacttcgaccttgctcataaatcatgcataactttcacattcaaacttcaaatgagatgatttaacatgttttgaaaaactgagaacgagctatatcattttagatttcataagctttttgagaaaatgatgaaaacattgtcaaaaattggttcaaagatctcagtctattacagaattgtcttttaag

SEQ ID NO: 38883 - DNA, 2245 bp, Cannabis sativa
agagagtgctaatgtactttttagcaattctcctatatcaatttgtctttttcaccttaatttataccctaggactctcatctcactcctcccaatttgtgtacgttcaagttccaaaagctcaaaaagccaaaccccttttcttaactatccacatctctacatctctctttgtttaatttctagcctctatagggcataggcagtgctaattacatgtagctatataggtagggttagggtaccaccactcaacgagccactattcacatatatatatgtctttactataggtcttaatattgcggctgcccgtgcaacagttgactttgttatatgtgtatatataattaaaataacatttttatttttactaacatatgcaaaactaattaattagataatgtattttatatatatataagcattaattttaattattatatatgagaatgagaagagtgtggagatcgaatatatgtgcatgggccaatcatgcatggagatcgaaaaagaggaggtaggcgtgcgagaaaaattaaggctagctgcatgcattcttttcgaaaaaaaaaaatacatctgtaatattgtagcagtgatattattattattattattattattattattattaaagaataatcagtaccccaaatgataagagaaatgctaagacttagcctttcttggtaaaacttttattgcaaattaacagaacattttatactttttttttttgaaagaaagaacattttatacttagattacaattcaaggcacaactagtatttaaattattgaaccaatcaatatcaaatgataagaataatactagctttctctctttgaaaatgagaaagctttgtacaaaattatttttgaattctatttaaggtaaatagcggcataaatacctaaagtttagagtttataaatggcataagcttaataatttgttttagcggcataagtacccaatgtttataaaactgtaatttttgtctattttcgtcaatacaagttccgttttaaatttatatattgaaaaaagatttaaaagcaaatgatactacatatttctgtccaaactaaataatctagaatctgagtcttatatgtgccctgtttagaataataacagagactgtactaatgaaactagaagaaaattacagttttataaatattaggtatttatgccactaaaaaaaattattgagttcataccacttacaaaccttaaactttaggtacttatgtaactaattacccttctatttacaatgaaaagtacaatatatatttggctattccaaaaggtattattcctagccttttaaatattgtaaaccaaagcattcaaaactatagactccacacttacatctcgttcttctacaattccaatcaggcagctatctaaatcattttgatgggtatttaacccagccaaatcacaaacctttcacaagaatttatgtactgtatacctacacccgaagaagagatggcagtgtgtctccaactcctctcacaaaactaataaacaattaccattagtgattaagtcaaacttgaacaaacgatctctggtttagagtctcttccaacaagcaaactaagtaataaatttttgttttggagcacttagcttatcccaaataaaggaaaaccattttctggtctgattgtcccttggccatagcttgaaacaaatgtttgtgatgctaaaatgtaagctagctagaacttcctcaaagccatttttcttctaatcgaattcttgcccatcataatttttctccaatatcagctggaggtttgtggagcttcatagctcgagttttaatgtacacagagcacatccaatgatctcaaagattatcttttttagtagcaatatctcaaatatatttgttaaaagacttatgattggttatgtggattgtttatttgaaaaaatacaaaaataatatacattaaagatacataagtactattatagaaaattgtattgatattatgatattgatgctatttttttaagaaaaaaaaaactatgtatatatataaatattagttctttcttttttcagcacatgtatactattttttcactaaatatttataagttacaacttcctcaaaataatgttaaactattagtatcaaataatgttccacaactgaaatgtcttttgtcctatatggttctatataattatttgttattaattaatta

SEQ ID NO: 38884 - DNA, 2539 bp, Cannabis sativa
ttaataattagtattattctaattttgtgaatttcatctaaatatttttttaattaatttttcagtatgaatttggacgcaaatcttgctttcatgaacatgttgaggatgtggttatcagaatcaccatggggtctgtatacagatataaatatatatattataaatttcatttaattatttatttatgttcaatcattaagtgtcattaatatttaatttttattttttgtaaaaatttctaacaccgttggatcgtgatcagggtgctcatccagattctgtgcagctacgtcaccctccctctctacgcccttgttacacaagtaattacactctaaacactaaataacacaatttcattatatatttctctttatatagtttgcaaaaaaaattattatctagtattaattattgcacatataattataactacaccctaattaaatatataaaatctatttaaaaataacttttaatttattattaaaaaattcaagtagaattaatttagactaattataaataaaaataacctctaaataataattagttatgcattttttaagtactgtattaagaaaatatatctctatataagaataattatatcttaataaaataaatttatataatttttatgtttatttatgtaaaattaataatttcattttaaattataaaatacgtataaatctactaaaaaataattttattatgatactaagaattatttattgtcattaatattttattgtgttttaaatttttttagttaaactctatttatagttataatcttttaattaaaatataatttatttagaattttattttaattacttagaaaatattgtcatagtttgggagaacacattatttacataattattagatatatttttttatattaataataacaatatgagaaatataacaaatttgtgtgaacatatcactaatcatattttaattgttatattgtatgattaacaataacattaatgatcatgttattaacttaattactatatatatgacaacacaacagatgggtacatccatgaaaccaactatattcaacgacaaagtagcggaggccctccgcaactggcaccactcagcccgaaagcacatcaaacaccaaaacaaggcggcggggtcagtgacgccgctgtcaagccggccgacgacacccacacatcacatgtccccggtccatctcttgcgccactaccgcagtgaggcagcagacagcctccaaaactccccaaggcgctcaaactttgatggcgccaccgaacggtgggagacagattcgccatctccatctcaccaccaccacggccgcttcgcgaccgagggttcctcctctcatcataatagtaataataataataaaaataaaaatcaacaaattgaattgggacaaataatggaacaacatcatcttcatgaagaccgcttcgccaatgagcttcctcctcaaaccacaacattaagaaatcaagctgctactgctgatgatcaatcatcagcagcaaaggtggggccgccaccgccccaccatgaaatcaatattggacacagagatttctcttttgaacggtttgaacgacagcccagcgtttgatgacgagagagaattccgttatttggttataatgttaatcggacggttctcattgtctcggcctgtgatgatcaacgagctagaatgattgagatgatttattactgatcagccagctccaataatgagcggtttaattatatgttatttatgtataattaattattatgtttatataatttttttgtttatttgtttttcattagtatttttaatttataaatattaatttcttttacgaaacgaatttggcgcacgtggagatatggagctggttttggcatcccatcccatgctaagcttcatgatcagttttattaattaattattactgcttaattagtttaatttgtacgtaagtgcattttctatatatgtatataaaatgcatgtataattaggaatattttcgacaattttctttttcattttatatcgacctaatcacttatattattataattatataagcaccaatttatattgttgttacctcccaataaattccatgcaataattcaaactatatcaagattaattatgaacaatagaaatgctggaccaaaccaacctacaaagttgaaataagaaacaacccaaatagtattaatcactcaaacatgttatgtgtctcgaaatgtttcattaaaatggtaaaataatacgcacttctctattttgtgtgtgtcatccttgaatattaattattacatgcttggagcggtgacacctgttatatttattatatatacatgcaattaatagtaacagctatttggacacatttattagcctaacaatataaatatatttctaattacatagcacgaccattgttattaagcactagtagtacttagtatttttttgatatgtcacgttgcgattaactagcgatacttc

SEQ ID NO: 38885 - DNA, 2268 bp, Cannabis sativa
  modified_base (2210)..(2219): a, c, t, g, unknown or other
gttagaaatatatttagtcagcggttaaaattaccaaataataataaatgaattagaaattcagctatcattacccaccacgtagaatttttggagcttataaacattttagaaattaatgcacagaattttgggacaaacttcaggagcagctttaatattatataacttgtccctgtggaaatgaataggaactggaatcaaactaagattttctgagtgcatcagaattattggaagggttgaatttactaatctacaagaatttaaatcatttcggtagttgggtgtaacaagagagatggtagatggatgttaggaacttattggactatgctaatttagttgttgtgtaatatgtaattcttgttgaattacttcttaaaggataaattctgatatgattttgtttctgtttcttttcctttatgacttagagaagaattaattgtagatatgggaaatggggaatcaacatttgaggataattctcatgaagatattcactttgctacttatcaccaaccaccttcttatgctcctcaccgaccaccaccttcttatgcagggacatcaatggatcatcaacattccagatataagcatcgatccacacgtattgcagataactacagctctttagatgaggtttgtatgcctgatatttcttctgtcgataacttctattcgttcctaattggatatcagcatctaatctttctcttcaatcctaaattgttttgcattttgtcactgctgagaaacaaaatttatcattttagttatactaattgctttaggaagaagtcatttgaagattcaaatgctaactacttgatttatctcattaaaatgtgaaatcctcagcctactatttaagaagcattataattacaagttacattttcagattagggggtctgtttatcttctggtctctgatctttcagtgtatgcatggaatgtgccttttagtctgaagtgtcttgaattgtgtctcttaaacatctgtggaaatcatgaaccaaagcgctttgtactcgctaattcatttgaaatcagttctttcagtttgtcacattgctggatcacaagaaacatcttctaacttatccggcaacagttcatatgtggttttccctaagagcatttgaaattgatactgcacttattttagtttccaattcttttcacaattttccaatcagattgatctaaaattattcagaatgctgactcaggctgcatttaccttagcatgcttttaacagctttgccctgtcaatgagaaatataaatctgataggctaattcaaatcattggagatcttcattgatgaatggttattagtaagaaatcttcatcttttatctgcctagtagttcaacatttgagaaatccaaagtaaaccaaccactcgattcaattggtctgacattttctcaagagtatatgctaggctgggcatatatgtatggtatatatatacgatagcaaaaagaagaacaaggaggtcaagcgcctagtttaaactcagaaattgaatggctaacacgtaaacactaattcgaaggagttaaagaaatgtaattactgatattcttaggtcatggggttttgatttttatgttgttatttacaagacttcaatagctagctaatgtgaccaaatgataccttcgtaggtttattctgtttacatttcatactccatattgataggcatgtttaatttatgtgcatactcatcttctgatttcccaaaacatatttcttaactaggatcaatatacaaatatactaggttgtctctgctttaagagaagctggacttgagtcatcaaatttaatacttggtatagacttcacgaagagcaatgagtggacaggtaatgtattattttccccacattctttaaactgtataacctctggtatagaatatcaatggctctttacaatcattgtaggcaggcactcattcaacaggaaaagccttcactcaattggtagcaggcctaacccttacgagcaggcaatctctattattggtcggacattgtctccatttgatgaagataatctaataccgtgttttggatttggcgatggttagtaacatttcctaaatcaacttcttgtttggaattgtgttaattcttttaaggtaaattgcggcataaatacctaatgttttagattttatacnnnnnnnnnnctaatgtttatttttggaggcaaatatacctaatgttacaattctctta

SEQ ID NO: 38886 - DNA, 1102 bp, Cannabis sativa
taacacccattaaagtagccaattgagccttaaccggagaggaaacattgcggccaaagcacatttcagatttatgaaaattaaccagctgtcccgaagcaatagaatatttttccagcagctccttgaactacctacattcactttcagcagcttctaaaaataccaaactatcgtccgcaaaaaagagatgtgaaacagtcagcccttgtcgtccaaacttaaccccatgaaccctcccattctgttcagcatgttgaataagcgaagaaaaagcttcagcacataacagaaaaagaaacggcgagaggggatcaccctgtcaaagaccccgttgtggaatgacacgtccctgtatctctccatttatgatgaatgaaaactggaccgatgaaagacaagccataatcttactgacccaggccgtattatatcccaacttcgccatcatagcctccaaaaaccgccattctacccgatcatatgccttcgccatatccaacttcaaagcaactttcgttccattccgaaaacgatttttcctcatcacatgtaaactctcatatcccacaatagcattatcatggataagccgccccttgacaaacgcactttgagaatctgaaactacatgaccaagagtggaccgcatcctattagccaaacattttgaaacaatcttgtagatcacattgcataaactaataggtctaaactcctcaatacgtttcggcttatcaactttcgggatcaatgctaccaccgtgtcattaagacacttcaaatcagccccataattcagcacattcaaacatacagcaataacatcttccttaagtttcgaccagaacttctgataaaaaagtgctggaagtccatccgcacccggtgccttagtaggattcatttccttcactgctcccacaatttcttcctctgtgaaatcagccattagaccatcattcatagccgaagtcaccttcggttgtatcactccaataacctcttgaaatacctcttcatttaactctgagctagtgaataaccgtgcataataatcctccactatcttacaaaccaacaccttatcatcttgccaaat

SEQ ID NO: 38887 - DNA, 2553 bp, Cannabis sativa
acttaatgaaatataataattgagctactttatgacatggtattattaccaaaatatatgtatctattggttgatacacatgcatgagtcaacatctgtttgggtcatttttgtgatcatgtacttggagaggatgtccatgtgttatatgggcccaatagaaagcttccacaattcactgcccaacccatatattacatatcacgtttaagtgggcccccaataaagaaaatgggctccacaataaggaatcagaatcatcatcattcacatgcatggccttattgaattatctacatatacaatatcatatgtttcccttttctcagacataagtttggctttggagtatctttaagagactatcatatatattatatatataaaaatatatttatgggtaaaatataatttttcataatttacaaaagttatccattaaattatttatttttgttaaatattaaattagattttatattttttaaaatggtacaaaataatactttaacttaattttttgttaaaataaaagttaataataacccgatctaaaattgttatgacaaaactggatacattttcttgcaattgattgtactagaaattgttttcaagttagttatattaaaaaaattatcgaaaattaggctcataatactattttatattattttagaaaatacaatgtctaatatatcattttataaaacagaaagcccaatcgataactttagtaaaatacaggatcgaaaatagcattaattcttgttatataactttgtcgctaaaaaattatgcccttgtacttatatgtgtattaaatatatttggctttagagtctctttaagatgctatcatattcatatatatatatatataaatatagtgaataaaaatttattttgccctttgttgattcaaaaatttggactagacttctaagtcacactcgctcgctagattagcgagaataaaacagttattaagtaaaactaaatagagacacaataatttatactccctgtatcacgataataatgtagctacgtctacttcgagtttttatttctcacgagatgacattacagaaataggtcaagtatcaaagctccaataggaaaactagagagagaagctctgactttgtggatatagttttttggatgtgtaaaattagctaagggagctctcattttatagttgaaggagacccacaaaaaagggagaaaaatacaaattggatatttttgaccgtagatgatgatctaacggtgataattaactactgaaggtgatagtcattttttagagcccggcgagacttgctgcgggtaatccgaagcttatttttgtaactcccttggggtggaatttgagattgatagctttagaattgcgattgaagtgttagacatgacttgataaatcattaaaatatattcgaaatgcaagttaaattgcgtcaattagataaatattaagtgagttatgactgttttactgaatgtagttcatgatgacccagcgtccaggttgacatccagcacccaagttgacatataatgtcgacctggatgttgggtaagtgaaaaaacgtccgggggatgtacattaagatgcctaagtgatattttgacatcacttagtctattttcgtgttctgcggaagctggtcaccaattttcagagatgttgctgttctgcagaaatgagagactcgaaattctccattttcgagtgagtttttccatgttgaaaatgagaaatgcaaagttatgagtttgacttctccgacttcatggatcttagttattgtgaaaaactagaaggaaggttgaaacagattagaattgaataagcaaaacccagcgcaccaggccatttgtcaacttgggcgtttggtaccctatttttgagctcccagcctcccaagttgtcgttttgatacttccaagattcttgaacttgagaacaaggtctcatatcccatttttgaccattacggatttaatggtcaaatcagatctgacatttgagtgttcgaaaccagcacattaggttgattatcaacttgggcgctcggcccagcactaggtcaacctgggagttggctctgtttctaggggcttgggtttgtggttttctccccgagtctgcttgaatattcataatttctaatgacgaaaaaaatggccaaaataatttttcgagaacttgattagaaacaacccagtgccaagtgtcaacctgggcactaggtcccagttatggtctttcaaaagttccgtttggtcctctaatatagtttaatcttaatcttttctgaaaatagagaagattctcggaagagttctaaaaaaacttcatcaaaattggcctaagttgacaaaatgtcaacatcttgtttttggcacccagggagtgttgtttcttccccaaaagtacctacttcccttttttttgatggagaagaagataatgattgggcattgggtgcccgggaaccaggtgcttcgtgtgcttagaaataaacttgctctgaatttgat

SEQ ID NO: 38888 - DNA, 6219 bp, Cannabis sativa
  modified_base (6007)..(6007): a, c, t, g, unknown or other
tcatttaacaaaacagagggtctaattagtaacttttgcaaaacacatagtccaaaatagtatttaccctactataatttcttaatcaatttccgtatccaagaatacatccctgaatattttaatttttttttataggagtgtttgttatagttacaatatcacctttgtaaatttttaaaaaactttgaatagtttacagtaccgaaaataggtttgaagatttttgaacacacgtgataaactgaaatatcagcactctgttttcgatactataaattatttaaaaatttacagggataatatagtaactataacaagtactgctacgaaaaaaaaaatatattttaacatgtaatttcaaatataaaagtccactaaaaaattataataaaagattataattaacacttacagctcagtataagcatatcattaatgcccagttgcccacacacccaactcaccagtaactgatcacctatataaagtcaaaaattcacatttaatatttcaggccaagatcaacatcaatttattagcaacgaatctgtcaaatatttctcaccaaataaagttcattgatgttgatatttttctctggttttgaccaagtctactcattttctctcattattcatggtagaaaatgagataaattagtgacatttttagtgataaaaatggtaaattggtagttattaatttattgctggtttaaataagccctccacaagtggatactatagcacaaaacactgatgcactatatatatatttttttgatagagtaatttcttttttttttttttcttttgataaacttttgaatagagtaaatacttttcaaattttagataatatagcaataaattaatgtgagacgaagagtcgtcgtagttagttttgaattcaattcttagactttgttgggagcaaaatttagtaaccaaccacactatatagcacaaaagaaaagatcatgttgtttcatttcaaccttaattaatccacattgaacccatcctttccttccaagatgagacttattcatcaattttcatggcttttcttcataccctttagcttaatattattactcactgtgaatttgcatactgtttctagccaatgccttaacgaccaaaaatccttgttgcttcaactgaaaaacaatcttactttcaacacaatattatcaaccaagttggtcacatggagtagtgatcaaagttcagattgcaaagcttggaaaggtgtaacatttaatggtgaaggacttgtcacaggtcttaacttgagccttgagtggatctctggtggattacacaacaattcaactctattcaatctacaacatctcaaaagccttgatttatcatggaacattttcaacaacattcttatcccaaatgagattggtaaactctcaaatctaagtcatttaaatttggcatatgcaggctttgttgggcaagtcccatttaccatatcacacttaacaaacttggtcactcttgatatcaccacactacaagggaagctaaatcttgacagcatagattttggggtaatggttcagaacctttccaagcttgaagaattgtattttgatggtgtgaatttatcatcatcaagtagtgactggtgtaaggccttgtcatcttctgtgcctaaattgagagttttgagcttgtcaagctgtgatctttcaggccctcttgatgaatctcttgggaatcttcactctttgtcagtgattcgccttgattataataacttgtcttccacagttcccacatctttttctaatttctcaaatctgacttccttgattctcaactcgaataagttgtatgggaactttcctgaaaagatttttcagataccaaccttacaaaatattgacttatcaatgaattccttacttcatggtgttttgccagactttccccaaagtaattctctccaaacacttgaactgcttagcagtaatttttcaggggcattgccaacatccattggcaaccttaagaacttgtctaagttagacatttctgcatgcaatttcagtggagcacttccaagttcactggctaagctcaaccaactgatgtacttgggtttatcttataacaagttcactggtcaaatcccatctttcaatatggccaagaacttaacagaaataaatctatctcataattctcttggtgggactattcctgctgcattgtttgcacttccatcattgcagaagattcaactttccaacaacaatttcagtggacaagttgttgggttttcaaatcctagttcatcacttttggatactcttgatttgagcagcaataatcttgaagggcctcttccaaagtccatcttcaaactcagaaatctcaaaattctatcactgtcctcaaacaaattcaatggcaccttgcaattcgatgtgattcaaagattggtaaatcttacatcacttgacctttcttacaacaacttgtcaatcaatacaagtggtaaatactctaaatttctttcatttccacaatttaacacattaatgcttgcttcttgtaaattgaccacttttcctgatcttaagaatcaatcaaagttagccattttggacctctcaaacaaccaatttcatggggagatacctaattggatttggggacttgaaagtcttatggttctgaatctctcccataattctctaatgagtctacaagaaccttatgctctttctccttttctctttatccttgacttacattccaaccagcttcatgggaagattcccattttacccccagcttcaacctatatagatttgtctatcaataacttcacttcctcaattcctgtagacattggtaaccatcttaatggcattctgttcttctctgtctcaaaaaaccatcttacaggtattataccagaatccatatgtaatgcatcatccttaattaaagtgcttgacttatcatacaataatttagacaaagaaatacctgaatgtttgtatgatatgactcaaaatcttgaggtgttgaatctaagaaacaacaactttagaggctcaattcctaatgcctttccagttaattgttctttagagacacttgatctaaatgggaattcattacaagggaagattccaaattctctatcttcttgcaacaaattagaggtcttagatcttgggaacaatttctttattggtgagtttccttgcttgttaaggaacatatctacactacaagtccttgttcttcagtccaacaaatttcatggaagtattagatgtttaaactcaaatgaaagctggaaggtgttacagattatggatttagctaataatgattttgatggtacaataccagatgggagtttcataaaattgcaggcaatgctacaaccctcttcgaaaactaatcgtgctcaccttgatgttcaatatgataatggaatgtattatcaagattcagttacagtttcctttaagggtagggagatggagttagtgaaaatcttaacagtcttcacttctattgatttgtcattcaaccattttgttggagcaataccagaggagttaggacaacttcaagcactttattttctcaacttatccaacaatgctctcattggccaaatcccatcatctattggaaacatggcacaacttgagtccctagacctttcaagtaacaagctgaatggatcaattccggtatctcttgcaaaccttaacttccttgcctttttgaacctctcatacaatgatctaaccggactaattccatccggtaatcaaatccaaacatttccacccgaatctttcgttggaaataaaggactgcggggatgtcctttgacagatgattgcgggaagagagtggctcctcgaaacacaacaaagaagaatggttcagaagttgaaaatgataatgagattgattggaatctcataagtgctgaaattggattaattgttggctttggagctgtgattttaccacttgtgttttgcaaaagatggaggattaagtattttgagtgcattgatgatgttggtgtgaaactctttcctcaattgtatataaccaattacaacaagaacataagaggaagaagaggaaggcactcatcttgatgttgtttcttaaagacatgtaagaatttttctttatagctcttaacataaaaattctattgtaagatatataatttagtaatagactagtttgcttttttcttaaattgattacctaaagttgaatacaaattatacaatactaataggaaatcccaaattgaacttgtaggaatctattgagtggtttggagctgagactaatttttgctgctggtgttttacaagagatggaggaagttatgttctgtttactattgttgattttagcatatacaaatattatgtttaaggtttaaagcaagttgtgctagtagtaatcataattgtgaactttaatcaactttctttcacttgttgaaaggaattaaagtttcaagtaatcataggttgtgctggaatgtttatgaggttgtgtatggttggaagtaatgaaataaaaataaattaatttttattctatttttttatttggttgcatattcatgtttatttacttgtaaagggaattatggtaacaattcttattctattgtttactaaactaaagaatgggaaattttggttaagtaaggggtaaaagaaatggaaaacttttccctaatgtgagtaatgacttctatttatttatttattttttaaaaaactatatagtaaaaataatttggaatctattattatatgtttgctctacattttgttgtttttgatgttaaaacggttttacttatacatgtgaaatgagttttgatgtattgggagtattcgtatttatagaaattttaattttcgtacttattctaatatttagttcatttatgcatggtgaaaaaagagcattggaatggtcttagctgacaattttgtcattagaaagatattttggtctatttaagtattttgattacgttttatgataaagtagacaaagataaaaccattatgattatgtttccaaataattttagcaaagaacatattacaaataatgattatgattctttcccatttattttgttatatttctccatttattaatttcgattctaattatagtttagtaaatatgtcatttaaaatattggaatgttattttaataaaatgacttttttattattttagtagaatgactattttttttaaatgaaggaaaaatcattccaatgcaagatgaaaaaaaaagaacttaataatttgtttatcaattttttttgtacattttaaattttattctattctattcgcattactatttttatgttttcattcattccaactaaatattggtgttgcgttgggttagaggtaggtaatgaaatagaatgaaaatagaataatttttatttcattcctttgttttgttgtattttagagcttgtttgatacaccatattaaactgtgtataatattatattatatattatatttatatacaatactatattaaattttgatttatatctaaatattatatattctatacatatacaagttaacaccaagcatagtattatatataaacataacataaatttcacataatattatacaaacgatacaatgtaatacagtgtaccaaacaaatctttaaagttttagaatgacttttttactattttggtggaatgatattccatcttgaaatagaagtaaatatcattctaatgcataatggaaaaaaatatttaattttttaccaatattttttatgcattttaaattttattttattgtattccacgtaatgttttaattgtcctctttaccaaaccaaacgtaccctaaagtttcaattgccattctccaaaaaaaaaaattcaaaatatttatatatatatanatatgtatatatacatatatattgattagattgagaacagagataatgactagtgtcacgggctcacctttttaggcagcggaacactcgtgtggcaccttgatttctctaagcgaagggcatccttccaaccatctgagtaacaatgggctcatttttcgcgtgaccgtgtgcctcgtgcacacttccgtctctcaaacaactcccgccga

SEQ ID NO: 38889 - DNA, 4027 bp, Cannabis sativa
atttttattgtttgttattttaatgctagatgttgagacttggttattgatgttataattatattactttttttttgctttttgtttaagaactaaatatgagattgttatctttagtgcatatgtttttgggtttcaatgcatatatttttgtgtaaatttttcgtttatgtcgatatataaaatgtttgattcaactgtgggataatttttattcaagatgtctaataattatagctaggaaagtagttagaaaaatcacttgaatcttttgaatttatgtgttatctgtaacaccttctatacaactatcattcaacggttggacaactattgaatgatcaacatgctagtcaatgtaataagaatttttttttgaacttctaattaatgtttcaaatatagtgttgctaatgctttacgtgtttttttataatagtttggatttggcattcaattataaaacaactattatgtaactttttaaaaccaataatgtatgaaatgtaatagcaatatattaaaataacaattctgtcagtaaacgttcacagaaaaaattaaagaattcaaactaatattctctcaatatttagtcgcttggttatgacatgtcttccggttgtgacttttttggccatatttgttgctcctattcttttttttttttgtttcacatgtacctataaattttcttttccttgatcttctggatcacacacaataaataccttgtgaagttaggttctttcaatttcagttatatgtagaaaaataggcttggattgtcctttatcttcaacggttggtaaccttgtttcacttggtgtttcagttgcaattgaatattttcttagttgtattttagcacttgtttcaacttctatactagttattcatacttgcaatcccttgagataaattcgccactagcttcgtaatttacatagttcattcttggatctcaaatttacatcctttcattctcagaaggatggtcaatttgagagaactatttagatactggaagacatgctacgagcatgtgtgatagattttgaaagttcttggaacaagtttctaccgttgattgagttctcgtacaataacagttataagagtaccattagcatggcaccttaggagatgttgtatggaagaaaatttcgatcacctatttattgagatgaagccggtgggagaagatatcttgggcttgaagcagttcaaaggactagtgaagtcataaaaaaaatcgatctcatatgcttgcttcacaaagaagacaataaagctacactgattcaaagcgtagagatattgagttctaggttggagattctgtaattctctgagtaccgcctatgaaagggatatgtagatttggagagaaaaggaagctaagccctagatttattggtccttttgagatactggagcgggtaggccaggtatcctaatggctagctttacctcctgggttgtccaaagtgcataatgtatttcttatctctatgttgaaaaagtatgcatcagattcgacacatattttgggctatgatgatattgagctttagacagacttatcatatgaggaacaacctgttcaggttttggaccgaaaaaaagtacttcagaacaagacaatcctactagttaaagtactatggagaaatagcaaggtcaaggaagtgacttaggagttagagtcacaaatgcaggagcagtatctcgagttgttcaggtaaattttgaggacgaaatttctataaagagaggatagttgtaatattctcgaacctaattatgaataattagaaattattatataaatatgaagtaattagggtacagtgagtaggattatgattctaataatctaattaagtgtgaattaggaatttttaccataagtggataaatagtcgtaatttattaattagaaacattttattggaatatgtgggtatgatgtatgttattcgttgaataaaaatatttttaagttcaacgaccttggggactcgatcagaggctaaaagtatcacaacaattttagaatatgatttcaatggaattattatgataatttgattttagaatatcaagatttagcggggtaacgatattggactattttatccctaggattacgagattacttagtgggaaagtaagggaatattagtctttttgtcctttgtttaatcaccttattttgagtgaatagtggttgtggctcaccaaatttgtggtgaccaacaacttggaaagatttaagatagaaatcaaaacaaaagaaattcaaagtgaaaagtaaagtcaaaactcacatttcttcttcatcctttctctccatttttgaaccctccaaaaccagaacaaaccagcaagctttattccattttcaagcttatttcagccaaggatagcaagaagaaacaacacctccatcctcccaagcaatctaaggtaaaccctaacccgaattcattagttttgtaaggttttagttggctttaagtggctgttttggataggacttgttgagggaatctggggaggttaggaagggcttcccatggttgtttaggattgattagaattggtttgaagtcttttggatggttgtagcaacagttatgcaagtttgagtttaaagaactcaaacttggctcatgcttgataacatgatttttgttgggaattttgctgaggtttattcatgaaaaatatttcttataatgtgtataggtgttctaaaaattttggtaaggttcgactcaagaatgagtgagatatggactttttaagattggacaagggaatttcagactgtcctatttctaaaataggtcgaccatttttagaacgaatcgtccattttgagactagtcccgggaccctaattttgtattttttttttcaatatttaaggtattctcatgctatctatcaatagggaaacctccatttatgaatttaagacctattatgggttaggttaagttgattaatcgattcttttttgttgttgtgacatagggtctgggatcgttgatctttctctattttgggtcgaccgacatacctaaattagaactagaggtaagaaagtacatccatactacataacatgacaagatacgattattatcgtttatgattcgattatgatcgaggtaaaaatacagtaattatcgttaagcaagagaaagtcacgatgtcaatcaaaaccattgttagtcttcatacttgtcaattgttttattagacaatgacaaaggtatgttgatgccaagatatgacatcagggttgttttattagataacaagagatgtgtggatgctgggttagggcatcagggttgtcttattagacaataatggaaatggttactttctgaagtaacgattatgacttatcttattagacaagtacttgtgttataatgtttaattatattattctgaattggttttctgattgatatgtgtttatgtttatttttcttgctgagtctttgtgactcatggatactttgcggtgcaggtaaatgcaaaagaaaactagggtagtcatgagatgacaatcttctctgacaaatatacatattgacttatccggcttgtatggtcgagttgtcaaaagatgttttgtgcggcacttgatgtgtattttgacttacttttgtatatagtcttattgtaaaaattttgtaacaggtgatcccaaaaataaatttttatcgatgtaatcctgttcattgctatagttttattttagtaaaacttttactattaccactgattttattaaattattaatctactattacaaaactatgttgtaaaggtacacacatggcgtccttaggagttaggttgttacacaaacgaagccttccaaacaatcgctgagacaatctggagaggaagtctaagaggtgcctctaaaagcctcttgcaggatgacgtgactgccctctgatacttggtccaccaaattagatcttgtcccttatgt

SEQ ID NO: 38890 - DNA, 5187 bp, Cannabis sativa
aaaaatcacgtaatacgcctatgctagttagggtgttacacagccgccctggaagtcttctatgaattatggaggccaacccagatggaaactttgattacctcaatgaaaacaaagaggcatatctttgtttttgtgtggcccagaaagacaaggaagaatcctaggcaaccaaccccaaagctccaaccgaccaaagccttgatgctccgaccactgacaacccgactgacttgtacagagagccagagactccagccgtataagaccttctcgttctcttttttttagtttagtctatgggcctttgttcagtataatacgactgactaagcgaccttgaaactcggttatacttcattttgttttaagacaactagctagtcgggcagcctttaatcccgaacttatcgtgcttttgttatctttttattttaaaatgagtatttcccgtgttttggtaattgcactgctatgttctttttttttggagcttgttatttacctttgttttgtacgagtatagttgcccccccaagtgaccgagcagacttttgactcttggtcacttgtattgcacaagttcattttttgtctgtttaacttttttgggttcgagcagaccctttgtacatattttaatggtaaattcataacttgctttaaagaaaaataattgacacaattagaatgatgataagtatctttattcatttatttgtctgaatgattttgtaaccatagtaacttacatttattgaattatgaaagttattacatgatctacccgatctttagctaattaaaacataaaacaattatatttttgaagttgtactttagaaatagtcatccgacctgagtaccagtcatttcatctaaatctttgatcgaggtctgctcaaaaggccacctacttaagagtaaatgttcgagcatcgtgcacttggagggggtcatcagaccttatgcacttactggtattattttctcaaatgtttcccgttctagtaccttggtaccagaacaagctccatgttctcatcataccctcccagcttgtatgctcctgaatctgtgacttcaactacttcatacggtccttcctagttaggtttgagtacgccagtcgtgctatcttttgtgtttagaaacactcttctaaggaccatatctcccacaaagaattttcttgcccgcacctgcttgttgaagtaccgagccaccttttagtgatgagctactagctttaggtttgtttttcttcaatctcgtcaagtgattctgccaggagggcgtgattagctttttgattataggttagtctcctgtgggatagaggttctaactctacggacaacattgcttcataaccataagccatagcgaatggtgtctgcccggttattgttttctccattattcagtatgaccacaatacttcaagtagttcctctagccaattccctttggcttctttgagcaattttttcatggtgtctttgagtgtcttattgacttctttgacttgaccatttgtttgagggtgtgccactgcgaagaaactttttatgattccatgtgtcacacagaaatctgtaaacatctggctattaaactatttgctattgtttgaaacaatcttgtgcggaagttcgaactgacatatgatgttttttaccacaaagtccaacacttttttagatgtgatcgttgctaagggcttgatctctatccactttgtgaaataatccactgcgaaaactgcatattgtactccacccttaccttgggcaaatgtccgatcaggtctattccccatatagcaaaaggccaaggactttgcatctgtattagctcattgggcggtgcacggggaatctttgaaaatctctggcatttatcatatttctttacataggcctttgaatcttccatcatagtcggccagaaatatccttatcttagtattttctttgatagactttgtcccgctgtatggctaccgcagaatccgtcatgtacctcgggcaggagttttgcatcctcttcttttattacacatctaagtaatggcatggaaaaacctcttttataaatcacaccttcaactatgatataccgtccaatctttctcatcatttcccaagcttcgttcctggcatttggaagttctccagtgttgagataagctgctatgggtgtcatccaatttggtgctatatctatctatcattttgatttcttccccacagttgatgatgggttcttctaagaattggatcaggactaagttagcattatctgttactgtgctgctcgagatccgtgccaaagcgtcagcagttgtatttttttctctaagaatctacctgagggtgtaacccttaaattgtgggagtaggccttgtatcttgcttagataggccatcatttttcctccacgggccacgtactttcccaaaatgtgatttactaccaattgtgaatcactacagacctcgatcctgagccagttttagcccagctatgagtgcttcatattctgcttcattgttggagtcttttgatccaaatttgattgatccatgtaggtgttgcccccaggtttgatgagggcgattcctgcaccagagagctggtctatagctgatccgtccacatgtactttccaggtaggtctatcttcattcttttcaggtagggattctcgtactggctccgagtcatcccttatgttgcttttttctttgcctgtgcactcaaccacaaagtctaccaagtcctaccctttaatcgctgtatggggttggaagattatctcatactgccccaactctatcgcccacttgagtaatcgctcagaggcatatggctcttgcaatacttggcgcaaaggttggtcagtgtatacccaaaaaagatgcgcttggaaatagggcctcaacttccttgtcgctaagataaggaaataagtgagtttttctatcaaaggatatcgacctttagcttcaacgagtcgtttgcttatatagtaaactcgatgttggacgttgttttcttctcttatcagcatgacacttacagtgtatttggtgacggctgggtatattctcaattcttctccgtccaggggttttgagagtacgggaggctgagttgcctttttaattctttgaaggcattctcacattcctccgtccattcaaactttttattaccttggaggatgttgaagaatggaacacacgtattcatggattttgaaacgaatatgctgagtgtggctatccgaccagttaagctatggacttcctttgtttttgttggcgatttcatatccaggagggcttgtattttctctggattagcttctattccccgaccattaacaataaacccaagaaacttacccgagctgaccccgaaggaacactttaagggattgagttttatgttgtagtttttgaagattttgaagcattcatccagatcctctatatgccttcaaccttcttggatttgatgagcatgtcatccacatatacttccatgtttcatccgatctggtttttaaacattttatttaccagtctttggtaggtagccccaacattcttcagaccgaacgacattactttataatagtatagatccatatctgttcggaaacttgtatgttcttggtcggatggatgcattctgatttggttgtacccaaaataggcatccataaagctcaggatttcatgtccggctgttacatccacgaggtcagtgaaatcaatacatacatgccatttgttgtgtggcttgggcactagtacggggttcgcaacccaagctgcgtagaaagcttcattgatgaacttgtttatgtgcagtctttctacctcttctttcagtgcatgtgcccgctctttgtccattagtcttcttttatgctggacgggacaaaagtttgggtcaatgttcagggcgtgagacatgatagtgggatcaataccgaccatatcctcatgtgaccaagcaaaaacatccaggatttctctcaaaatttttattaaagctaattttatttcgggcagcaaacttttactgattttgagtttcctaaccaagatatctgggtcaatttctacttcttctagttcttctattggcccaacatttgtatttgtttccccaagtcaaggatccatgtcttcgtccccaccttggctgggatacctggcttgcttcataaaaattcaacatgactctcgcgtgcacgtgttttttgtgcgtggaagatcactgaaagtgcgacacgtcttcaaccttccttcccagaatggaaggagtacttgaagtctgtctcactcatagtgatgttttcaccctttcatcttttcaagcaaagttatcgcctgaatttttatgcaactttagccttcctttgcataaactaaaggttgcttgataaaaattcaacacgattctcgcgtgaacattatttttcatgcaagaaaggtcactgggagtacgatacgtcttcaaacctccttcccggaatagaaggaatgcttgaagtatgtctcactcctagtgtgtttttaccctttgatcttttcaagcgaagtcatcgcttgaatttttatgcaactttagccttccttcgcagaagtcgaagcttgcttcataaaaatttaacatgactctcgtgtgcacgttgtttttcgtggaagaaagatcactgggagtacgacacgtcttcaactctccttaccagaatggaaggactacttgaagtctatctcactcctagtgatgttttcatcctttgatcttttcaagcgaagtgatcgcttgagttcttatgcaactttagccttacttcgcggaagccgaagcttgcttcattaaaattcaacatgactctcgtgtgcatgatgtttttcgtgcgtggaagttcactggggctgcaacacatcttcaacctccttcccggaatggaaggactgcttgaagtctgtctcattcctagtgatgttttcaccccttgatcctttcaagcgaattcatcgctttaatttttatgcaacttcagccttccttcgcagaagccgaagcttgcttcataaaaattcaacatgattctcgcaagcatattgtttgtcgtacaagaaagatcactgggagtacgac

SEQ ID NO: 38891 - DNA, 2867 bp, Cannabis sativa
tatttccacaacttataaacaacagtcctttttagaatagctcaaaaatgactaagaaaaaaaaaatctataaaattgtaaaaacttaaatttttttgtagtttttgggtatttctaaataattcctaaagagagatgttaaaaaagtataagtagtatttagcactattttatgtgtcaatattgctattgatccaattaagtatcgaatatcacttaatttaatgtaataattgttagagtatcactagctaatcacaatgcgatgtgtagaggtatagtctccaagtagcaatgctcatccctaaaacaatcacattatcccacaatgatgggcctggcccactattccaaaagcccaataagaagcccaatattattccagaaaaaactcaacactagtctgattcccaatcccagccgcattgctaagctttcttctctaaacaatctctaactctcaaaaccaatccaatttctcttcctttcaattattcggtacgccattttctctaatcaattttctcattttctcttttcaattttgtgttgttttcaatcaaatgattttatgaaatcttgttaattagggttcataatttcattttttgccggattctcaatagtcaacattacgaattaatcaattgctaactttaatttttttctttttatttttctgagtcattggcagaaatggcgtcgaggattgcttcaagaattgtatctcggactcagaggagattctcgagcagtggtaaagttctaggcgaggaggaaaaagctgctgaaaatgtttatattaaggtcattttcattatattttcactttgctgtgtttgatatatgtatatatatgtatgtatgaacttgagggatgattaataattatgataatttttgtgtgaatttattgacattgttagtatcgcactaaaaactaacacatttttttttttattttttttaactaaatatgactttaatttgtcactaatttatttagtctattgtgattaaaaacacaatctttagccacagactttataattacaatatagatttgatgacttataattagtcacaattttttcactcttaattttttttttattattagtcacaacttaagtaagtaagattttttctagtatttttttactgtagttttaagtaatttttggcgaaaacattcatatacattagatattcttttagcttatttgatgaaaaaagcaattattatgttcttgaaatttacaggcacttcgtttacatttctatatacataaaattgtttgttagtgtagttttctgaagcatgacattgctcagagctgtttttgctaattatataaacacattttcccccttattttggtaactaatttgaacaatgagcttattgggttttatgataaatttagtatatactttgttgataattaagaactttagaaaatgaaatcttatgaactacaatgaattacttatgtagtttatcacttaagacttttttgaagaaggttctgtcactaactaacatgtttaattcaattgtgaatactaaatttgggttcaaagccctgtgctcgtgtgaatttgaatagcttgtgatatttatctgttgcttcaaagtttacagtagatattgtcttattgtttctgtataatcttttataattcagaaaatcgagaaggagaagcttgagaagctcgcacgcaaggtatgactatggcttagcttacaatttacttgtatgtgttttaattttaaaatgtatacatgctcaatttggaaaaatttaggacaatttttctgtctagattcttgggaggaactatttttagtgcctgtatttataggtgtttcaaaattttttgattagaccttgatcatgtgggcattctttcttcttttttaagattttaaacaaaagctgatgagcgccaaactattatttcgacactattaacatctttgttctttcttttactttgtttggactttggatttttgtgtaagaaatgattaggagaaagaaagagcaatagaattttatagtatttcttttggagcttctcttttctaatatatgtttgtaaaagttttcactataaaattacatcaaattgaactctcttaaccaaccaagtgaaagtagagcactaggatttcttagaccttgtttagactttgaatttttagaaaaattaaaatttaagtgtagtataattttgtgacatttagaacaattacacatacagatttgtagaaattattttcctctatattttctcgattttccagtccaaacaaagtgttagatatcattttatttccctcctaaaatccaagtttcaaacatagccttgatttcttgtgacagtttaagtctagcaaaggtcaaattcacttatgctttgagcttatgcgtgtataaataaccccgaaatctttccagggacctaaaccagaagaaacagctaccgcaacctctgaggctgcagccaaaccagtcgaggcaactgaggccgccaaacctgctgcctcgactacaaccactgcttctggagaatcaaaagtatcaaccgacaagcatcgaaactacgctgttgtagcgggtgtggttactgcttgtgctgctctgggatggtatcttagaggcagtgagaagaagcaagaagttcaagactgagaataactcggttttgtcccgaaaaattacacaataacctctgcaaatcatatctcttctggttttcgaaaatcggaagtggtagagacacaataaatctgacttacattgttatatctctttgttgttctatagatatattgagttggcaatatatcatgacctttc

SEQ ID NO: 38892 - DNA, 1309 bp, Cannabis sativa
attgtcttggtaatacttatttgattttaaagacagattctgaagtactcattatttcattctcacaaatgtgattaaattgacatgattttatttacttatgtattttctgactgctatttttaatgtataaaatcagaaactgagcaagccaactttgatgacaaatgtggaagagtttgatgatgacagataatgacatgagtttgagttttaaatccctcaggaccaggttgagctttaaacatgttgcaccagaaatggactacactacactacaggcttaggatattacataacatacatacatatagatacatgtatacattgattgattattctgctattattgtttcataatttataattgtcaaataaagaaaatttcacaaaccaaatcacatcatcaaattcaaatataacttcttttatatgatctattcttagctagttttgctttgtatttaattcttattgttttttggttttggattatctttgcaactttttattatcaatttggaacatttactttgatttataaacatttattcacacttcatagttagttaccccaaaagataaaaaatagcaaaaagggtcatcatctaaacaacaatcatactagaagatgatgttatataatagtctattgtgaactttgcttttaaaaatcttgaattttttttttactaaattatataatggtaattactactttgacaatttaagcatctctactctaatcttaattaaaatatattaccaaaaaaaaaaaattaatcaagaaaagagattttcattaatcaaccaacaaaatacaatcaaactgtaaagcatttacaattgtagtcctttgacatgaatgagtttcacttagccacttttgccactaaaatagtgtagaggccaagctaaaaaaacccagccaactaaacataagctccaccatgttgacatatataagcagctttaaacttgttattcctacccgcagcttgtaaagagatttttattttaagagaaatttgcggcaaaagtctgcaaaaagttgagtttgatacagataagttcccaacctcaaaaaatagcggtaatagtcctcaaagttatgtttcttatttgtccgttagtcctaattttaactaagcagtttacttttttaaaattgtcacgtgtcgaaatattattggtccaaattattattttaattttaaaaataaataaataaataaaaatattactgccatcataatatataaaaattaaaggctaattaagatttttaccctccgaactttgacatgta

SEQ ID NO: 38893 - DNA, 1336 bp, Cannabis sativa
aaaaaaaaaaaaaaacaatgaggaccccgcttcctaaggatataaggcaacaagtggtttagaatgttatttatccttcaccaaacaggtcacaatgatcacaaaacaatgaatcataaaactgaaaatgtcacttggacatcctcgagctcaactgggcacaaagttgacatgtcgtgctttggcttgtatcatttttagtttccaactaattcctatgtgaatataattagccattatactgtaatacatgagagacatgccccaattaagttttaagtcttaaatacaagtttgaaagaaactgcacccggagacaccagggtgcctaggttgatattcaattgaccttggcgggatgaaggctaaggtttaggcttttagaaacttctttggatccaaattcctcaaatccaacttggaacaatgcaaaaacatgagttttgtcaacgacatcctgaagaagcatatctgaaactatgggtgcccaagctgacattgtaacatgggcaccgattttactccacttagtaactttagtgcgaattagacaaatatgaaataaagtgagcacttttcaccaaaaataagttaggacatgaacgagataactttcagagactttgcccctctacttggacgcccaatgctggctaggccactatgggcgctcaagttgacgtatctataaggagcacttcggtacacctttctatattagtcttttgggaatttttcttatttttgtcaacgatgaagatacaagtacttttggaaagaaaacaaaaccacctaaggcctagataaaaagctgggtgcccaacacatcaagagcaggtgccctaggtgcccaggtggacatataccatgccacttgtgattttgtcaattcaattgcgattccgtctcgagcattattgtttttctcccaaagcaagatatgagacttgaaatcagaggaaaatgtctaagtggtggttcaacccccaggtaccacactgggcatccaagttgacattcaacctagagctcaatgttttgtccattaaacgacaattctgtcctaggcattagtcttaatttgctgccaaaataagatttggatgcttccacaagtcaatatctcatgtatatgtgtcaagcacaaatctaccgacatttacgagcactaatcaccccatcatcaactagttgcaaccggtgatcacccagacatctcttgcgtgcatcaactataagaccaagagatatcctgctatttgtggaatagagaagagagctacgatgcatgcatgttattgatatataagaatttttttttgttgagcttattttg

SEQ ID NO: 38894 - DNA, 1151 bp, Cannabis sativa
aaaaaaaaaaaaaaaaagttaatggtgaatatgaaaaggatcacaattgtaagcttaatcctttttatgtattgagtttgaataaattaaggaataagatactaaaatagaaacataaaaaaatatgcatgttctctctggccagctcatccaagtattgcaaactatacttaaaccaagcaaactttattccctccaatatatatatatattctttttttctaattgggtttattcactaattgggtaacttaatttggatatttagtatttaccattggtcttcctccaagttactcgagtaaataacttgatctagtattagttaagttatgaatggtcactcattgaatattgtgagaaaatataccaatatcctttttattttcaaaaatatcaaacaactaatatttaaaattgataatatttagtaattacactaaattcttgtggtgggtaaaaaaaatacctcaattacttctaattacataatcattaagtaattttctaattaaacaaacacatgaaatctaataattaagtaattacttattgtttttcttttaataaaaaatggaaaaaaaaaaaatccatcaagactttttttagctcccaagacatctctaaatgccaagtttggtttggaaaatttatatatagaatatcaattttggcaaattaattatttcctttatactcaaaacatataatgctaattattaaaccaaagtttatgtgttaaatttgattggaaaaaaaaaagcattatatttagggattttggactatagctataaatattgcttggaaataaaatttgttttggactatattgattatttttttgtagccatgaaaaaaattattttgattagtcaaataataaaatataattatgactattttagaagtgtcataaaataaacattctaaattttataataatgatattagaaatctcattttctaagatgaaataaaataaaatgtgctaacaaattaaatgataaagatcaaatttgttgttgtacctaattaaaaatattaaaaattaattatgaggtagggcatttcaataatttcctcttttagtatttacaagttaggtgtatagagttaaaatggcaataaatataatattacattaattt

SEQ ID NO: 38895 - DNA, 2304 bp, Cannabis sativa
aatagatactatgttgttggtgagaattctcgatccagcactgccaatgatctctcgaatcctttctttctttctaatggtgataatctaggagcagtactcgttcccaaaatcctcacaggaagtgaaaattatagtacctagaggagatctatgatgatagctcttgttgctcgaaacaagatgaagaacatgataatggtcaattgcctctgccagatgaagaacatgataattacgatgcttggtgtaggtgcaacagtactgtgatatctgggattcttcatacaatctctagagaaatcgcagataacattatgtatcttgatgatgctgctgagatctggtctgaatggcatgaaagattcaatgagagaaatgctccaagaatctttgaagctaaaaggttattcagaatcttacagaaggatcgagcagtgtaagtacttatttcacttgattgaaattgttatgggatcaaattcatgaatgtagaccccaacctgtttgtagttgtggtgctatgaaggttatacttgagtatcaaggagaagatcggcttcttgagttcctagttggactgaatgattcttttagtaatgtcagatctcatattctgatgagagatcctcttcctactattaacaaggcttatgcttcagtggtacaagaagaaagacaaagaaatctaacaattggattaaatggttcaagtggttttcgtgaggctgaaaaatccttaagcaattctactggacaatttgctagtgttgttcaaccatttctatccaaatacaattgtactcattgtggcataaattgacacacaattgatagatgttttagaatgaatggctatcctcctggtcataaacttcatggaaaatttccaaatcgaaatgctaagggaccccaaggaaaaactgcttctgcaaactttacaagaacagatgaagagaaggtagagaatacactaggggataaagatcttgtgtccagtttgtccaacattcaatgttaaaaactcatggctttgcttgctcggaaagtagctgataacacaccacctcaagttcctaatgatcaactagttgtatcatactttttttggtaagagttctcttgttcataaccctaaatggatcattgatacaagagtcacacaccatgtgtgccttgacattactcttttccaagatacctacaatgattctagtcttaaaactgtccttttgacaactggttcacatgctaaagtttcatgtattggaacaattgttctgactgttgatcttgtcctcaaaaatgtgtaatatgttctacttttcaatgcagtctgttatttgttaattctttaacagccacaactatttgcacctttttgttctcccataaaaaatgtgtcatccaggacactgtcaagaacaagaggattgggataggtgagaagtgtggcagcctctactatctcaaccataatcttcttaatgtccattctatttctattttttcatcagtttcagattccaaaatttctaatgaaactatttggcaagaaagattgggcaattcttcttgcataaaaactcatccattgaataaagctttgaattttcactctaattttaattctctaattcattgctttatatgtcattatgcaaagcaaaggaaactacccttcacatctatttaccacattgacaagaattgttttgatcttgttcatgttgatatttggggcccctataatactatgacaactaagggatacatatattttattattattttcgatgattgctctaggtatacttagatcaatctcatcaaacagaaatctgatgcccagattgtcattctcagttcataaacttgtttaaacacaatttgataaaaccatcgacggttttaggatagataatgctaaaaagctgcaatttagtgaattgttttccaaacttgggactatgcatcaccactcatgtgtccaaagacgacagcaaaactctatggttaaaagaaagcatcaataccatgtcaatattggtagggctcttttgtttcaatcatatattcccttatgcttttggggagagtgtagagccacttctacatacttaataaataggacacctacacccaatctcaaaaacaaatcaccatttgctgttgttttttccaagcctcctatttatgagcatttaaaagcttttggttgtcttgcatatgcatatactttgagtcaattatcatgacccaagttttctccaagagttgctttatgcatttttcttggctatc

SEQ ID NO: 38896 - DNA, 2988 bp, Cannabis sativa
atataacttgtaatgttacccactggctagtgatcaacttaaggtagtggtcacagttttcgccacttctaacttctaagcttataatcatgtgcatactcttatatagtataatgggaaatcgtatctatccgtaatgtatacatagccatctcttttatatagattagtattgatttggaccaaataatgtttgtgtttgaagaaacaaatgaactattctttggtcgactgtgtttttcatctctagagctttcatgtaatttattatgcttggctgctattttatcatcaaattaagaagaataatgttatgtagttgttatgtaatggctaagaggagaatatgaaacaaggtgtcataagtaccttctcttagactaattggacaagtcttaacattagttccatttaaggatcttatttcccgatttatgttgggttgaaaaactcttggtttgctgagcccttatacaataaaattaatcacagattaaactaggaaataaaaattttgaagttaaagaagttgtataattaagcatgtaagtagtagtactgtaggcatgcagacctgaaggaagctcaaaaatgagggtgttttggtttggctgtcgaaattggtttctaacacagcagtttcccatgacccaagagtagatcaaacgtggacctaactaaacgtgaatgaaatttgtaatactagagtgaagattataaagaagatctagtacttgatgatgatcctgtgttaatgatattatagttatagttgctaaaaagaggaagaaagggtttaattctaagaaaaagttactataaatcaaggtggccaagtaattccccatagacattgttttagccgtttggtgaatagagcaaggtcaataacatagtgggacgtttcgtgaaaatttaataagagagcaacacattctggcgattattactaagcatatatattaagatgcttctttttcttcttaccatgatgaaatcatgttccataaggtgataactatatagtagtatatacttttttttttctcttacaaaaacttctattttaggacagttggaagttagttgatttgcacagtatgtatatatcatccaaatctgtttaatatattatttacagtttaggatgagatggactttattatgtgcattcaaatccaaaaaatgtgtacttcaagtgaagaaatagagtaggaaatgagactgactcagcaagcaaccgtctgcaatgaaatttttataacgcctcctttttgggcacccataaagccgtaagtaacaggtttggagttgttaaaaaggatggataggcacacacctgatcattgcctgatcgttacactactacaaaatcgggcattcctgtcgctcctcaaaatgattttttccgaggatcatcactaataaaattaaatgagtgtttaaaaccgtcgaaaaaaattgggtattcccgacaatttagaacacttgtgaggctatttgcaacgatttttaagagtttaaacacagattttttaaatgaagagtacccgaaggtttaaaattgtcgactatagtttacctgacggttttaaaccattggatattataaatctaattttgacctactcagctcgatcattttcgtctctctctctctctctctcaaaagtttcgtcccagcccattgcaagtcccaagtctttgactaaaaccacccattaaccctctctttctctctctctcgttctcgttctacttgttgggatttatgccctaaaagtaagtacttaatagataatatactagagaataattgaaacacaattataagataaatgatacattaattataatagtataattaataaatatctgaaaatttcttattcatatagagaaggtataatcttgtaaggatgtacaagagaattaagattatacgatatgaataaaataagtcaatagtgtattaaagtaatgtgaatctttaatatggatctgctcagtacggtttactatacactatacttctagtgtgtgtgattttgattcggatcacatatgtggatagacatgtagtaaaggtgatgtttataattccattatgcatgactagaccaagtaataaatatctttcattaacgtatcgtttaccatgaaagagttattcatatcacaacgatgatcattagtagatcatcctaaattctgagtatacatgaactcctatttgtcttcattgtcactcgttaaagtttctcagagatgatgattctttcaacttctgttttgggagctgttattgagcaaatttttcgcctagaaactcgagaccaagctcccataagaatgacacgacacatcccttgaggattactgagctgtcaagaagggactccttgagaagttaacctcgcctgaaccaaacttgcgagatgatgtgaccgtgacagagtctagtcgcattattacgcctcacataatataaagtaaaaccaggaccaagaaggaagtatacaagtcgcacatataccgagatatatgcgatgactaagtagtcttcttctgcgacttagtaaagatcatttctttacataaggaattggtccaaatgaccaagcatattcgatgactcgataaggactcgcatgtcctatgttattaatgctgataaggtatccacatacgcaactcgattaggacgcaaataccttaatgcaaggtcccttagcctcctttgttgtaataaaacgcaccctaagcttgggagcttgtgagagaaaatgaacaggaaactcgcgctatgaaagtcgcatacattgttgtatttagtgaaacagatttaaactgttcttcatttattcctttacgttcattttaatttaatgttagtatttaatgtaaaaaagttctataactgattaagttctgtgtaactaaaaggacacttgctttgtatataaaggagtgatccaacatgaataa

SEQ ID NO: 38897 - DNA, 1562 bp, Cannabis sativa
aaatctagatcctagtaaaaaacatattccaacatggtcatccgtacggaaggggaccacttgacagtaacaggtagcatgcgccgccgatcatccacagtaccaaaaaggcatgtcccttttggtattgtgtgcattttccatgcttaagacagtggacaaacccttagtttttttggatctggtgtcagaaaggtgccatataagaatactctaaaggtcccttttgttgccttttccggaatactctatgagggcgtctagataggttcggttgggtctttattcttttggacgagtcgcctttctaggaccaataaggttcggctttattatgtctatacatgggatttgtagctgaatctaacgtcgtgatccaactctaagatgggttgacccattagtttgactgagcttgtgaatggccccgtcttggttaattttgatctttggaagtacatgtgtcacctattcggaaacacggataacatttacccccaagccttcaagacttgggagttgtggaggccagtagcttcctttcagagtcattgtggtacgtgggatcatgaacagttctggccttttagaatttcgaggcaataggtcgcggaagctcgcgaacttttcattttttctatgagtggaaaacacatgttataatccctttgatccttgtgtatcacgcgatttgagaaagcatgtgaggtttggggttgtaaaaccacaattggtcatgtcagtgggatttctaaggtgaatgccatcattaagtagccttgatctcgtatacaacatttaatggcaaccattcgtatccccggtattatcttaatttttgtccacctgacatggcacctccatgtggcaaaaagctgaaaaacacattagagacagttcagcactaaccggccaggctagtattgtgcagccttccatcctttaagatcccatggttgcacggtagacacaaacaagaacaacatggagacttataagatctacatcttcaaggttctgaaccaagttcatcttgatatatgagtcactagcaaaatacaagcacatgcaagatcctggtcggacctttagctggttggtcaggggaggcaaccccatgcatcgggcaacctcaagtatagctggccagccaagcgtataggtcatactccaacacttgtgtttttccacacaagcctttcaaatcatcctcagcactcttacaactttggaacagttcaaactacccaggattttagggattcaacaccaaaatgtaacaaccctattctttaggtatactttctgttatgtcgattttttcccacctaacgtggcatgtctacgtggccaatatcaatgccacgtggcagtacaactcactaacaagaaggccaaatcatctactcagcacttaaaccaatggggggtcccgacactcaaacaggatgatgaatgatagaccagccacctcaaggaggttggccgatcacccctggctggccctatggctagcataggccgaccagcttctggacaacacaaggctggccaacctgcat

SEQ ID NO: 38898 - DNA, 1665 bp, Cannabis sativa
  modified_base (30)..(31): a, c, t, g, unknown or other
tcaaactgcgaccgcaccgcaaagaatttnnaaccgcattttttttgcggtgcgggcggtttgggcggtttgatgaacactcctaataaatagtactgtttgtttaataaatatataaatatataaatattaatattattttttttttaatttttctttataatataaagtatataaaattaatattttaattcgattttattaaaatatataactaaatagatataatttggagttcttacctaataaattcaaataattttttttttttcaaatttattattttcgttgagctgacattattaaaaaaatatttagtcaaaagttgaagattttttaccattataaggtggaatattagtttgtgactcaaataataataagtacaaagtgaagttagtattttatcacatatattatataacagctttaatatacttcctcatgtatattgtgttgtgacgtgtctttcatttttaactcatgtatttgttatatttatagttaatggctagacaaaataaagaattagctcaatacttttagggactatttggaatgggttaatagtagcagaggaatggtaatgtgaaacattatcttgtttgttttgaatgtttagccttagaatgttattcttttagtaaaattattattcttgaggaaggtaatattaataccttaaaaaaggacagaattgaattattacattccattacattaatttgaatagcatttctgaattaataaataaatttaaataccaataatattatcatttattataaacaaaatattatgatatatatttagtgtgtgacatcgatttttttttaactgagttatttttatattattaacaataacatatatgtattcattatacataaattttatgcggatggtgtacataaattacatagcgaacaaaaataaataatgtagtgataaaatatatagaaatgttcattttaattaataaaaaatgcaataaaatttaatatttattaattaataaatatatttttttaataaataattatttttttttatgtataattaacattaaatacatattcattttaaaaaaaatattaaatagatataataaaaaaattatttttattctttaaaataatatataagattcctatactcaaccaaacagtgtaatttaattaacagtagtatgattacatatcaccctacacagccaaacacatttacacgttttcctacaatcatattctcctttataatattatttataatcaaattattttgaacacctcatacaaaattctcccttaatatattatactaatattttgtatttaattttatttttgttaaaaaacattttaatttaattttttttgaattactattataattttttttatatatttcatacctctttatattaaacatctttctctataaaaaatattatttatttaattacattatatataacattatttattgtaataattgaaaagaaaaatatataatctaatataaaattaagcatttgtatcttgcacgtaacattaatctattatatattacataaacttctagttttggtaaaatatttacacttttacgttcaatttttcttttacatttttacatctcattctataaaaatacaaaaaaaaa

SEQ ID NO: 38899 - DNA, 2442 bp, Cannabis sativa
catattaaaatcaattcaaatctactcacttttataagtttattacctaatatacccttacatatgttactttaattaattgagtctcaaatgcaaagaaccccaattctgtcatagcagttcaatgcatgcaatctccacctcttccatcatcactgactcaaaatattgtgtaatgataaaaacaaaattaatagagtgattaaaaaaaaaatatataaaaaaagaggataaagtttaaagacaccaactaaaaaaagtatacagcctaatttttattattatattttttttttgttaaataaattatattttaactatatacttaatcatatctctattaaagatacaaataatgaaaactcaaatttatgagtaatgacacatactcttaatttacacactttatatatttaattttaattatatataaataaacagtgctccttaaaaatagtaatagttgatattgaaagcacattatagctagtttatagataatacatatatatagtgtgtgtaattgttggtattaaatactcattatagtatgtaataagagtgaatgtcaaaatctttgagttactctatattatataaaggaatcaaatctcttgttcataaaatctgatcaaaaaaatcattcccaaaaataattgattgatcatgcgatgtttggttgcatattaaaatattaaaatatcattttaagaaattaatattttttatcattttagtaaaatgattattccattttaaaataaaaaatatacatataattcaatattagaaaaaaaattaaaaaatatatatttttttatacattttaaattttattttaattcctgtttcttatcctcattcatttttttaattttcatttctcctaattaaatacgaactaattaattaaattaaaaattatcaataatatatatctatatttatcatgttagtattcactaacaaaacaagataagaagataagaagtgaagtgataatatatttatataaaatacaatttaagccatttttttagtgcaaatgtttgttattaagggaacaagaaattgtcaaaccaaaaaatatatatatatatatatatataatgaatttgtttaaatgtctcccattctttacatttattttttaaatttaatgaatcaattttgtcaaaaataagttaataattaataaatatagaaagtacaaattaaagtgtttataaaactacatttaatatttttaagcttattatccaattatatattgactgagtgttaaattttatcaaccgattagatctaattaattttaatcatccaaactcatctaagattcattgaatcggttctatttcatgtatatccattgaattttgtcaaatgattacatctagttcatatttattcaatattttagacttaatatttttggatcgaattaaatctatataatattttaggtccaatatttattagattggattggatccatcagatccaaaaataaaataataataataaaaataagtaaaatttaatcctaatttaatatatgtataaaataagataaaatataattacttttcaacccaaataaaaatactaattaatataattagatattggattgtattagatatttgaagacatcatctaatattcgatttgatccaatctagttcaattaaatattaaaaaatagcatcatatttaatccgatcataattaaatatttaatatttaactgctagttattattattattattttgtaagagaaaatggaagcatattaaaataacaaaggttactatattacgcaaaaagtgaaagattttcttctatttaaaaaatttattgatgctaagtgcatgcaaagatactctaggagaactagacaataaaattttaatataaaaaaaatttcaaacttacttccactctaccaataaaatacctacaaaataaatgataaaaaaattgatcaatattaaatttttattgatttacaaaactaaaactaaccaaactaaacttataaaattaaaactaaccttagtgactttataaaattaaaattagttatactaggtgtgacaaaccaaaattaactatactgatattatcaaatcaaaattcaaaattaactatactggttttataaaattaaaattagccatataaaactaaaactaatcacactaattcaacaagtagttacttaaattactcagttataattaggtgagatcaatttttgtacatagttagtacaaatgaataaattgggtgaaatgaaaggtttcattcgtgaggttgtaaataccatattttttttttctttcatttattattatttttttaaaaaaaaatcaatttttgttcccctttcaaaacactaatattatatgtggaaaaaaatcacactaagtattat

SEQ ID NO: 38900 - DNA, 3086 bp, Cannabis sativa
tgtgtgcttttacaaacttatttctaactaatctattagtttaagaaaagtgtggtttaattaaaaacctttgattgaacttaaaataaaactttaatacaaatattgtcgtaatacggggatcccctatttataaaattctttataattaattacagaaccattattacaaaagtaggttacaattccagagatagaaaatagggttgatcctacttctcggaagccaagacatcacggctgatatgtacattgctgggagacctctaactcatggccgaacaccactgctattctttttacatgtaccatgaagcacccgtgagtcacaatgactcaacaagaaaagctattagacagaaagcattaaaaaaatgcaaatacttacatcacaacataatatatatacttttgattcaaaacataagcatgcatatatagtttggcatctatacaaatacatatactactcattataagaaagtcgaacaagtcatggtcgactacttcattttaacaataaacagatattcacataatctacatgcttcacaaagcacttaaatcacatatatcttcaataatcacataattttagtgcttcataaagcacccttaccacttgttgttcatgagctgtgtatgtcactatcgtcgcccgatacagcgaacgataagtaagaaatctaaccgcagtttcaggagtaattactcataacggtaatgaccctatcttctctcgatcataatcgagtcactaacgataataatcgttacctcgatcataatcgagtcaaaaactataataatcgctatctggatcataatcgagtcacaaacagtaataatctctatctggatcataatcgagtcacaaacagtaataatcgctatctcgaccataatcgagtcacaaacggtaataatcgctatctcgatcacaatcgagtcacaaacaatagtaattctttctcacttaacatgtacaatgcgtatagcttttcttaccgcagaccagaaattaggcatgcgggccgacctaaatggaataaagctcgacgatcccgagtcctatgtcacgacaacaaaatccaataaacaacttatccatattcaaaacaaaccctatctccataaccgaacaaattctaactctccactggttcaaaataacataaacgtttctaaaatatcctattctaagctttgaaaaacaccccgagcaaaaccagttttgaagctaaaaactagagtttacccccacgactgccaaaaccggtcgaccagtttcactatggctgtgaaaccagttaaccagtttccctactgcagaaaaatggaaactcgagtttttgctccaaaaccgaacctaatctcctccaaacctgttcaaactctgcagaacagtttaacaatataaaaataatatatccaacatccaaaactcagaattacattcaaatcacaaaatcacaatgcttgaacaaaaactaggttcaaaacttaattttccaattcaaacctcatagctcacaaaaatatcacaaacacacttgaacaactttaaattcaacttagaattgcactctgaacttaactcagcactataaccccaaaatatatgaaaacaccacaaaatctaactcaaaacctacaaaattaaagagaagaagaaggtgatcttacctccaagcttgaacaatccttaaaccttatcaatcctactagaaatggttgaatttgaaaagaaaaccccatggcttcagctgggttctagggctttgaaggagaagaggagggagaaaaaaaaattctatgaaatgctccttatttttctactttatcccatcttatttcctaatattgtttaacttaatctaaacttaattttaatataacctcaacctagaaattccatacaaaacaaaaatcctaaccccaccaaaagaccattttacccttcataaaacattaaaacctaaaagtaaccctaggggtattttagtcatttcaaattccccaaataaactagtaacttaaatttcttaactattccgggaaagatccattgtatcacaactcaaattatcgtgacaattcagaccactccgtcgagttttccacggctgtcgaacccgaaaataatttatttcaaaaatagtatctgtgatacccacatagttcgataaaatcttcgtaattaataaattacgctttatttatttatttactcgtaattaccttaagtaggattataatcctactctactacccacttaaccacgtatttaataaaatatgcccaattaaatatcattatattttctgggatattacaattatcccctccttatagaaatttcgtcctcgaaatttgtctaaacaactcaggatacagcttccgcaactgcaactttaactcccaaatcgcctttcaatcttattgttctttcacaacactataactaccgatatagtctttgttccacaacactttctcttttctattcagaaaaaaaattgtactgattgttcctcatataacaagtttgtttgaaattcaacattcttgtaactccgtatatggatcgtttctacctcatacttctgaatattaattacagattatgaacttcaagtaaggcagggagtatggctagctaataagctacctaatctcccctttccagaaagtcaaacggaccgatgaacctggaacttaacttccctttcttcgcaatttctgagttcccctcattggaaccacctaaagaaagataaaattcccaacttggaatttaatatctctacaccttggatcagcatagcttttccatccattatataaagcaacatacaaacttgaatccttaaactgtatcagtatcacattaacaatactctaataactgttattatatgaaaacttattcagcaaatgatgcttattttaggaaccttcaaaatctatcatgttggattatattttaccatgatctagatttactaccatgtatattatttaacatcctaaatatgaatttataaaacaatgtaattttaacatatataaagtttgagaaacc

SEQ ID NO: 38901 - DNA, 1035 bp, Cannabis sativa
tttatacttgtttattcagcaaaataaacagcaaaaaatatataatatcttgtcttatcttatacaattttttttttttaaaaaaaaaaaaactggatttgacttcgtgttgtcaaaaaaataaaattgtcaattattttattctccctttgctcattatccattaaaaaatatccaaataaaaaatattataaaagtaatataaagtgattaataaatataaattttcaatattgagatataaaattgtgtctctgtacataatacattatttattcattttaaaaaatcattatttactgaaaaataatgtttgataaaacatttaaatattgatattttttgggttttttttttaaatggatttttcgagtttcaaaaaaatgttgatatttttttattataaaattttagggtgccgatattttttaagcaatataaaaaacttgtgtacgtcaatgctagctcgaattttaaaagaatgctacttcactaatggtacttttttagaggccaagtcaagctcctttatttggcgtagtattttatgggggaggatcttaattgcaaatgggattcgaggtcaaatcaaatcgaataggcaagtgcatattaatgaagacaatagccattggcttcctcgacccatcacctagagtccctgcaacagccactctaggtcaagttggggccactcttaaaaatgtggatggttcctagaatgactctcatattaccaccatatttcataaagatgatgttcttcagatttgggtttagctccttgtacctcaacgtgtgaggatgatttggtttggcactatacatctcaaggcttttatacagttaaaagtggttatgaagtgagttataatgtccattcagttcatgaaagttctcaagaatgtctgctggtgtggtggaaaatattatggaagctggaagttcctccaaaagtcaagaactttacttggagagtttgtaaaagctggctccatacaagttctgtcattgtacaccgaggtatgaagattg

SEQ ID NO: 38902 - DNA, 1394 bp, Cannabis sativa
tatatatataatttaatataacaattaattttattgataagtgaaacaatacataattaattattaaatatggaagaatttttttaactaaaagtttattttttatttatagtgcatatcgtactaatctatgtattgtctggtacaatattaatattttaaattacatgtaaaaattatcttatcaaataggctaattagtaattttttccttgacatgtatcaaatcgtgctccttgaatttttttggccattaaaaattttcctcgaactattaaaattgttaaatttaagaatttttgtctaatttaattcaattttactttttagtgattatttatgtactaaaccatgcttcccacattttaatatttactaaaccatacccctcaaactttaatatgtattaaatcatattccttactaattaaccattcaaatataattgatggcagcactaaattctaaacacatcacaagctactttgtctaatcaaaaactaaaataactcattgactttacaactctaatgacaaacaattcaatattttaccaatgagagagataatgtaaacgtgtgtttttctcatcgttcgtattgaaaattattccttttacaattttttaattgatgtattactgttttcttaataaaaaaagaaatagtgagatggagatattccataaatatggaccgttgaccaaggccccagcatctaattctttactgtagaacagggtgaccctgtaataagaaaatattaaacaaaaagcagttaaacaggttgtccattcatttccattttttctaaaaccgacttcaaaattattgttattattcttatttgcgtgtccaaaccaattttctttctttgcctaattggaagttaggaatcagaatatcattctattattaattgctaattcaccattacatgagtacacatgagacaaaaatcagtggctaatatttgtccacattataatatttagaagaaattaaattcaaaactttataatatacataattttctattgtaccaactacctatttcatatagttgagccagtagccccatgaaaataaaaaaatgaaagagacaaatgaaaaatcttgtccctgaaaacacaaaaatatatacaactagacaaactcaaaacgttgctatcttgatgatccgctccttcaattcaattcaattcaattccccgaaccagctccttcatgagaacaacttatatcaccggttctatggaatattaaccgagcagggtatctgttgttatgccatttttcttgttaatgggttcatctcatagatgacttttttattttgggtatgcttttgacttgaatcaatgatgggttgttcaaatttttctatattttttt

SEQ ID NO: 38903 - DNA, 2116 bp, Cannabis sativa
catatttttgaaaataacccctaatttaattaataattggatttaaaaaattatgatccaataacatttaacaatattggattttatgctggatttaaatttaaaaaataacctttaattaatattaattttagtttacatatatgtttaattaccttaaattaaacatatataattataatttgagtttcagtttgtggaatttttatattgttatagaatatttaagaaaaattttcacaaatgcacaaaagtaagaaaaatttaacaaaaatatgtgcacacgggaaaaggaacataaatacgctaactatatattaatttacataaaatatggtgtcacattctttgatgccttcaacactctcatcctaggaaaaaaaaaattagagcaggccactgtttcttgacgaaggtttctgaaacaaaaattcaacaacaattcaatgaaaaatccacaaaaaactcacctattcgaatattgattaagttgacaaaaataaaagacaaacatcaatagaggtcaatccattaataacaaattctcatagaacaaatctgtttacaagcaggtatcaaacattcgaaacacaaatctcagaagaaattgagtaagatctacactccttattcaaaattttcatttgaatattgcagatcatataataaatagttgagagattgttgatcggagctccctactaaatccaaattcaaattgaaaacaagtattaaacatcagagccacaaaaatcaaaatgaataaataaatatctatagtacaaaacatataattgttgtttaattgttgcagttcatactacaatgagttgaaaaattactgattgcagctccctactaaatccaaaattattttaaaaacatgtatgaaaaaaaagtcatgaaacacaaaatgaacaaaaaaagatctatactacaagtcatataattgttttttaattgttccagatcatacaagaatgagttgaaaaattattgatcggagctcccaatcaaatccaaaaaaaaaaattaataaggtattggattacttatgatgattgcatgttaatgattagaacatttgattcattttttctttaaaaaaagatataatagtgaataattattgttgtttaattgtttaatttgtgtaaatcatttgaatgatcaatttattcaagtataaaatagaaaataaaaaattgagttacatatacattgaaaataaaaaactgttgatttattgttaataatttggaataaatttaattttcttaaatccctctaagaaattttaaattctggtttgataaagaattaatatttcctgaaaaaaaaataaaaattattgttgatttattggttaataaatgtaattcaaatgtttttatacatgaaaaatataaattaattcaaatctttattgttgtttaattggttaaattttgtaaatcatttgaatgttcaaattattcatgtataaaataaaaaaaaaatagagttacatatatattgaaataaatagaaattgttgatttaatgttaataagttagaacaaaattgtttttcttaattgcctgttagaaattttaaattttggtttgataaagaattaatttttctgtaaaaaaaaaaaattaaagattaatgttgaattattggttaattaatgtagttcacatgttttcatacatgaacaatatatacaatttaatttaagatattggaaaatgtttagttgatttgtagacaaataaaatcaatacttgttctagttcaaagcaatggacattgggatgagaccaattaatacattggttttgaagctactggatatacatccaaaaaaactacaaatatacagaattagtggacagactgttgaaaaaatataactgcaacagaaacttaagtaccctacaaatgcagtttcaaatacagactggatatccagcgttaaagatcacagatatagaaagactggagttttacttgcaggaaaaatcaatagaaaaggacatgacaaaacatcctttgtgcataaatatggtcccaacacaaaaacaacatcacaattaccttttttttttttttttgctgaggttgacacag

SEQ ID NO: 38904 - DNA, 913 bp, Cannabis sativa
aaaaaaaaaacaaatgataataaaacaagcctggtaataataacaaaacaagaataatttcaactgattttaatagaaccaacttggcaaacacaaaataccttaacttttacgaatttcattaacagaatttatctttttccataaagacccttttcaagaacatgacccaccaaaaaaaaaaaaaaaacaccagtttatacattttcacaaacaaaaaagaaaaatgaaagagttatggtgggtcataccttaatctgggacaaagtggaaccagaaatgggagtggtttaagggaagaaagaaaaactagagagaaatggaaattcagataaatgaatgaaataatcagctgaaaagagaaaatgacaggtaagaatgtgagagagagcggggaatgaggaatgaggaagaaggtctgaagtttttttaattgatttttttttttttagggatgtctttgttgaggttgaatattaatacttagtggctttgattaagtttctctcaatggatcttgttttgtttctactaaaagctttctctgttattcagggctctcataatagccatgctcttttctattcttgcatgacttatatatagcagaaaccaaagagagtgacaattattattattattattaaactctttattacatatatttttgttgaccgtaatttatgataatgtattatatgtaaaatactatattcattgtctatgctttattttgggaattgaatttttaaaaaattagtgagtaagaaaaaacttttttaatttttaattatataatttttattttgtgagacttatttattataaaaaaaatatttgtctttacattagaattattcctactaaatttatttaattttatggaatatttttttactgttttagtttttaa

SEQ ID NO: 38905 - DNA, 2111 bp, Cannabis sativa
ttagaaaatatcactagtcaatcgcaaagcgacacgtttaaaaagtgataggcaccactagtacccaataacaatgctcttttgctaaaggaaaactttattaaaaccaataaactttatagtttgtcaacaatataggcgttagctcccaaagaaagagaactactaaagtagcttctagtccaagaggctaagacatccgcaaaattattgtcatctctagaaattcaaagaaaattataatctaaaacattggcgattatctttctgtggcctgacaaagatccttgcaatttaaaaataaatttgagctccttaccctaagatgaatgatcatccacttcactaagaattccagcatgagtctcaatctccagcgttgtagtagccccaaatacatttattttggtcgagcacaccctgttaaggaagttagttacttaactgtctttttctgttatatttagttagttgttagcatcttttggtgttattctgttagtttagctactatttgtttaagctctctaagtgttatataaactcacctctgtatctctctaaatacaataaaatcatttgttttaattctaaaatgactgttatttcaatatggtatcagagctctaaagaaactctaaactatgtccttcgtcttcatcttctttgtcctacccagcaatgtctggctcaactaacaatctcagataacctcaatacacagaaccaatggccttcaaacactctctttcatctaaactcgatgagaataacttcttatcttggaaacatcagatcctcacaactgttcgaggttgtcgtcttcaaagattcttcaaaccgcacactgctccaccaaagtatgaatcaaaaattgatcatgaacttaatagatctctcaagactatgtcgattgggaggctaaagatcaacttctactttcatggatgttgtcttccatgaatgagaaaatgaacacaagaatgatcgggcatgaaacttctatcgatgattggctagctctccaggagttcttcactgctcaaacaaattcaaaaataagtcaattcaacactcaacttcgtaacactaagatcaacattcatcttcaattaatgactatttgtcgaagctattactataacagatcatggcgaagctatattcaatgatcttggacctaaatatgacattttttctacacgtcttacaatattaacaaggagaaattcaccatagctaaacttgaagccccttctcatggctcaagaagcaagaatagataagtccaccaaaaatctaaatctgcagaagtaaatcttgctcacaatggcaacatgcgtggtggattctcctccaatcataggggaggatacaataaccctaaaccataaaccctaaaccctatacaataactataaagatcccttaccctataataatcctaatcgtggtggtggaataggtttttctggccgcgaaggtggtccaaccaaccttggcaatccaagcagtgtatcaactctgccagaagacaagtcatgttatcactcaatgttattatcagttttacaagtctttccttggtccaacaaccacacttgcaccgaatcccaccaccacagcaccaatgcaagccatgattgccataccagatgcagtttctgatcccaatgggtaccctaatttgaatagcacaagaaggcttgcacttgcagtccatgttatacttttccttcacaattggtaaatggaaaataaattcattccaacttccgagatagaaagctcaatacatactatagaacattggtcaaatctgaagtgttcaaaatgccaaataggaatggggaagaagcagtgctagaaacactcaattcatccaaaccaacctaaggaaaatttaaaactaatatccaaatccccagcaaggaatgaaaaatcacaagacttcagattctgaagttgagcttgttggaaacagtttctcaacttgggaccgagcatcttcaatttctgcaccttccttctgattcaactcttctaactctgccaaagtagctttaaggtcagctaaggatgactccagccgctttctacaatcaggaatc

SEQ ID NO: 38906 - DNA, 2258 bp, Cannabis sativa
tctttattgatattgaataatacggattacattgaatttgagttttatttagggcataaatcccaacacttggttcatgcaccatacttaaagggcctgaagaagaagtcgtcgagatgcatggtggtgatgtaagagtgcaagaagttgaggaccaaggcgaggttcgtctagctcgtgctgaagaaaaagaagtggtccatgcgactctatcgtatgaaggatataacgaggatagggagccaattcaagaacttggtgaattcctaattaagggccaaaattatgtcattgaggaatagaagaaagctcttcctacaaagtaccaagaaaaacccaaggctcagtgggtttctcccttgtccattctttcattgaagagacttaagaatctgcaggccaagggtgtcctcggtggtgtggaaacttttcttccctatgacgggaagcttgccaccgaccctagggaaggaaactgcgattggtctggaccacatgctcagtagggcgcaatgctacccatccatccgtactttaggaggattgatgattattacaatattttcctattgcattttgcactgaaggcgatcaagtatttagttgcattgtttgtcctacacgctaagaggcgatggggaatgcattcacctcatgatactaattggttttttgagctaaagtctagcccgggtcaccaccacttaggatatttttaattttcttaagtggaacattcttggctgactggcacgacgaccaaggaggtcaccaaaataggtgggtacatcaaagattattacaacgtacaagagatggaggctaaccacttatccttccaactggaaaatacatattactgtccacctttcactttgggattgcggtcaagggcacaagtaatacttcggctgcttagtaggtctcgtaataaatccctattggccacaatggagaaatttatttggtacggactatttccatctaaggagactgttgaaaatgttcctatagccctagcttctactcctgttcaggaagtattgaagccaaagaagaaagacaagaactaactgaagttcccattgtgatcaaggaagtttccgaggaggtttcctatcccattgtgcaggttgttactgggaaaggcaaaatgatcattcaggaagagttgagagaagactcttcgaatgacgacgtcccttgaatagtggtctagggggatgctcccccagtggtccagggtatacttttttaaggatttcaccttgccttttgttgtgtattttgtggaaattgaccaagtcattttttccatgtagctatgtcgtgcaaacttagtgccatgctaaagaggaaggtcggtggctcttccggccaaggttcaacaataagaggagaaaacctctaataaaattcttgtggctccacgtcttcccccgaacaataaagaggatattgctattgatgtgccaatgaccccgacaactgttccagctaaggccaaaaaggttatctgtccccctccgacccctcagagcaaaaagtataaggagaaaacatctttccccgaagcctctaaattaaaaaggtcaaaagacgtggtcaggtgctatcaagacagggtccaaccgaagatgaacaacctgttggaacttgtttaacgaggatctagactaacattataattctataatctaacatcctgtgaatttcctaaaaaattacaataaacacatataaagttatataaaaccttacatttgtggtagcagaatgtaatgactccttccgttcagatctctaatctttgttcctttttgtcgtagagtattaccaagatttgatctctttggatgagggaattcttcacaatcttccacactatatttgagtattgacttgaaatgtgtgggaaagcactcaactcaatataggtttcgaaaattagaagaagaaagaaaaatatttcaaaattcaagagagactctctctttgtttttttagttgtctgacaaggtagtctgatgaaagattaaaaaaataagagccatctctttctatttataggatttcatctagggtaaattatatggaattaaaaaaagataaaataatggcttattaatcccttaagtggtcgaacctataagtgggccctacatgtttcaattttgctattttatttaacagcttatattttctttcacaaatgccatattttaattctaatcctataaatgtcaaatctatctatt

SEQ ID NO: 38907 - DNA, 3779 bp, Cannabis sativa
tacaatggccaggatcagatatttgtgggcaatggagcaggtctgtctatcaaacattgtggtcaatcctttgttacttccaataactgtgctaagcctctacttcttaagaatttgttgcatgtgcctgagataactaagaacttacttagtgtttctaagtttgcttatgataataatgtcctatttgaatttcatgctcaagcttgctttgttaaggaccaggttaccaaggaaattttgttgactgggacactccacaatggcctgtatacttttgatccaggtcatttcaagataattccttcatctcatcctactgtcagcacagatactcattccatcaaccaaaaatctgccttccttgcctctaatgattctgctacttctgaaccaagctcccagtcatgcactcactgtaatacatccatagtttctgattttaatctgtggcatagcagacttggccacccttctccaaaggtggtcacatctgtgttgcaatcttgtaacattccatgtaataaaacttcccatagtgtttgtgcagcttgttgtttaggcaagatacacaaacttccttttccaaatttttccaatacaatgtattctgagccattgcagcttgttgtgtctgatctatggggcctttcacacacactatcacataatggttataaatattacatgagttttgtggatgcttttagtagattcacttggatttacttgctgaaaaccaagtctgaggccttaaaaacctttctccactttaaaaccgaagtagaattacaattgggaaagaaaatcaaagtgtttcaatctgattggggtggggaatataggagtttttctgaccctcttagacaagcaggtgtcattcataggcatccttgcccaactactcatgaaaaaaatggattggttgaaagaaaacataggcaaattgttgaacatggcttatgtctacttgcacaagcttctatgccactaaaattttgggatgaggcttttaggtgtgctgtctatttgcataatcggttaccaacccctgtgcttaatcaattgtccccaattgaaattctgttcaacactaaaccagtctacactaatctcaaagtgtttggatgcctatgttaccctaatattaggccttataataagcacaagttggagtttagatcctccccatgtaccttccttggttatagtcttaatcacaaagggtataagtgcattgactcaaatggtaggttgtacatctctagagatgttatttttgatgaactcaaatttccatatgcctccatctctacagatgttacaattcatgattctgagtcttctacttcaggtgctattcctctcaattctctcagttatactgttgagtctctcttctccaattttaattcttctacaccatctgacactctagcacctgatgtatctcattctggtttgaatgaacatcctgcaccatctgtcttaccaagtctccattcaaacctgcctcaaaattcagatacttcacaacctgcatcaacatctttaaatactccaacaatctccattaatcccactactgaacagtcctcattacctaatacacctggtcccataacaaacaggcacagcatgcaaacacgggctaagtcagggattcataagcctaaagcttttctggtttcacaagaaccaaccaatgtcaaggctgctttgaaagagcaaaagtggtgcaatgctatgaatgaggaaatgtttgctcttaaacgaaatggcacatggtcgtatgttcctttacctgctggaagaacaccaatcagttgtaagtgggtatataaagaaaaattgaatgctgatggtactgtcaatcgaaacaaagctcggcttgtggctaaggggttccatcaacaagctggtttcgatttcactgagacgtttagtcctgttgtgaaaccggttaccattcgaacagtcctttctcttgccttgacaaacaactggcctatccaacaacttgatgtaaataacgcatttttaaatggtgatttgaaggaggaagtctatatgactcagcccccgggttttgaactccctgatgctcctcatttggtttgtaaactccataaagctctttatggtcttaaacaagcacctcgtgcttggttcgaaaagttacacacctgcctggacaatcttgggtttcaatcatcaaaatctgatcacagcttgttcattaagcacacttcctcctcagttactctcatcctagtatacgttgatgatattatcatcacagggagtgactcatcactcatttcgactattatcagtgagctgcactccaaattttcattgaaaaatctaggccagttacactactttctcggtattgaagtgcaaaccacttcaacagggctgcacttgtctcaagctaaatacatacgagatttactgattaaagctcaaatggaaggagctaaactagtgccaacaccaatgattagcaccttgaaactgtctgcatatgaaggggaaccagttcccaatccccaattgtatagatcaatcgttggtgctctacaatatttgaccatgactcggccagacatttcctttagtgtcaatcgagtatgtcaattcatggctaatcctctattgcctcattggaatgcaatgaaacgtatcttacgatacttaagtggatcgatttctcttggtttgactctgaagcctcttactgagtttgaaatttctgcatttagtgatgccgattgggccagtgatcctgatgatcgtcgttccacttctggattttccatcttctttggggcaaatctcattgcgtggcaatgcaagaaacaacagacagtttctcggtctagcaccgaagctgaatatcgcagtgttgctcaagctatctctgagctcacatggctgcattctctgttcactgaactgcgcattacactgtctcgaacaccagtactctggtgtgataatctcagcacagttctattgacagcaaaccctgttcttcatgctcgaacaaaacatatcgagctcgatttgtactttgttcgtgaaaagatctctcagcaacttgttcgtgtcaaccatgttccagccttagatcaaattgctgatggatttactaaagccatttctagcttcagatttgctgtcttttgtgacaaacttggtcttgctgtatgcaacaattccaagtttgggggggagtgtgaaggagattagttagttatgtctgttatttctgtttcttgattagttacagctgttagttagtttgttagctttgctgtaactgttttctgttttcatcagctgtatatatattgccttgtatcaatttataatatcaagaagctattctttcagctctgtgttttctctctttcttcctctttgctttcttcctttcgttcttcatggctaggtacaataccagatcaaacatggtatcagagccttttcctccattaatggcaaatgctgctgttaatggtataggcaactccacctcctccgatcctcagcccgcacaatcgaatccccctgcaaatccatgcagtcgaacccgtgaaacagagcaatctcgcagtcccatatactttagccattctctctctgtaaaactcaatgaccacaattttttactctggaagcaacaagttctagctgcaatccgtggacatcagcttcaaaagttcattcaggaaattgctcctccgccacagtttctctcagatgctgat

SEQ ID NO: 38908 - DNA, 1899 bp, Cannabis sativa
tctctctctctctctctctccgtcgacgaagctctcttgtcgaatcaaagctagttacgcacctctcactcgcatctctcttttccgaggacaaccaccacacccaccacttccactctcttttctcttctccagagatttgacccaacggcgacctagccgaggcctccacgagtgagaaatccacctctcactcaccatgtgtctccctcctcctccattggtaagcccaatgagcgagaaacccaccccatcatccccctccctcgataagccctaaaaacaagagagattgtggggtcatcattatgtcttgggctctggaccaccactgagccaccagcgccttcataccaccaccaagcaacgatcggggcaccaaactctgtcgtatgtatttatatatatttacataatatttatgtatttatgtattttcttttctaaaaaattctttaaatatttatttatttattaattttagttttttgaaatttttagagttattttttattttattttagatttaagtttatagatttgtggatatttttatttaaattaaaggtatatttattagtttatttgaataagctaaatgttaaattattgaattgaattggaggtattagaattttgttttgagacggagcaaaaacaaaaattctaatacatcatatccaattcaataaaaaaccatgatgattacaaacagagcaaaaagcttaaaacctacaataaaaaataaagtaaaacccacaaaaatgagacaaagccaatgtcacaaagacactggttggaaatacacaattattataaagaacctaaacaaaaaaaaataataataaaactacaatcatcgagccatcccaaatccacaagaaaaaaataaaaagaatcttagcaccaatcaaaagtaagctgaaaacggacaaaacaatgtagctacaaaattttgacaataaaacctacactcagcctcctaaatgggttcaaaatgaagaaggatacaagacaatgattgcatgtccctttgagaaatcccagaatctccacccacccaccccaacatatctccacaactctatgagctcaagataactctattgcactggagtagcaataccatacattaagaaacatgtgaaccagttaaaaaatataactttaatgcaacttaattaatattaataaattaaaaaagataaacatatagtaagagtggcatagagtagagtgtgcataagaaatgtaccaagaagtggcggagcagctacaaattttaaaggtagaaagcttttcttaaattaatatatgtgagtttcattgtagaaaaaaaaatttattggattaaaaataaatatgttagaatagaaatcaaaaataaaaattttatggaataaatattaaagtatgtcagtataaaaatgaaaaatataaatttatcagataaaaataaaaatatgtgatgacaaaactaaaaaaaataaattatttagacaaaaataaaaatctatcaaatttttcaatacaaaaaatatacttatttagtatttttgacctcaaaaagtgatcaaccgacagtggagtcgcatgaacctgatgtttgtcatgtgttacacaacaagcacgataaagtaaataagacaagaatttttatagaggtccagtccccttagttagcgggtaatgaccaactcttattttggttgtattcataccaagagataatattactaagatcattataggtgtgatctgatataactctctataaggttacaaaacatggatcaagtaggcaaatctctattgagagaggtatttccttagtggcatgtgagagaggaagtgagaagagccccttaggcgtgtacaagtgagagagagagagagaga

SEQ ID NO: 38909 - DNA, 5823 bp, Cannabis sativa
  modified_base (4641)..(4641): a, c, t, g, unknown or other
gaatatggtgtatatggacatggaaatggaatagtaggaattattgggcataatatatatatgggttatttactttcaatgttttgaaatcttctttagggcccaacattctaattttggcattagatatttgacatataaatgaaataatataaagattaaagtttatatacacaatcacatgtaccatctcatttttcttttttcttttttcttttttacaaagaatctccatttattttaattgatggctgagttggggtggaccacttatagggtaaaacaggttcgagtcctacctaagaaagaaagtaataaaaaaagcaaaaaaaaacactagtctttattgagatcagaaatcgatatgaagtgaacacaaagctaattataacatttgtattttatcaatttgttaaaagaaaaaaagatagaaaaaaaaaaataataattcattatggtgacgtgctggaaaaaattaacagctacgtcaagtaaaaaataatcattttgttgagaaaaaaaaaataaaactattatcaactaagaattttttatattattaataagcattttaggctatcattttacatttttaccctaaaaaaattaaacaaaaatagaaatcaaaactttttaatttcaaaaatatggactaaacaaccaatctgtgtaaacctcatccttcttcgttacccagtctaaccagaccgaactcatctccacgattttcattctcaaccctgacaattcagttcgaacgaaaatttaccaaggatggaaaaatcaagggtccaatgtagatctcaattaaaaaactatttaatcttggaaaatttaaaaacaaaaggtaaataaaaaaaaaaagaaaataaaaatttttacctccattaataaaaaaaaaaatacaaaaacaacctaaatccaaaaatatgaatcatactggaaagataatttcaatataacaagatcagagagaattcgaagcttactcaaaaacgaatcacacaaaagatacaaggtaacaaaagttttaacgattttcttcttaattaagttatttctttagagttttcttcatggttatatatttttagtgtgtgaaaatcaaatcaatcataaatcatagaaaaattagttgatctgaataaaatagatgaaattagattacaattaaaaaaatacgaacgcatataatataatttattgtttttataaggaaaccattatttatatattgttttcgaagattaaaatagttgtttgggaatagagaaataaattacaaaaaaaaaattgattagttttcaaatgaacaactattgttgcattaaatctcatttatcgttgcttataaaaaagcaattgtttaatatttgttttgatagataaaaataattatttaaaactatttacataattagtagtttacaaatagagcaactatagttgcattaaatgttatttaatgtttcttaaaagaaaacagttgtttataagtatttttttaataagattaaaatagttatttgcaactatcgatacaacatattgataacgaattcaaaaatttcaagacatggaacatctgtaaattttgttacaaagaaatgactattgggatgacaaaaagctcaataagcactatgttgattacgaatcaagtggagaattactatcaagagattacactttcggtcaactagtgaaaaaaaatggaggaactccaatgcaatcctgatacaacaaaaatgtacaaatatcaactgaaagaaggatgtgaaccactacaagccaaggatgacaaaagtctgttgttctacataaaactattaagtaaagaaactgatttcacatggtactcattgtgtgtgaacacaatcagcaacacaaaaacacaaacatgtttggcaactaactaatcaatgatgtgcaacaatatgatactgatagcatatgacaatcactcagtacgtccagatgtgcagcaatattatataacaacataacatcaacaaacaacaactgcctgtaccaagattgggatcagttcaagatgatgctattttggtcaacactgtgattttagcatcagagtcaaccatatagcaaccaaaaaacaacaacaaaagaactcctaaagaagatgaaaattttgacttcgccgactatgccaagcttgttgctgtagaaatggtacaactacttgaaaacaactagaaagaagaagaagaagtcaacaacataaaaatatttatcatcattgcttatgcctcccatcatttaaaggaatatgaacagcgatacccaaagcatgatctagaacttaacgcggtaatttttgctttaaagatttggtggcattatctctatggagaaaagtgtgaaatttatactggccataagagcctcaaattttctttaatcagaaagatttgaatatgaggaagagacgtttgttggagttggttaaggattacgactgtgaaatcctttaccatcctggaaaggccaatgtggtggcagatgccctaagcagaaagggtcccgcgcaggtactagtacgatagatttcacctcagctagcagatggcatggtcagatcaggcattgagtttgtggtaggcaaactccatattttgacattgcaattcgatctgttagaaaaaattaaagccacccaagtaactgatctgcaattggtgtagatccgagaagaggttttagctggtgaagctaaagattttacggtgtgaaagtagtgggaagctgttgtataagactagagtttgtgttccaggtagtgcgaaacttaaaaatgagattttgcaggaagctcataccactccatactcaatgcatcctcgctctaccaagatgtatcaagatttaagaccctactactggtggtacaggatgaagaaagatgttgttgaattttatagcctggtgtttaacttctcaacagattaaggtcggctgagcatcagagatctacaagattattgcaggcagtgaaacttcctgagtggaagtgggaggatgtcactatggattttgtggttgggttacctaggaccacgagaatgtattattctatttgggttgtggtagatcgatttacgaagtctacacattttctaacggtgaaaacaacctttatagtggatcaatatgcgaagctgtaagagaaagaaatagtgaggttaaatgggtctctgaaagtccattatatcggatagagatccgtaattgacctcaaaattttggcagtctccaacaggtcatgggtaccaaaatgaagttcagtacagctttccatcctcagactgatgaacagtccgaaaggataattcagatattggaagatgtgttacgtgtctgtgtgttggactttcaaggctcttggagcaagtacgtgccactgataaagttttcatacaacaacagttatcagagtactatagggatggctccctatgggatgttgtatggcaggaaatgtagatctccaattcactgggatgaaactggagaaaggaaatacctaggttcagaatcattgcaacagactaatgaagatataggaaagatcaaggccagaatgcttgcctctcagagtaagcaaaagagctatgaagatccgaagcgtagaaatgtagaatttcaggtaggtgatcatgtattcctacgagtgtctccgatgaaggggatgagatctttcaagaaatagggaaagttatgccctaggtttatagggccattcaagattctcaaaaaggttggactggtggcatatcatctggccttaccactagcaactttcagcagtccaaaatgttttcccatgtctctatgttacggaaatacatttcagatcccactcatgtactgagttatgagaaccttgacctttagccaaatttattgtacgaagaacagctagttcagatcttagacagaaaagataaagtccttcgaaataagactatagctttggtcaaggtgctctagagaaacagtaaggtggaggaagccacctgggagttagagtctgacttcagggctcaatatccagagttgttcagtttagattttgatgatgaaatccttttaacagggggatatttgtaaagaccgcttaatgtttattatggaattagcagataattaggttttaattatgattttaagactattatttatgacttatgaatttatggtgatttatttggatttaggatgtattatttatgctatttatgaaatttcatgtttttcatgttttgtgcctcaaatatttggaaacgcaactttggccaatagaattacattttagtattttggttttatcggggcaatatagttagacgttgggggtgtcagggatattagaggtgttggaaaggaccaaattacccctagatggtttagaagctttttggtataagtgggggtaaaatggtcattttgtgcctttagactttttgtcctttagtggaatatgttagaattagttagtgctgatctaattatctaagtttatgtagataatactaagttttgtctcatttatcaaattagaaaaaaataaatcaagaaagaaaactatttctctccaagctctctctctctctctctctntctctctctctctctctctagaaccagtagggttggaagatttttcagcttaatttttgggtatctagcaagtagttggtgtatcccaattgaaggtaaaccctttaacacctttcccctttgttttcttaagctttaagttaggttttgcatggtttttctaaggttagggttctgtggtagtgtttggtgtttgaattccaattctgtaattgaattattgttatttgagctgttttggtgttgtttgatggcttggttatgttgttggacaaggtttgagcttttgagctcaaactttggtctttaatggtgatttgagttttaagggttatttatgggttttgttccatgaattatgttctttatggtgtaattaggtactctggaaggtttggttgcatttgggtttgatttgaggttgttgtgttgttttaggtatctcctacactaaaccagtcaaacggtttagtgggacctgtaggaatcggaattccagttggtccccatgaaaccccacagaaccggtttccggttcgggatctggtctactggttggggccattttgggaaccctagttttttcccttttgtcatatttaggttttttcatgttatccactgatacagaaacacttttagtttcaattttaagttcttgaaaagtaatttagcgtgtcactcatcagttttacaaactatgtgatttagtgccctataaattgaaaatcagtagttccactcaggttggccagcacacctaaattcggaaatgaggtaagactagtataattatatgcatatgtgtttacatgtttagtgtacatgtttgtcaagcctgttagattacattagaatagcagtatctatatatttagtattatattggatatcgataaatgtatcttggcttaagtactatttgacaatatcacatttgtacgactagagtatgactagcgtactgagtataggctgatattatggtcaatagtactgtcgtttgaatgttctggactcagtatcgtgtgggacacagggatagggttatggttggatgtatgggtgtctgattataatcaggattatagttatgatattgattatgcttttctcactaagtctgtcgactcacagatattgtttgcacgtgtatgtaagggcaaggctaagtttgagcag

SEQ ID NO: 38910 - DNA, 1942 bp, Cannabis sativa
ctcaatgttgaaacattatgaaagaagaagttggttaacggggtgtaaagttgcaaggggtgctcctcgtgtctcacatgtgctatttgtggatgatagttacatataatgcaaggataatgataatgaagcttcgaatgtgctacgattacttcattattatgaaagggcgtctgggcagcaagttaattatgctaaatcatcaatatttttcagcaaaaatactgatgaggggactcgaaatagaatgtgtgttgcgttgggaatggttgaagcttctgaaaagagcttatacttgggtttgccttgtaccatggggagaaataaaaatgcaatctttggttttcttaaggataaaatgcagaagaaaatatttagttgggagagccaatttttgtctaaagcgggaaaagaagtcttgttgaaatttgtggctcaagcattgtcttcctatgctatgggtgtgttcttacttactaaggaaatttgctctagtttggaaggaatgatgtcaaaattttggtgggaatctaaatctagggcttctactaaaggagtgagttggataagttggaagggtctttgtcgacataaaaatgtggggggtattggctttcgagatcttagagactacaatcttgccttccttggaaaacaagaatggagactattgacgaataaagactatctgattagccaagtctataaagctcagtattatcctacatgaagttactttaatgcttccttaggacaaaacccaagcttcatatggcgaagcatctttgaagctcagaatttggtgtgtatgggtgctagaagctcgattggtgatggtcattcgttagcattttaatggacccgtggctgcctgattcaattaatccatatgttatctcatcacatccggggctgcaaaccaaaagggtatcgagcttgtttgaggttggatctagaacctgagatatggaggtgctaaatgacttgtttgaagcaagagatagagatctggttgtgtcgattgagctgggcaaaagtgtgttgtctgatgcttggtattggaataaggagtcgacaggcttttatacggttaaaagtgcataccgtttattgcagcagcaaagctctgtacctgatgaagatgactgtgatggttattaatcactttggcagttggacattcccccaaaagtccaacacttcttatggcgtgccgtctcgggttgtctctcaaccaaggtacagttaaacacaaagcatgttaacgttgatcttatgtgctcattttgtaatatggctatggagtctatatttcacattctatcgattgtggttatgcacggtcttgttggaatatttcaagcgttgatacggctggtatgggtgttggggaatttaaaagctggttttttcagttggtaaaatcccagctgactgctatagctgctgatgcagcaatgattgtcgagttttattgtcttctttgatgaatgtgtctttagtttttgttaaacagtctgcaaacaagactgctcattgtgtggctagagagtcttattttttggcagatttgtatttttagtgagcttgatggtgctttgaagttgattgtacttgatgaaagtatttgaataaatatcacatttcattcaaatatatatacatgaatattcaatacaaatttgatatgctattgaattgaaatgatgtaaagattcaacacaaatttggcacgagctttgtcattgtactttcaaaacaaaacccaacgttatcccatttctaggaaaaccacgttcgttcattccaatgatctatattagtttgtttttctctcattaatttatataagtactacaaacaaataagcaagtccctaatagactatcaaactaaagagaaaatcttaaacaaggttccattaatggcttcttcttcttct

SEQ ID NO: 38911 - DNA, 1340 bp, Cannabis sativa
agtattagtagtgtctaacaccttgtagatatattattttgtgattaactagtggtattctttaaaaattattacattaaattatatatggaatttgatagctagttaggtcgatagcgatattgatatgcaggagtgtgctctaaccagtatcttttagcaatacttttcttaaattaattacacactacaattatatattcttccccctcttctgttttttcttcttcacctcactttttctaatttaagtttcccaaacaccaaaatgaaaaaagagataaggctagaagatatcatatttcatgataattaagtatagggtgctttttatggtgtaccctcaattttctttatataatagtgtgcattctctaaagttttgaataaaaataattatgggtatgcaatatttgactgtttaagatttattttacgctgaataaattattttgaaatttttaaaaatttagaagatatcttatatatttacaatattcattgtcatataatgaaataaattaactctaaatatgattaaaacactaaagaagtgcatccatatatttattttcatcatcataggttgccccatatatatagaacaaatatagtataatgtatagtgagttgttgccaaaatgtatttgattttttatatatttgttaacacttactacaccgtataatcaactatatatatatattatcaaatttctttcactaattaaattagtacttttggttatctcaattattcaatagtttacaaaataagttgtatgcagcaatgcataatcatatatttgtatatttgtgatggcatacattaattttaaatttctttttcttagtttggctataaatatctagagttaatatatataattacacccattaatatatatatagtagactagacaacctacaaaaattgttctgccgacgaaaatagtgagatcctattacaaaatatggttccattttattcaataattaccatctccataatcagctgagctccattatattcttttcttatttcataatatttaaaaatgaaattcaaaataattagaaaaaaaaatacactctagcttagctactacacttgagtggcattcctttattttcttttttgtctttgaaatgggacccatgcaaacattctcctcgataaccatgctctacactatatatatacattaataataataataataatgagaaaatattctagctccactctcccaaaatattacactcctaacattttttattatattgttttcttgtacgacaatatcttagaaacctagattatctctttaattaattat

SEQ ID NO: 38912 - DNA, 3750 bp, Cannabis sativa
tatgtcttatgtaattattccaaataattatgtctgtttacttttcagttatcttattatttcgttcttaattttttttttttttttgaaagaatttttattagaaccaaaacaacaaactacaactcaaaaggatgatcagccttacaaaacttgactaaccaatccgggaaggagttgtaaaaagaaaaggaatttttgtcggctagacatttcctagctaacaaatttgcacattcattattggttctttttacatgaattatatttacatgagtgaagttttccagcaaagttttgatcttgtgaatgatggtgctgtcagcagtgaggcttcgattcttgcttgtgatttcttccaccagcatccggcaatcggactggatttcaaagtgactgatctcagttgcagggaggttgttcaaagcttcccaaagcgcccaggcctcagccattttgggagaacaacagctgtgcaaatagctcataccagcagagatcagatgaccatcagcccttctccaaatgaaatcgattcctactcctggggtattatctacaactgcagcatcacaattcacacaaatgctaccactagcagggggtatccattttacctgattataatttcgattagcttcatggattgttgcaggaaccgcctctgtatggccatttgggtaggcagagaagacccagttcaggagttgctgtttattcatacaagggagttgattctacttcctgtttctattctcccatatggcccataaaatttttatggtatcctcaaaatcctgcttgttaatgatttgctcaagagacttcaaaatatcaaacatagacccctctcccaatttggaagcttgtttgtaccaaggaaggagtttccaaatacatttaactttgtcacaactccataaagcatgggtaagagtttcatcataccttgtacacaattcacatcttgtattgacctccatacctctatgctttaagttcatctttgctggcagccagttgtggcaaactctccacccaaaaagtttcatccgaggaggtaggtgtaaactccatatcattttccaccacttctgaatgtcagtcatgttggagcacctagtggggttaagattcatctccctacccaccctatagccacttttgactatatattggccattaggggtaaagggccaaaatagagtgtcttccatatatagatcaatgggaatgccttgtatccaaggtatgtcatctttgtggaagtgtttgtcgatctccgccatgttccaattcccatcccaagttatgaacttatgaagcttggtgtggggttggagattaggaaattgagataaagtggctgcttgaggtctcgggagccatttgtcttcccacactttaatttctttcccatttcctaccctccatctagctccttcctttaagatgtttctaccccaacaaattcccttccaaacacaagaagcccccggaggacaacccgcctccatgaacgaagtattaggatagtaactattcttcaaaattcgggtaagacggcagtgagggttatgaagaagcctccacccttgtttagccaaaagggcttgattgaattcagttaagcttcggaaaccaatacctccctcctcctttggtatgcataacttgtcccaagtactccaatggagttttttatgttctttcgtatctccccaccagaaattggcagccaaggaatgaagagtctttattagcttctttgggagccgaaaacagctcatggtataacttggaatcgcttgaaccacagcttttattaaaatttctttcccggcctgagagaacattgaggatttccaacctttgagcttgctccacactttttcttttattacttcaaagacttcttgcttccgtcttcccacaaagcttggaagacctaaatatttagcatggtgtgaaacaattcgaacccccaatctggttgctaaagcttgtccctgagtggatgaaattctcttgcccatgctgacttcggacttctctaagtttacttgctgacccgagagctgtgagtattgttgtaggataagtttcattgtatcgcattcattctcctttgcctcaaggaaaacaaagctgtcatcgacgaagaataaatgcgacactttgattctctctttcccgaattgaaccccatgaatctttcccgctctttcggcttcatgaataagacacgagagaccttccgaacagagaaggaagagatatggggaaagcgaatctccttggtgaagacctcgggtaggttggaagttcccaattctttctccattaatgaggaccgaaaaggacacactttccacacatctcattactttttctatccattggtcctcataacccaatcccctcatcattgttcgaaagaaattccattccactctatcatatgctttagacatatccaatttcagcgtcattttccttccattcccaaaccttttagtcctcatacaatggagactttcgaaaccgattatagcgttgtcttgaattagcctaccccccacaaaggcactttgttcctccgaaatgacttgatgcatgcttgttttcattcggccagcaaggcatttagctataattttataaatcacattacataaacttattgggcggaattccgacattcaggtgggctttgaaatcttggggatgaggcaaatgagtgtatcattgatgtcctttatcggcatcccttcatttaatattcctaagcaaactgttgagacttcttcaccgattatggaccaatattttctgtagaaaaggcctggtaacccgccgctgcctggtgctttttgtggatgaatatctcgcatggctttgaacacctcctccttagtgaaaggctccaacaaatagtcatttgtagcttgtgaaacacgatgcgggatgactctttggaactcttccaacacttcttgattaggcggatgggaagtaaataactgcttgaaataatcacatgccacctttcccatgtgttgattttccgtaatccattggagccaatcatctatcaagcctttgatggtattttttgctttcctattacttgccttcctatgaaaaaactttgtgttcttatccccttctttcagccataaagctcgacttcgttacttccaaaatttctcctctttgtcaagccaaacatttcgttttctttctaagtcttccagatgttgccaatccttagcattagtacttcgggataacaaggagattttatcttcatattcctttaggttccttgacatctcttgcctcttagacttattccattgttgtaaatccattccaatctgtcccaaccgagtcttcaacccctttgtactcgtattctgctggttttttacccaggccgattgcacaatacactcttcgtcctctgcccaagcactttcaaagtggaatctagttctccatcttgtcgcatgttgcatttttaaatgggggtcatggtccattagaagtaaaggacaatgatccgaatttgtacgatccaaatgacgaactttcatagacgggaacatatcaaaccaatctgaattaccacatacccgatcaagtctttcaaagataagatcatttttcctcccattacaccatgtataatcattcccctcataacccacatctctcaattggcatctatccaaagccttcctaaag

SEQ ID NO: 38913 - DNA, 4276 bp, Cannabis sativa
ccactcaattgtactatcatatcaattatttttgttggcaagattggctgaaggacctgtagagttgtttaaagatttatttgtgccaaaaagtaaactgagtctctcaaccttactgtcgaagcacagtagtatatcctgcaattgttcccaagtgctagatgtcctagcttcaatctagagaactatagggagatagtctagatccagacttgaaaggacatttgagataagctgatcttcagggtaaggagcttctcttagaggcaaaatatctgtccagtgtcgtttttgcctgaaataatccttcatagccatagatccttttcaaactatttggatcgtagtttgatatttatcaattttagccccgaatgagaaccataaagagcttcaagagcacaccacagatctacagaactttcacaccccataacctctgtggatattccctctgtcatggagccatataaccgcccatgagaagttgatcgtgagcaattcattgttcataatctggattgactttcataccaaaactaggttgtccatcaacagatggaacgaatatatgagctcaacaagtttgactctagttcctgtgagatatccatccaatcaataacccctaacaattgcagataccatggtcttcgacaatataaagttattgcaatccaatttgagggcaaaaggctggtttagtgtgctcccaaaatgtggaacaacaacactcgatgcagaagctgcattttgagtagtggaggattggttagcaacattgctattagactgaaatagagatgatcgatttccctgaggtgaggttgctggaggggttttatcaccggttgacatctctggtcacggtggctctaataccaacttaaagttttttttaaaaaaaagatgaaataggaaaactcagctcaataagcatgagtgaggagccttgtatttatatttcaatatattaaaggaatcgtctagaacaatacacggcacaaaataaagataataacaactttggaaatattccaaaaaaaatataacagaatggcaatatgccaataaaacggtacacaaatgatgagctcataatattaacaagttaaggtaggtgcagagacctattgtgaggagaaaaccaaagaataaaaatttcttaacaccagtagtgcctagtccactcttttacatgttatattggtgtaattaagtatcggaacctatataatttaatgtaatgatttttaggaagtatcgttaacaaatcgtaagatgacacgtctagaaagtgcgagcactaatagcaatggtgatataattatattattgcttgagtatgaaatggttgagcataatgacaaatattttacaaggcaaaagttcattttccaataatttaaaattcctttcatatttagaacttttatgaggggttgatgcactttcttttagtataacttctaaagttaataaaatggaaggtcatacagattaggaagtaagaataaatttaattagcagctgtcaaacatgtatgttttatttactttctaatcctttagaaaatagattcttcaaggagaaaagatggtccttgtctggttgtatacataaaagttttggattaatttttctattaatttctgttgtaattttttatttcaaaagactattttgtcctctatattaaaaaaaaaaaaaaaagtgagtttattttaataaactataccagaaggaatgtattaattaaggctttgatggagataaggtggtacattactacattgtttataggtcttcaatgtatatggcagaatgttttgttgtgaagtgaggaattttatatttcacgcttgatatcgttatctccatggatttcataactttcttaatattgcttttaatttattttattaacatttggttttgattttcattttcttttacgcaatatatttaaaattactattacatttttttttacatgaaattactattacatttctatataaaaccttagttaattctttaacttaagatattataaaaaaattaaaataaaactaaacataacacccatctagtacatacaatatatataaatataaatcacaaaattagtttctaaattattttctttacttaaaacactctattatttgtatatcagtcatatcatattctaacatatatatcttcggattcctagccatgcaagctagtgcggttgtgggacactcccggccccttaattttttttttttaatttgtttataaattgtttagacatataaatttgaaattattgttattttaaacttcacaaaaattataactccattatatttttatttcgatttttctacgttggatgtacacatgcaaagagtagataagtcagggaattatgaggttgccccataaacctaggtttccttgtctacaaaagaccacaacatcttcaagagtatatagatatatattaaattattatgatcataattatgtcatgtaccttatatatacatatctccaagtgccaaccagctcatatatattatataattccaattcaaagcagctagccaccacgtgtgatctccattccaaaacttttgtacattataaaattgatgagttatatctatatactaggggagttaaaacattataatttagtatgtgttatagttacgcatatatagatgtataatcttcataaggaattagtgaactgattattaattaaatctttggtctccttaccataatttgttctttattaaaactaaaagtaaatttagacctgccaacatatatatatagatatatataagataaagttgtcctaaaaaaatacatatttatatatagtttttttttttttttgatatatttatatatagttaggtcttgatttcaggtttggagacctggggtgctcctgcagtggtctggtgttgagtctaggggctccgttgacgataccccaggtttctatttcgttctcttcgagtgcgctggtttagtgaagaagatgaagaagaaaaagaacaaaaataatttttatgattttaaaataatttttttagttttttttattttaaattatttttaattaagatgataatttggatcaataaaaaattggtatgtgacattttattagtatttaacaaatcaattaaaaagaggactataacggatttataaaaaatgtgactttagagactattactgctacttttcgaagtttaggtcttatgtgcatcaaacataagtttttaaggacttatgccacaattttctcttatttcaagacatttgtttaattaagaaagatggtaatccataaagctgtaacatcgagaaatagggtgaataaggttttgtcagtccagagttatgacacacttgtgaattgaatttttttattattatgactaattaaacagcaactaatggaacagtataaaatccagacatataaaatgcatatccaataacgctaagactgactggcattgtgaagtgatgaagttgcttaacttaaactgacgaggttattactctaaagtcaccagataactatctcatggtcactactagaaaaaagtttattcatgtcggtcctcaaattgattttattgaggacggtcgctaataaagttacgtgactgtttaaaattgtcgcctataattaagtattcttgactattttaaacagtcgtaagcaatctcgacgatttaatataatcacataaaaatttagcggagatttttaataggtatccctaaaattttataaccatcgtaatactatagccgacagttataaaccgatgcctattgtctatctgtgtcaaaactttcaaaaataatttaaatattgctcatttgctcaaaatattttagatctcatttactcctactctcaaacgctctcatttctgtttctatcgaaatagggagacccaaggctctgcttcaatctctgttcatccctcctccttcgtccctctcatctccattttgattcgctccattttgatctcaactcgtctcgagaccaaaggtgcctccattcgttccacccgcacacgagccacctcaaatggtctgatccccactcgtcatgagagattgaaggctcctcctactctatttgtctcagtcaccggagccacggttcgatctatacatattgtgcattttatttattttcttatttgattctatacatttttttgttatgttgttcttggaa

SEQ ID NO: 38914 - DNA, 2729 bp, Cannabis sativa
agtagatctaagatcttggtaaattaattccaacacaactctcatcaaagaagtgttatgtccaaccatcctgattaatggaattgctagggtggtttttccttctctcgcaccaggcccttttggcacaactttgccttttagagcagaagggcatccaagcccaaaggcatcggtggccttctgcgtctgcgagggctagttggctagattcacgctttctaggatgtaagggagttgttttgtttggaggcccactcacttttgccttccccttgtcttttgcaggagttaaagttttggtgttagtaaggtttgctctgttttcttcgttgactacttccactgaggcatcctcctcataatcttcctctaaatctctaaattttgcatgtaatcgagccactatcctctctatctttcgagagaccacttcttgatgggctaacttctactggttctcgtgtagtttgttggatactcaaacaagatctgggtcttgttcataatagtatccatcattgtagtaacaatcttgacatatgcttcatcattctcttctttattctcgtcggtagggtttttgcctttgacttgtttacgacgttgagttgggtcatccccttcgtcgtcagctttcgatgtatccccttctctcacattgctcggctgggcgtgctttagaaagagagggtttacatcttccatgaccacatcggggtttccgtgaggagtcttctttatcattgttttgggtgtagccaccatggttgtagtaacagcgtggctcaagtctttcctcagctctcaataaaaatactaaaatatttatcgagatttttagaaacgaattaaataagatcttaagaactaataataacagtaaataaagtagataataatctttatgtggttcaagcgttaattatccatagtccacgagtcagcatattggtcttgaagactagtaaatgtattacatatggtgtttacagtaaaaccctaactccgttttgttgttttttcttgaagaagaagaaagcttagagagaatttggcaaagcttcgactatctcttttttttttatcccctcttttgtgtagaaataaaggggtatttataggctaaagtacgagcatgaacatacccatgacccgtctaagatttttgaaaaaagtccaccctctattggggtaaaagacataaatatctgactattggcccccaagatggttctttctcgcgaggcgagtgattcgtacaatgaggaccattgcttgttcatggcacgtgtcgagcaaaggtctgcacttagtgaactaaacactcagaggtacctgtactactatagtctgatgcaggggacaagatctgatcgtgtgtcagaaaagaataaccgtcaataaagccatctgacttggactcttcgcatggctcttcgacacttgcctgtatactcaagttagtcgatcttcttcgagacctggagggatggtgaggattccaagtccttggtagtcatttgccacttggcgaatctctctacctctctcgagttagacctttcttaggcttacataatcattcgagaaccttctgtaattatggaaacttaatcggtaatcactttgaattgtttttttctatctttgccactcatctgaaaattaaataacagtaagaattagtggaccaatatatttaggctcaacaatattatttatatattttatttgttatttttttatataattaattctaaatacacaataattgcatacaatgatggagtgtaattttgatttatgtatttcgaagaaaagtctgtcagtagaagtaattgactcaacttaaataaagagaccactcattaatacggcaagtaatatgtttatccagatgtgtttgcaaagaaaatttaaaaaagtgttttttactcttattgcaaaatgatatatatttaatacttttagatatcgtgtttttcaattaactaattatccaatatatattttaacaatctatccaacaatataacacctacacaaactattattttattttgtctagatgtgtttcccaaactatctcgccaattatgtatgtttattttctttttagaaagacatatagatgtgttggaattatgttagttcataaattattataaactagttaaaggtcgcactttgtgtgtgattgtatttatttagtgataattttttaaaaaataataaatttatataaaaaaaaatatcttcaaatatattaaacaattctcataaaaatagaaatctataaaaaaaaattataaatctatttaaaatatatcatataatttctaaacaaccgttaaccccgtatctcacttgtattcaccattatatttaaagttgatatgatcatcaaggtatcttacttatagtctcattaatattattttcagtaagttctctatatataaaataaattattttctatgtatttttggatgattagttaatattaattgtatgtgttctctctctacacaactgtatttgtagattattttttttttaatatatgtaattatttattagttattgtatatatattttgtaggttttttttttaatttttaattatataatgatctttaattaaataaatgaaaaaattaaaaaaaaaaatgagagaattaataaggagagaatttaaagttaaaaaaaaaagagaattaaggaga

SEQ ID NO: 38915 - DNA, 2455 bp, Cannabis sativa
gttacgagcctgtgttatggattttgaaggctcatggagcaagttcttaccaatgatagaattttcatacaacaacagttatcagaatactatagggatggccccttatgagatgttgtatggcaggaagtgcagatctcttattcacttggatgaaattgggaaaaagaaatatttaggtcctgaatcagtacaacgaaccaacgagactatagaaaagatcaaggccagaatgctagcctctcagagtaggcaaaagagttatgcagatctaaaatgcaaaaaagtagaattcctgtaggagatcatgtactcctacgagtgtcttcgatgaaattaaggaattaaacgtttcaggaaaaaggacaagttatgtcctaggttcacaaggcgttttgagatccttgaaaaggttggattagtagcttaccgtctagccttgcctccaacactttcagcagtccataacgtatttcatgtttctactttagaaataaattttggatcccactcatgtatgagttataaaaacctaaaactccagtcagataattatccaacaaagagcaccagttcagattctggacagaaaagatcaagtcattcgaaacaagaccatagctttggtcaaggtactctggaggaacagtaaggtcgaggaagccacctgagacttagagtctgacatgagggctcaatattcagagctgttcaagttagatttcgaggacaaaatccttttagcgcgggcatatataattgtaatggctgcttaattttagtatgagaattagcagataattagggtttaattcagaattagacttttaattatgatttatgaaattatggagagatatttgaattttgggtgtgctatttatgatatatatgaaattttatatttttcgtattttatgcacggtaatagttgaacgcgacgtttggctagtagagtcactttttcttatgatttagtaattttagaaatagcgaggcaagttagttagacatttagaatgtcgaggtttggcaggattatggttttggactattttacctctaagccaatttgccatttgtttttaactttgatgggggcattgtggtctttttggatttttggttaggtggtgttttctccttatggcagctgggcattatacttttagtggaatagttatttttaaaaaaatagttataagctaagtcattagaagaaaagaaggaaattactaaaaaaaaaattgagtttgggctttttccatctccatgctttgggtcagctaggtaaccaggggtgagcaggtgtttttcttcaaattcaaggggattttagcaagaattaagtgtttttaatccagctaagcttcccccctcttagtttcttgaatttcaagcttgaaggttgggattttatgattaattttgaggttagagttgtatgaactgttttggattgtttgagttttctaaggtttatgttggattaatttagtgaatttaagctgaattggatgcttgttgttgtgtgtgaacaaagtttgctcaaattttgctatctcatggtgttttgtgtttttgagactatattgttcagttcttttgcatggattatgttatttttgataagtataggtggtctgaaaagttacgtgtgatttggggtataattaaggtatttttggggatttttgtggtactgtactaatcgaccggttcagtttgatactgtagagacgtagaaccggtctaccggttcccaagcagaccccacagaataagtttttcaattgagaacccgtctacgcagtttagggcaccctaaatttttatgtttttacgatatttatagtattgccatattattctttcctttcttttctttgtagctggccgtagtgtctggtgaaagatcatctaattgcaaaagaatctgttgaacaaactaattaactatacattaatttatcatgatataatattatatatagtggcatcttcggttagtattgtattaattgtgtattgtatttactatatatattacttagttgtgggtgtatattacgtatatgaaatagatataattagggtcaacggaattatgctacatattatttatatatatagtccaacgaaacactgctggtgaatataattacccaactagatatatataaaatatgtatatacataaatgacaaaaaaagcatgaagttggagggaaaatgatggcgtaacataattaaacttaatgtaagtagcatataaattaaaagaatatatataacgaaaaatcacacttgtatgcgtttgaatttaacataaagagaagtcgatatggatatggtagtcctgggcagagactgataatatatacaaagttctggggataattagtgctaatatatatctgatcaggtttgaatatatttaatatatactaaaaatt

SEQ ID NO: 38916 - DNA, 2701 bp, Cannabis sativa
ctcttccgatctaaaacccaacaatcacttctatgaattttgagtgctttcggcagtatgacgtccacctaaaatagttgctacatgaccatctaagacttgcaatgcacctcctagagggtatggatttccaagaccgggggctatagctactgccgctactagagcgttttgtgccccttgaagagcttgtgcatttggagcttgtattccaagaatttgtggatgtcctactccttaaggaggatttatggctccatgctgttccagaatgaaaagttgttcgtgtggaactgcctgtcctagatatatgactagcgtccttacccaattttttaatgttcactccatactaatccctcaatttcatctcttaaatagtcagattcatttatggtgtgaccaatatcaccatgatatttgcactttttgctcagatctcttcttttttttctgcctttatacaattgcgaaggcttcctgtagtgtaccatgttacaggttgccttgaatatattttcttgagtatctatgagacttgtgtactcggtgtatcttgattcttgggtttttcccttctttgcaaactcactgggatttggaccctttgtacttcttttactccattagtgggttatattggaatctagaacttccactttttggttcatttgtttagaagcaatagtatatctggtttatgcagctctgaacccagaaaaactagcttgtgcagctggctgcacaaatgtagttggcaatataccatgggagtagtaaaagcagttggtggagggtaaatggatggagttttcatctgtaaaggctaggaatttgttacatcagtggaaggtgttgggactactccatatgcttgagcataagcatcttctatatttataaatccttgggctcttactaagaacacactcaatgtatcagcccttttgcactgaagatctccccacctcaaagatccaattttaagtcctgatgttaaggccaccattttcatatcatcggtgatctttgttttagcagccacatccatcatgcgttggataaagtttttcaagctttctccttattgttgcttaacgctagtcaaggagctgggttccaaatcatagtccttcgctactataaattactttctaaacattacttataggtctctccagttgtggatcaatcatagagataacctcttccaccagtcctccacaaacttgcttagtgttaatgataaacataaactttacgcatcatcactgtccttggcaacttgcatgatctggttgtacttagacaaatggaacctggggtccgtacgtccttcatatagctctatctatggcattcagaaatgctcgggtagtggtgcatcaatgattcttttcacaaaaggcttcgtatcttcttcctcacaatctaatacagcaccactttgttttctagaaatcttttctttgattttcatcaactcctcaacttaacattccaggccttgagtcttatcacttgaagattctcttccgcaaacacgattattgatgtggtttctcaaatcattctcgggaggtcttgctttttctgctttggctctttccttcttagcattcaatcttcttcggagataattcatgcaaaggcttctgctactgtcgtctgacaccggatgtactttgtcaacatcctcagtgtggttaccggaatcactgggaggaggcttttccctccagaactctagcttctagactctgacatcagtcttatttttttgtgtgactctacctctaaaattggtctggtcaccattccttgaggtgtggtttcctttgcacttctgttgaggttggtcaacagctttagactttttatgtagcttggtggaatgagtcttttttggttctctaacaatgattcctttgcctttgtcttaacaaacgcttgaagttctaacattttttggatgtgctttctcagggacgtcagttattggagaagcttgtactttaggagctatcttagtcagggaaatcattacggcctatattctagtcatcttagtgagtaataactcgttgaattgatcttgccgagttaacttgcttttggccagttgaagttgtcttgcaatgatgaccacggggtctaactcatcaggttggctcttctctccaacatcatcattagcagccttgtcctgaaggtcatcttcttgcatatcctccggtacattcttagcattaacttcaccgttcccagagctactttctctagattttgcgtctttaatgataagatcttctcgattctgatcattgtcccatcgacctttttgacgactattcaccttgtgggattcactagagtctccaaatttggtgccaagaccagtggaacaaagaaaaaactttgttcgggtgagggccatgattactagaacataatccgcaagtggtctaactgcttccttctactcttaatggaagcaccaaaatatttattgagattttcaaaagcataatataaatgataagacctgaagaaataaataattaaaatagaaaaagtaaaaggagacaaacagttttttacgtggttaatgtgttaattagccttagtccacgagtgagtattattcagtagttctttagcttgaaaaagcctttaggaatacaaagaatatatgttctca

SEQ ID NO: 38917 - DNA, 3691 bp, Cannabis sativa
gttgttgtggaatatgcgacatttgtggatagtaaggttgctgcgacacttctggcatttgcgggtagtatggctgctgcatgtgtggaatttgttgtactaatgtcatcggtgatgactattgcataagagacaccggtggcatatgttgcatcgatggcatcgaaggcatctgctgcatatgaggtatttgttgcatagaaggcatattggtgcaaatgtgacacatgctgaatatgcgcaatctgctgcatcaaatgcatctagtgcatctgtggcctttgttgctgcatctgcgacgtctgttgctgcatctgcggcgtctgttgtatggagggctgctgcatctgtggtgtgtgctgcatggaaagttgttgctgcatctgtatttgtggtgtctgctgcatctatatcttttgcatcaaaggttgttgttgcatttgcgatgattgttgttgcatctgttgagtctgctgcatttgtagtgtctgttgcatataattcacttgcagctgcgacattggcgaggacaaccaaggaaacagggacatttgctgaggtgatgacgaagaatacataaatggaataggactctgctgcgcttgatgagattgggaagtcccgggctgtgaagatgaagtagacccacctccagacatttgaggttggaacatctgtgttggaggcattggcattgggaacaactcctcctcagtaggtagacaaaaatcaggtcccaacctttgagacatccacaacattgttcttttcaatttttcaagttgacgctcaatgttggatccataggcatatcttgagtgggagtaggttgtgtgcgccgcgacgaagattatccccttatttttctccccactcctcgatttataccacacctttcactaagtacattagtgagtactctcactttaatctcctcaacaggtccagcgtcaggagtactggctcttttttcataagctgaaacgagctcaccctatattaaggatataagttagaaaacattattaacatacataagagtattttatttagagcatatgaataattacttacatatttttgtgcagccaatagactaacaaatgtatttgtctttttcgacaaatgaacatccttccaggtctcaatgtgacccttgtccttctaaaagaaattgaaaaaaaaaattagaaaatgtgtaaattaataacttaatttaataaatcttttaacttactctttcaaaacgcctctcagccataagtttcgatccttgtgttgtagggtactgcatcttttttctattttctgcattaattttagaacgagcaataaactctggactggtaaagaaattacaaagaggaagccaatcctctggagtaagatcactaggcgggtgggcaacagcgttatcaaaatcagcaggacttttgtagtattttttaaaatgcacatgtcttaacaactttcgtttcttatatctatctgccatttcagcccatgcaatagttactagtacgcaattttcatagaactcttaggagagaaccagtgggattgacagagacagaggaataaatcattgttcttgagagccgttcatggtattaccatccattggcagcagttcaacaatacaatagcaatgaacggaaaccaacagatttgattcaccttatactactttcaaaaacaaaaactagaaacgatgcttgaatatctaaatcatcattaaatgcaatatcacaaataatttagttagcacatctatatcagtagacttacacatatagcaatctgcattacaagctatgtttttaaacattatttatgtaagttgataccacttcctcataaaaaaggacaataagaataaattaaactaaaagctgtgtaaaaaatgaagctgcaggttaagctctatcattttactgtgattgtgattgtgattgtgattgtgatatatatgtgtatatatatatatatataaagggaaagaccttaccaaaataataataatgctaacgattttttattttttgacaaaaaaaaaaatagatatatataaacacacagatagatataaatttttcttacatattgaaaattgaaataaatcccaaatttaatcacttaaatactaaaataaattagaaaaattccaaatttaaacaataataacaaaaaaaaaaatcaaaatcaaaacctaatttactcacattatcaaaatcgactgaatctcttcaaaatgtaaccctctgccgcctttcaaccgtccccatagccaccccctacaacccaaaagagtgagatgaaaatgatgaacaaaaaaatgtaatactaaaacgaaaacaagcttaccaccggtgagagggcttggctgagtcgatggcgacagagacgggtcgacgacggtggttgggcttgaatggtggctggacaaagatttgggcgaagtttttatttgggctgagaaatggggtgtagagagaaagaaggggctgagaaatggggtgtaagagaaacaaatgaaataataaaaggctgagggtttttttttaaaaaaattgcatgggacagttggggccgacacgtgagtgcccactgtcgtgccatgtcagggcatggggcacgacgtggtcgtgcccatctgtcctggagggaaaattcccgcctattacaacagacatttttcaaagctaaattggcacgactttatcgtgtccattgggccacatgtcgtgcccacatacctccaaaattaaaaaaaaaaaaaaagttaaatataggggcacgactgtagtggtgtcggcccaaagtataccaaaaatgggcaccactttaggtcgtgccctagttggacgtgccaatatcccatttttcttgtagtgatattttaaattctaaatatattaggagatccaaataaataccttttgttgcaatatttatatgacgcttataaattctcataaaatatattccaggctataatcaaattatgattatattttcttaatatttaaatcttatttcagtcaatatcatgtgtatacaaactttgtatcaaagcaaataaattatctgagctcgcatagtcattattaggcttaagtgtttcgttagttagttatttcagttagagtagttaggctatttgttagttgtaactactctatttttttgtatataaacttctataatatcttttgcataataatatacagaattatctctttctctctctcgttctttagcaataaaatagtatcggacgcttaatcgttctttcttccatggcgaacaacaatgaagaatcgttgcacacctccataccaggttcatcacaaaacactaatcatcttcccaaaacaaatcttgtttctttctctcatgctttatctatttgtcttgataaaacaaattatcttccctggaaacaacaagtacttgctactatcaaagctagtcgtcttcaatgattccttgatccaaacctcatgcctccacaattcatcactaaaaaagatcgatgaactataacacaatctaccatcagtatgaagattgggagcaacaggacattgtccttgtgtcatggttgttatcatccatgtcaaaacgtgttttaactcgaatggtcggctgtgattctgctgctcaaattttggctcactcttcgtgaata

SEQ ID NO: 38918 - DNA, 1952 bp, Cannabis sativa
  modified_base (1158)..(1159): a, c, t, g, unknown or other
attagttaatccaaaaactaatccagtggggataatcctatatgataggcacctatcaccgtgttagggcacagtaatagtggcaccacctatgtcttaacaagacattggtggtgccttttgtccagaaaactttgtcttttctccaatttatttaattaataaatttgaaaaataaatagttactattttgacaaattgaaatagctttttccgaacttccatatagaacttttattcctacccttgatagtgtttcaaggtggcgatccggagactatgtacctataattctaatctccaataaactagattatttattcaatctcatcaatcaattaatcatatttattaattccatgattactcgagtgtaaatatgaaattgaactcttagtaattgtagaattatatttactgagttttactgcaaagtccattgatataatcaattccaatgattaactctccttgtgtcggctagtaattagttttggtcaaattaccgttttacccttctaattacttctttatcctttagtatcgttaattcactagtgaaagtataatttagatccaatctaaatttgtgcacaacattttcagttctagaattaacacttaaaggaaaccaacattcgatccattaggaaagtcagaattccataattttaaatcatgttcctagccatccacattattatattcccaaaacaaacattataagaatcatcttctatgagaaaatttaatgagtgaaccaaagaaactaataacatgaacaggacttcatgattactcaggattcagtctgatctactattaatcatctttatgatatgaattaggtctttataataaacgacatgtttgataaagacaacttaattacatattgatcattgtcatatataatctctattatatcggcacattcacttagatgtcatactatactctgaatctagattgcttgcaccaaataataggcatcagtgaacggtattagtaatcgttgattaaaaattcaaaaactttaatatgttgctggctattttattcatggctaagtgatcttaattctccgtacaatacaagtcacagcatcatgtatgaataaggaattttttgaaatttatatataaattattcaatatnnaatattaataatttaacatttaagcagatatgaaaatgttcaactcttatttataaacagaaatatatttacaggattttcaggacatagaccctaacatatcttgtagttgatttacaagtatcgtgatctcctgcatagtcagcgtcacaataacctaccagtttccaactttcacctttcttgtacagaagatccatagtctatcgtactttttatatatctaagtatctaccgaactatttctaaatgagacttatttgaattttgcatgtatcgactcatgactccaactgaataggaaatattaaggcaagttaaggtcaagtagattaaagtacctactatctgtcgatacatggatgcatcctctaaatcttttccttcgtgcacacatatgtttccatttggttctatcagtgttgaaatcggtttacaatacagcatcccaaacctccctagcaggtctatcacatacttttcttgacaaataagcaacccttcttttgaacgatcgacctctaatcccaaaatgtgtttaagctctccaagctctttcatctgaaggcagactgaaaaattgtatctcgtttgacaaatttctccttcaccatctccagcgatgatcaaatcatggatgagggcgccttcttcgaggtgaagttggaggagggcgtggtgaaaacggcaaaggatgtcgtcgaagaacatggatttgagaaaatcgagcatcacttttggcttcaaaagagtgagaaatccaggaaatgcaagactttgcgagtatggtttg

SEQ ID NO: 38919 - DNA, 2736 bp, Cannabis sativa
  modified_base (42)..(62): a, c, t, g, unknown or other
tcgttttagaagttcatatatagggtgttaatcaacatactnnnnnnnnnnnnnnnnnnnnnggtaaaataatttccaacaggctcgacctgctctagatcctgctcgcagagaaattgccaaagctctaggtagcttgccagttcaagatcgcaattagcgattgttgtgtacaactgcaggactacgagaacacaagcttatacctaagaaggccagccttcagcgagaaccagtgtacaataagccttttgagaaacaaaaggaatgaatagacaatcgtctatctaaacaaacatcaagaccaacatcaggtaatacattaagtatatacatgtttttttatagaataaaagttatacttatcttatggcttcctcgcagaaatgacgttcctgaagcaggctcctattcacaactgaaagcctaaggctagaactgcgacaacatctcctgtcatcccgcagaagaggaggagtgaggttgtcacgactcctttggtcgactcctctaagaaacagtttaaactttctcaagaaaaagggaagacggtcatgattgaccccgctgttagggcttacaacatcataactctctaagacaacttcgtgagtgatgagttcgtgttcaaggtcgagggagttcctgccgagaaattgttgttgcgctccacagagctctccttgcagtttatgaccatgttctcgaaggttttcttcgcaggtaccaaggaggtcgatttcttgaggaagcaaaacactcttctttaagagaatgtgaagaaattgaagttggacatgacttcaaatgagaaagatgtcgaggacctcaagaaggataaagagcaggcagaggaaaaggctaagtaggtggaggacaacgccaagctcttggaatcgtgagttgagtaattgactcgtgatcttgaggagaatcagaagaaaaagtacgatcagtccttggactgaaagcagctaaaatagctaaggcttttcgtgctatgtcgcctacccaaactaaaggatgtgggggaaaccttttccatgaggagcccgagaatatagatgttgaggaagtcgctgatggtgctgcaagcaaggtcgtagatgattcatcactccagctccttaattttttctaagttctttttattattgtcgaactttaatttctttttttttgttagtggtacacgggtactcgcacttcgtacttcaaaaaaattttatttattttgttatcgaacactatatcctttcgaggatatttactcttgcatatttattaagcggtacatgggtacttgcataattaaattgctcttttgatagttgtttctattcgcaatattttttatcatcattacaactaggtgtaataacttagaaaaagcatgcgaagaagataaaaatctctaaaaaattctagaaacttcaaaaaatttattatcctaatcaatagtacactatcaggtcataccccctagacttagtacgtttattgaaataaattgactaagtataaatacatgcgagtactattgatagtaatactttaagctttcaccattccaagatctcttgatcgctgtgccttcgagatctaacaattagtaagtcgcactaccgatttttccagtgattaggtaaggtccttcccagttatcaccaaaaactccatgtgctcagtttcgtgtgtttggcatgacctttcatagaaccaaatgtcctactcgcagactttattttttgatcttcgagtttaaataacgagctatttgttactcataggctgcatttttcaaatgagcctgatcgcaattccccttttagaagatcgagtggtaataactgatttctatattattattgatgttgaaaacatctctcgttagagatcctgctccaagttcgactggcatcatgacttcacacccataagaaagggagaagggggtttcaccagtcatggatcgaggagttgtattatacgaccatagaacttggggaagtttctctggccatgtacccttttattcttcgagcttccctttgatggtatgcttaatgatcttgttaactgcttctgtttgcccattaatttgaggattgtgatcgctgaaaaagcgtttcgaatccccacttcatcgcatagttggtgcatctccttacaatcgaattgtttaccattgtcagaaattaatttataagggatgccaaacctacagatgatggcgctgtagacaaactcgtgcgatttggtggctattaaagtcgcaagaggtttggcttcagcccatttcgtgaagtaatcgacaatgactgcggcatattttacccctccttttccttttggcaatttgccaattaaatctatgccccagaccgcaaatggccagggactagtgatagaatttaattggctcggttgcctttttacataagtagctatttgctaacttttgtcgcatcttttttagcgaagctagctgcatctgctcacaatgttggccagtaatatccttgcctcatgatttttagagcaagggaattcccaacaggatggttatcgtagattccaccgtgtacttcttagggtatataatctcattcaatcccgacgatacacttaagtaatggctgactaaatattctgcgacagagcttgtcatcataaatgacatatcgagcagctcgatattgtagttttttggcctcagttttatcctcagaaagt

SEQ ID NO: 38920 - DNA, 1370 bp, Cannabis sativa
ggttctttcaaaaaaaaaaatccaattatagactcacaaaattacttttctctcttttacctcattttacttgggcatacatgtaatgctcttggtatggttgtggaggaatgtgtaaatatttcattgtttagtttaaatttaagggtaggaaagtgttaattttttgagggtcctatatggttttaaagagtgttagaatttgggatatggtaattttttgtgggtccaatatgatttcatcttatatataagaactaactcaaaattagctcacaatgtatctgttttgaaactatattagaatttaggaaaaattgaatgaaattctactttaaaatcaattgactaacttattggtaatgtaggactaactctaataaaaaagaaagctaaactttttgtagagtagagttttggatgtcacactaaataaactctctccacattttctcatgcataacatttttcataatgtattaaactaaaattgtacagaaccaattacaccatatatgacacgccatgttgccctttagcatttctcctgtagtatcgtgattgtatagtggcaattttgttatttgtttgcttttgttgaaactgatcattttacgtataggataaggaaggtggtgaaaatggaggtaagaaggatttacgaagcaggggattatgcttgattccagtggaatgcaccttacacgtggcggacaccaacggtgctgatttatggtctcctgctatggcttccaacgtttcatcgtccatgaaatgaagcagtgaatattataagtataactattttttgctctccttggaatactttttactctgtacatggttaagaacctaattaagaaaagggttaaaaagtggaagaaaaatgttcagcagaatataaccaggtttcttacgtgtagagaaagaagaaaaaggctatttttttgtagtcgttgaaagaagtgtccttttcatgacatctttggtttggctctgctttacattttgttgtgttttcatagggacaaaatatgggttttttggtttggtgaacgttttcttgtatggaactggaacacacctgtaaattttcttaggctttaactaatctttagtttttttttttttgagtgtagcctaatactattttataagctagtctttagtgctttaactaatccttagttattattatggtttgttacttatattaatagcagtgcataagcgtactcatattacattaattaaaattcgatctaattcgactaattgacaacctatcaatttaattataagtaagggataaatattgaatatttaattgtgattggatcaaattagattgataaattagattgatagtg

SEQ ID NO: 38921 - DNA, 2036 bp, Cannabis sativa
  modified_base (1993)..(2005): a, c, t, g, unknown or other
ctcaaatgacagcaaaccatttgatcagccaacattctttcaaagtgtcatgggaggactacaatacttgactctaagtaggccagacattgccttcacagtaaataaactcagtcaattcatgcataatcctactcaacgtcattagaacacttgcaagcgcttactgcgctatctaaaaggaacagagggacaaggaatcatattcaaaccatcaaaaaatagaggtgtcgaatgcttcagcgatgcggattgggcaggatccatcgatgatcggaagtcgacaacagggtactgtgtctacttgggaggcaatctcatcacttggtgctcaaaaaaacaaaaggcagtggcaaaatcgtcgattgaggcagaatatcgtgcgctctctcagacagcaactgaagtggcctggctcttctctctatttactgaacttggtattaaacatcacactcatgctgttatctggtgtgacaatgcaggtgcgaataacaactctcatccaatccagtttttcacagccgcacgaaacacattgaagtcgatgttcattacatttgagatctaatcaaaagaggattgatcgaagtgagacacatccccaccaaagaacaaacaactgatatattcaccaaggctgctccatcagccaattcatttatctcaaagacaagcttgtcgtggtgtctcaaccagccgagcttgagggagcgtgttgaaaatattgaattgtcacatgtttatcactttgtaattatgagctggcagtaggtgatattaggtcattctagaattaccaattgcattggattctcttttctgtagccaattagaaaaggaaagaatataccttattattcctgatattctttagggtcattgtactatatatatatccgttgtacacagtgtacaatccattcaaaaattcaatacaaaattctacagaaaaagaatttctctctcttttatttgtttttgctgctgtactctttttctctgatattgacacgtaggaaaatattaagcaccacaagtgtcttttaacatttttctatatatatatattatgtttttttatgcatataattataaaagaaacttaaaaaagataagttttattacaatttgtttcttaaactttttactatatttatttaatttggcacatatccattttttcttgtgtatatatgttgggagacaaaaacacatttgagaaatttctttttttatattaaaattttattatttaattttcggggacatctttgtagtttgcacggagcccaaaacccaaaagcccaatcataaattattagaaaaaattaatttctatacccaaaaaataataagttattatgaaaacttatcttttttgaaattattttataattatatactctaggaaataattttggaaattaacaagcattatgattttctattaatgtacttttttgatagaaaacttactttatcttaatatgagcatcttagacctctttatgtagtgttaatgatattaccatttgaaattcaaactcattatgaactcaaatataactcatgcacacaccataaatcctataacattaagaattttaaattaagatgtgtaacacattttacactcttatggcacgtttacttaaagcgtagtcgtttttggaataaattaatgagagaaatgataataattgtaatatgctacatattagtttgttacacatatttaatctatacagtatattctttataaataacatcacaattctccactagattaaatttatctctaataacaaacttgtaattttgtaatatatatttaaacaattaaaaatactacatcaaaatataacattcctccccttttattaaataaatatacacttttcataataataaatacagtagaacctctatccaagaatacacttaggactaagtaaattatattctaattgggaggttataactaaatagnnnnnnnnnnnnnaaaaaaaattaaaaaactaaaaattatcaat

SEQ ID NO: 38922 - DNA, 1971 bp, Cannabis sativa
  modified_base (149)..(150): a, c, t, g, unknown or other
agaagtttctttaattgttgttgagtttggcattttatttccttagactattgaagtctcttctccaccaaaatcatttgctataatcaattgttgaccgtctcttttaggtagggcgtggggtcttaaaatattgtgtctgggtgacnntcctccccatgcctctaacacgtctaccatgttcatttatggcaagcgccagggttagaatatctttagtgcctttgagcactagtgttccctcgttgacgtgctttttaaggtcattctacatacaaaattcaagattaaattagctacacattgtgaaaaaccattataaatttgaaattctgaaacaaaaatatatagaatttacaattttatccatgacttttgtgtctcagcatcaaactcatccttcttgttcttgtacatgttgatccacaaattagcttgatcaatgtcatttgtaatatcccaaaaaatattataatatttaatcagacgtattttattaaatatgtgactttatggatattagagtaggattataattttacttaagctaattataagttaattagtggaatttgagtaaatgaataaataaagcgtaatttattaattacgaagattttatcaaactatgggggtattatagatacgatttttgaaataaaataattttgggtttgacggctatggaaactcgatggagtggtcagaaatgtcacgaaaatagaagttgagatagattggattatactggacttgttagtatttgctagatagtggtttagtcagggtagttagaatgaccaaaatacccctaggctttaatttatttaagtgttgagtgaaaggggcaaattagtcttttcactaggttaaagttttgtcttttatggatctactttcttagctaaaatggaatttataataagttttatttatttactttaagtgataaaaataggaaataagagataaattctaacttagcaaaaaaaaaaaaacattacactcaaagactctctcttccttctcacctatttgaaccctagaaaccagcaacagcaaagaagatttctccaccaatttcacaatttcttagctgaattgacaaggtttagggattgttcaagcttggatgtaagtcttatgtcttttatcctttaatttcttaggtttgagttgtgttttgcttaggatttagcttagttttggggctgtggatattgttggagtttagacatatttttaagtttaaattgatggtggtttaagattgaattgagtggaattgaaggttgttaggtttgagttgggaaaattgagtttaagaagtcaattttcactcaactatagtattttggttattttgatgaatttttgagttttgattgattgtatacattgtattcatgttatagaattgttctatgaagtttgagaacaattagttagatttggaggaagttttgggactttgaagatctaaaatttttgagtttctactgtagtgaaccggaattctggatggtacagggctgtaccaactggaatttcggatggtctgtttcgggaatcgccgatttctgtattttggccataatttttcactcgagtgtccgttttagacattctatatacaatttcgaagcttatgaagagctctacaatatgagacatagattagagccaaaagatgtattttattttaaggtgttttcaccataagattcagtagaaaaccctaggttactttatgcatgttttagatagtgttttggaatagacccttactcatttactgttgtcgtgatcatcgagaatcattctactcaggtcagcccgcacacctcactttggacttgaggtatgaaatgctttatgcactactaaacgtgttggtaagaaacgattattatcgtttgtgactcaattatatatgatcgaggtaatgaagtgtatgttgggttttatgcc

SEQ ID NO: 38923 - DNA, 1795 bp, Cannabis sativa
agacgccgaacgaagaaatccgctccaactggacccgcgaggatgcacggttcatgagggatgtgccatccattacgccggtctcgtatccttcacgcacagcgccgttgccggaagacaaggtttcggccgaaaatccggcgactgagagcgatgaattgcagagggagaaacagcaaatcgaaatggagaatcgaatgaggaggagagtgtttaaagttctggaggaggacaaggtagtggctcctttcccaatgttaattgatgtggagaagaaggagagaaaacctattcttgatttaatggaggcaattcggcaagtcaaggtcagtgtagaggtttctcttttttttttccctgtttggtttctgagaataagtagtataaaccctctgtactaatcttatatgttattttctagttttcaggctagtgccaaatgcaattttgatgaaactgttgaagcacatgtgaaattgggtattgatgcaaagcgagcggtaagagactcttatatagcaaaagacttctttctagtcaagcttgattttctcttatatgtatgaacaattggagtcttataggtgtgaactggcctgattgttggggcatttagtttgttataataatccttctatagggttgtcaaatttggtcttcagattttcagtgttatgaagtatttttgtgagtgattttaacatatgaatgagtaattgaaacttaattggtaggttcttcataatttaatttgttttatcatatggttttatacacctggacatagcttgtttgagataactatagaatcatttctcattgattttctttttacacctttttatcttaatatttcagggacgaggagttcgcggtaacatgactctgcctcatggtagtgggaaggtattacttaaaaatcttgaataatcgtttgttgtaacatttgttagccactttagttgaagctgattgccttaacattttcaaatatcaggttgtaagggttgcctattttgctgaaggggaacttgcagatgaagctagagcagcaggagctgatattgttggtggtgccgaactcgtagacgaagttgctagtattgacctaacttccctctctatatgtccaatttaagtttttaggatagataattccattaccctttttaacattatatatagtcctttaaatcatatgtccttgtttccttgttattcattcttagctttggataagtacaggctttcaattataatcaatttaggttatggatctgaaacctgagcttgaatctttgcaggcagtaacaagcttaatgttgataagtgttttgcaacaaatgaaatgattcttcgaatgggaaaggttttctgaaaatctaatgctgttcctagtttgtattagtgattttgagttttttttttttttttcaatctaatactgttgactttcttttttcagatttcaaggattcttagagagcgcggtctttggcctgatcgtaaagtgagttcattgtcttctatctttgattcaaaaattatttgagatgagtgaaattgttatttttgtactaatacattgtatagctaggcactgtgacaaatgatgtttcagaggcactcaacaaagtaacaagtcatacggactttaaaatggacaagacatccattgtccacgttggagttgggaaggtaccaatttatttgttataaaacattctgttgcattcaaggagtagtttgctggagacaaagttatgtgcttacatatttattattttctattttt

SEQ ID NO: 38924 - DNA, 3400 bp, Cannabis sativa
tggcttctgccactgctccaccggccactgctgccaccaacgctgctcccccatcttcttggaaccccttctctcactcccttacctcgtcccttacagtaaaattagaccgaaaaatttcctctcttggaaatctcaattaagttgtgcgtactgtcattggtcatgatctcgatgagatccttttcactagtattccaccacctgaacgattagtcaacgacggtcccaatctagaatttcagcaatggagaaagaaagatcaactcctcctttcttggattcgttcttccatgtttgagagtgttcttgcctctatggccaactatcccacttcttctgctgtgcggcgtgctcttgagaaaaaatatgcatctcaaaccagagcttgacgattacaactgaaaggccaattctcaaatgttcaaaagggagtctcactatctctcaatacattgacaaagttgtatccatttctaactctcttactattgcaggatcccctgttattgattaggaccttgtgcttcaacttctaaatgggcttgagcctaagttcgactctgttgtttcagggatcacatcacgaagtgatgctctgtctattgaggaagttcaagccctgcttctctctcatgaaagcagacttgaacatcacaacaccatggccgatcttactgtcaagatgtaagccaatcttgctcttggatctggccgtggcaatgtgtctcgatacattcccaatcaaagattcggtgcaactgaatatcccattcaaacctttggtcgtggcaggggtctctttcggttcaactccactaaggtcaaatgccaagtttgcctgaaaactggacacacaactgccgtgtgtcgttatcgatataagaagaactgggttcgtccaaagccaaaccagaactagaaccgtgcatttctcactgagctggagtttgactatgatccacaagcctatacttccactatggtgaaagattttggagatgaccattcttggtttgctgatacaggtgccattgctcatgtcacctctggcaatacaaatcttgatgaatttcaaccatacaatgggtcagatactctagctgttgaggatggtaagaagctccttatttcacatatagattttactactttaccttcttcaactaatctaaatgctttacaactcaaatctattttacatgttccagccattactaaaaagcttataagtgtgtctaagctaacagaggacaataatgtcttccttgagtttcacaatcattattgttttgttaaggacaaagagacaggtgttgtgctactcaaaggtaaggttagagatggactgtatcttcttggtgattcatctattcgaccaaggtctgccttgcagtgtcacctagccactacttctagtttgcttcttgattcttgtattccccattgtactctcaatattgagaatgatatatctcagaacaattgtaataatcttgcaagtaataattttttttttctggtttacaagagtcatctatctttcacaccactatagcacatgatgtcaatttatggcattgtaaattggatcatcctgcccattctacacttgttagactcttaccacacactgaaactataaacacactttgattttgtaatgcatgtcaataagcaaaaagtcacaaattaccattccctttatcatctagtcatgccagccagccccttgaattagtgcacactgacctatggggcccttgtcatgtcccatccaaagatggatatagatattacatccatttcttggatgactatagcaggttcacttggatttacccccttactgtcaaatctcaggcatttgaaatgttcatcaagtttaaaagtatggcaaaaaaacaatttggtttgcccataaaatcggttcaggcagatggtggaggtgaatacaaaccatttgccaagttcctcacagatcaaggcatccttttttctcatccttgtcctcatacccatgaataaaatggtaagtaggaagaaaataccgacatattgttgaaatgggattgacattcctagctcactctggtttggatctcacctactggtggcatgcatttcagagtgctaccttcaccataaatagattaccaaccccagttctcaactactttaccccatatgagtgtctattttgcaaaaaacctgactataccattctaagatcctttggtttgttcatcttttccacactttaaaccttataactcacataaaatggagttcagatcacaatagtgtatatttcttgggtattcacccttccacaaggggaagacatatgaaaatgacaaagggagaatttttatagcaagaaatgtcattttcaatgaaaatgactatcctagccacagacaaacagacattacaaaggtacaaactctgcctaattctatgtgttcccactgcaacttttttttttactaatgcgggtactagtgctcctctttcactcaataatgatgctattgagacaaatcatcaaccaaatgctactattcttgtcccaaattccccacaaatagccatctcaattgctcccaaccacactatcattcctgatgctcccataccaaatagaacaatccaacctaaccttgttaccaccactgcagcaattttacctgctgcaccagatcttgtcacactagatcaacctcagcaacaaaatgctgcccctaattccccattccccaccccagatcctctcccccaatcatccacacatccacctatcacacaaccatctacaaacaccccacccctacccatacctgctacagtctcaagcaacatcccacaggaaaatacagcaagaacacatcatatgcaaaccagatccaggagtggaattgtcaaaccaaaggcataccttgccaccaaacatccattacccgagtttctacttcccaccgaacctacctcactcaaaaaagcactgcaacatcccaaatgattacaattaatagttgaagagatccttgctctcaaggctaccaaaacttggagccttgtcccacacaaacttggcatgcatataatcagcaacaagtgggttcataggttgaaattaaatgctgaaggttctctcaacaagttcaaatcgagacttgttgcaaaaggatttctgcaacaatctggaattgactatgaagagatattttcccctgttgtaaaactagtaacaatttgaactgttcttagtcttgctatctcttttgactggtctgtcaaacagattgatgttagcaatgcattcttaaatggcatgctaacagaaactgtctatatacagtagcccccaagctttgtggatcattcgaaactagaccat

SEQ ID NO: 38925 - DNA, 1518 bp, Cannabis sativa
ttaagttttttaattttgtttggataattgtatacgtatcagcctattttgctttacaatctacatatattattttgtttttctcctctttctcttgtattattacgataataaactatttttttttcttgaatatctatctattattccttgtttttatctaactcatatacttgctacattttattttccttataataattcttttcctgatgggacatttatcaaatatttatatttttataaattttttttcttttaatagttttagatatttttttattagaaaaataattttaaaaatacttttcaactatactggtaattgtttggccatcagaattgtattactactcttcaatattattattttgatgtgtgaaaaatatatatttctttaccttaccgttacctaaaaaaaataatctaaatcaaaggtaaccattttgttttttttttttttgatttaattaaccaaaaaaaaaatacaaaaatttaaatttaaacaaaataaaatataccaactaattttgttaattatttttttatttaatatttaaaagttactgctatgagccaatgtagataaatttctaaaatatattttctacttagctaacaatcaaactgaaacaaaatttaatatagcaacaaattttgtggattaataaaagctactagaatcttattttttatataagaaaagcacatagtatattaaaattcaatataaaaaccaacattataaattactctataatttttatattttatatttaaaagttaccaaataatatatttagaataagtttgcttaatatctattttaatatatttcttaaaaaaaaaacttataaagtaactaaatagtattttaaatattataaaattaattatattataaaaattattatatttaataactttactaataagagatatatggtaaatacttattttttactgtaccttattaaattcttgaataggtttttgaaagtaactgaaatagtgctagaaacaaaaataatgtaaaagaaacaataagatagtatattgttacttaaaataaatttttgtaatgtttaagatattatttaatttgttaaaaaagtcattatttagttttttttttttttttttgaaattaaaccatcatttagtttctttaaataacgaaaattatatgaaataatataattgtaaaggagcacttattaaaaaatatatatatgttagtggtttattttctaattatagcatatagtatataaaagaaactaaaaagttttatgaaattgtatatatatatagagatgttcatatttataaaggagaaaaatataaatacataaataaataatgataaaaaacacattaaaacaatttgttggcatattatcttgtgtttatgttttattaaaaaataaaataaaaaatagttggctaggctacaaagaaagagaaaaaaaaatgaaaaaaaaaatgatatgctgagtaaaacgggaagtgaatgag

SEQ ID NO: 38926 - DNA, 1729 bp, Cannabis sativa
tgccatacttggctacacttataaattgtcttgtttggacactttatgggctcctttttattcatccaggaagtattttggttgtgactataaatgggtattatcttgtaattgaggttacatacttaatcatcttcttaatcttctaagataagaagaaaatgattaaagttgttcttgttcttgctgagcttgttttcatttcaattctcacccttttgactttgactttgagtcattctcacaacaaaagatcaatcattgttggtaccatttgtatctctttgatatcaagatttatgttgctccattagctgttatggtaaattactatttactagttattaattatttaatttttaatatcagtatttcttgtatgattttaattacttatttttattggtgcagaaatcggtaattactactaagagtgtggagtttatgccatttttcttatcatttgcttcattgttgaatggtattactttgaccacttatttattaagatgcccaaaattttatatcgtcataggcccccattttttcaggaccggcccttattattatgtgacaataatgatgaacaaataaaaaatgtggttaataatgtagctaattaattaattatgggcaatcatttattcaaatatggaaaagaaaatcaatggagcaatactcagctatgccatacttggctacacttataaattgtcttgtttggacactttatgggctcccttttattcatccaggaagtattttggttgtgactataaatgagtctggtgttgtaattgagctttcatacttaatcatcttcttcatcttttgaaataggaaaaaaatgattaaagttgttcttgttgttcttgctgagcttgttttcatttctattctcacccttttgactttgactttgactcattctcacaagaaaagatcaaccattgttggtaccatttgtatactctttaatatcatgatttatgctgctccattagttgttatggtaaattactagttactagttattaattagttactttttaatatcaatatttcttgtttgattttgattgcttattttttttggtgcagaaattggtaattactactaagagtgtggaatttatgtcatttttcttatcatttgatttattgttgaatcgtattacttagcccacttatttattaaggggccaaaattttatatcgtcttaggcccccattttttcagggccggacctcattattatgttacaataatgatgaacaaataaaaaggtggttaataatgtagcttattaattaattattattattaattataggacaacatttattcatatatggaaaagaaaatcaatggaccaatacttagctgtgccatacttggttacacttataaattctcttgtttagacactttatgggctcctttttattcatccaggaagtattttggttgtgactataaatgggtctggtcttgtaattgagtgtacatacttaatcatcttcttaatccttggagataagaagaaaaagattaaagttgttcttgttgttcttgctgagcttgttttcatttctattctcacccttttcactttgacttttactcattctcataagaaaagatcaaccattgttggtaccatttgtatactctttaatatcatgatttatgcttttccattaactgttatggtaaattattagttac

SEQ ID NO: 38927 - DNA, 2350 bp, Cannabis sativa
cttgatgatcccaggtcctatgtcgcgatagcaaaattcagtaaataccttaatcaaatttttgggaacaaaccctaattctcgtaatcagacgaacctaattcccactggttcaatctaactcaaatatcactaaaaatgccctaaattaaactccagaaaacaccccaagccaaaaccagattcgaggagaaaacttgagattttccccctgctagcaaaccggttgaccggtttgcgtgttgcctgtaaaaccgatcgaccggttttctgggcagccatggggaaatctagtttttcacctcgaaacccaatccaagctccaccaaacctatcgtactcttctaggacagttcaatgtcaaatatataacatatccagcacatcaaaacacaacaatttaacaaattacacaaatcaccatgctagaaccaagaaattgagttctaaaactcaattcttcaattccaacaccacaaccacctaactcaaacaaactaaactctaatcaaccttaaatcaagcctaataacaatatttatacttaatttaacaacatagtaccaaaatcctaaaaccctaagctaaaacttgatgaaatctttatacacataggaggaacttacctcaaggcttctagcttgagcttgggattgaaatctgctagagacttgatgaaattgaagaaggactcccttggtttagctggtttctaggttgcacgaaggagagaggaaagatgagatttttggatgatatttcttgtttcctttaagccttaccaaccttaactatttttttctttttcttttttttttttaaacttaatggtaattactaataatcaaccaatattcgctaaaaacacaaaaagacaaaatgggataaaatgaccattttatactttccacaaaacttaggctatggaataacctagcgcattttggtcatttctagttttccctttctaatttacttctcaacattttaacctagtccagtataatttcaatacaacataacctaattgtcgtgatgcttttgaccactctgtcaagtttccaaggccgccgaactcaaaaatattttatctcataaatagtgtttactattcccacaatattcaatcaaatctctgtaattaataaattacgttttattaatcacaaatttaattttactctaattttacacattagcttaggtaagatcataatcttactctagtatcagcaaatcacatatttaataaaatatgtccaattgaatattataatattttatgggatattacagatagggaaatgaagtatctaggtttggagccagttcagcggaccggtgaggctagagaagattaaggccaagatgtttgctcttcacagctggcaaaaaagaatatgtagatttgaagctcagaaatatagaaatcccaagtaggggaaatcatgtcttcctatgaatattattagtgaaaggaatgaaatacttctgggacaagggtaagatatgccttacattcctaagacttatagagatttttgaggaaatcagattaataatttattgtctagccttatgattagtattgccaacatcacataatgtttttaggttgtatgttaagaaagtatgatttggactcaactcatatgctaagttataaaatcctataacttcagtcagatctatcttatgaggagaaagaagttgagatcctcgataaaaagataaagttcttcgaagcaggattatagtattggtcaaggtactttggagaattagtaaggtggaaaagccccttgggaatgaggttccgacatgaggactcaatattcagagatattcatattagattttgaagattaaattcttttaacgaaggaataattgtaatgaccacataattaaatcatgagaataagtatataattaaggatttaattgttattttatgattatgtactttatagtagaaattagggcttactgtcacaagtaggccttagaaaaatatgttctcaattacagagatatatttaaattctagatgtaatatataaaatttcatatttttcatatagtttatgtcggtaatagtgcaatgcgatgttttggccagtagagtcacttagatgcggttaagtatcttagaattaacgggtcatgatagttagatattttgaatatcgagtttattcaaggttgtggtttaggaccattttacccttaggcattttaggtttattcttagggaaggaagggaaaatttgatattttgtactaagttagtgaatttttgtcttttatagactctagtatttcctttgtaatagattgattgtttaag

SEQ ID NO: 38928 - DNA, 1745 bp, Cannabis sativa
  modified_base (1695)..(1712): a, c, t, g, unknown or other
ttatactaattatgaattctcattcctaatatgtgataaaaaaagtctgtagttaaaagtattagtcaaaaaaattacaatttgttgactaaatacgtttttagtcacaataattattgtgactaaaattaaatcagttacaacttgtatctaaatattattaattatgttttagtcaatatataccaggaaaaaaagttttaggggcgacattataataggcaaccttttgtgcctccaaataataggttattagggccaactttctttcatggtcactcctagtaattgtcttatatttaaaataatatttcaaaatattgttgttgcaacatttattacatttaggggcaacataaaaagtattttattaaaaaaagtataaaaaatacaaacatgagagtaataattattattaggggtgacattttggagtttcaggagcaactaaagtcgtccataaaagttcttttttacattttcaatttcttaacaaagaggaaaaaaagcaaaataattaagacaatattagctcacacaaacaaaaaacagagaaaacagagaagaaagaaacaatgaaccttttattgagattgaaggaattaattggttacagatacaagagaaggcaagctttatatagctacaaaaaagaattagttacaatcataacgaccataatagaattaactaacatgacagctaggaccaactagcttacaactaacaacttctttgataccccctcaagatggaccatagatatctctaagtcccatcttgtctttaaagcccttgaattgagtaggaaataaaggtttagttagaatatcagcaagttagtcttttgttgaaacatgaaccattttgataatcccttcttgcactttctctctcattatgtggcaatcaatctcaatatgttttgttctttcatagaacacaagatttgcagctatgtattgtgcagatttgttatcacaatacaagaatgcaggcccttcatgttcaactttaagctcctttaagatagacaaaagccaaataacctcacatgtggtatttgccattgccctatactcagcttctgaagaagatcttgaaacaacatgttgtttcttgctttttcatgaaaatattgatgctccaatgagaatgcaaaagcctatagtagatctccttgtgtctggacaagaagcccagtcaaaatcgctataggcatgcaatttaacttcagtttttgttgcaaagaacaagccttgaccaaggctactcttaatatattgcaacactctttctgtagcatgaaggtgagtaacacgaggtgttgcaagaaattgactaagcttgttaactgagaatgagagatcaggcctagtgattgtcaaatactacaacttttcaacaatatttctaaaaagagtcgggtctataagttttccttttacatcctttccaagtttgaggttaggctccataggtgtattcgtgggcttgtagcctaagtgtcctagatcctcaagcagttgcagggcataacgtctttgagagacaaaaatcccttgttcagatcgagctacttctaagccaagaaaatactttagatttcccaaatccttaagctaaaatatgtcattcagtcttactttcaaggcttggagtttctcaaggttattgttgttgggttttgtgccnnnnnnnnnnnnnnnnnnaatataatcagatttattagttaacaaagatca

SEQ ID NO: 38929 - DNA, 2669 bp, Cannabis sativa
atgatttgtttcctctcgaccaaaagttctcttcttctatcgcggtaaattcctcgtaaaacagaggaaaggaaactcaggtattaccccgaaagaagctaataagaggagaatctatttgattcctcaattttcctatactctttattgggaatagagagaaagttgtccattacattaacttggaaactccaccatggatggatatcaactgatattcgatcaaaattaaactttccggggaaagaaaatgagagagagagagagagagaagtttttggtagataattgtgattacctgattgggttgggtgatttctggaaattgttggtatgggtggaaataaagcaatgacgaaattttcggttataaaagcgagaaagatacacacatatgagacatatacactactctgctctgagaaatagtgggcggccgcgcccctcttatatatcacccaaacccaatataccataatttattatatattaaccattattttttttcggatatattatatttagctttgtttatttataaaaaaaatatactaagagttgacaaaatctatatatatacacattttttttgtttgaacaatgatgaaatcttatttatttatttatttttttttttgagaatgataaaatcttattaaggtaatatatacacattcataacactatttattatttttcttttcatttttttttgttaaatgttgaacttgaaccagcaaacgcaaaatgtcaacctagtggtatctcttctcttaagtccttttatttctttataaatcccatttaagaatattgtgagtaatcaaattacaattatcatgatgaattaacaaaaattaccattattgcttacaaaaaaaatttatcactattattattttctttccatatttatgtgttgggaaaaactaagtgttgatgaggaaaattccgtactctcgacaaatggaacccctcaagattggtaccactaccagtcactaaaatgcccaacgagttacgtgggagagcccatgatggcactctcttgtaaatccaaaccaaagggaacacccccgaatcttaaggagaaacttcatctgaaatatgccatgctaggaggcaccttacctacctacgactcccttccaaggtagacgaaagtataaggcctcatccttcaacgttggtgagcaaagggacgagtgaagcaccatacctcatgtagcccccgtgcaaaccataaaaaagaccaaggttcctcccacttacctccgaaagaatagacaaaagaatgaaagagctagatgcggagatccaaatcctgcccatcacaagtatcaccaatgtgaagcaaggagaacaagagaatttgtaaagttacattcagtgcttcaacattgaagttaccgaagtagggaatttatctaaagacgaacttaagatcaccataattataggagtacgccccgaaagcaagctttggtaaacatgctaaagagagagttggatgatctcagtgtcttctatgaaaggacagagaagtatatctgtgtggaagaagacaaaaagagcttaaagacaggtaaaaatgagaactggtcgggaagcttttcaaaccaatataagattttttaagaagcactccccaacatttagaatttattacactcaagtgacattttcaacccttaaagctatatacatcaagcatccaagaaagtcgtcaaagcagtactatcccacttgctataatcgatcaaataggacacccctgtttgcctatcttctttttgtaataagttataataaattaaagaggatatctagtttggcctctagtagtagcaaatattattttaactctacatgtgttaagttagttttttccgttatttcagttaacagttagttaggattagttataatggctttgtactataaatagactcaactctttgtaccaattcagattattccatttaataagattttctctctgtttttaccaaactaacatggtatcagtagaaaacgatcaaagctcgaagaattcaaattgaagcttcaagatttcttcttcttctcgactgttcttcagtcctttcttcttcttcaacaatggttagaacaagaccacaagttctgctactaccactgctgttcctctagtggttgatgctccaatggctcctccaccaccaccttcaacaaattctgctgacaatccaccaagaatagagcactctgcccctgttcctcgatcaacttcggtggacagacctccgtatgaagacattcgatctccatactacttaagtaactttgatcatcctggcatggctttggtaacccttgtcctcacaaatcgtaatttccaaccttggaaacgtgactttaaactctcaattggagcacgaaacaagactccatttcttgaaggtactatccctcaacctccccccaatgataatttgttcaattcttgggttaagtagcattatgtaccttgagactgcatccgaaatgtggattgtattgaacaatcggttcaatcaaggaaatggtccaagaatttttgaattgaatgaaaccttgacctatcttcatcaaggagatgatttagtcagtgcctacttcactaaacttactgctatgtgggatgaaat

SEQ ID NO: 38930 - DNA, 4796 bp, Cannabis sativa
ttttttgtaaatattgaaaatttaagaatgataaattttaagttgttatgctgccgaattttggtagcataacatttttaatttaattaaaaaatataatatcaattaatttttttttacaaaatagtaagaatatcactaatattatatatataaataagttaaattaaaaaatataaaatattataagtaatttattttgtattaattatctttaatttaaatatggatattaacttagtttagactttattttaaataaatttcaattaaaaataatggtcaaactataataaattggtaactttaatattaaaaaataagtgttaattgtaataaattagaaactttaaaatgataaataaaaaattagtaattttaataagttggtaactttaaaaagttaaaaattaaattattaattttaactaattggaaactatagaatgataaaaaattattaatttcaacaaattaaacacttgaaatgataaataaagttgttaatttaaactaattggaaattttaaaataaaaataaggattgttaattttaagaaattggaaacttgaaaatgaaaataaagattgctaattttaagaaattgaaaattttgaaatgaaaaaataattgttagtttaaataataagttgaaaattttaaaataataattttatttaatttttaaatgttagtaaatacttttacttagtaataattagttttcaaattttaattatagatttggtatacttgcaaatataccataactttggtatactagcaaactaaatatagaaaaattgttctagactttatttgcaagtatagtgaagttatggttttaattgagctatgaatcccaaagtaataaggttaatttaacactattcataattttgaaattgacaataaaaatttataagtggtaaaataaaatagcataaaatattctaagatagcataaatgaaattcttatcttgatttgattcttcggttattataaaccaaagtaggctagaacaattgtgtttgtattatcacctagtgataattttttttcacgcgcataattttctttagaatcgtttggagaaattgagtcagtaaggactcttaaatacgtttctttaaattatccaggactttttttgtccgcgtggataatttgggcttgttgtacacttataatgtgatttattgcacatttgattgtttctttactaagattttggtacgtcatctccttgcacgttcttgtaagttggcagacttgttaatagttttcttacttataataattgtggagaggtgttgccaaaattttgacgaaaaagaagcaatcttaagagcataaattgtattatatgcatattacaaacctgaatggaataggttctctacccttttaataatggagtgagaaggtggattaggaaacttgcatattttgaactttgttttgaactttttctttttatattatgtaaaaatatgatgagtgataaagtttggatgactttaaacaaacggtctatagagtttcgtaggggtgtgaacaagtttattggagttgttcgaatgcaaataaattatgatggacttactcgatgcccttgcatgagatgtctgaatgtgaacttcgacactccagataatatacaagtacatttgtttatgcatggcattcaacgatcgtacacgacctggtattttcatggggagtcgttcacgcaactggctatagaaatagtagacaatgatgaagaaaaaatggcagatgtgatggctggtattttaagagaaaatcttggctttgacgatagaagtactacctaccactaattcattcaacgagcctccactgaatggtagtggtaagtacgataatttgttcaaggatatggaaagtgaattgtactcgggttgcaaaaaatcagcactcaatgttttggtgaagctgatgcactgcaaagttctcaatgaggaaagtaaccattctttgatatgttactttccatattaattgagttatttttggagggtacaaaattatccaagtcccattacgagtcaaagatgaagttgcataaccttggtttaggttatgactccattgatgtgtgcaagtaacttgtgccttgttttggaaggagagtgagaaaagaaaattgtcctattgtggtgagagtcgtttaaaaaaaagaaaaaggaagatgaaaaaaaaagttgctcagaaagttatacgatactttccctaactccaagactaaagaggttatacaatttaagacaattggctaaggacatgcggtgacatcattctaagataactaaagaggatggcgtgcttaggtgccctgcaaatgcagaggagtggaagcagtttgacaagcgccacccatctttttcccttgaacccaaaaatgtgaggttgggtttgggcacggatggattcaatctgtttggtaacatgagtaaattttacagtatgtggccttttatcttagtcccgtataacttatccccttggaagtgcatgaaagcaaaatttttgatgtagtctcaattgatagggcgcactacgcctagaaaagacatggatattttcatgagaccattaattgatgaatagaaagagttatgggagtcaggtgtccaagctcgagatgcttataatgggactgtgtttacaatacgtgctactgttttgtagaccattaatgacttctcagtgtatgctttgatgtctggttagagcaccaaagggtacaaggtgtgccccacttgtaacgaacacatcccttccattagattgcgtagaaatattaattatgttgggcacagacggtttcttgaaatggatgaattaagacgaaaaagtaaaaaataagatagaaaatttgagaaacgaccacctccttcagaacttttaggggtaaatgttttagctcacctcgagccgatacatttttgtttgcttagaaaacataaacaatttggtagagctaagcgtaaacattttgtagctgagctaaattggtcaaagaagagtatattctttgaactagagtattggaaggacatgtctctcagacataatctcaacataattcatatcaagaaaatgtgtgcgacaatatacttagaactcttttaagtatcaagggaaagtccaaggataccaacaaagcaagatttgatttgaaagacctcaaaatacgtcatgagttatggttgtatgaagaccgcaatgggaattagaagaaactgcctgctagttaaatgcttagtcttcctaaacgacgtgaatttacagatttatcaagtatgtgcagtttccagacagatttgcttcaaatttagagaagaatgtgaatgagaatgaagacagatatttggcttgaagtctcacgactgccatgtgttgttacaatgcttgattctgaggggcattcgaatttttttgaaaaaataagttcgggatacaatagttgaactgtgtatttttctaaacatagtgctcaaagacattgaatgttgaagacttggagagcatgccaaaaagtattttggacattctttgcaaattggacaccattttcccaccggcattttttgacataatggttcacttggcaatacatttacctaaagaagtgatacttgggggaccagtacactataggtggatgtattcaattgaatgagccatgtccgtatacaaacaatatgtaaaaaattgttctcaaccagaaggatcaaatttgtgaagcttatgcagtaacgaggcattaagcttttgttctatgtacttttgggatgttgaaactcggtttaaccgaccaaatcaaaatagtgatgtcatcctgaataagcctgaaagagaattctctatattcaagcatgttgggcgacccattggtaagagaaccatcgtgcctttaccaatgcaagaaaagcttaaggcagactggtacattttgtacaatcgtaaggaagtgaagaagtatatcaagtaagatactttttgcattcttaatttagttttctagcactcatgaccgtctcttacaaaaatctatttgtgtggtgagcataggaacgcgctacaacttaggggtgatcaaaatcttaacaccgttcaaaagaacgatttttctagttggttcaagtctcgagttagtattgctttatactaattttgtcattcaaatacggtttcttgtactagtattgattacatttttcactcaatgatagatcaattaactctgatcagataaccctggggaagtatcagatgagttttacgccatcgcatatccctctaatccagcatgttattgttatccttgatttattattaacagtgttaaattcctagttgaagattagaatgacaatcgtaacacccaaaacagtggtattttggttcctagagaagatggtaaaaaaatttatggcgtactcaaacaagtctacgagttgacttatatgaaggattgtagtgttattatttttaggtgcaagtggtgggacacaaacggtaacaggatagaaagtaatggttttttcactagtgtttgcgtcgcccgtcaatggtaccaaaacaaaccattcatacttacatccgaagaaaatttaatatattacatttcgaacctgaagaatgagttgattggaagcttatcaatgtttacacctgtgacagtcagtagtcccgtgatccgtaaggggaaaaacactgggtaagctgtgcaatcctacgtcgcctggggaaggtcaagtggg

SEQ ID NO: 38931 - DNA, 1733 bp, Cannabis sativa
tacgctggtaaaactttgacctctttgccagtgcaatttgcgaaatatgctgataaaagttaattttaccagcacagtagaaaactgtgctgataaaaataacatttcttgtagtgtctagtggcagatgttattcttactcgacgatgtgatttgaatcttcatcttctatttataagcaagaatggatgatatgcttccctcgatctttcttcttattggtcgatatgaatttatcctcctatttcttcgtaattgtaccagtagcaatattccacattgaagagtactaaacaccactaatgtcttttaacaaatcattataaaaaatagtaattgcatggagttataggtcgctgagcattgctatttgatacatactgatgtgatattttataattaattggcgatttatatgatatttattaaattaaaatatgtggaacctaatattaattaaaatgcatcaataacgatatatgcttgacaccttaaagaagtggcgcagggagagttttgcaaagtaggaggagagggagggggcaaattgtgaagagaaagatttaggagggctaattattaataattattatataatttaatttttttttacatatttaatatatataaaaatagatgaccccgtgtttcttaacattttttataggcctaaatatacctcgtatatttatgagtattaggtcatctctaacagaacactaaaaattttaatttagtattgtttctcactaattaaaattaatctaaccgaacagtaaaaactatcctatatatagaattgtctacagtatcttattatcattagtgagatactattcaccacacgaaaattgctttttttttttttaatttttaataattaaataatggttacatatatgtaatatttatatttatatacaaaaataataaagaatatactttttttatgtaatttatagtgttgtaattagaattagaaaaaaaaaattaatgctaaataatacttttttaatgttaatttaacactataaatttaaatttcattaattgatcttacaccattagaaattaggagagactaatataacatatttgggtcttgagaatagtttaatataaatttgtggtagtatatattaaatactatatattggcgtgttgtaatatttttttcactactattattatttattggaaattatttctttataaagaaagagtggcatttttcttctttttcttcctacataaaaaggaggcccctaaatttgtgtttcattttttgtaacatatatcttctttttatgaatttcttaaatttatttgatgctactgttgcatttaaggtagacagcacagcacttggaactatttatgagatgaaatttataccaaaaaatctcacataatccatcaccaatattttgctttattctacactcaactcattaattagttttttcatgcattattaatttactacttaactcacctgttaattattaatgctatttaactatccatacatgcaaattattacaactccacaaaactatgaatagacattaaaaatcttattaaaaatagttcattacagttttacataccgtacatattattatatataagtagtaatcttattaatatacataaatttatatatattgtatgtggtagtctgtattaattaactcacctaatttttctagaaaatttaaaacctagctaat

SEQ ID NO: 38932 - DNA, 2422 bp, Cannabis sativa
gataaaaggatgtgaaagttacctgcattgccagcttattaccagcatgagaacctccattaatgacattgaaagctggcacaggaagcaccaaggtcttatttccagcaaggttggcaatgtgctgcaagtaacaagattaaatgaatataaaacaatagtcattgcatccactagttaacagtgtaatatttgctcttataccacacaacctaccctatacagaggaatcttcttcgctgaggcaccagctttacacacagcaagggatacagccagtatggcatttgctccaagctgaaataacagatagaaaacaccccagtttttcattttcatgatggtatttatatgtatatgaatatgtatttatattttttactcctctcttgaaaggagagagagttacacgtaaagtaggaagtccaaaaaaggaaaacagataccttttgtttgcaccaaccccattcattgacagttccatcaagctgttgaaccatgtaattatcaatcttggtctgttctgttgggtcctgaaattcacattggaaaaaataagtgtcatggccttcaattccaataaacattgttttctttttctttttcttcccaatataatgtttatatttaaaaaaaataaaaaatataaaaaaaataatgtttatatttagaaaataatacctttccaatcaaagcaggcccaattatggaattcacgttctccacagcctaaatcagcaaggatttaaaagcaacagtcagattaactcaacaaaccccaaatactggataaaacaatacagaaactcttgacaagaagggtaatgaagcataaaataaattgacaccgtaggaatgtaaaatatcaattgtaaaagtaactgtataatgaggtaagaattggattttatatccagatatgtgagattgctactgattaagcaactaaactatcaaatagcattagttgcagcttgcatctaatgaattcaaacaattcttaagttttaaaatcaaaacagagcataaagcaacaaaatcatgttcagcacaatacactcaaagttgctataccttaaggacacctttcccaaggtaatctgatcctccatctctcaattccagggcctcatatatacctataaaggacatttcaagagtaaattcaaactgtagattagtatagcttagaatttaaaaaaaagctcttaatgtcataatttatatttaaaaatttaaatttacaatcaacaaaagcagaaaagtaaaactcaaaatccgaaacataaaaggtaccactgatgtctaacacctaacaccctgttgtattactagtgtaattaaatatcgggtctcatataatttaagaaaataacttttagagaatatcgctaaccaagggtgccgcctataaaagttgctgggcaaatagcaatactctaaacataaaggtgtataaataatatgatataagatacaggtccccttagatgattaattgtgcaaataaataatacatcttattatacttaggatgttttaaacagtgtgtttaaaattaacaaaaacagagccctgaattatagtaagtacctgtggaggcaccactgggcacagccgctctggccaaagttccatcactgagtataacatctacctgaaaatcatcacatccacactcatatatcactatattggttataatagcagatatatataataaaataaaaaccatgcgattaaaaacagcttaagtaatgtcctcttctacttctaataatccccatcattttctcagcaaccaaacagtggtagttaagaagaaaaaaacttggagtttaagatcaaaggaaaacttacttcaacggtgggatttccacggctgtcaaagatctgacgagctttaacgattttgatcgtgaccatgatgattactgaatgtgttgttctttttcctcttctcttccttaaaactcagaaatgagtttggaaaatcctaaaaagggtttgaaatgtggggggaagttggtgaaaaggtcgccacgtggtcacctatcacgggtgcctaaatcaagacagttgattgtgatactatgatgatgatccgacggctctgattgccctgttctttctcaaacacggttggttggtactttgttctacttcacttttctttttctgatgcatccgcacgctgatgtgggtccggggagagcatatatgcctttttaaaagggcattgctaccttgtcacatgtcgcgttgcgattggttagcgatactccataaaaattattatagtagaatttttacccaaaaatacattgggaccaaataaattatattctaattgagaggttataactcaatagagttagaaaaagaaaattaaaaactaaaaaatatcaatgtaataataaaa

SEQ ID NO: 38933 - DNA, 3376 bp, Cannabis sativa
cggattggattggatccaaaaaaacaaaatccgcacttagtgtgaattggatgttgtttgaccaaaaaagtgcggattggattagatgaagagtcttaggttcattaatagacttagtgtaaagcattggcatgctattgagagggtgtcaaataaaaggttcaaaaattaaaaaaaaaaaaaaagaaatgtttcctaaactgtaatgtagacggttaatatctacataaaataaattgaattataatttatgaaatgcaaaaatcaagtagtgtttgagttccttctcttttgtgattcctgcactttctgatgtcctcagctgtattgaactaccattagatattatgaacttcaatcaaatatatatgcattacaatagggaaaggtggcccaataacaagaaatcacttatatttttacaaattaatttttgaaaaggagccaataatgtgctattagtgcacagtgatctggcacatggatgattgctttcaagaaccacatatatatataccaaatttcatatatgtttattattacttattcaattatattcttccatcacaagataaataaaaatttatcgcatattagtgtacgtaatatgcaatgaaataatatatgcacatataatataaacgacctcttgtaataaaggagaaaaataatagaattatagagattaatatttctaaacatattcctttagcaaacatttcattggattgagttaaacctatctatcttaacgaaaactaattaagcttttcaaaagctgtttgtacatggttctctttaatttatatattaatgattgtgatttgtgtctgtaaacaataagattaggtatgaattgcgtttccttgcaagaaatggtatcgaagccaatattattaaattcagcgagttcatcacctagattatatttatattacatataaaattctagttgaggaaggaatttcaaaacaaattatatatattattggatgcctcttttggcgtaagtggtagatgagtatatactacattaatattactatatatacagtagtcagtactataaattgtcttggaatttaggggtgattccaagacaatgtagtcaatgcgtgattaacggataaaatttgacctatgtagcaaaatgacttatcaaacaatcaatgtctaccaaaagccacactaaaacacattattaaaattatactcacacaccatcacaatattaagttcttgttcatttttttttttttgcaaagcaaaatagtagtgtgattatttattcaatattagattctacaggcacctggaatattactttgtcatgagagaaatagaagagagtccttagtaaaaataaaacagtactccttataaatacattctggaccatcatcatagagttgaatttgtgtcgttaatgaaatcgtcatgtcaataataatgcatgtaatactttaatgctttttgtgattatttattatttcgagaagatattttatttttctaaaatacattaatttttattgttttttcccttcatttgttttgttattaattaataattgtagttatgatttattttattaatatatatgttttgacatttaattaagcaagtagggtaagcaagtagggtgtgggttatcttatcttagattactttagaatttaaaaccagagacacactaatatatataagtaagtggtgctcgtttagatacaataattgattctctcataaggactaatattattaaataagttataattaattaatcaattgtatatatttatctacttgcagcatataaatttgtctaggaatgaaataagatgataaagagtgagtaccatatacctgaattaagaaatcaacaataccaaaaacaccaaagccaaaaatatatcataatcaaaatattatggattaattggctaataacattaattccttggatggagggaccaagcctaacaaccaacccaattacccaaacacaacaaaacccgctcctttcattctcctaaagtggctacacaccaaattcaccgtctaaagtaaaagcaacgaaacctcatatctcattaactctgtattttaaatcatctctattattactatttatactacacttaaaacatattctcccctctacttcttatattatatatcttctatttcataatgaataagaggaaaatggacccgtttggtgcaatccaagataaagaatggagcgtgtcaagacaaaaaataaggtaataattataaagggttttgctctttttatttatctttttctttttacattacaaaaagtttgattagtataaccttccatttccataattttggctcctccatctcccttttggtctctataattaaagtactaattataatcccacacaccaacaccaaaaaaaaattccaaatccaaaatcctacccctaatatatattgctttgttttgtctccttttcaatccaaacaaacaaaaaagaaaaacctaccaactcctctttctctctctacattccaatatgttgctcatgagaaactccatttcctccaccaagaaattctttcaaagaacttttggtagtttgaagtgcctcttcaccggagggtcctaccaaaagctaccgaaatcccctcgcggccatccattcaccggcgattctacaaccgcagccaccaccgcaacgaatatccaccaatggggtggtgccagctgtactaaaaggagagaaaaaagatcagatgatgagaatgatcatcatataattagtactactactacttatgatcaatatccaatggagcagaagaaaaaagatcaaacctctcctaataaaaaggtggtgatgatgagttgtaataataacaacaaaaagaagttgggagattatcattacagcaataaaaataaaaattgtttggttgaggaaaagctaaaagagctagaaatgttggatgttagtaatgtggaccatgttttggacatagaagaggttcttcactactactctcgtctaacttgcccagcttaccttgaaatcattgataagtttttcattgacatgttctctgagttgttggcttcttccactccggctcagccacccaactccaggttcagatcacaatcttctaccatcacatcataatttatttatttaatttgtttctttatttattaactactaaattaattaaggttttatgtttattgattctttgctcgcgcctattcttggtttgtaattagaatattgtggatgatttttatttaatttttcaaataaaaaaaaaaagttaacaggcttagagattggcctcattaatttgttcatttaattattg

SEQ ID NO: 38934 - DNA, 2606 bp, Cannabis sativa
ccacggaagcgtatagtcataccccggcgcaatggcttagtgatgtcgaataaaactcgaagacggagataaggaccaaagttctctagcaaggagagggggaaaatttcaattagctcacctatctcgtcagcaatgaattgcgccaactgagggcttttgcgaccaaacagaattctatgggcctggatccaaaaggacataccggacatattcgggagttggggtaggggacacatcaggatgggtgaataccattaggaacttatcgaaatgccagggttgttcttcaagaacacaacgacagtcaccgtgacattgaaaagaggccaggaataatccagagtggtattcggagatttgaacggaaaatcgaagggtccaagcttcaatcatggctttctcaatccaagaaggtttcacagagttggaatcagtgggtgagtgtagtgaaatgtgatcgaaatcgtgaacaagactctcttcatcatcaagagcggtaagaggaatggggtttcgagaagaggacgccattaaaaccacagaagaaggaaagacagatttgaaaggagaaggaggaaatggttgtggggagagacattgcaagcagatatttaaataagcattagagtgaacaagcaatagaagaagatacctggagaagaaagggcacctagaagagtgaatcggtctctgagccacctcttcaattcctgcaagggctgtctggacttggagaagacaggcaatgatgatctaggggtttaaattgaagagataccaattgacagttggtttatctctgggattttgacatgggaagaggaagagatggatagattgcaggaacactaaatgcgatggcaatggtgccgccaaaattaaatggaggtgcgagagagaaagggttttaaaaactaattgagctcggaaaattaggggagttttcataatgatatagggtattaaaaactatagatatatatatagttgatgatgatgagtttgaacagatatgcatgctcatagcttatcaatataatatatataatcttggtgtgtgccagagtttgatgatgatcgatggattgggttatttggatgatattgtatgaggtgtatatatattattagctaggtacgtgttttatatatatatatgtgtatgtgtgcttattaattttcgtctgtgtttagtacttacgagagttagaattgtactgcttttgaatacaattttattgagtttgtttgttttgataccttaataattcataatacaaaaaattaattatgatttttttcttctaaatttgacattttaaactttttcaggttccttctattcggttcaattttaccaatgtgtataattttgacatgtctttaaatattggtgccctaaaaatttaatatgtatcaaattgtactccaaatttccatttactttaagcacccatcactaaaattaaacagaattggacgaaaaactttaaatcaaataattatttggtcgtttctttaatctatttctaaccaattgacaagggtcttatattgacatttacatggaattgttgttaactctgtgttgatttcttttattttaagtatctttgttttttcttacttaatattattgtcacctaccaagtatttgactaaatgtttgttaaggttagatacttattgctaagcctaatttatagaaatttcagttggtctggtttgatgacgttttagcaataatggaaactttttatatcattactgattttttttttgatgaataagaattttattgcttcaaccaaacttttacatcactaatctttacatttttctatcaatacatttatatttgattctatacaagtcaagtcattaatatccatgctttatcttcatccttagctttcttaggaagcagctccttgattctaatcttactcatttgttgtgttttcttgaccgtggtgttgatatgccattgtcgttgattccataacacctcattccttgctttccaaacataatacaccaagcttgcaagtacagtcttcaccatactcttcttagctgctgagaatctcttcgtgttgtggcaagcttgaagcagctgcttgatattggttgctggtgtgttccattgcaacaactttttcatcttttgcagacagctccggctgtaatcacactcaaaaaacaagtgtaatggtttcctcttccttgctgcagaataagcattttgcatccatgttggtcatgaatttgcttaatctctcttttgtgtttagcctttcccaaagcaccaaccaaaggataaacctatgcttgggaacaataagtctatcccaaacaaggttactccaaggcaatttttcatattcagcaaacaacaagaacttattttgttttcattactgatttcacttattttgttttcattagtaataagggaactgctatgttgtttctctttcttaccaaagttactaactttactagtttggtttgaaatattttatgctaattttgaaaaattctgagaaaaatagatttttttgattttgtttttgcagattttctatttctctctctctctc

SEQ ID NO: 38935 - DNA, 3885 bp, Cannabis sativa
tgttaattaaaaggggatattaatttatagacacaaattacaaaaagtactactacaactactacacaagaattaactatatagtattctaatgaatggttaatgtcaagaaaataatagatgaaaatctagcttaatttcaagtacgacaatgtgttgtacggtcttaattaattctctcttacacattaatataccaaatcaaattccagaagataaggggtttgagaaaatattattattaattattaattactagtataaattaagttattataccctagcttgcagcctagctagctagacctaattcccgcagtccaagacttgaaaagattaatcaagttccaaagcaacgattaatgctttgcatgaaccctaaccctagaaaaatgtcattaatcagatgtagatgtaataattaaaactaaaatatcaaaagaaaaataccaaattgactagaagaatacttaatccagcacctgaaaaatcagattcatttattgagaaattaatatatacataaacaataagattaatagccatatatatggaataacatttaagaaattaactatagaaaagttaaaacaagtaaccaaattttttgattacctgatccacagatcatatatattcctttgcctcttcacatgacctaatctgatgtgttcaactaaaattaattagcaaaaaaaaatattacgaaaatatgaacaacaccaaatgctgtaagaagattcatttttgtttcataagggaaaattaataaaataataattattccatcaattaatatttatatatacaacaaatatgtaataaataaaaaagaaatataggcaagaaaataaaataaaataaaataaaaaagatgaagttacaaaaatcacggagagaggaattagatggtatcaggaaaagcagggggggaagtgtcactatcttcgtgagagttagagaagggaaagcgattggagatctctgatctcaaacacaaatctggtaaaaaaataaatacttaaacattaaattacttttaataaaaaagaaaaaaagaaaaaaaaaagactaggaagaactatgtattcttcctcatcttcttccataagataataaaggaaggaagaagaaggagaaatgaagccacaagctaacacatacatatgcatatatatacataaagataatatgtgctgttgtggttgaatttggaattaggataacatggaaaaaggtatatatatattgttaaagggagatgatgaggtagctagggcgtcctctctcatatgtcatgaggcttaggttgaagaagagagaaaaagaaggagatgagagaggtgggtttttgtttttttgaccagtagagagagaaagatagagagagagagagtgaagtaatagttgtcaaaaactactgtggctgtcctctcttgctatatctggcagagagtgaacagtatcgcactactatcaataataattagtctttttattaacagaaaatgcttaaagatggtggtggcactcctatatatataacaatatctaagtacttatgctgtataatgtaacttttagggttaatattattttccactcgtattctatagaagttacatattttattttgttagataataaattaaattaatattttgaagtaattttactttaataaaatttaataataatcttatttaattttatgatactactaattacatccatttttattaaaaattattttcgagttagttattttaaaaaacagttttgttaaaaattaaactcaaaatactaatttgtataattttaaagagagatactaaagggcaccagtggtgctaaggatcctcctatgtgtcaatatcgctataggtctaactaggtatcggaactatataatttaatatagtagcttttaggaagtatcgctagtcaatcacaacgtgacatatcgagaaggtgctaggcaccactagtgtttaatagcaatgctcaattttaaaatatacaaaatttaatttgtcatttaattataaaatgaggtaccaccatgcagtagcatatttctataataatttattattaaaataaaataagtgagacttaatattataaattgtactaaagtatgtttgatttgatgatttgtatgatgaaattatttgtaccattacatttttatctttaaagctttgtaatgattttatattaataattattacatcatattataatttcctttacattataaaacgagtgtaatagagattatattgttagaaaagacttattttgctcttcttctttttttcttcttttatttaactttaaataataaaaataataaaattaaggatatttttattaatatgcttctaattttatacaattacaatgttcaatagagtgttaaaccaaacatcaataatattattctcattacaatttttattctattacattttcattatcattatcattctcattattacattacatcaaaacaaatattacctaatattgattatgacacctttaaaaggggtgctaattaagcactaaaagtgcatttagcataacttagatattattggtactttacaagagtattggtacactaaattgcctagcacttctataagatagcgaccactacaaataaatttacttttagtcacaataaaatttgtgactaatgataaaaaagttgtagttaattataaattagcattattgtgttgtgactaaaaagtctttggctaaaagtattagtcacaaaaattacaatttgttatgactaaaactaaattagtgacaacattgtaactaaatattatgttttaatcacaaataattttttgttgtgactaaaagtagcaattttttgtaatccaacttgtaattagttaacaattttttataatttttattaaattaaaataggacacaatacctcgccataaatttttttgtgaagggaaaatgataaattaattaaatattaaaaataaagataattttgttaggatttgaatctttaacatctataatataatatttgtaaaataatttaactatcatctcaaagctaatgttatgtttatatatattatattttacatttaattataaatatacgttataactaactaaaatacaaatatttttttattttttttcaaggtcataactgcccattcacctttatgtaggttagcttatagttacaatagggatttctatttagaatttcgtaaaaatataaaaaaaatatatatatattttttgaaatgtataaataaaaaaaaatcccaatatcaaaatacaccaataatacacataaaaataaaagaaaacatgtaacactatatatagggtttcaggcttgaggtcactcaagtaaccggaggacaaattgttgtactctacttctgtattttcatttaattaattatgacatctactgtccctacctctgtctctatcttttcaatttattttatttatttatttatttttgaaagagatttttctatttttgatcataccctttttatttttctctgtttaaattcagtttgtttgttactggccctgtaaaaataacattgaaatagttaaatgggcacgaaatcaaataagaaatagttcagttgtgatcgtcccccgacggacacagtagtacagtagtactggtggtggacatatatatattctcatattttaaatttgggttattattcagccaaattactaaatatttgaggaatgtaatgcctaaatagctaaacaataatcattaccaaaaaaacataacttaaaaaattagtgtaaaaatatctaaatttagttagttacaatatttaaatattt

SEQ ID NO: 38936 - DNA, 2603 bp, Cannabis sativa
acaatattaattatgtataataaattcgaattaaaatattggtttaaataattcatatcataaaaataaattcaaaaaaaatttaaataaaataatattaatatttacatatttataaaataaataatactaaaaaatatctattgaatttaatgaaatgtatattttttattttaaagatatattattcctaagagatattgtccgataatatattttgtcttgttatcttaataagttataataggtgttgggttgtgcacatttattgtgtcgttataatattgtttgtgtgttatttttctttcattttcattttcttttaagttaatcatttttaatattcaattttcaaaaaatattaggttgggcgtatattaagagaattttcatttattattattattattttgattatgtataataaaattaaattaaaatattaattttatataatttcttaatctttcttaatattcaatttttgcaaaatatttggttggccgcattaagagaatttttatttattattattattattatttgattatgtataaagaaatcaaattaaatattagctttatataattcaaattataaagataaatttaaaaaatttaaataaaataatattaatatttacatacttataaaatgcacagtactaacaacatccgttaaatttaataaaattttcttgtatttttaaagtatattctattaaactaatgaaaataattaaattactactttttatatataaatatattttaaaataaattaactttttctatttgtatataaaaatattaaaattctataaattcaatgaacttaactcaatttttctattttagaaagtaggattgagttttacaataaataaatatgaatgattcatagtttttccaaactataattattaagttgggtgactaaaatactaaaatatttttattagtccaactaactaacccatatgcaatcatagccatatgaaactaaaaataagcgtttctaacttcttcttttcctttttgaagaatggtttgattgattttaggtaatatattttgatgatgaacataataaacgatttggtaagtttacaattacttggctcaattgattttgtttagagagcaaaaaagaaaaagaactaaatttgtgattagttactttactcttccgttctttaattttgaacataatttttcaaagacaacactttgtcctctatgctaattatgatcatattaccttttcttttctttctttctaagcactataaatatatatatatatatataaacatataaatataagaaatcggtgtggagatcatcaatcaccattatagagagattatacataaaagtaaaaataagaactattttatatatgcacatgtattatgtatatgaccctctactctaaagataaaaactattagttgggttagtaataatgatgttattatattaatgtcattcataatatataaatataaaattcaaaacttatgtgatataattgctgcaatccccacatgcagcatcgacttgtcccccacttaggtagtttatcaaatttttagtggcttagcttactatacatttatatatttatatatattagtgttgtattggttgggtgcgttgtagttgaaatttgaaaattcaaagtccctttatatatatatatataaatattatataatgcgttggggaaaattccaaagccccttttggatggatgaacaatggttgttctcaatttattgttattattattattattattgttatcatctaagctaagatcatatcccttcctctttcctttgtgggtctattttttctccacaataattaaacatttcttggtcaaatgttactgcaaattgcaaaaatgcaaatttcatttcaattaaatcttacaaaagcaggggccaagaagaagggttgaacatatacatggttcatctaccaaaagtcgtccttttattttactacatttacgcaaaccaattggtgactcacagtcgcacaatcattattgtggaattttaattagattaattaagatttagttttgacatgtactaaattgtacttctaaattttttattaggccatttgaaatatatttcttgaactatagatgttgtttgatttaaagacttctgtcaagagttctattcaaactaatagatatctaaacgattgtttatgcattaaatcatatctcctaaactttgttatttactaaattgtatccactaaactttgacatgattcaaatcttgccccttaaatttcgtccatgtcaaacgtccaatagtaaaattaaacagatcatttggatagaagtctttaaatcaatcagtctcaataatattttgaagaaaattttaacggtttgaaaagttttggtggtacgatttaatacatctcaaaatttggagtggaaaaaacctagttagactttcaaattcaatattattattattattattattattatataaaagaataattagtaattttacatattaaactttcgacaatattgactctgctccctaaatacgtcttgttaaa

SEQ ID NO: 38937 - DNA, 2358 bp, Cannabis sativa
atgaatatgaaaaaaaaaaattagactaaaaaatttttctggaaccgaaataaattaatagtgcatcagtacatcctttttaagatagtgcattgtagaatcacccaaaaatatataatacccaatatattattttcttgtacccgataaagtgtccagtagcatttctaatgacgctggtatgtcttttcgcttgcctacctccatatatctatccattaattaaattcaaatgatgatatagacttctgcataaataataaacaacatctgatcaattttactttttttttatttatcatcaatatgataagattctttgaatatttatctcttcatgtcgtgatctaaaataatgtaacacaataatcaatgagaaaccaattaattcgatgtttatcaattaattaagttctaaggttgtcacatatttttttggcttttgtgaagaaaaaatgtgtatatgtatagacctatagttttcatcagttcaaacttatttatcaataattgagtatttttataacactatgaaaatatcttataatttataattgattaacaattttacatattatttattaatttaaaattcgtgtgacttttttttttttgaaataaagattgcaacttttattaaagcaaatcagccaacaaaataactttcaagctagaagggacagaccccctactggaaatacgatccggacatgaaccagaagaatgagctaaccagttagccgcttggttcccagatcattttacaaactgaactgaaatatgaaaaataataaagaaccgtataagattaatacaatccgaaataataagaccaagaggagaaagaatttggctattgctattgatagcattaaccaacaagagacagtccgactccataatcacctctgtaggacgaaaatcttcaacaacacctccttcttcccaacaagatttaacccaactcaaagcctccttcattgacaacgcctcagcaacacaagggtcaatttcaccccgaagcttgacggccgcagcagcaaagcacaaaccagcatgatctctagcaatccaccccaacccatgactcctctcagttgaaaaaagagcagcatcacaattaaccttcaactctcccaaagacggtttaatccaatgctcaacaccagcacgaggatgactagaagaagatgaaacacctccatttttattttgagcaaacttccaaagttcaagttgcgtaattgcagatgaaacaactttttccctagaagtagccttattattccaaagtaaatcattacgggccccctaaatactccaaagaaccattgccagcttatcaatcttctcaccagatgagtagtgttacagaaatccccaacaaaccaccagccaccaaaatcctcatccccattattaatatgcagacccaaaccacgctccaaacaagcttttgtaaaagaacaaccagccatgatatgaaaggtggtttcgggttcaacattacacaaagaacaaatactgtaaacatgaacccgcttagtctgaagagagactagagttggaagacaattggtgagagccctccaaagcaaattcttaacttttggaggaagtttcaaataccaaaactttatccaaaaaccaaaattatcctgcatattccatcttccattacgcacttgtacaacacgataggcactccttactgaatatccaccaaaagtttcaaaagaccaataccatgtattcagttttggcaacgcaggtagcaaaattttacaaatgagatccacatctctcggctcaaataaatcgtctaaaagctccacatcccaacacattcgattagtctgaagaagatcagagacaggacaatcctgaagagcctcatgagaagaaatcacatagggattgtccatagaagggagccacggctggttaagcatagagatcgaagaaccagatcccacacgccatctagcccccaatttaaccacatcttgagcttcaattatactccttcacacataattcggattagctcccaactcagcatcaagaaaagaaccttggggataatatctagcttaaaaaatacgagccacaagcgaagtcggattggttaacagatgccaaccttgcttgcccaacatagataaattaaagtccctcaagtttcgaaagcccaaaccacctttatgtttatgcagacacaacttattccaacttttccaatggattcctcaacctcgagaggccttagaatgccatcagaatcttcccattaggcgatcaatgtctttacaaatttcaaggggaatcaaaaaaacactcatggtgtaagaaggtaaa

SEQ ID NO: 38938 - DNA, 3641 bp, Cannabis sativa
gagcgaagagagagagaaagggggaaagaattctagctttttcttgctttttccttaattcctttcaaaataatttatccattaacttcgcaatttggctgagtataacaaagtgaccagctgccaatattaaggaatgccacctaatccccttagtaaaattaccaaaataaccttctcacttgaaacttaagaaatattaagcctaggggtaaaatggtccaaaactataaccccacttaaactcggtattctatttatctcaaatatttatcccaccaacaaaaagattctagacttacccatatgactcaaacggccatccgtcgcattttctatcgtcaccaagcaaaaatcataaaaattgcataattcatatttaacataaataatactcctagagtttaataaaatttctgaaattgaaaaactcgtgcatccaataaggccctcctaccaaattaagaaaactctcctttaatgttggcaatgttgaagctgtccatgaaactaaattcaacttcacaattcccacagatcaatcttttcatacgatgtcgaacagttcaaaatatttctttgcgcttccctttcttcttcttgacaatccttcacaaattcaaccttacgataggtagcaatgtcagttggagcaaatacattgaaactcatctcttcaccatgaactcgcaacattaattcccccttttgtatatctattaacgctctccccgtggcgaagaacggtcttcccaaaatgataagaatgttttcatcttcctccatgtcaagaattaataaatgaacaagaaaaatgaatttaccaaccttcagcaaaacatcttcaattatatctcgagggtgagcaactgttgtaggatgagcttctcccagttttagccttcgaaaaattaatagagacattagattgatactcgctcccaagtcacgtagggcttttgtttcaaccgaacgacctattgaatatgaaatattaaaactacctggatctttaagcttaagcagtagtttcttttacaagattgcactacactccttagtaagtgccactatatcatatacctccaacttcctcatctttgctattccttcataaatttaaagtatgttgaaatatgctcaagagcctttgcaaagggaatgttaatgtgtagtttcttgaatatttcaagaaattttgaaaacaacttatccaacttgttcttgcggaggctttatggataaggaatttttatgttgtggtctatgctcacaagtagtgccttgtattcctttggcagatctttagtaactttctcacctctagccttcttctcacttgtgcctttgcctgtacttgttgatcctgaccctctttaagcacttaattgatctactcttagcccctcatatttcttcccacacctaaatgctaatgtcttacaagtctctttttggtttacctccatagtgctagacaaattatcttgcgtgcggttggccatttgagcatccaactatcccatttaagtctctagagttctaatgaaagcccttatttcagccataaattttattagaaagtcagattgaacactggaatttccaccaaaatttggttgttaagtttgttagggttgttgtgattgttgttgcatttatccttgttgataaaacccttgttgctgacaattcccttgaggaaaatttcaattgagggggtagttccaaatagctctagcttgcttcatgggcaggtcatcaacattaacaatttggcattgctcataactatggggacctccacacaactcacatttaacatgttgagctttttttacttgggctatcattagtttagttagggcttcaacttgagcagttagttttgtgattgcatcaactttatgcaaccccactactttctttaaatttctcctttcactaggccattgttgattattcatggtcatctcttctaagagctcataggcttcattggcactccttctcatgaatgccccagaagctacaatgtcaatgagagtgtgggtagtagcgctcaacccattgtaaaaattatgaactagcatccacttttctattccgtggtgagaacactttcttatcaggtctttaaatctctctcaaatatcataaagagattcattgtcaagctggtagaagttgttgatttcccttctcagtttggcagctttggttggaggaaaaaagttggaaaggaacatcagagccaattcatcccaagtgttgattgagttaggtggcagagacactaaccaactcttagctcgttcctatagtgagaatgggaacaaccttaggagaatactatcatcactaactccattcatcttgaatgtttgacaaagctccacgaagttagctaaatgcatgttatggtcttctggcaatagtccccaaaactagattgtggattgaaccatctcaagaatgcttggcttgatctcaaaattatcttcttcaatgtcatggtgggtaccacataatccctcaagcttctatcaactgcattgtaaccattaacctagtcttatacgacaccccattattgccattattagccatggtttcttctaactcaacccttgtagaagatctttcaaacctcttgtttcttctgttttcctacatgtcctctcaattttaagataaacaagtactcttgtagttggtcctggacgacgcataaactacatgcttctgagtaaagataaaaattgatacaaacaaattagcaaaaagcagaaagagaaaacaaaattagaataaaattcaattgttttaatattaactaaaaacaatctctgataacggtgccaaaaacatgttatgataaatccaacatgcaagtatacgtatccttcataggtaatagactcacaagagtgaggtcgatgtcataagcagtatattaattaccaaacaataaaatcctaattctatttggtgacaataataattgagaaaaggagtttaaaatctattgaaaaagaaaacaaaatgaaattaaagtgaaattttgttaggttgttattagtactatttttaggttaattttaatatgtttctaaatagttttactcttgtttggagcaatttcacgctttttatcttttatttttgcagatttaaaatataggaagaatagaaaatatcgaaagaataagatgaaaaaaaaaagataaaaagatcacataaaagataactgtgctcaaagtgggagtcatgcctaggcatggaaatagcatgatgcggcacgtgtcaatgaaagccttgaagatgtgaggaattgcaacacgggccgcgacataggaagtgcatgctgcggcctgcccatataattcaaggaagaatatgatttttagcgtgggttatgattttctctctttttcatccctttattattggctataaagaagtggacttcaatggttttcaacaagcaattccgaaggaaatcagaagcactcaaaggagtacaaattttggagatccaattcaatattggaggcgttttcaagagggttttcaacattcttttcttccctattttcttctttattctgaaattaatgtgtgaaattgctatgatgaac

SEQ ID NO: 38939 - DNA, 2464 bp, Cannabis sativa
tttaactatcactaactcaaaacagaaaagaaaaaaaaaacattgaaagaataaagttgtaacaacaaattctatgaaaaaataattaaatagtacaaaaagataaatcaagttgtcaaagctaagtaaaagaatcataatatattagcaatttttctacctgaacttttgacattactggttttctcccccttaaaatatatggcttgttaagaatcccccctgaacatttacatttatagaaatttagtctttatgttcggttccaatcccattattccaattaaatactgaagtatctttgtaaattagtaattttgaccctaaactttgacaaataccaaatcgtaccccttcaaaataaaaatgagaaagattcaatattttttagtaaatcttagaaaattaatttagatcttaaaaaaactcattttgaatgattaagaaaattaaaaaagaaattaaaattttaaaactaattgagtgatttaagaaattatttaatttttattaaaaaaaattatttagatattaaaaaaatatataaaaatttaatttttgtaaaaactaaattttacgagaacaaccttgagtctattttgtgtttattgtttaaatgaacataacattttttttagtttgatttctaacttttttgtcaaaataactttatatttttattgaatttttaactatttttctttaattgttaagatatgagtttataaatataactaagtttgattttttttttttcaaaaatattagtttatttaaattatttattagattctcaataattttggtttaattttttaagatacttgcttataaataaaataaagtttgaaaatatttttttaagaataatttaagtttttttttaagtaaaattaatattttgtaattgatttatatttttattaagttgttttaaaactttttattatttttttttcaaaattaaaagaatattataatttttaaaattaatttttttaataaaagaaggtaaaattttatattggtcaaagttcaggggtaaaaatattattttttgacaataaaagaaactgaacctaagagaatatgcataattttgtaactgttatattttagagagaatttttaataagccgtatattttagagagcaaattcacgtaatgccaaaagttcaggggacaaaaatattaatgattcaaaaatatattgaggagttaatattattttgctttttctttttttttttatgaatatttttgttttgtttattgcaattaggtcaatattttgttacttttattatccttttgttgttttatagttattttcatgttatttgttaagttgttttagagttatttttagctgtattagttttttttttttattttactgaaatatagtatttttatgattttgaaatttaacacaatatttttgtaaatttaataaaataaaatgtaaaaatttacgtgtctcaatatttttgtaaattttttaaaatagtatttttataagtttctctgttaataattaattactgattactgatttttttttaaggactgatcattattgattcttatttatgtattaatctttggtgtaaattccacaatttggaaagtggaaagagaatatagaacaactataactcttttcttttgggaaaagcacatggaactgaactcactctttgcaaattatataggttccacgtccgaagataaagaaatgacaaaaaggaaaatgtagatatatagattctttaaaatatgaactacaaatgaaaagttggaatttattctttacccaagaaaaactagcacataattatcaaaaaaaaaaacaatagcatattgtgttaaatggaaaacgatatatatgtaagacaaaagaatgttattataattatttttaaggaaaaataaaaaaagaaccaaatttaaattgcacgattatgaggaatattgatcatatcataccaacaaattccagagacccacaaaaataataggaataaatcaattagggtatatatatctcaaagttaattatacacttgtatagtggtcgttggcatactctaatagttctacactaattttttataaaaagaatgtctcaatttcgaattatcccaatattaaaaaagaaaaaaaattatatacacttatatatatgtttatatactgtttctttttaacaaaatatctattgtaatgaacacatactcagaatatagattagtcaaactattagtatttattaattatattttataattatatataaataattgattatgtggatcctattattttttaataaaaataataagatctattaattaataaaatagttcaaaataatagaacgcacttcagaggaacagtcctccaactgaagcacacgatctgtagagaaataagagtctcttgccaagcaatgagccaact

SEQ ID NO: 38940 - DNA, 1029 bp, Cannabis sativa
aatttaacacactttttagaacatcattggagtataattttttttaaatgtgctaaaataaaataatacactacctttttgacactccattggagatgctctaagtgcataactaatgctaatgtgttagaatttgtgatgcataaatttttagaatcgatgttattggttttagtttcgatttcaaaccagaaatcaagttttcttcttaaaatttttgcgtttcaaaaagaaaataatgaatataaatttattagaaaagaaaataacttgttacattatcattatttttagtaaccattaataagtaacacttattgagaagtgtatataataaataaatagtttgtctggaaatatcacacgccaagtgaagcaagttgcccaaacacgtagttatatcagccattaattgattttggttttgacttcatcccaatgcaaaccaattctatgctttggtttatcataggaatggaatactaattactaaggatatatatacaggtgactaatatataaacatgacttcacagtcccacatcatatatacatatattttaatgtttattgtagagtatattatatacaatggtggaccaagtgaacttgtgtaagaaatgtagaattattctcaaacgatttttaagtttttctaaaacaagattcactttcataatctctattttaagaatccaaagggagtgaagtttcttctctctcctcgaagtagtacgatattccttctcagaaggataatagcaaatgttatacactggtaatagcaaatgtgaaatctattaccaattaaattaaaatacataaaatttaatgtaagcattagcatcaacaatgtatcattatctaaaacgatcaaaggtttgagaagtttcttcaggagcgaatgaagagagtagcgcctctgcaaacatgaagttcaacattgtcaatccgaccaccgggtgccagaagaagcttgagattgatgacgatattctgtattttaatattcccagtttgattatttaa

SEQ ID NO: 38941 - DNA, 2077 bp, Cannabis sativa
acagtatttttgaaaaaaaatttgacccacagtataaaagtaaaaaaattgaaaatttcagtatgtagtgtaattattcctttttttatttgtttactgtagggcaaattttttttttttttaaaaaaaatactgtgtaaattttatactatgtactcagttaagttttcacaattgttatgttttatttgtttcactgttgttttaattgttcagttttattgttttacgattgttttatataaagaaagtatttttgtaaaaaaatttgtgtggcagtaaaattataaatttttgcccaaaattcaatatttttgttaaaactccattaagaaaaagtaaaagtaaatagtagtacaaatactaaaagtttcaagttttaaagtaatataaattctttatttttttatcatttttttcaataaaaccttaataatttgtatataaaatagtatttttgagaaaaaaatagactttatgtaagtagaagaaatagcatttttgagaaatggatgcctccttaagtagtaatcctaaacaatgacctgaaccgcatgtacccaaaaacggttgtccactccatcctactccattccctatttaatcctacaatagctaaataatgacacaaatactttaagttttaaatttgtaagtgacataaatttaatatttatttttaaggcacataaaacttggactctaaattattggatttaaacaaaaaaatatagagttacttctaattaatgttcttttaataaaaattcaaaataaagtctatactaacgaaattgaaaaaaaaattacaattttatttgttatttatgccgctaaaaataaatattaaattcatattacttacaaacttaaaactttacatacttatactctatttaccaagacaaatctgtagtatttaattgtaacattcaacattaattttaatcttttcattattaatctgtagtctaatggtgaagatggatttggttaaccactaactaatttcatcaattaatacgcacctgtacagttgcacaaacaaaaggaaagatgtactgctatattaagtttgaccacatgaaaaaaataatatatgatatgaagtaatgaaagttactgaatggttaacctaccatatcagctgggatggtataaacccaatctcagaaaacaatattgatctaatgattttggttaattgttgagaaaattgaacccatataatgtttttaattagttgtacagagatagattatttatggtaaattactaccatgaccagttctaattaagatgaatttgcattggctatgtatattcataagctaaagaagaaaaaaaaaacactttttaataagtttttttaacatacaagtaaacttttattttttatttttcttaaacattttctaaaaaaaggtcccgtttgacttaatttacataagtttttttttttaactttactattaaagaagttctatgagtggttggataaaaaataaaaaattagaagaatttgtaactctttaaaagaatttttgagaagttaattttaaaattaaataatttatataatttctaatttagttacaaaatttcttttaatgatatctaaatatttttctaaaaaaaattattaaaaaaatcttcatataataattatttaaacatttaaaattagttaaaaaattatacttatattatacttttaggtacaaataaagagtagaaacttaactagattttgggtctattagtactgctcggtactttcataaattgttcttggtgggtggaagttggggcagtgtaagttgaaggatttcatcgaaatataatataccttatataaaaatcgttttagtataaataaataattaactcaattttatatgttgtgtcatgcttcccacatcagtgttatgctaggctcgttttgtcagtttcatgaactaaggatatacataatttataaattgctacaattgatcgcatgataagaaaggaaggataaaatgggtactaaaagaaaacaaaagaaaaagaaagaagaaaagagaaaagagaaaag

SEQ ID NO: 38942 - DNA, 1414 bp, Cannabis sativa
gtgttctatgttatatacaaatagatcttgggttaattgttaatttatttaacattaatatatacacacattttcgtataaaactaaatattaaaacttaaaataattaataaaatatttttagaatagtgaatgtatttttgtttcttgaaattgagtaataaatgtatttaaattgagaatagtaactttttaaaaataaaacttaaaaattaaggagtttataatatatgatgtaccttgtttttagtttagctttttaaatattttaaaacttctctattttagagcatctaatgtgagtgctataagagcaaaaagttatactcttagtgctctaatgtgactggtctgatgcaggtctaatgtctttctattgttgaaatgagtaaaggttaaaaacgtaggttcgatggtggtatgatggtggcatgatactaccaatttttttatgtacaataacataaaaaaataaaaaataggtagcatcgagccaccatcgggcctacatcgaacctaaatctttaacatttactcatttcaacaacaaaaagacatcagacatcagacatcagacaacaggtattcaactaattttttgccctaaacacaaatccgaccaaacccaactctaaatcttagataaactcactgatcacagaaatttatcatatactttaatattaaatcaataaactcatacattctaataaaaaaatacaatgaaatgaaatgaaaaagagagggcccgaaatcttacattaccttcaacattgcgatggtctgtctgaggtggtcgtgggttggagaaagagtttgtcatggattggtgagagagtttgagatgtatgatgttagaggttgggtcggtggaaatatttcgattcgagaagagagcgaaagagagtagaggaagagagaggcaggaatgtgttgaaaaattggaggaataatttagagaatggacaaaagttaacctagttggccaatattagttagcattagtttcgaaaaaaaaaaaataaacttaatgcatagatattttatcaaatttccctttgagaatgagaaatattaagaggcacacactataaattttagtataatattattggtgtcttctaaatctaatattgactggattccacatattttgacttaataataatataaaaaattatcaactgataatagaataacgtatcaatattatatcaattattttaaggtgccaaataataatattaaaattgtgctataattttttttgagaagaaaagtcttgaaaccatcttgaaagcaaaaaggatcggctaattaggaattttgttccctgaactttgacatgtaccaaatcatgtcccttgaacttttaaggtcgttaaaaatgccccttgaactattgaaattgttg

SEQ ID NO: 38943 - DNA, 1358 bp, Cannabis sativa
tgtatttgtgaaattatcccatttttaaaaaagggaagctaaaggatgtaaaaatatccgcctagctcgaaattggcatttagaggtagttttttgataaaaattgtaagtatacaaatttataatatctataccgttggttgggggttgaaaattttttagcctattttataacacctatggtgtcggttattaaggaaataaccgacgtcatatgtgtatgtcagtaaactgtgcacatatggcgtcggttatttcctaataaccgacgacattgagtgtatatatacacactttggcttcctcacttccatcttcttcctcatatgtgaaccagcagccatatagcagaacccatacccacggaaaaactctcgccaaccaccatgaaaaacccatcattctccctcatttttttaccattttatcccatttttgttttaaaatattctatttttaatacctaatcctatactataaaaaagtttggttttttttccctctatcactataaccgaacctattaaaaaaaaggtagtggtataattctggccactgattttggtggagaaaacgtcgaatctcaacgtccattaaggtataaatatgagttctatttattttattactgtacattgctttatttttcgtttttgtaaatttttttgagaatttttctattttattaatattatgttgttttgtgtgcatggccgaatttttgttgtaatttgtcatcggattatttttatgaggtaaatatttattaatttgatatataatatatatgtatatattttgtgttttattgaatatgggtttatatatattgtgtgtataaatattgtgtatacattatttgtgtgaattgtgtaattgtattttatatatattttagtcacaatattaatattttgtgcctaactgtgatttttagtcacaacaaaaagttacttgtgattataatctagtatttagatacaagttgtcactaatttagttttagttacaacaaatattgtgaactaaaacatatttagtcacaacaaattgtgatttttgtgattaatatttttagatgtgaacattttaataacaacataagaataataatatataattatagtcgtaactttttttacttttaatcgtaaattttataattatgtgattaaaataaaatctatatatctatataatcctaatgttaagcaaggttatgtggcatcataagatttctctaatgtgttttatcttttttgttattattctaaatttttatacttatcaaaatttattttcatttaagaacaaaaacaaagaaaaataattacaaaaaaaataattatatatttatt

SEQ ID NO: 38944 - DNA, 2271 bp, Cannabis sativa
catctctttggtcggtctccattgctgtctccacacacagaaaaaaaaaagagaaagaccaatttctaaatctctaaatgggtaatctaattattacatatcccaaaaaagctgagaattaatatgtacttatatatagagagagagagagagagaagtagaactacaaaattgaagatatgaagaaaaagttaaaattgttaagagatgtgtattataaattaaaaagtggtattgaattttcaaagagtgattgtcaaaagtgaatgtcaaacatgtttggcgagaaaagtgtggatggcacccaggtcccatttcccaagctaactttaattttgtctgtactctaacttcccacgtttaataaaacattatttaaagtgaaaattacaatatggacttgccaaaacactcacaacaactcggctaaacactaaactcactccacaacaacagagacactcaatttaacaatagaattacctcatgtttaatatgggagaaaaatgaaaaggaaagagaattttgttgaggaaagtcagtagttttttttttaattactgatataacctatactaatattattttaaaataataaaaatgtaattgtaaaataatacaaatttatttcattcatctctaccaaacatttataatggactatcattaatggtgcggtgcggtgcggtttatgcggttttgcggtttggactatcattaactaattaaactatcacaaatacaataaagtttgagcaacacttgttaaaaatactataagacttaaaaataaatatgaaaaaaaaaattaaagtttcaacaatacaataattagtgggcttagattgggccttcacatattaaacctaaataaatataaaaattgatatttttataatatgcggtgcggtgcggtttgaaccgcatattaaaaattcaaaaccgcaaaccgcaccgcaccgcgcggtttaggaaaaatccaaactgtgaccgcaccgcaaagaatttcaaaccgtattttttttgcggtgtggtgcgatgcggtgcgggcagtttgaacgggatgaacacccataataatataatatataaggtaatgagaaagtcggtagtacatgtaagagtaaatctatctagttcaataagttgtagtatacattattatacaaaataaaaaataacataaaaaaaactcatctaataatgttaaaacaaataaaactgtttatttgatgtggatgtgacattcagtataagtactaagtaggtagctgtcttattaaaatagatgattaaaagaaaacttagtacaaattgatcacggaagatacagagcaataagataaaacaaaccaaatcacatgacaccaccattactgactcactactcaggtttgtggcttgtatcggaaaaattatataaattgttatttttttaaatatttctacttttcttatatatttatagtattttaaaacaataataaaactgtataaaaataatatgaaaataaaataaaaataatataaaaattaatacacaaataatatgattacaatataaaaatatatcaaaagatctatttaatttaaataaaattttaaaaatcgtaaaaatatttaaaattttgtacaaccgtattttttataatttttttttgtgttaatttgtatatatatatttttttaaattatccctattttttattttttaaaagaaattaggtaaaaataatgtgtaatgttttatttagaaattttattgttttatttttaattgtaatacaaatttaaataaatgtaattatttatatatcatattttttcataattttaaaaataaaaataatatacattattttttttttttatatgtgagcttagcacacttttcacaaaagagatgttgaattggattagaattggctctcataattacaatgagaagggtgagtaaagtaaagaaggaaacataacaatcattcttgtctcataattaagatgagaactatttgattgcttgttttttttgctaagcaccttattttgtaaatagattaaaagagacataccacaagaaaatatgtgtgaaagatcaattttggttctcaaatttgtatagagatttgatgtataattgaggggttagttagctgctagtgcaattggtaggggtatttataaaatagtcgatccaattcaatctgcacaatctaatttaattcaatccaatttaatattcaatttgattagattggaaaattcaaaatc

SEQ ID NO: 38945 - DNA, 2041 bp, Cannabis sativa
gcaacggtacaaagaccacctcctgtaccctacaagacaaaagcatcaagcttgttccctagggaccatcaatgtatcttagaccagtagaacttataaataccctagactaagatttgaaaaagtgtaaaatcattgtatgcaaggcatagtactacaaaaatgggcttcaatgagccatcttgagagactctaatgatttttagtgaccctttacttcgagtcactattgtgggtgattgaaaaagtaatatatagtgacccttcactacaggtcactaaaaccttttagagtcataccattgagcatcactatatcattttagagtcataccatgtcatactctaaatataatagtaacccaaattatacgtcactatgtatattatatttccatttttttttaaatatattgataatgttatttattaatattttacaagtaattaacaaaaatatttataataaaatttttacagaacaaaataatattacttttgattaatcaacataattagaaataaaaaaaagtagtaatttgtacattgatttctattgctaagaacaaaatttgaaaagattttttttccaacagaaacattagacatacacattatgaacccagttaaccaagcataaaaaaagattaaaatccacttagtatgaaaatttaaaaactagaaaaaaaaataaaaaacaattatgaaactcttaagcctccaccaccatcagtgttctatgaatcagatcggttttacgaactcctaatccactgtcttagtcaataaccttaaagagaaaaaatataagtaccttccttaaattaaaatgagaaatcctaatcctatttttttttcaacttcaatagagtccttaatgtatcaaaacttcaatcaacatgtgaagaaaatcccataaataaaaagtttaacaaagacgtaaaatccaaaaaaaaaaaccccaactaattcctcaaagattggaaacctaaatgcagagtctaacaatcacacacacacacacatatagagaaataagagtgagatttgggggtttctatgagagagaaccttgatagaggcaaatttggatcggagtttgggtcgttgctcagtagcagctcagatcaagaaatatggagttaagcactagaatggggctacgacagtggagaagatcgggtgccaaaggtttgtaagcatacatccccatcgtcttggttgtggctcttgcataagagatcctcactcacttgccgttgtcgtgatcttgctcgttcacgtttgattagaaggaatgagggtgatgatagagaggaaaaacaagttagttcttcttattttttggctatatatagggcttcttaactaatatgtaacccttatatctttaatatttcatttttttaattacttattaaaattttattatgtttacgtttttgaaaaatgtatatatgtaaccctaaaaccacgcgttgtttttatcatttatttattaagagtttattaattaaaattattttttttagtttaggtgtatgatatagtgacgcgctaggagggtttggacacatttacccatttgggcctattgcgtcactatagatcaatgttttttttttaaaaaaaaataattaaatattatgggagttactctttagtgacccctcgtatttttaatgacccaattttaggtgactgacactgactgtttagagttattttttgtgggtcgctaaaactcagccttaacactttagtgatctacacaaatatgcacgtcattatagagtgtcactaaagggtatgtttgtagtagtagaacttagagagtaatacaaactttctatatcgtcttatccattacttttctgtatttatttcatgtttttgagttcacaaatatattaatctaaactagccttaaacttttgaatttcgggccataacttggttgacgaattctcattatcaacaatggtaaaaataatatagaccccaataagtatggtcgtatataatttatattaataattaa

SEQ ID NO: 38946 - DNA, 2684 bp, Cannabis sativa
caaaatgaaagtaaaatttttatttttaaaaaatttatttttgaaaaacaaaaatgcgttctgtaactacttttatttttcaattttaaaatataattaatatgcatgatgatcaatatgactttttctaaaatcaaattgtggtttttgtttatcaagtgaaactataaaacctttcatcataaaaaagagaaactatatatgaaatcaataaggaacttaaaaatgatgaattggggagtaagagcatatagtagtatatatagtactattcttgcctttgcctttgaagctcctgtacctcttgcccacaaccagttactcattgccatttttcaactgagtattcaaaatttttaaccaaaatttaactcaatacaaatgaaatgatgactagatatctgaggatgtttggttaaggattttagttatttatatacacatcagttttttcaatatagattcgtaaatattgaaaaagttgagccaccatggtccatgcatgacattttttcttgttctaagatgtgatctgaatatatttttattggttgaattggctagggtcatgccttgtgatttgttgaacataaaactataattaataatgggaatgtaattaactagctaagataccaaaagacactcatatatgatatatcaccagttaaactctcaaaattatattaaaatgccccatcacgactcatgacatatgttatatatcatattttaaaatccaaaaaaacctgttatatattgatattcctactctttattacattattaatatattttgtacagctctaattttatagataacatccttattatatgaacccattaatataaataactaaaaatgtcatgtatttttatgcttttatagttagggattatatttacactttatagtcgaaattttgtagcaactttaagattaatagttaaattaattttatttattatttattattttcatttttaacaacttttatactcgatgtcaattttaaccttccaaccccagccttaacatgcgaacatagttgtaaatgcatctatcgtgctcgttcgactcatatttttcaaaactttttaaaatacagattgtgtcgtgttatgccataaaaagaaatacaatctatgtcatattgtgttgtgcaaaaattttacaaggtatgcccgacacggcccgcaagtctagtaattttgtatcgtgctcagattcatgatcaaggcgggccaaatgtatgctcggacccagactctaacctatataaaccattttaccccttcacacacacacacaaaatgagaaaaaacttagaaataattgggcataaaatactctctaagctttcttcttcctcaaaaaaaacttagaaagtgggtaggcataattaagatttttattgtgaaacttatcctgtaacacattttaaaagcctaaaaggctaatataccacgtaaaagttttgattctattgagttttcataactcttgcaagttgaaagtgaatccttttagttattagttgaagtttttgccgcaaatgtttctcaaattttgtaaaataagaattaagaccataaatgaatttggtaataccattttgagagtgcatgtctaattattggtttagtattatctaggagtttgattacaggttattcaatgtaatatttattttcatgatcatgcctttagtcattgtttacaaattgtaaaatttttaaggtgatcagttatacacgagtgcctttattagtttcagtgggactgacattcatgctttatgcaggttttctatgttctaagtgtcatcacatttttatttggaagaagatcaaagggctttgttttgcattaagaagaacttatcttcatttttgttgaatcttatttctggtggacaatgaattttcttatgcggtctactcagactgcagcagcagcagatcaggtgactgttcgtgaatcaactgcagagacacatcacataccaaaacctacagcttccttggaggctcttatagctgatgatccatatcgacggtattctgcacttgaagatcatgatggagagattgaaaattttggaggtgaaaagggtagcattgcagtttcagatgcaaagaaagactctactgtatcaaagcattctgatgtttccgaagaggaaggatggattacaatcccatacagtatgactctgcctctgcagtcaatttgtctgtgtaggcttaccttttagtagttatcactttcagactgtccatacagatgcacacaatgcatgagattgtcttaataatttgaagtgctgaatttttttaagcatatatttgcgatagctgcacatcttggtctaagttaacaacatttgaaaattatcactttcagattgtccatacagatgcacacaattcatgagattttctaaacaattttgagtgctgatttttttttaagcatatatttgtgatagctggtctaagttaacaacatttgaaaattatatttacaaatttgcatgtcaagaatacactgagagtcatcttcatgttcactttatgttttgatgttgcggattttatatcatgttggagcaccctccttaagtagcttacacttttctgtacctaatgcattttatggtcttgtagaggaactgtctgac

SEQ ID NO: 38947 - DNA, 1276 bp, Cannabis sativa
actataaaatcaaatagttctctgattgtcataacggccacaccatgttttttgaaaaaatcctgcatttcaccgaatgttttataaggttttgatgctgacttttaattgaaaaaggtagatatttatcagctttaatgttgactggataacttacagaaacatgaacacaatcttcacgtaggaaatcaagggcatgaggatggtccaaatcaacagattgagaaacatcaattatatacaagtgaccctgaaaaacaaaagagaagactacttgtgaataaagatgcagagattaacatgtataccgtatcaccaagtcatataacaaatatagcttacctcataatacagtatgttgtattcactaagatctccatgcaccagtttgcacttttgatataatgtcctcatagcaattattatctgttaacaattcacaaagacattattcaaaataaatgaaagaaaaaccatcacatcccagtgaccccacggacataaaacaacttttagagcatgccttcagcagagcaggctatggcatgcataggtttttgttcctatttgcaaaaataaaaaaaactaaattcaataattaaaacacacctccatataactttcacgaagcttgtcctgtgataaattagcatccttaagacgaggtgcagcccaacctgattttcctataagaataccaaaagtatttcaagtgtcaaacactacaaaaccataaataagaagagagaatattcattaatttaaacattcatcaagatataaatgttaagaaaggcaacgaatacctatgaattccatcaccaaaacatgaagtctcaaaagtattggagttgggcaccgtattcctgcagcctttagcctacacataataggagttatatatccttattaaatgacatcaactaaaattaatatgcaagcacgctcatctatggaaatttcccatctagaggcaagcagaaaaagagacttaggttgccattaatttcccaatctacaggttggttgaagacaaaattgactactaataaaaaatctcctttgaaatggggtataactaacaaaattagaataaaatctccatgcacaagtgcctctagtagcccactattcacttgaattatacctcaattaaagaatcaataatttttctatggtactagaagttctgtgtgcacattcatttaaatattgcttacctaacaagacactgaatactgatacactgttatataaatataaatacagaggttct

SEQ ID NO: 38948 - DNA, 3905 bp, Cannabis sativa
  modified_base (1070)..(1078): a, c, t, g, unknown or other
catgaactaggtttacatcctttccataattccagtggtgttttactcacaactttggatggaactacattcaaaatgtaattcgtagtttgaagtgcatattcccaaattgaagagggcgtacatgctggaacttattttagaaggatctttatttactaatatgtatgttgattataaatttgtaatttaacaacctaaatgtgaatcaacttaaaacgatgatgtttactgagatttcggaaaaactaattataaataattagaactgaagaaataaacaattaaaagagaaagcgtaagaaagacaaatagtttttatatagttggggcgttaactagccttagtccacgagtcaatattattatgtaactttaagctagaaaaactttcaggaatacaatgagcatataagttctcaagtttgctagaaaaaatactacaatagaattcaacccttaattcgtaagattcattgggtatttatagtatatagagaattacacttagtttttcttttttttcctctatttgggagtttacattgaattacataacttgggttgtcttgtgaagtttagcccacgaaggacataatatgctaactaggcagattagatacaaactaaattggtcaaaactgtgtcccataattgtgggcaattaattgtgaattaattgcttggtctctgtttaggaagtttccccttttagcttgatatgaacctctatcgagattggggaagcatttgtttccttatctgtgtgcatgaataaaaagggaaactagactggtcttccaggaacacgctatctgattctttcggcatcgcggtactggactgcttccggatacgagctgtcactggcagaagatcatttgatcacgtagctaagatacgttcatagaaggtcctatataatttgggcttggcccaaattttattccttgagacccacttgtgggcctttgatgctgacttggattcgacgtgtcccgtgtcagaaacacaaataacatttacccccaagcttccagaatgctatgtatggtggaagcttgcatcannnnnnnnntgtggacatgtggaggattagaagtaatattataattttccaagtgttaatcgatcatggaaggtgacttccatcttcagtcgtggtacatctacatgacatttgcctagtagtggaagaacacgtttatcgagaagttgctttctaaaaacggttattttgacagatgttcattttttggtgcaaaaattaaatagtaacatcttcattattgatatgcgcttcaattccagcgtgcattaattgagttgacatgccttgacagctgtgatccccaaccgttagatggagtttgtgtttctggagacatgatcggaatcgtccattccttttcacgtggattgctactttgagtataaatacccttcacgacttccagttaccacttttcccctattttcaattttcaacctttcaaaacttaagttttctctacattctttgagaattaaaaccgaactcagagccaagccatctaaatcaatctagaatatgttgtcgatctttgcatttaacttctactgaggattagggcttgagagtttccaaatcatctacccccagtgattgtgaactttatgctagaggaaattgtaatttcagatttcaatacagaaattgatttgttgattgccctcacatatcgtctttgtgaaaagtgtgatcaacttcttcaaccgaacccagcaatgataaccttgacatctctattttcactatcatatatgtatcgattcaattttttttctctttgattgtgctttttgagtttatcagcacacattgcatttgcatgctttgttttgaatgaaattagggttttctgactctacgattattatcgttgatagatttaggtgttataaaccatgttgtttttagattctaatgttaggaattcctaggataagtcgttttgtagcagaagtgctggcaaaatttttccatgcccaagatccttctggttttgggtactttgttaattttcactccatttattctcttcattgttcctagctttccatctggaatgaatgacccctgagggtttttgtttctggatggtaggtttaattgggacctctccaagcagtttatgggagaggactcccctgctccctttctatattagtttggatagctaactacttatgtttttttttttctttttacagaaactatgcctaagagaatccaacaagacgaagtcaaaatggaagaggaggtcctggagcaagatgatgctccgaaattggtcattaaggatagtccatggggatggactaacacatcaacaagttcacaatatacaacaacttgaggaagtacgtgtaacgccctattccatagggacgccacgtgtgattttataacttagtttaatactaatacattaattaattattaaaaatcgtgagaatattaaaaacttgactaaaataaaacactaaaaatagacattataacgactttaaaaaggtattccggggatccctgctataaaaagttttacaaaaggattatatacaacgatacctcaaaaacataaaaccaaagcacacaatagatacagtccaacacgcatgccggtgaggtcaataggtacattgttggagaagacagtcatctcatggctgttctaactttttcttacctttacctgcaccacagagcacccgtgagtcacgtagacttagtaaggaaaataataaagaaggatacattaaatagctaattatatatatatatatatctcattatcataaaatgattaaaccataatattcaacaataggtaatataaccagccatatgtatggaaatagatatgcacatatatttatattttctaatcaggtaagcctgtgtcataatgtaatatcatatataatatcattgcaccacctaatgaggtgaatataatatcattgcaccacctaatcaggggagactgtgccacaacctgacaccaatatattgcatcgcttaatcagaggagtctgtatcatagcttggtactcatatattactgtcgcccgtatctaataaggtatgttgctagttagaaatctaaaaatggtttcgatcaatgccataacaaggcattttcatattactgttgcccgtatctaataaggtatactgccaattggaaacctaacagcagtttcaatctatgccataaccagatattttcatattactgccacccgtatctaataaggtacgctgccagttggaaacctaacagtttcaatctatgccataaccagacattttcatattactaccgcctgtatctaataaggtacgctgccagttggaaacctaacagcggttttggttcatagtcatgactttatatcggttgcctcacaagcacaacctgaatatcggtatccacatattacattacctattcaagcaagtttatgccatagcctgtcatttattatatacatatattgcatggcctaatcaggcaagctcatgtcatagttttgcattcgtataccacatcaccttgtcagacaagcctatgccataacttggcactatatcacctaatcaggtgtatttataaatcatattgactaatcaggcaaacttatttcactatttaaaattcatctatcatatcacctaataaagtgaagttgtatgtcacattcatattattactatctaatcacacagccgatgatcacaaaacctgtcatgccatgtgtgcattatacttttcttaccttgagtttcagttcaagatgttggctgacctgcttggagaacaatcgatgatcccgggccctatgccataacaataata

SEQ ID NO: 38949 - DNA, 2354 bp, Cannabis sativa
gccattcgtgagagcgtggcgagtattgcagaagagaaaaagtgtaaaaaaatgtaatgaaagtcaattaagtttaatagagaggagtgaaatttttatatgggaaacaactcaatgatcaaaaataagaaataagctaactaagctaactaacagttggttagcattacagaccgacaatgtaacaagaataacgaccataacccagttaaactaacaaaccaatatatagtaaatcttgctactcctctcaagatggactatagatatcgtgtacatacatcttgcccaagtgttttgccaaagtggcggaggctaagggtttagtaaaatgtctgcaagttgtagagtgctgctaacaggtatgagccgaatggtagagttgctgattttttctcgaatgaaatgacattctaattcaatgtgttttgtcctttcatgataaggttgattgttagcaatgtgaattcttgattgattatcacaataaatgattgtggtatttagaaatctgagaggagatatgtaatcaaggtatatgctggttgtagcagctagagcgcgatcttctgcctctgcagaacttttggaaatggtcatttgtttcttcgttttccaggatatgagactatctccaaggaagatgcaaaatccagtaatcgatcgcttgtgattggacacgatgcttaatcaaaccccttacgtgaagtgaagatgaagttgaataaagaagtccttgtcttggagatcttttgagatatcgcaacaaatggtgtaaagcttctatgtgtgtggtgcgagtggtcatctaacttggtgcgaggatccattggagcttttgctagtttgctgctaataaatcatgtatcttcaagtagttgcagggtatattttctttgagagagaaagaggttgtccttggcatgtgctatttcaaaactaagaaaatatttaagtttgtcgagagcttttagtttgaatttttgatgtaaggaccgttgaagctattgtagagctgtgatgtttggaccggcaagaactatgtcatccacataactagtaagacaataaaggttgtgtcagatcctctggtaaagattttgtaatctgcttgtgatttttgaaaaccttcatctaacaaggtatatgaaagctttttgtactaatgtcttaaggattaacgaagtctataaattgatttatgtagtttgcaaactaggttggtatctgtaatggaaggaggaagagttaatccttttagaaatcgcatataaacttcttcatggagatctccattaagtaatttaaatgtgactatttttcaataggagaaaaggtattgaaaaaatcaaggccctcttgttgagtgaaaccttgtgcaaccaatctcactttgtaacgttccacacttccatcattgttatattttatcttatacacccaacgatatcttatagctcttttatttggtaaaagagggacacagtccatgttttgttgtttcaaaaaacaacaagctcaatgtccatagctcaaagccaatgtttgaaatgtattgcttgatagtaattttgtggttcctattctacaaaaatggcaaagatatatgcttggtgagtttttgacaatttagtataagagataactttagtgagaaggtgaagtgtggaggatttgtccttaatggaggaattacattaaaaatccttcaagaaaactggtggttttagctattctagttgttcttctaagttctattggtatggttcgaggagcaggtattgaatttgctggtgtggtgaagttgcaggggaactttcattttcattgctttcttcctacacagaactattggtatggtaaatgacctccctttctatatgctcttgtcaaccatttgtctatctctatagatcggctgcactgaaacggatatttttcctttttaaattaactttttatacacaatttgattatttttttaaaaaaatataaaatactaatttatatattatacattcaaattgaacaatacataatgggcttgtttggaacgtcatattagatcgtattatattatatttttatataataatacatataattttacataaaaatattgcataaaaagaatttaatattatactatacaatataatacggtgtgataagtaacaaattaaaccaacccaataagaatatcaatgattattttaataatctaatccaatatataataataataataataacataataataataataaaaataaagatgatcatactttgattttattacgcaatggttcatgcatgtacatatacatgcataaacacgtagagagctattat

SEQ ID NO: 38950 - DNA, 3792 bp, Cannabis sativa
attgcataaaatacaattcaatataatacaatacaatacaatacaacttaatacggcgttccaaacgagcccttaataatttactttttatgtaagaatgtggtaggtcccacaaatttttaatgggtaatatcaaaatatgttccctttgattaccctcccaacattcctacacagaccacaacttataacaaataccctcttatagctaccaaatcataataattggataaactttgaatgtgattgaaattaaaaataaaaaattaatttttctttatgtatatataatatgcctaatatttttatatttgaacatttcatacgtaacttgttcaaataagaaaaaagttcatatgcaacaattttaaattattgttcatatttgaagtctttttttgaaatcatattaaaagtctttaatttaatagtaaagtccacattattttatctatatatagttatgaagttatgaagttttaaatatctttatatatttgcctttagtctcaccacgacacatagattagttaatcaatatctggtttcctaacatgttgtttcttcttcttgccttgcttttaactctaatttttcttgtgaaaaataagatcaaagccaataatgaaaacaagccaaaacttcctcctgctcctccaaaacttccaatcataggtaacttacaccaacttggttcactaccccatcaatctctatggaatctctcaaaaacatatggccatattatggggcttcattttgggacagtaccagccatagttatatcttcagctgaagctgcagaagaggttttgaaaacaaccaatgacttggcttgttgttgcaatagaccaactttaactggccctacaaaactctcttacaacaacattgacataactttctcaccttatggtgaacattggaggcagataaggaaactatgttctctcaagttactcagcagcaagagtgttcaatcctttgatttcattagagatgaagaaattcattctcttaatgattttctccgcgaatcatcggtttcagccactcctgttaatctcagtgtcaagatgtctactcttatggcaagcatgactttcaggacagcctttgggaagagatttcctgagtgtggactcgacagcgacgagtttgaagaaatgattcatcgtgcaatgggtgtcgtcggaacctttgcgttctctgatctgtttcctcatgtgggatggattgttgatagactgagtggtgctcatgccaaatgtgagaatatcttccgtgaattggatgatttctttcaaattgttattgctgagcatctaaatcggaccccagaaaaagggagagaagatcttgttgatttgctgctgagcatggagactggtgaagatgactccaccaatgaagaacctttcactagagattgtactaaggcactcatcatggtaataacatatatagataaactttgtcctattttttaaaacttcaataggttttgagctaataatttcatgttatatgttttaggatatatttgttgctggagtggacacagcttcgatcacagtaacttgggcaatggcagagctagctaaaaatccaagggtgatgaagaaaatacaagatgaaatcagaaattattgtttgaagaaaaacaaagttatgatcactgaaagtgacattgaccaacttcattatctcaaaatggttgtgaaagagactctgaggttacaccctgcatcaccaattttgctaagaaaaagcatatctcaattcaaggttggtggctatcaaattaatccaaaaacactcattcaagtaaacttttatgccataggaagggatcctaaatattggcatagcccagaagagttcatcccagaaaggtttaatgataactccattgatttcaaagggcaaaactttgagtacttgccatttggatcaggtcgaagagggtgcccagggatgactatgggactgactatggtggagttcacactagccaatctcttgtgctgctttgattggaaattgccagttgggatgaaggagtccgatattgaaatgggggagggggctggatttacaatctttaagaaatctgctcttaaacttgtcccagttagctatcaatggcccttggagattcaaacatagccaatcaacttcataatttttattgtatgcacattgactatatttttgtctcataataaatatgggcacatgcttgcttgtatgcacttgtactcacaaaaataataatgtaatagtaatttgcggtataaatatttaagtttaatttgcagttgtaaataaatacataagtttagttttttacagtaataatacctaatttaagtacatggacattaagtattacataaattaccacgtcataattcttgattggttcaagtcattaaatttttaattttcttaaaaaattaatttaaatatactaataagaaaatgagatgtagataataatttaatatttaactattaagttctaaaaatataatttaagtattattattacaaaaaaaaaaataaaattgaatatttattattttgtaactgtaatagagttttttgttacgatatgtatcatctatatataaaaatttatatatatgtatatatatttatagcgtagtgtgtttgaaagagttagcagcctaggtacacatcaaacagaactgcatgtacgtagaattaagtatttctttatgtgtttgaataattaaataaataaataggtcttttacaacaataagcaagactattgaatatgagtaaggaagaaaatattgatgttgatgaaaacatctatacatatatttaacaaaaaatatgaaaattaataatagacttatagaacaaattaattaaataataaatataaatctattaattagatattataatatcgttttgattacactaacttataaatatgataatatttgacattcattttcaataagaaacatcaatattaacttgaaagaggttcaaaagtacaatctaattaatgtagaaaatattgataccaagtttgaatatatatctgcatgtaattttgaacatgaataaatgtttgaaatggacaggggatcaagtccttgatgatattctctacccatgtttctccataaatggtaaattgtgatccaattacttgtacaaacttcatactaaaattgggaacaaggataataaaaaaatcccatagccacataaataatcactatcactaaatcgcattcatgagttaacatttcttgattgttcctttctttttcttttttctttttctaaataaaaaacgaacaatattatctcagatactttcatggaaatatcggagatatttttccatttttggacaaaacgaatattggaaaatatcgacgaaatatcaaccaaataatgtaatttttgcttatgagagaatgagaaaagaaattggtctttctcttaccatatttaagagatattattagggacgactctattagtatttatcaaatgagaattggtaaaaggtaacattagtgcttagtatttttttggtgttatacttttattggtttaattaaatatacgttctcatataatctaaaaaaaaaaaaattttaaataatatcattaactaattgtgaagcgctacctatacaatgtatttgacaccattaatactcaatagtaatatttttatcaaatggtgattttaacttttaaaagggatattgtcacacctaaattattttacat

SEQ ID NO: 38951 - DNA, 3772 bp, Cannabis sativa
gcctcctctagatcaaattctacaccaaaattatcagagccttagtccatctatggctcaacatcagtagggggctgagcggtctcctccatcatcttaatttaacccgttgtggccaccctggccatgtgagggtcatatggaggtgccctacggaggtctgttttgttctagccataactactaaataagcaagagacctacacagattgtcatcttccttattcaacacctagtactacctgcatttaggaaataaggggacgttagcaacctaacaaagctacaaacacattcaagtcaacaatacccaagggtacctttcaggtaaaacaaaatgtataaggtcgatcaacgaccaagtactgtcttaagtacatttattaagacgtagtaagtcctaagctgtataattaactgtaacggactccctacctagcgttacacagagtttccaagagaaaccacgcataaggtaacagttgtatatgcctccaaggccatcacaagaccctagctgaggtcaaaagagggagaaaaattagctacccacttggagccttggcctttgtcagctagggttccaggccatagtggctagcgagaccccaagacctagtgtagtggtcagccaagaacccttattctagggataggccagctagcctaggggtacaacacccttgttggccagaccccatgaaagccacccatggttgtccaatcctcaaacaaggcgtccttggccggccgacatctgcatggatcagaacacatgttttttcaagaactcaaagatgctctccatgttcttcgtgactcaaaaaccaggaaacacaatgaaagtcaaatttagatctttttcgtccagaaatcacacattatgtatcctatggctattaagcagatcaaaatagtgaaaggataacaatttaacgtaagaatcaaagcatgctcaaatcaaagaataatgtttatacattcatggaaaagttagccaaatcaagtaaaatagcagtaatagaaagcttatccacaacaagatgttggttaaaaagaaggtgggaaccttggatcgttgaaacgatgcaaaaattccaggaagatgatgcttatgggttcgacactttagggagaaggaagagctttttctaaatcgagttgctagtgagagaaagtgaaaagttaaaaaagtgagaagtgaaaaaaggttttgcccctaaaagtcacttatgtgatgcatgtgggccccttttcttcacttacctcacctacacatcataaaggcaactaaagcagctatttctctatagcatgagatcagatagttaagacaaaatgattttaaaggctaaaaaatgcatcaacttttattcaacaaaggctacaacagtcccgaccacaccaacacagctggtaaagtccctatccgtacaaacatccgcacaggactttgggggaaaaggttatcctaatttttatcctcttgatgttggatgcttaaatggataaaattagtaccacatggtaggacaactcacacctaagaaaacggagacccctggcactcaaacgggcatcaagtgacaaaccagctccctcaaaggagttggctgccccctctggccggccataggtgctctatagggttttttgtgcacttctacatgtggacagtaactcatggactgggaattggaccctaaaagcccaataaaatggctgaataatatttagatttaagggcattttagtcttttgtaattgtctagcaaactatgcaaatatatagggtttcaaactgaaatcttaggtttaggcctttaggccttaaccctagcctagaaacttaagtggagtctaagcctgaaacctgcctccaagctctaagcctaagtgtgacagcttctgtcctcctcacttcgtctctcacacacctacactagcatcatttcaacatttgtgttttgccactattgattcatacgttgtattcctaacggtgctatagcagatcctatctatagtggtctagatagtattaaccctcgatattaatataactaaaaggggagtaggtcattacgcgctatcacaagggggttgaacctccataacaaatctgtgtgtctattgctttttattcttatttgtaaaaaaagtggcaagcatcatatccatacaaccccattgtcggttgatcactttttgaggtcaacaaagtctaatatccttctctctctctcactcgcccattataacatctctcaacaatttagatttgccatctttatttcttacttttaaccttaagagagctatattagatcccacatatagtgatctaaatagtgttatctctcgatatcaataaaactaaaagggaagtaggtcattacctgctaatgaaggggttcgaacctctataataatccttctgttctttacttttgagctctaattgtgtaacacgtggtaagcattatttaataggactccactgtcggttggctaatttctaaggtcaacaagttactaatgagtaactagttagtaattaaatatatgaatatgaaaattagtaaatagttaagtagtagtaacaaaagtattagtttaaaatattatatatacatatacaatacataaaaaatatattatataattataatatttttacacatacaatacctatacaatataattacaaaatacatatctaatacaatacaaaatacatacatatatactactaatgtttagccttttattttattaccaaacttcagccacaactactgaccaagatctagccaccatccacaaccacatgagcacaatcttaacaatctaggaaaacgttcaaaaaaatttatacaataaaaaaataaagcaatttatacataaataaaattattagaggttagatttatacgttaatggacattgagattcaatgatttttcctctaaaactggcgactggagctacaaccaccccctctaagctcggtataacttgaaaaacaaaaaaaaaaggatgatcaaagtttagggatatgtttttgggtatgaaaaatgcaagatttataaaaaatgagtaaaaatagatgaaaatagagaaatgggggatggatgacagtggttgggcgaggatttcatgaggggctagggttattttatttggggagaagataaagtgaggaaggcaaaggtgtcattagggttttataaaccctatggcatccactactacaaaaatagtttttacttcggttcttaagtgacatataaacaatttgcgtcggttggggtaatcaatggaataactgtagatgcaaatagtcttcttgttgcttcatttcataattgatgccaatattgcactactatttttaacaccctactagttttggcatgttaacgtgatttttaacgtaattgtgcagctcgcttttaatcaatgagtttattaaaaatattatttaattaaaactttatctaactaattataaataccaaaaaaattatattacactggaaccctgttacaaaatatttacaaatgttttacggtggagaatacaaaagtttgtcgccgagcgactatacaaaataagcccagctatcctaaagaccgtacgctctaagcttaaccaccctgacatgtacaatcttcatttgcttcctctcacatctactcaacctttgctttgcccttacctacacatgaaaacaatatctgtaagtcgacagactcagtaagaaaagca

SEQ ID NO: 38952 - DNA, 3121 bp, Cannabis sativa
  modified_base (1778)..(1781): a, c, t, g, unknown or other
ggtggagctcctggcgcatatctcgatactcctgtcgggtaataccctctgtaatccactatctgggtttcttccagattaatgtatttttagactttcctctaaaagtcttggaggcaggctgctccaacctgctacaattcgttccaaaaaggggttcccgtacggatcccagcctgaagcaaggccaactgttgtccgtcttccaccttctttattttcgaggcctcctccttaaatctctttatgaagtcctttagggtctccacatgcagttgttttaatgttggttagggcactgacctcgaggttgatctttcttgctgcaacaaactaccatcggaaactcacttgtaccttgttcaaacagtctgccgatcttggctccaattttttgaaccattctttggcagatctgctcagtgttaggggaaagcatagacactttgcgtcattacggaccctcatgacggtcattaccctgttaaatcgggacagatggtcaatgggtctgagtctcctgtgtaggtcgccatttcgggcattttgaaatttttagggagttctgcctctaagatgtttcgggcacaaggctcacggtcctcgcaattagagtctgagtcatcccctttttgtctctgggagactctagcaatgtctttgcggaggatcgccaattctgctaagattcccttatttaaggcatcacctgatattagtaccgcgtgcttcttctttttgagatggtttctcaagtcaccatgtttctcgttaatttttttgccgtaaatcaatcggaggatggcgaccttttctttctctttccccgggctcgtggtgcagaaacacgctctttcggtcctctcggtcctgagggccaagactcccttgaggaagcttgcccctctgtggacctttccctcttgggaaatctgagcagacgttttgtggatcttgagcctttttgtttctctcgaggatcgaagtgggatttttcttagggtcttcctcggaaggatatcatatggggcttggcctcctagttttaggcctttgggtgcttggcgaggactcctcttgtgtttcctctagtcctgcgggcacggctttgggatgcacgtggattcaagttgtttccatggccttttgcatggcaaccattatttcttgcatccttctattctgttctttttgggcagctagttcggcctcgtgatcagtcgctttttgccttaggaccagtaactcagtgtagctacctcctcataagcatcatacccttaaagattctcttcgtattcctcgtcatttaactcgtctcattcctcagaggccacatttacttgtgtagcagcctcttcaccttctgggtcccgaggatcctcggggggacgaggttggtgtgtgttgttctgagtttccaccatcgtagctttgagtcttgattgtcgtttttcaaacaacgcttcccacatctctcaatgaaagcaccaaaatattgatcgaggttttcgataaccaattaaatgagataatgataagagctttgggatagttaatgcaggtgatttttacgtggtttgggcattaatgagccgtagtccacgagtctctattattaatgacagtatttgttttatagagaatgttcttggggtgtttttctctctcccttttttcgacccgatttctcatttttctcaggggtatttatagagattggtgggaatggttgaaaaggggtaacttgtctttgagtgccagctatggataagcannnnttcccaaaagatacaaaatagggcatgcattacctacatagtagttatcatagaggttaggtgagattagccttcatccttccttgattgatgtgattcttcataatggagccatcaccagcccctttgattatcgtgtaatcgccctaaattaggcttatgatgtctgacatgtcctcttatgggcgtttctagacgttttccccatgctgcatttaatgcgaggtgactgttcgaatgggtccctctcgtcgcggatgtgccttactatatcttaactcccgaagaagaaggtgtgccttttgcacttgtccgggatctaactcttcgaatcatacttattgcctcttctatacaacccttaactgatctcaaggtgaggtgtcttctttgtccacgtgtcatacatagcagcggccacatattttgggaaaaaatcggggcaacaatatgtaattgtatgtgataaagtagaattaatatatggatctaatccttcctgatctcagtgatctagtattgttgtgggcgttgatcttggataatctttgtgggcgagcagcaatttagatttagagagcagttaaaggaaataatgaaagttgaagtctacatatttatttttttgttaattttatttattgttaaggtaaataaccattaaaaagaaagctatggatggatgataccaatcggtgaggagaaaatagactggattgacacgtgatgtgtaaaattataaaagataaaaatacattaaactttaaacctaactaaaattaatcaagttgtaaattaaaaattcaaatgaaatataaacatgacaccttataaaaaaatagaggagtacaatccacctcagcattcttcattacttttataattattttttttttaattttttttgttagattttaaacttgtttgtatttacatttttaaataagtcattaaataaaaactaaataatagatggaataattttaaattaaggttatagttataataattttaaattataaggttataagtgaaattatttcaaattttaagattatgtgttataatttcaaattataaggaactttacgtcaaatattaaaataatttaagtgaaaaaaagtaattactaaagaaactttatttaataacaaattacaaaaataattaataattataattaatttaatttaatttaaataaaatattatattactattaagttacaagttttttttttaatataatttttaaactaataacaatatttatttaataatgattcaatgattaaaaataaatataattagtatgattatatatatttgatatagttattg

SEQ ID NO: 38953 - DNA, 930 bp, Cannabis sativa
gatggtttatatttcaaaaagaaagatggcctttgcgggatcaacggttcaaattttatagaagatccaacggctagggagacaagaggttcagcataattagcctagggcccaccgaactgtcaaggtgggtctcttcacatcatttagccattggttgcattccacctttcttgctgaacgcgcctcgtgacgtgccaaaggggccaaatgagatttttgaagtaccccatgattgccacacaggcgaatgtaaatgttgtattttccctaaacagagtacagctcatacagaagatgcatctgtgacttaaattatcagctcgtgttaatagccagtactgaggaaggatgattaagggacacatgagacacatgacataagtccgcaactcaaagagtctcgaaagcttggaggtaaatgttatccatgttttcacgcatgagacacatggcatgattaagggacaaaatgtattagcggaaatgaataattgagataactcataaggtatctcggaggcgacatctcagccatcccaaaagtatccactagacacttgacggaatgaactatttgcaaacaagtaacatctcctggacccagaagattgttgaagtaggcgaatcccagatggagatcctttaagtgatggacccagagtagcgtcatacagaaatcgctttatggacggttatacctttttctgacataagatcagatattgcaggccatggtagtgcgcgtacgcacatcgaaaaatgcttttatttgcccaacgaccaggttacagagtattttgcaaaggagagacctttgcatgacacgtgttctggtttgtatatgaaatctcttactgtagttgtacgccacacgatgaagaaggttcttaccaaccaatggttagatggtcctatagtaatgccgac

SEQ ID NO: 38954 - DNA, 1666 bp, Cannabis sativa
tatatatatacattatacacatggctagcttgatattcatgagattttaatgcagatgtgtaaaactctcatgaagtaatgtccatttcttctacagagcactattagttgatgtgtatatataacttattcttttgttggaagtacaccaaaattaattaatacatatatgtaatatataaaggctgaatttgaattgaaaagagccaactatatatatatggctaatggctatatgtatgcatgagaatcatgagattaatatacacgtttggtggatcgaagagccacggttcagccgacaaaagacatcatacacgtacacataacattaatactaaaacataacttatatatacataaagtcaatcaaaaaattaatgtttttctcttcttattaattattataattacattatatagagtgcagaaaaggctgactgaaatctctggaaagagaaagatgtgttatgatatgaaatgtcttgcggaaagaaagatatatcaatgtcacatatgtaaacacaaaatttatgatcagcagagactttatatatattgtctttcctcaaaagaaaagaaaagaaaagaaaaaagaagataaaaataaaaattgaaacagtgccctttatgtgataataattattcttttgaggaaagtaagcttaacactttgtacgtattattattatgatatatatatatataaattaattgcatgaattgtttcatctagctatagcgacctatccttcttcccaacatgccattcttcacactcgtctttttcagctttattataatttttcattggaatatatatcactagtatactagtatatggaaccttttttatgaatatatatataaagagatttaaaaaaaaaaattagtatttttacttacaaactcgtgggaccatatgcttcgtcttacctaaaaactatgtcactatatatgataacatattattttctctccactatgtattgtttttggtccattacaaacttatggttagtatgaattaatatattactttacattaacttgtatagagtacatgacaaaggccttaaagctaagttgttgctttaagagaaggcatatatggtattggcatatgtatgtagtgaattaatatgagatttggttaagtgggtttttggtagtaaatttaattaattaattaataatgagttaataagttggaaaagtgttgttaattagaaagtgatgaaggtgggacccaccaaaagaaaaagaagtgtaagtgtagatagatgtgagggtcccatgttgtcggttggctacccctttgggtggcataaagatggaccattacgccatttgtggttaaccaatctctctctcatcacgtaaggtggacatcaacttatgcccacatatatctgtatctatccatttatatataatttatttatgtataaaagccagggtatatactataaggattttttttcctttacatttcatttcaatctcacaattaacatttattcaatcaactaaacccattatagttctttgaatgaacgagttgaattaacatctcattactttttagtcacaatataaattttttatgactaaatataacttttatttacaataaaaaattatttgtgactaaatgtgactttta

SEQ ID NO: 38955 - DNA, 3895 bp, Cannabis sativa
tgggagtcccttcaaggtgggaacaactagccatctggaaccatccttctggaggaagactagcttccctgaagacttcttctagatggacaagttagatattcgggaatgcccttccggatgtaatctaactttacataaccagaacaacttttagagatgtttacatttagaagaactataccacaaattgcaactagtttcttcaaattaaacaattgacgatgatgatgaaagaatgcatccatcatggttggtgtcccagatatctcaacatactaaattctgtcattgatcaagtccaagcaatgctttgaacttgttttactctttaagaccttagtcccaacatctggtaggattatcttttattctgaccttctctaattcaatcaatccctcctcgatcttctccctaatccagtggagtcttatgtctatacttttctccctaatccgagtacacagtcactcctcctctcagttgtttcaattaaaaaaaaaaactccccaaaagccatgacacttccttgaaagctttcgttgtagccataaattctgcttctgtagtgaaaaaaaagcaaccatggactgcagttgggccttcaaacatatacagttccagtttgtcatgaaaatgtaggaattggttgattttctcgtatctctattcgaagaataatcactgtccacgaaccctttcaactctagttctccttttgctttttcataggcgaaaccataattctttgtgccctttaagtaccttaataaccatttaagggcctcccaatgttaaatacccgattggacatgaacctatgcttagagcatgagctatgtctagtctggtgctcaccattacatacattaaacatcctagagccattgcatatagggtacatccttaatttcttctttctctttcaaactattcagactctattcatttgataagaaaaactgtccacccaacggtacggatgactctttgcatcttccatgttgaacttctgaataatcttcttgatgtatctagactgcttcaagtttattgtcccttccttcccgttccttgaaactttaataccaagtatgtttttaactagtccaagctccttcatctcaaattctctcttgagcttgactttgatactttttggtcactaattggtccttgctcattatcagcatgtcatccacataaagcaataagaacacagttgaaaattgctctagattcttaaagtataagaagtgatcatatgttgatcatctaaacctgatttgttgcaagtatcaaatcttttgttccattgtcttagggactgttacaaaccatctaaggacccgttgagcttgcaaattaactcaattgcattcccttacacctgaaacccatgtggttgcttcatataaatcttttcatctaagaattcattccgaaaggaaattttaacatcaacttgatcaacttcaaactctatttgagttgccaaagatgacatcgatattgtcatgttataatttaccacaggtgagaatatttcaatgtagtctattcctttcgcctgagtaaaatccttagccactaacctggctttcaaccgtactagttcattctcattgattggctatttcacctttacaatccatttgtattccatgattcttttgttgtctagctttcgcccaaccacccaagtcttattcttttacagcgaatccatctcctcatccatggcctagagccaatttaacttgtttccacctgaaattgcctcttcgtaccttctagactcttcaatttcatttttttgcactactgctagtgcaaattctattaagtctgcttccacaaaccttgccggagggtggatccatctttttgctctatcacgagccacatgataaacttctaaaccagcctctctgagtccctctggaacctctgtttggtctttgttatcttctagctcagcatcaacttccttttgcgcactctcttttgcttccactatagattccacatgtaaactctcttctagatgtttcgttgcatgttccattttcatgaatgtagtgtcgttatttcttattttttttacatcacatagagatacactacttttcccaaatgtcagtaaggatattccaacttattgaaaacaatatttctagaaatcgcaacctttggtttgcccttcttggaaatgcagattatgtaccccttggtacctaaggcataacctatgaaaattcccttagttgatctaggttccagcttgttaatagattggtgaacataagtcatacacccaaatgttcttagatgcattagatttggggttatgttttaccacatttcatataaggggtttttaagcctatgactctgtgtttttgagagcttctatttataaggtaggttgcaataactaaagcttcctcccaaaatggtttttctaatctagaattgaacaacaaacatcgaacgttatttaaaagggtttggttcatcttttgaacaacaccattttgtttcggggtcttcactacggttctatgcctagtgattctatactcttgacacacaacatgttgaattcagagtttataaactctaacccattgtctgccctaagtttcttaacatttagattggtttggttttctacctgagtttttcaaattctaaactgttccagacactcattcttagttgctagtaaatgggtctaaacacacatactataatcatcaacaatagaaagaaaatattgcttattggagtgagaaggcactttgcgtggcccccaaagatcagcatgaatatattcaagtatcttcttagttgtatgccttactggagtgaatttcaacttatgttgtttccctaaaacacaagcttcacaaaatggcaagccaaaagaatttaaattttaaactatagtttgtttgtccagttccttgaggcctttttcactgatattcccaagtctgtgatgtcgtagctgcatatctaattctagcactttcaccaaactcacctcctcgactggaatagtttctccttggagaacatataaactattgatcttttcaccttccatgactattagcaaacaattggtgatcctcatgtttttgtgcacggacttgtatctgtaaccctcatcttgaaacacatccagggatatgaggtttcatcttatctctagaatgtcccttatgttcatgagcaccttcattccgccatcatactattttatgacaacttttctagttccaatgaccctgcatgaatgatcatttcccattagaattttatctccatcaattgatttacaatcaaaagaaaattctctacttaggcacatgtgattcatgcatccagagtcaagaatccactccatgttcattgatgattctaagatggagaataattctccatccattaaggagtcatacatcttctacaactgcaactgaatccttcatgtggtgatgatgatgggtgtccttcttatccacattgtgagatttgttaaagcctttttgctgttggtactttttgcaaagtctttgcatgtgtccggaccatacaatatatttttttgaaaaaaatatcaaatactaacataaggtaacacttatacaagtgttgtcttataccctatcttttggcaaagaattttcttaagtttaaaaaaaagtgttaacaaaagttatttctctagtagtgcatcactatcttctgaaaatgcaactgaatccttcatgtggtgatgatactggttgtccttcttatccaaattgtgagatttgcgaaagcctttttgctccttgtacttcttgcaaagtctttgctagtgtttggaccttccacaaaagt

SEQ ID NO: 38956 - DNA, 4290 bp, Cannabis sativa
attaataaaatgaaaaaaaaaaatgggataaaaattctatatttggtcaaaatcctcaaaatccatacagaaatagtggcttcaatttttcttcattgattcttcaagtccaagactcaaaattaactattatttttaattatatcataattaattgaatgtttatgtttaaatacttgtcatttccaacatggtcctaatgatgtggcatagaatgatgtgacacatggtgaacatgaaagaggttgagaggatctaagaccctccaaaactccccaaaagatgttggtcggctctatgaactagatggagcagtctaacctcaggcatatgttgggcatacttatatccacgagtattatttcgaatcaccaaagacccaccacaggaaatacatccgatcagatatcctcacgagaggagatgtccagattcattccttaactaattttcaagaaatagttagcgaaaaatccttattttcgtgggattaatttagaaggatgagaaaatcatgcgattaatgaaattcccacgatcttctctattcatttcattatttaaatgtaaatattctaaattatcttctccatgaatattggttccatttcagtaaatgaggaccgaagtcaatattctcgagagaacaaagagtctgcaggaatatttgtaacctcaagagatagcaggaaactcacctggctagtccttgtgatcgaacttgttatttttcatagaaatacaaaaaaaaaaaaaaaagtggtaggctaataccactgacaggtgtcaaacttctataaagttcttgtgtcgtttatagctttttgattatcattgttattcaaataattataattgttgtttcattgactccacgtcattgagccaaaatgagatcaacattttggtgctttcattaagagcctgaaagaccattttgctcttaggggcaagtaatcacctcactactgatcaagacaacatgtccaacaaagcttcatagagtggtaaggataaactcacagttggagatggtaatcaactgtccatttcacatattggctctgcaattcttcaatctgactgtggtaacctgctacatttaaatgatgttctacatgtccctaaaattgctaaaactctcatcagcatttccaaacttacaactgacaataaagtatttgttgaattttactctgatgtgtgttttgtgaaggacatggcaagaaagaaagtggtgctgcaaaggaagctcaaggatggtttatatcagcttgaagggtcaacaaccaggtccaactctcacaaccaatctgccaccattatcccaaatctcaaccatgagtcttttctgtcaaactttagttctttttctggtttagtagagtcaagttcaaagtcagtttcatccactagtcaaggtcatgttaatcaaaaagatatttggcatagaaggttaggtcatccttcatccaaaatcttgagtcaagaagtatggtcaatgtaaaagttcacatgaatgaaaatcagttattttgtgaagcttgtcaatatggtaaatcacatgctttacctttcaaatcatctaacaacaaagctaccaaggttcttgaactaattcatactgacctttggggcccatcaccagtcatgtctaacacaaacttgagatattacatccattttgttgatgattttagtaggtatacatggatttatccattgaaggaaaaatctgatgctctaggtgcttttattcaatttaaaaacctagttgaaaatcaatttgaaaccaagattaagaaattgcaaactgattggggggagagtatcaatcatttagcaatttggtcattgagaatggcattctctttcaacactcgtgtccacacacttcagaacaaaatggtcgtgctgaacgcaagcacaggcatatagttgaaatgggtttagcccttttagctcaagcacacatgccattaaaattctggtgtgatgcctttcaaacctctatgtatttaatcaaccgtttgccaacacctgtccttaaaggaaagtcaccaattgaaacactttttggcagaaacctgattacaattttctgaaaatctttggaacagcctgcaatccatgccttagatcctatcaaacacataagtttcaataccactcaaccaaatgtgttaatctaaggtatagtgagtttcacagagggtacaaatgtttgagttccacaggaagagtctacatcactggacatgttgtttttaatgaaggagaatttccatttcaaaatggttttctcaataattatcaaaaggaaacagatattgctgttcaatctccaagttcctggtttcagctccctatacagcagcaacaaacaaatcaaaccagcaactctcactctcccacaaatgaaactgaaaatcaaagtccaacatctcactctactgcttcatctgatataaacctgtctgaatctacccgagccacaccacaatctatgttgcaaagtccttcacacacagatcaggtagatatttcaaacaatctctttgtcgatttggattttgcttgtgccactgctactgaccatgtgacagcaggaagtgaaaatattaactcagttgagcagcaaaatcaggttactcaaatagtccaacaaccgagtcatcctatggtgacaaggtccaaagcaggggtatttaagccaaaagtttacagttctcaggccaaatgggaacaagacttagcagaacctccatcagttcaagctgttatatctcacaaggggtggaataaagctatgtatgaagagtactttgcactgctgaaaaatgaaacatgggttcttgttccatcaaagacctggtcttgactttggggaaacatttagcccggttgtcaaagcttaaccaattcgagtggttcttactatagcagtatctagaggatgggatgttaggcaacttgatatcaacaatgcgtttctaaacggaagacttgaggaggctgtttatatgtgtcaacctgaaggttttgaagagaaatctaagtccaatcatgtatgcaagttggtgaaatctctttatgggcttaagcaagcccctcgggcttggtatgaagaattaaaacaaacacttatcaagtggcagtttgttaattccagagcagatacttcattgtttctgcttaagactccaaagttcgttatcatggtgctgatctatgttgatgacattgtcatcacttgcaataactctcaagaagttaataacttcatttccaagctgaataaggtttttgccttaaaagatctctggtgcttgagttattttctgggaattgaggtgtttagagatgcaactggaatgtatttgtctcagggaaaatacgtttctgaactgttaaagagactcgaaatgaccaacatcaagccctgtgcaactcccatgacaggaggcaaaccactatctttgcaagatggtactgaactgaaggttttcactcaatacaagagtgttataggagctttgcaatatctcacacacacaaggcctgacattgcctttgctgtgaacaagttgagccaatttttaaagtgtccaacatcaacacattggacagctgtaaagagaattctaagatacttgaaaggcacaatacaccatggaattcatatcaagtatagtgacaaacttccaattgttggttactgtgatgcagactgggcttgttgccctgatgataggaaatccatagctgggtactgtgtctatcttggggactccttgatctcatggtgatcaaagaaacaatcagttgttgcacgatctcaacttgttgctgaaataacttggcttgaatcttttctcaaagaaattcatttcagcttacctaccattccagtaatttggtgggataacatgagtgctattgctctagcctcaaatccggtttatcatgctcgcacaaagcacatagaacttgatgtgcatttcatccgtgacaaagttctacagaaacaagttgaaatcagacacatctcttctcaggatcaggtggctgactgcttcactaaaggcctaacacgacaaaagtttcagctcttctttgacaaacttggtgtgacaaactcacccctgcgtttgaggggtggtgttaagacagagtacttaaatggttaaagcagagaattagtattaattgtgtattagccctgttctctttattttgttggtttgtcttttgtttaacaaattttgttttcccttttttgttttcatc

SEQ ID NO: 38957 - DNA, 2522 bp, Cannabis sativa
ttcttcatgttagtgacttcagtccaagtttaatagataagactaagtatatctgaccttataagttttgaatgctcctctgcagcctttgcttcaaaggtatgctctttagtttctgaaaaaaggctttgcgccttctcagtcaattttatacgtggaccatggagtggggaccctttgcttgccattggattttttccaagctgccatgattccttccacaacagaaaagctacctcctacaattacattgacatttacattgctcaatataaagtgagagacattaacagcaataaaatattaaacagttaaaagtatatttgcactgcctagataggccactcaattagccaagttcaatacagacccaaataacttccaaatttagaatgaaagacatagaagaaccgtgaaatttatttgacatacttgaagttgcccagtagatagaaagaagtccttcaggaattcatgcttataacacctgtaattaaaagaaaggaagagaagatcagtagttgtgcacaaaagaaagtcaggacagaagaaaaacagacacaataatcagatgaggtcggctttcccatggatgtatcatgcatctactcgtaaaacacccctcaaaaaacatgcaaaagaaagagcacaattttttttctacttggtaatttattattttatagtctgataaagaaaatcaattaactgttgctcatcataatgaggcaaagcaacatcatgtcaggcatgtattatttttttttttttttggaaactaggattccctcctaagcctacagtatttgaggactaggaaactatagcaattgccctacaggtacccaggagggattcgaacctcagaccttgtgggagcaaaccacatgcctgaccatattatcagactattattccttttctctgatgtcaaaactttaccctctaggttttacttggtatttttattcaattcatttctcctacaagctcagaattttttcttcccaatatcattcaacacaattatatttgttaagagaatctaattttatgaagtacaagtagcagtaattttctgtgagaaagaaggccactcattgcatctctccgtcaatacaactagataaaatcctcccaacacttgaatcattgcattctaaattattaaatagaacataatactaaatgggaagttagatttaccgtgcataagttataaataaatcacgtgccagggttctggcttgtatcgttccgaaaaactccaacggtggcctctacatcaaccgacaaaaaaaaagagcttcatgaataaatgtatttggagaactacaagtgcttttttctatatgattgaatatttttaataaatccatatcaacagaaataaagactgcccaaatttagaataaaatcagatttttgaatattgtcagcattataaccttttgccatatgtgaaaaagaacgagataaacaaggtcggtatcaccactttctgttgccttcactaatgcagtatcttcttctcctatgcttaacaaaagaggaacctaaacagaagaatatagagaatgtcaaaaattatttcccaaatgctttaatgaaactgttactctgcatggaatgcacaaaattctaatttctgaaagccaagtcctgttctgtcctacaaagaaaaagaaatcctttagtggctaaaaaaagaaaagaaacctgcttagaggaacgaggttcatgctcaacaagcatagcagctaacttccggcgaccacttttatctgcatgagcagcaactgctgcaaatgatatccctctgcatattctcaactgaagacggaaacaaaaaccacgttcatactagtgtttggcaaaaattactagctactctcaaacaaatttataaacaagattcacaaccttatgaagtaaaatatcaagaagagtggcatctggaatcgccaaggaagcagttatctttgaacaggcccaatgcattatcacaacctcctgtatcaagccagtcatagaagaatatacattactagctacttctacttcccagcatccgtagtgaaataagtttgagactaattcatttttagcataaaggttgtgccttgagaaaaataactttgtctaaaatcttacttgattcatccccaggtactctgagatccgtagtgcaagaagatgttggtgggcattaatcaaacgaccaatcagaacagatgttgtaagcaactgcagccaacaagttattcagtgcaagaacaagacacaaattaagattcagaattggaattgaaatcaattacttgaaaaataagttttaaaaaaccttatattgttgtatactaagcgggatgccaatctcatggttacgaacagcatttaagacccgcaacattttactcatctcttgaatccgatcacgttgaaaattgctgtcaaagccaactggatatcattaacgagagcaaaaatcagaaatgtttattcttttaaaataagttgat

SEQ ID NO: 38958 - DNA, 1213 bp, Cannabis sativa
ctctctctctctctctctcaccttcttcaaatttttatcaatttcggaaattaaagcttggatttggagtttgttggtgcaagttttgtgggaggaacttgaggtagttatttcacctcttaatttttgagtttggatgctgaaaattatgttgattataatgattttgaagtattgatgcatgttgttgagtatttcttagtttattatgtgtctggtgtatttttgttgttgagattatgcttggtgtatctagcatgttttagtgagattttagggttcaaattgaagttaaaattctgggtaatattctaagttttaggttcatacttgcggctttgatgcttaagttttcaagctttgatatagatgtgaatttggtgtatgttataatcttaaatttcttgatgttaattttgttgtgggattttgtttaatggttctaatctttggtgttaatgaatacgtatggtatatattgaatttatgaatgtgtttagttttatttgagttttggtaggtttttgggtaaaaatttgagtaggttggaattggtttttttttttggatttttacccaggagccgtagcatgggtttttacatgccacgacccgctaggtggaaaattctaggtttttccccagaagccgcgacatggcttttaagtgccccggcccgttgcaggttttttcagggcagatgtgttaaacttgataagcataactttttattttgaacatcattttgtacgctctatatgttgttggaaagatcattccgagctttatatgcttatctgtaattggaatgcaattgtgtaattatgtgaaagtgaattttgggattaaccctatttgtgaaattctaggaattgtgactaggattatcggcacttgcttaagagcacctgaggatttggaatctccacatacttaggatatcaggtaagacagtagttaacacgtacagttaagagatttggcactcatatttgatattatgttgtgaataaatgagaatttgggattagggttattaccctaaagtaagcagttatatggtcttgggttattactctagtgattaaaggattttgtaggtaatgtcactctatatatgttaagataaagaattgtgcgggtaaggcataattaggttagactcgataatcagaactgagataaacaagtctaaggccttattgtaaataga

SEQ ID NO: 38959 - DNA, 6427 bp, Cannabis sativa
  modified_base (46)..(60): a, c, t, g, unknown or other
ttcaaaaataaaattttaaaaaataaaaattttactttcattttgnnnnnnnnnnnnnnnaaaacaaaagtgttaccaaatgacacttatgctttttaaatgtaaatcatattttatggatatatacaataatttttaaactttatgtagttttttctctttgattttcaaaatattatttcttttaatttcaaaattttatataatgtcttttgattatcaaagctttgcactgtattttttttttcattaatcatcaaaacatcacacgttattttgttttcaattattaattgcttttattatatatattttactaacattttgtgttcaatttttatttcacaaaactttacactaatttactttttttttttaactgtaactttcattgataaataaatgaaatacaagttatagtgtaatcaaagttgaagagagtcattccacactaacttcttatcaagtcccaaaacttttttttgcaatacaatgagcatcaatattattatttctagagacaaagttaactgaaactttaagaaagtttgataaagaattacaaatatttctcactaaatcagaaagaacagatagatcatgattacagtttgttattttattcacaagattttttgaatctgaaaccacctttaaaactgggagattcactgctgaacaccatcttaaagcaaaattgagagccaaagcttcagcatgagttgaatcaaacaatcctgaaattggaatggccaaccctgcaatgatattatcatgatcatctttgacaactactcccaatcctaatttgcttcttttgtaatctattgtagtatcagtacaaagtttgaaagaaccccgatcaacaaccgcaggatcatgatcccccatggaagaaggttgagtgacatcaggggactttatttgagcattcctgtaatctttaagataagatcttaaccacacaacagtgttagaagcagacaaataatttttactaaaaagagtcttattcctattatcccaggttacccataaaaaccccaacacaaaacccaaatcatccttattcagagactcaaaagcattaaaaataaagtctttaatatcacaaagcttattattcatgtagaaacttttaaaaggagactcacaccaaaatttactaactctggaataatctagcaaggaatgtgtcacaatttccataagatagctacaaaatgaatagttagggctaggggtaatgtgtttggaaaagaggttagaggcagtgagaagaacatgatgaaaggcacgccaaatgaagtgcttaattttttgagggttatgcaaactccaaagagtagtccactattttttaactaaagggaaattcgaaggggatgggggaagagaagccactttagcataatgataggcagatttgacagaaaacacagccaaggaatgaaagttccatattagacaatcaggcttagatgtgtcaccaatcggcactagaagaatttgagaaatggtgtcatcatcaaagtgataattaagtttgtccaagtcccaattccccaagtggttgatgaaataattaatagtatttgagggaggatgaaaattattcttttagtgaacaattttattattaagaatccaaaaatcctctaaagttctaatagtgcacccattacaaactttccatacaagaccctttttaagaagatcttttccccaaagtaaacttctctaggtatatgaaagggaatgccctaaagaagcctctaatatggaattatttttaaagtactttgctttcaaaatggatgctaaaagagactgaggattagagaaaattctccaagtttgtttggctaacatgacttagttaaaactaataagtgatcgaaagcctaaccccccaaaaaaatttcagttacaaagaaaagaccagtttttcaatgagttttaaaaattttcccaatcgacccctaccaaaagttagccataagactttcaatttttttgacaaatagaaacaagaattctaaaacatgacattacgtaggaaggaatggcttggataacagcttttaaaagaacctcttttccagctctagagaaaagcctatggttccaaacattgagatataaagacatcctatccaggagaaaattgaagttaatctttttggaacgctcaaagcaaagaggaacaccaaggtaattactaataaagggcttaggtttcagccttaaagtgatataaaagaaatccaaaatactgaaaggggtataaggcaaaaaaagcgcagacgatttagagtagttaacctcctggcctgtggccagtttataaatatcaaaagcctccctaatagatttacaagcttgctgggtagcagtggaaaaaacaagagtatcatcagcaaaaaggagatgagaaaccaagggagcattatgagatatagatatacttttaaacctagagtatttctcctcgagcctaaaagcatgagaaagaccttcaaaacaaagcaagaagaaataggacgaaagtggattcccttgcctaataccccaggaaggcactatcgaatcagggatagtaccattaatgttgaatctaatagtaacagtgttaagataaatccaactaacctattaggaaacccaaaatgctgaagaatagcttcaataaaatcccactgaaccttatcaaaagccttttccatatcaactttaagccctacccatcctaacctcccatgctttttatggttaatggcatgaataagctcctgagcaatgatgatgttataaaaaataacacggttagtaagaaaagcactttgggtaggggatatcagatcacaaagcacaggtctaatcctattagcaatgactttggcaaaaactttataaaaagtagaacgcaaactaatgggacgaaagtcactaatatgggatgcattagaccttttggcaataagaaaaacaagggtactattaataggagccatgtccgcatcattattaaggatgctaagaatggcattacaaaaatccacccctacgatattccaattcttttgataaaaactagcattgagtccattagggtcagttgccttgactccagagatattaaaaagaacaaatttaacctcctccgaagtaaaaggctcagacagaaaagaaaattagctatcactaacccttctatccaccactgaaatgatatcataaacaacatctaagttaacgttttgggtgctgaataagttagcataatagtccttaatctcaaaccacagatctagaaaggaagagatcactttaccatcactaagattaagtgatcttatatggttattccttttcctggcagaggctttactatgaaagaacctagtattcttatccccggcttgaagccagtgaatttcggatctttatttccaaaacaagttcttacttatgcatcaaactatccaattgagattgcaagtgcctagcatcagtgagatcttcattggaaatgggaagattagagtagagagaggtgaggatatcatcaatatgtttaattctagataaagttatctaccgaatgcctccaggtcttaatagagttaacacaacaagtttgtttggcaataagcttctctaaaggattaacaacattactacccgtggcactggaccaagaattattaacagtgtgataaaaaaaaggctcgttaagccagtgattctcaaaaacaaacctccttttatgcttattattcatacaatcatcattaagaataaaatttaacactcaatgatcagaaccataaaaattttgatgctgaaagggtagcattaggaaagagatcaaactattttttggaagcaatggctcaatcaagacgctcaaaaaatgagctatgcttcctagtaaaacgattaccaacaaaatagattggctgaagatcaaactttttacactattttacttgattttgttttttcaaactattataatgtttttttcctttaaacattctacatcaaacttcatttatttttaacttaaacacgacatttaaaaagtaaaatataaaatccaaactaaaattaagcatcacatgtaactataatatagtatagattaaatgtactcaaaatgatttggtacaatacaatcttagttggctcattctacggtcaatttaactactcattctagaatagaatgttaattgaagaacttattacttcatttaagatttctactttttttaaagggaattcattatatgcaaattacaaaggaacaagcgtgtcatgacaagcaacaagggaagaccttccattctacatgcaaaaaaaaagttaatatctaaagcaatcttagaccttaagtgagaaagttaaaatatgtatgctaaaaacaaaacaaaacaattctaagattgcaacaataagaaaaaatctcagctactaatttaaacaatacaaatattgttaatgtttgatatacaatttgactacaaccgtgcaacgttattataacaaagttttaattttaaaatagttaacaaacctacaaaaattgattgctaaatttcactaattactatattttttggtttatactttaattagaaaattcaaaataaataataattaaaaataaaataataaaataactaaaaaagtaaacagacaaacaacgattttaatcagaaaataaagacctagagcattaatttttctattttaaattatgattctcagtttaccaattattctaatttattctataatttgtagtttcaagaatcctaatatagtctcttaacctctctcgaataataataaaattaacttaattaactaaaaatatatctttattcaatgttaatcaattacgtaataataaagcaatatgattctctttaaatgaaactcatagaattagtgaaatctctcaatcttatacttttcctatgccatgcaattctaaattcgattttagatcatctctctcaaatttgctgttaaatcaacaccaaaaaattactatttcaacactaatttttttttttcaattctaaccacaaccctaaaaattacgccaaattttatattcttgattattttattattttataatataataagaatattttaatactaaatatatataattatttattttttcttctttaaagtattatttaattattaattttttataaaaaaaatagtgtagtctacaatgtcccactaaatttggtagacacgggagacaaaactatttatgaggatagatttagtgtcccattagagtaaatatagtgtgaaactatactatatttgatgttttagtgtcctattggagatgatcttagaaaaaacgcatcaaatatattaaaaaatttaaaaaatatatattaatttatttaataattaactaaaaatgagtgtataaatatgcactcttcaaggttaacataaacaattagccaaacaaataaataaaattagaaaaatacatgtaatactaagtgagaaaaaaataagaagagtaggttaaaggattcaattcttgtggttgagatggtgtattcattttctagtaagtgttctctgaatctctcgatattaaattttaaattcttgaattgggtaatgggaaacaattaataaaccatcaagttcttgtttgcattaaattaattagatccataaatattttagtataaaaaatattattatgttttaattaaaaagaaaaagaaatatattttggcttcaaccgtagattacgatggtctaagattctgtgggtttgatgtgagtgtgactgacccactcaccaccgcctaatccaatcacatgcactcctaattaccatattgaccctacccttcaacattcacatatatccattttttttcttctttttcactcttctagtttttattggaccaatcattttctcaactagagttttatgtagattcttttttacataattgtttaatatgactatacaatttagaatatttagcctataattttaaaattattcaaaaaaatctactatgaaattttaagatttaatttccaaactacaggcacccaatatccaatatgttttccttttaatacaaaaaaaaaaaaaacaaactagatgcaccaaatatttttaccagtcatttttgatgattttcatatctttttagtttattccatgatttgatggtatatatatggtacatttaaaagcctagtaaataaaaacaagaaagtttggtattctttactcctaatctaataacatgttattatatgtgcatatattttgaaccatatttaggttcaaagttttaattgtctaatatggtaggaattatgagtaaatttctctcccccccccccc

SEQ ID NO: 38960 - DNA, 1306 bp, Cannabis sativa
tctgtacgctgaactttccaaaggtcaaagccccaaggtaataataataagataacctatgtataaactataaattataatgtatcatgtatatatatataaataatttctgtataattattattgcagtttatggtatttgcctgcggagactctcgggtttgcccatcgcatgttctagatttccagccaggagaggcttttgtgattcgtaatgttgctaacttggtcccaccatacgaccaggtagtttctctattcctttcttttcttttggatctaaaagcttaattagtataattagatgtaggtagagtagtctgtagttattatattgtcttcaataatgtacaaagctaatgaatttggtttttgttgcaacacagaccaagtacgctggaactggatctgctatcgagttcgctgttctgcatcttaaggtactgaattaattattactatctacaaccatgttttgtttgtaatggccactgtttaattattttgtttttttggggtacgtatgttatatgtgcaggtgagttacattgtagtgattggtcacagtgcttgtggtggtattaaggggcttatgtctatcccagatgatggagctacctccacgtaagatgacactacttgtataaatatatacatacaaacataagctaaaataaattattaatattgatgaaatataaatatgcagggacttcattgaagactgggttaaaattgggttgcctgctaagaacaaggtcaaatcatccttgggcagtgcacctttctcagaactctgtggatgctgtgaaaaggtaatcattttattttatttttatagttttttgattaattattattattattattatttaataataatgaaaatgttgattaattattgcaggaggcagtgaacacatcccttggaaaccttcttacctatccttatgtaagagatggtttggtgaacaaaactcttgcattgaagggtggttactatgactttgttaatggaacatttgagctttggggacttgactttggcctttctccttctgtctccgtatgacttcagtactacttcatcaaccattatcaatatcatcactatctgcaattatccatcttcctttcctaatttctatatatatatattttaattactttaatttgttcctaaaaagaaaaatgtatccaagtgagagttatatggggtttgcatttgcaatcaataataaacttggaaagagaggccctttttagtggctctttttctttttttcatacaaaagctttctttctt

SEQ ID NO: 38961 - DNA, 3942 bp, Cannabis sativa
ctttatgccaaaccccttttatctcttttttttctttttaatagaaaaaagaaaagaaaatatgcattaggttatcgagtactgtgcaagtaccacttttaaactttgtttttttctttttgcaaggtgaatttcctaaatttacaaaccaaattcctatcttatcttttgcctctttcaatttttcattttttactaagaaaattaagaaggcaacgtttgtggtccaaactccaaacaattaaaccgaacaagataatactgttattatttcctttttttttcattaaatatctcaaacaacaaaaaagaaaaaaactaatatatatgataaaattccaaactaaaaaatttaaaacctatttcacaaacagattacaaatcaactataaccattatgattatcagcataaacccagattagaaatcctcgtccagcttgaaaacatggttaccaccatcaccattgatgctgtacatcacagaggccttttgatactctccaactctcttctcaaagaaattagttttaccctgtaacgaaataagctccatccaatcaaaggggttctgggcattgtagattttggggtaacccaacgcatccatcaatcgatcggcgacgaactcgatatacttgctcataagatcgccgttcataccaaccaaggcacacggcaaagcttcacagacaaactctctttcgatttcaacggcgtcgcgaatgattcccctgactcgttcctcgctcagcttcttcttcagaagcgtgtaaagcaaacacgcgaaatcgcagtgtaacccttcgtctcgcgagattaactcgtttgaaaacgtgagaccaggcattaacccgcgtttctttagccaaaatatcgcacagaagcttccggagaagaagattccttcaacgcaggcaaacgcgatcaaacgctcggcgaaagtttctgagccgtcgatccatctcatggcccactgagctttcttggccacacaaggaatggtttcaatggcgtgaaagagacgattcttttcagccggatctttaatgtaagtctccaacaacagactgtacatctcagagtgaatattctcgatagcgatttgaaaaccgtaaaaggcacgcgcctccgcaacttgaacatctttcataaaccttccggcaagattctccaaaacaatgccgtctgaggcggcaaagaaagcaagaacatgggaaatgaagtgtttctcatcgggagtcatattttcccattgggtattgtcttgggagagatctacctcctccgccgtccagaacgaagcctcggccttcttgtacatttcccaaatctcaggatactgaattgggaacatacagaatctgtcggggttgggagcgagaagtggctcttctgggtaagcaggcattttcgattggaaatgaagaaaaaactgaaaagaaagattggaagagttgaatttggggattaggttaattttgaaggtttttggctatggagactgagagagtttgtgtggctatatataagggttttggtctgcaaaaaaagaaacgtttctttttaaaatattcaattgaggcgcgggttatttaaaaaatttcagaagcttgttggagactgaactggaagaagggtaatttggggatttcaagttgtgtgtttgacagtgtggtccttctgatcggctctatgagtagttgtcagaggaggatataatggtcatttcacagatgttaggtggctatttggagggctatttcggtaattttgattgtaaaaaagtgggaggcttgtgagggaagctttgggtttcaaattggcgggagtttttagtagcgcgcgttgattgaaaatttgggttccaatttaatatacttttaaaaaattaaaattttgaaaattacatgtagttgtttttttaataaatttttgttattattatttttctctttgtaatttatttctttatttagaaaattggagcttaaatttttttgaaaaaagaaaatagagttagttagtagcacgagtttaatgaaggttttagaaggaaggacacacacgtgacacactctaccacgtgtggtgtacaagcacacgccatgcttaggcgcactgtacaatgtacatccacacatttttctacttttcttccttatcttctttatgttttttctttgctaatttactaatagttttgaaattattttatattttaaaatatacgatatatttaaatttgaagtagtaattatatgtaaatttcttgttattatgtttagtaaaataattagtaattatatgataacttaatattatgtaatatttaatttaataattcttatcattttacaataaatatttaaaataatttaaatttattaggaatattcaaatattgctcaggataaatttcaatagttatatttttaatgtaaccaattatattttgctgttataatatgttgtaacaggtcattatgtaaataagtttttatgtatattttaaaaacaaaatttgatatttagaattgtagtaatcataaaaaattatgcaattcaaaaaaattaattttttaatcaaattattaaattaagatctttttaaaaattgatatgtatatagatttgttttatatttataaatttaaatccctaatttaatataacacaaattttttaacaataatatttgaatatgtggaaaaaatctatattttgccacaaaaattaaacttatatcaattagaaatatttttttaatttaattttaattatgtttaaaattaaatttccaatatattttaatatattacaatagtataagaagattttttaaaaataataaaagactaaatttttaatcttttttatcaaatcatgacaaaaatatttactcatttaatttaaaataaaataaaaattaaatagaaacttaaaacaaatcatcaatcaacatgagcattagactaattccttacaaggaaaaaatattaggcaaattaaaatattattaaatcaaaaataattttaaaaagaactaaataaatatcaaaacacgtcaattaatatgaacattaaaaaaaaaatcttaaacgaaataacaatatagaagaagatgaatgtttagaatccacgatttcaaaagcacaacgacattaatagatttatgctaatttagaataattttaaaaatctgagaataaaatagtaaattaatttatctcattgagtggtgggatgggcacacattcctccgtcgactacacctgtcaatcatataactcaatttgtccatttatttgtcgcactaaagtgtactaaaataataactatataccagtttgtccaagttcatgaatagtgggagccatttttaggatcgggcttcggaattgaggagaaagttcttcggggttggatctgtgtatttgagaggaagaagaagctctttagtgagcatgcgtctttgtattaagagagaaaaaaaaaagatgatgtaatggggaaagaggaaaaagttatttttatttttattgttttgtaaggcgttaaaaaaattattaattttttattatctttaatatttttcaatttaggtcatatgtccaaattttttgatgtatcaaggggccgggttttgttgcaaatatatattaataatttgaatgcaaaaaaataaattaaaaaattaattgctaagagaaccttaattaataattaatcataaaatttaattagtgaatataattaaatttaatttttgaataaattaatcttaattagcattttataagaaaataaaatataataagaaatgaatagtagtttcaggtaggttataggtaatatattaattctttaattaatcataactttaataataattgattaacgtaactatggtaattatatatttgaggtaaccattaaatag

SEQ ID NO: 38962 - DNA, 3096 bp, Cannabis sativa
  modified_base (1215)..(1216): a, c, t, g, unknown or other
atataatgatgaccacaactttaaataatcgtgatatacaaataatatatactaaaagtcaaggtaagtatttgcttaaataataataataataataacactataattttccacaacagtaccactctatttctttaattttgtaataatttttttttaatgaaagcaatttaaagtataaattttaatcctcttaattataattaattaattaatctataatatataattattaatactaacataaatttagatgatatcatttcataaattactaatttttgttatttgaagtgagttactatttattattatataattattttttattataatttcatgaaaaattaaaatagccgcgcaaagagcggttatattgcctagttataagtaaaataatattataaataaaacattcagttctcaacataactcataagtttttcccaacacactttttcccaaaatgacctgttttacaaaagttcccaaaggtctgctttcagtttacatgcatttgcctacaatgaaaaacaactaagtcttatatagtaagtcaaccttatagacaaaatataaataatatataatcaattcattactagaaaataattacagagaaatcacaataaaggtcagacaattcatcgatcttatcatttacttggattaacattaagacatgaacaatttctacacctatacataaaaagcgcaccacctaacaattttacggatttggtgaccatgagagcttccgagctcctctactccataacctaaattacctataccattgcattacaacatagcctgggaaactcccgttaccttaaccttcactaccaaaaaaaaaagacttatctcggcagctctatctcagcggactcgcgtgtgggtatcgagataggcctgaatttttttttaaaaaaattttgagcacccgccgttattgctattttttaaaatttaaaatttgaccaatctcgaccagcgaatgtaggcccactgttattggtccagcccatttctaccgtggttaccaataacaactggtctatattggcctgccaagattggtcaaaaaatagcccagcccgccccttaacctccctttcatcttctttccgttaatcaatttctaaccacctctagtttcttcctcagttcgaaaatggcagtcatttttccggcaatgagtggagtagcccatgnncttatatatggctcaatactttacatttaatccatgtgggacaatgttctggagtagcccatgttcttatatatggctcaatactttttcatttaatccatgtgggataatattctccaatacatcacaaccacttcaaaaagaaaaggtgagcttaaatatatactattgatttaatttttttttttatatatattctcatcctaatagtttttaatttattttagtttaaacaaccacttcaaaaagaaaaggtgagcttaaatatatactattgatttaatttttttttttttttatattctcatcttaatagtttttaatttattttagtttaaaaaattagtaaaataatgagatgttagcttgtatttgaatgttttagattgaaatatatttgggttagcttcatacaacataaaggaagtttaagaattgattggagcttcattttggtgatttttgattttttttctttatttttttggccgaaaatggtttttttttgtgccaaaaatggtgttttttcttcctttcagtaaaaaagttataaaataatgaaattataacttgtatttggatattttagatttaaaattgtttggctaaagtttcatacaacacaaaggctatatgggtgacaattgcttagaggtttatttgggtgagtttgattttttttttctttcttttttagctgaaaatagctattaaatatgtcaaaatagttgctttgttttaatgttgattttaaaagtttatattttctttaaaatttgtaatggttaagtatatgatttttatgttctaagtatatattgtagttatcatgttagtttaaatagtaaatatgagtatacataattttttagagttggtttatatggtggatgattgatatattgatgttgttgtgaataatttgtttggtaaaaagttttgtgcataatttggtaatggaaatagcatatgtgtttgttggtatttgatagtagagtagagaaatatgtatttatgtatattgaaatgtgagactagtggaatagtcaagtaaaactagtgtatattattaatggtcttgtaagttttttttaattttttttttttaagaattcacaattagttattaattttttttttaagttttttttttttttaagtgttgtaatatatacatagatataaattagttcaattttattttgcataattgtgtaataattattttagtgtaatattaattttaaaagtttgtattttactagtttattagctaattagatatgatacaacttagaaattttttaaatgttggatgtgtagaaaatttaaatataattttttttttttaaagaaaaggtaattgtgttgattaaactttaagttgtaatatatactaactttattattttgcgtaacataaaattgaaaagtttagtttgggatatgtacattagtgattacaattaaaaaaaaaaagttttatttaaatagtttatgagatatattgtgttactaaaactttagttttataatatgtatgtggtattattatatttcttgacatattggataatatagtaaaactttaatattgtagattgtggatttaattagcaagtattcattttacaaattgaagtgaagtttgtttggtggttcactgaaaggggtgtgtacaatcactcatttctttacttaacgacataatattgttcatcttagaagagtttgaatatcttaaatattcatctatactgaagtaggttttgagattaagtgtgtgttgcgataataatggaaggttgaaacttgtgtgttgtagtgaagtagattctgagaaatttgtgctgctgcggagatataaggtaaagcttact

SEQ ID NO: 38963 - DNA, 1736 bp, Cannabis sativa
tacgggaaatattaattacttggggcttccattgtttagatcgtgccagaaagatgttgacttcaactttattctgaacaatttagtgacaaaactccatgagtggaagttgaagacgctgtctaaggcgggtcaggctacattaataaaatctattggactcgcattacctgtttatgaaatgtaaacgatgaagctttctaagaagctgtcctccaaaatcgatggtatgactagagatttttggtgaggatgtgagcaagggaatagaggcttgtatttgaaggcttgggactacttgtgtctccccaaatcccagtgtggccccaatctctgaaagtccttggaaatgaaccatgcctttttagctgagtggggttgggccctctttaatgagaatgagtcgctgtgttgctaggttttaagggctaagtacttgagaggtaatcccttcttaaattactcttatagaaactcagattcgtggttctagaagaacgtggtgaaatctagagaagtacttaaaaagggtgcttgtaagctaatctctgatgggaaggagacaaacatatggactgatccgtgggttatccatggtgctaatttctaccctaagttgattacttctcagcctgtggagctggaaaggattgcaaaccttattttggataatggagagtgggatatcccaaaactttagtctctttttgatcaagagactattaataatattttaaaaggaggtaagccttgtgcgaatggtaggagtagatgggtttggaccaaggaatctaatggattattctctaccaagtttgcctacctagtccaagccttgtatcgcccccctttgtgctctgtatctccagtctgttggagcaaactttggaactctaaagtgttagagcgacataaagtcctttagtggagcattctttctaatgctctttcggtccgtgctcttctcgccaaaagaatccatatcgaagatgactcttgccctatgtatggggagagcagggaaacgatggaacacctgaacctatactataactttgcgttccacctatggcgttcctctccttgagggattatgtcggtcgctgagtccgaggtgagaatgtgggactaagtcaaaattctttggaatgtgaagtctagaggggttgaaatggatagactttttctctatgcctcaattatggtggatacgatttggaaggcccgaaacgaaaaggtacacaacaattctttgagtaactttaaatagtgtattgactctattaatttctgttacgcagagtatgggtctggtttattttccttgccggaagctgctgtttctcataggtggaccccctctggaggataaatcaattgtgatgtgaaagttggttgcggtttcatgtatggtgtggctttggctagggatcacacgggttctattttgtgggtggccactaacaagcttaacttcactgatcccctgattggagaagttgaggcttgtcagttggccatggagaaggttgtgcttatgaaacacccttttgtgtttgttaagagtgactcggaggtcaaggcgctgcatggaaccacatccagttggattattgctaactatattcaccattgtaatatgttctctaaggtttttttgagttgtaattttttctctattccaagattttgtaactttccagaataatattattggcatggttgacccgtcaatc

SEQ ID NO: 38964 - DNA, 2904 bp, Cannabis sativa
acaaacttttgcatcttccgagttaagttggttagatgagttgctatctttgaaaatccttcaacaaaatgtctgtagtaaccagctagtccaaagaagcttcttacttcactcgtagtcttaggcgctggcctgcttttgaccacttcgatctttgaagcatccacttcgaatccatctttgaaaactatatggcctaggaatgtcaccttctctaaccagaactcatatttcttaaatttggggtaaagttgggtcttcttaagtcgattcagcgtgaaccttaggtatcattaacatccatccactggttgaggtacagagaacgtcatcaacaaatttgacaacaaatttgtccaccttattttgaacactcacttcatctttgggtgtttgactaatttaagaaggtgtcacaaatattcttagtgcctcgcggtgttttgggtgccgctttagatgctaaaatcattttgtacttcttcttcttggtgtctaggtttaaaatttagtcccgtcatcaaaatcaatattgcttattcattttaaaagcgaattcctaagtagagaaagaaaatatcttccttattcattttgttgggttcttaatgcataaagaaaattaactttggtcataagagaagtattcacttgtaagaaaaatctctatttatttaaaagcataataaatctctacttacataatcactagattattggaatatgaacaaaactcttgtccttggataaaattggacaagctaaacgaaactactaattatcctccacgcatgactcggcttcggattcttcagggtcttcttctcggtcctcttcctcagaatcgattgtcatttctacatttgcttggattggtgttggtatattttcagattttgaggctaacttattgatttctacttcagaatgatagtctagtatgtcacctttggtttatcgatacttattgtgctttaatctaagtcctcgctcttcgacactatagggtaatttggttcgttgtacccttttgacatttccccatcttcgggttcttcacttgagggtaatctagttcgttgtacacttgagggtaatcaagctttttgtacactttaagcgatagaatgcttttgattttcgattcctcaagatcttaagtattatttcatttgacaccttaattctaagagatatctcctatatctgcaacaatttatcctttaactatttagtaggaattaacataagatttatatttttatatatatttaccagatagaataaaatttctttatttatttttggattccaaaggataataagctaaagaagttacactaataattctaactaaagtggagccatactaaaaccccttattacataaataaataaatacatgaaataaaatacagcttcactattttaatcttttatgtttaaccatttctttaacatatcttctataaaatctttatagtcgagttctaaatacaccaggtttgacaagattggtaacttttgaaggaattcagacttgacaacattattggattgataatatatttcttctttagtgccattacaatgatatatggtgtcagtaattttgtaattttgtattgatcctctaggttaatcataagtaggttatatctttcggtgtcatctatcctgacatgccctagatttttctagttctcttagactacgttggacatgtggcatattgagtgcgtgcatcagggctacatacttctcatgtgactttaataaacagttctagtgatatattatcttatcaatccctcatgtatttttgttaattctattaaacactttgtcttcttcatgcatgggtggggtcttgggaagtcttgttaaggctttaatgtgcctaacaatgtgttctacttgctctggtctcttgatgttggagcttagttggttctagggttctaagaatgaacagaaattttgaaattactaaaatgcacataacatatgaatttgcaaaaataatacttacttggtagtgagcggagtctttttagttaatatctgtgactcgtgataacgttcagggccgatataatcgtggctttgataccttttgtaatgttctcatttcaagtcttcattgggtccttacactcacaaaatgatggctcttatagacgcgtacgtcactctaattgcttgttggaatgatgattggccctacaaaccaacacgattacttccaacgtactttgtcctcactcacatgtttcttaggaaaacttcccacgaggtcacccatcttgagattaacccaagtcaagcacacttaactgtggagttctttcatgatgggctaccaaaagtaagatgtatcttgttgatataggtagtatcaatcattctatttaagcctttttcaattgtgtagtcgcgtacctacacaatctcaaaatcatcacacttgacatttttcaggcgatgtaggattgtacagcttacccgatatttttttgtacgaatcacaagactaatgactgccacaatcacccccttacgagatctgacgtcctcatcgaccacacttttggcttggtcaatgctttgatatcaccccatacgtacacagtcttagaataatcacacttgaccttactcaagcgatgtgggatagtacaactcctagtctttccttttgcatatcacagtctttagtatggactcgtgtattagaggcacaattatattagtctcgaacgttcttgagagttacacatatcggctaaaaatgctctgctcgctacccagtattattgatgcatgttcgtatgttatatgtaatatccattatgtcgaaaagggaaattttgccaatttattagtgaagatgttatttttgtt

SEQ ID NO: 38965 - DNA, 3518 bp, Cannabis sativa
atatagggatatttactctttaatcactctttttacggagccaattataacaaccttccccctataaatagtagaggcattcacaaggggaagagacctaaaatgatactcacgcatctaagggcactttgctaaaagatattctttgtaaacactttgagagatgtagctagaattcactctgtcttccttagtgatatgcacggtattatctcacaatcaatacaaataaaagggcagtaggtcattacccacatacaagggggtcgaacctctataattgttgtgtgttcttatttattttctattactaactccttattcgtgattaaggattatttgactccgagtcagttggctatttttccagttaatattttttgtgctttcattgagagcttcaaacttcgcaggaagatctcgtctctttttcacctggtaatcacccaccatggtcctgacaaggaggagtgagtgtgtccatagagcctcaagatcccatggatgtggatcctaatgtccaagctccaccaactggtgacaacccagccaaccttgcctggtcacctcgagcaaatccatcagcagggtttagacccaaaggcttactcaatgtcgggcatgatccaacaagtaccaagcaagtcctgatcaatgctagacaacttgcccaaagtaccataggggttctcgtgacaaggcctaccccccaggtatacactagagagaaaatgggccaagggttggccaacctggtatcaacgaatcccaagttgacttggatgattctgagctggccaggctgagaaaagtcatagggcaagttcagggtcatacaaacatcctccatcatgaacaagaagaaacacgcgctactgtgaacgatgctttcgcccaacagagacgccaattccaagaatggatggatcgccatgtcgtgatcatccaagcccatcagtcggagctaaagtgtcagaataggtaagcgaatgaacttattagacggttctatgaaagggctgggtccagagtagaagaaccaccactcataagggacccccttcgaggaaatggtcccaatgtcttggaagaaactcaatgccctagggatcatgggcaaacctcatgtccagtggagccaactgcatcccaaacaatgcaacatccccatcaacccaatgattagcctaaaagggcgtatggcaagactaaccaatttcaagacctacctagagacgaaggaaaaagggaagatatttcaccaaggcaaggatggagtaggtatcgcagtggggaatcttaccccaatctcaatgaggaaggggccactagccatcctattgatgggcacactaactggagatcataataacactgggcataataacaacgttcctcccataatgctcaaactaactctaatccaaggcccaaagaatttgtatttgatagagtgagtcctagcttcgatagagatctacaaaatgacttaaaccgaagaaatgctaattgggacggaaatattcagctccgaaataaccaactcccttttaacccaccagacaggctagccggacaagggctggtcgagttaatcctacagtgcaagcacagttggatcaactcaagagcctaatacaaggcctatcctgcccaaagctttctaacctagaacttgacaagactcgaggatcgtctttctctacacgcatcaatgtgttgcccctaccaaccaaatttcaaatgccaaattggaaaatgtacactacgaaagaagatcctctcgcccatatcaaatactttgagatccgaatggatttgcgaaatatgatagatgatacccactgtaggatttttccagcaacgctatctgaaactatacaatagtggtacttcaaactaccctcaagaaggtttaattcttgggacacattcactactgagttttacacgcaattttcatcctctaaacaaataccgtcccaactggatgatttagttaaaataaaacaaaggtcaagggagcctttgaaagactacatctaaaagttcatgatcgaggccacaaaggttaaaggcctgacggaagaagggcaatatatagccatactaagaggtatcctacctttgagtgacctttggagggaccttaggaaaagatcaaccaaaaatatgagagagtttttagacctggctgacgattttataaaacttgaagaagatgtttggcatgtacaaattggcggacataaaacaactactcccagcaacacacctgccacacttgggtccagtaataccgcccagttccaagcgaacaaaaataatggaggaaaacaaaacaatatggagggaaacaaaacaataatagtttcggccaaggaaatggaaagaacgggaaattccataatctccttacacagcaacaccctcgggaaaaggaggagaagttcacatgcttctccatcctaacagacaaccctgatgccatccaaatggctacacaaatcatgattctatataagaagcccccttcgatgaaaaaatacattagtaatagggatccaaccaagttctgtcgattctataaagatttcagccacgacaataatgagtgtaataacttgaggaagagatcgagttcctgatatgaatgagcaatcctcacctacatcggtatgttcaagttgaccaaaaccaaacacaggttcagcaaaataacaacttgttgccctcaccaactgctggccatttacaagtcatcatcggtggaccccacattgttggggactcaaacaaagcattggaccaatatgctcgacctctttgtcatgagcaaagaaatgaagtcctacctgcagaggaaagaagtcccaagcatctaaagttagaagatcccgccatcaccttcactgaagaagatgcagcccatgtcgaatttcctcacaatggcccctactactcaaatagggaatatgatggcaccatgctgcatgatggatgatggggcctcctccaacaccatctttaagactgtgtacaaaaagatgaggcttaatctgaaagacctaacaccctatacacagttcatgtatgagttctcaagctaaggactggctctttagagtacatctgattgccactgacaaatagtgaaagttccgcacaaaagatagtcatgacccaattcagcattattgatgtggcatatgcattcaacgtgatgatagggcggctagctctgtatgacctgagagcagtcacttcagtttatcacttgtgcatcaagtttccaaccaaacatggtgtagagtgcctaagtagagaccaatagtctacccaacaatgttataatatcactctgtccaaagcaaaaaatgaagacctacctgccaagagctcaaacagtgagtccgaccaagggcattgaaggttcgctcaaggcgaggagacacacatagatcctcgctttgggaatcatgtgcacagctttggacttgtagaggaattagatgaat

SEQ ID NO: 38966 - DNA, 1765 bp, Cannabis sativa
aaggtggctccgactcttcctcaactgaaactcaaggcagcttgactcatccaagccgatccagccgctgcagacaaatccagcccaaccacctcagtcgaatcaataataactccggccaacctccccaagcgtcgatccgtacctgcattaaacaaactcttacaggtattgaatgtttcctcccttctcccctgttcactgtcaaatcgaatcagagatttggtttttcaattgagcaatttagataccaatttggtatacccattaaattaccctttgacatttctaatctgaagggagttttagtttttgaaaatttatctatacaacctcttctcagtaaagccataattcctttgctcaaatagatccaaatgtctcattaatacccgtctgtgtatgtgttctgcctggtactagatgtaaatcttatatgcagtacctctgtttaaacattaatagcacatatgtgatagttaccaaatttttttgtatcagccacaatgagtttttactatataaaggcaagctattcttttggttcctcatctgcattctaatcatacatagaccatgcattatctcatacgatatatatattacagtctataacctcatctgtactcagtatcaatatcctcacctctccattatcttatacgctatatatattacattctataaccgcacatattcccctccctgtctgctctctcttcacacacacttagtcacatttttgcatattcatactagagttcaacctttgctttttatcaatctcatgtgttccctggtttggtactgtatatttttcactttgcataacactttgtctctaacccaccgctgcatcactcatcctccgttgcaagttttcagtcatcatcatttcactatcatcttatctccgtcccataattgctctatttctggtttttctagttataactttcaaataaatcttcatttactttctcttttggtttataagtattcagtcagcataacatatttctggtccattaataatcacagtataactgttccaatatcccaaaccctccaccgtatcatattgtcctttctacactgcttaattctcttgaccaatatcatggatgagttaacaaactcactgtctgttgctcttaatctcacagaaaccgagtgcactatccaaacactcagtgagcctaaccccacaaacacttccgagtccgatatacagtctctccctttctaccttgttgttaaggttcacacggttaaatcctttaactgcaaaaacttcatggagaaaatgactagagattggaacaatatatctcggaaccccgtggttatcaccgatcggggtaatggcctcttccttgttgagtttggttgtgatgaagataggcgccaggttttgctacaacaaccttggacctacctcaaccaagctatcctcatggatattccaaattccttgggtgtccttaatggagatagcttactcaaaatacccctttgggttcaagtgttcaacactccctttcttaaacgctctgaagagctggcggttcttgtctcgtcatctctcggccagttgttggaaatctaccggccctctttccgggaaacttggggaccctactttaggattagggtcatgtttgatgttgctcagcctcttcctcgccgagttcccgtccatttcactggtattaacaaagttgtctggcttgagctgaagtacgagaatctccccgacatatgt

SEQ ID NO: 38967 - DNA, 2762 bp, Cannabis sativa
gatcggatcggataataaaatctaacatccaatatatgattggatcggatctgaataggcctaaaaatattggatgtgatccaataaacacccctacctctaactattcataaaactcgagttttgccaaataacaatgcttagtaacgagtacaatatttatacctggggccatataaccgtaggatccagctacatttgtccaaatggaggagtcagggatcaacaattgagctataccaaagtctgatagaatgggaacaaaatctgagccaagtagtacattgttcaaagacacgtcgcgatggacaattggtggagaacaatcgtggtgcaagtatgagattgcgtgggccaatccttgaactatctccacccttgaatcccaatcaagatttgttgagccatataatactttagaaagactacctctttttgcatattgatacaccaagtacatttcactttttcttgaaatgaacccataaagctttatgatgttccgatgtcggacttcggttagagtttgaatctcattctcaaaactgatgcgattaacttctaaaatatcacttgaatctgacacgtgcaaccgcttaactgccaaaattagctcatgtgatctcaatatggccttgtaaacagtaccaaaacctcctttcccaatacagtacttgtcatcaaagtcttcagttgcctctacaatttctccaaatgtgaattttgcttccttctcccatatgaatgacttgttcatttcattattgttggcaccttttctactcttatccatcactttggattcatgacaaaatatgagaatgattacaatggtagtaacaaacaatattaggctacaaacaagaccaaagactaaaatgtgactaccattgctagctttgtttttttgcattctgcagggcttaagtcctgtagcttttccacacaatccaagatttccatcataaacacattttgatgcattttggaaaacaagtccagttgggatcggacctgtcaaattgttgtaagaaaaatttatgtagcttatgcttattaggtgggaaaatgattgtggaatactacctgagaggtggttacgagagatgtcgagaatttctagcattgtaagctttgacaggcttgaaggtatttctccaacaagtaaattgctgctaagatccaatgcataatgcaaggagcccaaatttccaagctctggtggtatttcacttgacagaacattgtggctgaggtttaagctatgtaaattttcaaagctaccaagccaatctggtatcttacctactaaattgtttgtcgacaaatcaagatactgtagcccactcaagtttaatagactcatagggatttcttctgttaaatgattattgctaagattaagctggtacaaaagtttaagatttaccaattgatttgggattggcccattcaatttgttggactccaagttcaaaacttgcaacttcatcaaattcccaagttcagatgggatcttaccagcaattttattatgacccatttgtaatgtggtgagattttggcattgtccccacatacttgaaacatgaccgatgaattggttgttgtttaagaaaatggaatcaagatgtgggtgaacaccaaaagcattagtgatgttgcctgtgaatcgattcccatcaaaccttactctttttaatttggtgcaatttctcaagcactcgggcaatggccctgtaaagctgttgttatttacactcaaatattctagattaaacccactacacaaaccttgtggaaactctccaaagaagctgttgtttgtaaacacaacgatgctcaaattaggactattcttcccaaagtctctagggatttgcccagtgaaattattgctaataacagagaacttctccaagttactaagactggaaatattaaccggcaactctcctgatagttgattagtgccgacaataaaatttgtgaggaattctagatttccaatcgctggtgggatgattccaactagattgttgttgaaaaggtacacatggatgaggtttttgaggttccatagagaagttggaattggacctatgagatggttacgagaaagatccaatcttttgagtttcttcaagtttccaatctttgaaggaattgaaccagtgaaattattgttagaaacaactaagtcctccaagttactaagcatggaaatattaactgacaactctcctgatagttggttgttatctacataaaaaaagatgaggtttttgaggttccacaaagaaactggaattggacctatgagattgtttttagacaagtcaaggaaggtcaagttcctacactttgatatgaaacctgggaatgttgaattaaagtggttcttacaaagaacaaggtaggttaaggaaggcatgcttgaaaaattagaccactcagaattctccaaattattatatccaagtgataagttccgtacctttggtagattggtgagctggtaaggaattgacccattaagaaagttgttgtagagattgagatattgaagctctgacaattggcttatctccactggaatttctccttcaaaatcattgtcacttaagtccaacaaagtgagcttggcgagattaccaatggcttttgggatcgaaccggcgagtttgttgttgttgaggttgaagatagtgatgttaaggaatgaggtgaagttgaagttgtccaatgttccattgagttcc

SEQ ID NO: 38968 - DNA, 2834 bp, Cannabis sativa
  modified_base (1837)..(1837): a, c, t, g, unknown or other
ttaagatgagttgagttttgtttttgtgtgaatatatatgtgtatatttagacatatgtttgatttttctttcttttaggaattcgatttattaatgtatcatttatacaagttcaatcaatactttctcataaaaaagtagaagaagactcatccatatttgtctcattttttttccttaatgtcttcatatgtagtatacatatatttttgccaatttattttatttaaatttatttacgagaaaattacacattctataaatttttataaattactgtatgcaagaatactttttttttttgggaaaaattcaaaacttaagaaaaaaaaaattaaaaaaaaatagaaaggtaactagttactctttagagtaaccaattacctccttaaagtaacctgtaaccttttcatgattttccaaatttcttattatttttttaaaataccatatttgtttaacttaaataaacataaaataataaaaattcttatttattaagggtcccaaaaattgatattgtcttaggtggtccctacatcctaagcgcattgtgataatataaataactgctatcatataaaattatgttgatgacactatgtcatactatcttttcttgttaaaaaaaaaaaattagtgtgataatatttataattaaaataaataatatttaaataataatgtgcgagattattattattataatatttttaaagatttttataccattgaagtgtttttaaaagtaagagtagagtgctaaaaataatatggaagagagataaaataaaatattatatttattgatgatgttaagatttttggcacctttaaaaattattacaattagaaatgctcttttggtgccaaacaccacaagagatgacatatcgttattggtcaaaattaatatcgaatctcacacaatttaacttaataaatattataaaaaactgataattaaccaatcgcaacacgtgatatttatattggttaccatattacacctaataacaatgctcaataaaattacgtacctgaatacgaagaaagttttcctgattatgagaagagttaaaaaacatggtagtgtagtgatcaaccatatctgcatttgcatctaacaatatttcaaggattggacgatctggattcccaaacaaattccaaataggatcgtttatccaattaacaactgaccaattgttaactgtgtcaacatcatatttccccacattctttgcagcacctgttcctaatgagagtacaagaagatgaggaggagaatcaaccaaatccctattatgttcttccctttttcttttcccttttcttctttctatatcaattttctttgccctgcttttcactacttctgttatagcagccatagtctacaatttcataaaagatcaaatattaatcacatgtactcaaaactaacaagatcaacttttatattacatagtattaatacagaccataatgtactaatacactccaggcttataaactaatacgtctttgggattaaactactgggccaagacaatcaatcatttcttattgggcattattgtgggacactgtcccacatggaataaatgataaaatactgagtcatatataagaatatggactacttcacttatcaccaattgattttaagatgaaacctctcaacctccttattctcatcatggtatcagagccatattccttgtggacatttgatccacacctatacaaatagctagtcttataaatatatattaatattatttattttaggttaattaaacttatactaattttagattaatttaaatatanataaatattaatatattatttatattattacattatgtttattgttattttaatatttaaagtatgttcaattttaatatttttaaactttatatttatttctttaaatttttaaaactttaaatattattttcttaaaaaagattaaaaaattattaagtgatttcatgtaatatatttataaaattttaaaaatacacataacaaaaataaaaataaaaaatataactaagtatactgataatgcacgtaacaataacctaatatacttaatatacttattgtctataaaatttaacctatataataaaaaatattattaatcagactctctaatttaccggattatttgctgcaatagctccatcaatcatgttaaattcaacatttttgttagagaacttataagcaggcaaataagttggtgctgcagaggtactaatgcaaatatctgcaagtttagcatccaattcttcattcccattattcacctgcaaaaaatcgaaaaataatttaaatgctcaataaaaatacacattaattaaaaaatattttaacaattaaattgtcaaaaaaaaacctaataattataaatatatattcaaatatatatatatgtgaaattctatatattatttatgattacagattaattatttgagctaatatatattttgaattggattaaataagtaatctaattaaatgagctaatcttaactactcttctccattatatattaattcccattaattgagtaagaactcataaagagaagattaatatacgaagactatgtacttacaatctcattttgtatcaaatatcatagaatctgttttttattttattaatttataaagtaatctcaataatttgatatgagttaagattcatatgtattttaaatttgatttctaacaaatatgagtattacaatatgtaaaattaaagcaattaataataaagagagggagaaaagagagagagagagag

SEQ ID NO: 38969 - DNA, 5312 bp, Cannabis sativa
gtgctagccgaatttcaggtataacaatttccccttaaaaattccttttcagtgaaaagttctttttaaatgattacgaagggttttttttttttttatcaaaatccattttgaaagaacacatgtcctttgattttggcgattttgtggtttcaaggcacatcatgagcattaattaaccatcttttccactttttccttatttctacccgttggatcaattatctccttaaactgacagagattaaccaaatggtataaaacgagaaaagaaaccacctttcatcatctttgccatttcaaaaactttggaaatttttctgcaaaaaacttcacccagatttctttgaagccttgcatgccatctttgtctttgacattcttcttgcgagtttcattcaatttgatttttgacctctagcattcagagagattagcatgttgttcgttccatcgttgtttgtggaaccgttcattgcgccaaaactcgacttcaaacagtaagtgattcatctctctctgttttcttatatgcttttatttcacatttttgggtttggtaactagtttcttagtttgcacctttatcattttatctggttttagagatttagggttgaatcatttctgggtaaattttaggctttaggcataccgtagaattttgggtttctcaaatttaccagcttctggtatgataaatttcctccaagaattgggattgctttctttttgtaacaatgtcccaatcttgttaagaagtttatcgtttagaaattttataaacagtgcctcagtgaacttgccatcctgtataaacccagtatttcaaaacctaaatccaaattagagataaatgatgcaaaaattaaggaccactttgtaaaaacccaccgagacgatattgctagtcgccacagacgcttcttgcaagaaattatagaaggcaaatgtcgtttcttgcgagatgctgcttggcctgaaccccccagtttgtcatctattcctttggctaggcctttaattttacccagagtcacgattgcttttgaaccaggtgacctgtattttgaaatcatgacttccaagccacgtaaatcaaagactccccaagaccctaatgtcacctttgaggctgaactaatcgagtcgaaggttcgagccattggagactacgtaggtaccatctcaaggacttgcgacattgaatacaaacgagactgtcaggttagatcagtggttgctggcgagtttagttgttgcccaccagaatgacttactcacgaagcatctgaggggactagtggcaaggccaatacgagtggctcgacaaggacaggcgcttggagcctcgaacacatcagggccggagcaactatccccctgcgaaactactttaaggacttcctcaaccaccttggaatttctccattccagttcgttcctatttcctacagaatccttgcaagtcttaaggttctgtacaaaattttaaactgggagtgccccactcccctggaaatagagtacctttactcagtgaaggcggttcctatgaggaagaatgctacaggggtttttattatctcgagactcacacaagtgatcataagatcattgttgggttgccaaacaagacccccttcatagatgactttttctggacaattggtctttccccaatcggcacaaccaccttccacatattacgtaagtgattacttgcctaagacttcgttaaattattccatgtctttaattctggctttgctaactttaattttgcttttgttttcgactgctgtctcaaaaagaccagttcctactctcgagatgcctgagcgacgtaggctcctactgggtcttccatatagtctccgatcggctgagttccgcttgaacgaggtcgacttgaggttcatggatctcctcactattaaggagtttaattgtgattacaaatatcccaagtactcttcttggcaacaggttcctgtcccagtcaatgaggaaactcatgactatgtggctcgggcgcactacctccagaacgtccctcgggaaaccaaagaaggatcatccagaggtaatcaatgtggttggtcacccacagtacttagggctgagcgaacaacgttagtgtcttttcgggatagtcgttataatttttacaccttgaatcccctcctcatagttcccattgcacataggtttgatagttggtacccagagttcttcgtctaaattagttgtaccgactcgtactaagggatagccaagcagtatggaaccatgctagacaggcaggtcacatagactcgagctgggatttagaaccaattaactccaatgacatattcaagatcacatgatgtagagattttagtggatattatagtccttcctcttcgtcttcttatgattatggtaaatcccttaggtgggaaataacctcccaatttccccttttacttggttttaaataagtgctaacacattgttttgtctcacagaaatgaatctcgaggacctccttcaatcttcaggcaagaatggaaagaaaaggttaactgcctcatagacttaatctgatgtcaacgtggagcctctcaaaaggcccaggaagacaactaccagtaagaagcgagcctcccaggctgttgatctcgaggtccctgaaactgagactcaggtttagacccctcctccggcccccacacatactaaagagcccattcccaaggcaaatcaggctgctgcctctttgagccaagcacttgagactcttcccatcgatgctggaagggccaacttcgagtacacaggggagtttggtgcagcctattggtgtcatttcaaggccttccttcccaatgagtgggacttaattaaaaatggcctcgtagacaagatgcttgacaggagtgtcgcccatggcctcacaataatttcccacgtccttatcgtttcacttttccttctaacaatcctcagacttatttatacattcttcgtttatttgtttttagcaaaccttcatatcctttatcgcccaacaccggggactgaaaaggatgaagtatctggaggaaaagatgcagaaggtgattggccaaggtgaggctgtgaccaaggaatggaatgactccaaggtggaggtcactcgcctaaacaaagaagctgaggaaatgaagagagcccacaaggccgagcttgaagctgctaagaaggaagcgaaggataagaccgagttatgccaaaaactttaggaagaaagcgagaaactctaagaggaacttaatgcagccaatgtaacacttgaggggaaagaagttgaaaccattgagcgatgcaatgccgttacacaacattccatctactgagcctggatggcaaatccagggatggatttgagtttcctaggaaaggccatgggagaagtccttgcttactgtgaggaagctaagaaggtagatgaggaagccgaggcagtagaagaagaagaagaagaagaactttcaaagtctcctaccatgtaggcttggtttttatttattcattttttttttctctaggaaaatggccttaaggccaagacaatggtttgccccttgtggtactttttgtaaagacaattttgcaaggttggatggccaactttactttaatttatcttttacttaatgcctcgtattttgcatttgaactttaatatatttgcttgtttgcactttcattcacaacttaaataattatattttcatcaaatttaaaatactttaagcatttccgttgctcaaattttccttcgatattatttaagtagttagtaattactatgtgcacgagcagttattatctgctatgcttttgatttgtgagcagttattagttctgcttcgcataaacagttataatctgttttaagcaaacttaaatatacttttaatgattcatcactttgtatatttttgattgcttatatgaatagctgggccttctattcatatattaggtttaaatatttttttcaaggcatcttggtgtctcgtttaatactttcttacaaaatgcgagtcgttcgtattcagcttcacatgtagcttaatgttgtttttatgatttatatctcatttacaactgctacttttgactttcctttctcgtgagaaaggttctttaatcaaaaactttaaaaatttttaaaaaatttaaagtagtgggtttgtaatatatcatgatattatgtatttccagatgaattctggttaatcatacacacacatatatatgcccctcaagtaattttaaagattgaaactttctaattacttgaaaaataattcaactattaataattgaagttcaaaaatattacataagaaatataagttacagcatcagtttactggtagtagggtcgcaaatgttccacgttccagtagttctttattagcgagccgttaagccgagctaatttgtaaaccccggttcctactatcgcattgatcacataaggaccctctaagtttggattaaatactcctgtagatacatctctcgtatgtgtaaatactcgccttagcaccaagtcaccaacattgaaaagccttttcttcactttcttgttgaagtatcttgttactcggtgttggtatgctacattagtaatttgcgactcagtacgtttttcttcaagtagatccaaggactatttcaatagttcttggttttcttcttaattataaaaatcttgtctgtgggtcgcaatattggcttctactggcaacattgctccaagccaaatgctagcgagagtggagtacgtcctgttgctgtcttctcagatgttctatgagcccaaagtacttgaggtagttcatcgacccatctacctttagcagggtccaacttttttttgatagtatccttcaaggttttattaacagcttctaattcaccatcgaactgagttttgttatcagacactatcttaatgggtattccaatcctacaaatcatgttcttgacgataaagtcgagaacttttttgcaggctctggaaactagaggttcagcctccatccattttgtaaagaagtcgacagccaccactacgtactttgctcctcctcgccctgtagggagtgccccaaaatcgatctcttatattgcaaatgggtatggcgaggtcatcattcttagtttcattggtggtacacgaggtataggaatgtcaatggggcgggtcggatatgatccgactctgatccgacctgatccagatcatatacggatctgccccgccccgc

SEQ ID NO: 38970 - DNA, 2305 bp, Cannabis sativa
taaatcatatccttaaattttttagacagttaaaaatttcttctgattgttggatttaaggagtttcgtctaattatattcaattttagtaacagacatttaacgtggcgattgccgattgtctaagtaccaaatcgtaccttctgaattttcacatttattaaattatgttccctgaactttcctcgacgtcagacacctgttagtataattaacggaattggactagttaaaaagaacttttaacgacctataaagttctagggccacaatagttacatgtcaaagtttagagtgagaaaatcttaaatagcctattaattattaagcctataatatatcttattaattatacaatttttgaaaaatgttgttatagggaggttacttagttagattgtatttatattacaattttttttttttcatattttttgatgtttgctctctctttttttaagaccattcgttcaacttcgttttgggccttgtatgaacaactttattgaaaaaaataatagtgatacaagctaaaaaatattatacatcccatgttcataaaacttatatgcaattattccaaagacactttgtattttaaactaacatatttcttgtaactttattttattttcattttgtgtatattatttgtgagagttcctagcactctaaattaaaataacttaaaccacatgatcttattttctatgaattaaaacacttgattttcttttcttttgctcactaaaatgaattccaaacaaggctagattatcttccatgtttcgtgtgggatgtatagtacttttttatgaacatgataatttaccgtattcataatttcaagaagaaaaaatcacattgaattaatttaccatattcataaattcttaggaattttctttgaatttcttcttattggtgtattaaagaagtttttaattgattatttaattttagttttattatgatgcctgttgaagatttttttgtaacttgaatttagtgatttgtttgtgtgtagttttataacttgtatggtagtatgtttatgtactcagtgtaacttgtttggtacatagtagtttattttggatttatcttaaaaatgacgtgagatagaagtgacactcgatttgctccataaatatgaaagataagttttcttcataaaataacatttggactaatttttaacatttaaataaaatttctcattttaatttgatattactattaggaagtgtgttaattaattttatatatttatcttatatatgtaaatttttttactcacttggtcattctaagatacaaatattttaaaaagataagttttattataattatctttcttaattttttactatatttacttgatttgatactaatctatatcttttcttttgtagatatggtggggaatagaaacacattttagatattttttctctgatattaaagttttattgtctaatttttcgaaatctctttcttatgtaagtcgcaacattaatattgcatctcatagattattttagcatgcccttagaacagagaaaaagtttttttagataaaatgaatctcttcacttttgcctttttgacgttttttctctaatctataacagttactctttccaaaaaagtttgtctaaaaatgttagtgtttcataattatgcaatgtaatctctcagttctcatgaggagttatgaaaattagagaataattgcgacccatcaattatttctaactatataatttctatgtaattatctaattaaccaaagaattctagtaattacttcaaattacaatccactccaattataaagtgactttccaaaccaaaaaaaaattgtcatggtaggatttatatccttttataaaacttttaattgttggattaatcatatatattactatggatccacatgatgacatgaaacaaatataagataaaaatctataaatagcataacattaaaaatcatttaccatattcatatctttttaccaaaaacaatattcaatgttttcaaatcttacacattacaaaatcttttatatattattatagcaagtatttaaaattgttgagaaatattttgtttttcaattttcttctaaatttacaattttgcccttttgaacaaaattattcttttcagcctctaaaagccaattctggctctatgcctcaatacaaaatatacaataaatatgaaagcactccattgccccattaccaatcacatggtgccacatgtccactatatgggtggtgttcatgggagaga

SEQ ID NO: 38971 - DNA, 2869 bp, Cannabis sativa
taacaaataatactcacaaagagtaaggtcaatcctacgagaattgtagttaagtacgttaaaattaaattcttacttctatttggctaaataaaacttgagagaaaattaaaatgaggaaacaattaaaaaaagtgaaagtaagaaacatgtacattagcaaaggaattaacaatgaataaaagttagggctttcgatttcaattgcatctattaattatggtttaatattattatcttcttattaccaatttttatgtagtagcaggtttactaaggtaatttatagtcttctcagatatataatctcaattacatacaaattttctattctcatgatagattaaacatgtaacagacattatacacagaaatcctataagctatctaaaccatataggtactcttgccctatatcaaaattaagttctatttcactatagcataattgacactcgcttctcagatctcgcatcaaaatcatagacattgaattggtgatcaggcaattaaaagttattaagtatgaatgaaatagaatacataaaaattgagggaaaataaatcatattaaaaaaggattttgtctatgaaatctaacaagaataactccggtgactgagccctcataacagactccaactcccaggtgacttcctccaccctactattttgtctagattactttgatcaatgctatggtcttttttcgaaggactttattcttttggtcaaggatctatagttgttgctcctcatatggaaagtctagttggagctctagggttttataactcagaatatgtgtgggatctgagacgtatttccgtagcatagagacatgaaatatgttatgtattgctgataatgttaggggcaaggctagatgatacactactaatttaactttcttaagaatctcaaaagtccctataaatctagcgtataactttccctttttcccgaaacatttaacccctttcattggagatactcgtaggaaaacatgatctcctagctaagttctacgtttcggcactctaagaggcaagcatcatggccttgatcttctatattgcctcattggcttgctaaactaattatggacctataagtattttctttctatagtttcatcctagtgaattggagatctacaattcctgccacgcaacatcttatagggagccatccctattgtactttgatagctattgttgtacgaaaactctatcagtggcagatacttaatataggagccttaaaatttatcacataggttcgtaaaatatcctctaatatcagaattttcctctcacactaaccatttttctgaggatgggaagttgtactaaacgccaactttctacccatggctcgctagacacttccccaaaacatggaagtaaacttcggatccctattcataataatagactttgaagccccatgtaatcatactatttcttttacataaatttttgaatattgatttaatgaatacgttattttcattggaaaaaaatgtgctaacttggtaaactgatccaaaactactgatatgaaatcaaagatacccgtggttctgggtaatctaaccacaaaatctatagtgacatcctcccacttccactcgagaagtgtcaaacgctgcaacaaccctgcaggtctttgatgttcaacctttatctactaagatctcaagcatctagtctcacattccaccacatccttgttcataccacaccataaataataaggttttaaatcttgatacatcttggtggtaccaagttgtaatgaatagggagtggtatgaatccaaaatctccattctaagttccacactgttcgagacacaaactcaggttttataaggtgacattttattacttcagactgtgaaatctttagcttggccatctaagatttcttcttggatcttcaccaattatgggtccaccaactgagcatttttaatcctctccaacaagtctgattgaaatgttaaattactaagtttgccaaccactagctcaatacctaatttaattagggcatctgccaattgaggtgagatcataatcgtgctaaaaacttgcttggggcctttcttaattagggcatctgccattacattggacttcccaggataatagcgaatttcacaatcatactcttcaactaactccaaccactgcctttgtctcatatttaaatctttctaagtaaataaatattagaggctcttggtgatccatgtaaatttcacacttttccccatagagatagcgtcgccaaatcttcaatgaaaaaaccactgcagcaagctctaaatcatgggttggatattgctactcatactcgttcaatttgtaagaagcataagcaatagccctatcagcttgcatcagaacacatcccagaccttgtctggatgcattacaataaatcatgaactttttttgatctgacggtaaagataacacaggagttgtgatcaatcgctacttcacctcttggaaaattgcctcacacttaattgtccatacaaatgactgattctttttaattaattatgttaagggatttgagatcttggaaaacaattcaacgaaacaatgatagtatgcagctaaactcaaaaaactttagactttagtgactatctttggccttggccaatcctttacagattcaatcattcccaaatcaaccatgatcccatccctagtaacaatgtgccctaaaaaggacactcgatagccaatattcgtactttttaaatttggtgtaaagcttatgttcttgtagttgttgttcatgctccacttctgattgagagtacagaagtgttgggttttatgcc

SEQ ID NO: 38972 - DNA, 4669 bp, Cannabis sativa
  modified_base (3510)..(3526): a, c, t, g, unknown or other
aactcagaaattctccttcactttctctttctctctacatcttcttcttctttcttctcatctactttatattatattatattattttataacactttaatttatgttgttatttttagttttacaatttattttttgaaaatcaacgtttatatttaaaataaaagttagacctcgtagtcattacaaatgatagttcctggtagaagaaggatcaaccatgccagtaacattgttagaaaacgcccatttagctacgttatgggcaacaaaattacagtctctaagaataaacgaaaaattacaacttaacaaaaaagtagcgagatgtttacaatgctatacatagttatcaattccccaattgaaacatgttcccttcagagtcttgataactgtctcgaaatcactctcaaccaattagttttataacttagtgttacgttatttttatcttatttagtattagtgtttttgttattcttagtttgtatttttaatatgttagcgtgttttaaatcatttatacttttgtgataaattttaatttgagcactaaaatgtaagattaatttttaaaataaattaaaataaaggctacaatgcaaaaaaaaaaaaaataaaataaaataaaataaaaataataccgaattgttgtagactcaaaatccaacattattagtggtgtagaatttagtgtgcactatttattttttatttttcttttttttggtaaatcaaaaagtgtaataatctaaacaataatttatacaacctaagagcatccataatcagaggaccactaaatctaagctctataatctttacatatggtttacaatgtattaaaccaatgttcttctctactagttatattctttggccgtatccacactattctatttttaataacagcttttactttagacacaattctatcacaattttcaatctccccgttccaataataaaatcacttatagaataataaaagcacatgtaattagtattcttatagagtactgtaggcattttgattactatacatctctttacataagacttttgctgtaaagcctgtaagcctccacataaactactgtgagaaacctaaaattgtatgaacattttaaattgtgaaaaataatatagagtttatacaaaaaaaattatcccagggaattgtcaaacaagcatcaaaaacgaaaagctattagaaacaataatatatattagagaaatgctaaaggcacctaactatgtgtgaatatcgttattggtcaaactaagtattgggtcctatataatttaatataataacttttagagagtatcgctagccaatcgcaatgcgacaagttgagaatgtgctaggcaccacaccagtgcctaatagcaatgctctatatattaactctttaattaacaaataaaataatatcaactcgtcgtggatagggcatggttattccatacactattatgccgattttatataattactataaatcaaatcgtatatgagatttaatattacattatttagtatatgggccacatcaaatagtattgaacacgatatagatatataatataggagaacactaatttaatattttacaagctcaattttttacgagttgttccgtatctgcgttaaacataattttagatttagttatgttataaagattacttgatcaaaattgaaccctctagaatttcattcattttgcaaaaacacaattttgaattgacatttaacaagcagcagaacagatatatatgctcaagtctcaacacgtgtcaaattggtatttttttacttatagcctctcaaattctagcttgtgtatatatattgtgttaaacacaagtgtgaaaatggtatttttcttatggaatacttagcctgtcaaattctagcttgtgtatatatatattgtgttaaacacaagtttgaaaatggtatttttttatggaatacttagcctgtcaaattctagcttctttatatatttaaagaacgagatcctcggacctcactccaagggtgttcctttgcttaacatatatacttagtgttaataagacacgtgtcgtagaaaaacgtttataaggattggtcctgtttatttgccaaaaaaaaaaagggaaagaaacaaataacataatcatctggagtgaaaaatataaaaataaataaatctactaccacaaacgtaaagttttactttttgataatagagatcctgttccatattttagggtctatttacttgacaaaatcaattcaacaatacctttgtcaatctaccacagacataaagctttcactaaagctttcactaaaaaaaaaaaaaaaagaaagaaagaaagaattgaagaacatatctttatctagcattataacaaagtcaaatacattacttgttacatgcatggtccgcatggacagataatagtgtgagtgcacgttcaaacaaaatgtggccaacttgataggttactgtggggtaattacaaaagtgtggtgtggaaaatggcccagatcgaacaaaataatctaataaagatggctttatcaaccaaagaatagaatggttcgttcccctcaaaaggaaaaaaaaaacaaaaatagaatggtccctctgtacgaaacgaattacataaagaaaaaaaaaatagtactgctactttgttattttgtagcaagtagcaagtaattttgaatcagaatgtgtaatatatattactattagtggttgattccattacataataaaagaaaaaaatagtacaactttcttgtttggtatagcaactagcaagtggtaattattaactattatcatattatatatggaaacgatgaatgggtaatattatgcgcaaatgatatgaatattgattatcatgccaaagaagttttgttataaataattaaatgaataatcatgacaacatattatgtatatattatgagtgtgagtcagcccattattcggttgtaaagtagagtcagatgctaacttatcaatatatatattggtagctttattatcctttataattatcctctctttttgtctcccaatccatgttcacagtcagcttgggcagaaacacaaatgtatatatatatacaactacaacgtcaaaaactcaaagatggcaaactaagctgctcaaaaatatactagcttagtattctaattacaaggagtgctgttggataccacaccgaaatatgcgagttgttggtacaagttattcgcatactaagctcgccgcctaaaatttagtcagtaaaaatagttaaactcagtttagttacaaacagaatccaattcaacactactcaaaaataacatgagtttaaaatattatgtcgattcgagactggttgctactttgtgttagtttatattaatgtgaaattttgttaaccaataaatgaacattttaaggtaataaataaactctaaaattaaataaataaataaatannnnnnnnnnnnnnnnnaataataataataataaatagcaagagagtttttaacgtagttttgaagtgaattcttcatatttcacgagttcatcttattctgagatttcataaatcgtatacaaaatacaaaaaaatattagtataattctcccttttctttttaaattggtcgtcctttgtttctcgagttctgttcctatttataaaagttttagggtgacagttattctattggatcttatccttgtaaccattttttaaacgtggacattctcgacgttttatatttacaacacatgggataataataaataatcgtcacaattgttctttgtctttatatattaccagttatgctgactatgcttcttcatcttgcaatataaataatcatctcaataattttattctgaaagatactttttgtgcctaaatatattctggagaatacttcttgcatccttctctaatgtcaaaaggggcaaatgcgaggcgctatcatagtgtgacaaagagataagttataaagcatgcaatttccttagtctttcaatatatttacgcatatgtgagtcaataagttacaacctcgtaaagaactcgttatctacactttccaagcattgtcattatgttatgtattctggttgtcacgagatggaccttattcgttggttatttatctagctcgctggtctcataaagcggtagttattattcatcgctcgcccttatctttaaaaagataagttcgaatatttctaccaattgtactttctgaggcgagtttattaaacatatttactgttttataacacgagatgatttattctctggctttataatatgtgtcattaccatatatttattgcttgaaatatgggtataataattgctccttaaaaagtgctttttagaacaaaaatgactttttaattactagagggtacgatcgtattttctatttttgaaagaaaatgcatgcttcattttggcagttcaatactttgaggtaaatatcatttcaacatttattattttgactttcttttcccagtagttcccatcactactggcagttcaatacaagaaatgtcactaccgccagcacatttttgtgctggcaaaagtttggtattgcgctggtaaaatggaatt

SEQ ID NO: 38973 - DNA, 1297 bp, Cannabis sativa
gataagttaatactaataaataatcaatgcaaactaaatttgttttatttggtcatagtgaattaaaatgatagcaaacaatttaaacatgataatacttataactctgtgtacactatattttgtttagaattcttatcttgttgtgcaatggtgattagtcaccgaatcaaaactttaaacaaatcccaacataatccattatttaacgtagacttatttatagtcattacaaatcttaaatcttacagaaaattgaaacagaaagccactattttaatccaaatttgacaagaataacatccttagaatgaactttttcagtatggtagcattctacatgctcttcaaggcattattaattaagaacattaattctcaacatgttaatctctgcttaaaaacaatgaatgaaaaacatcagcaatacaatgacatataccttttgaaaaatatatataatatgatgaaaaaacaacagtaataaatgaatgacaatattagtggaaaaataaatgaaacacaacagcaatgacatataccttatcaaaattttcttaaaacatcttcatttattccatcttttgcagaaatactcctacgcctagccaaagtatcatataactctccaacttcataacccataaacgtatatacatatatatatatatatacaaacataaaaatttaaactttacctatacaggcactaaatttgtcttgatagagttttccattaacttggtgctgataaaatcgcttcccaatcgatctccaagcatcattttccttcccagtaacagttctaccaagaaaacgaagacttttaaggcctcttgagagcagggttcttcttgtaatcatattggcacaaatcttctgtaacgcagaagcaaatctaggtttgtatttgggattgggatctcttttgtttgatggaagctttttcctccttttctccaaaagatgaaaaccagccctgaatcgcaataactctgaacgtttttgctacttcaaaaactgagtgaatagtggatctaacaaaagggaaaaggaagaagaaattaaaacagaaatagttgggttttcacccaaaaatagaaaaaaaaatagctgaaaataattaaatttaaaggagaaaaaaaaaacaaatgaatatatcatattcatagcaaaaatcaaaaagtttacagataaagaatgcctaaaatgagtaattaagagaagagagttacattcgcatgtgcaaatcgttccattgaaagctgtaatgggatgattctaggggatgagaaat

SEQ ID NO: 38974 - DNA, 5195 bp, Cannabis sativa
gtgaccctacaaagggaaaaggacggaggttcttgattgtaggttagtatcttgtgggacagaggttctaactctacgagtaacattgcttcgtagtcgtaagccatagtgaatggtgtctgctcggttgctattttctccgttgttcgatatgaccacaatacttcaggtagtttttcggccaattccctttggcttctttaagtcattttttatggtgttttagagtgtcttgttgaattcctcgacctgaccatttgtttgagggtgtgccactgtagagaaactttttatgattccatgtgtcgcacaaaaatctgtaaacatcttgctatcaaactatttgcattatccaaaacaatcttgtgcgaaagttcaaaccgacatgagatatttttcaccacgaagttcttttgatctagattggccttgacgtacttttgtaagtgcgggttattatttcttatcaaaaactcaatttctcgcttcagattattacattcgtttgtgttgtggccgtagtctgcatgaatgcgacaaaacttagatgtgtctcttagttgcatcctttttcatgggagaaggttttttgtattgcatcatagactgaattttgcatagattgtctctatgtcatctgttaggattgagaaggcagtaaatttagaggccttctccctggggtgctgctcggcattgccagtgaatttacctttctttctattaccctgcatgttgctgttgttagacctcttcccaattaaattcaaactgctaggatattgtagattctggacggacatcctcaccaaagtggcacgtggttgatttttcttttgcccgtcagtatccacacgccgaatagcttcttcgaccttaatgaacccatctacccgatctaggaattcagtcattgatcccatagttagccttttgatatccttccacaattctccgagaggctcgataccccccagtattacagccagtcttccttcttcagtcagccccttcacttttgtagcctcagtcataaacctgctaatataagctctgaggggttcctctggcattttctttacttcaaccaagtcttcaaggtgcgagggaagttgatgaaaggaggaaaattgtgcatggaattctgatgagaaggcattccatgagttaaaccttcctggaggcagtttgaagtaccattgttgggcgaattttgtgagtatggcaggaaaattttgcactttacatcacctcgtacccattgcaagtccatctgcatctcaaaatactttaggtgtgataaaggatcttcttttcttgtatacaccattcagattggcattttgaatttcgggggtagcttaagaactttaatttcagtggagaaaggtgatcctcgtgcccagtcaagtttgagatcaatgagttttgggctggtcaagccttgtactatgtttgtaagttgatcgatttatgcttgcacaagtgtatgaacttgttcggcctgtgtcacattgggatctcttagaactggatcttgggtgcgaatacctggttggatagttggtggaacgtattgttcgtccaggccccttctgcgatttaggtcggtcttgaggtcatgtgcgacacgtaacctatcaaagtctgaggtactaggtggcattggtgtctgacttgtttggccaataggttggcctgaaactttagtattagtaaagttgttggtatgtataattcctcccaaaggacagtctcgcaggatctggccgtctaccatttggcccacagtttggacctatggccttggattggacaactgaccgatgtgagtttgtgcgatatgcccagttgcatacccttctgatctgtccaagggaatactggatgcaatagccagttgttgattggtgacttggtaggcctttcttttcagtacagttacctgcctagtacgatcatcattggctgcctgctaagacttcataatatctatttcttggttcctccattttatgaattggcgcctctgttcggcaaacgcgagatttatggctgctcgaaggtcttcctgatcatgatgcaaagtgttattatgaccttgcatgagccctagtgcctctcacaaattttagagtttggtgtcgtccccaactggtctttgagtattagttgtggacggaacctcagtgctgggagtggaatgatcagttgtcgaactggtgtttctagcttcttgtaggcctggtgtgatcccagccagagggcaagtcactctgtggcctacatgtaggaggttgtgtagtgactgctcggggttcgtccctggtggtcctctcgtgtttctaggagtttgcacgttggcatctgtcaccattgggtcgccctgatcagtgaggcctcctcgacgggtttgtacagccattttgtttacatgtcaaaacttaagacgaaagacttgtgttttttctctcaatgaaagcaccaaaatgttgacctcgcttctagccaacgatagtgaatcaaataataaagcgattaagtaatgtaattaaaagaacgcaagaatagtaaagtaaaatgaccactagattttaaagaggttcggtctcgtgaatagggtaatagcctactccccttgtattgtattaacttgagagaaggaacagagtattcttcctcttaaaagctcttacaattgatctctaagtcgttttctctcttaaatctctcttttctctctagagtcttctctcgatccctttcatagtgaggctaggccactatttataaggacttaatacatgagggatggttcccttttgcttacaatgcacaaaataggaaattacaatgattctataattacaatatatgaaataggaaactaggacaagttgccattttcctctgactcaatcccacgattatagggatctcttcgcgtctggacacaaagagattagtttttgaagttgccatctcttgtacgtctctcggcataaacatgtttgcatcttgtcgaatatcttccctacaaccctgctcggatagccgattattacagatgctgattagtcatgtgcaagctgctagggatattttcctctgtccaaatatcaaaattatgagacaggtgtcatccgatcgtattgccacgtcaaggtgcaaaaaataggataatagtaagctttgtatttttactggaccaagaagttaggccttcaattttcgacccaagtgcgatatcaaggttaagcttaaaactttgggttatatgggctaaaactttttttattttttacacttaactcatttatcttttttttttttttgtgtggtaaaactcctttatgtttactttttttttttcttttgcaaatttaaggtatcaactagatatcaccgttaaataccaattagattattactgtatcgacttcgaagttttttttttcatgtacacacagtagtcatccagttggtggtatttaacggtgatatttaactgacgcctcaaaattgcaaagaaaagtaaaattaaaggagtttttccacacaaaaaaataaaagaatgaaatgtataaaaattaaaacacaatggagttttgccccaattattcttaaatttttaataaagttcaattgtgagcaacaaacgtctctaagagtagaaagatatttgttggtactgcctctcatgagagttatagattctccccagaaaattcattaattcacattgccatataatagtgctaagtgagaaaagtgaaaaaagacaaatgatcaagtgaaagtatgtgagatgttatttattgttttatctataaaatggttggttaaataataaaattttagaattttttcagtaaggtagaatttaaagaggtattggcggtaaaattaactgattatacaatttataatacttaaccacataaatcgtgttctaatgataaaacccttcaaatctcatttatgttagttatttaacccttcggttcaaattgtattgttaaatgccaacgtgtatggataaatacatagaaaatttaagtaattcacatcattttaaaattattataaaataaaaatagattaaaaaataaataatgaaattacaaaaacaaaaaaaatatatttttttctccttttcctttttttttttctttctcttccttctttttttctttctcgaaactgagagtccatcatcacccacatcactcaccaccataacgggataattagctaaatgaccttaaaaagtttttttattaactaactttcatttgtaaaaatttagctacactaaccttctcttttaatgaaacttttatatctcaataataccctttagtattttatatttatttttaattaaaaacagaaaaaccatatcattaaaaaaaaaaaaaacagccctccccctgcacatggtgccttcatgctcttcctctatttttaaaaaatctctcaaaatcttataaaatctctttaaatttgtagaaaattaatttataatacgcttacatatagataagatcaacattgttgtcaagaaagcgattacattcaaggtaagtgaatgaaccctaattttttaattttttattttgaatgtaaaaaaacaagaaaaattatatttttttagcttgattttttttcatatatatttgatagaaacaacaataaaaatatcatactagccatataattactattttgtagtttttgagtttaaaaactcatttttgcgaagtgaacccgaggttgaagatgaatcgtagggctcaattattaatggttgatctcgactatgttagttgagatggtgattttagtacagctcgactatgttagttaagattacagttttagtaaagctcgactgttgtcagtcgagatgacaaacgttacggtagagctcaactagatttaatcctgatttatatttttaattgttaaacttttttcatcgatgtttgctaaaagattcgcattcaatagatatgataattctaaaagagctcaactagctcgaccaaacattgtcaatatagtgttaatactcaattgttaataaactctttgatggacacattcataaaacttaattgaatttagttgaaaattgaacttgttaattataattttaacatcaatatattttaactattttttaatatcaa

SEQ ID NO: 38975 - DNA, 1759 bp, Cannabis sativa
  modified_base (924)..(946): a, c, t, g, unknown or other
aactcactaacaacacaaagaaacaagataattatcctcgctcaattaatatccaaaaaaaaaaaaattaaatactattttaatctggatattacattgtagtgtaaattttttcattgatatatattgttaacattatcatctttttattttattttgttgccaaagtagaatatgttcacctgtcaagaaaatgatggtgttaatctcatacaaagtaaaaatttactattatttttacttgttgaactcacatctatcttataaatcttaattatttatctgtttgctaatatgacattgacaagcccaattaacaaacataaataattctaaaaaaaaaaaaaaaacaatacataataaataatattgataaaaaaaatacataagtggcattaaaattaggataatatattcttatcaaagtctttttgataaatgttttatatataatcttaaacatatatattttaagtgaaatactaaaatatttttcgccacaacttaaatattagctacaacaagatccatcccatgactctaaattctaataatcatttgagtatattgatttgtattaatttttttttcagcatctagagaatcaattctatttttattatgtatatatatataacattatatatattctagcaataatagatatatcacattctatctattcttctaaggaaaaaagttggcacattcatgcgaaggtataaatttattggtaacttctcaattcaagcagaaacattaatagtagtattggattggtctcacatacttgatcttcctttttgttctaacttctaacttctgttgaatcacattggaatttgattgtttaggtaatgtttggtaataattttttaatcgattttttatttttaaaataaaaaaagtgaaaatatttttcannnnnnnnnnnnnnnnnnnnnnntttacttttcaattttttaattgaaaatcaaaattttaaaaatagaaaagtcacttttattatttttttaaaaaattattttaatcaatattttagactccgactcagacccaaactcggccctagccctggtgccgaacctagcacccgatccggacccggacccggccctggacccagacccgacttaaataaaatcaaaaaataaaataaaaataaacttacacaacacacttttattttctgtttttaaaattaaaaaacaaaagtggttatgaaacgcagttttatttttcaaaaacaaaaattccacttcatttttgtgattaaaaaattagaaaatataattgttaccaaacgacaccttagtttatttggtttctgtatttccaaagcactccatccgtatttagttcggtttattttcagatgatattgctagtttattttttttgttttttcaaggtatatatctttagactatttttaatgtaatatacaaaaattatactatatctagcacaacaaaatactttgtgatatatttcaatcaatttttagtattatactccaatgcacaaaatttgacgcaaattttaatatttttatctaaagaaaaaaaaataataactttattattaatattattatattttttattatgtaacacaataaaaaaagaaaatataattcattatcaatgttatagtgaaatatactaataaaataataaaaattgtataaaaattaataataaaattatgtatttatggtgatgtaaattttgcgtcatagcaaatgttatgccaaatt

SEQ ID NO: 38976 - DNA, 1744 bp, Cannabis sativa
  modified_base (1293)..(1295): a, c, t, g, unknown or other
tcgaacctagacccagacccacacccagactgggatcgaaacttaggacctggattcagacagagacccagacccaaacactggactcggaccaggactcaaccccgacccagaccctgacccagacctggacaagagcccgaacccgaacagagaatcaaaatcagaactgggactaggacccgaacccaaccatggacttggactgggacctaggacccgaacctgaatgggggacctggacctgggcctcggaacccgaacccggatcagaactcgagactcagacctggacctggaccaggactcaaacccagtgcttgaaccaagtgttgaccatgactgggatcaataacccgaacccgaactcggactaggacttgaaccccgacgaggtcctagacttggaccgggacctaggacccgaacctggacgggggaccttgacgggggacctgagcttcggaattgacacagagacccaggacctaactcgagacccagaccctgaacttggacacggaccaggacctcagacccgaagtggaactagactgggactcgagaccaggatcttgatctagactcggggcttggacctaacccattgttgatgattggatttgggacccatacctggactcaaacagagacccaaacttagacccaaacccgaacccagacctgaacttgtactctgtgactcgaaacttgaagcggaaccggaagcggactgggacttgagaacaagactaggggactaagacccgatctcggtcctggaactagaaactgacaaggaaccagacccagaccatgacagggatgcggacccgaatcaaaactcggattgggactcgagacgcgaacccaaacccagacacggacttggacccatacccgaacgcaggacccggaccgggattggagactcagacctacacctaggtccctaacccagattagcgacccaaatgcgaaatttgaaccagaatcaggacccaggaaagggactgggacctaagaccagaccttggtctcggtcccagactcggacccgaacacagaccgggacccaagatcggaatcagacttgaacccaaacacggacctagacctagaccacgacttgaaccagacccacacccaaaccttaaatcgtaccctgtgatgcaaaattggaaccggcactggaagcagacccttaaaccctaaaccctaaacctaataccctaaatcctaaactctttacacttacccctaaaccataagccctaaaccctaaaccctaannncctaaacaataaacccaaaaccctaaacccaataccctaaccttgacaagggcccagaaccatacctatactgagatcggaacctaagacctagacctggagccggatctaaacccgaacctagacccaaactcgggacctaaacccagaccaaaacctcatccgggacctagaccttgactgggacccgaatcgtgaccccaacccagacccaaacagggacctggactaagagtgggacccaaatctagactcaaacatgaacccgtactaggacctagactcggacccaaactcgggatccaaacccgaacctaaacttggacttagactgggacctaggatctagacctagattggggacctgggccccaaaccaaaacctaaacccagaccttgaccaaggatgaagacctagatgggggacttggacccgaaactaggcccca

SEQ ID NO: 38977 - DNA, 2042 bp, Cannabis sativa
aaaagaatttcacacgtagagaaatttgtaaattttggagaggcatcaaaagtttttaatttgactctaataccgaattaaaattataagatacataaactttcatttcaaaattaatttacaataaaaaaatttaggcttctgaaactccaaacacatgagtaactcttgaagcactaaaattggttgcgggctctaaatttaagtttttaacttttaaaaaaaaaatattttaacaaagctgatttttcttaacagtttgctcatatagctagccacatgtcaaaattatgattttaaaatagtcccaactagtgctgtaaatactaccttccactaaaaaatatatattctttttcttttcaaaaatactaaattaactttatgactggttgcagctatttttgttatatgttaaacaaaaatgaattcacaaaacaaattcgccacgaaaattgggcatgctttggtagtcatatctcaattaatgaactttaatatattcattttaagaaagaaaagaaaagaaaagaaaataaaacccaatgagtataatgatcccatcaatgttgaaccagccataattgcaattgtcaacaacactatatatatatatataaaaatatgatcaggaactgaactgggcagtgtaactgtaatatgtcttttgattatatataataatcttttggacaaattagtagtcaaatcatgtgtgatggaaaatgcactttgtctcacactttttcttctattcatttataaattagatatatttgtttattttcttcttcttcttcatggctcatgcttgtatgtaaacaagaaggtcgtgcagtgtccaacattatgggcctacatgtctattttgttctgcatttatatcataacatattcacctaaaatttatttgcttacatcaaccaagattatgttatatatatgctttttcattacaaaattaaacaaattttaataatcaaattattagtcctccattacttctaatcaggatccttccccataaattaggaccacaatccaagttacaaatttctaatgtgtataaattagtaaatatatggaattttttaattatatatggcttttatgtgtaatttttccaaaaatatatgaattatactttctttaaaaaaaatcaatcataggaattattttaaaaactatattatacacaaaaacaagtaagtactacccaatcatatatagttattagggataagaaatttaaattcaatttatttaaccttccaagaaaaatatatatgtatatttacacatcttattcttaccatgtaagagtctcgtgattcatatagcaaaggctaattagtatttttaccctctaaattttaacatgtaccaaatcatgacccttgaatttttctggccgttaaatttttttcctagatttaaggatttttgtttaatttcatttaattttactattttagtgacaggcttttttttactaaaattagacaaaagtccttaaatccaacaatctcaatagtttaagaagcatttttaacgaccttaaaagtttaggggcatgtcaaagtttggggataaaaatcctaattagcctataagaaaagactaagttatgcaatcacacatcgtttgaataatatcaagcgtgataattctaatattatgtagatatgagactacttagttaatgagaacatacatattggattgacgggtactacttatactaacaaatgcatatattttttggtagttcattacttaagaactccaaaattaaccacctaaaaaaaatcttacaatgactcctgaatttttttttttcaaaaaatatgtgagtgaaaacatagcacaagataaagattcgtataattggttcacaaaactagttgtgattccaaaaagtattcaaaactgtacaatgtattagtatggaactctgaagcgaggtgttacatgtaattaactaagtacatataattttttcttatatttttttggtgtatttaaaaatgttaattttgaaa

SEQ ID NO: 38978 - DNA, 1755 bp, Cannabis sativa
ttaatttttaattgtatcacttttcactaacatagaaaaaaattagcataaaatttagtatacgtgctatgcacgtagctttttgctagtatatatatatatatataaaaatccccttagaatgctccatttttatttatttacttagttttgctgaatccttagaatactcacttagtttagtcaaattgggcaatacaatgacattaataatttaaaatttgatattttatgataattataagtcaaattgtattttactaaattagaaagccttttggtatttcccctaaaaaaggggattttgtattaaaacatggattccatttcttaacgaattttggtaccggcccgtaccaaaaccgggcctgatagttgttgctagaaaacacaaacacagtatttgaaaattgccaaattagcttacccaagttcaatcaaagtgttctaaaaacccaactaccatccccacaatatatgcagacgtagccatagagtagcaatgaaaattcaatccaatgtaaaatcaattttggagaatataatattgaattagaatattatcaatactctatacttgtaaacattgtggaccaaaacattttaatttaagtatgataaaattttatgcaggtgtactgtttacctgttattataaaagaaaacttctcattctttgaaggcccatcgtgcgagaaggcctgggaagtttacatatacccaagcttatgtcttattaataagttttactactacattgaaaatgtgtaaaaaagagcatctaaaatttgtcattaccactcaatcaatattatgttgaatttagtcttactgtgaaatcttttgttatattttgtttcgttaatagcatcaattttgaatttcacacagtactttaatttgtttccctcatatgttatattgattattttttaagtatttatgatagtattttattattatatgtttaaagtatttgtgagaccacacatgtttttttgaactattttttaatagtttgaatgccttttacagtttatgtgccttttatggcgttttgtgtcatttattatggcttgtccctatttgtttagggtagttttgtgttatggttaatgcatgggaaagagaagtgatacattttgtgctcatgatttttacttcaacgacctttcacttataatagataaatattccaaatctttttaactctttatatttaagagagatttatttaccatcgttctttcacattaccttattttctttatattgtgtggtaatagaatttattttagttattttgtaggttattttgtgaagggctacacttaaacagcatttaccgataaatttatttttaaatataatctgtttgacattgatttcagtagttttaaattagggtgctagtatgttgttactggtcaaagggtaatacctttgactagttgtctatagaaattttgttggtgttttaattttttgaactagtgacatgggttgtgtgtttattctatttttattttttaattttattttgaagattgttattctaatataactatgttttttggtttggtgttgcgatgttttttcagatttgctagctctggcgacaacttataattatgagaagatgtttgctgtttgagttatagctttattgtctatatttccgggggcagttttgtcccatgcggctcgcgatttgatttctacagctcatggttggcaaaacatgctcttcggtta

SEQ ID NO: 38979 - DNA, 1485 bp, Cannabis sativa
  modified_base (393)..(397): a, c, t, g, unknown or other
aaaaaaaaataatattatgcaataaaataaaaaattaaactgttatttaaatatatatttattacattattgactatacaaaataaataaatacttacgaacattaatatttaattacaaaatatgaatgctcaataaaataaaatttatagtttttattgaagaaaaaaacacatgtttgaaaattgtaaaaaatcagacttattaacttcaaatattatatcattttaactccaagtattaaaaaatatattattattagagtatctatttggtattttgtatttcatcaaaatatattattttatattttatcattctttagtgattttaatcaatatgttaaaaaaaatacaaattttgtattatatatttttaataatacttatttannnnnttttttttttgaaagaaaaacattttattcagcaaaacaaagcttacaactggtcaggcttctctgcctttaaaatggcagcagcacaagagggttaaacctctgaccaaaaagaattacatctttgagtaatagtccacttagctaaagagtgagcaactttattacaatctctattaacaaatttaattacagcacacccatctaaaagttttgttgcaaaaatatccaccaacggcactccccagtcagcacgaggagccttctctatatgcggtaaatttgttaagcatagcagtatcaacattgacatagatcatattctcaataagtttgatccaatgtcaactttcgttccttagatatattagctttccataaataaaataaattatttatctgagaatatgtgcattgatcaagactaactctagctaaaatcactacttcttttacctatttaatatttatacttctcataccatatgatcttatttctttcattttaaataaccaacacaacattcagaataaatttttgttttttttactaaattgtgtaaaattaatttcgatacatagatattttagttttctatttatttttcaaattaaagtaaagaaataaattggctggttgaggctaaaatatgcatgatcaaactagtgaaaacattgaattgtgttaagattggtacaataagtacaactatgtatgttttccaaatacaatgaaagaaaacattgtcatgtaacaatcaacaatgaatgaagtttagcaaatcatgaaattcttctctattattgttgcttttctttcctccattaaatcattagacaaattttctttttgttgtactactttttattttttcatatatttatataaaaaaaataaatgtgatgcacagtgtaataggggcagttttgtcaaacaaaaacttaaggccaacctaataattattatagctagacatatgatatgaccaaatcaaaatatatatcaatcaaagaattttattttgataaaatatatcaatcaaggaattaatttactaattaatcagcttaatttacgacaaaagtat

SEQ ID NO: 38980 - DNA, 2605 bp, Cannabis sativa
  modified_base (1996)..(2003): a, c, t, g, unknown or other
ccagccgcaaaataaaaaaaataagcgagcaaatggcactacttatgataaggtgattcaagattggtgagcaaaaatagtcaccatcttgacaggggatagaaccccatgattctcaacatttacaaactaaataaaactttttacaacagctattggctccaattcaaattttgtttagggtagtgttgttgagactcattctaatgcatgatgataaaaaatttaataatttttcttatcaattttttttatatattttaaatattattttattttatttctattcctcttcttattcttattttttttcccattaaattaacaccacctatgttcactagctacaattgatatttgataatgcaaaataaaggatcaattgtggacaactacacacattttgcttttgggtcaaaagtaggaaaactcaaaacaaagtcttctctcttctgactccaatccaatccatgttatgctatattatattatactccttactccttttttgttcttttgttttttttatctttaatccaaccatcttactttgagctgaagaaatgtcattttttgttttgttaaaaataaataaataaaataactttatcttgtttggaagtttatgtattattttatttattttagtaattatatgcaatgatgcatgtacaaacaaattaaatattggttttaactgattatattttttgaaatgtgcctcacaaaataatgaaaattttttagatgaaaaaaataatgaatattttgaggtgtatatatttaacgtgtatatattattatacaacccttttataattattaattagtgagggaagagttttagttagtgtatccttcttttttatgttctcatcatttcaacctgtaacctatgattaaactacaatttttttttttaagtaaaacttttgaaacacagagtttaatttgaggaaagacatatgtgttttgaccaaaaatggtcttatcattgataaaaaaaaacatttaaagaatttatttttagaaactcttttatctcttgttcattcttgatcttttctctatattccttccttctcttacactatctcctctatttatattattttttacccttagtgtcaacttaacaagatttaacttccattcaaaaagaaaaaaaaaaaaaaaaaacaagatttaactttgaattgacatatgtctattacttccgataagatatctttatatattttgacatatgtcctttaggtgtccatattatatatatttttcctatccataatgtataactttcataattaggacatttagctcagtagtcttgtataagttctctttcttgcatgtaactcatctattttagatataccttccatcttggatgtaggtcatacgtgttgtttatgtttatgtcatcctgtctgaggtatgtcattccatataaagcatgtcaccttgaatgatcgactaagatacgggtcatcagagcgagatacgtcaactgaccgatcggccgagatacatcacttgaccaactgactaagatacgttaaccgatcgagatacgtcagccgatcgaccgaccgagatacgtcacccgaccgaaatgcgtcagttgatcgaccgactgagatacgtcacctgaccggacgactaaccgagatacgtcaactgaccgatcgaccaattgagatacatcagccaatccaagatatgtatctcatttgagataagtcaactgttttgagctatctcatcccatttaagatgtgtcatctatctagtatctaactcttccacttatatgcttacttccacttatatgcttacttcatctaggatacatatttaataaaacatatagtacttcttttagaatggaccttttgtgacttttgagcttattttttataataatttggacttgctaatttttctcccaaacaataaatttcttatttcttatttcttattattattattattnnnnnnnntattattattattattattggtagggatacgtttcttatatatatagtgaatatccattttgagcgaaaaagctatgtatggatgattgttattatattggagtccagaggtttcgggtttatacatggtgaagagtgcttatcaactattacaacaatataaagggcatagggtgttgacactactacaaaagatttatttgtgtgagtttttaaattaatccatttagaactgtcgctaataaagttaagtgaatgtttaaactattgggataattcaactattctcaataaatttaaacaagtattttataatccctaactatgcaaaatattcacaattttaaaattaaaaaataggttaaaatggtaaccttggcggtttaaaatcgttgggtatactagacaattttaaattgtcgacaataacagtatacccaacatttttaaattaacgggaatagcatgttaaacatattaaaatccaaaaaactttcgcattgttcaaacatttagatttcgctatctcttgtctttctctcattctcgtcttcaaacatgccatggaacccactatcaccaccacaaagctctctctctct

SEQ ID NO: 38981 - DNA, 2661 bp, Cannabis sativa
tttagggtaattctatattttccccaaaagagtcgtttttgtacacccttaacaatttcggcatccagaagagctttttattctaaactttcataaaatttcaagtagtttataatgccaaaaataaaattcaaatatttgaacttttatttcagcattttaaactatttgaaatttgctgaaaatttacgggtgtgtctaaacaactacaactacaacgtactagatcatgaaaaaaaaaatagactaaaaggctatcctgaatgcaccaaacagatatggtgtaccaaaacgaccttcagcggggtgtactacaaatttttctaatactcaaatctccatgtttaaatctcttcctaaaaaactcaaaggcaagacaaaaccacaccaagaaattaccacaaatactgagtattacagaaaaattaacaatgaacaacacttcccacgaagtaaagatcaatcctttgagacaattcataagcaaaaccataaacaacactgaaattactactaacctcacctccaaaagttgagaagagaccaaactcgaaagcaccaaataccgaatatgagaactatccttagcaaaatcagcccaacaaccaaaaagagccaaagccagagcctttgaatcacaatcaccattatcaaacacaaccttaactcgactcaacaactcactacgattccaaacccttcccttagacaaaaaccctttatatcttctcccatggcatttctcccgttgcttgtactccattaaaaacactttcacaacgcagagcttgatgtgttggtctccagaattgaaagcatcagcaaggcgcaagagaatggcattggaaaagagacgatcttctccgggaattaggtcgaacatgtggtgtgcagcgagtttgggcggtgatgtctcgtgactccatcgaaggagtctgggtccgaactgtagaatggcttgtgtggagagagctggtgagtttgagcgaagagctttctctaaatctatgctccattccatggcgtgagctgctgaatttctctccattgtcaatcggagagaagacactgaaacccaactgctgctacggcggagaggctcagccggcggcaactaacttgtagtgtggcagcccgcctatttttaaactgcgaaaaattagagacagaagcggctgtggagacctttaacattattttttcgacgagttctttcttatatatttcttttgtaatgttcttaattaaattttatcaattgttcacaataattatgagtagttagattttttattaaagtgttaatggagattgatttacattttattttaatttaatgtgattcgaattatgttttatgatatcaatataaaatttaaaaaatgagtattggttatattatagtgaaagagacatagattttgatacaaaaagtaaatatatgatttcggtagaatttagaatgtcttagcagcctgaatataagtttctttagtaaattagctattaaatgaaaattgaattttgagaattaaattatgttaaactaaataaaatagattcaattaaaattaattacattaaattttaattattgttaatttcaacataattaattgtttattttgttttaatttttgcttagattatttggttttaaaattctttcattcgattgtcaaataaaaataataatttaattatttggtacttagttataatctttgtgggaacgatctcacttactttaatattacttgctaaaacgtatgtatacttgcatgttggaattcataactgaattcaaacacactgcacttcatcagtgacggacccataattttttatctgtagggacttattgttattaaaaatatttattatttactttacattaaaattataattattttgtagagattttttagtattttattgcataattatttaactaaatacattcaattttttttaacattactgggggcacactatcattgcaatatccgtttctgcacttcatggttgttataagcacataaataggtgtaaaatagattaaaaaatgtgatttggtggttacacaagagttagagagctagaacggattccaacgttcaaaatgtttttctcaaaactattgtaccacgcacatgtcgcttggtgtatgatcgagattatgcttttgagtttcagcactcagaccaaatccatcctagatttttttttcatctcatatttaagtagtaatctattttgtaacaactatataattataattctaaattttataaatcaaattgtgtaataattcttttattatactaattatgtatgatcaacaaaaaagttacaaataacaaccttaatttataattacaaagtataggttatactttatatttattatacacttaatatttattattcacatctttattcttattttggattgattcatttttctggatttagttctttaaaaatacaaattttaagataaacaaaaataaaagacaaaataatttatatatagtctaaacatataacaccacaataatttttaaactatgtgggatttatttatttttttaagaaaaaaaattactaaatagtcctccactaaaatattaaaataaaaatctaaggtaattgtattta

SEQ ID NO: 38982 - DNA, 4406 bp, Cannabis sativa
cgggcaccgccggtgagagagagagagagagagaccgagggagtgaatgggtgagatcgagagagatggagagagatcgagggagtgagagagtgagattgagagagatagaggcgcgagggtttggtgtcttaatgttttggtgagaggcgcgagggttttaattttttagtattattcccgacagttttgaactgtcgggtaaagtattttacgcgacagttcaaaacagttgagaatagtttatacgggtaaattctctgcacttttaaactgtcgcctaatctatacgagtgttaaaaacggtcgcgtatagtatagtataggcgacggttttcaacactcagttaatttttttagcgacagtcccccaaaaaaagtgtttttgggaccgtcgcgaattctacattttgtagtagtgaaaacatatttgtggctattgtggacaatgtcccacgtggaataaatagtagagaattgagccatatataagaacacgagctactccactcatagccaattagttttgagatgaaactccatgattctcaacagtggctgtctctaggatttttatgttctataaatagctcttagagagcaaccaaatatttcttatctcttcaagtctcatattttcatatcttatatttgtgagaagagtgtttcttttgtaaaaatcttgaacatcaactaggttttggatttcttgtaatgatctcttgctatttatagaatatgttgaagagaagctttgaacaagtatgagtctttgggagaagacttttctaagtctcattttaagaggaagtatgcatgtatcttcgggagaagatctgtcaaagactcatttcgagaataagtcagcatacatcaatagttgaagggagttcactactttgtgtgtttaagagatctcattagcaaggtgggttacaaagagttgcgaaaaatcattagagggtgtctaattttgtttaagtcaattgcttttgtaatctttgatactttactaattgattttattatctgagcgtggtccagtagactagtagtgtttgaaaaaatattgacaccacatataattttcttgtgtcaagttttaaattctgcacaatttatttctatttctattctgttacaacaagtctgtgttctgtaataacaaaatttcaatctgttatttatttatcgtttttctaaaaaattaattggtatatgcaaaaacacaattcttcacattccatggcatataatgtgtttttcgggtataacgaggcataaggtcctaaagtggtttgatgtatgggtatccatcctctcttgctttatactttcacgtgtttggtttttggacagcttttgttggtgattctaaatggctctggagaatcaatgctcaataacaaagggtatgctcattatttaattaatgccttttgatctaataagataatatatactatatatttatatatacattatgtatttatgtatctagttaaagcgtatgataagttaagctgataatttataaatcacgtgcttcgcagctttaaggcttcggataagttctgtggatgggtccgtcagtgcatttctatgacaacattcaatattcgtcttaaaagtggtaaggtgagtagacttaatctggagtgcaggattaggcaaggggatcccctttttccgtacctttttatttgggctactgatactctctcgcgactcttagagaatgccctagacaaaggtagcattaaggggatcaagttgagccgaaatggccctcaaatttcccatctgttctttgccaatgattttattttggtgggtagggccacgataaaagaaaccacgagtttttggcaatgcctggagaaattctatgattgattgggtcaacatattactaaagtaaaaacatctatctttttcggtaaaaataccaatgatgggacgaaacatagtattaaacaagctttggggctcaacttggtagtaggaaacatcaactacctaggactcccgttattccataagaaggatgcagactttaatttcataatggataacttggtctcaaagttgcatgggtggaagttaaaatcgttagctaaagtcggtcgtgctactttgattaaatcggtgggtctttccttacctgtgtataccatgcaaacgatgaagttgtctaagaaactttcagctaaaatagatggaatggttagagatttttggtggggtcatgaaaatggcaaccgaggaatctatcttaaggcctggaataggttgtgcctccctaagtctagaggcggtcttgggttccgcaggacctcagaaatgaatctagctttttttggctaaatggggttgggcccttcttaccaaggataatttgttgtgttgcaggattttgagtgataagtaccttaaaaatagacccttcttgaagtgttcgtataaggaatctaactcgtggttctggaagaatgttttgaagtccaaagaaattataaagaaaggagcatgcaagctcattttagatggaaaagatactgatatctgggatgatccttgggtgattcataatttttttccctatcctaaaaatagatgaccccagggttgggagaaagttgctgacttccttactgataatgggaattggaatgttttcaaactcaactttctgtttgaccaagagacaaccaacaatatccttaaagggggtaggcgagggggccaaggcagcaataaatagatttggaccaaagaaccaattggtcgtttctctacaaaatctgcctacctcgctcaggccttgacatgagcgccacctactagggtggctcccgctctttggaacaagctttggaattcttgtatcctagaacgtcataagattctttagtggagtattctctcgaacgccttaccgatcgggttagctttggctagaagaatgctgattgaggatgtgtcttgccccttttgtggtgagaaagaggaaactatggaacatcttttcctgtattgtaaatttgcttttcacctctgaaggtcttccccctgaggcgtgatgccaatgcctaagtttggggctcgaatgtgggattaggtcaaattcctttggagcctgaaggataaaggagtggaggtcaaagaaatgttttgtatgtttcaattatagtggacacaatttggaaaacccagaacgataatgttcattctaataattatatttgtaacattaagcattgtattgactatatttttacatgttatgcatattttggcccttgtttgtttctttcgttggtgattttcacgcctcctgcttggtccccccgtcggacgattgggtcaaaatcaactgtgatattaaagttagtagcgactcaatgtgtgtggtggccttggtgagggatcatgaggagttgattttgtgggtggctagcaatattctcaacttctttaatcatctcattggagaagatgcatcatgtctgttagccctggaatcagcgacacgtgggaagcattcttttgtgatcattgagagcgactctgaaacgacgatcaatactttgaaaggaacctcttatgtttggagtattaataattatgtgcttcaatgtaaaatgctctcaaaccttttgattacttgtaactttttatttattttcagattttataagtttgttgcccataatgtagctaaatggacttttagtggtaatgtgactggtatggtagatccgtcttttataccaattaacttaatttgtaatgatcttgaggtctaacttatttggtacttaatataattacgcatttattcgaaaaaaaaaaaaacacagtacaatgcagccacaaatgaacatcatatatgattcatatacctctaatcttttatcactagaagggtggtcatacttctaatcttttatgctctacattttaataatgcattttttacaaaataaatatattgaaccttctaatgttttttattttttattttagaaaagcacttatgaatctcacaagttgccaagttggtgaacaagaatttttgtgatttaaagcatgctgttttttttttttttcacttttggacattaggcgtgggatccttttattcaatttgtggtgtaaaaaaaagataatgtactttgaggtgacaaagtttgtttgacactatctaaagcatgttgatgtttaaagttgacttgatcgttagagactataaaccaaaactaataactgaattattttatcattgtagcaaacacaaattcaatctcaagcaccaaaaagaaagtaggtactctctcatggcttctccctcagaaaaattggaaaactctccacaaatcgttaacgatgaaaggaaacaagaa

SEQ ID NO: 38983 - DNA, 1689 bp, Cannabis sativa
tcttcttctattttaaatctgcaaaaataaaagataacaagcgtaaaaatactccaaacacgattaaaactaaattaaaaatatactaaaaataacttaataatgtacaagacatgggtcgcaacactaggcatgtagtgtcatgactggcttaggtggaattaaaaaattggtatatttgatatcttttttttttatcatttttcggctatttaaaggcgtgatttcaaactttttggaggcaattttttagagtatgaaaattatagaaaagaagtgaccgacaaggctttttaacagagtttttcaacaatttattctctactattttcttcttgtgttcttatttgaattgtgtcaaattgttacaatgaacatgagtagctaaactgttattaggatattgatggagattgtttgacatcttattatggttttatatgatttgattcttcccctaactttttatgtggttctatttcatttgttcttaatttttttaattgactgaccatcaattaattgtttatgattttgatacaaaatttgagaagtgattgttgattatgctatagtaaaatagggatgaatttcaatataggacgagagtacctatgtggtttggatagcatttagggttttatgcttaatgcctcttatatgttgaaatttatcacgacagtagaaaaaattacatataagttgagatttatatatcttagatgaatctaaattacttgagtaaacctgttattgcatagaaactctaacatttttacttcgtgcattcaagagcatgttcttcatgactttgctcaataaaatacaacgggagtagactattaccgacacttaaggccgaacctctttaaattctagtgtcattatttatatctattgtttgtgttttagtttaagtctcatttattattacgactccgcgtcggttggctaaaaatccagtcaacactaattaagttgtagcaactttaactttttagctatatcctctccataaatttcttcaacaactaatggaatatctactataaattagggttgtacataaacttttataaaccgccccacttgaataacttgcccaaataaaaccgagattactcacaaaaaatgcaaactaaaaaatctgacaaaaatataacacgccaatctttatattgggtgtattgaaaatataccaaactacccaatcaacccaaactaacccgaccaatccgccgattaagaggttttttttttttctatttttattttatataatctatatataatgtaatttatatacatattcattaataaaaaataaaaaagttcaaactactatatttctttcatggtggtcaatttgaatttgaatttaatttatatatatatttgtctcatcatcataattgactgaaatataacaattgaatatgacaaaaaaaatattagtgctcggtttggacgggttaatccaaccaaaccgaccaattcattgggcgggtttatttttttttaattggatgggttgcccttagatttttataacccaatctttacgttgggttgaatgaaatgtaacgtaaaccaaccaaattgactttttaatttacacccatcctataaattattcatataaaatcatgagttataattataatctatctatatatatatctttatata

SEQ ID NO: 38984 - DNA, 4770 bp, Cannabis sativa
tttcttaaactcttatgtgtttacaatatttccaacacctacatcggttctatcgggcctcacaaaaaacacaaaaattagacatattattgagcattacatcaaaccctacattgggccaatatcgaacctatgtcttcaacctaaatcccttcccaacaacatgatacttcgggcatgcatcagaccaagctaaaaaaccatattcttttccaaaacacaaatccgaccaatccaaccttaaatctaacccaaactaacagataaaccctaaatcaataaacctctaaataatctcatacattttaaccctaaatcatgtaaaaatacaatgaatatcactactacaaaaatagttttttcgatatttttaaacagtaggtaaagtatcctcgtcggtttctataatcatcgcctatactattgtcgcaaaacaggtagaataggcaacggttcaaaatagtcgctattttgaaaatccccacagtttaaaactgttgtctataatagggtatagggcacggttttaaaccgtcgtctataccctgttataggtgatagtttcaaactatgtcatataatacaggttacgtttttttattttaaaaaacttttagcgacagcttttttcagtcattacattggaaaaataggaaaaaaatacatatattttgccatttttcccctacattaatttttaaatttttacagatctatatagtcacaataattaaactaacaccaatatcatctaaatatatttaaaaatctatatagtcacgataattaagctaatgctaatatcatctaaatatatttaaaaatcaatatattaactataattaaactaacgctaataattatctaaatatatttataaatctatatagtaataataaatcgagatatacacacagatcaataagaaaatcgttgtcgcactgtttccactttcacataaggaatccatcgatcacgtataacatttatctcgtcatttgtgtacggagtgagaaacctatcttgtaaaacaaatgtatatattaattagtaaagactattatcatatgctatttaataaagaataatatatattataatccttattaattgttttaccggttgtgtcaacacgtatattggatcttctacggtcatgaatctttcaatgaatttcatgacgtagtatccacattatttgtcatcaggctgttctggacatatatgagttatccactggataggtctattaggtcgtcctgtcatttaattgtatatggtgaatgatctacataaaaaataaagttagcatatataaatttataaatataaaacatgcttacatattgggatgttagatatagaacttacgtgaaaataatgaattttaaatgatcatctggtacatcgccattacctgaatccaagtatgccactgtctgcatacttggttggatagtaccagcatctagtgaaatattttcctacacgtacaaatatatgtaaaattatgaagagttataaatactgcaattatttattttaaatttacatatatcaattgttgtaggggtaataacctatttattggattgttcatcctagtcatacgagtgactagtgcttgataacggttactgttaacccctactttgatggcaatcgcactcggatttaaaaattcatatactctgtttaaccaattgatgtctaatagtatttttttcatgtgcctgataaaaggtcataattaacaaccgtcgctgtcaaaagaatattatcaagtttattttttagagttagaaatcatacttgtaccaaactgttataggatgggctcccaagtattggatggtgcacaattcatgaatgtcattttaacaagccaaatagagtcatcttaatttgttcccaaatagatcataagcaacctgaaattggattatggacgactttagccaccttttgacggagttctagaaggtaatgattgagctagttttttgtggttggacataacaaccatgacttgttggcttactcggcctcttagggtgttttggatgctgtgttggaggaccgagtaaatctttataggcttatatgcttctcctcatgggttgcttttgaagttgtttggtgggtagttgtgtctatatatatgaaaaaaaataacaaagttataaatatcattaatcaataaacacaacaagttatgtaaacaaattaaaacataccaagtatattccaacaggtgtagggtagtcctttggccatgttacgtaactttttataccttgacctactattgtgaatgtaatttgggctatgggacatggaagtagtgcattgtccacattgacttctgggatgaataccagatgataatctttgtataggtattcatcattgtgaatcgaaaactttccatctttcaaatatttcttcttcacaatatgccctgaagaaaccttcagtaccatcccactgggatccaaccaacagtgcatctaacaccgtaagctctatatatccaaatcaaacaagcaacaattcaatttataaattgaccatatttttaatttttgcattagatcagttcataaaataacattaggattacctcttttgaactattaccagtaggtggtggtgctgctgctagatcagaaacctttctgacaagcgatggtgatggagtagagacattggtagcaccaaatagttgtgctatgagatctggtggagtagagacattggtagaacctgattgttgtgccacgggattggaggcaaggtcagcatgggcttgttcattcgatgctcctccaacaccggaaccagacgcatgggatgtgcccacaacgctgctatgctgggaactaactagacaaatgagctcatccactttctcctgtagcttgtctcacggatgtgtctctccaaatttgatgatgcatggtttgaaccatccatgtttttccttttagggcgtggtgtgttgaaaaatttggtctggatgacgctaaaagccatggctcgaacccagccaccatgctcatctgtcccagcgccaagcttaacacatccctcttaccttccacttgcgcaactccttcttccacttgcttacgaaagtcttcgtacaaacataataaatagagttagaaataaattataaaacataaaaattcaaatgaaattatactttaaacttacaatctgtttaacgatttccatggctgggccctccacctcgcctttcgtgttcatgtgaagtctttttcatattttagatatatcaaattcaataatttggtggtctgcctctttctctatttgttcttgtaccatccttacaccacctcgtctagtgtgatggttgtaaatattttttgccctactctattaggcctttttcctcctcacctcaaagtttggactcaatcttatagccacaaactccctccattattgcaaatcaattatgttttcatttagttttaatgtctcaagaagttggggagccacatctttaaatttaaaaataccatctataagtataaattacaatcaatagtgaagaattcgaatattaaaattaactttacctttatgtcatcccataattagtttttaatgtcctcactcacattaggccacgatatgtctcaaagtggaacattaattcgcacccatgttccaatttgggtaacttttgccgtcgttccctatccttagtttgtccatagttgttgtactcaacctccaacttttttccctcgctaaccatttttattatatcgctatgtttgcttctcccacgagtatttttctgtgtttgttgttcaggatcaacactacattcctcttccatcgatggttgttcaggatcaacactagatcctcctagcatggatggaccatcatcaccatcataatctaaccaagcactccactcatcgttacccttaaatgttttttccaagtccgaaacacatgttcatttggcgaaaaccttcagtgtcctatataacacattttctttgagtgttttaaatacatagaaaatgttttcttctcacaaatgggacatgctttgtacactttcacactgcatccaaaaatattttcgaaagctagaaaatcattaatggtcaacagtaattttgtaatgccttgtctcatagggacaccacgtgtgtgcttttataaattagtcgttacttattaagagattaattttaagaaaagtgtggttaatttataaaaaatttgtttatactaaaacataaatcatatacaaaatattactatgtacggggattccctgtttataaactcttacagcttggttcataatcaactttacaaaataaagttcctttttcaaaatatgatcaaaggatggatcttgtccactagaagctgagtcactgcagttgatatgtacatcgctgggagacctatgactcatggttggctcattttctcctttcctttacctgcaccatgaagcacccgtgagtcacagagactcagcaagaaaagctataagaacacaaacaatatatatatagcaagtaatcacaacatgccatattaaacaaattcatcatctaatgtacaatcaaccaatgcataaccaattatatgtcttataagacgtaccaatcttgatgcctcataaagcacccttaccactcgttatccacgagctaaatatgtcactatcgttgcccgattaagcaaacgataagtaagaaacct

SEQ ID NO: 38985 - DNA, 2737 bp, Cannabis sativa
aacatactctttcaatatgttagcaaaacgctttctctcagagagagtaaaaccaggctgtccgcaatcctgaatcaacaaaagttaacaatcatttagtaaatctgtaactagattatgcccctaaaaataggacctcaaaataagtggttcttatttgtttcagtagctcattctcaaaaattcacaatgtaacctctatgttctgacatgaaaagtaataacaaacttatctgtaatatgcatggtaatacaaatgccctatgataatgatgtagaacctaattatctaataagtattctgcaactaacaaacttttattctccatacaaaaaaaaaaaagtacttattctaagaaacttcaacatcagataagtcacctctttatttggaggtacataattattttgcttagctgtgctgaaaaattctggatggctaacatcaatctcttcatggctgcatacaatttcaattattcaaaatgacaagacaatcaacaaaagtataaatctaaactgtatcatagatcaaattacagaaactatttttttcagaagcatgtcatttgtcataaacattggctcactggaataagagagaaacaacaaatttcatttgagctacaataacaatgatattgttactttcaagtcaagtgcgttttttcttgttagacctttctgaaatcagtcacactgcagtctgcattcctttattttttcttgactagatccccttgtgcaaaatgtgagtactatcaaaaccaatcagtacaagagattcatcatgccatctactagagcttaaatcatatataagtatctgcacgcatatgtgtgtatatacatatatacatatatatttgtttctattgaggcatgaacagagaaaaaaacactgacctaacatttagatcaccacaccatataagagctttatctgaagactgcgaaacaaactccagtatccttttatcccattttcttctccttataaatgagttttcctcctccttccagccattatttggtgcatatgtatttaagacgcggaatgtctcaaattcagctaaaataacccgaccatctgtttcatgctttgaagctaacaataacaacaatgacaatttaatgaattcgatgttgttcgtcataaaaaggaatatacaacaatgacaactgaatgcatttgatgttgttcttcataaaaggaatatcaagggaccattatgaaggaaatgcatggttcattgccttttgcaatgtgaaaaaggacatttgtttcataagctgacattcaatgggataataccatgtaaaatacgaacatattcatacaatgaagaatgaaattttgtgaatcatcataccctttttgtcaagattgaaaaaaactgattttggttggaaacatttctttacaattagggcagtccctgcatactttgaatctgaaagagaccaccaaacacgataattattaaagggcggggaggacaaggcacgcataattatctgcaagattatggaaattaaatttaagttagtaacttagcagtacacataacaattgctctaagcaatcttttacatttcataggggtgatccaataatgaaaaatactaactgtgaaaagtgttacctgtttttcttcacgtgatgagctagtatcatctttcaactctgctgggtttttagttgcccctttggagccagcagcaggcatcctcacttcctaacatttataaatggttagaaggttccactccaaatttatcactagccttagtaccaatcattgggagttatagagaaaagagagataacaccagcatgagcttaagtatttaagctcacatggattaatttatacatgtcactcaaaacatgagctctcacaattttttattataaagttaggctctgtttatatgatttgaacaaaaagtatcagaacacattgcattctaccttgtgaaaagttcctccaataaaataagaaaataaaaaacacaatataaaataaacaattcttcgctaccaatagtataaaaaactcaacaccaaaaactttaactctttgtagttcatctgactaaatgccattaatagtgcttcaatgttcttagaatccttaaaccatagcctcttaatctcaacctcatcaaaagaacaaaataaccaggtcccgggttcacattttcatcaatgaccactgacccaaataagaaaaacatacgtttcaaaacacaaggtgctcaaagcatgaaaacccatttgccatattcatcaatttccaccaagagagagagaaacccagaaagggtgtttcttcagagaagagtgaagaggaacaagtcacctgtatggaaatgacatcaggttcaaattcagagacgaacttggtaaagtcggggaagtcgttcttgatccgaagaagaaaactattggcattccaagtcaagaacttaaggggctctttcttggtatcttctttaaccaatatctctccattctcatcgtttttcttggaaggtgaaggagtaggcttcttggctgagccatttttctccactggttgaaagtaacgtttcatcgtctccacctcctacactctcaagacctttgttttgttttggttaagttgagaacttgagagtaaagatccctgcttttgcttttccttttccgatgttgtcactgtcccctccaacgctttttatttatttattt

SEQ ID NO: 38986 - DNA, 1582 bp, Cannabis sativa
aataactattagttactaattgtgttagaagtatatgagaccatctttataactattattagctcattatagtccaccattagttaaattttattagcctaataatacaatttaaatctttagagactatttttataaaaagaaaaactaaaaggtgtaaaaatacctgcttaatttaaaattaacatcgaaacaattttttcaataagaactatagctatataatttaaaacataccatttagagacggttttaggattagaatatatatcgcaagaaataccctctatagggttgacttttatcaaaaagctgacgccatatgatatgttgacacgtgttaggtttttttttatcaaataaccgacgccatagaaaatatttatcaaacccttttagcaaacgacctcacttcgtcttctttagcacgataccaaccaactcaccatcaccagaacccaaagcccatgacgaaactcttgccaaccacctctaaaaaaacccctatctccactatttttttcaccattttaccctatatatatttttttaaaaaaaaatcttctattttcggtacctaaatctatacagtaaaaaagttttatttttttttctcatatttcattgtaaattgagcctattgaaaaaagttggtagttataactccgaccatcaattttagtggaaaaaacgttaaatctcaacgcctattaaggtataaatatgattttattcattttagtaatgtacattgctttatttttgtttttgtaatttttttcatttgattaatattatgttgtagtgtaagtgcatagtggccgaatttttattggaattgatcgttgaatagcgtttataaggtaaaaatttaaaccttaatatatagtatatatgtatgtattgtttattttattgaataaatgtgtatatatattttgtattgtgtatttatattgtgtaatatttagacaatatatattttgtgtattggatagatattgtgtattgtgtctatatatactttgtattttgtgtatatatattatgtaatgtttagacaatacatattgtgtatatacattgtgtgcatatattgtgtattgtgtgtatatataatttgtattgtgtgtatatatattttgtatttggagttttaattagtttttagaaacgaagtttttaaaattttgttactattacatatgtatgtatatgtaaattttttaaaaatttatatatataattttctaaatagtactagttattttttttttcattcatattcatatatttttattactaactagttactcgttagtaactagttacttataaataatgtaactagtaagtggttaaataattaaaattttaattttgttgtatttcattatattataggttattatgagataattttgaaggttccaaataatttagagttgatcgaattttagcttactacaggtatataaatttactaactttttgttattaattatttatcaatgtttagtaggggtgttcacggattggtttggtccggattttcatagtttttgaatcaaaccagtataac

SEQ ID NO: 38987 - DNA, 3433 bp, Cannabis sativa
cactcctttcctcttcgaataccaactgttgccaatctttcttgattgccttcctctcctccactagtgattgatttcactcatctgaagcttccaatttgtccagagatgctagtcttctttccaatgcattttttagccacgtgtttggttgccattatgtcttcttactccattccttaatttttcctttgacttccttcactttgctcatgaaattagtacccgcccaacccgaccctacagcctcttgccaccactccccaaaatttttggaaaatgtattgtgttctagccattgattgtcaaaacggaaagggctaggaccccaagaaggaggattagagtctagtacaattggactgtggtctgaaacaatccttaccaacatctcttgttgcacaaaagtgaacaagttactccaattgttggtgaaaaagaatctgtccaacctacaacaaataggtttatttcgaaagttcgaccacgtgaattttccattatttagttttggatccataagcttcaattctcgcaccagctggtcaaacatcttcatgctcttggtccaagaattgctatttagtttctcttgtaccctcctaaccacattaaagtctcttcctaagcaccacacatcgccacagattgcgcttaatccagccatctcatcccagaattctaatctttctgtataggaacatgggccgtataccccagagaaccaccatggcctttttccttctgcttctattagaactgaaatggagaattcaccgaccatagaatccagtacagtaatgcttctagtatcccatactaacaacgtaccccctgatcttccaatagctagaatcaaaatccaagctttaaaacgagacctccaaatactaccaatgtacatcctgtcaacggatgccttcttcacttcttgtaatatcaccatatccggattcaccttactatttgtagctttgattgccttcctcttcatcttgtctccacttcctctaacattccaggtcaagattctcatgatagtctttttggaagcccctcttttttctgacctttctcataatttatgttaaaagccaattttttgagttctctattcctcttccttccacccttgagactctgaaccttttgtttctcttcattctcatttagtattaattgcattcccatttcttccatggaattaacgaggtcgatatcaggtagcatcaaaatctctctcttctctatttcgacttcttccatccctgctagctcatcaacttgctcactgggcatcaaatcttttttgagacttccagcctcttgccaaagctccttgatgttacctataacgtcttcatatttttcttcttcttcttcttctgtacaatagccttcttcttcttctgaattgtcgtcatctgaactgaagtcattgatatcttccaattgtgggtcctcatcctgttccatcgcctccgaatggacgtccccaactaagctctcaagtactccgccattgccgttaaggcagtcttgtttcctcctgatataaactttcatcctcttttcacttacagcttcttcctcgagtgtaatttgttctaattctcgcattactaagtttgaattaagactgccacaggaattgaaatcctcccagtaattgatagttgcagtgtaaaattcctctcttctcttcggcctgactggtttgagaaggccttcaaacaatttgtttgatttggtgttttcattccaatgtccctgatccaatatcaaagtgtaaggccccaagtgctgataaataaaatggcccaatatccttctcacctcttccattctcacgggctgtgtggaacttctgactggcccatttaaaccttggcccacgaagcaaataggacccaggaggctcagatcattatttttacccttctccccgttcaattctcggcccaacaaagatgagggtccaattcttttactaacccacttattttggcccattttatgtacccttcttttttcatacagctgccacatatcttttaaattaatagaagaatttggcattaaatatagttgcacacgtggctccttcagatcactccacagccttttgaatatgttgtgaatagtaaccgacctcctagattcttgtaatccttccttggaactctcaatcgccgccgaaacatcaattgtggaaaaaggatcgctctcgatcgttgcacgtacgctgctgcaacataatatcttcctcggatattcctcgttcaccgtgtcatcagtatcgtctgcaaccgccggcactgattccaccgaccggtcatggaaaaacgttgatgggtcatcgctgttcctctgttcttttctggtcctgttatcgtcgatatttcgcaccaagccatctcctatttcaactccatctgatcttctcttctggattgcttcttcatttttataaaattcagaatcctgatgccaaatggtgttgaagaatccattaaatctatatccccagtcgttgagtttgaaaatctttaagaacaattcagatccttggtagtgtagtcgaattgacttgggtacaaaaccgtcttcatcccctcccaacttgagtctcaagtgatgcagaaaatttttttctgctgtgtccttctccacatcaagcaaacctccacacatttctccaatcttccccataaacttaatgttccataaattcaacggcaacccttcaacgcccatccaggagcttctacactctatttttatgtccctgttttgctcttccatagaccatctgatgagagaaacaatcgtgccaccagtacccggtattacagtcttgtgaagcttcaacaagctctccatctcttcttcattcttacaccaaattatagttcgatcatcatacatttggctaaccaccaattttctatcaatttcccgagaaagattgtagaaaatgacactccaccccaccttactattatctctgaacattatcaaagcccggttccaatccttgtcacatttttctgcttgtaaatattcatggaagtgtttctgttccatcctatctctcgggaacatgttccttggcctaaaactcccattcccctttggtaaaaagtcccagtatcccagcttgttagagatccgattctgtataggcttgtgatattttctttttactaggtgagagtcctgttttggaagcttgtttctccccccgtatggcctacttcttctgtcatcatcatgatcgtagtatctgagaccagattgactcttcgatggttctgcaggctgtttcactatattcgcataagagggctttagcccaccacttctaacaaactcctcctcctccactagcgatttctgaatcttatatttctgcggaatacttctttttaat

SEQ ID NO: 38988 - DNA, 3550 bp, Cannabis sativa
ccacaactagcactcaatatagctatttcttaaaggttcccacctccgaaatcaaaagctcaatccatgtatcatatccaaaccaacgtagatccaaggataaaagtaaatttgaagcaaaagaaaaattgatagatctccaatggtgagataaattgacaaaatgacaaaaaaaaaacctctctttttagatgttctaaaatgttctaacactataaaacttgttatttagaaagtggtagaaacttgttatcgataagaataatcaaacaagtagaccaaagaacttctaatgttataactgtggaaagaaagggcaaattgctaaacattgttattcaaagaatattgttgaaggcagcaacaacctctaacaagaagattgatgcttaagaagagtgggattttgaagcatcatttgcagtagaagaatcttgaatgaagaatgcaagctttgaagaatgggcattggcgactgtcactccagagcatattaattataagagcaactggattattgattcttgatactcaaatcatatgattggagatatggagaagctgcgagatgcgacaaaatacaaaagaaaacgtgtagtagatactgcaaataattcaatgtgccaatcactctaggtgtgaccaaattcaatttcaaaatgtttatcaagtgttgggaatgaagaaaaatctaccatcaatagctcaattggcatcatcaggaaattatgtcgttttttgtcccaaggatgacaaaatttatcaaaatctattagtcacaaattgggtggtgatttatacctgatccacttgttaaggtaagggcaatcctcctctaacatgctggttttgttaaagtgggttaacaacccaataaccttcctaataaaatcttaaatatttgggacaccttaataaatttgacgtttataatctatctatgttatgttagctgagactgcttacaagataaagttcgaaagaataagacatcaacttgtggcatgccagactagcacatgttagttaccacaaaaggcgatgatcgaaaaaatggcgctcaaaggtctaccacaacttaatgtcaaaagcgacactatttgtgctggatctcaatatgggaaggcgcactaccaaacaaagaatagaacttcaagtctacagcctcgtgcattctgatgtttttggacgggtcaagcaatcgtcaattagcgaaacacgctacatagtgacgtttgtcgatgatttcttgaggtatgtttgagttttctacataagagaaaaatcacagactttaaaaagtttaaggaaattaaaaaataagtagaacgagaagtaggaaggaaaattcgatgcctacgcactgataatgggagagagtacacatctaatgagttctctcaatatttacaaaagtataagatatgttataagtatggcgtgttcgcatacaccacaacaaaatggtgtaggaaaataaaagaaccgacaccttgttgaggtctatcgaagcatgttacatgcaaagaatgtgccaagtagattttgagctaaaggaagcccatatctttaacaggcttcctcaaccaaagcttggctttgtttcacccttcaaaaaactgtgggtgtaaagaatgcattcttggattgagaaatatgtttatatatatatatgatctaaccaagagggtttgacgacaaagctcgatcacatttgtaagttgtaaaaagcattatataaactgaagcaagcgccaagagcatagtatggaagggttgccgattttttaataaaaagcgaacactcaatggcacatgcaaattctagcttatttgtcaaaatgaaagatgcaaggatctcagtggtgttggtatacgtagatgatctcttcatcactagagacaatgaggcgaaaattcatcaaacaaaggagactctgtctgtgtagaatgaaatgaaaaagcttgaagaacttagcactttcttgcttcagaagttgattgcactaagaaaagtttatttctctacaaacaaaagtacgcaaataatatattgcaaagtttggaatgcttgcttgcaaacctatatcaacaccaagcaaatgccgaactttgtgctcataaaggaaaggagttgcaagataatacaatgtatcgtcaacttgtaggtagtttaatctaccttacattgacccggccaaatatttcctatgtggttggagtattaagcatatatatgcaaaaactgaaggaacctcatttggaagcaattcaacgagtaatgaggtgagatcatgctacgcgatgactggatatatgttcaagatttgaacaagagtcgtttcttggtgtggcaaacgacaaccaaccgtgtcattatcatccatggtagcagagtattgaatagctactatggtagcacaagaaagcatgtggttaatataattattaaaagatttatcaaccaatcaactactatgataatcagtacttggtgacatatcagtcaacaatttgcttagcagaaaatccaatatttcatggaagaacaaatgttctaaaatgttttaagaaatttttaagagaaacctagaacactctataaagtttttagaagaaacatagaattacttggactagttatagatagctctagaattatgtaaatagtggtagaaacttgttaatgacttgaaaagttagaaattctaaaaatgtttagacatctcacttgtagcctataaatagaagtgaggtgtgttttatgtgtgcaaatttgaaaaagagagtccaaagggataaatataatttcatctagttcaaggtgattgggtgtgggagattagagttcatatacccattgtaccaaaaagatatgatgataatttcagttttagacttccaaaattacaattatagaccagtacccaccattgtaatcgtatcaatttggaagttggaaccattgcctttctcaaagctttcaagagaatcccattggtattagggaaaatatggagactttagaaaaagaaaggtatgagatgcttctagccatacctttctctgtcaacatgatggcctttatgagattttacgggttcttattttacaaaaagaaaaaaagaatcgaatgtaaagaaggaaaagacaacaactacatactgacatataacaattatagcacttacatcggagttgaaaaaaaaaaaaaccacgttcttttagatgcttaccaaaacctatgggccaatgtaaaaccttaaataaatatgcattatggcttcgactttaattatatatgaccttacagatgttttaatggcttacaagttaagcttgttctccattaaattgtgaaagaagttttctcaactaatttagaatgctcatactaaatagtagttcaaccctagaatttactttaacgaaacttggtaattatattgtaaatgaacttatggaaagtatattgtaattatagcaggccttcttcttagctgagaattttgaataattgattgtatggaaaacaaggacaaaataactt

SEQ ID NO: 38989 - DNA, 2686 bp, Cannabis sativa
gttaggaaaggaagatagacaaattccattggtccatgcaatcgaaaatatgcttcagtaatatacattagtgagacacatttgttggaaagttaattactccaacaaaaagcaatgctcccattgtcaaggaattcaatttattaggaaaattacaacatgaattcaaggtataggagtaggaattaaagcacctacttacaatacataacaaaatatagaattcaaaagggttcacataacatgtattttactcaaagaataccgaaacaaataatgaacagtgatttacgcctttgcaggccatgttgcctgagctgacatgattattcccacaatcactccaaacagcccaagtgcacttccaaaaatctcaatcacaagaatcttaacaaaaagtgaggagttttgggcatcagacaaagcacaactgcttccaattattcctacgcacaatctgtttcgaaaagaaaaagtcagaaacgaggaagaagtggtaatattaaagagttttattcagtcaatgatgagttatgaagaaacggtaggagacaaacccgcagacaagatttgcaaaaccaacaataattccagaggcaaagattgcatatcctgctctaagtgactcgggttcatacaattgtgatgctggaacactctccaatttagtttgtaggatgattgcaacaatgacaccgtaaatagcaacagcttcgcagaaaatgacgctgcagcacaagaacacaagcattagatccacttagtctcttacatgccacaaaattgtcactaaaaaatttaacaaacaaatttcatccaatctacttggttgaagcaacttctcaatgaaaattgtgaaaccttcaaaagaacttatttaatagtgtgattgagcagcaagtaatgaagcattggacaaatttcttttaagttctacagaaagaagaaaacattatcctaaaatgtcatttccaattgatgtgtgaaaactcttataacgtgtgctgaattctgaccaacacaaagttattctctggacatacttgcttcttacctccaaattttcgaggtcttacaaattcctcaaactcgcttggcaaactaagttcaaaattaagtttttccagctaaatgctataatatatctttaggaaacagtgaaacgggaaattgacaaatagattgctagataagtcaattaaggatagtgatattatacaattctcagtgtactactacttaagcttcaattcagttaaaacttctctgatacaaatggtaaagtgttcagtcatgaaattacaaaatctccatgttttcggggttaagaaagaatgagaagatttgaaaaagaaaatatgcagatcccaaatatgaccaccgataattttcatcaaaatcccacacacaaatcacaaaattaaacttaaaatacatgttcatacaacaactaagtgatgatcaattatcatcaaacatatataagtccataaaaccccaatctagaatgccttcactatgagatccaaactgctaaatctaaaaaaataaaaagtacgaattaaggttggcgattacctaatcaaattcttggacgtgattcgaggagctttaattgcagcgccgatcaagctacttccggtaatgtaaatccccctatgaaattaagaagacatttcgcaatttatcaaaacagcgagattaaaaggaatggaatgtgatagggttattgagagtttttaccaagcagccccaaggactgagacaccgatagcgatggcgattcctagggcggagtaggtgtagggagagatcctggcaagggcgctggcccatgaggtggtaacgcccacgactactgcggcggacatggttggtgttggcgtcactcgaattcaaactgtccccatttttgactgtcgaaacctgataacgacgatcgacggtagtaaataaatacgggcaaggcagcttctctctctattatttcatctttaaaaaaaagtctaatttcatcaaacgacaagtcgtttttaaatcttaaaaatcaagaattagtttcatatagatccattacatgtacaacaacaaaataagttagagataacctcattatatttatcagtattttttttttaaaaaaaaataataatttgtgttgtgtcgtgctacaaaaaaatataagtcatgtcgtttcattctaatatttttaaagggtaagtttgacaaggtctgtatgacagtattttcgtatcgtgctcaaattcgtgtcgtgttttgttcgtgtcagcccgtattttttaaataaaattcatcttaatggacataacttgtaattaaaattatatagttgtaataattttactctgcatgaattttattgtatttatataattaattaagataatatgttaaactaaattatcttaatttgggatttaatttaatagtgttatcacaaattttattaagatagataataaactttcattttttttctaaactagttgtttaattaaatctatcataaggttcatctattttttaaaaaaaaatttaaatataatccacaagcaattttagatttagtaaattttttatcttcagtttatactttagtgtctagtgaaccacataattttaaataattagaaaatatgcacaacattcttaattatataaaatt

SEQ ID NO: 38990 - DNA, 1757 bp, Cannabis sativa
aaaaaaaatggttaataatataacatatgtatacataagaaataataatcacttttattaatttgctcattttctttttccttttttggttaaaagatcttagaaagtaaccaactaaatcttcctttgtatgaaattaatcaaaaaattaagtactaaaaatgtgaatggatttaaaatttttaattataattacatgaaacatcaagacaaatttaaaaaatataaaagatattgtaatttgacaactcaaaactcaaactaaaaaacattcaaacaaatgaaaaccaatcacatgatcatgattaacaaatatcaagtaattattaaaatcagaaccctagaaattcacttctcgagtttcagctccaagaaccctggtgatcttgatccaattttcgcaactttcttttctctcaattttttctctttttgtatttctctttcgattattcaatatgaattgtatcttgcattagagggaatgattaaagccttgaaattgataatatgaatgaatgactcaaattatgtacttaattaactaaatagaattctacaacatttcaataactgacataacagaactgatgctacaacatttagctaacttaagaatttagttaaaactgttataatccaattagttatttgttataaaaattaccaaacaacaaaagtactgatgataaaaatgtacgttgaaatggataaatgtttttgtattcaatcatatcctcacaatatataatatcatattatatttttatgctactcaatctttaacccaccacactaaatttaatctctcgaacactgcaatcatatatagcagccatttagtatatatatttatttttcttcttcttatatatatattctcaatgaggaaattcactataatatttgtatatatattgctggtagatccaatattgacaaagctaatcatttttatttttataattgttattaatttaactcatcacaaaagattgcatgcaaatttatatattttctagggaacatgtatagtttttttccccaattaataatttaaagagtaaatacaaatttaagaacatggccattacatgaatatggaaaactaacatacatatataaatacatatttatacagctgtaaaatatatagtcaatggttgacgtctcatacaatttttaaatttcttctcatatttgtaacttttttagttcttaattaattaaataattgatttttattaccaaccattgatactaaacagatcattgagctgtaaaatgatgctgaatacttttaatattaaggaatctgagtagaaaagtaatttaaaaaagccaaaaaagattttctttttcaatcttcatataattgatgaaagttgaatgactcatctatatatatccatatatcacaatccaattctatatatattacaattatatgagtaaatgaaaaagctccacgtgtccctaaaaagattgaacccccaccaataaacaagaatcaaatcattcataattaatatttttactacaacaaaaaacatacgtgtcttcccatataaaatcccacgtaaacaaaaatatatgacctaaatttatgttgtggtcctccctcttaacttttcttatctccaattatttatgtatttatgaatattttgaaataaaataataataataataatagagacacgacttccatacatatatccacactcgtgcatatatatgtaattaatacacaatat

SEQ ID NO: 38991 - DNA, 2360 bp, Cannabis sativa
tattttttttatttcgggcccccaaaaagtgtgggccctaagcgcgggcctagcccgcctatgcctagggccggccctgcacaagacacaaggtgggctcgacatataggaagagattcctctgccattggtttacttgggacttgtaggacaccgtgtatctctatattggtaccatataatcttttgttttgggtctaaatccttacaatttttttagcatagataatattaaatatttatttttatatacttataattctttctatttttagataatgtgagattttagttgcacacctaacaatgaaattcagccatgacctattattgcttcttataatcactttaggtgagcctgaggcattgggtattctttgaagcttttaactttgtaggatcgaggttaaactacacgagcgcacattaagctattaccagcaaaaaagttttcatattaacaatattattaaggaggttaaactttgcctatattattaaggatattatttaacatttgtgatgaattataattgatggcaaattaggttttttctttcttgaactttaatgtattaattcatgtttctcgaacttcttaggtagttaaaaatttctcttaaattatcattgagattgttggactaaataattttcgtttaatttaagtaacgcacacttgacgtggattgaagttcaaattaaaggtataatttagtacatgctaaagtttaaaaaacacgattttatacatgttaaagttcaggggttttttatctgcctcctacggtggcttaaccataaacaatcaacacactaaatatttattagtaaaatttaagagaattggatgtaagtccttaaatctaataattttaataggatagaaaaaatttaaagagataatttaatttatatcaaagttaattagttattttctatttatatatatttatatgggctggaactgggtaataagtttgcttatatatgatttaactaaagtgctctttctaagagaatcattagattcagtgtcctgacaatggatattaaactcttcatgtattcttgatgttatcaatattgataaaatgataacctttaataataattggtgtcagtgttttatcaattaatttttagtaaaataaatttgaaaatctcacacgacataatgacactaaaaaaaattaataaatatctcacaacacctcatattagattatgtgagtttgacacgacatgcaagacttgttggtatctgtattttattttcatgacacgaatcacgtgtactcgagtgatgagttggtatatatagttttttaataaatttaagaacttagctcaacaccgacaccaaatgccacccttacctattctcacccatgttcaacttgtcagtgactcagtgtcattattttcatgcataaatgtgaagtaataacagtcctattttatttgaaagcttttggataataagatgacaatatattatataagacaataagagttggcagaaatgtttaaaacgtgaacaaaacgacaagtaatttgggtctctagctccttcccctctccattaattttagataacaattatttattaggattgagatgtttataatacaaaaacaacaacaaataattaggtacaacaacaacacctcaatcattatatatatatgtttgaattattccaagaaagacagcatcatcaccatactagctagatacataaactttacttttataggaagcaaattcatgagaatttattattgaatgaatagagtgattaggtaaccactttggttttaagcaatgtcttctcatactcctccacgcacttaaagagctctgagatattgccttttccgaagcctccacaaccacctttttggtaaagcttgcctttatcatccttcaccatgcacccaactctctgtattatttcaatgaatatcgtcggtctgcacatttcaaacaagttcttaatcaaactcattaagccacacgtacaattttaactagaaaaatgctaaaaattaccaatggtgtttaaaatatctttaatagtaaaaatttaaaggataatattaaaatgttatactatcagagagagatggatgtcattttaaaaatttacatggacgttatagagtaatattgatgctatttatttttttttaataaaaaattaaagctaaaaagttattgttcttaaatattaagatatatattaaataataatgtgagatattataattatataacatttttgaagagtactatactataagagtgtttttaaaagtaagagtgtaaaaaatgatgtgaaagatagataaaataaa

SEQ ID NO: 38992 - DNA, 2596 bp, Cannabis sativa
  modified_base (48)..(49): a, c, t, g, unknown or other
  modified_base (1086)..(1090): a, c, t, g, unknown or other
actattcgccagatagaagttatacattccatgtttatgctagcgctnncactcaattgcactaccgtgttcataacttggctgaatagacttatttttagggcctggtctgtctatgatctcctatgggcggccatttattgtttatgtagcctcggtatgtgcctgccaaccttagtatgtgcctgccagccttggtatgtgtccgccaaccttggcatgtgcatgccttccttggtatatgcctgccagcctttctagcttctttgtacaactttccttgtaaatgttaggcttcgttgactgaacaggtctttttggtctgactattaatctttggccgaccagcttattcctaaggcttggccgggctacaaacttaccctggttttcctatatgctacctttggccagctagacatggctagccaaggtcttgatggcctgcttcacacctttttcttattgcttgacaattttgctcgattgctttagaacccttaacaattgacatgtcgtgtaagatgactttgtcatgttattgtcaaattatatcccacatctcctcgatcttgaccatgtggacatgccacgttaggtggacaaaatttaaaataatatagcatgtttctataattacaatgaaaagattgagaaatctaagctaattacttttgttctcagaatttatcccacaaatgtagagtatgtctttgtgacatgcaagcttagaaataacgatgtccatctcttaaatttccaactcgcactctttggtcggtgcatgcgagttacataccttatagagctggttggatgcctacttgtgagcttattcaaacattctgctatgtatttgtgacattgagtattataccaatctttatggactgctaggagtaaaactatccgcccaggttacccagccatgtgccaccgtcctagtgcaaaaattaggataatgaattccttaccggtacggaagctttttttaccattaattttaaatcatgtggtcattaagtaataaggtgtatattcttacaataagactgtttgtctacaattaaaactttatacatattnnnnnaatatttaataatatattttttaaaatataaaataatattcataattgaaatatttattaaattttaattaaattattattattattttttggaagttaatttaaattgtttttgtataagtattcatttttaaaacataattttacttacgagaattttgctataattttttatactactaatcaactataacaaaattaattacttacttttgccatcaatttgtttacatatataattctactataattatcttttaaattaatttactttattaatttttttaggggaattactctatatatactatttttttaacattttttttcaaatttatggtttgggtttctaaagtggttgcagcgcttgttgcaataggggtttctatacgattttttgtaacaatttaggttgcagccctagttgcaataggagtttctatgtagaattttgtaaaaatacaaaaaaaattattttgaagtgtaaaaacgaaaaagtcctttgtttttttttttatcaagaaagatcatttctatttatcaaaccgagtgaattacatccacaaggggattccccttcaaaatagaaatgacaactcatttacagtttaagaatattttatctatgctagacaactatgctagacaacttcctttcgtgtacaaaattatgtatatttttgaagctttctttaatgctaccatctttatacaattccgattcatacactttttcttatttatatacaaatttcaatttagtcaaatgtcataaagtacaccagatatcactttcttataaacataatgtaatttttattctaatatatattttttctcatttttttaattatgtatttttttaaacatatttactttttttaataaaaaaaattaaaataacaaaacccattaacataaagtcaaaagaaaacaaacacattaatatatacatataaatataaaagagttctctttttttttttttttttgttttaacaacattttatatatataaaaagcagtcattttttgaccaaaataaattacatgatatatactatcatataatgtaatttttatttgactttaattttgttggctgaaaaaactacctcatattaattataaggcacaaactaaagatcctacaataaaattaccttacatatacatatatatatatttatataaatgagaggacaaaagtccttaaatctaacaatttcaatagttcaggagaaattttttaagtgtcaaaaaaatttagggaaaatgatttggtatatatcaaaattcagggataaaaatcctaattaacttttataatttattttaatgttaatttgagatcttttatattttaaaataagaaaaaataaatagtatatttattctatataaatgtggctatataactgaattcttggttaatgagaaattattgagtgactttttttttaaaaaaaaattatgttaaatttaagtactctatcgttaactctt

SEQ ID NO: 38993 - DNA, 5077 bp, Cannabis sativa
  modified_base (4894)..(4896): a, c, t, g, unknown or other
aataaaataaagagaaaaagtaaatatgtttaggtaaccgtgtgtaagtatatatgtaataaaagtttcattttgtatttttggtgtaaaaatttcaaaaagaaacccaataacttatcctagatcatgctctcttcctggtaaaatcacttttacatttgtttttaaaaaataattatttttacttctatatttgtgtatttcttttgtaaagtatcaaacaatgtatcaacaaaaatgtactattaataaacaaattaggaaaattctacaatacacccctttaaaatggatacactgatacacatttatctgttttggtatccgaaataattttttgtcaaatttttttctcattttcatgtacgttataattatttaagacatcctgtaaaattttaagaaattcaaaaaaatttcacacgtcgaaaataaagttcaaataatgtgttacacgcgtgattattttattttatatgcgtgtgaaatagactgtctaaatatcgatttctataatgtaagttattccgaaattctgaaaattttgtaggataccttaaattactactgtcggccttgatgttcagtcttcacctacttacaggttaaacactttgaaacatattcaacaatatcactcttcattcccggtcaccaatatattgtcttggtgtcatgatacatctttgttgttcccatgtgtagggagtacgaagtattatggaactcatcaaggatttccttcctgatctggtcatctgttggaacacaaattctttccttataactcaatagtccacttggagccacaaggaaatcctttgtagcgccaatctcaactttcttactaagttcgatcaattcgagatcattttgttgaccaatctctatcctttccagtaaatcagactacaacgtagtatttgccaactttccgactacaaactcaatcttggccttggccaaatcctcggtccatcttggagagatttccttcaacttgtagatttgccctggacctttccagctaagtgtatctgccactacatttactttgtcgggatggtagaggatttcacagtcgtaatccttgactaactctagccatcttcgttgtctcatattcagatccttttaagtgaaaaattatttcagacttttgtggtcagtgtaaatcttgcacttctcaccatataaataatgatgccaaaccttcaaggaaaaaatcacagcttccagttctagaccatgagtggagtaacattgttcgaaatccttcaactacctagaggcataggcaatggcctttcctgattgcattaacaaacaacccaaaccttgccttgaggcatcgcagtatatcacaaacttttcatcaaaaattagcaggctcagaactggtgcagtaatcaatatcttctttaattcttgaaagttattctcgcatttatcagtccacacaaacttacaactctttcaagtcagctcggtcaaaggagtagaaatcttagcaaaaccttccacgaatctcctatagtacctagccaatcctaagaaacttctaacttcagttggtgtctttggccgtggccattctcgaacagcttcaatcttcactggatcaactagaatcccatccttacttaccatatgtcctaagaaacttacttgggacaacaagaattcaaacttcttaaacattgcataaagcttgtgttctcagagtcgttgtaataccatacgatgatgttgttcatgaacttcttctggtttagaactagaatgtcatcaataaacacaatcacaaagttaacgagaaattcctaaaacaaccaattcattaagtccataaatgatgctggtgcattagtcaaatcgaaggacaccactagaaactcatagtgcccatatcgagtacgaaaggcagtttttggaatatcctcttctcgaatccttaactagtgataaccatatcaaagattaatcttagagaagatggtctttccttgcaactggtcaaacaggtcatctatccatggcaaaggatatttgttcttgattgtcaacttatttagttctcgataatcaatgcacattcgtaaagacctgtccttcttcttcacaaacaaaactagtgcaccccaagtagaggtactcggcctcataaactgtagatcaagtaggttctgtaattggactttcaattccttcaattctgttggtgccattctgtatggggccttagaaattggctcaacccctaatactaattcaatcttaaagttaatctctctccttggttgtaatcccgataactcttccaggaatacatcaagaaattcacatactactcgaacatttttcggtcccttaggtatatctttcgtggtatccaacacactagccagttaccccatacatccttcttgcaataattctctggtcctaagtgcaaatatcattggagtccaagatccctaaacctttcccataaaaacaaatggggtctcaccctctggtccagaagtcaccattccaaggattgcatcaaaatattctaagtctgattcaatcagatgcactgaccattctctcccttctactaacactgggagagaccttacccacctcctggagattaccacttctccagtaggtaacaacgtaccaaatccactagacatgatatcacatggtctactcaatttgtcaatgattttactagaaatatatgaatgtgtggcaccagattaatcaaaatagtaaacataatacaaccgatagttatctaacctgtaatagtgtaagggccagcctccgcatctgcttgggtcaaagcaaacaacctagtaagaaccataggactctctttcttggcctcgagcttctgtagctgcgggcacttgttcttgaaatggcttgctactccacattggtagcaaactccagaccgacattcacccacatggtgtctcttacattttgggcattcagaataaggctgccaaacctttttttttgcctcgacggaaaccctagttaccttgaaactttctatttggacccacaaccggtggtccatctgggttcctatttcgatcattaaagctaaagcttttactcactccagcaccacacgaggtcttctacatgtccttcctctgagtacactttttacgaatcaggctttcagcccctccagcagtgagagctaagtctacaatcttaggataagtcttcacgacccttgattgtttggcttccataataaaatctctagaaatatgttcttcaaggcctttgataaacttaacctttcttacagcatcactggccacttcatcagaagcaaacttggccagcctgtcaaacttggttgcatatttagtcaaagtcatgctaccctgaactaatcacgcaaactctttagcctgagcagcacgaatggattcattgtagtatttctcataaaacagtacctaaatgcatcccaagtcatagtattctcattattaccctgggaaacaatctcccaccatatacgagcaacatcccgtaacatatatatagcacatcatacctggtcattatcttccacccgcataaagtcaaagatggaagtaatcatactcatccactgttcttctttcagtgcgtatgggccaccctcaaacacatgtcggttctgtttcctgaactgctgataaattggttccatacgatcccccatattttgtggcactacctaaggtgccaaaataggtgcaggacaagcctattgctctctcaggtctcgaatctactccccttgctacctaatcgtctcttgcatgccagcaaacagttgttcccagtcctgagggggtggaggatgctcttcaccaccacctaccccgagccccttctcgcggtttaggcgattggatcatcgctgcacgatctaatgtactgtaacccaaaaaccttcaaccatttagaattcaaacaatatcaacatcaatgttaaccccaaaaatcgacagatttgatttttgagattagtcaacaatctgccccagcagtcaagagacatcaactgcaagagtcagtccaagaatgactgagtcaattcatatggcctaaagattgttaaacttggaaatacatgcttacaagtctcgacgtatatccacgcaacttggaggtcaaccccgtaacaactcattagtagagtttgtgagattaacttactggttacaattgctagaggattttcatagtgatatgttaagaattggatcttgccacaaacataagattcaaagatctctttcttatctttccaaagcatctttaattgtccaattcaaatgtatatcgagaaatttatggccaacatactaagactgttaaattgtgatagcttggtatgcgagctgatagttcccatgcgagccgacaggctattgcgcgactccctagctattgtgcgaccccatagaggttgtgcaatcccatgggccattgggtgagccaagggcattttggtgagttgtggaaccttcatgcaagtgatggagcatccgttcgacctagggatgtcaatcgcttcgggcccggcccgacccgccacaaacccgacccggccggacatcactttggcccggcccggcccagcctgactccttcttttggcctagcgggtcaagcccggcccgagataatcgggccgggttaggcccgacccgtttttttttttgttttttttttttttaagaatacttattattttgttttgtttcatttggtaaagtgaatgatatttaatttttgtggtggttgagacaattcattatagacacgttttttatttattatgttattttagagagagaaaatttgatgagaaaatagnnnatgcatcaaaacccaccattgatttttattattatttgctctcttttctttttattttatttctaaaaattattattattattattaggaggtggttagttataactattatactattacaatatgacatgccttattaaaagagatttcttttttatttagttttgtcttgttttgagtc

SEQ ID NO: 38994 - DNA, 3678 bp, Cannabis sativa
aacatcgaagtatatgttgtaaacatcagataaaacaaggagtatggctagctgataagctacctgacctacccgttccagaaactcaaacggacaaattaacctgggacttaattcccctttttaaataatttcaaaattttccctttcattggaaccacctgaagaaagataaaattcgcaacttggaattcaatatctccacactttagatcagcatagctcttccatccgttatataagcaatatacaagcttaaatctttatactgcatcaacaccactttaacaatactctaacaattgttattacatgaaaactcgtttagaatcttccattcagtatccttatcagactgatacaccaatctggtttatatcataaaatttccttcaaacaaaatcaaaagttcttcgtcaatcgggttccaaacatttccctgtacttctaagttcggagtcactctgttggccattttatttcttcccaatgaatttaactacaatgtaatattaacaaattctccaatcacgacctctctccttgttcttgttataattccagtaaccttttctaaaatcctttcattttacaaacttgtcctagaactcttcagtttaaagtattcactactaatgtacttcacaaaatggtagaaaatcacaccattaaaatttcaatcagctctaactatcaccactgtttcccatttaaattcttccaaaagaaatagtatttgaggcttttgtattccgtatagacttcacattttcaccatacaaataatgtgccctactttcagtgcaaaacaattactaccaattcaatatcatgacagaaatatcattactcacacttcttcaatcgtttaatagcataggcaataatcctcctagactgtatcaaaatataatcggatccttgtttgaaagtgtcaacctaaatcacaaatttctcctcatcgaccgatagtgttaacattggtacaatagttaacctctgcttcaattcttctgccttaactcccttaagagtgtaaacatccctcaacatatatattctatagaattctgtcaattccagaaaacttctaatctcagttgtagacttaagttaaagtcaactctgaaatgctttattcattgtcaaatttatcgagatactatctatatccatttcatgctccaagaaacttacttaaagtcggtaaatttgcatccctacaattagcataatgtttaagctcctaaaatattacaataccatcaaaaaatacctctcaaatgccttatttgatttgaaagaaatcaaaatattaataatgataacatttgcgaagtcatcgagtatgaaaaactgctttggaaataaccttctcttaaatcttcaacttgtaataaccagatcgaagaccgatctcagagaagatggtacttccataaaattaatcatcacaactactatctttaacaaaggaatacttactcttcatcatgaatttaattaatttccaacaatcaatactcttttgtaaagtttcattcttcttcttcacaataaagctagcatactccagataagggtactcaaaccagaaatttcaaactcaacattttcggacaacggaactttcacccctttcaattctgcagttactatccagttcaaaactttagatataagttgtactcccattgtcacttcaattcagaattaatttcctgctttatcaataaccatggtggctcttctgaaaaggtatctataaacccttgaaccacaagactgtgtctcaatctcactgatgttccctttgcaatatttgctgcactaattgaaaggttgatacatccatcccataataaaccttctgtcttaaatgctgccgttaatggaattcggaatccttgaaccttgctcacagacacaaatgggtcctcaccttctatttcgaagttaccatctttctttcacaataaataattgaattaaactttacaaatcaatccattcctaattcatcctctagatcctctaatcatagctcaattattacaaccaggcattcccttcttgccccacaactctggaagggatttgaaccacttgctggagaataactagttctacagtaaaagtagagtaccgaaaccacttagtaacacatccttaactttatacaatcttccaatcatccttcttgaaatataagaatatgttgcacgagaatcaattaaaactattaacaaagtatgattcatagaagttcaacttatcaccgtagaaagactagcactagtcttagtctaggtcaagcaaacacccaaacaagaactaaaatgcctcacccctctattccaatcgctgtaattgtaggcagtttctttctaaatggcctactaccccacattagaagtaggctcaaatttagcattcactttgctgatgtctcttacatctcgatcctctggatgggtttgtaaatcttcattcccacctatcagattctttggttaccttaaattctctcactagaacccataactggtgggttgttagtctatttccatgagttcactaaggtctacacccttatcagatccaacattggacattctctttcatgaatctttcttcatactatatcccttttgatctaatccttactccctcagaagtaggtgttagctgaaccacttgagcgtcaaacggaacaactcctaattgtttaaccactatatccacatttcgagcgatactctatttctacctttgattggattcaaccttcctagtagtcttaacagccgcttcattaaaacaaaactttatcaattggtctagcttagtgatattctctctcaccacgctacccgggatcattcatgtatgctctactaccttaccattcaggtaatctcttatttcatggcatagatttactcctagtcttgttgtaatggaaaattcatacccacactaccaactccgagcctgataagcgcgccattatccttactagatcgccccaggtacaccttccagtacactcacgtccatttctttccatcgttaaaatctttcaaagtagaattaatgctaataagcattaccataaaaacatttaacaattttatcttaattcatgcttctcaaatgcttaaacatttctaatgagcaggcaattcatgcaatcaacaattaatctattaatcaactaacaattaacaattactaagccaagagtcgaacgagtcttcgcagccaatgtacatatcaagccagtcttcaggatctttaaagcttggtcgctttgataccatgttgtaacgccctaactctcaggaatgccacgtgtgtgcctttacaatcttattattattaatctattagtttcggaaaaagtgtggcttaattcttttcaaaccaattacaaaactgttattataaaagtaggttacattttcaaatatagagaaaagaagtcgatcctgcttcccagaagccaagacaccacggtgtatatgtacattgctgggaaacctccaactcatggccaaacacagtgttaggctatttttagcctaagtttcaggtcacattttatagttgtttttcttctttattattatttttggaatagaattatgcttgttgtctttagtttcaggtttcaac

SEQ ID NO: 38995 - DNA, 1617 bp, Cannabis sativa
gagaagaaataggtgagaagatataggtgggcatgtggaaaatagaaataaagtaggtgggcacgtgagaaatatggcaagaagtaggtgatgatttttgaatggcccttatacgcgacgatttaaccatcgcctataaaggtccattaaaaaattcattttattaaaaaaacgtcgcctattttgtttactataattttaaaccatcgggaatactaaatttttctcgacagttttaaatagttacttaatttttttagcgacggtcccctaaaaaactcgtttttaggaccgtcgcgaattctgatatttgtagtagtgcactcatatgtaggtaaatgtcattacctacaaataaacaaattttttttaattgtaagtaaaagattgtggagaaagatcttcccctacaatattttatatttgtaggtaaaaattactgtggaccccatttaatgagctggacactaacgactcaatgtatgacatggcaagccacataagatgaaatatggcacactctcagttgtccacgtgacacactaatcagagcatatattgatgcttaacttcatcacgtaacattaattaggccatgtggcaagtattaattgggtcaatttgtattaataaattaacatttcttaactgtaatattttttctattaataattcttacaaaataagaaaaaaaaaattaacgaataagcatcactaaaaaagaagaaactaacttaataatgaatcatcttagtacatattagaaaaaattcttagtgcatttaaaaacatgttatgttatagttgaatatatttctcaccatgttgagtgtgctacattactgggtgactcatgaacaggggcggacccacattgtagcgactgccccccttgaaaaaaaaaatcgagaaaaaaatgtatatgtattttaattagttacaacatatatttgtattaaaagatgatatttatagacataatagtaatcttggtgtaatggttaaggtagttggtaaataggttagagggtaaaggtttaaatcccactaactacactttatattttctttttaaatttatttacgcccccctcactttaaattctgagtccgccactgctcatgaaatcagtttccatactttagaaaagtgatagactttcttgaactcctttctttccataaactatgacacttataagatattaaggtatataactacctaatgttgccaaaataataatctcatcggtatgtagtacatggaacgaaaaccaaagaccataagaaaaaattgcagtggcaaaaaaatatgatacaatattgatgcaaacagacattaatagacattaactatgtatgcatacataactaatccacttggaagctaggaatttttgaaagaaatagttgtctgctttagaaatagttgtcgatattaaatcgacctatactaattagaaagtgacttgaataaaataaaataattcaataaataagatagaattcacaaggcacaaataaaatctaaaatatacaaacaggggcggatgtatgtgcataggtggggtggccttggccccctcagaatttctaaaaacaaatatatatatatat

SEQ ID NO: 38996 - DNA, 6720 bp, Cannabis sativa
  modified_base (6320)..(6329): a, c, t, g, unknown or other
  modified_base (6490)..(6502): a, c, t, g, unknown or other
atttttatatgaattggaagaaaaaaattttaaaaaaaaacttaaattttttattttttaaagttactctttaatgataattttttaatgacaaagtagattttttgtgaattaatattatttttagtcacaataagaaattatttatgattaaacatagttagatacaagtaattataagtgagtaaatacatatttagtcacaacaaattatgatttttgtaactaatatttttaactattttttttttgataataacataatttaatgaatatttttagctattttttttgttattgttatattagtaacgaattttgatttgggactaaatatatctttttttgtagagtaacttgtgtccatctaagagaagtaactagtagtatttgagtttctggaagtagcgtagggccggcccaagggtgaggcgggctgggcccttgcctaggccctctcactggcccaaaaacctctaatttatatttttaaaatatcatgttctagatatcaaatttatttttaaaaatactatatttaacatattattaagaaataagacacaattatttttcaaataccatattttagattttactactatacatatatagacaacatatatatgtttttggcccaattcctaattctcgttcatttcattcatgatgctttaatctaatgatattacataattatactaaactagactagacagtactaacaatttagtcataagtctacaccgtaacataactcttcatttcacattctctgttctctctcttttttttttaacaatcataagctcaaatcgcataagataaacgagtaattgcctagtccaaatgtgtacaaagtcacaatattagtattgaacaaaattaacttaaatgatagaaactagtattgtcttccatttgaaattaaacaccaatattagcatataatgtatttcaagcctaattgtggtataattcctctaaatgaaataatattatctctaaaaggttaggtgtctctcgaatgttgtttccagacagctaacttgttcatcccgtaagggatttggtagaatgatggttgaattcggaaaggagttctcgaattactatcatgtccacttcgggctcggtctttaagatagctagccctcctccggaatggagtttcagacaactagttattctactggaaggcagtttcggatagtcgactccagctaattctttcctatctaaatgcttcttcaggggagtacctttggtccgtgatcctaaaagcttgtatatgttcccgaatacattaagactgatgctgatgaggagacttcgctcaaagaggggttgattaagttagttatttctaactaacttaacaacatcgtttctcacaaccaactttaagatcttattcctatgcctataaatactatcttgacttgttatttcgatatacgagtttcataactttgttaagaggggatttagagtttgagaaagagaaaagattgagaggtccagagagaggtgcatagaaaagagagagatttagtttggattttataagaagaatcttctgtagatgaagaagattcttgtatgtaagtgtgagaattgaaacactttatgagaattcatcaaagaatctcatctcgactgtattgtacctattcttgctcaatcaatgaagaaatattacggtggtgttccaaaattggagtagagccataaatcacatcgatctatcagacttgaaccaatatatatcttggtgttgatttttttttttgtgtttattgtttttagatttatatattctgtttgcccctgttttcatccgtttgttgttcttgatttgtcaatcttgtcatttctaattgtttgattgtttaaagtttagttattttgattctgcactaatagtcataatttttccacaaattagagcttggtaattgatcaagaatgtagaatcaagattctttccgctgtaattcttaaagaaacgttgaatgtcatcaatgacgagtttcgaattagagaagttggatggaatcggggactttgcgctatggaaagaaagtatgaaagaaattctagtgcaccagaaaggctccaagattcttggagacgagaagttattggcagaaaaaaaatatcagaggaaaaagcataaatggaggagatgtcgcactacacgatcatcatgtatctatcaacaatgttcgaaaaaaattcatcacagagaagatgacaaaaggagtttggaacaagttggaagagttacacttaaaaccatcgatagctagcaagatcaatttgctagaaaggttatacagttttagaatgatttcttccatttctttagatgataatattgatagatttaatgagattattgtaggattgagaaatataaatcacaaggtttatgaagaaagccagaccattattttgttgagatcacttccaatcgcatattaagaagaagaagtaaaggctgctactatcaagtatgacagagacgtgattgcattagaggatgagttacaattagaaaagaatccaagaaagaataagtgtatatggcaagaggaagatcacccaagaaaataagttcgaagagtaaataccatcactctcaatcaatatcgaagtctagagaaggaaacaaggaagtgttacttctgtggaaggtctggacacttgcaaagatcttgcaagaagtacaaggagcaacaatgctttaacaaatctcataatagagataggaaggacaactgacatccactctaggaaggactctgctgctatcgtggaggatagcgatgactgctccacagacggggaattattctccatctcagaatcctcaataaacagggagtagattcttgactctgaatgcacttatcacatgtgtccaagtcaagagtcatttttttgattataagaagtttatggaggtaaagttctaatggataatgatcattcatgcagggtcattggaaccgggaaggttaccatcaaacaatatgatggcagaatcaaggtgctaacgaacataaggcacatcctgaagcttagacaaaacctcatatctctgggtgtgcttgaggatgaaggatacagatacaaatccatgcacagaagctcgaggatcactaaaggttctctggtagtgatgaaaggagaaaaaatcaatggtttatatgttctctaaggagaaactaccccagcaagagaggcaagaatggtgaaaaggctagcattggatatgaagttgtggcatcatagacttggatatatcagtgaacaaggcctcaaagaactacacaaacaaggtataattgaaaatttaaattcatgtgccttaccattatgtgaagcttgtgttttagggaaacaacataagctgaagttcactccagcaaggcacacaactaaaaagatactcgaatatgtgcctgctaatctttcggggccatacaaggtgcctactcactccggtaagcaatattttatttcaatcgttgatgattacagtaggtgtatttggacctatttactatcaaccaaaaatgagtacttggaacaatttagaaattggtaactcagatggaaaaccaaattgaactcaaaattaagaatcttagaactgataataggttagagtttattaactccaaatttgaaaagatgtgtcaagaatttggaatcactaggcatagaaccatagtgaagaccccagagcaaaatggggttgttgaaaggatgaaccgaaccttgttgaacaaagttagatgtttaccattcagttctaggttagaaaaaccattttgggggaagctttagcaaccgtaacatacctcataagtagaagcccaaacaatgtgatagacttaaaaacaccttatgaaatgtggtacaatagaaccctaacctaatgcatttaagaacatttagatgtacaacatatgaacaccaatctattgatatgttggaacctagattcgtgaaggaaactttcctaggttatgccttaggagtcaatggatatagaatctatatttccaggaaggataaaccaagggttgtgattgctagaaatgttatttttaatgagttggaatatcccccacttgacctccgggaagggtagtgtgtcttcgtttgatgcaggaaaaataggaaacaaagacactacaagtgtgaaaatggagtatggaacgaagctcccggaaaacagttcacaggtggaagatagtgtggaaccggaagacaatgcgcagatggaagctgttgtggacccggaagaataagataacaaagaccaaatagctgacaggtaggtctagaagtttggctcgtgatagaacccagagagagatccatcctccagaaaggttcgcagaagcagacataatagcatttgcactggcgacagttcaacaaactaaaattgaagtgcccagaagctatgaagaggcaatttcaggtgaaaataagtctaaatggcttcaggtcatggatgagaagatggattcactctaaaagaataagacttgggtagttgtgccaaagctgtagaacaagaagattgtagagtgcaaatggattctcaatgtgaaagagggaatcaatgagaatgaacccgtgaggtttaaagccaggttagtggctaagggttttactcagatgtaaggtatagactataatgaaatcttctcacctgtggtaaaatataagataataaggttgatgttgtctttagctgctcaaatggagctcaaggttaaacaacttgaatgttaagacttcctttctaaatggattcttggatgaagtgatctacatgaagcaaccacctaagtttcaggtggaagggaaaggggttgaattagtgtggaagcttaacagattcctttaagatttgaaatagtccccaaggcaatggaataaaagatacgatacgtatatgcgtcaaatcgggttcaaacgatcctcatacgatcactgcttatattttaagaaatggagcaatctataaccgtgttcctattgccctatgtggatgatatgctcatcatgaacaaagataattcggtgatcaaaagtatcaaagctaagctcaaacgagaatttgagatgaaaaagcttggaccagttcaaaagatacttggtatcgaagtctcacggagccggaagaaagggactattagcttaaagtagtccgggtacatcaagaaaattattcagaagttcaacattgaataagcaaagagtacatccattctgttaggaggtcagtttgttttgtcaaaagaatagtgttccaatagtaagaaagagaaagaagaaatgaaagatgtaccttatgcagtggttttaggatgtttaatgtacgtgatggtgagcacgagaccagatataactcacgctctaagcatcctaagccggttcatgtccaatccaagtattaaacattggaaggcccttaagtggttattgagatatttgaagggaacctgggattatggtctgacccatgaaaatctaaacgagaagtagaatttaaaggattcgtggacgcggactactcgaatatagataccagaaaatcaaccacttcctacgttttcttaacaaatcagaactgcataagctagaaagcctagttacagtttgtggttgctctttccaccacggaagcagaattcatggcaactacgaaagattttaaggaagcattatggcttcccgcccggaatactttatgagctaaaacaaatcaaagggagagtgactgcgtattcggatagccagtcttcaatccacatttgtagaaacccaatttatcatgaaaagaataaacatatagatataagactctactggattacaaagaagatagaagaagagctggttgatttagagaaggtctacactaaagataattttactgatgttgggactaaggtcttaatcttaaacaaattcaagcattgcttgaacttgatccatctcagaagttagtatattaagattcctggaacaccaaacatgatggctacattctttcttcatcatcgtcatacttttaattttaagtaactaggtaaaatttgtggtatagttcctttaaatgaaaaggtctccactatcatccctagaaagttaggtgtctcccggatgttatttctgaactcaactatcattccaccagactcctccaaatgaaccctatttgattaaatccaaatagggttatatattaaattatttttgattaatgggattaatcaatatatgaacannnnnnnnnnttaatcttataatcttaacttttatcaaatagggtttacaaaagaggcataaataatcaaatagggttagaaatacggtaattaaagctagaaccctattattttttttttttattttttagatttaatgggattaattttatttttattttattatatannnnnnnnnnnnnacccatgaatttctcataaaccgaaaattctattatataggcacactttatatagaatagatatatataaatgattgttatattgactaacatatatagaaataaaatgacgctacaaaaaatattgttacttttactgataattttttagtcacaacataatttttttgtaactaaatgtgacttttagtcacaacaaaatatttcttgtgactaaa

SEQ ID NO: 38997 - DNA, 1711 bp, Cannabis sativa
aatacgcctatgctagttagggtgctacatagataatgcgagggagaaaattaacaatgccacatcaaatttttgatgataaaaaagaatgataactaacaaaaatattatatctgtatatagaagagtttacgaattttttttaacatggtgtatgttttaaatgatacaattttatattggtgtatgttcaagagataaaattctaattattttttaaaatagttatacctaaatagttttaaaagtcactcacatgcgaacgcacgtgcttcctaactagtgtatataaaaatgacataaaccatagctcaacgaatattacattgaagtgatgatttcaaaagttctttctcctcttaacaaaggatttcaattaatgataaaagagcacttacctcggtttctcaattttattttttaaaatatttcacccaaactttacctttttttattttacttaacacttttatattgtatcatacattatattttttttttctacattcatttaaatattattttagaatgtatataaaatatacaataatagagcatgaataaaatagccattaaatattatttgaagaaaaactattacttctatagtattctttaaaatttgaaactgaaatagctcatttgatgaagctaattttttgtcatcttttcacttctcttttctatatttgaagagaagagtatcataactcatctaatgttagtattctgtaagctcaatattttattattaaacttagactaacaagtaaaaaaaaaaagaaaggaaaaaaaaaacaaaaaacctatagtagtactcttatttttgttggatactgtgataatgtaaacacaatcagtatttgttttaattaacaatcgtctaattatttaaatgtatcttcattgtagacttgttttagtttaatactgcaaccaacgcaaatattacgttggagttgtaaatcgcatgtggacgagaagagcttataatgctgcggcgtattgggatctataagaatggaacagagtcaccacttaacgcgtagcactattttcttcaattagcataatgttttttcattttcctttttactttgtagcttctcaatttgcccataacacggcttaatgacgagggaatcagcgcccatcacgctttaatgatcaaaattttcacatgtgatgaatgtgatcatcatatgccatttcttcttccggtgttctagttcccactttttgagaactaggaaaacattgaaaggttctattaattacattgtcaagtagttaagataattgtgcattaaaaaaatcttttatatattattgatctattctcgatttttgtttaatatatgttcgcaaaaataagatgtttctcatctcttttggagctacaacttaaatgcttgagaatcttgacatgtgcggcaacaaaagtagttacttttactgagtatgattgagtttttccccctcgaagatagcatcacgcaatttaggattatgaataaggtaaagcaaatcggcacctcttttaatttaggatccattcgatatttaaccaaataaattggacaataataggatatatatatagagagagatagagaaaaaatcgaggttttgtgatagaaatagttgagtaaaaagagacaaattttacttaccttaaatgtaacgccctaatgctaaggcacgctacagt

SEQ ID NO: 38998 - DNA, 2069 bp, Cannabis sativa
aaaaaaaaacaaataaataaatagaaaaaaaaaactgctttcttatttaaaaaaataaaataaaataaatcattttagaactttataccaaaaaattatagaaccaacttatacaatttctaaaatgatttattttaaaaaaattgattgaaatttaaatatatatatatttatatatattaaaaagaatcagtttctttttctcaataggtataataaatagttggtcccattaataaatgttgtgtttgaaaaagtctcattttttttattattattataaataaatattgtatataaggaatataataaactaacggaatgaagttgataaataaaaatctgtcaagtcatcatcaatgagatggattgttttaattggttagacagaggaatggacagaaaaaatctggatagaggatccgcctccatggaggagatagatataataaccccattaacctaaacagagatgcccatttcctcctaataatttataaactatacacacatactcaaatcaagcaccagttggtaactgttattctcaaatttttcattttgttattgaattatttatataacaaataattatttaaaatgaagagaaatagttgaggaaaaaaaacttctgcaacttcctttttttaagcaattttctaaacttttaatttttgacaatatgaggacaaatatgtaaaactcttgaaaaaattcgtgcgcatacaaagaacaaatatacatacataatttctaaaagggctaaaagcttcaagattgtttggttaagatcttcaagattcttttgataaccaaagaatcaacttggttcttgaattggattattgtttctacaccttatagaatctattttggtagtcaggttgtactactacagtagaccaattacactggggaacatcaattagaccactatatatgatattctttttatttatatatcaaatttccatttatcttatgttattattattttttttcaaaaacaattaaaaactcaatcaatacttgcatcatgtataaacattttttaacaaccttttctttatgtaatacaagagtctccacttttaacttagggtggttttgttgataatcttttttctgtaatatttcaaatattttctattaaaatatttttttttttgactatgaaaaatctcaaactcagaaaaattaaagaaattccatactatgaaaaatttcaaactcaaaaaaatcaacatagataagttggaaacaaatgctaacctcttcgtagctggaacgactttatggatggagatgcttcgtggtcgtcgtcatggtcggagagggaacaaatcggggttgggcgatgctgactccgatgcctcaaggttggacgacgcctccgacgagatgagaatgagattgggggctgaggggtttcgtgtatggtgggttggggttttgtttatgtcaagagaaaaaaaaaaagagaaatcaggggccagatgaaaataagaaagaggcgggattttatttggttagtttcattttggtatattatactcttttggtttcagtttataactgagacttaaggggtttttaaacttttaacttttaagtctcagttattaactgacaccatagaggcatttggtttttttttttttttaaactcttttagtgtcggtttaggctttagcctcggttaactaactgacaccattgctttttttaaatgtcagttataaaccaacaccttaaaattgaactactctatggtgttagttttttttttttaaattaaatgattctggaactgacaccaaaggtgtcttttgtagtagtgactgtcagctattttgtccgttttatgacggtcgtataggcgacagttatagaaaccgacgagaatactttaaacgactgtttaaaaacgtcgagaaaaaccattttggtagtagtgaatctatagcttcaataagtatttagaagtgaaacgataatttccttcgaacttggctgaatagaaataaatgattgaggcctcattacagtgattatattagtttactgaa

SEQ ID NO: 38999 - DNA, 1397 bp, Cannabis sativa
gaaaattctaagacgtgtatatatgaaatttaaatgatccgtagccaaatttacttgtcaccatgtatattatataatatttgttattatataggattcatttttactatattgaatctgaatataatttgtagcaatacgattcaattgagaagattcccggccaaaagaaaatcaaataatgatgactcaaattctaaaaagtacaataatttgatccaataatctactccatgataagaaagaaatgtttttgtattggccataattgacgacgtggtaaaaaagtaactcaaattcttcgatgtatcgaatccaaatcatgacgatgtgacggtcgatttagggtttattttacatttgtttggtcaataatttctccacatttgaactcctccttcttccatacattatttatatatttatatatatatttttatattgtaatcaccaaaagccgccctttagattctaacacctgtagactgggtttgggtttgggtttgtggctaatatattttctatgatacatatgatgaaaaatttagagacgacccctttgatgtgggaatatgattgtgtcatatacttacacgttttagttaggtttcatttttgccactgttaaacttaataataattaaaaaaaaaaaaaaaaagacatgaatcgtaacattatttgattcctaataataccacctaaaacaaactacaccaagttattatttttgtgatattatattctattgtatatgttaatgtaacactgtacatacagattaagatcgttgtcgtttttcttctttctttcttttctttatttatattattcttatacaaaatgatagaactgcacatgtggtaatgtgcaataccggtatggattattaagagtttgcatgtgaaaataattaattacaaagaacaacaatcattatatatataaatatggtaaattagaaagaagaaaaaaacagaagtatatggcgatctggttgttgtttttgttgttattagctttgtttttaatactcaataatgcattaatattatattatgatatatgatatacaatgtaaggagccaagaagaggggggaacaaaacacaatcaagcctttgaataaaatttacatttatttttctttttcaaggcctagtcatcatttatatacatgtggccaggaagtgatctctctttaataatttatgtgtgtgatatgatatgatgaatgccacgcaatgctgtcttggcaattaagattagtatattgtgtttgattgaacctcaaaagaccattagtcaattctactcttaaccaccatataaatatgtacatatattatatactaggtgattgttacgtgccaagctacgtagtgttagttttatttaat

SEQ ID NO: 39000 - DNA, 4794 bp, Cannabis sativa
  modified_base (2392)..(2394): a, c, t, g, unknown or other
  modified_base (3119)..(3123): a, c, t, g, unknown or other
caaattataattgttattgcaagggagaattaatgattgctcgcaaattaaaagcatggtagataataaactgctcgtgcgtatagtagactattaactacttaatattaaaggaatataaattcctaaagtactttgtatgtgatcaaaatatgattgtttaaattgtgaataaaatgcaagcaaacaactatgtattaaagttcaagcataaaagtacgaggcattaaatgaagataaaaaccaggttggccatccaacctagcaaatttgtctttacagaaaaaaaagtaccataaggggcaaaccattatctcggccctagggccattttcttacataaaataaaaaagacaaataaaaaccaagcctaaattgtaggagacttggatggatcttcttcttctactgcctcggcctcttccttctctttcttggtcttctcacagaaagcgagaatttcctcctcatcttcctccaagaagcttgtgtccatgtccaaatttgctatcagtgctcgataaatggtacgaaggccaaccttgttgcatcgatccttggtttaagcctctttcccctcgagtacccctttgagcttcttgcattcatcagatttggcctttgttgccttatcgcccttttcgagactcttcttcatcctctcgacttctttggtgaggcaattaatatcctgttgagcgttgttccatttcttgaccacgacctcatgttgggccagtgagttttagacctccctctccaggtattttatcttttgtatgcctcgccactgggaggtaaaagaagcctggagattcacaaacaaagatgtataaaaaataagggggaagaagaaaagaaataaaagacgtatacagattaaggcaataaacttacaagagggtatgagataagcccctcgtaagcattccttccaaatccccatgattgattaaatcccaatcatggggaaggagagccttgagttggcgccagcaagtagctccaaactcctgggcgaactctaagctagtcttccctacctcggcagataacatttcaatggccttgctcgaggaggaaggtgtgggttgtgttagggggaggctcgttggtacttgcgttgaccgtaagaggagtttgattttgagtctcagtctcagggacctcgaggttaataggctgagaggctttcttctttttatgagcgatggttttcctttgccttttaaaaggctccacctcggcatctgaaagaacccctgaattggtcgctctcttcttccctttcctctgcataacatcctccaagtgcatatctgcgagacaagacgaaagtattagcattagttataaatgagtaaaagggaagttttgggcacaatattccacctaaggagtttaccatagtcactagaagacgaggtatgactagaagatggggtagaaggaccataatatccactaaaatctttacaaccagtgatcttgaatatgtgaaaggaatcaactggttctaaatcccagctcgcatttaagtgacttgccctatccatcattgtaccatatatctcggctataccatgatacgactcgttacagtttatctggatgtggaatctagggtacaagttgtcaaacctatgggttatgcgatctataaggagagggttccaaatataaaagttaaggcagctttctcggaatgtaactagagtggtacgttcagccctaagcagtgtgggtgaccaaccacagtgattacctcgggacgctccttcaccagctttttgaggggcaatgttttgaaggtactgtgctcgagccacgcgatcctaggccttttctctgtctgggacgggaacctgctgccaagaagaatacttgggatatttgtaatcacaagtaaactccttgtcatttaggaggtccacagatctcagattgaccacgtttagaaggaagtcgcatgacctaaggctataaggaagggtcaacaggagcctgcgtcggttggccatcaggagtaggggcaggtcttttagaaagaactgtcaaaaacaaaacttcagtcagatatcttagaataaaaagacttggattaatttaaccaagtctaatgagaacaatcactttcgaattatgctaaaggtggttgtaccaattggggagaggtcggttgtccaaaagaagttatccttgaaggatgttttatttggcaaatccataatgattttggactctctggagtgagggccaagataataaaagcctcatgcggcattcttcctcactggaacgactttgacggagtaaagatactctatttccacaggagtggggcacttccaattcaggattttgtacagaaccctcaaacttgcaaggattnnntaggagacgggatttagttgaaatggggtgagcccgaggtggttttcaaagtccttgaaataatcacgaacgaggattattgccccagccctgatgtgctcaaggctctaagggcctataccagtcgagccacttgtactggcctcgccactggccccctcagaggtcttgcctataagacgcacaggtgggtaacaaataaattcaccagctcgtactgacctaacttggcattttcgcccatactcgattccacaggtccttagtgaatcacctatgtagcctgagatagttcgcacactcgactcaattaactctgcctctaaggtgacgttagggtcctagggagtctttgatttacgtggcttgtgagacagtatttcaaagtccaggtcacctggttcaaaagaaattatgactttgggtaaaaataaaggtttagccaaaggaatagaggatacactggaagattcaggccaaccagcatctcgcaagaaacgacatttgccttctgatttcttgcaagaagcgtctgtgacgactagcattgtattattgatggattttcactaagtggttccctaattctctttttcatcgttttatctctaatttggatgtgggtttggaaattttgggattgtaagggatggcagttttatagggaactcaatttctaaatcttttggatgatgaatatctgaaccagattgggacattgctgnnnnnagaaagcaatcccaattcctggaaagaattttatcaaaccaaaaggtggtgaattgaaggttctgtaaaacctacgtattgtctaaaccctaatatttacccagatacagttcagccctaaaagttactaaaaccaaatgagatgacaacaatataaacaaataagacaacaattaaacccagaattacaacataataaacatgtaagatgtcaagaagtaaagccacttactgtttaaagttggggtttgggacgatgaacagctctacgatttgcgaatccctgaacgtagagaagatctctctgagtgcgtgaagtcaaaacttaatcagatgaaactcgtagagaaaatatcaatgacagagagggcatacaagttttgaagcaaatcaagtgatgaagaagcttaattttttttagaatttaaaaaatggcaagggtagtgaaaaatggttccttttttcattatatacccacgagttaatttctattagattagagagatacttgatcctacggacagaatttgaaatagaagtggaaaggatagtcatctaatgtttatgtacctcgaaaccacaaaccgccaaaatcagaagacatgcattttttcaaaagggattatgacaaatataccctttgtaatcattaaaaagaactttttaaggggcaattgttatacccaaaatttggcaagcactttagaggaggacacgtgtcaaactgggaagaatacgaatcaataaatatagtgataattatatttgaaaatggaatgactcattaaatggggaattgacagagtatatttacaacttgttgagtataaggtcttacacgacataaagatatacaaactgttgcctcatgcattaacgagaaaccatacgacattagatgtgcaaggcggggcatgaacctcattacacattaagagacgtaggcaagatataatgactattaagacacttagtgtataatacaagtatacaaactaaatataacagccgggtaaatataaacaactaatagcgaggcatccatctcgctatgggaaggcacgctcgtggtacattcactaatcaactccaaatatctttcaatgagattcacagctccgttgagtcagttctcttagatagaagctaacattcaaatgatgttgactattaaagttcaccttgtcaccaagaactgtgattgtcagatggagcattatgtcttcagcacagaagcgacgagattaacattatcaacctcgaaaagatgtgagaaaaactcttgctcgctaccagagttattgttgctatattcccagcgagacgtcctagaatgatacgattggcaacgtatttaatacacgtttacattaacccagtaaaagcagaccaatcacagctgtaaagactcggtttgaccgagtcaaatatttttatatatatatataaaataataattaaataatatatatatgtacgtataaaaaaaatcaaatcttatatacacataacggtaccccttcgtccccctctctctctatatctcattttctctctcttcaaacactaaagcaagaaacccataaaccttcataaccaccacttcggcgagcaacttcccgccactgcccgaccaaccgcgccggtcagaacggaaccccaggtgccggc

SEQ ID NO: 39001 - DNA, 1945 bp, Cannabis sativa
taccctttttatattgttctctttagtttttaccctcttttttaaaatttattatgtttacttcttttttcaattattttaccaattttacccctatcacttcacgataattttttttcttctcgaatcaaaattttaccacaattttcccacaaacttacacatctatctacaaagaatacaaatctattatgtttgaaattatgtcttaattatgtgagtgtgtgaataatttgggtgtaatactcataaaaagtggtatttataaattaaattttatttgaagataaatttagttaatgtataacataggggtattcttcaacttttcctttttttttcatagtagtagtatttgttatagttacaatatcatatctgtaaatatttgaaaaattgtaaaaagtttaccataccaaaatagagtttttgacatttcaatttattacgcgcatttaaaaaacttcaaatttattttaaacacggtaaactattccaaaattttaaataatttacatgatatatattgtaaatacatatctgagatagattcttgtgccctaaaaaatttgtctatgctacttacaacttatatcacaaatatctctttcaaatattttttctaactatcaataaaatttccaatccttttaatatttacaatatttactaacataacacaatataattctattttaagttaatcaaaatctccaaaataaagtcaaatatcactttttggagtaattgatctgcttaaggtgaatagttttcacaaattctttccattttggatggaaatgtagaatagtccgaacaatttaaaaaaaaattgttgcagcaattacaaaataattatttcgatagatctcattcccttaatttgaaaaattaaataaatgagacgtgagatacatggtacgaaatcctataaacagtgaactaaaatgatattgtccatacaccttatcttgctcattaaccccacttaaattccttctttcaatttctaatagagcatgaaccacgttaaaaaaaatatgtactttggccatcactaggcttggcttcgatggtgtctttctatttaaggaagcttattatgttccaagcctcttgagaagtactattttcaaaccaagtctattaagaacctaccattttgtaatggttgcttcatttgaaatgtgtcctcatgtaaaagattatgcttatttgagaaaatttccatcgattaatgaaatatgaaattcatgttattgttgtctctaccaccatagatgagattttcaaagatacttaacaaagtgtttaaagagaaagagtatcaacaaaacaaaatctatacccaacgtttttggacttgtgattggtcaagtctttatcgaaaaaattgtaagagcttgccaaaattgttcaaaggacagctcataaacattatgtgtacatatttggtgttattaaatttatttagtttttctatatagctttgtataatataatatttatttttacccaactattttgtatttgaaatatgatatccgaaaattatgtatctcgattgaatttgtaggcccttgacacatggtttcaattaattgtgttgcattactatttttgtttgtcaaataattcttatgttgcttataacgaaaaaatggtcagccaatataagcatagttacaaagttcaaatagcaaaatataaatgtgctttgacaaatgtactcagttaccaaattttccatcctagaatgattgagggaaaagtagtctaaaaatgggaacatgccaaatcttctctaatctctatcattgtaatgtaatcttgtgtaattcacaaatcaagcatgtttcgtattgttttttgttttcaaaaaattgtttttaaaaatgagaacaaaaaatagtttttgaagtttttaaaaacaaatcatgtttgg

SEQ ID NO: 39002 - DNA, 3382 bp, Cannabis sativa
aatatgatagtatttttagaagtattaataatttaattagaaaatatatttttctagtgagcataattatacgcattttctaactataattaatagtgtagaattatagttgagtttaaagaatcaattttattagtaaaatataattgcatgtacgaagcttgtgtattccataatcattttctgatcactttttattttaattacttctttaattttcaaaaattatttttttaatattctcatcacattcaaggttcttattttattatcgtaaaattactaactgtccttttgagtgtatttttcctccctgtggatacaacatatagtccgtttataaccgcgattgtagtgtaactaattgggcgacatcaaatgtcaactctttcttaatcatcataatttcaaagattcacgagctttgttgtaagtctttcatcaacccactaatacaaggttataacccacatagtaacctggatgtagataataacaaactatgtggctctctttagtatttcaattgacttttctatctattcctaaatactcaaatgttcatatatgttggcaggtaaagatgatatgcatcatgttatagtactactgtctgtcgattgtgtagtacaatgtatgactatatctcaatagtcttccaatctgaggtggtgtatagagttatcaaaagacatggttttgttttttcagaagcaacaccaatttttctttgttttgcctaatcaagtttcattgaacctatcaggagcaggtgttagagtcccctttggtggtgttgcagaaggttaatgtggccttgtccgagttgaaacagtcttgatttgcaggaggagattgaggttactgtgggcttaaattgtcatatgcttccccaaagctagcggaagttaatctctttacggctgctcctgcagttagaagttctgctttcttgtcgttttggctttgggtaaacattatgaatttattgaggccttctctgttaaagttcatatctcgtccgtggaagtggaaactcttgtcgtgtgccatggattgctttgatccagagtaggggatggagtggtgccaggactttttcagatggctaggtgctgagagcgatccccgttccttttattgtctgtggcaactgttttcaacaggatccctggtctccgaatagcctcaacgtggtttctttctctggttgctcatagcataaccgcttagactatttgtatttttctgtttgttcgtgttttctaatgaagttacatattgccaaaaaaaaaaagtttcattggaaaaccagaattttatcatataatcatgttatgaagagttttctggtaaatactaaccaactaaacttgagcactgggttttgccagttttattatcaaaagacataaaaagaaaagctaattcttaatcgtatcaagttataatatccttgctcttgacattttcttctctatgtgctagaaaagcaacaaaatcatctatggctttcagagcagaccctttatgtcccccctcttcttttacggctgctcttatctgcaacttaatctcactggcccttttcctcatctcttctccttcaccattagactccatcaccaaatcaattaccttcttcacttcatccccaacaatggaccccagagctcctttagtcagctccacacacacccctttctcctccaccaacatcttcgaattatgactttgctcagctgctattggccacgaaatgatcggaaccccctggctcaagctctcctgcacggaattccacccacaatgactgagaaacgcacctatagacttatgcgccaaaatgtccaactggggtgcccagtttcgcaccaacaaacccagattcttccccttgagtcgctcttcgaacccttctggcaaccattcttgcctaaactctcctttcaaatcgaaccccaatggaggccttatcacccaaacgaaaggcttcaaactcttctccagtccgatagccaattccatcatctgggttgctccgattgtgttctgagaaccaaaggagatgtagagaacggatttgggttcttgtgaatcgagccactcgaacaacttcgcaactgatatcccaacttctttactgactctctgtttggaaaaactcaaagaagaagaaggtgaacatgacttgtcgtttaacacagcttgggggagaagcgaaccaacacaccaaacggggcgtttaacgtaatcctggaggatttggagtccgaaggtttcgacttcttcgacggtgtaacacaaccaggcatgagatttcagagaaagctttaactggggttgaaagaatctcgaccatcgatctgaaccgtcggctgctgtcaagaactgatgtaactgagaacggtggaaacggcagcgtttcgggaaaccagtgacctcgaattcttcagactccgttttccggtgagggagttcgagccagatagacatgtaggccgcagtgccgtaagcgccacaggtcgtgaaagtgatactgacggtatcgaagctattggcaacgcccaccgcccaccccatgaacacgtcggagataacacaaagcggcggccggccatatttaccgatggattcgtggattaatttccggcaaggagtttccagagatagggaagcgtagaagaggccgattacctctgcaagagacaagttctcggtggtttcagtgttggggggtaagccatggtcggaggaggtgaaaggtagctctgagaaatgaataccggagtctgaattttcatattggttggatgaggaccggcggaggtagttgatgttgagctttgtggaggcgataatgagggtgatgcctgttctttggtgaatttgtttggctaaggctaagaaaggaataagatggccatgagctaaaaaaggtaacatgagaatgtagtcatcatgtcgggagctgctagttctgtttgacattatgaaagagatgaagaaggacagagaaagagatggaaagagtgaaaagaattcaccgaattcagaatgcatggatggagcattaggctacttacttacaaactaaatagccaaaccgatgctactccatttaataatagcatttaatttattataaaaaaaaaaaatatttcaattttaagtcaattataaatttaataaaagaaatttaggctagtattcttaaatgtaaaatatgttgttttaatatgttactcaattaaaaatagtatatacaatagaacctctatccaagactaagaaaattatattctaattgagaggttataattatatagaggtacactaggaaaaaaaattaaaacaccaataaatatcaatgtaacaataa

SEQ ID NO: 39003 - DNA, 1198 bp, Cannabis sativa
atcttcaagcttttacatttgtgcttatattatttaatcattttgttttgtttttcaaatgtgtgattggtttttaattcctaacaaacagattttgatagctatatctttattatttatagtcattaatgtatatatttgtatatattggtaccgtatgtggtatgatggctgccaccattatcattttttatagtaccattttcttttttctgcagataaaaaaaaaaaaaaaaaaaagtttgaaagcgaatgggaggtagaagacgtgaagatgtgatgcaatataattagatgttttaattttgtttttcttgttatgtctcatatgtaattttgaattaatagttggaaatgtaataatattaagaataaataagatttgaaaaaaaaaaaaaaaataagatttgttgttctcttcttaattatagagttttgtcaccttaaatttgtaataagtttattcgttttagaagttattttcaagttaattatataaaaaaaattatcgaaaattaagctcatggtcctatttgtattattttaaaaaatagataatcaaatatttttttcatttaacagaatagaatataattagtagtttttgtaaaacacataatctaaaatgttattaacccttatatatattttttttcttaaaaaataaaacctttatatgtatttatcaaagctagaacttttaaatcgcatacatatatgagtcagttgggcacaactgtgtgatgagtaaaagtaattatagctgtgttgtgaccaaaaaaataagttgcagcagaactatagaaaatcctgagtagagtgtttggtaaattataaattttaaagtgttgtgagtgattaaattctattatattaataatgataatgataatattataatctagtttatattataatcacaaatttataaaatcttgtgttatataattttttttatataattttaattattttttctcaaaagtataaatttatatgcatttgataaaaataaattataatatttttaaattaaatttttatcacatgtaaactatataagaaattctaggttgatgtggaatgttaatattagaaatataaaatataaaatattttttaagaaaaaataaaaaaaaaataataagatatttaaatattatttattttattataatttatttattttaaatatttt

SEQ ID NO: 39004 - DNA, 1832 bp, Cannabis sativa
aaagaattgaatagagaaatgggtaaacgcgggcttgggcttatttttgggtaaatttgattttgattgattatccatattgttcaaattgccacttcatctttatctctccaatgttagatcatcatgttggcccattccatggcatcatggcttcggccttctcacgatgttgacagggccttaggcccaatcctgacatccaagagattttatattaaacgaagtttttgtataaataccaattattagtcagttgacaaacttccaacttgttagtcaaaacatttaactactctaataaacaaatctcagaacatttaattttcaacttttcacatctactaaatcataaaaattccctttaaattattaaaattattagatttgaggattttttttttatcatttttagtaaaaaaattctaacatgaatcaaagtttaaagggtatcatttagtacatgtcaaagtttaggagcatgattaggtagatatcaaagtctgtgaaacataatttagtacatagacaatcacttagtaaaattgaatgaaagttgacaaaagtccttaaatccaataatgtcaatagttcaggtgaatttttaacgaccagaaaaagtttagagtgtgtttggtattgttttttattttttgttttcaaaaaaagtgtttttaaaagttttcaaaatacaagtcaggttctgttagtgttttttaaaaataatattgaccaaaagtaaattattttttaaaactttattttcaaaattcttattttttgtaattttgttttctgaaaactactgtcaaaaaataagaccaaacatgcttaattgttttaaaaaaaaaaaaatactatttttgaaaacaaaaaactattttttagttattatctcaaacatgcacttagaaatataatttagtacatatcaaaattaaaatttcaattagcataaaatctaatagaattccaaatatctctttcttaatctgccctctcaaatatatatagaagtatagaatatatcattttttttttatatatttcgtgacacgtggggaaagatgcttgtcaaacaaatattttcagattttgtttaagacctcatggaatattaattcgttgatgaatattttattttggttttcattttctttcattttgttcttaaaattgattaatggttttaataaacctacgtaatgagcatcaagaaatatgcatacacctagctattaggagtaaaagtattacattatagtgaaagatcacatataatgcacattcataattttaatttaacgtaacctacagaaaaactattgttatatataatcattaattttcagcaatacatgagaagtatatgtatcacacaacaaaaattagacgatatatactaataaattatggttatatattgacattaataaatatgaaaaaaagaaaacttacacttcaaatccccaaatatgttgacgtggcaatcaataatcataatcacaaataatacaagtaagacacctgagttaacgacagtataaagtctttcttggatccctccaccctgcagacatatttgttatataagagaatcttaaccaaagtcctctagaaaatgatcaaattgatataaaaaaaatattaagctagttagtaacaacacaaaagtcaaaactttcatctaaaggactaaaaagaacatgcaacatgcaacgcagacgaattataatttatacaagaagaccacagatgaattatactcttcagaaaagaaaaaaaaaaaaagtagatatattgataaagtgttgactcaattttacgaaagt

SEQ ID NO: 39005 - DNA, 4154 bp, Cannabis sativa
cctagctcaccaacggggtcttaacatgtcatttctcatattcgtatataataaattatataataatataattctataataatactcaattaactagttagggttttgctaatccattttcttaattctagggtattacagtcttggcttacaaattggataacacatttgccccccaagtccctgttcgaacatctggtctgatagggaatttcaagctctcgtcttgtctgtagtagtctctgttgagtagccttgtctagctaagtattggcttttgcatggaatgcttttagatctttgatcttctctctatacatacgtctcatcttctctccttggatatctcttctttgtacctgccattaacaagtttcaagctttttaagctttaaaacttcttgattctcatgtaagttagtaatcttattggtatattgatcctcatgacaatttttgaatgtataatatgtgacttcttgatagaaaaagattatttggccttcgttgtgattcttgactcattgagtcatacaaaacacgaggcacatatttgaaccatgtaaatgtcttcattaagatccccattaaggaaggcattattgacatctagttgccttacaatttagcctttagatagaacaatggtgagaaccactcttatggtgacaagttttaccacaggctgaatgtttcataaaagtcatatccagcttgttgatgatatcatttggctacaagcctagccttgagcctatccacataaccattagcattttcttttactcaaaacacccatttgcaacctataggttctctgttgaggggtagattaaccagagtataggttttatttttcttcaaggtattattttcatcagccacaacagcaaaccatttagcattttttaaagcacgtttgactgaagctggagtgagagaggccattagaacctttggctttttgatacctgacttgcctcttatttcataggatgattgttaaaaataggatcaccacttagtctgagtaggctgattaatagtgagatcacatagtgcaacaatagattctggtgcaggaacaacaactagaacttgacctggagcaagtgcaccatactcaatatcaaaattggttgcagaaagctgaggctgagtatgtagagaagcaacaggttcctgattcgaggagccaccagttgctacaacttctatgtgagcatctgcattgttaacattagtttgtgtctggacaacagtgttactggtattcaaaacattggtaagaggttgattaggagcctgaggaacaggttgcatggattggttaaagctaggaagagaaaatagaataggtatatccttttgggaataacagatgtaggcgattgtgagcttgaattggaagtaggattttgtgtgtattgtgatggaaagggaaaaaacaagctcatcaaataggacatctttagaaatatacactcttccataatttgagagacatttatagcctttgtgagctaggctatacctcataaaggtgcatggttgagacctatattgaagtttgaccttgttatatggtctaagatttgaataacataagcaatcaaacaccttgagggaagagtaatcaggtttgacattaaacaaaacttttaaaggatagaagttgttgagaagtggagggggcattctgtagatgagaaatacagaagacatgtaagcctcatcccagaatttaagaggcgtactagcctgagcaataagagttaatccactctcaactatgtgcatatgtttcctctccataactccattttgttcatgtgtgtgagggtaagagactttgtgttcaataccagattgttgcaaaaagtgggtgaatgattggtattctgctttccaatcagattgtatttgcttgatgggtaagcctagttgaagttcaacttgatttttaaaggtaatgaatgtagatagggcctcatttttggcttttaacatgtatatccatgtgtgctagagaaagtatcaacaaaactaatacagtatctatacctaaatgaagaactgataggggcaggaccccataaattagaatgcagcaattgcaatgactgagtgtggacaataatggatgtggggaatggaggtttgtgaagcttcccaaggaaacaggcagtgtaaagttgagtaaaagattcattatttttattgttgagtttgatattacaagagttaagtacttgctgaacaattctagagtaagggtggcaatgtcttttatgccacaacgaaaaaaatactattgtgttcagacaagatacttgaattacattgagtgctatcaagagtagacttgatgttggtggattgaggcaaagaggattgcttgtgagtgttgagaaagttgagttgatttgaatcaaattggtagcgaaatttgtcaagcttcccaacaagcaaagtcttcaaagtaacatgatccttgacaagacagtgaaagaggtgaaattcaatgaaacccccattatcttggacaaattgagacacactaagaaggtttttggttatatcaggaacatgcagtaaattgttaagaacaagattatgagagtgataaggggaagtaaatgaagaatggccaatgttttgaatactcagacctactccattacccatgtgaatctactaatcaccattataggtactgctagaagccaaattctgttcattgggagtaaggtgatgtgtagctcttgaatctgggtatcaattaggatcattgaccacttttagtgtagcatagtaggcctgcatctcagctatgttggcattcccatcaatattctgaaaggattcaagccctaaaatgacttgtcaaagcggttaaaacattattgcacagtgtgtccaagcttgtgacatagttgacattgtagtttttgaccccaaactgtattaaggccacgaccacgagagaaacctcctctgaaattgccaaattgacctcttgatggtggcccaaaacctttggatgcagggacaaagtgaccaggttgggtggactacaacataggaaaggttgcaccattgcttttggacataaaaccaaatccagaagaatatggagaaaaaggttgtgtgtactgtcctcgacctgtttgattctcggtcaaagccaaattagcttcagctttagcaatatcaagttcttttacagctttgtccaattgaacttcttgagccattaatagtgcctcaatcttagcaacactatatgcattcgttctggtgttgacagaagtaatgaaaacattgtactctgatggtaaaccattgaagatcgcttcaatgtgatcttgtgatgtagttgggagacctatagatgcaagagtatcaatgatactcttcatcttgagaagaaaataactcaacgaagactttattttcgtgttgtgaagctgagttttatattgaccgatcttggcacgatgtagagaagtgtaatattctcgaagattgacctaaatttgagctacagaatcagatcataccattcttgtgagcactttatcaaacatgtatgagagaagccatgacacaaaattgttgttttgttgctcccaatctttgaattctaggctcagtctgtttgcacgtcgatattaatggttgcaagaacttgatgcttccatggcaggtagttgaactcatcgagtcgaatagagagtgtgtgaaagaaagagacaagattagttttaggaaggttagtagtattgtgaggtaaaccagtttgttgagacgaaccaggaggaatcgacgaacttccattgttgattgttgaggtctgctccattatgaagacgatacaagctttgataccatgttaatgtcaaaagttgaagaataaagtgaaagaatgctctattttcattattattcaaaaaaggaaatacacgagtatatatacactttgagggagttaaaaaactcatcaataactaacagaaagttagttgacactaactgaaaactaaaatagaaaaagctatagcaacttgtaactgttttaacactactacaaaaatgggcttcagtgacgcgcctcaagagactctaaatattttagtgacactccattgcac

SEQ ID NO: 39006 - DNA, 3325 bp, Cannabis sativa
ttaacgaaattgacccaaaagaatctgaagcttatttggacggatcggtacgagaagagttttcaagagttaaagcaacgcttaattacggttccagtattaactctttcttctgacaaggaaaagtttgttgtttattgtgatgcctcaagataaggtctaggttgtgtacttatgcaaactggaaagataatagcttatgcttctcgaaaattacaagaatacaaacaaaggtaccctactcatgatctagagctcgcggcagtagtattagcgttaaatatttggcggcattacttatatagcgagaaatgtgagatttatattgatcacaaaagtctgaaatacttcttcacccagaaagacttgaacatgagacaaagacgttggcttgagttggtaaaggattatgactgtgaaatcctttatcatcctgggaatgccaatgttgtatttgatgccctaagtaagaagggtcaaaaccagatgaatacaataaacaaatttccaagcaactggcagatgagatgacccgagctaacattgagtttattgtgggatggatagctaacatgactctatagtctactctctaggaaagaactaaagaagcgcaatatcaagatccagacttagtgacgtctcgggataagatttcatctgggaagatcaatgattttatggtggatagtattggtgtgttacagtttatgaaccgtgtttgcgttcctatggataatgatattaagaaggaaattctaaatgagtcacatatgactccttactctgttcactcgagaacaatgaaaatgtatcaagaccttaagtctatgtattggtggcctagaatgaagaatgatatattagaatacgtagcaaagtgtataacatgtcagcaagtgaaggcgagcatcaaaggcctgtaggttcgttgcagccattgaacctttcaaaatggaaatgggaagacattactatggacttcatacttagattacctaggactacgggacagtacaactctgtgtgggtcagagttgacaagtttacaaagtcaacgcacttcttacttgttcggacgaacttctcccttgatcagtatgcagaactatatgttagagaaatagttcgtctccatggtctcccaaagcccattgtatctgatagggatccaaagttcacattgagattttaggagagtttacatcgagctatggtacgccaactgaagttcactacaacattccatcctcagacatatggacagtctgaaaggaccattcagattctgtaaaacatgctatgggcatgtgttttagactttgaaggatcatgggaaagtaccttctcctgattgaaatctcatacaacaacaaatattaggcaacaatcgggatggcttcttatgaactactttatggaagaaagtgcagattgcctattcactgggatgaagtagacaaaaaagttatgttcatccaaagcgacgagatgttgattttcaagtcagaaatatgataaggatagggaaagtagtgtacaggttggctatgcccccagtgctggcagctgtacatgatgtgtttcatgtttcgatgttcagaaatatgtgtcaaacccgtctcatattctgagttatgaagcattggaacttcaagcagacctctcctatgaggagccaccagtgcaagtactagactgaagagaaaaagtcttgagaaacaagacaattacactgattaaagtattatggaagaatagtaattttgaagagacaacctgggaactcgagacggatatgtagcaaaaatatctgaagttgttcaggtaaagtcttgaattttttttatccaaatccatcaaggctaggactttttaaatcatgaatactaaacaaagctctcttaacattagaactagtaaaaggcttaatcaaatacagttattgttcaacatatagaatagtacccctgaggaaacaatccttattgatacctctcgtggcaaaacttggactacccataaaacttttaaagtggtttaagcaatgaaaggccacctcatcatatgaatgtaccagattaccatgttggtcaacaaaagaggctatacgattgacttccttgtgttgtttaataatagcatgaaaataaattgtgttttcatccccaaattgcaaccaattaatcttacttctttgtctcaaatagctttccatcataatagaacaagaatttagggttgcctttatcactttttctttattaaataactccacaaaaagaatattatgttgaatatgaagctgaagttgatcaaaacgagccttagctgaagtataaacttattgggcatccactatcaaatttttattaaactccccaagcactttcttcactctgtttagcttgaccaaaatttgaaataattagtacaaagagtagattgctgccaattgtccaacatagtctgtttaaaatcttaatgctctatccacataattaagaatttaaaaggtctaaaccctgaattcctactttgaaagcttctaacaatacacatgcagtggtttgaaagaatatttcattgataaaaaacttcagctaagggatgcagatcaagccaatcttcattcttaaaatccagattaattctagaataaattcttatgttatcacacttgtcattctaagtaaagacagatcagaactctttaattccaactaaaccaagagagagccaattgcaagagtccttaagttcaatggacgaaataggttgaccaccaactagatcccccacatcaaaatagcatgagccaaggcttaacgaggaaaggaagagaagcaagatcctgccataactcctttctctcaatgatagagttcagcccatagactacagtaagacaaaactcatttttaatcccaaagtgtttaaccaaacaatgcaaatattggttattttcaaaaaaaaaataacagtaatataagtatgtaaccaaaagagtaaaattctaccttcaacaacctgacaagataaaaagttccaaccatgaaaattggaattcatcataacatcaactttattaccacgaactttggcttccaacaaggcccatattctgactttattcaacttacaatgagaactaacattcttctgtttatttcctttctttagaccccgcacattccaacaaagaagattgcaacaatccattaaaaatgatgatgtgtcgtgcctccaccctccttaataaatctaggaggactctcataacgtgctggcaactttccacaattttttttaacaaaaaaaaaaa

SEQ ID NO: 39007 - DNA, 1907 bp, Cannabis sativa
  modified_base (1183)..(1193): a, c, t, g, unknown or other
  modified_base (1834)..(1842): a, c, t, g, unknown or other
ttagtacatgtcgaaattcgggaaaaaatattactaattagccaaatttgtaatatatatttatatatatataaaactatatatatatatttacttttaccatttttttattagagaaattgggatcacaatatagaatactatatattcaatttctcacccaaaagtgatttttttttttaattattttattatcaccacacaataaaaaatattattttattaccgactttatattatatccctgcaagtacaggcttaaattttaccatatttagttgtcgttgttcatttgtctcagtgtataggtttggttagtaaatagttactactttaaaatattaccatataatgtagcagctaagaattgacatttcaatttacaatgcttccatttatgccttctacatattatattattcccttaaactagttgattttattgtttatatagtaaatgaacaactatatgactatgactgaaaacgaccaatagaagtaaacatttagataagtacattcatttttataaaattaaattacggcatggtagatgacaagggataacatttaaaggcctaatgggcatattataattatatttatattatgtatatttaatagtctatgaagaaaatgaagttattctatattttaaagtgaatatttatgttacaacgtatatatacagcttctagaaattaaatagcacattacgtaactctcggattaacattgaattataaaatataacataagcaagattgtgtataataattatgatatatataattatatatatggcgtataataccacgtctaattcacataaaaatcaaaataagcatacttttcaatcaaaacttataacaatgatacaaattagtgacgcatgcatatgattaagttaattaactcataaggaaaaaggaaaataagaattagctataacagatgatcacaacaaaaattttgtaacaaaaaattaattgtgttactctcagacgtacctatctcgttactaaaagtcggagctaattaaaaatattggttaccaaaatcacacttgattactcattaaatatatattacataataatcaaatatatttttataattttatgtaatgaaccgtactcaaagttttatgtttgtaagctgcataaactcaatgtttattttnnnnnnnnnnngtactcaatgtttgtaaaactgtaattttttttcttctaattttgtcagtagagactctaatattgtcgtaaatagggcacatataaggcctaaatttttgatcatcgggtcgatctagatagaaatatatagtattagttacttccaaatgtttcttttaataaattcaaaacagagtctgtcctaacaaaactggaagaaaattacagttttacaaatattgggtacttacgctgctaaaaataaacattggatttatgccacttacaaacataaaactttaagtacttatgccgctatttaccctaaaaaaaattacttctagtgacaattttttttttttttttgaaaatcggtgtttatggataacataaattttaatcataacaaaaagttacttatgattaaaatatactatttagataagttgtcattaatttagttttagtcacaataaatattatgactaaaaatatatttagtcacaacaaattaattgtgatttttgtaactaataatagccacggatattttagtcacaacataaatatattaatttataattagtttcaagttttgttgtgaccaaaagtaatttttttacattgatacttttataatatactagatgagagttacnnnnnnnnncacgtaaatattagttttatataagttttagtggtttttgtttaagaatccagtaactgagcaac

SEQ ID NO: 39008 - DNA, 887 bp, Cannabis sativa
agggcataaaacccaacaccccaccattctaccaggcctcttttggtgctcttaatatgtgctggccgacctaccttttgtttggggctggcaggtacatagccatttttggctggcgagggtgtggtccggccagactctcctggttggtaattttctcgtatcttgacttgcccgagtgtttgggtcctttggcaattaatatgttgcgcatagtgactttgtttacctattgacacgttgtattctacctggctctggtcttgcctacgtgaacatgccacgtcatgtgaacaaaatttagaataataataatatatataatatttcaatattattttaataatacctattgtaatactaactcttctcaatatcaatcaaaaagagaagacaaatctaatattagtgggacaaataattactttaggtactatttagtactagtagtaattaaacttaagcatgcatgagtagatactaattagtattttttttatatattatttttatttggataacaataactagtttacctaaatatttagatactagtacacaatatgataccattaaatgtataattacatattattattttgaatactaattagcatcaaattacacatgatattaatatcataatataataacaaacaagtagataaataaagaaaagatttagataatagttaatcaaaaaaataaaattaaaaaagaagataaagtaaatgctttgaaaaaaaaagtaaaagttattgatttaagtagttaatggtatgataaaatagttattaaagtttaaaagttggttaattaggttatttaatattaacatatgagtataataaaatttgtcttatataattatttgtattttaaataaa

SEQ ID NO: 39009 - DNA, 3094 bp, Cannabis sativa
ttttgccaccaaaaataaagataagggggttaagtgtataaaaatcaaaacataagggggtttcgccgcaaattgaaaagtaaataataaataatattatgttaggataaaataatatgttgtatgaataattacaaccaaaatttttaatacaatataaattgtattatttaatacataacaaatagtttgtactcgcttgtattataattacaaaggatttagagtcaatcccaatctctgacctagagacctggacccgtacataggatctggacttgcacctgtactcggaatctagacccaaaccaggactcgtacttgggatctagacttggattcggacttggacctggacccggagctaggactcaaactcgaaacgaacacagactagactcggatccagttgctagacccaatgagacccgaacctgaatctagacccaaacccgacctgtaatcggtgttaggatcaagtttttaaaaaatatattataactttacacaatctattaatataagtcaatatcaaacatatagtattgtattaaataataataataataatacaatacaatacaacacaatctaacacaatacacaatacaataaggcataccaaacgagccctatatttattagggttatttgtagcataaataactaagtttaactcccagttacaaataaatacctaagtttagtttttggcggacctaagttatatttctaaaacttcaaatgtcaagtcattatccacgtgtcattttcttattggtctatttaaactaattattttttaaaatattaataaaatttaatgacttgaaccaatcagagattgccacatggtaatttacctaacaattaatagctgggtacctacagaagttccagaattataacttagatattattaccgctaaaaattaaacttaagtatttatgccataaattactctatttattacgtaataaatttggattgtgcatgaaaaatttcctagagctagcttggctagttgtgctgtggggaaaagcagcatgtagttgtactgtgagaaaaagctgagctgattgtttgttaaattatattttaaagtgttgtgagttgttaagattcgatataatcatcatacgttatagtttttaatttttattattttctataatttttaatttttttctcatattataaatttatatgcatttgataaataataatttataatatttttaaattatagttttattacttataaaaaaatatagtttataaagaattctaagttgatatagtttgttaataataaaaatataaatataaataatttttttaaaaaaaatttaaaattatttattttcatattgttttccttcaaaaaaatattttttatttttgtaatatataataaataattaaatacaattttagtacaaaacaatttattataaagacttttaatcaaaacaatttttttttaaaaaagttgagttgtatcagctttagcttttagcttctccacaaattcttcaataagtttttctttaactggttaccaaataccttcttatcacaatttttttttttttttaaaaaacagcttttagtttttctaaaaactaagccaaatagactcttaattggagatagagatcttactaaatttatgattagttatattatttagttattacttaattttatcgatctttattgatgttcgtacttttacagagaacatatgttaccactttaccctaaaaggtgagaatgaagtcatcgaaacttagctcgaggtagtcgtaccaaaacgttgatcctagaccaatatgtctttaagttagtatatttacattgagacatgaggttgagtaatgggaaattcttggtccaagatgatactagtcatggggaacgggatagccccgttccacaaggatagagagtgagtggaactaagtccctaaagagagatactcctatatatcttactattcgagttatatcagtacggtatgtgaactacacttgcctcaacgtaaaaagatggtagcaatataactcatcccctctataccaacgttaaatgagatttttaccaatcaaccaatctttaatttctatttgattaaataaatttataaaaattttagcaagaaaaataatagaaaaaaaaaaacaataaaaacaataaagaaataacaaattgactaggacaattatgttcatcaactacgtaccctctcttttaatactttaatgcaatttacttaaattcttcttcttctaaattaattgacaagttgataaaattagtttataatctaattaagacttataaactcaatctagtttaaagttctgtatatttctatgacagcatttaatcacaaagaaaacaataaatataacaactgataaaaattatacaaaatcaacctagatacttttattctaaattaaattgcattcataacaaccatagcgcataatcaaatcgaacttttcaaattttaattcgaactcataaacaataattataaaagccaataaataattgttagattaacatagattgcatggaattaaatagaagatgatgaagaaattgaaaactacattaattcataaaaaaaggttcaagtgagtcgcataacatccttaaaattgaaattagctcataatagtcattctaaacatccaaagattcaattaaacacataaaaggttgtgataaaagagatataacatagagtgggagtctaatggtctcctcctctttttcagttgccactcctagcccccaagactcagaaaaatcaaatggaacccccagacctagccccaattcatcattatcttatcgaagttagaaaattgtcagaaatagttaagtgcctcaactctttagggaaggttgcgacacttgaatttttttttttttgaaatattgatatttttgttttattttcttcaaaagctacaactttcaacggaaggtggcgactttcaaaattttctcaaatgttttctctgtaacgattggagtgtcgggactcttgagagaaggtcacgactcttgatgaa

SEQ ID NO: 39010 - DNA, 3308 bp, Cannabis sativa
  modified_base (170)..(175): a, c, t, g, unknown or other
ttgtgtggtggtggtagtaatagtgtttgtgtggtggtgatgataataatgagatgaatataacacagaaaaggaaaagaagggaaaaatcgataggggaggcagttgggatggataagaagatgtaggggttttttttttttggttctaagaagaagaagaagaagaannnnnngaagaagaagaagaagaagggaaaaaacatattttttaaaattatttttttttattttaaaattttttaattttttaaaattattttttaataattaatattgcgtggatcactaaaaatttaccacgtgtacacaagtgtacacacaggcagactagtgcggcacttaactgagattctttaacagaagtgtaaagagcaaaacggaatgagagttcagtagattttgccgttgaaatttcaattttttttggttgtgttgaaaaatttaaagttcaagtagtttagctgccaatattcttatttattatcatgtattaacataattttattttctatttttatagtattacatattttattattagtggagacagtgttatagttcaaaaatatatttatatgaatatttcatagattcgggcggctgccgaggaattggatcatccttatctattaaggtttaattaatattattcttcttatgtttctctttcattgctagttattcatgaattattcaagttataaatacttccaaccttaagtaaatgcaaaaccatatcatttttagattctaattaagttcacagataaatgaaaatggcaccatattctctatccattcttactcttctaataataatattattaacttgttttcatagaaaagtattgctggtttatgcagttgattatggtacttgtgatctccttttattctttttaatttattatttcaaatttgtgtttataatttatataaactctgatattaatctgcaccaataactgtatcaaaattatatttgtattagtaatcaacttcacactcctatattcttcatttatataagtacataaatttcaatattctcaacctcaactttatctattaattgatatctacttatttgaacagattttagttacatgaaatcagtttacaacgcaaccgatctaccattagtagaagaatatgactacatagtgattggaggtggcacagcaggatgccctttggctgcaactctatcagaaaagtactcagttcttgtccttgaaagaggaaatgtccctaaagctcacccaaacacattggtttcatctggatttctagctaatctaattgaagaagatgatggcacgacgccagcgcaaagatttacgtcagaggatggcgttgagaacgtaaggggtagggttttaggtgggtcaagcatgattaacgccgctttcttttcagaagctgacaatgattttcttgctaaatctggcgtggaatgggacatggatgcggttgagaaggcttatgagtgggtgaagaacaagatagtgtcgtattcgaatttgtcgttttggcaagctgctgcgaaagaagcttttgtagaagcagggattggtcctgataatggagtcactacaaaacataagattggagctaagcaatcaggttcaacttttgacgacatggggagacgacatggagctgtggagttgctcaataatggaaacctaaataacttgaaaattgcaattcaagcttcagtacaaagaattatcttctcctctaagttctcaagtatgttctataattaaattcattttatatcatttttatatatgaagttatatatattatagctatattagatattttacttatttttgaaaaattttaaataatttatagtgtcaaaaataaaattcaaaataattagtccatgcaagtaaagaaaacaaatttgaatcgatcctattatcgatagtgtaatttatttataattttctgaaaataggttggttgactaatataattataatgtatttagttattatgtcaaaagaatcgggaaattataatttcttaggtaccaaaataaaaaatattgcaatattgatgcatgggagtgaaaatgatgccctagctacctaagatctctttgtgcgtctttttattatttaacaattaaatagattgaaaaaaagaatcaacattcaaatctttggattttgtgaagagaaaacaaaaacatatatataagaaaatttcattattttttggactcaatgatgtgattaattatcaaaattagtttttttagaaaataagatagataacctagtaccaaaaaaaaaaaatatatatatataacaagtaaataaaggttaaattaatttaaaattttcaatatttcaaccatttaatattttttatgattggtacatgaaatttggattcaataacatattataagttttttttttttttttttaaatatatatatttacaagatcatgatatagttaggagagaaagtgacatatttgtccccgtttaactccttcaaccaaaataacatgtccacaattccaatcaatattctgaatattgatattatatatatcaacaacaaaccaaatgttaaatgtaggcacaatgaaagttccaaatcaacattttatttttatttagtcataacaattttgtcaaggttattaatatgtcaataatgtatattttatttaattatagcaccacatcatagtatactattcttaattggtgtataatgttaatatagtagaatatacatatacatcactacaaagataaggattatttatttaattagttttcgtgtcgagttgatacaagaattgattaatgctaatatatatacacaaaataatactcgatgctagtttttacatttagagggggtaaaaaagaaaatattataatggcgacaacttatattctaaaaaaaattgtgacaaaaatatatattaccctatgtactcaactactataaagttcatcaaaaataaaaattatatacaaaaatacaattcttattaataaatttaataatattattgtatataatagaatgggatgaatgtatctttgccacaattttgtgattaaatattagaaaaatttatataatagataaaaaaatttgacaaaaaaattataaattaaaacatgtcaacacgtgcagaaatttttttattattattcttattaaaatttttttatttacaaaaattttttttaagtaaaaataatgaacatcttttttgttgttttatagttattatagttattttttttttttttttgttt

SEQ ID NO: 39011 - DNA, 2455 bp, Cannabis sativa
acgtgtttttgagctaacacttaacagacttaattgacacttaacagccaaaaaagggtacgattgtaacaaaattgtaagataagatacttttgccgcaactttttttgattaaggtcatatgtgtaataattgcaaatattaagaggatttcactgcaaatatctctaattttaaatataagattaattattggattatccgctaagatggctaaagaagagtcaaaaggtactattttgatttgggattcaaaatgtaatttatcaaaacataaggtttaaacatatatttgaccgaaatataagggccaaaataatatttttcttttccattcatggtattttcagaaaatgcatagataaatagtagaaaagggataggagtgagttaagtttaagaacaaacctgaactgttttaccaacagagataggagtggcttcagccagaacaagttctcccaagtgagcactcttcaagtggttgatactgagttgaattccagctacccttttgtaaccagaagccatgtgggctcccatgctagccagtgattcagctatcaaagctgacacccctccatgtaacaccttgaatggctgctttcatttcattgcaccccaaatgaaacatatgttaacaattagagaactgttaaggggtgccacaagatgtgacatattgttattggtataatttatgtggtttcacacattttgatttaataaataatataagaaactgttaactacgcgcgttacatttaaggatggaaattgaataggtaataaacgggaaatgcttccattgttcccattctcgtaactattttaatactcactattcctgtctccttccctacatataccctatcgaagatagggtagagaattctcgttggaataggtaatacttaggacccatttattttaaattaaatgaaattatgaataaaaaaggtaaattgtataaagtttaaaatagacaatgttatctaaaataaaataaaaatatttaaaaatttactaataataagttacaaaacacatatagataatgtatagtaattaaaataatattacacaataaataaaaagagtccccttagaggatagaaagaccctctttaattaagttactttttagcttttagaattaaaaaaatgaaaagtcattttttaatttaagtcttttttaaaagaaattgagatttgtagcttctcctcaaaagatttcaagaaattatttttaaaattaaaataatttacataatttttaatttattcacaattttctttttaatgataactaaacagattaaaaagtactttttattaaaaaaaaatctttatataatagttatccaaactttatacttatcttatatttctatttacgagtaaaagtaaaagtttagccaaacagaacatctctgtcttcaccctattttctatttaggtgggaaatacccgtcccattaggggcgagcactagcggggccatgcccaacagggcaattctcatccttaggctcacatgtgttaggcatcttctaacaattatatgaaacactataactcaagaatccatgaaaaccaatacaaagaaagaggaagacctggcaacacttgagagtgataggaaggagaccagagactttatttggagagacttgttggaactcaaaaccaatggcctgaagagtaacatccaaatcctctgtctttatctttgatgaagaagatccacttccatctggtgggggtggctgctgctcatccatatgattggaattttgtagataataaggttgtccctttgttatgatctttgtgttaattgggttttagttgatcaagaatagaaccatggtaacaaaggatccattgccttaaaattgtgttctaaattttatgaacaaagaaagaaacttgttttctttttcttttgttgaagatacatactattattactaagagggttgtaaggttgggtgtggggactgaagatgagagtcttatctgatgtggcatagtgtcagcctcatcagtcacctctcattatattctcatcacacaatcattttatcttctttatctttttatttttgtttacacaatcctaaaaacaagaagtgatgataggagttgactaattcgcacactatggaatcaaatgaatcaattttcattctattgtttagtttatttgattataaagtgtaaattattattttatttaaaaaatgagataaaagatcattccaaatctaataaaaaaaatgcttatactctattcttattttttaagggtgagcaaaaaatctaagaaaccgaccaaatcgagtacactgaccgtctgaacaccgaaaaaaccaacactgaaaaccccaaaatcgaaaaaactgcattcggttaaaactggctttatatggtcggttttagtatcaatggc

SEQ ID NO: 39012 - DNA, 1489 bp, Cannabis sativa
ctctctctctctctctaggacactagtaacttagatttgagatgggagttgttctcttgctgtgtcttcatcgagtttgagagcgaaggtatttatagttatgacagttaggacaagtcacaaccataagctgagctatcaaaagacagttaatgtagttagtaattcaaagtggttaaaacaccaacagctaccaatgcctataaaaggatgttaagacacatgatctacaggacacaacttcagaaactctctccctctctttctaaccgtcccaagtattcttagagtaatataatattctagctcaagaaccgattgtaatcattggtgttaatcaccatatacattctaattcaatatattgtaattacaatttgaagagcaattaagatccaagtcattaatggctgatttctcttgaggtgtaggttatcaactaaccatgttcatggaacgaacctcgtaaagctgtgtacaatttgtctaattttatgttcctgtttttttgttatattattgaattatatttttggtgtgtgttttgaattgttctatgtttgttgtgtacatactcgaatcacaataataatttaatgtaatataatgtaatacggtatactaaacgaaccttcaaagatagatagtaacccacaagccataaataactactttcttaatttttccgtgtcgataaaatctgttatgatttcgactactgataataagaccgaaagtaatatagatagaaagactatgcaacaagaacaaccttaatagactattattttaattgccccaattgactccgttatgtatataaccacaagttgacacgaaatagcatatgtagaaactaacaataaataaataaataatcttaatattcttaataattaaaaatacatcattatctatctactatctatcatatacattattaagatgtatcaaactattcatagtaataagaataaaagcaaacattttacaattttcaaactctaataaagtaaatactacaaatggatcaataatcacacacctaaccccaccaaattacatattcatactacgtcacaaatctgttacatctgttatattcatgaacaaccgtacataaatggataaatgggcctttggtttctcgacaacaaatttccattttcctggaaaaaaactttagtaataacatacacatgcccatccacatccacatatatttaataaatttgttactaaataatgatcgtgagtttgtacatatccaaattatgataaaatccattgaatgatgtccaagtagggacgacagaatttaattattagttttattacattatttgccagtgtgctgtaaatatgtggtgttatgaaaaaatatgtgttatgaaaaatatgtgtcgtattgtgtcgtgccatcctataaaaatactatttagtcgtgctcgtaccttccaaatttgtatcgatttcgtgccgcgtcaaa

SEQ ID NO: 39013 - DNA, 1928 bp, Cannabis sativa
aaaaaaaaaaaaaaatgaaaaagaataagtgctatttttttttcttattattattttgatataacattgtacaatattaaacttagttcacaactcttatcatgtccttacaatatccaagttgtaaaagggtttcaacttgtaataaaatctagttcagttcaagctcattaagcagcaaaagaactggacaaagtgtctataagttcaacatatataactgtcaaaaaaaaacaaagataaacaaattcccactctatgatcatattagctaatctgttcacctatcaagtccaatcccataacaagaaaagataatccctgaaaaagcaagaagtaaaaatggactccatgagcagataataggcttctagctgaggcagtgagtaaaagaaaagcaagaacaagttccttcttgtaaagtttgttggtcttgttcttggaaggcacttcaattttaacttcttgttctttgagtttacttagaagttctaaaccggattctgaatatctcctcaatatcttttcttcattggaagattttgattccctttctgcaagtgccaacaagtctgattcagatgatcttcctgtcttctttgtaaccacccattcgtaggcgctcccgagttgaaataggcctgataccatggcattgaactttgtcactgacattgtgttttcaaacagaaggtatgggaccaagaaagggaatgatttaggtgctggtagaatgttgagaaatgacatgaaaatggggacataacagattacccaaagaggtaattcagcttcagggatgaacatggttaatgggagaatgatacagaacaatgtgaatgagtaaaagggtagaattagcttccttagtagaaagaataggaatatcaagttggccttcttccacaatgatatctgcacaaaagtaaaaatcaaataagtacttcttttcatcaaaatatacaattgagaatcattatcataggtatcaatgtggaagaaaaatatgatgaggttaagaaccttggaagttatgatggaaggaaggcataatctgaagagctgcattggacccgaatgccatctatgctgctgtttcttgtaagcttcataagactctggaacttcacatattactttgacatcattaaggaagacaaatttccatccattaagatgagctcgaaccgcgatatccatgtcttcaacggttgtcctctcaagccaaccacctgattcttctaaggccttaattctccaaactcctgcagttccattgaacccaaagaagttgagaaacacaccattcacttgctgctcaacttcaaaatggaagcacaggttgatgttctgtagccttgtgagtaaattctcatccttgttaatgaaagaccacctagcttgaacaagtcccacatcaggctttccctgcataatttttttaggacatgttatatagttgatcaaattaataaacataaaaaatcactttctccaattgggtttcttatgaataatcaccttgaagtgaggaacagtttgtttaagaaaatcagaattgggttggaaatctgcatcgaaaatggctacgaattcatagtccttgacataatcacatgacattgctgatttaaggttgccagctttgtaaccagttctaatcaatctatgtctgtacacaatattaacacctttctggctccatgaagagacttcttctttgattaaaagctgtactgttccatcactcgaatcgtctaatacttgtattagaatcctatcttttggccaatctaactgacaaactgctgcaatggattgtgcatacacctatatacattcatacaaagcaaagcaatatgagattaagttcaaatattaaattcagtggaaaaggactttggtatatttacttacctctctttcat

SEQ ID NO: 39014 - DNA, 3491 bp, Cannabis sativa
gaggcaacaacatatgggaagctcaaaacacttgagattattggttgtcctaagttcgagggagatttgcctcgcttccttccttcattgataagtaataaaattacaggtaacaaggagtgtccattattaagtctcccaagattaccatgtgtcacaaatatgagcattgataagttggagaactcgaagtcattgtatgaggcaataaagccaaggaatccttgttccactgtcactcctcttcagtctcttaggttagcatattgtggatcatcgtttagatccctcgatatggatttatttcccaatctcaaaactctttggattgaatccagcgactactttgaaggtatcacagtgtcagatgggaaatctcttgaggaactaacatctctatctatcaaggattgtgatagttttgtatctttcccaaatggtggacttattgctcctaagctgagtcacttggagattagaagatgccctaaattgaagtggttgccagagaagatgacttccctctcagctttgaaggatttgcaaatcttgtattgtccgttgatcgagcttttccctgaaggtgaaggtggtctgcctgttagtttgtctagacttggtatatcgtatgatgaacttttgaggatgaaatggaattggcaaacattaccccatcttacctttcttactatttatggagatggaatagaagaagatgtggaatcattccccaaggaagggctactgcctacaactattacctctcttgaaatctcgtcttttagaagacttagagggctggacaaaaatgggcttacacaactcacctccttgcaaaaactttacattggtagctgccctgagttggagacattgtcagaagaagggtttccaacctccctcacctctttaatcacatggaaatgtcccatggtggaggaaaagtacgacccggagaagagtgggaatgaggagtactggaacaagattagtcacataccagatgtcatatttatatgatgaggttgcatttaggacatataatctgaggtttgttttgtttgattaacttattcttcttccattttatttatttatgtataatctgtgcagttgttgtttttgtttagagtctgccttggcttgtttcttttcaaggaatctctgtttttattaaatgtttgtaaatatatttgtgaacaagtgttaataattcattggtgaatttgttaataattagaagaatcccctcttttatcatggtctattcaatttatgtcttcttaatatgcaatgcaggaaggaagacacaagcagtgttttgtttgtttggtttctgttcttagctttttctcttattattatattggaattatattgattaaaactgcattttaaaaaatcaaaggattatattgaaatcaatattaaacatgtaacttcaattttattttaatttatttcttttcctcggccatgtaaataaatttgggaggaggtcacttgtggacatgtgaccttcatctcttcctattgtctgcaacaaaagctaccacaagtttgattgatgggattatatttgtcttttaatctcttcatgtcttatttaagtgttacattctttgattaaaaatgctttaaaaatcaaagggtttaaattggaaaatttatgagattctttctttctcttgatgtcttttctccttgatctaatcaaataaactcaatgttgattctaagatgggtattgttgctaaaaatgaatggtaaaatggattaaatgttcaacaaataacattttcttgaaattcttatcaatcaagattttcacattcagctaataatgttataatgttgtattataacatttatatatataaatccaaaatacaaatataattaaaaacattttatggagctattacgtacacaaaaattatctgcataataattatagtcctttgtatagtttatactttatagctgttatggctaaacatattgcacataaagaacaaaaagaaaatatatacaaatatatatatatatgtaccgtttttgcagaaaacccaggatagagaacatgaatattattaattataataataaatattaagaaaaccccttatgatataaagtagaataattaatgaatattgaaagcatttgccacaattaacatatatgtttacacacacatatatatatacacacatatatgtatgagtatgtttggtcaaagtttctacatacaatacttgtagagaagctcttgttggtcactaaaatttactcaagaatttatctttttactaattactcaatctttcctaaaaaaataacttaatggaaacttaattagtcaatgtttaataaaacagatggtaaattgttcaagcttacacaacagtcatcacactagacctgtagtctccaaaaacaagagcacaaagcaactgaaatggctaagaaaacgaaaaatgtttaccaaacgcaattcaaagtcgaaatcagtgacagtgataccgacagatgaagcatgattttttggtgtcaagtgtccacaacattgatatcaacatctcatttgatgaaattattatcttaagctaagaagcagcattttcggtgacttttccgatagttttaaggtcgaaaatctcaatccagtagccgtcgggatctttgataaatgctatccccttcatttttccatcatctggtcttttcacaaattccactcctagattttcaaatctctcacatgccttgtatgtgtcatcaactgtgatcccaatgtgtcctgaaaaaacaaatacaccaataatagaatgatattccatcatcttatccaacaaaaaccacatttagccaaatcagctttagatgataaagtttgtgctctttggaatgggggcattaccctctattgtaagctctgtgtttgtttcggtttaatgaatttcttcttcagaaaagaaaaaactgtcttcctaataaattccgagattgtgcaaacgatattttgtcaatcattgaaaagtgcagaaattgttttcccatcctaactgtctactaatacttgacactgcactctctcgtcacatgacaacacgaagttggttgagtaccggtagtaagtcatacatggctaaactacattcaaagtacaaatataaaacccgaaagggcaactcaaacaatcaagaatctgatttttttctcaagttcaagttcatcatgagcacccacaataacaattgatacaagtaaggatccccaatttcaaacttgggtagttaattgaaattgcggtttatgcataaaaacctcaaaatgctaagcttccagatactactgacctatgtatcttaaaaaatattccatattgtagaaaatagtgaatcgaattatgtgtgtatttcatagaatagtacatatttatatacaaagctaggagactaggaaataggaaactaccaacaaaatag

SEQ ID NO: 39015 - DNA, 1519 bp, Cannabis sativa
ctattaactttgtctttaaattgtcacatagaaaattgatttagaaagatattttaggtgaaaataatttatcttcttagcatccatatatatttaattaggtacttaagtacaacttttagtatgatttagtggatttttattacaaatattttaaaatcaatttgtcacatcaccatctaacaataaaattaacaataatgaagtgcaattaaaagttgattttagatatttttgcaccaaaatataatttgaagttagaaatataaaccaatgtaatataatgatgattttattacaaatttagcaaataaatacaaactataatgatggatcaaaaaattaagaattcattgtgaaaacttgtggatgataattaattcttaatttggatgtttaggctttattaacgtaactcttatgatcctcccaaaagtataatatatgaattcatatacgtacggtgtaataataataattttttttggaagtaattggtccatcaattgactagacaacatattaaatttataggaaattctaattaattatttttatatgtaaataaatatattttttaatattagtctcatgcgtgtatgtagagttggccttgagttaaaataggtcctaggcaaaacaatttttttaggacccttactatttaaagataaatggtaattttagaaattattaaaaaataatatatacattcttcttttcaaggtaataaattttgataagttttttccttattcttacactcgttagtgttctcttaaatcatcaccttacacatgtcaaaaaatcgttaaatttcatggagacgaagctatgatcgttgcatcacttttctattagacacgttgagagaaaaagtagttttcaagacctaacaattattttaatcgaaatagtgaaaatcttacatttcacatagtggttcccttttgtgaaatgtggcctgaacccatctcgaaatatgtttctccactagtcacaattaattcgtactactaatacgtgaatttgacgattggattcgcgataaatttggttaaaatagcccctaatacaaaaattgaaaatattcttactttcatgataaattttaaaaaaatttcttccttactcttatacttcttattaaaatttcaccctacacatctcgaaaaattgtaaaatttcactggaatagagccaagaccgttggacacgttgagagaaaatataattttcaagcactaacaattaatttaatcgaaatagtaaaaatctcacatttctcatagtggaacccttttgtgaaatgtggcccgaacccatctcagaatatttttccccactagtcacaatgaatttgtactgctaagacatgaatataaagatcgattttgcattaaatttgattaaaatgaccacctaattcagaaattaaaaataatcttattttcagggtaaattttaacaaattttttccttactcttacacactcgttagtgttctcttaaaatctca

SEQ ID NO: 39016 - DNA, 1928 bp, Cannabis sativa
aaaattctgataataataaataaatataatctaaaatatattataaaacgaaaatttatattgtaattacaaaagtacatatattgtctaaaactaaataaaaatatcgttagcttatacaaattaatattagttacactgcaaactaaaaaaataaaactacaagtccatagcatcgtcatcgacgttgtcatcatgagcaggggtagtctgtaaagaagacccaacaacatgaggccaaaaatgtggaatcggtggaattagaggcatcgggggcaagttgaatccttgaatagcgttggccagacgcatcttttattgctaaaacgcagtaataatttgattctgagtttgcctcatttgttcctgctgctcattctgtgcttctttctcttccaccctttgctcaggacctcatattcttcctaggtgacagtaggttactcagaggtaactgccctgggagtttctctcttttcccccgccctaagtcttgacaactggcccattcctctcaagtggcgtggccgctcatccagcacctgtgtcataacaggtatgtctgtagaaaattaggaggggtcgacattgtactactgggggacattggtcgtcgttggttaagtttcacaaatgtcaaccattttggcctacaaaaaatttgaacaaactgttagagatgaatagaaattaaatatagaacgagtttattaaagatataaaattacatacatgtaattattgtgtgtgttcatcacgaaatttgttgtccttgcagttaaactttgcaaaagtatccacaacactggaaagttccccgtctcgggatcaatctatttttatataatataaaaaaattgaaatatattcaaaaaaatatgaatttttagactaatatgctgacagcatcataccccgctcacgatgtggcctactatggtcttggaaccccatccaccttgagttttcatttgtccttagttttttgcattttgtttgactcttgcctataatttacagtaaatttatttttaacaaaatgagcaaaacatcatatgttgatggagattcaattttaaaactttcattttatacttgttgttttgggtctttctagtgtgtgataacctctgcccacacctccagtaagaccacatctagacgtgatctcctagtcgcttctacgtctccattttttttcaatagtctatttccatgattttttcgtgtctattctccaaccacatcgcccttttcacatttattaacaacataattctcaaacataggattgtcagttaggactcaaacatggtttgaaaaaaaataaaaattaaagtcatatatattgtataatagttttgtttgatatattttactgttattttatcctagatttttagaattaccttttccttgacgtcctcaaagctgaacttgtttgaaggaattgtaatgcgaagaagaaacttgataaaattgttaaacttgttgccatagtcatttatcggggccccagtccccttataaaatataaatttcaatttatgtcctgcatgctatttggtttgttgttgttcaatattttcccctaactccctttttcttactgtttcttgcacccgcatcaaccattctacacatacaagctagaaataacttattaatcaacctattaacaaaagcaatatgtatttaatttaattaacggtgagtttcaatattacaatactttgaagtctacaagtcatcataatcatcatcattaacagttacattatttttattatcactatcactagtgccttcatcataactataaacaatcaaatattggattttgtgtctaaaacctatttcaatgtaatcagatttactaattaataaagatcagaaatggcattttatgttccatggttcacatgatt

SEQ ID NO: 39017 - DNA, 2638 bp, Cannabis sativa
ttccaacaattcatctcatatatggcaatttatttctacatattagcaatgtgagactaagtctaacacacttttgggcctgaaaagtgtaggtataaagatcgacctttaagagaccacaggaccgaatgtgacatttgaaagaatcccataaggccaaatatcagaaaatttgtaggtgtacacgttaggaaattcgtgaattttgaaacaggtcaaagaccccaacaccgaaactggcacacattggtcgaaatgtcctaaatagaagttaaagggaaacgactttttggaccggtggcactttgagctcacgacagatcacaagtggctctgataccatgttagaatttgacataaggtgaatggggtttcatctcaaaactaattggcaatgggaggagtagctcattcatcttatatatgacaatttatttccacacattagtaatgtgggactatctctaataaatacacactggccgaaacgtgtgtacaggccgggaaatttgtgaattttgaaatagctcaaagacccatctttttatgtcggtggcactttgagtgcacaacagatcacaagcggctctgatactatatgttagaatgtagaataaaagtggctaaggtacatcaagttctatctcaaaaccaattaataatgagatgggtagtttattcaacacattagcaatgtgagactaactctaataaacaaacaacatatcacaccataacaaagtcataaaattcttgaaaattactatttaagtcttaaatttataaactaaatctataaaaggtccaagattcaattaaaaatagtgaaagttctgaacatgcatggtcgtcttaaatattttggaggctctgttctaatgtaaaatttaggctcctataaaaaaatgtaatttataaataatattcttaaatattatcatttagttatatactttacaaaataccaaaaaattctaactatttataaaattattgattgtaatagaacaaaaaaaatattaagaaaaaaagaatataaaaattttgaaaaaaaaataataaataacagttataaatttttatttttttttacttaaaagcattaatagaattgaaaatgggctttaggaattgggatggaagtgactaatgacaaattattagtcccctcaaaagttaggttcattaaaaaaatattaggcattaaaaataaatatattgtgccctttatttttttttttttggccctgtacagtagtccacattgaactccattatgaccggctatggttctgaacatatataaagaagctagaaatatatgcgcgaggttgatgaggattgagtgagaagggagggattaggctgagaaggagagagatgagagattccataggagaggatttgaatttttagggctatattttcctatcatttctattaaaaatctgctaaattaaaatattctaaactaatttcatttaaaagtgtgaaaataaaaaatggccaagatcagcttaaaaaaatagccctaacacacaaaacaagaaagaaaaaaaaggtcattggtgaggcgtgtgccttaaaggtgtgcgcctcaagttcgcctcattagtgtgagacatacaccttaatggtagtagctaaggcgtagcctcaaatatattttctccccgccccaccttgagacaaccaatttttaaaactatttttaaaactaaaatgttgatatatatgttttttttttggtaaatcaaatctttctttgtattatgtccaaactatttagaaacactaatcattattaattacatttgtaaatttttcaaccaatctaaatccctctgacatacagacctacagaccttccttgacaacaaaagacttatcctattacaaatatctttttttatatatatattctccataacattagaaactattggtttctttacatttaaaaaattctcatttttaactttccaaatataatacacactcgcacaaataaattgtattagagttagtcctacattacttatgtgtggaaataaattgtcatatatataagatgaatgaacaactcttcttattgtcaattgattttaagatggaacctcattcatcttatcccaaattctaacatggtatcagagccacttgtgatccattgtgagcccaaagtgctacctttctaaaaattcgtttgtgatctgttgtgaaccaaagtgatgctggtccaaaaagatacttccgctctctcccctttaacctctatttgggacatttcagccaatatgtgccaattttcagtattatggtctttgacctgtttcaaaattcacaaatttttcaatgtgtacacccacaatttcttgatatttggccttgtgggattcttttaaatgtcacgttctgccttgtggtcttttaaaggtcattcgttatactcacactttctaagctcaaacatgaggagagtgtattagagtttgttccacgttgcttatgtgtggaaataaattattatatataagatgaatgagctactcctcctattgtcaattgattttaaaatggaacttcattcatcttatcccaacttctaacactttggcatccagaattcttacatctt

SEQ ID NO: 39018 - DNA, 4013 bp, Cannabis sativa
  modified_base (2164)..(2169): a, c, t, g, unknown or other
ttctcttctcatatctattttcttatatctatttgattatagttatctattgagatatattggtattaatttgagatccacgatttgggcttagtttttggtctattttctttttttattttgcaatgtattaacctcaatatgttattaaaaagattttatgtatattattttttctctaaataaatatgtatattattgttttactttatttatggaatatatgcatattattgttgtataatataaagaaagtattttttatgtttattaatttatttatataattcatgatataaatttatttacatttattacgtatatattattattgtgtaatataaaaaatgtactaataaaatttaattttcatatgattcacgtccagcatacttggactaaaaaggggttctcattgtgtgtcctaatatcaagtccatcaactttggacaagtaatgtttttctagtctaattttcttggactagataaacacccattttatgtccttggatactatgtccaacatcaaatggactagaaggatttatctagtccaactttaatggacttaaaatgaagtttttgtagtagtgtgggggtaattctcttactttaaaaatcatacggcaagggtattactggtcgacgctgcgacgagacgctttaaacttcgctaaaaaatgcgacaagtgtcagtggatagccacatatgtcaaccaacctccaagccacttgcactccatcacaagtccttgaccctttgtggtttggggcatcgatctaattggagagttacccaaaagaaaaggcagagtcaaatacgtcgtagtcgcagtcgactacttcaccaaatgggatgaggcaaaagcacttgcgactattacagcagccaaaatacgcgagtttgtttataattccatcatctgccggtttggcatcccttacaagctcatctcggataatggaaagcaatttgattgtaagaaaatgcgacaattgtgcgatgagttggaaattaaaaatgcgttttcagcagttgcttatccatagagcaatgggctaattgaagccgtcaacatgcaagataattaagcatactatcaagggaaaacttgaagagcgtaaggggatatggcgagaagaactttcgcaagttttatggtcatataacacaaccccccgatccacgactggcgaaactcctttctcgctctcctacggatgcaaagccatggtaccagtcgaggtcggggtgggtttcctatgaagagatgttttcaacattacctagaacgaggaaaaacaattgctccacctttttagaagaaaaatgcgaccaggctcacttgaaaaatgcggcctatcagtagcgtactgctcggtattttaattctaaggtcaaggagaaaattctgcgagtaggggatttggttcttcgaaaagttatgccaaacacgaaaagcccatcgcatggggttttttgagacaactgggaaggaccataccttatcgctgaaaaagttggcaacgcaacatatcgacttgccgaactcgatggtactacgatttgaagagcctggaatggcgaaagcttgaagttttattatcaatagtacccacaatgtatcgtttgtactcattatgtatttataattagtcaatttatctacataaatattctaattatagagggtatataacccactcactttgtactattgatagagatgaattttctcgagctttcaaaacattgatcctaccttagcattttttacaccaagctgtaattaaaccgcaatcgagataataaaaaatgcgagtacccgtgtactgcgaaaatcttataacataacataaataaatatccccgaaggaatatatgttgttcgaaatacaaaagacaataaaaataaatttgtctaagtacaaactgcgagtacccgtgtaccgcttaaaaagtttggcaaaattaaagtaataataaagtaaataagtcaagcattgggagaagtaggggcagttggagtggttgatccatctgcgatcttgctggcggcctcgtcagcgacttcttcagtattcgcagcttcaatgtcctcaggaagaatattcccccacctccttgagtctgcgtgggcgacatagcacgaaaagcctcnnnnnnctcagccgcctctgctccaaggattgagaagtcgaagtctggtgttttggaaagagtcgtgtatatgtagtcggagactgcttggtcgtactgtttctttccattctcttattcggcctctaggtcgcgagacagctcctcgatgttcgtctaagaaagtttgacttccagctccacctgctcctttaacttccgaaggtcctcgagctccttgtccttggtattcgcatcctgcttcagtttcttgttgtactcttgaagctggacgatctgcttcttcaaaagctcgacctccttggaaccaggaatgaatgccctcgaaaacatagtgatgaactgcgaagccaactctgcagaacgaggcattagttcctcagaaggagtcccttcaaccttcaacatgaactcctcacccacgaacttctcttggagagttaagatatcgcgggcccaaatagctggatcgatcataacctttttccctttgtcctgggtaggcttggttttcttcttggacgagtcagcaataggagtcaccacgacgtcaaccttccttttctggggaacgatagtagaggtcgtcgctaatccagtcttcggcttgcgattaagtacatgggcttgcttcaggaaagtcatctctgtgaggataagagaagataagttaaaataaaaataaactcaaatacattcacaagtctgtatgcgcgatatgttacctgatgttggtcgagaagtttgcttggaaagacgcttgtctatcttctctttttgcttctcagatggctccttgtatattggctcccaatgaaggctagcattctctggaattagcttgtgttcccgcaacttcaaggtcatgcacagtagtcgccagttgcgatcttgaacagggaggcttctgagaacttagcgacttctctgcgagctgggtccagtacaggtcgagcctgtctatctgcggttaataaggaagagcgtgttagacaatatcataaggtaacatgaatattaactaagtaattaaacttgcgacgtactaggtcgacgattaaaattggtcctaattccaggtactttgaacacataaaaccatttagatttccaatctcccatattggaaaccatgccttccaccccgttgatttcagaagtggcccacttgctgaagcaatataacaattatgaaggcccacgttctttatatcataaaaatagctgaagtcctccatcgaaggctccctatgcgcatactccatgtacatcgcatagaacccaagagctatgcgataactgtttagggttagttgaaagggggatacatcataccgcttaagaatagcagtgataaatggatggaaaggaatcgatactccacatcgaagtatgggaatggaaacaactacatcgtctgaaggtatgatcgcggtgttagttaaaggaaggtgcggtctttgggtggagcggggacgcgtggtgccaagtcgcagcaaattcaacctcgtaaacgtagtgaggtcggctttggtaacttgcaaaaccaagtcctcgcatgagaaaggctcgttcagttgcacgttgtccactgaatcagtcccactcccctcagcatcctcttcctcatctgactcgcgatcagaagcctcccagtcctcgcccatctcttcgacttcagcatcaggaacgtgcctagagtgaacgagatgttcacgagcagataccgtggactcgctatcgtggatctcgattgtccccgattcagcgagctcctgaaccattctttctatgttcgcggaagacaatgggccaagctccgcgattttggcaatggggggctccgcttc

SEQ ID NO: 39019 - DNA, 1798 bp, Cannabis sativa
gtaaaatctcctctgcaggatggtttgccaaggatcatactgttctccgacgtgttgggcatgtgttgttgcaacttccttatgctcctcaacgcaatcctagacaggtaataatagccgatgattgctttcaactaggaaagattcccgctgaaaggattgttcaagttgttgtcaaatccacagagaagatttttggaagtaagttcttgtactttgttgtataagcatcattaggatattgatttcttttctcagcacttccatctttattgttactattactgatattattttatttttattcactttcgaaaatttataatttcgatttttgttcgcttaggcctaaactactgttttatttttccttttcggtactttccgtggatatttttttaatgcttctttttaatctgatccagaacaagtattaaagcatgaaaatcttggagactatttaagttcaaaggtaacaagcttgaaagtgttccaaaccaaacaaataaatgggcaaaatcaaaattcatcacttggatcacttgcagctgttatgaagatttttcaaaggtgagcttctttctcacaagaggaataaatagtctcatctgaacaatgattaatcaatttttgttttgcacatccttatacagacatgagtttagaaataatcacgaggagtggattaactcggtgaagcctgttttggatcctgctatctcgtcaatttttcatgaaacacctgatacaactggtaccgatgttgaaaattgcaaagcaattaggaacgagatgcgcttagctctcaacgctttattgaaggtataagtcctttatcgaagaatttttaaaatattaatgtctttctgctaaattgtactaattgaaattttaattcattatatactttagaatcatgctgactctggtacttgagatttgtttaggatgaaggagttcttgtgataccgaccattgctgatcctcctccaaaagtaggtgcgaaggagatcctatcagagcagtttcagagccgagcatttagtctattaagtattgctagcatatcaggctgttgtcaggtaaaagttgctagtttgcttcccccccttatctccctccgagcggtgtgaagtttgtatgtttctaatgtttgatcaatttacacctgaaaagttgtgatgtgtgtcatttgtgtctatgcatttgcttatgtacggtcaatcgggacttgaaaattcaaataaatgtttgtctgaatccaaaatgtttttaagaaggaaaaagagaagaattgtgggagtggattcttgttaacatatatctatatcatatatgacatgaccattatatgattttcaggttacagttccactcgggtttcacgagaagtcgcctgtttcagtctcctttatagcccgacatggtggtgatcggtttttactagatacagtgaattccttatatgtgtctcttcaagagcaagctgatctcgcttcccaatcgaaagcttccagaaatgttgttgtcagcagggaacaatctgccgagatggcaaaggaaaaggttcgttcgattaacagtttgtttatcaagccaaaagtgtttcattttcgtgacatcgttactttattgtctcttttttgtgctgataattagggcaatcaagcttacaaggagaaacagtttcataaggccatcggtttttacactgaagctatcaaactttgtggcgatagtgcaacatattacagcaaccgagctgcagcacaccttgaagtcggaaggtattgttatt

SEQ ID NO: 39020 - DNA, 1413 bp, Cannabis sativa
attagatctacataactatacattgtagttttataatgaagttgatataaagagggtcattaaaggtagcccatggacgtttgatagggtgcctttgatatttgaaagactcaaacaaggaaaaatcccctacttgttcctcttaatcgttttgagatgtgaattcaactcaacgatttgacagtaagattcatgtcctcacatatggtcaagggaatttgaaactgtgttggaacttttgtcaaatcagatacaaatagctttttagggttttggcgtgattatttaggcatttttctgaagatttgtgtggatgccccattaaaacgcaaaatgaaattagagatgaaaggaggcctgatgtgttatttgagttttaagtacgaggaccttaccacaatctattttatttgtcggattcttgaccatatagagtggttttgcaaaagattatttgataccccatgggaacaaatagtttaacaatacaatatagagttgaaagcggtaccacaaagaagaaattattcaatgggagaaaaatagctacgtttgggagtcacaattaaaggaggtgctcagacatttccaggtgatagctcaacatccatgtccatggaaggaataaatcatgttgcacaatttaaggaaattaatttgggaggacgtagactgaattctaactcaagattgatgcaaagagtggatacagttggagaagaattattctttttgggggcaaatgaaaaagtttcgagcgatggattttctttatagaaaataaaaggaaaagacttgatagtaataagtccattgggcctggagctgatgctaaaatgcaaatgggcctaagttgaaatggcatacatgatcttacaaaaattgttaacaataacggggcattagaaaaagatagttttattgaaggtttaaaaaacttttgtggggcgggtattggtgtccaagcccgccaatcattataaatgttttaagttggaattgtaggggcttgggaaccaatgggctattcaattcttatgtgagatcttttctgaagagagactcaattctattttttgtgtgaaataaagcataataaaaagaaggtggatgggtatagcccatttgttgggctttgatggtgtttttgcggttgactcttgtgggcaatcaggtgggttggcttttttatggagaaaaaaagaagagggggctaagggggctcagtggtttgttggggattgttctcttaattatctcggtggttggggaacactggctgcctaacttcaataatccttctattctctcttcacgtctgagtttaactaatgccaaggtgtgtaaattcgcttgttgtgaggggatttattgggacaatgacattcttgaagacttgtttgactaaagaga

SEQ ID NO: 39021 - DNA, 2118 bp, Cannabis sativa
agaggttcaccccattagaataaaaactgaaaaattctcattcactttttctttctctcttcattatcttcttcttttttctcatttattttatattattttataacaaattttatattttgtaaatataaatatgtttttttttcttttgtagttatctatgttcttgcattacaatttatttagaaagaaataatgttttccctacaaagtaaaagaagaagaagaaatagaatatgtttagtcatagatgtataatttttgtagctatctatattacaattaatttggaaagaaataataagtttgcctaaattaggaaaaaaaaagaatatttttttagcatattctataatgaaatttccaaggactttggaatgttaaatcttatttttcttttcaattagttttttttttaccttataggatttcattctctataaataaagtttttttcttcattttctaacactatcaaaactctctcattcaccatgtatgatttatctttcacttttctttttagatttccattatgatttttgttttacattttttaattaaatattctctttgactaatattttgagtaatttttttttcaccatagatcaaatctattacttagatatggatatgaggggggttttgatagttgctattgtattgtgtacactttcattatatccttatgaagttaaaacacaatcaatggaattatcaagagaagaagagttggaaatagaaaaccaacttgagagattgaataaatcatcaatcaaaattataaaagtactttttttttctttcatcttcataacatctcttctttgatattatttatacaaatgtatataaatgtaaataatttatttcgtgtgatgtacagacacagagtggagatatttatgattgtgttaatttttatgaacaaccagcgtttgaccatcctttactaaagaatcacaaatacgattttcaggtttctttcctatactcaatatgtataatttttatacatatatacatatatttatgcaatgcgtgtaaatattatttttgttgtagatgagaccttcttctcgtcctaagggggcgatgaatgaaaacaagcctacaaataaagagaggcatgtatcaataaaaagtcaatttaagagtaaaagatgtccaactggaaccgtcccaataaggagaatgaccaaagaagatcttattaaagctaaattgtttacaaaggcccattcttcaagaattagttccctcacatcgaaaaatgcaggtgttcatgtaagtattttgctttagattcgatttatttttggacgtattaattagtatttttcatgatttgagtataattgtaatttaaaattgaataatagcaatcgattgttcatacaaagcctgatcctaaaaagaagtacaatggaggtggaacaactgcaagttttttcacactcgataatgtcagtggctcacaatatagtaaaggtcaaatgaaaatacaaaatggaaatgattttattcaagttggttggagtaatatcttataagattttgtttatttattggcgatcacaatactcggttattcacattttttaaggttaactctcctatatctatatatttattccaagagttttcttgatgataaataagttttttttagttatgtgtaaatcgtcgagatttctatttttgaggtgttaaaacatgtcgctttaaaaaaagcacattattattattattattgaagagtgcattaattagtattaaattagattaaaaagaaataattattgagaatcatgaggtttcatctcaaaattaattggtgatgagtggagtagctcatgttcttatatatgactcaatattttacatttgatccatgtgagacaatattgtccaataataatattgatgatatcacatcaggaccgaccctgagctgtattggaccttatgaaaattgaatttttgagctcttattacaaaaatagatggtattttaaatactatttttaaatatttattttttaaaaataatttttttttatttggcccttggagtgggtgggtctgccctgtatcacatacaagtgttgttaa

SEQ ID NO: 39022 - DNA, 3421 bp, Cannabis sativa
tttttgataaaagtgtcatatattttttagtttgaaatgtattggtttaagaataaaatattaaggtttttaaagtctagttttttaaatttcccaaagtaaatcaataaaataataaaggacaaaaataatagaaaagccaatgtaaatgtgaaagtgtagatgaagttggtacttaaaatttaacaaatttaaatataaacttttaaagtaagtgtttaaaaaaaatgacaaatcaaatatctaaaaaggataaaagaaaaataaccataaaaccctaacaacaaaattatgtcatatttatcaagtatttatttaaaattcatgagtgtactttcctatttatttgacaaattcagaggcattacattgatcagaactgctattttagcctaggctaagatataagttataaagcattttcattagaatgaaaaacactcccaaataataaaaataaaatgaaaagcaccctctgaaattagggttgttcatctaatttattgtgcactattttttttcatagtgtatttgattcgcactaagtgtaaatttcatattttaaactcaatttaatccgcataataattcaaatccaatccaatgcggattggagatcgattatttaatccgcataaaattagttgcttttcaatattcattaaaatattttttttttaaatctgcaacaacaaattaaaataaataaaacaaaaaataataaattttaaaaaaaaaattatgattaaaaaaattaaatttttttagattatagttcccttatattaagaatgaaatatacaatctattagattttaaaatgtatttgtatcatttgtgttagattttaaattcctatcttgacattaagtattaattgtataatatagctttttaaaatatgtgcagattaaattggatcaatcaacatctaatccgcacaagtacaaattttaaattttccaatccaatccatttcttataagtgcacatagccgcaatttgcagattaaattgaattaaatcgtgcagatcgaattgtattagatattttacaaacacctataattataaaagacattgtaagaatgattctcaggtttccaaaatatcccaaaaatcttcaacaaaataaaccatttccatgcgatcaatcagtatttacattttacaagttaaggccgaacaaaattctacacacagcatttctaaattcacaagggcaaaagggagacctgcagatcttttcatgataccaaatcatttctcatcacaagcagttgaatctaaaagtgcaattatcttcttctgcagctcgggtttgttcgctccaacgagcttgtcaatttgttcaccatctcggagaaagaagaaagtaggagtggctttaatatcccacgaggagctgaagtcctgcacagtacaaaatcatgactaaactaaagaaactcatagccaacatttggaattaatgcaacaatcacactatttgaacagataaactaaactataaggtgaagattaagttacaaatatttaagccttttttaactgccacagagatccaaggcaaggcattctacgcaatgagtaattagttgcactcatatagaaaattgaaattcttatacaggaaaagaacaccattcaacacttacagtcatttcatccacgtcgattacaacaaacataagagaaggatatttctcagatagctcgcagtagaatggtgcaatcattttgcaaggaccacaccaatttgcgctgaagtttgcaatgacctatcaaacacatctttcaattaattaagtttgagtagactccaatatacagaatgaactttgttttccatcaaaggcctacttataatcatgtttcttcaaccatcttcttcctttccccacactattctcaatagcaggccaatgaaattcaaatatcacatggtttgattttgcaccaaattactttcactcatcttctaaaataaaccattatgcattaaagttcgtgattgcctaattattaaatataaaataaaaaaaattattcctccaagtccgacttttttattttcaacctgtagaaaaatactcttgaatgttattattatcactattggaaaagccttcaaaataggccgagtacaaaaaataatctaggtatagatattaattacacctcaattataaaccacaaactaatcaaataaatactaattatttctacaccaagctggtgcataaaagtcgcacatccagcttgcatatttgttcataaaagttttcttttgataatctttttgtcagcaaatcagcagcttgttgcttgttttacacataaactacacatacttccttttcttcaattttatcttttatgaaataatggtccacccccgcatgtttggttctatcatgatgaactgcattgagtgctatattaatatctaattcattgtcagtgtatagcttcaaaggacttgtgtcctttgaagttgtagttcttcaagaacttgtttgatccacatcaattcacatactccttgagcaagagctcgaagctcaacttttgcactgcttgttgcttctccaagtaacaaggtttccccctaccttggtacaatatccaagttttgatcttctattctcaattgaagctgtccatctgcatctgcgaaagcttgtatgcctctttcttcatttttctgaagaacaaacatttttctagcgtcttctttaaataccataatatcttgtaaactgccttcaagcgttcttcaaaagggttgtgcatatactgacttatcaagctaactgcaaagacaatgtcaggtctggtgtgagacaaatagatcaattttcctactagtcattgatacatccatttgtctacaagcttctccttttctttcttcttgtaattgcctttaggttccactaatgttgttgttgtttacattttgagtatacgagtctctttgagtaaatcaataacatgcttacgttgagagactaagaggctgtttagctgtattttcagtttttaattttcaaaattgcgttttcaaaaatgaaaacagaaaactttgttattttaaaaatttaatggcatttaactaaagttttttaaaactatttttaatttctttttactaaaataaatcaacattctacaccatacaatgacatgaacctatccaacaccgtaccgaacctcggaactgacccgagcccagaccccagactcagacccgaacaccaaaacagaaacccaaacaagaaccccaaaacacagtctcggactcagacctcggaacacgaacccagacccgaacccggactgggaccccgggctcgagctaggtcatgggctggggtccgggtcagggctcagggtccacgtcctggaccggggcagg

SEQ ID NO: 39023 - DNA, 1649 bp, Cannabis sativa
tttttggtgtggttcatcggataaggagaagaaaattcattggtgcaaatggcgatacttgtgtcggccaaaagataaaggaggcttgggttttcgggacttggggatgttcaatcaagctcttcttgcgaaacaaatttggcggtgtatacgacatccacaacagttgtgtagccgagtcttaaaagcttcatactttccacgcaaggggtttttggaggctggatgtggggccaatgcatcctttgtttggcgaagccttatttggggaaagaaactaattttgaaaggctatcgatggcgagttggtaatggcgagagtgttcgggtgttggaagatccttggctcccacgtcctctcactttcaaggtgtatgatcaacctacacttcctgaaaatctttatgtcactgatttgaagcgggcagatggacaatgggatgaaagtttcattcgatccgtttttaatactatagatgctgagttgatattagccattccttgttcggattgggacttcgaagacaaaatcctttggcattacagcaaaaatggcgagtatacggtgaagagtgggtatcgaatggctagttccttgattactgaacatcatcagtccagtgatcactctttggttcagtggtggaagaaactgtggcgactcaaaatccctcctaaggtgaagcattttgtatggaaagtcgcacataattggctgcccacgaatgtcaatttggctaagcgaggtattaattcgggtgttatctgttctcgatgatccagtcatgttgatgagtctattgcccatgctttgtgggaatgcaaggccagcaaaggttattgggttgtaagtggtgtatatgatgagtttaaaaagatgttgggaactgataacctctctttactgatgcgcatggcggctgaatgggaaaaagagaagctggaattctttttactggtatcatggaatgtttggaatgtgaggaatagtgtggttcatggtggttatcatccgaaaccagaagatatgattgaatggtgtggcaggtaccttgatgagtttagaggcgaggcgggcagcaggagcaattcagcgatggtggaggatcggagatgggtgcctcctgtggtggatcaagtgacaataaatgtggatgctggggttaaaccaggaggattgcactctggcctggggaatgtaatgagagattcggcaggtgcagttctttgtgctgctgctacagtgctgcaacaagagcttcctccactgcaattggtgctcatggctatcaagaagggactgcaggccggactacagaggagactacggaggtttaatgtcgaaaccgactgtctacaagctgttaagttaatccaaaataaggagaatggctgccgtgacgttgatggactgttagaccaaattagagctttattttctcatgatagttgtgttgatatctcctttgtttttcgagaggctaatcgagccgctcatgctgtagccaattatgctttggtacacaaagttagtgctatgtggattggggttatacctccttgtgctcggcaagcagtcttgcttgatgagccgaatcctgtgtaatgtttgtcctttaatataagatttccatttcaaaaaaaaaaaa

SEQ ID NO: 39024 - DNA, 2983 bp, Cannabis sativa
acaaattcatcaaagagaattaatatgtagtatgaccgtcttattatctatgatgagtaagtatattatgagatttttataaaaatactggatttttgacaaaagtttttatacacagaatttacaaaaatactatgtttttataaaataatacaatctttttaatacataattatgtacattataattatagcatgcaaattatatactctatttattatatattattcataattttaaataataattataacatcttatcataattctttagttaatgtgtgcgattaaaattatatattataatatttaaggatatatattattttagattttgtgatttataaaaattattaattaaattttatattttattaaataataattcgaatcctatattttttaaaatggtacaaaatagaccttgaatttaatttttgtcaaattaaaatttaataataatctcacttagaggtatgataagaatgattacattttttttatctgtttgtattagaaattggttgtaggttggttatattaaaaaaaataacaaaaattaatttaggatttattttgtactattttaaaaaatatagagttcaaattgtaatttaacaaaacaggtctaatctataacttttgcaaaatataaggtctaaaataatattaacttttttttttaattgatattcattatagttacaatatcattcttcttgtaatttttttgaaaattcaaaataatttacagtatcgaaaataaaattcttaatattcatgttagtaacacgcctgtttaaaaaaatttagacttattttcaacaatgtaaattatttgaaaacttttaacaatttacaagaatgatattgtaactataacaaacaccgcaataaaaaaaaaattgaaaaaaaaaattctaacatgtgttttctaacacagaaattgattaaaaaattataaaaagagattaacggtaactgtttttgtttaagtccaaaaagataaaataaaaaattaactacacatgtttgtattgaattaattaattaagtagcagacgagacaatgcatggatgtgttttatacattgaactgaacatattaatacatgttacaataaaaggtgttatatatatatatatattgattagtagtagtatattgaactgtgtctgtgaatgaactgtagtgaagaagacgatgaagatgattatgaaagaagattttaaacactactacgtactagtctactactactattattactgttgatatattgaattattcgtctgttaattaactatgaagctttgtatggagactcattcatgggaccctgttttggagccatgtatgtcttgtagttccttccttctcttttttctgttttgtcagctgacactactgttttcgtcttatttggctagaaagaaaaaaaaaaagaaaaacaaaagaaattatctgaggctctggggttttgacacgtggaccacctgatctttcccacgtcctcgtgactatttgatctcttgtggtaccgactctagctagtgtttttttctgtctttttgatgtcacatttgtgtgtttgttttggtttggcttaacctcgtattgttgttctcaatctcaaacccctcttactactttgtttgaccattttagtgtaagtaaagacaaaacaaaacaaaacacagttctcttactttctacttttttccttattctagttaatattggaaatatttaatctcaattacagctaataatgcctcattacatacttattgtcatagatagaactagaagttgtaaacttgtaattacagctactaaaatttgtgtttatttaactaaaagattgaaatgaaagacccttcttcttcttgatagtctcttgtcttactttagtgtctagtcacatcacaattattgaccgacactaatttggaaccataactgttttaaagaaaattttgattaacaaaaagtcttctattttttgatatatttgttcatttattaatttttaagaaaattattaggacaagtctgaaattagaaatggcaaaggatgactgctacttttaaattaccatccccatcctgtagttaattatataaccatatccgctttaataattgttggtcatggtacagatattaactagtagacaattaagaaagtagctattttttatgaaagtaattacaataatttaatttaattttaataaaatctacttaaactttaaacaatgaatgttttttaaactcacaatccaaccacacatatatttattaaaaaatattaggtacacccctttttctatatatatatatattttaatattttgagccctttatataaaaaaaattatattttggcctccttaattactttttttttcttcttaattatcactggtataagaacaaaaaaaaaaaaaaaaatagtcacctgcgattttatttttaacactttaaattatttattatctgaatatttacgtgtaattctaaataattgtaacagacactataaaaaaaggaaagttagttttaccgaaatatctcttacaccacctaaaagttagatttggtgcaaaaattgggtccaacatatcattatatctcacactattataccatgtgtactacagtgcacgatatatatactgtatatcatattgtagccatgatatcttttttatttttattttatacatatgtataaatatattatatatatatatttattgtaaattctacagtgtaattcctaaaatgagaagtgctaccgtcaacctcctattacaatcttttagtcaacctccacgcccgaaaacacatgtcagaatattttttttttcataggggtattcgttaagcttacatcatcatccttgtaaatttttgaaaaattagtttacagtgctgaaaatatatttgaaggtttttgaacgcgcgtggtaaact

SEQ ID NO: 39025 - DNA, 4652 bp, Cannabis sativa
  modified_base (44)..(53): a, c, t, g, unknown or other
ttttgtctcaaaaaaaacctagtttttgatttttttttttaaannnnnnnnnnaaaaaaaaaaaaaaaactagtttatgattttcttcgtattgtaaagatttttttttatataaatatccaatatccaaaaaagacaaaaaatatattacaaacaaatggatttacaattattgtaaatgacatttgtttatgattacatgatattttttctcaaaaaaaaaaaatgaataaaatgtattttttcaaaaataaaataaatgttttcaatatttttacctacttatttttttttaagaacagaaaacgggataagttaaaaaatattttcttttttgtatctattaatcaaaaacacccttattttatacttttgtgagagggttacctaatatattctaactctacttaaatttagcacataatttcgttaacttaatgggtatgggtatataatagaaacatcatttataaaattgaatatgtcttaaagaatatggaaacaaaataaaaattaaaacaaataaagtaaaataggtatgtagtatatacaatgtaattttctcttattgttttcaaaacaatatattatatatgtaaataaaaaaaaaatcagtaaatatataaaataaagtcaatatgtaattaaaaatgtacaaaaaaaaaaaaaaaaccattcaaaacgaaaatgagtaatacgtattacctaattaaaaaaaaaagtagtaggtgtatgtatgtaataagcaaattataatattttaattatttaggccctcaattagtctgaaactacccaaaatttcagcttatatatgccaatattctaatgtccagtactgcatgcgaatataactcattaacacaaagcatcttaatgactgggtttcacgatatcatttttataaatattttgtacttgcaatatatttggtttactagaaaataattctttaattgatgagctcataatattgttggtttttactacgtatgatatcagtctaatataactttattagctcacgggtactgtcctataaattaaacaatatgataaataatatcatgctgacaaaaaataggtcattaaggtacatattatgagtagcttaaactgattgacaaagagaagagaccagccagcctaatttattataagaaaaagaaggtcatgactcatgagatatatgcaacatgaaattacaatataataatatataatacaaatatatatatgtattatgtatatgtatataaactatttagatcacatagaagattaacgagataataattgtctgtaagtcaaaatacatacaaactattacacaattatcttctatcaacccactaaatttaactttaaattgggctaataaaattagttacatatataataaatatagaaaataaaactaaaactatattataaatttacctttatatttgtgcctgtacgtaaccctatatatcaaacaattttattgccatttaaaagaaaaaatgttctttgagggcaacaaaaaagactgagttctatttggagatttaaaacttaaaaattgaactatttattaataacaatttgtcaaaaataaataaataaatcctttccaagagtttggattatttattacttgcgcaattattagcggctttataaaaaaacatatacaaaattatcggatcgatatatagaaataagtaaatgcggtagcaaaaaaccaaaaaaagatatcgaaagtaaatgactcataaattaattaggccacatcaatttctaataaagttttcagcaaaaaaattctaataaagttgatattaatactgcatgaaaccggccactgatttcattttaaaaaaacaaccggccaataatttaatacatagataatactaagtaattaaataagattgctgtaaattagcacacttaataataataataataataataataatattgctatggatcggagaatatagcaacatcaaaaattaattctaaagaaaaatatatagggcaaatatatatataatatacctacatatgagtctggttccaactctctcttacacttgattcttttgggagcagtactaaaatacctgtaacatataaatattcatatatatactaatgtattatgtataacagctagcatgaacaaaattattattctatatatcgccaggactttttataataagtttttttattatttttgaagaaacctcatatactaatttcaagactagctctggctaggattacttaaattacttttatgttaacatatatttttattttcttgcacaaattatatatattgcacgatccccatgaataaatatacataaaaaatacatacgttacccaaatgttactcacccaagaagcaagcacatgcatatatgatctatatatgtacatgcatttttaatataattataatagtatatacatatataattaaaaaatgaaggaaaaataaacttattatgataatatgtaattaacaaaaccaaattaaactgtaaattacatgacaagagttctagagcggttagatccaagaggagaaacacaggttgagaaggatgaggtgctaacacccatgatcggaagagcgaaagaggactcaagaaaaaccctccgctggtaagtatctaggctgccaccggcctcggccagatccttaatcatattcttgtaggtttccttaagcttcttcaaaatgctcttgtaatgaattttcagccaccttaatctaatctttctcagcttctcaatcaaaacagccacccttcgcggcctctttccgcccagcctaacacgcggtagtttcttccgccgccgcagtgggatgccgtggcgcctgttcgggttcaggaaggccatgttttgggggaggagtagttcatgctctatacccatttatattatatagattaatactaattacgtccgatgtgggacagagagaaagagagagaggatataatggtagagatatgcacaataatatatgtgtatttataagagagaaagttgactataagtgtgaaaattaaataagtaataagtaataatatatacttcgaaaagaaaaaagggaatcttttagttcaggaccattgcttgtttattttttttaattggaggaggataagatggtagagatatgaaaatgaacccataacatatataacgtacaatttacaaaataatataataattgttcttcaatgcaaaatacaaattaggtataaaagagttcattatattggatgacatctctctaatactgcgtttattttataacatataccaaaattatttttatttttatgggtttagatcatatatttttttattatttaaattggataatatattttttaaaaaattttattttagaccatcttttgttgagtggtctagctagtggcaaaatggttactccggtttctaggtgatgaaagtttatatgtgaggataatagtgacagcctatcatcttcaaatcaaggtaaataactttgattcgacaataatatatacaaataaaacaattcaaattatacattatggttctgaaaaaaaaaatatatatatatatatatacacattatggtcgaagttaacttttgaagaaccccatcactcttttcatcttggtgtaggaaatgtaaagtttaatagttatttttacgacttttttcctgaaatagtgtggtaataagtaacgcatggcaattaagaattaatatacaaatcaccatgtatatctgcagcgctgaccttcattaattttcatattatattaggcgagaatatatgctaatatgaagctggtatcaaatatacatcaatggtcaatttattactccatacattatattgattgttcctgcatataagattatttccttaataagaaaatgactaataaagaatcaattaccaaaaacgaatattggtagctcagaattgatgtgccaactcgatcatcactaaaaagtggaagaaaaaaaaaggttgaattcagctgtgttatttagttctttatattacaaaatatcaaaaaaaataggaagaaaaaattaaaacaattgacaaaaataaaccaaatgattcattacaaacgtttgatgagcctatacctcttatagtatgatcaacaaccaatcaatcaacccatgttatattcttccctaaaatcacaaaacaagataagtttcatgaagttggcatgttggaaaatccctgtttaaattattatctttaaaaaattaattagtgaatcagatgaagatacggtgactatacatatacatgtttatatatttagatcaagccatgtgcataaatcacgtgattctactatataaacatctgtccaagtggtaagaacattgcttgtgagttgtgagccctacaatttatttggttttgtagggatgcagagttgtgttagttaagaggggtacataaatccaaaatattgatagctttttgggtttgttaagaggtaatcaatcgtaagttgtctactctttctttccctttcacatgttctccccattttctaagcaattcaattataatcattaggcaatagaataatgctatgtcagtaatataagt

SEQ ID NO: 39026 - DNA, 2394 bp, Cannabis sativa
ccaacaattagacacacgtcccatactcagataagggtgcataatctccatgtctatgcgagaaggcctttgtggatgccttgggggtcgacaactggacctaggttggtttctaggatttcttccatcattacgaggaatttcctagtttcctggtcgtggttgtctcgcctctgcattcatgtgagatgatcctagtatgtatgtccattcattcccttagtttgcaaatccatgggaagttcctagaacatctcgttgatgttcttgatttcttgtattacctgagtttggggtattttctctatccattgggaaatgccttgcattcccaagttgttcttcttgagtatttgggagattcccttggttattttcctatctcctagtcctagagcctcgtggtctccttactgttggatcagattgattttgaggaattgttccctgtgcagtcctggttgctgcgacttctcgttccaactcaacgtttcgtcagtgttattcagctaggcattgttgaagttgcctattttcaaattctaccagtggcacatatctagtaggatcataggcatcttcactccttttttctggaatttgatcaccaacagtattgaaattaccatcgttcctccctgaacgtggtgttttagacgggttggttctctgagatcccataggttctttgtcaggacgatgagttgtttcctctggatgattaccttcatgtggaatgttatcagccattgatatggatttttatttgtgtttataaggagggatttttttgagtttttgtcaccaaggctctcaatgaaagtaccaaactgttaacgcaaatttttgttaaccaaatatatagacttttttgtaataaattcactgtagaatttcataataataataaataccagatattttacatgattttgtagttagaatctacatactctacgagttcgtattattgaggatatttatttgaatacaaagtctaaatattagtaataataatagaattttctctctactttttgccttcctttttcctatggattctacccctatttataagtgtataggttggcagttattttttttattaggatcagttcatttacaactgctgatgaagcgtggacatttccacgtttcatttatttgcacatgggataatatctaataactacacaactgctccttgtctttatccttaaaatgactatgctgactaagaagattgtttctcgtcaaatataagttatccttcttatctgtcttgagagaaaaaaatactaagtgtatatatgcttcatcttgcattactttcatattgtagttatgaagcgagatgactactatgttgtgtagaacgcgagacgattgagtatagatatttttaccctgctcatgtatgtgggtcaatgggtcgtatgacccttgctgtctcattttgtatatttttattactctatttatcccgaggcggacatattatctcattaattaaatgaattaatagttattattcttatctcgcatatgtctatgtagtcagcgagtttgaatatttctatcaactttaattaattgaaatgagttatttaaattgtatataataatacaatttaattactatattctttgagctgattcatattccttttataggacatgtgtcagcttcgggtacatagccgaatttttggtataacaatatttgtgattataatgaactatattataataaaatcttaacaacttccaacactttaaaatttataatttaccaaacactgaactcaacttttttccacagttctgatacaactatttttttcacaacacaactatagttactttttcccataacacaattgtgccaaactaaccctaattaattatatatgtatatacatatgtataaaatacaaacacaaaaacaaaattgtattaaataatagtttgataatatttttattaggtgacttgaaaatcatttcatgcaaatttatagtaaaaattattatcattattattattattattagtattattattattattagaaaacttaaacttattttttaaagttacatttaaataattaaaataataatttctatgattctatcttatgaactattactactatattatattaaattttttgtcttgttaaaattttctcggaactatgcacactactaaggtattgaattttcgttagttttcatatcttagatgatagagtacttatatgtgactatttagatgatgtgacaaattattgccttgacacatgtataactaattaaagtttaaatattttgtaaaaaaaattaggagaattactctatatactatttcttaatttttttttttaaattt

SEQ ID NO: 39027 - DNA, 1770 bp, Cannabis sativa
ttttattttttaattaataatttaatatatatatataaattgtaataaaaaaaataaaaatatacatatcatatttaaattgcgggttgaagggtaggatggcgggttcaacccgaaacccggtattcctaaaatctcaacctgcgaacaagcccgaagggtaccgggttgaacccgacccgcccgaacattttttcaaaaaaaaaatttgcaggttcaccggtttgggtttgggcgggttgcttgggttcgggtcaaacctgctagaaatgtccagccctactttgaaccatattttcgacatgttaaatttttttgaattcctcaaaattttgcaggaagctttaaataactacaacgtccacaaacatgaaaaaaattagactaaaaaattattctagattttgaaacagattgaggtctactgatacaccccttttaggaggtgcattgtaaaattttccaaaactattttcttattattttcttcttcttcttcgtcaaaccctacacccaatttctttgctacacgttgagccaaaaaaaaaaaaaccttgctgcacccaatggattgtgccctctctctcagttcattcttcttcatcttcgatattttttcagatcttcatagtagaactcgccgccaccaccaccacgaaagtcgcaatctcacaccaaaaccaagccacgatctttcattcttcgttgttcctctctctctctctcaaccattctcccatctctctttctcaatcgtccttctcttactcttccaattactattttccttattcttcttctacctcttcttatccccaaacccttaccaattccccaaccctaattcccttccaaccccaaacctcatttgtcgcctctctcgatcactttcttctcactcatctcactaccccataacaatggcgttgccaattcgagaacgaggaggaggagaaggatgaactataaataagttaattactaatccatatctcattttccgaatattacatgatcatgtagaaatctctctattcatcttattataaaccaataaatatattgatttcaaaacacataataagttaggcaaatttttagagaatatgtagaaaagtgtgaattcattttaaatgcacaccatacgaataacaaagtaacaataaatacatataattattaattgtttgcttgatacttaattatttggtagaaatttttattttattgacttggcttgaatattgtgcagcagaaagagagagagagagaacgagcagcgatatgattgcgatggtggtggttgtagtagtggcagtggtgtggctgcggtggttatttctagtggtgcaatggtgtggttgttctggtggtgtggattgtggtggttttttttagggtggtattgatggtaaagaagggagagagagtaagaaaaaaaatgaatttctcaaaagattttgatgaaatatattttattataatctatttggcaagagatctaatatggtaattaagtaaattaattgggtagcaaatgaactaaagattggagacatttaggtgataagttaaagaatcacgaaacaagtaatgatcacatagttaacatgagtgcttggattgatttggatcaattgagattatcaaagaataaaataattgataaagatgctcaagaaagacttaataaatagaaagaacattggagaaatgttttagtaagaataagtacaattgtcaaatatctagctaaaaacaatttggcct

SEQ ID NO: 39028 - DNA, 2322 bp, Cannabis sativa
  modified_base (45)..(46): a, c, t, g, unknown or other
  modified_base (1699)..(1706): a, c, t, g, unknown or other
actcatttaatgtaccctgagacctatctaatgtaccacggaatnnattccgtgaaagtacatcacggaacaaaatcatatccctttatatatatactaggtatagccttttacaaatagttaacagtatgacatctagatgtagattttaaaaacacttttggtatcttttaacattaattactcgtaatattaaattaggcaattcttatacttttcagcatagcataggagtattgagtttgaaccactcaaagtttttagatgttattgttggtctcttatgtcaccattcatcgtgaagaggttaaatttttcccataatttctggtgtgcttttgttgaattgaagatcatttacatgttttgtgcttacactacactaatacaaaatatggtttttctcgtcgatcaatacgcttgttaatttcgtgattataggccgacacaaatgaggttagggccaatttcccttatcacaaatacactcaattgtatcgacacaaatgttcgagcaaataggtctcctaaatatccgttggttttattaaagtgacacaaatggctattgtgtttgctttttacggacccaaatggacaatattatagtaacatcaattaaaattttaccattcaagttaacatgtaataatatttttaagaaaaaagaaaagcaaatctgtatataaaaaataaagagtaatttgcatcataaatacctaagtttaactctcattagtaaataaatacctaagtttaatttttgcggtaataatacttaagttataatttttgaagttctatagatacctggttaaataaattgtcacgtggcaatccttgattggtccaagtcattaaatttttaatatttaaaaaaaaattagttcaaatataccaataagaaaatgacacgtggatataatggcttaatatttaacaattagatacctacagagttctagaaatataacttaagtattattactgtaaaaaattaaatttaagtatttatttataactgaaagttaaacttaagtatttatgccgtaaattacaaacaaataaataatgaaagaataggagaactttgcaataacattaaatcagtggcagagtcaatagtatattttaagggggtaaaatttttttattatataaatagaatattaataaaaaatatatataattttgttggggaatttttttttaaaaatttataggaataaaaagaaaaaatttatatattttatgggaataaacataaaattattagaaataaaaatttaaaaaatacataaagtttaaaagataaaactactaaaaattaaattttatgtgggcaaacttaaaattatttaaaaaatttatataaaaatgtaatcttttaaaacttaagtggggtcaagtgcccctacataacaccttgtggcctcccactgtatggaatcagttatttcaaaaattaagtgagattttgcgagttgaatgtcataagagtaattttaacttacccaatattgatttctcttgatataaataattgttaaaaagtattattggtagctattgctaaatactttttttgatgtcatattttcagggccggccctaggcataagtgggctaggctcgtgcctagggcccacactttccgggagcccaaaataaaaaaataaaaaaaaatattaggcttttnnnnnnnnaaaatttaagtgtattataagcaacaaatatttatagcttagttagttgaggtggatggcataatgtccaaagtcatggtttcaaatcccataaaactcttcttttaattttttttttatatatttttgagggccccaaaatttaattcgtcttgggcccatatattttcatggtcggccctgcatatttttattggtataactaagtatcagattctatataacctaataaaataatttttaagtaatattactaactaatcgtgaggcgtcacctataaaaaatgctgaacactactaatatcttataacaacgtttaaataatactaagtgagggtgggacgtgcaatgcacgtgcttggctctccttattttatttcatttacatttttgtttatttaatttttattttctaaataattataataaaaatttatataatttaattaattcttacaatcataataaataacatactaaatgatttttcttgattactttcttttatacagtatttttcttaaatttttaaaaaattaattaatattttcttaattttttaaaaattgttcgcaatgcttttcagtgtaataacatttaaaaatcaaacaccta

SEQ ID NO: 39029 - DNA, 2794 bp, Cannabis sativa
  modified_base (1134)..(1171): a, c, t, g, unknown or other
gccattggtgatccagcagtcacggactatttctgcacacattggctcacgggaccatacattctcaaaacgaaattgataaacagggccacgggaacaagcaggtgtgggatccaatccaaaacttgtattatgtataatgttatcactttttattacaaatatatattttaactagggatggaaattgagtaggtaataagcaagtgatgcacctcccaaccctatccccatccccattttatatttatgccccctatttctacctctgttccacttaattcctgatagattcggggtaagggaatccctactaggtatggggacccattgggtacccattaaaattaaattaaaattaaaacaacaataatgattagaaaataatataatgtaattcaaaataaaattaaaaaaaacataacttattgactttaaaataaataaacattctacctattaaaaagtctttattacacagtaaattaaggaagattaattgtcaactttgtaagtataaccaataagttaaatacgtaataatttgaaaactatataaaaattttggaaactatgtatttgggtcgaatatggggtgggtagtatcacttccgatcccgttccaaacccgcttcgggtatataaaattgcatcccactctgctccattacccattaaggcgggtaatccttgtctcattcggggtaagtactcatgggtacccatccccgagtcaaatttctatcgctagttgtaactaattaaaatattagttccctcacctttatataggtgtgcctttgtatatattgttttgcgaatggttatcgcttttttaatataattattaaattaaaatatataaaacttaatatttatatatatatatagaatatgatttgatatatatttttttaacgtgaatataatttaatatgtaattatactaataatatataatatttacttgtgactagtgtgagacacattgtcctcaacaatttctcattattaatgccacatttttgggtagtaatgccaaagtctattggctacttttttttatttatttttttttttgtcgggagtctatgactatatataaagagttcctaattattattattattattnnnnnnnnnnnnnnnnnnnnnnnnnnnnnnnnnnnnnntattattattattattattacaggtggaaatgaggcctacttttcaaatacctaacttttattaattttttaattattttttctttttttcaccaaaagcttctaggtatttgcaagaaaaatttgtaatcatccattcccatcaaaataattgtagtgaagagcaggacaagagtagggatgaaatggaagggcatagaccctagagactaatagaacacaatccaatggtcaattttacatatgaaatggaggagaaaacaatgtagctgccaaatcacctatgattcttatttgattgatataatcaaaagattaggatgagtaagcagtctttatcattggtcgttttttttttttttttttgttattttctatttggggaccactttttgtaatttaggtagaactcaataaaaattaaccaacactagtgtgcttcaacttaactactcaatcgcaatttgaattcataaaatttagaatgctacgactcataatcccaacataacaaaatgaccaaggaggattaaatatcccatggcgagcaaataaagtcaaccctatagttggaaggaaaccaaaccacattccttaccattcattttaagtggtttgttctattattcttcttacaaaagcattagggttttcgttccttatttatcttagtacttttattttaggcaggaaaaagaaactcacaacctgtatagtactacttgaactgagtttaaaagaaaatatccgttttgattattgtggcctggaattattagttccgtagtgagtactcaacccatggccaaaagtaacctcagaattacttagtttggtagtgagtattcttcataagagctatcctatgaccccaagcatccataataagatagataatgaaaagtaacttgttaccaaatttattccaagtaagttatgaaatgtcttattttggactaggtccacgaacaagccttatgggtttgatttgtaaaaatgtcatttgaaaaaaattacaaactatgaaaatatacttggtaggaaggaccatctacccgcattctcgaactcaaaatctcaataattacttagttgcaaaaatgctactttttgtaatttgtaccattaactcataccaatttagaaaataagtaaaaatttattaagaaaatttacgcaatacacctaacaatagatttttttttttttacaggacttttttatttacatttttacttatgtttttttttttttttttttcagagaataatgttgcttttttgtagcagcaacatcaaaacaacattgttgcttctcgtagcagcaacgtaaaaaaacgattttttagagaacaatggaaaaacaactctgtactttattttgtaaagatgtaaaaatacagtaaatttgtaaaaatgtaaaaattttgcaatttgtgtatatttatgaaataatccaaagcctaacatccaagattttttttagaaattataacttatgtattaattatagtaaaattgggaaacttacaaaaatactggaattttggttaacttttacaaaaatactgtcacacggaaattttttcaaaaatactgtgtttttataaaacaccagtaaaac

SEQ ID NO: 39030 - DNA, 1491 bp, Cannabis sativa
ttatcaatataaaaatatataatctctcatagtctttttttctctctgtgtgaagaaaattatggagtcattccaaatggccaaagacaacactccactttcactaacacaaaatttcattgtcccggagagtaataggccacaactctcaaaagtatcaactctggactcaattcccatcattgatttgagtactccttctcagtttctacttgataagataacacaagcttgtgaagagtatggtttcttccacatcataaaccatggagtccctcaaaacttgtgcaaaagaatgttgactgccatttctgatttattcaaactgcctcatcaagaaaggtccaagctcttctcttctgatcataacaaagaagctagaattttgaactactaccttaaatgtcaaaaccaagaaaaggtcacaatgtggagcgaaagctttaatcatgtttgggatcctaatggagattttttcactttgttacctgaaaatcctcctcattatcggtacctatctaattttatatatagttttttagttcacaaaatcttccgtattttgtttaaaaaaaaaagttgaaatccataaaaaaatattaaaaaaaactgtaaattcctatttttgcaaatttattttcatttttagatatttataaaagtatctcttcttcaaatgctaattaatttttcttaattccctatttaattttcacttctagggagacttttgttgaatatgcaaaagagattgataagttgatggggacactttttggcctaatatctcaaagtcttggcctagagaagaattgtttgcaaagaaagttaggtgagaagccaagattgaaagcacaagccaacttttacccaccatgtccagaccctgaactcacattaggactgtctgttcatactgatcttccagcccttacagtgttgatgcaatctgatgaagtgagtggtctacaagtgattaaagatgggaaatggattgatgttaaaccagtcccacactcatttgttattaatctaggtgatcaacttcaggtacatatatcaatgaatattattgttaatgtttgttatatattggtcaattttattaataagcgttttgtaggtactaagtaatggaagatataaaagtgtgcaccatagggctgtgaccaacaaaatgttaggtcgaatatcagtagctatgttttatggaccaaatataaacacttggataggtcccattgaagagttggttgatgaagaacaccctgctgtgtatcgaagatataaattctccgagtttttggatgaatttgctagacaagaaggaacaagacggagggtcaaggaagcttttcaaatttcttatgatcatggaatttgttcttcttctaccccttaaatgatgatgctcagtaataagttttatgattatttgtaatctgtctacaatgatcctattcctatgcatgatttacaaagtattaagaa

SEQ ID NO: 39031 - DNA, 3506 bp, Cannabis sativa
atttgtgtaattaagtatcgagtctcatataaaaatatcgctaaccaatcgtaagggtgttacctatagaaggtgctaggcactactcagggcggccctgaaaataaatgaacgtaaggcaaattagattttggagccttcagaaatatatatatataaatattgagaaagagtgttatgaaattcaaactcatgatattgtataatatattatatattttaactaattaaattatgaatatttattgtttataaaatatttaattttacttaaataaaagtctaataaaactttttatcttttattttgtactcgtgtagagtatgaactctaagcacgagtttagctacttatacctaaatccaaccctaacactactagtgtggaataaaactaaaattactttacttggattatttattatttattattttgctacgtttctcaacagtaactataataaatattgagaaaaaagttgtaatcagagtatgcagcaaagagttgacatgaaagcattcacctttatcactcaataacacgtaatctgagtttgaaaagagggtttgtgtccttttctccgggttttactagtggggatgcaacttttctctctcattatatttatgctctgctcagtgcccaccatcaatacgcacaacttacaacttaagggaatcaagtcaaaattgaagtaggtgtgtgcaggacccacatcttacacaatgcattgcatattgcttatttttaattacttcattcacaatgtcagattgttaatgatgttttctatatactattttatttcatagggttttactttggtaccacccaattcacttgcacttgcatcttcctcacttaaacttaactacttttttaaaatttgaaataaaaatctttttcaaatgaatgtattctcatcccaaaaaatctgctagtattttttttcaaaatatgaagaaaaataatcttgttttaataatggataagtttaataacaaatttgactggacaagtgtacactaataattgggcatatctagcttatggtgggtcggtctgtacctgagttgacctcagagctttatttatattaaaataatttgttgttttcttttctggttttgaatgattaagaacagggaaaataaaagattgtattgtcaaattccaatacattctccaacattgaacggccgtaaacactctcatggtggaattttagggaactctgctctaccgttggtttattgtcccttgtgggttttcacagataaacctctgtttgttactcaactcacttttaattccattaaaaattccgatttgatattttaagcaatattcaataatggagtacctgtaaaaggatctttctgctcttttgttcttaggttatttaaggccattctttttgtgggtcattttggtcttgccttttgcgtggagggttttagccattagaagaaataatgttgacctccaaagagttttggactaagaagacattgataggtcttgggctggggcaatttctctcccttttgatcacttccactggcttctcatcttcggaactctctaaaaaaggttttttttttttccttttttgtctcggttgttttttaaacctttctacttcattctctctgatcattgtagtgagtcgtttctgaagaacatagtagtaatgcgatattcaacagatttctatctctcaaaattttgttgttaaaaatagaaaaacatttggaattggttaattatagaattggtgcactggatacatgattgattttttgagagtagtaacttttgtggtcttcttttcacacacttgagaatttgattactagaaaataatatcttttaagtcattattgatgaatttatatgtgaaacttgggtataggcttatatgattcacgttcatatgtctcactttttgtgttacctctgttttgagttctttgagaaccactcaaagcaaataaagaaaattataatattactgtgtttagccttgaaattttttctttggaatattcaaaattttcacttgtttgatcaaatgaacaaggaaatattatattgagaaattgtttgaatttattatctgctctctctctcttttgtaggaatcgatgcaccaacttcgcagtcatttctaaattatgtgctcttggctattgtatacggaagcattatgctctatcgaaagcaaccacttaaggttgtttcttgcatccactagctgctttaccttgctctttttttgttttcgataaatttaatcgcaccaaatacagcatttatccaataaccaggcttggtagctgctttaggtattcttgaatataaatggttaagtttgattgcagtttctacatttgacagattttaatttctttcaaatataacatgaaccctttcttatcatgacaataacttagttgagtggatgaagacctagtgattatgacaaatttagatgatatcctgtaaaagtgaataattaaagacctcttaagtaacctactaaattatggttcgctatcaaaggaaaagttttttgttccatgatgcttcagcaatcacattaattgaataaagaaaagaaaaagtttgctgattctattggattggtaatttatgacttgatatgtgcaattaaagtgacagtcttcttttgaaagatgattcaaaatgatcgtgtatagtgtctttaattggatcatgtaaaaagttgagacatattacaactataggcataaagtacttcttacttgttcatacacttgacagttgcattcgtgtttatgtcaattgtaaccatgactttggaggtgatccattttttctatcaatcttatgttatgggacaacttttgtgatagaaggaaccgatgaaactaagttaaatcttagtttagtctctcagggtatctgctctctgaatagcttgagtggtcacccctatgtttttctctcacaaatttttgggttcatattctcaagggaacctacctagcatgatgtcagctcccatatatacacgcacacatgcacgaagatacatatctctgtacatataaatatgtatatttatttacagcacagaatacaaatagttgtctaccttttgttttcatttattatctttgctgtatattaaatgtcatataaccattctatattaccttttcattatgtgcagtcaaaatggtattattatttacttcttggattggtagacgttgaggccaattttctaggtgagtaaacttgaatttctgtcctagcatgtcctacagctacttttttttttcttctcatttatatgttttggaatatgtgtgggtctgcaatacatttatgatgtactgcacatactaaaactgaatcacccaacttaaatgattgaagtcaaataaatatttttcccatttgattttcttttcctttatgtgcatcatacattgcatcctctcagtatttcatt

SEQ ID NO: 39032 - DNA, 3240 bp, Cannabis sativa
gaggcggcggccgccgtgtccggaaaatggcctgggaataataataataataaggaggagctaaaccctcaggactcatggctacctatcactgagtctagacatggaagtatatactcttctgtttttcatgtcttgacctctggaattggattccaagccatgctattacctctcgcctttgcatctcttggatggtaacgttttttttttctcttttcttttcaactttttaagttgtatagtaattaaatttgttttgtttttatttagtggttttctttttcaggttttgattagctttatttaatttaaagagaaaaaagaaaaagaaaaaacttaattacacgtcaatcttctttctttttctttttcttttttcacttctttaataatttctaggaaactcaccagtcaccacgtacatcatgtgaaatcattaacaatatcatttgcatataaagccatcttcaccaaacgtgtttcctttttttctttttttgttagagattaatactaataaatactatcgaaattggtaatttaagaaataatcaaaacaaaaataagattttctttaaactcacatgttaaggcaaaatgactaatattaatacgatgatttcaacccacaaaaaataaatattaaaaattagttcacgaataaataaataaataaaataaaaatatatcatgagctgaatattcctgaagatttgtgtacgtaggtttatttatattcagttgtataagtattaaaaaacaataaaagaaagtaggttacgtgtaaaaaaattaattctttttgcattttccaacgtattcatatttattgatttttgactaacaattgtaaaactaatggaaattttacagttaacatgtaataaataaaatggacaggtgtcaatcttttattgttgggacaggaatgggataggaaatttgggagtggtgatttttattccatggacatatcttccaaaaactttttttttttttgaaaagatccaaaaacttatagtaccgataattggttatcttccaaaattgtccccattatctcacattaatttacaattggtagacatatttgcaaaaatagtattgataaacttatttttcttgcaaaaggggagtatatagaataagaaatatatatattatatatatatattgttttttctatcatgataaggtactttgtgttcatttttaaatataatgggcatttgttttatttgtaatggttgcagggtatggggaatcgtatgcttgtcgttggcttttgtgtggcaactctatacaatatgggttctggtcaatcttcacgaatctgactctggacttcgttacagtagatttctccacctctcaattgctgcatttggttagtatacccctcagccttaatataatctaaacaataattagtatatttgtctattaactttttacactaccaacttatgattgttagttaataatacttttccaaagaaatacaaaataattattttttacttctttattacaataatgaataataaaatgaaagattttttttattattttataataatttatattttatttttaatattttaatcattcttaagttttaaaatataaaacttgactttaacttaactatcaattttacaaatgcctgactcttgtttttattttttctcctttctttctcgacaagtggctgcgctctatgtagatatttatttcgatacgatattttcattacaaaaaatctcaacaactgaccaaagatcaattaataatacatctaattgttttaaaagaaaacatacatttctatcaactatttttcatcgggctaaaaaataccagtggtgacaagtaccctcttacgtgtcaatatcgttattggtctaatttaatatcgggtcgcatataatttaatataatagcttttaagaaatatcgctagccaattacaagacgacacgtctcaaaggtgctaagcactgtgcccaatagtaatactcttttcatccctctatatttttgtttaatattaaaatctaataaatttatcaataacaagtaacaaaaaaaaaatgctaggaatacgataggtctcaaactgttattggtaccattggatgtcccatactttttatttaattacagttttaatgctaaaaaaaaagtagtgaggtagcaatatgttagacaatcttatattattaatgtgtggaaagataatagaatatataaaaagaatagattacatttgtcaattgattaattggttttgagataaaacttcattcatcttatctcaaattttaacacagtatttgcatattttgtaggtccaaaggctggaaaaataatgagcatatttccggtgatgtatctatcgggaggaacgtgtgcgatgatgattattacaggaggtggaaccctgaaactgttcttccagaacatttgtggtgatgggcctgggctttcgtgcaaggcccaatcggtgagtggggtagagtggttcttggtgttcacatgcatggctattcttctagctcagctacctaacttgaactccctcaccataatttcatttgtcggtgctgtcaccgcaattgtgtattgtactattctttgggctcttccccttggtatggataggcccaatgagatatcgtatgatccactaccgacaaactcgaaaatggacaagtatggtgatgttctaaatggcattggaattatcattcttgctttcagaggccacaacgttatccttgaaatacaggtaagataacaacttgcacattattctttttctttctttcttttttgggtatatttttttaagtatattaaagtgagtggacgtttcttttttcaattgtttactagtttgtcaatgctgatgttactttttatttgataataatgtgtttcctttttgttgatatggactattgagtgattccaagatactatattgtagcatctcttcaatatacttttttctaaagcctctcttcaatatacttgatatgaatgggaattaatactcacatataaatgaatcattatcttgtttattggttgtattgtgctgcatttatatcaaataagatactaaggaaaaaagaaaagacctttcggcaaggtgcataattattaatagtagtatcttttatgtcaaaaagaaaataataataacaatttttattagtgaatttttattat

SEQ ID NO: 39033 - DNA, 1993 bp, Cannabis sativa
  modified_base (44)..(50): a, c, t, g, unknown or other
ttcatatttagggtgttaataaatatacttgtgagtagatctannnnnnnggtaaaataattccaacagatagatgcatatagaaagaaaatcccgaggacctccatggttaatcactgaaaggaagatgagatcatgcatatccctggatgggcggaacgacgacatgcaacaagaaagacttcaagaattcaatcttggacacaaaataacagcaagcccttcccataaagtcactgaccaaacccaaatagaggtcggtgaagtcctgtccagtaggaagaaatgtaacgatcaaactctccgggcagcgctaggttaggaagcgagatagagaataatttttttaattgtttaacataagaaaatattttgaaatttatttttaatatcgtatattatttatttttttaaaaaagatgtacaaattacttattacagttatgatttatagtgtcatataaaaaaattagaatataatagggaaactcatgttccaaggtccctagattttatttttctgtctgagctcaaagtggatgcaacttctctggtacgtacccttaaatccttccacttttattttactatttatgttcgggagttggtgctgctggtggtataattttggcttggaagaatggctttatttttgagtgtatctcctactctcgacatcatatctctggtattgtctattcggatcctccttcccacccctggcttctctcttgtgtgtatggcccaccctatttccatgccaagaaaaacttttggactgaattcatgaagattggagataagtttgggggggcttggttgattctgggtgatactaattttgttctcagtgcttcagaacgtgaggggtcttttggaagagaccagtttatccctgtcatatctaatctggtggattctcgggggcttattaacatgcctattcatggagataagatgactttggacaaccaccgattatgtacgaatcatgtcaagtatgttcttgataaaggtttagttaatggggcttggatcaatttattcctgagagctattatttgttcgtattagacgagcaactctaatcacagacccttgtgtctttttactggcgggttggacgccaattttaaaagatcttttaagtttgaggaaggttggacgagagatgctagaagtaagctggtggttgttcatgcctggaattcggttgcccacccttggccccctgcccgcgtcttcaaaaagattgaagccactcgggttgctctccttcaatggcatagaacctaatttggcaggtttgacactgttacaaaagaatttgaggaaaaacttaactttatgcagagcttacttgaggggactcgtgattggaattcagaacgagacatatggagagccttgaataaatctttcgaagaaaagctctatactggaaacaaagggccatgatttcttggattaaggatggggataaatgcatcaaattcttcttcctctcggccgctattagaggaaggagaaatgttatctaaagtatcttgaacaaagataatatttggatcaccaatcgagatctcattggtcgggaattcattgagtttttccaaggaatattcttggggtctgatgatggtcaggatctcaactgcaatcaattctttcatgagaaaatttcttctatggaccaggagatgctcctcttgagccccactcatgaggaaatctgaagaactctctttgctatgggtaaccataaagcccttggccctgatgggatgtcacttcttttctttaagcactattgggagtctatgggtgaagatttctgcaatttattgcagacttcttcaattttggaaaaattcacaagggtgttaatgctacaaatgttgtcctcattcccaaaatccaaaatcccaaaagaacaaaccattttagacccatatctctttgcaatgtgatgtatgttaggttttatgcccta

SEQ ID NO: 39034 - DNA, 1754 bp, Cannabis sativa
ggccaagaattcacaagccatggtgacattggctcgttctttgacatccacaaaactaccccaattcatgctttcaatttgaccccagattatttcaaatcttcgttggcgtctcaatggggtatcggtgtaatcaatccccttcttcaatgtagggcctatccttcaacttaaggaaccgctcttgagctgcttcacttacaaaccaggacctatcaaaagattgtcttggattggaccggggaggattggatgatgaaccatcctctttatttgcccttgttctcttacgtcccatagttaccaacaaacacgaattttatacaacaaagattttcgagaaattttgacagcacctaccctaattttcttcaatttcccacaatttcaatattaccaaaaacacacaatattccaagaacaatcaccacagtcaccaaaatcacacacaatactccaagacaatcaattcctcaatatgccaataataccataatccgaaaatcccaaatactatagcaaactattcaatcctgtgggaaatgcatttaatcaattaagatattgaagggaatgatacttactaaatgagaatgccattaatccacctccattgttgaatcaccatggaaagcttgatcttgaagatgatgaatagtttattttcagaattgggtgtaaagtggtaatttttggattgatttttgaaggaaagtgaagattgatgagaaaaaatgtgtttgtgggtgattggtatggatgatttgaaggaagaattaagaaaattgggtttttaaggtgtgaaatgggtttggtggctgagagagaataggggttcggttagggtttatggtagatgaaatgaggattttcggtttgaaattgggtttttaaaggcaatttagggtttcaaaccgatcactggtcgtgaccacctaatgggctagtcgcgaccatggatcgacatgaaatagcaggctctctgtaagccctgtagttgcgaccatggtcgcgacccgaccatgaaaaagggtcccgaccatagaaagagcttgtcgtgactactaaaggcattgaaattgtaggctttctgtaaaactccaggtcgcgaccatggtgaagcctagtcacgaccactaggttttagcccgaaaaaattatttttttcttttttgacttttcacgctttgcacggtttaacttaaaacaaacgtctaaaagtttacaaaacattaaaatgctaaaaataaataaatacataaactaaagtctcaaaaacacatcaaagtaactcaatcacttgggttgcctcccaagagcgctgtctttatcgtcatatagtcggacgttgagttgcttttcaaagaggcgccagtataatggcagacttagcttggtcaatttgacctcccaagtagagctttaaccggtgtccattaactttaaaggtttctggactctcgcctttcagttccatcgctccatatgggaataccttgaccaccttaaaaggtcccaaccatcttgacttcaatttgccaggaaacagttttaaccttgagttaaagagtaagacctgctgcccgggttgaaattctttcctaatcagatttctatcatgccatttctttgtcctttccttgtatatctttctattctcatacgcttcgtttttgaattcttccagctcatctaattgtaacagtctcttctctcctgcggctgctaaatccatgttcagggtcttcattgcc

SEQ ID NO: 39035 - DNA, 1555 bp, Cannabis sativa
ttgagagtgatgcatttcaaagtgccaattcttcacaaaagcaccatagttgtttttatgatttagtttgtgatatcatttatttgatgtactctttttctagtgaaaatgaaattattgattactcaaaaagtaatatcttgatcactcaaccaagatattaataatgaaaatgagatatcatcataagattggtacaagcttttgatttgatctatgtatatctttacatttaacaatttatttctttaaattttttaattaaatgtaattataacaatttacagtaataaattgaacacttgttactacaaaatacatatttattgtaatagaataaaaataaaaataaattgtacaaaatttaatcctaacctaaagacagcaacaatgaaagaaaaatgaataacaataagaatgaccaaagacatgaaaagaaagagaagctcaacaacgaccttgattagcaacaacatccccacgagaaggcttcgaagttcacatgcttcaccattctcaccgaaactttggaaaccatttttatggcaacccagttggtcgtttcttacaaaagactccctccgattaagaagaatatgagcaagagggatacctccaaaaattttcgatttcacaaggatttcggccatgacacaaatgagtgtaacaatctgaaggaggaaatcgagttcctcatcaagagaaacaatttacatttgcatcggtatattcaagtcgactagaaccaagttgtcaccccgcaagacaataattagaaccacttgatgcctccaccagtagacaacatttacaagtgattattagggacctgcatatagctaaagatttgaacaaagccatggaaaggtatgctcggactctccgacatgaacaaaaggaagatgaagttttgaccatagaagagcgaaatccaatcaatccgcatagggacgatccaatcatattgctcaatggagagggcactgcccacgttatctacccgcccaatgaccccctaattgtccaagtacaaattggaaacataacagtgactcggtccatgatcgataatggagcttcatcaaatatccttttcaaaacaatttatgaaacgatgtgacttcaactcaaagatttagtaccttgcacgcagctagtgttcgacttctccaaacagagtattgcttcactcggacacatttgacttcctctcatagtaggaaaaagtccaactaccaatacggtaatggcctaatttttagtaattgacgtactctctgccttcaatgtcatgataggccgaccaactctatatgacttaaagacaatcacctcaatatactacctccgcctaaagtttccgacaagatttagagtcggatgccggggagaccaaagggctacactattacaatctcaccttgacaaaagcaaagaaggaagatcaactcgacaaaaagtaaaggtttgagcaaagtagtgaaaaataggagttcacccaaagtgagagtaaaattttttccgtattgccatatttttgtaatttttattttta

SEQ ID NO: 39036 - DNA, 2435 bp, Cannabis sativa
aaatatttaaaattctgtgaaactgtatttttataaattttttgttgtttttatatttttgtgaaataatcccactattctaatatgtaaaacatctttttttctttttgttttttaaggagaaaattcttgccacaaaagatggttccctaatatagtgaaactcacactcaaacaataagaacaaatttctttacaagtataaatttcatgaagcctagctttgatcttgtgggatcccaatataaaaatgtgatagttttataaaatataacataaaatggtatttttcaaaatttggagacctgtgctcatagaataattgatatttttgaaagaaagcaaaaaaataggtctgacttagggactgacctactacttaaaactggtctctattttaggttgtttttcattgaattgctcctaaaatattcaatctaattaatctgcacgattcaatttgatctaattcataaaatgtgaatatctgcacttgtataaattggattggactggaaaataaaaaatatacacttgtgtagattaaatgtaagcggtaaccctatgagaaatcctgaagactgtagtcggagtgaacatgatagtcattcgggaattccctttcggactcaactatcattccacaagactccttttcgggatgaacaagttagttgtttaggaacaatatccaggagacacctaactttccaggaacaacttttagataccttttcatttggaggaactatatcacagatccaaaataagaaatctccacttaatacaaatcgggtgtactatgggtaaaaagtgtatattggattggacgaacacccctaatttttcaatcaataaacaaaagttatagtttttgctgggtctccctttacttattattgaacttacttgttttgtaatggtatctatatttactaagagattcttgacatttcataagttagtattaggctgtttttttttctttaaagaatttggcaaatttgttatccaacttttttgagtctctgtaatttgtgtttatttattaataaattaaagtgaaggtaataaaatagaatgtaatagaaagtaaataatttttattatatttttttgtttggttcattttaaagtattgaattgtcattttaatggaatgacttttctatccttttagtagaatgataattttattttaaaataaaaaaaaatatcatttcaatgcaagatggaaaaaatttaataatttttttcttaatttttaatttactttaaatttaattttattctatttatattccttttctcattcatcacattaaatttttatgtttttattcatttctaactgaacccacttaattgtacattgttaaaacataacattctcaaacaacacgtgtaagtatcctacattatcattttgttttgaaatggaactatttggacttgtaaagtgggctctctctcaataataggtgcggcccaggcccatattcaacatatatgctctctatatggctggagaattttacttccacttttatttttttggatatactatatattgattatttataataaagtaattacttgctgcaactaataataataaataaataaataatcataatgtgcacatgagttcattgaatctaattctaactttatattacataattgagattagagaacttaccaaacaatattatgaatgtttacaaattattttatgccttaaaaatatatattattaatattattttacaattttatttgtttcagtatcaataagttaattaacatttgacaaatctttaaaaaaaaaaaaattatcaaatattgaattactaaactaggcttatttaataacttttttaaaatactagatacttattctattaaattatgaatattaaaaactaatttgacaaaaattatgttgaataatggtgtttttatattaaattgtcaaatacaaaatactattttggttatattaaaagataaatgagaaaataataaaacactatataggaaatcaatgatcttattattctattgtattcaacaatcaacattaaaaaaaattataaattaaaaaaataaaacattcattattttaatgcactattatttcttttcattgaaaaatgttcaacatacaactatgacattattgaataaattaaaaacatatatatataccataactgcacaactaacttagaaataatattttggaaagaaaaaatggaattaatttatagtttttcaataaacaaagaagaaaaagaaaaaggaatagtaaaaatatgacaaaacagaaaaaagaaaaactaaattttcaattaaaatctattcttgtaattgctagcctattttcattgggctttctttaacaaaacccaatgacccgtgactaaattttc

SEQ ID NO: 39037 - DNA, 2777 bp, Cannabis sativa
taaataatggtgtcttttagtatttatccaatatttttcgggtcttctttaagatcctatggctgtagatcttgatgtttgtgctctagtcacaattagaatctccacgaacccgacggaggtggctaccccgccacctcaacacaaccaatccagttggtcttaatgatcaatctttgttgtaccgagaagaccctccactggtgcctcatattgaagaatggccaacgtggggcaatccccgtgcaccacagttggatttggtccccagtattatgctagagagacagagttaggaattggtgagtcccatgtgaacttggaagaagatctcgagttagcgagacttaaagagatcgccaattactttttttttatatatatatttttaacataaatagagtttgaggatgaaggaacacttccactcaatttctcacttacatttaataaaatactcaaagagaatattttaatttttttatagttgtgtatgttgtagttattcaatatatatcctgtaaaattttgataaattcagaaaaatttaacacgactaaaataagattcaagcggtaaattgtttgaacattactttttatattgtaaattattctaaatttcttaaaattttacaagatatatattttaaataactataacgtatatcactacaaaaaaattattatagataccaaaacagtagaagttgcaccaattgttttagaggatgcaccctaaaagctctctatatattattgtttatgtttgataagtttagaaattttattttacttaaaaaataatataataattgaaaatattttagttgtcatgattggaatgaaaagagtatataacaccaaatttaatatttaaagttggaaatggcttaagtaattaatttgaaaaatattactattaaactaatgggtatgtttgttcaattttttattatatatatttatatatatgaattatttgcagtataagtatcctagcaaagatctaataattttttttaaagacatcagtacataaaagtattattctaaaaaaaaaatatattaataaaactataacttttgtcctaacttatggtagatgcaaggccgatcctaggcataagcgggctaggtctgtgcctagggctcacttattttaggagcccaaataaaaaaaatatcttttaaaaaatatacatattttttaaaaaaaaattaaaaatactatttctctttatagtaagggactaaaaaattttttttgcctatgactcattttaactcagagccggccctgaatagatgtccccatccacacctaataatttagaggttaacctcgaactttaacatgtatcaaaattttctcttccaattttttcagacgttaaaaatttctttcaaactattaaaattgttaaatttaagaatttttgtataatttttcaatggaagcctgatgtgaatggaagtttatgtgttttactatttggtacgcgtcaaaattcaaaagaatttttaaagacctaaaaagttatgaaaatttcttcaagcacatcattaatatattgtgattcttgttatagtatcaagagtcatatccctaacttgttttcaacatacacgtatcctaatagttagtccgagtcaaccacacgagatctaaataaaaatgaacgagcaaatagcagagcttatgataaggtgattcaagatgggtgagtaaaaaataaccactattttaagagaatattgattaatattatcccatatagattaaatataaaatattgagccaaaacattgtgtccttattcttgtcatagataaatgtttacttatattttatattatacatgtaaaatgatatctattctatataatgtaattattggtttgacggtgttttttaattttttatgttaattttaacagtataatattattttttaattttataatatttatatatttaaaaataaaaacaatatagatattttatataaagaaatttaaatttaaatttaaaagacttaaaatatttttaccagtattttgttgatttaactttgaattaaaatgagagacaattttgctcaatcgcgcacgtattgattcaccatgatatctcacttgggttttattatacatatataatcgcatccaaaaagcacacaaatatagccgtaatagctaaaaaaaatcctcaaaaattaaaatctcaaaccctatttcaaaaattaaaaaaaaaaaaaaaccattatgtaccaaattaaaaaataataaactacatgtattacacttaatatcatttaattaaatttaattaaaaaaaactaattatacgtgtattgcacgtaacatcaaactagtaaaatatgagcattccactgctaaacaccttctataagtggcatcacacgattaattagcgatatttcttaaaaactattttttttaatttatataacattcaatacttaattacaacattaacaatatggcattaagattcattttagcaattctcatataaaatttatgttgaataaattaactcttcacaatttatcaagtgatttttaatatatttatacaacatctctttataatttatttttggctaattaagatttttgcccctgaattttgacatgtactaaatcatgtttcttgaattttttttgtagttaaaaattatccctaaactattgagattgttaaatttaaggacttttctctaatttcatttaatttaattaattcggtgat

SEQ ID NO: 39038 - DNA, 2243 bp, Cannabis sativa
tttatttatttatttttaatatataaggaaactgcatgtagatttaaataaataataaaaaaaaatattggataactatagtatgagaagaaaatacatatggatgtatgttggaaattctgagtttgaatctcaaataaaatatggttgtaatatataaacccttaaaaaaaaaaataccacaaaagcaaaaattggagattgtgggtcatataactgtttcacattataattattgaacatgaacatgtaaaagcttatcacttatgcattattcattggctgcaaagaccatatgaccaagtcaattggctctacttctttcagaaaaaaaaataaatatgttatcgtgaatagtagcatcctactcccaacgtggcattttggacgaataaaaaaatgccacgtaagaatagtacagtaggcgaatttctatggtcaatcattgtcaaaggcaataagggccgacacataaaataaagttaccaagttggacacgtatatatattttcttttctcattagacggtagtccacctagttacgtccaactccataaaacgtcaaactttattttattgtccttttatatttaatgtcacatcataatcgatcatataattgaaatgtttttctcttttttggattttttttgtttctattaatgaggtttttcagctatccatcccatcccactgccctagtttcaatgtataataaaaattaatgcacattattataagttttttaaatagtaccacatcattagatattatattttgatgcataaatgaattggctatttttcatgccatttttcttatggcgttgtttaattaatgaatgaaacatctaaatcatcgttaaaacgatgtatgacatatttttccatgcatctaagcaagcacccagttttgcctagttatgatatgattgagcccaaaatattttacttattgattagtgagagtctacgtcgtcatgaaaaaagaagaaaaaaaaaactataaagttgatttaaaggaaattaacgcgtttggagagttggcatgtcagtcacaatcattatgtgggttcccaatttttttttttaaataagaaaaatatattttatattcccaccctttctaaacactaaatttaatgttaagaactctttccaatccaatcaaaatttataaaagttgataaaattaaaatatcatcttacatatgataacataaatattacattattaaaaaaaaaattacattcatgacaaaaaaaatacagtaaattaatcaaacttaaaatacacttgaaaatattaattaaattatattaattcttctagttatcatatatgtcctgaaagtgttcaattaatgtatttgaaacttaatgtgagcttccttattcttactttttttttttatgtttagcaaaaaattcttgaaggtgatgtgtatttagttttaattttttaatgtgtgtataaatttgtaatgttaatattgtataatatttaaaaactatatacataaatatttaataatgttttatttaaattataagtacaaaacaacaatttatgatattcaccttttaatctacacacaataaattaatttcttaaataattttaggattctctatttggactctctgctagagttacgattatcagcaccttattgtggtcatggcaggtcgtgatcgatcgcggaagagtagagctcagggaattggaacaagccccgaaaaagaaaaagatgtgaggcttaattttgtcagatcgagtgaagaaggtttgttccatggatgagttaataggcattgagccaatggcgttctacgaatatgatgcagagaggatgaaaaagattctgggaagtgaccctgacctaaaaatggaagacgtgaacatattctctcactaagggcatctctagaagcaattctgcaacaagaagacattcgtagggacttctccaacttcctggtgtcctcgaactagtgcgccaatgatgttagagaaggtaaagcccctactccccttgttccgcgtctagagaaattattcaaaatttgacttctaaatttactaatgctgagaaaattgagaagcggaagattaagatagagttagatgttatagaggaggaagttccattctggaattcatttgtggttggatatgttttaagggcaaaccctctactatcagtactagatgggttggctcgcagattatgggattcaaa

SEQ ID NO: 39039 - DNA, 2509 bp, Cannabis sativa
atacaatttaatacaatacaatacgacctaatacggcgttccaaatgagcccaaaaaatatactttttatccggactctgcgttcaggaaagttagagcattcctataagatgtctatattacgatgaagtatcatcttataatttgttagtaatttttttataatatttattaattaaagtaaaacaagtgagacccaatattgagttgcaccaataacaatataatatctcataagagtgttaagtactatagatactgttttggtcaaaaacagtcactatttgttattttgtgggatctttctttttcagttcctaatccccttttctttacgtggttcctttttatttatatggtacgttcttttgattgcatgggtaacccatcatctacctactctactcttgacacgtgttttttctctatgttccttccattttgctacgtgtccacgttttaactagcagctattctattattgctttcttatggtccgacgatattacatcctctcagaaatgtttatctcttcctttgtatccagtgtctcttgtccccgtcggaactctcgtctgaggcaaattgagtttccttccgtcggaggtgtttgtccttattggggtgttgttctggtgttccttttcttattatattttaggtaaatctcccgtcgatagattggttgggggtccccgttgggttcttatttgtaatgcatcctacattcggcccgtatttcgtcgacagattcttctgtttccctcctcctccaatttccgtcggcgtttacttctccgcttcgttgtttagtgctccctgtccgtatctatcccttgagatttattgtatgggtcgcacggtgttaggcctttctgacgtatttagatcttgggcctttgtgtgttcgttctgttttgggccttttgatgtttttattttattctatttgggcctttttcttgtgcttgaattttaccctccaaacagataccctttagcatttctcgaaaagttaggccctcatacgtgtggatgagtacaacaacaacaacaaaaacaaaacacaccaaccttatccaagatggataacctgcctccaagggagccttggtctaaacgaatatcaccattgggaatattcaggaaaggaatatgaaaggtcatctaggattgtctactattccagatgaagtcgtgtcacatctttgacaccatgccataaatttgggacttgtctcttttaccaactcgcaaaaaggctcatggaaaaatgtgcaatcctccataggattgtcacaccattactctaacacaatctttcctcatgctccaagcgatgactcatgcacataggacgtcaacattaatagtacaataaacaataataacttacttcttttagagatttttttgacatagtaattagaaccactcatgaatttatcttgtatttatctcatcaatagaatattttatatctaaaaacctcaattgggccaattagatcaaactacttataaataggatctaccaccaccatgaaaagagttgaagattttacaaaagtgttcttgagataaatgctttaaataactccattgctacaagtttaatattatcaactggtagattaaagtttaaccctttaactacataaaaatttattgttttatctctttagcttctactcctttttgaaaaaaaaaatcaatttttaaaaaatccaataaatattatggtgctgtcatgagttgaagaaagtttttgccatcattgtcatactaaaaacactttcacaaggccaactggctaaatacctaaaaataatggtgaaaattaagctttcaaccctcctaactctcttttctcgaatttatttaatagttttaagctacttaaaatttaatttattgacattaaatattcaaatattacctataaaaatacgtatacatatttttatttcatctttaactactaattatgtattttttttttttgtctaaactcttaaattgaattttattaatatcatattagtcttacatcaacaaattgtttaaaacaatgagtagaatacagagactattagtaataattttatagctcagaaaaaatttgcaaataaaaacgcaacaaaattctacaaaaattataattcaaaaggacaaatactatttattctaattattttgcaagatcaatgacttatatttcaattctagaattaggtatcaaatttatttttctaagaagggattaaaatgagagaaagataaaactttagggcaaaagtgaaattatattttaacatttctaaccttcaaaatcaagaaatttattttactttatttacgataccaaatcaaagcaatccctaaaaccccaaatccaaaatcccaaatccaaattctcactctcaattcttcttcttgttctctgaactgtgtctccagattgttgaattgttgtttcgaatagtaaaatggtttatataacttcctgg

SEQ ID NO: 39040 - DNA, 2431 bp, Cannabis sativa
tataaaacaacaaaaagataattataaagcaacaggaaaataacaagacaccaacctcattgtaatatgcaaatcaatttgaactcctcaatttatttttgtattacgaattttatatttacttagttttaacaacttgataatttttttaatgaaatttatttgttacaacttcataccttttttaacttttttttttagagttagtgacagctgaagtaatagtttaatttttaaaaaaaataataataaatagttacattactaatataaataataaaatcttataattttaaaatgatgtatgggtaatatataattaaaacaacaaaaatctaactagacaacaatataattttaatatgttaatatctactacattgaaaaaacgaaaaaacttattattgtatttaagataataaaatttaggaaattttaattaattgtttttattctttaaaatatcttgatgttatttgttttttggaagtccttataaataggtaatagttttggtgaggtattattcttatatctaaagctttctaagatttaaacagtgttcctagtgttgaacctaataataattcccgttctatgaaccaaaaagagttgaccatcttttcaaattcttccaccatgattgaagcggagacagatgagtactcaaagtcggtttttgaaagatcaatctctaagaggtctattaataaaggtgggctgatgaatatgtttaatcaactttggcaaaataaagcatgtgagaaaattgaagagtatacagatggtatttttattcttaccttagtgtcaagtgttattaagaatagagtcttgagggggcaaccatggaatttttcaggtaattatcaaatctttatagatcctactggtttggaacatatcttggattagaattttcaaggtatttctttttggattcatgtttatggtataccttttcgtaaggttaatttcaatatgggaaaagaaattgctaatactatgggtaggtttttagagtatgattcttctaccaaactaccttttatgagattcagggtagagttagatgttactaaaccactgataaaaaggatgcatgtagatttgagtagccttaaagattcaatttggatctctttcaaatatgagcgcttaaataagttttgttttttctgtggttgttaagatcatatacagaaaaattgtgtgagctttttagaagagttagaaaaagagtttaacccaaaccttgaatatgatgattcccttaaaactgttcctttgcctataacgcacctcccctctaataatactctaaccatgatgtggaggttgtcaaacctaataataaagcttttacacacactggttttgataaggtgcgcttaggtttagaatttgccaacacggataaccaaacaaagagaattaaattagtagaaaaagataaggtgccatgttcccgttatgttgagaatatgcaggactactcaaaaagttcaaagaatatccaacagaagagcttagatggaggagacagtaaaaaggcagctgataaatgagtgaatgagtagtatggagaggatgtcttcactatcttctacaaggaagttgttcagaataatggtggggctaacagaaagttatggaagtttggttgtttggttgttttcggtttgaaatttatgatttttttgtatttggttttaattaatattctatttggtcaagagtttaatttgtctaaaggttgatgtaagcaatggtattttgagaaagacttattaattcaataaatttctgttgtgttttaattttaatcattgttatgattgctttaactattatgattatttctccatgagatatatctaacaaagttcttagagtacatattccaagtagtcttccaataatattatataaatttgatcaacaataaaataagggtttatatggttgataatagagaaaagttacatagtttagtgatgttaacaaataatagttttcaatagctgtcatagttgtaaaagtaatttttgaaaagtctgacaagattataaagtatggaattatattggtatcatggtaattaaactaaaatggggaataaattcactgtactaaaatggttggtactttttgaaaaataatatttattaatatcagttttaaagattatattatatataaaggatttataataatataaaagagattgtgggattagttaattctcatttatgtagctgattgctattattttagaatataaagtaggggtgtttatcaaaccgttcaaaccgcccgcactgcatcacatcgaaaaaaaatgcggtctgaaattttttgcggtgcggttgcggtttgaatttttcctaaaccgtgcggtgcggtttggtttgcggttttgaattgttaa

SEQ ID NO: 39041 - DNA, 2380 bp, Cannabis sativa
tttgaaatattttttataatttttgaataataatattaagtgtactaatataaacgtatcacgtgtacaagagtatatatataagcaatccatgttagcagttaactgtgaaaaataaatgacacattaaatttgctaacagtttagtaatttagaaaattttatcaataaaatttaaacttaaagagttaagtaaaaataaaataatagttaaaagagtttaattaaaaaaaaaaaaactcattatttattgatagccccatgagaatttgagtccaccaccctatagagaaggttcttttgccctttgccaaaaccaaaccataccatgtttggagtcatgtacatacatacacataaatcccatatatatatatatatatatatatgtataattttacctcatccatacaaattcttagctatgattgtcttgattataggaagcataccatatgatattaaatacaaggaaaacacataaagacaaactcatatatggaatcaaaggcaaattgttatagcataatacaaattgaattagttgttcccatgtgatggaaagagtttgaagttaaatatagttagagattataatgatgatgatgaggatgatcattatcattactatattgattgtgttacaagattgtgaatatatagtcaatatataatcaaagatattgagaaatagtactcatttattaacttgagtataataattaatcaccaacccaaattggtttattaattgcaaatttcatatattgcatgaaattatcaatgtttttgatttttgattttctataaatagtagggttggttctaattattacaatgtgctcaacggtcaaaataaacatatttgcacaaatataggagatacctaataatatgtcccaacataggtctcataacataatcaagcaataatttaatattattttatttaatatcaaactttaattttatgtaaaggattaaggctagtttagtggtgagagagagataggaaaaaagaataggtcataattcgaactcaagacctttaaaactattaaactattaaaatgattgtaatattattacgctacactaaaaaaaaaaaactttaattttatgtatgtatgtgatcaatttttatttttcatatttagataattattatttaatttttttaatgaagtgtttggatattatttttttaatggtaaccttacatttaatttaatattaagtgacacaaatatatttgttgacataactattttctttctttttttttttttttaatggcaaacattgttgattctataacatcaattaatatttagcttagctttttatggggttggttgggttcttaactttacctttttattctttatttttggggcatcttatagaaagtgaatgtgtgcattttgtaaagcacaaagttatgtgtctcaaaaaaaaaaaaatatatatgtttgattttatggtgcaaaaataggaaaatatatggtatcaaaagaaaaagtaaaagtaaaaataaataaaagaatttgctaaagtaaaaataaacaaaaaagacatggatgtaaaatgcctccaaagtttatgtttttgctctatttcatttttctgccgttattcttcttggtttgcttaagattgtatatgaattttaagttaaaattggagtatataaaataatataatgtatatactatatattcacaaaaaagtgcacatacagtatacaaaataataaaaaatatatattttataaatataaaatgtaaatttatttgcacttacattaatcattggttgtttttattaaaaatataggttgatgaattggtttttttttagctcatatattagttgtaaatagttaatcaggtgaatatctgtgttaaagtttaattgcagcagaagtatgagttttactagttaattgaaacatttgatgaggaggccccgcatggtcggtcctgagttgaaataggttagcaaaaaattttttttggcccttactataaagataaatagtatttttaaaagggttttttttttatttggacccttaaaataagtggaccctaaacatgcccgtttatggctagggtcggccctaaagtcccgtccaactacaattttactgcttaagtccccttcttaactttataaatatatattatctcatcacaattatatatttttattaatatatttttgttttagagatctagagataaatgctaggttagtattacaataccaatctatgatatttcttgatcatttctatagaacgatcatgtatattttttagggtaaatactattttggaccctgtattttgtaaaagttacagattggaccctgtgtt

SEQ ID NO: 39042 - DNA, 2818 bp, Cannabis sativa
atattaggtataaataaacattgcttaaaaaatgacacttgtcattagaatatagaaagagtgcaaaagagagtgtaaaatagggtgtgattagcactcctctatagtcaaaattaggattcaaatacttaaataatcttttcaatacttcaaatacttaaataattctaattaaattatttataatttttttaaagtattatttagttgaaggtaataaaataaaatagaaagataaaaaaataatttctattttatttctttatttagttacatattaaaatataattctaattgaataatctttctattattttggtggaacgattatttcatttttaaataaaaacaaaaaccattccaagcatgatgagaaaaaatttaataaattttttttatatattctaaattttattctattttattcttattattatatttatattcccttgccactaaattagctagaaccacaaatataatgtttgaacggaaattattcaaacattttaaaaatttgtatattatagctataatacacattagtatatgttacaaaaaattaagttatggataatctactataaattataattattgttattttcattttcattgtttaaaaagagtgagcatgtaaaatctaaaggttttttttatttttatattttaaaataatttttttttaatattgttatagaattctacatagaaactttcataacaattaacggatcaacctaaatcgtaacaaaaatccacattgtaacctacatagaaattaccgaagaaacctaaatcgtaaatttaaaaaaaaaaattaaaattgagttaattttcctaaaaattaagtatgaaatttttttattagatattaacgaaaaagaaagtagtgatgtctattgaaatatcggtcctattaagtttatataaatatcacaaatatttttgatatcaataatggatatttataaaatataaaaaataatgattaaacttatattttatcaataaatttgaataattataaaaatttaataataaatataaaaaatttatatagatattataatattgttttaattcaccaatatcatatagatatgataatatgtgacattcacacactcaataacaaaatatcaaataccaaaatggacttctaaattttttaaaattattagttaaaccattttaatatgaagatatagagtttaaatatgtttgcatgtaattctaatcatgccagtttggtgttttttcccattatttttccataaatgggagatgatgaattcacccacttgcttgtacaaactaaatatgaaaattgggtagaaaaataataaaagacctcatagctttatttgtgtttgattgatactgtcatttgaaaatgaagtttcagtgttttcgttaaataatagatccacatgttttgtcatgaccagattacatgccctagtgcttttgaatattaactgttctaataaaagaccaaaacagttttattaggctgaacactgcaaggtagaacacaaaacaggagataattgcaaatagttgatgattagaaatttggattttgagaggtatcccaagtagttggagcttggaaaccaaccataaacttgattagctatcacttttcctttcaagaaaaaaataaaaaataaaaaacacccataaacttatgacttattaacccttttgttttagttagaagtaaacacgagacaaaactatttattactaaaaattgaaataccaggaataggtgatgtaaaatttctaccaaattattattattatttgggtatttatttatggatgagctaaaaaaaaaccctgcctacatcctacaacaaccattatgatcatctcctatcatttccaatgctcttgaactgacaagtgactacccatcttcttcattgtctccctatccttcatttaccgtacacctgactctatagtttctcccctaactttattaaacagtgtctcatcaatttctcctcacaaaaaacgaaaacagcaatagtcattctatcccctttggattgagaattgggatgccaataaacacttgtaacttctaacttttgggtagtcctttacgtttcatatgggagaattgttaaaaggtactattcgtgactagtatttttattagtgtaattaagaatcgagtctcatataatttaaaaaaataatttttagaaaatatcactaactaatcctaaagcgtcatctatagaatgtgttgggcactattggtacccaataacaatactcttcatgttatcgtaaaatggtcatttagttatgaaaaatagcgcatttaagtttataatttgttaaacgatattttatgtataccataatttttatttataatgatgtacacataaatttaaggctaatcaggattttaatttctttgaattttgatatgtattaaatatactctttaaactttttaacttattaaaaatttctcgaattattgagattattgattttgaagatttttatcaaattccattcaaatttactaatgtaacaattgtccatgtactaaattgtctcctccaaattttaacatttactaaatcttgcccctaaattttaacatataccaaatcatgtccctaaactttcattcacttcaaacttccattagtaaaattatacaaaaattttaataatttgaaagttacttttaacgatctaaaaaattaaaaaagtattatttgtacatatcaaaattcgaatgacaaaaattctaaataaaatattcccatatgattataga

SEQ ID NO: 39043 - DNA, 2355 bp, Cannabis sativa
aatattatatttagagtaatttatcaaaaaaaaaaaaaaaaaacttattactaattaattagtattatattagcatataatcttattagaaaattgtgtctaaatcagcctaacaaatctattaaattgagaataataggattgtcctcactttataaattggatcaaattatatatcaccacgtcagacttataaatgatagtgacgaaatgatccatgattaaagttatattgtaattagtggtctttaggatattaataatttctctatttttattatcattaattttgtaagaattaatatcgagtcagattattctcttggataaaatatgcggacccaaattaatctttttttaactaccattccattgttctcttactcctaataaattatatataatgatgatgtgaacaaataaataaaaaaaatattctaatttttgtgaattttggagagaagcaaaaggaaatcttatatacttttttcaaaaaaataaaaaattaaaggaagtcagaatgaagtcttacactcttttatatattcctgatttcttggtcaagaaaaataaaaatctaatcttgtaactcttaacttttacatatattaaaagtgagaataacattaatcaaaaaaaaaattgagaataacagaaattctattataacaaattgttcagtggcgttgcaagaaacatcgcatcaataatcaatgtgatataattagtatatactttccttttatgtgctaaaataatggtggcataaatggaagtactcaagtgggatgttaatagatatttcaacatattgaaagacgaaaaaaaaatatataaatttaagtaatttacaatgtatcaaatcaaaaaaaaaaaaaaaaaattaaaatgtagatatttaaatttaattttttattaaaaaaaataaatatataaatttaattttgtattttattaatatgtaagttatattcttgaaatttttgcggtattagtttttaagtgtgaaatcaaagtgttatttttttgttaacttacttgacacttaataatatctaccaaaattttaaaattattactcttacaaattcaacttaaatatttattgaaacaccagttaaatttaaatatttgggcaccaaaaattacatcataaatttttttgtttggccgaatttatcaatgttgctttcaaaataatggccattatctatcattcttacctattcatgtgtatccctgcaaataaatcgtactctactgtcactattgctctctccaccatcattttcttacaagatcctatgtatattttgtttatatgtactacctatatatgtccctacaatgatatatatattattggagaacattattcccagtagattagatataaaagtagtgagcatatataagatataggttactctactcatcatcaattgattttgagatggaattctataattctcaacataatattaaagctatattcttaacgggtaattgtgcaaagacgcttgagatccgaataaaaataaacgagcaaatagtatggcttgtgataaagtataagaacatgggctactctactcgttgattttgagatgaaaccccataattttttaacattgagacaaaaaagacatggtcgagtatgaacgctgaaaagctactttgggtgtgatattattatatattatgataaaagtgaaaatgagccgaggatcgagtaattcggaagttttaatcctcttctttatatattatacggggaattgatttcaaatgtgacaaaatatgttttcttttatagtattagtactgttgtttagtgattccagagatggaaaaacgagaatcgtctacgccagctaggaaccttcgtcgtatacccacaaagtttgtgaacttaagctttgattattaattgaaaattgagtaacagttccactttttggtccctgcctaggcaaatatgccagtggctcattaattatggacaattggataccactttcattattattaataatacatgtcctctcatgaatatataattttctccaactttatgatggattatcagtttttttctaccagagatttttattcattattgttggaactttaaatataccagaagtgaagtgtatttgttagcaggaaaaccagacacaaaacagagacaaagagaaggaaaattaagcttcattcattgaattgtcattgagcatttacaagagatgagctagctacttatagcagctgaaaacagttacaaaaataacaaacattagcaatcataactaattaactctaacaaaccggctcacttaactaaaataactaaca

SEQ ID NO: 39044 - DNA, 1898 bp, Cannabis sativa
tgtataatgtaacatacattataaactacacattattattggttaattactaaggaaacccgtgaatttttgttacgatggattgtgagccagcactgttttgaatacgtgtggtaactcacacgagtccttcgtgaaacccccacgcgatgatttatgttaaatgttatattataattatacacacagttaatattgtaacttgttgtggttgaggtttagccgactagattttcttttaaaagatagtcttgcagtatataaaagttgtgtttcttaaacaattaactgtatcattcgggtcttaaaaacattattatttattttccttaaaaaaaaaaagaaaagaaaagatggtggcatgcgccttgtgaatgccatcttctgtacccatatattctgcagttgcaccacttggcaatcattatatttgtgttgaagtaactggctttgcgaaactttacttataagattgaagctgcatacttggttctgttctcatattatgtggttctttctctctcccaactggcttaatgtgaaagaaaattagtgagaattgcttagtcaaagactcaaaaggctcttttgagagtaaaaaattaaaaagtttggtattgtttattattatttttattattttgaagaaagtgatatagtattgatatatggcgaaacccactaatacacatgcgaatcaaacacatgattaaaaactgattatggccaaagacaaacagttagccaaggccaattttgctaatgaatgagccctgttacacacaatgcagattgaaatcaaaattagccataaattaattcgaaaaaattaaagcttttgcagattgaaatcacatcttgtttattgtacattaatataaaaaattaaattaattttctcaacttttgcttgattaatttgttttatttttaatcatggtttatcttttatattttttttgttttctttcaactatgaatgtttccatacatttccaaaaatagaaaatctttgaaaggacacgggatatcttggtttcgctatggtggtgatgattaacatcttgaaaatgtcatgaacaaagaattgatttttcttagtattattagacaaaatacagtacaatatattaataaaatgtttaaaattattggaagactcaattcaaaaaggtgatatggggtggttgaatttatcatgatcatgcctatccgagtattcactgactactgaagtctttcatggtcctggcctcacttatcatttcttcaggctctagatttcagcataagcaaacaagaggaagcacatatttgaattttctacttatgcttgacgagtctcttcattattcaaagtcatgagagagctatgcccatcctcagtcaggggcgagcttgttttgtagtaaatttgatcaatctcagtttcaagaggacaatgtatgtaaagattcttggtctggttaaaaatcatggcacagaagttcagcttctggcacatgtttcataaatctcatttcatgatccaacttatccagaaaatgaagaatagctttatgttgatggtggctgttatcttccatcagaaaataatgaaagtttcctttcacttccacggcactatagccaggtattttctttattccagaatgtttcatgatgtttttcaaaccagctacttcattccaattattttccttggcatagaagtttgagatcaaagcataaactcccaagtcgtctgggtttagcataagtatattttttgcagcaatttctccgactaacaacttcccatgattgtaacaacctgcaaggagagcaacccatatgggaagcccaggttcagtatccatggaacatattagcttataagcctcttcgacttgccctgc

SEQ ID NO: 39045 - DNA, 1147 bp, Cannabis sativa
atgttatgttacgatggaaaactcacctgaagctgaactataatttctttcaatttctattaacaggattgttatgggacaccaatacttaatactacgtggtaacactttataattaattagttagtaattttttgtaatttttaataaaataaaatgagttgggttttatattgaattacatcagcatacgccctttagcatttctcttaaatacaaatagtattagtacagtgtaaagggaacttacactgcaccaccaacagcagggccaactgccttaaacagagacattgcagtcatagaaaggccattggcagcacctctttgttcttggtcctgtttgttcatatataatcaacttaattaaattgaggctctcactaataagaacaaaatttaatcagcaacaaaacttaccacagctctgttctgcagtatgaacaagccagttataagagaagcctgtacactcatgtgtcccaccaaaaccgaaaacaagattttgttaatatcagaaaattaaacacaagacaaatcattgaaaataataagctaataatttatgagacattctaattaaggtataaatgaatttatgatgctgaggttgactaaacatggtttagtaatatattgccttaagttcttctattgtgtaacttggttccctagctatgagactaataatattagaagtatatattcacttacggccaagaaactctttagcatatttgcaatgtttaacaccacaaaaagagcaacccctgatagtagagctatatatggaaaactagtcaatagaggtattgttaatgcctgcacatgaaaaaaaaaaaaaaaaaacagaattaattgcacataataccaacatcaatttcaaagtattaatgaatttgtctctgtgcattttattgcctcaaatatctatatgtttttgtattatttttgaaatgtatactgaaattaaaaaatatattttttaatacgttggctattcttctatactttttcttttactctttcatctctctgctacttagtagctataaccattttttttgatcgtgaatagaggtgacagcacacatatatattttgggacacgattttgtctcgttattgtactttcacggaatgtatt

SEQ ID NO: 39046 - DNA, 4613 bp, Cannabis sativa
  modified_base (4584)..(4584): a, c, t, g, unknown or other
aatgggcaggtacgatggtgcacatcccttgtactttgacctgagattgggggacaaaaactaacgtcgtatccaaaaaagcattactgtcacttctatgatctgataggtatgggtggtggcctcccgcgacactgtatgggagaaaaaactgtcctaagcctttttcgctatagacattctaagagaaggacttggcttctataatgcattttgcaaccggaaagggacaccttccctttcgctcccgctatgcttgttaattcttcatgtgatctttccatattgtggatgtacttttcgtggaagcccttcgcagaagctagagccgtaggcactaattaactatggatttgcttgaatttttttgctagattgcacgtctcatggttgcaaaaatctggataagatttactccttaaccttttggggcgccccgtgttatgggatcttgcaatggctacctattttctcatgattggtccttaacacgtggcgtcgcttgaaattgaattatgtcatgtgagtgattgtcaactcatatgtcattgatagtggacatgattaatatggtaaactagcagcgttataaattcagcttgtaacagtacacacgtgtacagcgcgtgtctcgagagacattaagtttgcgacaaggtgattgagcagatccctcatttaataagcactttccacgagacatgccataatggatgttaaaatttttgtctgatacaatcttcccaactccccatatctgagatcctcaaattctatcttggttaatcatttgggttgttcgctttgcgtggaaggaactccacttagcacgtattaagtattcaaagcatccgcattgccttttaagtttcaaaattttcactcttcgcaccagaggctttgcatcttgactcaactcactttttaccaggcacaactctattactcaagccatcctcagctacgtaactggacacgatgctatcgagctatcccacacgacatccttgtccatcacttagaaaatactttgttgctcttgccaggtatataaaacttcatgcttattataaaaatactgagtttggacttaagctggtgtgtatcgtatgtgagtctttgtaatttttttttttttttaattttggtcttatttgaatgatctattgcagaaagagaagcgtggtggtttggtaggtcgacagtgtattgaggggttgtccatatgggtagaaagactagtctgtccctttgttcactgtcaaaagttgaccaccatacgcttgatagattatttctactaaccccattattctgatcagttgacttactcaagcctgcatcaatcgtttttgcaggcacttcatggtctaacatggtgaacttaaggaaggaagttggtccttcaaatgctggtggcgatagcagtcctcgcgggaagaggaagaggcatggcactactctttatactggggccttcaatccatcttcctttgctccatattcccgtgaggaccacccccaccgacataataaattgtcactgggaggctaacttcatccgtgccatccatcttctcttccaaagattcccctcgtgggcttcatatttcccacaaaaattgtacctcttgatcccaccgctatgcagacagcgggggagatcaaaagagctttggaggaacatcttgaagaagagaagggatttttatgcaggcaggccatcatacttttgaccgtgagaagggctgaaatctcagagcgcctccatgcctcaatgtcggtcagaccaatagttgatgtagaggctctggataaatgtttggcacaaaaagtggggagtgagactggtttgcagcaggatttctagataaagtggttgtaacacatccaacctacccttggaaaccttggccacctgtagcagctttgatgccttttccctagctcacgctgccaagcagcaagtggttgggttgaggctcttatctttgcacttttgtttggccactacactaggctttctcaaattttctctattgcagcaggtagctttactggcagaaagggccatggaagaggctggtacattggtcatggagcttgtgccagacaatgctgataaccgcgagttgtgcgctgccaacaaggctctcattgataaactcatagaagttgaggcttagattgaaagcttcaagataaaaaataggttgttggaggacaactacgcccaacaaacctttctcatgtggggtatgcagttaatcagcgaccttcatagggagaccactgagacgatgcaaagagcacactcctatgaattatccaatagtacctaaatatataaagactgagcggctggctgagggagtgtcccactccaggaccctgacctgtattttctttcagtttactcttccacattttccctttctcattttgtggaaacaatctgattaagccttagccgcgaggccatttgtaacgactttatacttttacagtttttcctttgagcattagtacacacccactagcttgttagacttttttaagggttgttatgcaaggtcattttaaactttgtggttccaacgaccaacacttcagacgtgttatccaattatttacccctcagctgatttacaaagttcctgaagacccttgtctactatttttaggtggggttactattgccataaccctttttagtcagtgcaagcttcgattcattaaatatatagacgtcacagagtggcctttagctagttcctagacatctagatagtcgtagagtcttagcattctttggacatctttgatagttacttacttttttaggatgttgctcacaaagtgctagactgggatggtttttttcgcaaaagggtgagattctgagttctaagcgttccctgactcttactctttgtgaagtttagtatcgggagaaatggttaaaaatgcttcagattccaagcgttgtcccttgtgaagagatttggttgaaactgtgataacactcaagtaggttttctcctcccagaccttcccagtaaatatctctagccccccgaggtcatgcacaaacctggtggtaattgtttacacatcatggattttaggcggtgtcttgcaatcaagatagggctaaagacgcatagaggcgcaaacagggaccttaccgcacaaacgaattaaaccttaggcaatccaccaaaactcttgagaaggaatccaagcaaatttttcctttcaagaaatttggctgaaggtgtatctatcatcgatgttttacactaatttcttaatttcgaaaaggggtttaagcatatctttccttgggaagtttggttgaaaatatatctcgattttggtttaacatgcaaggtgcaataagacacctcaccaaataggtgagtacgacacaacgttgtgagaagttcgaacgtctcccaattcctggtaatttacttaaacatttcttgtggtaatgacgcattattcaagtcaatgaggggaagatttggttgtgcattgaagtcctattcgagctccttttagggaggcatagctgaacttgtgttgacaccttaatcacgccctctccatctaaagtgatcagtgacgggcctttcttgaccagtggcgagagagcataaaaaaaacacaaacttccaagcctgcttcttttctcacatttatagggaatttgccaatcgcggtagatggatctaagggatggggacaattgttcaaacaattttccttgtctaagggcaatgttgaagatacgttgtccatgcttcatgtgtgggccaggttgaataataaagtggatttttggcatccatggaggaaggctgaaaccacactgaaattcaagcacgggcttcgcttctaagaaataaaggtgaaaaccatgtttggcgtttaataaacctcaagcgattcaggcttctatgagaaagggttgaagacgtattgaacctcaacaatcttccacacaaggtagaaatacacgtgcttgtgagaactaagttgaactgtgtggcgggctttggcttccgcgtaggaagactgaagtcacaacaattcaagcaatggtctcactttcaagattaaaggtgaaaaccatagtgggtgtttgatggacttcaagcaattcttccctctagaaatgaaggttaagacgtattaaactgccagtgatattttacacacggtataaatacacgtgcctatgagaactatgttgaattgtgcaacaaactttggctttcgtgaaagaaggctgaattcgcactacaattcgagcaatggcttcactttcaagactagaagtgaaaaccatagtgaacgttcaacaaacttcaagcaattcttccctccgggaaggaagattgaagacgaaccctcaacgatatttcaggtatggtagaaatacatgtgcctatgagaaccatgttgaattgtacagcggactttggcttccgtgtaggaaggctgaaattgcacagcaattcaagtaatgatatcaatttcaagattaaaggttaaaactgttgggttttatgcccnaaataaaacccattacaatctaatctgat

SEQ ID NO: 39047 - DNA, 1930 bp, Cannabis sativa
  modified_base (47)..(60): a, c, t, g, unknown or other
aaaaaaaattaattatttttttatcatttttttatgcattttaaatnnnnnnnnnnnnnnttcctattcctattcccattctcattcctattcttatataatttgttagctttttttataattttattaaagtataataattgcgacttaatattaaattgtaccacgaaagtattagataatcatttaataatatttctctttacaatatgatatttatctttaattcaaaagaaaagaatcatatataaattaacataaggaatatttatttagtacttttcattgttataaaagatatatttagtactttgtatttttaataatatttaattggtattttatattttaaaattgtacattttagtaatctaaagtaaaatttaattaatacaattttatcaatttaactaaatagttctcagttatatgtaattaaataactaaatttgaattcataattcataaaattttagacagtttgattatattgataaaattttatcaaaaaaaattaaaatttaaaatattaaatatatatatatgattttaaaatataaaatacaaaaaaaaaatattattaaaaatacaatgtataacttatttaaataaaatacacagtaccaaatgggtaaacacccattaacatatgaaaaaacatgttcttttacatttcgataacaagaggctagagcacaattcaactccatatataacactttataatctatatatatacattatataaaattcatataaaaatgaagccacacataaagttgacacgtggcaagtgatgggcatgcgtgtatatgatctgagagattttgtatacatattatatacatattataaatatagtcaaaggaagaaagttattattattatttgattaattaattcactgtcaagtaaggggaaccatatattttggtgtgtcggattgtgcaaggtgcaatttatttttgttttgttagtacttatcattttatataattttataataataatagaccattttttagattttccacattagtggttatgataattaagctgatttatgtgatggttataagtaatttgtcttcaagcctcaaatttcaaaccaaccattcatctcttgttgctagtagtttatatatattactcgtcacatcatcaatcatgtaaatatttaattttaaaaagaaaatagataagaatatcaatgctactattgcttttacaccacacttgcagttaaatcattttaatatgatagttatttaaaatatatagagaagagatttttccgtgttcaaatgttaataaattttaatttacaagtcaatagcattaagtttttataatagtaattataattggaattattggatagagtttctgcactttaaatactaagtttcaaaacccccttcatagtagtggtgagactctatttatagagagagtcatgcaccttgggttgaactgaaccgggcccaacaaatgtatttggtttatacctggcccactattggtgcatttacaaacatgtagttagaattttgtcaaatatatagaatgggcttgttgttaaaggcccagtacccaaatattgcagacaaacactgttcagtactacgaggaaattacattgtatacccactttactttattttattttaatttttacctctattttcatatttttttagatatacccacttttatggatgatgtttccataagaccccttagattatgtaaattatatgctagacttaataaagagtgagggtatattaggcaattcactcattaaaatggatatattttaataaaagaaataatatgagagtatttttgattaatgaatacaaaaaagaggtatttttcaacttatctctattactattgacatagcccatgcgtgagccgccgcatg

SEQ ID NO: 39048 - DNA, 3288 bp, Cannabis sativa
attgtcccacatagaataaatagtagagaattgagccagaacatgggctgctcccaattggttttgagatgaaaccatgattctcaacagaaacaaattcaatggaaggctgtgctgtatgcaacagttgtgttaaaccttttcaataccaatctagattaagtctaaggtgcttgtgttgtcgaataccaccatgagataacgttatataaatgatttgtaattttttataataattattaaatttaagtatgtaagatttaatatttaataaacattacagtttaacatggtgatggtggtgtgttaactttaactttctcaaaagtaaaacattaactgagagccaagacggtcaataatgagaaaaatatgaccgagctttgactagctattgctgattgctaagtataattaaaaaagaaagaacagtagtaatcattaaagggtgtgcaattcaagttaataaaaagccaactaatcaaaacaagatatccaattatatgtaatttactagatgcaattggctaagcttaatgcctatagtgtctgtaatgatgtttgcatactatgctgctggtgtgcctaatgatttaagctcctttcttaactccactcacatggcaactgtcaagcatcgatccccacaccccaacattgctcatctctataatatatacatattatacatctatcaatatttataatccacttttggcttttgggtccactcttaatccttcatcctccatcgctgtacgcgaaaccctttaagaatccccgcaatctgcgcagaaagagaggaagagcagatgccaggcttgtgaagaggtccattatcggcgccatcaatgacttcaagccaaaaaaaaaaaaaatatattgaaaaaagaagaaaactttgtgaaggtaaaagcacaagggcgtggtccatattgtgagagagagctaacatttaatacttaaaaggttaaaaggttaaccttggcatgcatctagttcggcgctttatttgcttttggcctggttaataataatatatataacagaatctttcttgatatgtagtgagggatgatatatatacatgattgatatggttttacgttttaataataataaatgttgtaaatcattacattttagaagtcattatatatatgttcatatatagtagctacacaagtgtgtgactacacataatgctgcatgttgcgcatggtacttaaaggcaagcaatggtctaattaaggttggtggtagagttcgattgtcttaatgtagtacaacctattcaaaactctattctcacagtttatttaagtgactgcactatttaatctggttcagtaaatgtttatgctataacaggccatcttaagcttcaacaagaccttaagtgaagcttaaataaggtctttgtcgaaaattaaattacacatttttaataaaattattaattatatcttcaaaatttattttcaattaaaagacacattaattaattaaattataagatgtttaatttttatattaataattatcacactatgattattttttttcgactttcaatttatttatgattaagaatctttcataaaataaaataaatcaacagtcataaaaataatcaaaataaaataaatacatttataaagaaacattataatactatttagaaataatttatatataaaatttcttattaaaaaaatcattaattattaattgagttctaaaattttaaattaattaaaatgtaatgttgatatctaatgttcaaatttattgaattaatgtatatcactcatattattaagaaaaatgtaggatttaaaatctgcaaggtcataataaaatatcttaaattaatcgtgagtaaaactttaaacttgtcttttgctctctttcgagaagagccttcacgagatgctgaaaacgcctgaaactatgaatcaaactgatatcaccatggaagacctcctgagcagaacatctaacctaactgtcttggacgaggatggctgggaaatcaacaacgaaggtggaacagaagtgaactccctctgcgccatgggaagatgggtttcaaatcgacctatgagtcgttctctattgagaacgattctaggacgggtctgggggatttcagagaaagaatggaacgtggaaatcaaattcacttcaaaagaggcaagtttcttggtcttcactttcaaatcctctcaagatttgaacaggattgtgatcaagaatccttggtttcttacaaatggtactttaattttggaaagacttgatggaatacctcagatttgggagaattctcttactaaatttcctcttagtggtcgaatctttaacctgccccctcgatcgattactaaaggaaatttagaaagattagcaggctttgtgggagatgtaattgaagttcaaaagctggatattcccaagattgtctccaaaggctattttactttcaaagtctggtttgatatctctaaaccaatctgtccaggctttctattcccttctgcaggtcaaaaaatttggctaaaattcaggtatgatcgcttaccatatatgtgttttaattgtggttttttggggcatgatactcgggtttgtgcagaaccaatggcatatattgaagatggattgggtaatcaacaaccagcatacggttcctggttaaaaatcgatgacaggaaggaggaaatcaacaattcaactcagaaaaactctggtgtctcacggccaatgatccctcctcctgggttcactgagaaaattcacagtccctatgcaacaacgcctacggatggggggaagatcagtggtcattcctttgctcccattaatggactggggaaggaaatcttggtaacttctcctgggttctcttgcaattctgagattggtatgctgaacaagggtaaacagaaaatttcaaatggaaatcttgggcttgactttgatatggaaaagcctatagcagaaggggagtgttctggcaagggaattaatttgatcatggtacaggagggacatggaagatcgaaaagaaatggttcttcgagagaagagggcacgattaatttattgaatgatccgaaaattgcttcaaatttggctccttcatatggccaaaggaatccaactgaaaccatatcgacaatatctatgaacctcacggaagttcccattaactatgattgtaacttggagatcttaaagaaaacagagggaccctccaagagaaggaaggtgattcctaaaagg

SEQ ID NO: 39049 - DNA, 2054 bp, Cannabis sativa
aaaaatatggcatttataggtttaccattcttctatgatattttttcacatttaaaattttttattgtatttgatataccgtattattgtaaacctaataagctaaacaacaaatgtacaaaaaacacataaaaacaataaaaaaaaacaactataaaaaaactacaaaacacataaacaacaacataaaaacaactattaaataacaaagacaactataaatcaataaaaaataacaagacatcaactttattaaaatatgcaaatcattcataaatcaactccaaataaactacaaaatatccaaaacacactactttcattaacaagttaattatattgtgtctaccttggactttgagaagagcaccctcccggacaaggagtgaaggagcgtcatcattagaagattcttctccaacctcctaaagaatagctttaggctgcacggtcttacgggcaggtacctccttggggtccctgaggtggataggtttctccacaggagaggctcttaccatgttgggcttagtcttcttcttcctagcagctgatggtttagttggctcaaaagagttcttagggaacggactctctggactcggatagagcccatacttagtgaaattctcaggaatttttagaaagaaaatatgtcgagtgaactcagacaagcccaaaatggcttgggccctatctctaagaccaagcgtgaaagtgggttagatataatttttttcttgttggaaagctgtgaagttagtcggcatatatgtgaccatgtaataatcatggaggaaactgccaatcttcttgatacaggtcttgttagtgttgatcaatcacgagcattcatactatgaaaagtataaataccctgagcggtcattgtgcgaggaagactttagttcaaagaaccaattgatatcattcgtagaaggctcactccacccttgttgcgcatacaatacatccatggcggataagtatttgatcccctttggcgtaaactgtgttagagagattttgtaataattttccaagttcacaaagtacgggtgaaggggtaagagggcaccatgctcggcgtgtgggctagaccacacacacattcccttgctcgggtcgttggcaagttatcccttgaaggggaggaagacatgcacgtccccaaggatgcccttcttatccaagttctaaaggcacctctcagtgagctcgaacggtggaaaaattcacattggaccttcatgcttctgatgttcagatggcccggcctcatcaaattcttgctccatgtaatcaatgcctaagattacaagtcggtcatggaagttatatggttactcgtcctccgaccaccaactagcaccttcagaaggcatgagggcgtatctacggttgtcaacttgctcctcaatttcctaaactttaggatctcatgtgggaaaaatgtcctcaccctcaaagtttagcccgccctatttgtgatgcatagccattagttggacaaactttgcgtcattcgggctaatcttacgaatggtctacttggtaagtgccatgtttctcgaacgaaatgagtagcttagtgagggatgatctgtaacagtaatgacgatttccgcttcaaccttaggacagaaagaaggtttaggattagcttctggcaaagtatttgggacgttcgatcagacaaggtacatccaactagaaggaaagtattttctccaacctaaattgtactgtctaataaacctaccgtacacgtctccatcgatttggtccagatagaagtgattttggatggtcagaattgaaggtttggattccttgctcaatacttcccactccttaaaactagaagaggaattgtcggtagagggtgaaggcaaatcccagagtctcgacatgtcttcataaagtaactataaaagatcattgtcaattcggttattacgtccctaaaatttgtatggatttatctacaaaataaggaaggggaggtaaataccaaacaaaatagaaataaaattcttttgaaaacaatccat

SEQ ID NO: 39050 - DNA, 3248 bp, Cannabis sativa
tactctacgcaccggtaaaaagtcttttaccgaccaagcttcccagataagctttgccgtcgcagttgtgcgccggtaaagctttgctggcgcaattagtttacttttcaaaagagggttttcttgtagtgctagcagacctgtgtcacataaggatttcttagagcatggctgggtacgtagttatctgtattgactggctgaatggtaaaagggatattttgtccgtctaatcctcttttatgatttagatcattcttgagatcgtgtatggtgcctaattagtcaaagactgattctcctaaggccttcttctctagctattatcagcgactcgttggtgttgtatatctgtttgggaatggatattatattgttcattctctcccaagtaatgagttggaaaaacttgctcgtctatagcacaacccacagtttgtggccttaaattgggtgactcacttccttaggtttgttgagttcttttagctaatgttcttctggcccgtattgaggtccagaatggatgcagtttgtcctttggtttggatcatgtttaattggagtgtctgacattgatttttgtccagttatctgatatgctcgtctaataagcactgtagcctgcttggaatgattgtcaatcacctcttgctgggctctcatgatttcaatctgttgattcatccactcttggaattggcatatttgctcctcaaaagaaaaatttattgctgcttgggtatcttgttgatgagtgttggtgtgctcttgcatctgacctagtgcggctcgtaaattctgtaattcagtgccgtcaccaattgtcctttgaggatttccaacatattgatttccagtactgagtttgttcggtccgagtactggtggttacagtttcttgcacacgtggacacgtggacattccaccatgccagttaacatctaaaaatggatgaaaatgttaatctgctaacagaacttgagtttaggaggttttactaccaaaattttagaattttgggttaaatgcaaaaacctaaccacttaaggaagttttgccgcaaataactcttgtttatacgaagaaaaaaatacataacaaaaaataaagtgtaaaaaatttaccaaaaatagtaatttatataaactttcttttatttaattgataaattacttattattttataacaaacaatacaagaataataattaaaaaaacagtaaggaaaaacaaataggcaacttataataaaatatttatatagtaaatctaattaatataactattgattaattcttcttatgaatattgctgactcttgtggtatctttatcgtaaagtttcccatatacatattttaaaaatagggtgcgacacacattggtcatgtatggcatctttaatatatgttactctttctacttaagtcctagtagtcgtagttaaatttcaatatgaaaaaataaaataatataaaaaatgacaggtggggccgttggataaattcacattgtcttggatctaaaaaaatggcttataaatagaaccccaatacaacacattcaaatcaacagttcgcaatattacaatctttctcttccaatatcagttttcgtataatctattagtaattatatatataagttttctcaagctaatagcagttgagaagactcttctactataatatatagaaattaattaaatatgggttcaagtcctcaggccagaggactgatgggagcgttaatggtacgctccttgattctgttatcccttctggccggggcagttgttggtggtcgaaatcaggttcgacactacaacttcgatgttgagtacgtttttggggcaccagattgtaaggagcacgtggtgatgggcatcaatggccagtttccagggcctactattagggcaaaggcaggcgacactgtcgtcgttcacctcactaacaagctccacaccgagggcgtagtcatccattggcatggaattagacaggtaattaattattaattacttatgatctaaacagtactatagatacgtacgtgtgtatttttagtatatcgaaatagtcatgcctaactatatcaaccgtgattttatcaacacgtgatatgtatttttgtttatcatctcttgctaattggtaattacgtgtactaattatgtttaatttgtgttttgttcagttgggtactccttgggcagatggtacagcctcaatctcccagtgtgctatcaaccctggggaagtatttacttatagattcctagttgataaggtaatttttatttttttttaatttcagtaaggtcacccctttttttagtcaaaagaaaagtgcaagaaaaaaaaaaaaagtaattttgttggaccaaatgaaaagtggaaaattgccaaaaagtctctacatgaaatttatctaatatgtagtaattttaactgagagcaataaataatcttttttccaaaaaaaaaaatagatttttttaatatagtaattttgtatttgcattcaaaaatttatgaaaatacattatattttattattttgatttttttgaaatagttttcattattttgtataatatatatttattttaatatatactcactttctttttctgctcaaatttaaaatatatatataaaaaaatattaagacaaaaagagaaaaataaaaacatttataaatcttattagaataaaagaatagaacatatgcattatttttatataatatatatatataaacgaaaaaagaacaaaaaaaaaatattgggtgcttatataatttttgggttttaaaaataattctgctttttcatattgggggaggggaatcaattgggacatcctcattgttagtacactatgaccacttaaaagtattatagtcaatcttaaattatataatgtgacattgtaaattgatgtcaagcactactaatgttatttagctattttaatttgaataaacttaatattaatcatttttaggccaatgctctctagcatatcattcaattggatcaatgaataaaaaataacctccaatccaaacaataattacaatagatctcatatttatattatatatagtatatatgttgtattctattgtttatcttacatgaatagagtatacacaatacatgcatgcacatatacacacatgcagttgtattgtagctgaggctgtcaattattatacacattaaacaacttgctaat

SEQ ID NO: 39051 - DNA, 1538 bp, Cannabis sativa
ttgtgatcgtcttctttgacaatattcttattttcaatcgctcaagctccaaacatgttcatcatttgcaaatgaccctcaaattactgcaggataatagtttttacgctacgggaagtaaatgccaattttttcaaagtaccattaaaaatttgggacatttagtgacatctcaaggggtccaagctaacccagtgaagattgttgccatggtcgattggcctattccgagaacactataactaataagggggttcttgggtttgacaagttattatcgacgatttgttgctcattatgctactatagtcgctcccttgacagagttgttgaaacgaggataattttatttggtaattcgattacatggtctgcctcataccatagtatcagatcgtgatcccatcttcactagcgctttttggaagaaactttttgagctcatgggcacaagattgaagatgagttcggcttatcaccctcaaactgatggccaaacaaaagtaaccaattggtatttggaaaagtatcttcgagcatttacagctgacaatcccaaacaatggagtaagtttctttcatgggccaagtatcattacaatactggccatcactccgcgatcagaacgactccttttcaggcggtttacagtcaactcccaccctctattccttcttataaccaaggttccactataattcaagtgatcgaagaggatttgatgagtcgtgatgcaattttgcagtagctgaaacaacacttgcatcaagcccaaaaccgaatgcaacagcaagctaataaaaagcaccgagacatagagttccaagtgggcaatacggtattgtttacgctccaaccttatagacattcaactgtagcaaaacgtctcaattccaaattatgccgcaggtatttcggacctttctctgtgatagctcgccatggtctagtggcttatactttggaacttcctcaagggagtcgcatccaccaaacattccatgtgtctcttctcaaaccataccatggccctccacctcctaagcgctactccttgcctgaattgagtgtagcaaatcagccactaatggtcccatttgatcaacaccaaacctgtgaagcaagttctgatacagtggactcttagctcgggagaactttgagactttctgtcaaatatatgatgtttccaatcttgaggacaaggttgttttggaggaggggagaagtgttagccaggcccaataatattagattcaaatgcaattaaagaaagagtcaaaagctgggtggatgattcgactcaagagtccagcccaaacaaagatactgctacaattaccaaagtggatgaatcgaagagaagttgaaagaaattgcagaggagaagggaacgctgcatgtgaggccaaagtggatgaaagaattcgttatggtggtgagatgttgagcagctagcaaccaatttcagttagagttgtaacctttttctttgctgagataaataaaccattttgaaatttcaaggggattatct

SEQ ID NO: 39052 - DNA, 1816 bp, Cannabis sativa
atttttatcaacctgctaacattggccaccaattgttgtataatgcacaagcctgtcacacagaaatttagctcgtaaaaaaataagaatgatgataataacaagtagctaatgactctgtgtgaacaaaatcaagtaaaaagaaattattttaaagcaacgcctcatctttcaggacatccaccaaccacaaatttcactgtgacatctcactaacatgatttaatagcaatagttgtatagacacaaatgctaatgtcatgaaagctgattgttaaagctgttccttagtattaacaagtctaacatatacacccctcatctattttttctcttcctcaccctctatttcattcatactcgtactgtccagtcacacacctagacaatatgtgaaaaaagacaaatattttgcataaattgcattcaaacaaaatacttttgaaactcttctagagtatacagagaatgtggtttccatcatgtggcataaacaatatagaatcaaaactcatggctttcaaaaataattttatttccagaactatcacaagtttaaaacaggtcaaagtatgaaaacctaccaagatctgtagcaatatgctagatgaaaacataaaagcaagcccagcaagactgcacaatttgaatgaacaaaaaaagaagggtcaagttagaagcattgttgcaagagctgcaaactttaaatcacataactaagattcctcacttacactgcatcgaccaagaaccattacagatgttttccaggacagaacacatacggaaaaaaaaaggaattagtgattatatattattgagaatactagcagaaaagaaataacagatacaaatagaataatgtcatagaccaaaatgcaaattataaagctttaccagtagtaattgaataggtgttcaattacttttttttttgtataataggtgttcaattacaagaaaagacagtagagtccattgaccattttctacttcaatcagctatataatttgccttaacccactcaaatttatgtgctgaatcatgcagatgatttcacactgtttaacaaccactccaaactaaaaaaaacaagtcaaatttctcctaattttaaagtattttacgccaaattttcttaagagaagtactatttgttcaaactttagttttaccatttgcaaatttcatcttttgcttctgatttataaacataatttcagaccattgtgcaatacaatatttcaaagttcctacctttctttcttttttcgatctttaataaccttcatttttcattttcacccctattctagtcttcgaaaattacacactcaaggttgccaattctgaagcaatttcaactcatttttcctgattcaatattttcccgattaccaaacaagagcatacccaactgccagaaatacatcaaaaccctaactcaacactaaacaccggcgaatcaacaccctttccgaaatcagttaaaaccctaattcgatattcagcgaataaaataattaactaaaatcactatttccgcaaacttccatgaattctctacgaacccctttaaataaaataaagtaaatgggaaattcagaagttaccttcaattgtcatcgccattgtttgttgaaatggaggaatttctgtaaattaatggaagaaaaagaaaaccccaaaccaagcaatcttagaaatgatttctctttggccgagctgctgacctttgtgccagctttcgtcacactaatttttattgatcactttattatttgttttagtatctttaatcacttaagtattagt

SEQ ID NO: 39053 - DNA, 2592 bp, Cannabis sativa
  modified_base (1291)..(1306): a, c, t, g, unknown or other
tattttggatgctaaaatagataaagatatatcagtatatcctttttaagggggtgcattatagaatttccctaaaaaatatacccctaataaatttatactattttattctaataattccacattatacccaaaaaatcattcataattattttgttttaaaaattttaaaaacctaaaaaatttatttctctctctacatctctctcatgcatcaacccgttcaaagagccatcgccctcctcctccctctatttccctctctagatccatctcatctgcctaaaggaatcgtcgcccttaatctcgtccggtcctctattgaagcccaaacgtccgtcgtggaagcccatcctccgtctctcgtccaccatctcccgtccaccatctcttgtccttcatagaagcccaaacgtctgccacaccacattttaattgaaagtcagagctcgttaataagtaaatttatttttaaaatattttgttaattgattgtaaaagtatagtctatttttggtagatctatgtaattgttgtttgtatttgtttggttttgacatatttttcgttgaaatcgtgagatctaattttttggagtattctatgtgttcgtatttttctcgatgcatttttgatacgttctcgacaggatctcgacgcaaatctctcaaagttagggaagacatttctcgacagttttttgataggttctcgattatatatcaaaatgatgaatgattttgtatttgcaaccattcttgacatgttatctacgcgtttttgatagtttttgaatggtgtgtgtatagttgtcttttcaaactttcttgtcccatgttatcgacgatttcttgactcaactattttttgatgattgattatttgttatttttcaacagttatcaattgctttccgacagattctcgattggttctcgattgtttgtcgacaatatttcctattaatttaattttttgttatttttgttattctaattcaattatttttagtttgtattgaattgcaagattgcctgtgtttctggttgtattgtatgatagcgttcgagtttcaaagaatttaattgggtgtataaaagcgaaagaagtacgacattgatggttgaaattgacacaatcttatgaaaaatgtacaacagtttatatgaagagttggaggttgacccattgaagtatgatttaaaattggtgataaagtagtaacacaatctcgaaattgcagccattgtggcagctccgattacaacaatgttggaattattttaccagnnnnnnnnnnnnnnnncaagtatgtttcattaacatccttttaatttttaacggttataacgttaaatattaagtcattatccacgtgtttttttttattagtatatttaaattatttcttaaaaaataataaaaattcatgacttgaaccttacaaaagttccaaaattataattattactaatgccaaaaattaaatttagatatttatttacaactaagagttaaacttaaaaatttaaccgcaaattaatcctcaattttatttcatgttaatccaaaagagatgagtatgggattgagtatgttaatcaatcccagccagcttcttagttgtgtgattaggaagataaacactactttgactcaaatctataaattttttgacataaaatattgaagttgaaactattaaaatataacactagcaataggaataaaattgtttcaaggtcacaaaagtttaagagctaacagattgctcttttaaggaaaaaagaaaaagaagaaaattattacataaattaactgatttggtttttcaactttaaaaaagacagattaaatcaacaacagaagaagttgcaactctttcacctctttcttttcttgtttcctccagaagcattccctcctttcttaaaatctcggaaatcgtttgtggtttcagctgtgttctgcttcttcaacgatttcttgcctccgaatccaaatttggaatccttaaaatccctcttcttcttctgttgttttccctgtccaactccacctcggctttctcttgctttccctccagatcgatctccaggacgcacaccaggtcgctgcttatttgatctctggaatgattttccatcttcaaaggaaaagtccaactcgccatctttttcaccaccttcaggaaacccgctctgctgcctctgtttcctccacttcttaacggattcaatgtcatcctttttctgcttagccctctctttcatcttctgggcttggacttctttagccaatttctttgactctcttgatttccttctctcctcagcctcttcaatattcttcttctcctccaaaagtcgaccctttactttctccatgtgagagtctgtcttcaccatctctgcataataatcaggtggcctgagaaaaggaatccccatcgactgaagcttcccgaatgcttgtttcgttccctccagagcttgactgtagaaggcaagctccctggtcagatcatcattcacatccaccgcttgctgttgatcaacatcaacagatagcttgtgtatccactccacattg

SEQ ID NO: 39054 - DNA, 1829 bp, Cannabis sativa
  modified_base (45)..(57): a, c, t, g, unknown or other
ctctctctttctccagattgtaagcttctctctctctctctctcnnnnnnnnnnnnnctctctctctctatctctctctccatgctctctcttcctttggacaataaatataaaaccgaagcccctaaagaattttgaatcgtaaaatttagactaattttttaatagattttatacttattagttgtagaaccccactagaacttagccatataagactttctaaattcttacaagtggacattgggagccgaaaacacgatatagcataagaaagaattgcttggaccaccgctttgagaagaacctctttaccagttctggagaacaacttaccattccaaacattaatcttgaaagatacactctgaagaagataataaaagttttctagacctactcaaacattgaggaactcctaaatacctattgatgaaaccctttatcaagtaaacttagattattaaagaaaaaatccttatccaaagaactagtattaggaaaaaaaaaatccctatcgaaagatttgtcaagatttactgattggtgtgttgccttgttataaagttctaagatatccttaatagcaatacaagattgatgagtaacagtattgaacaaaagactaacatccacaaaaagcaagtgagtaataacaggagcggacctataaacaaagatacccttaaactatttagtgaactcttttatacaaataactaatcgttgaaagaccctcagacaccaaaaaaataaataaaaaaaataaagggataaatggtccccttgtttaattcccttagaggaccaaaaactactagaaaacctagtagggaaactagctaaaatgatatcaaaagtcttctcatatcaagcgtaagaacagttcaccccaccttatcacattttttgtaattaatagcatgaacaacttcattagtaataaaaatattataaaaaaatattctatcacacaagatagcactttagttactaaagattaaagtactcaaaattaatttaatcctattaaaaataattttagcaacaactttataaaaagtagaacataaattaataggcttataatctttaatcttaatagctttcttctttttaaggatcaaaactatagtattatagttaatcaataaaaaataaataaatttgtgtaaaggttgtaaatgtaaaatcacttatattccatatattttaggtaattttgactttatttctcacaacaattttcttaacagtttcttttacaacaaacggggaaaagtaaagaatctgttagatgtacaacaaactccttaaatagcacaacaatttccatccatagacctataaatatataaggggtttatttatttttatcctttaaattattattattattttattttatttttacaaaaatttctataaatatctattctatataaaatatgcatatataacagaattcttggtttatgattattttgtgagtgattttttttttttaaattcaaaaatagcagtttttctttggacgggttaaacactcctgcaaatcagtttaattagctatttctttacatacgccgccgatatgatctactcttctcaaataacttaaaaataaaatatcccaaattttttttactatatttcaatcaaaaaattatttaccatatttcaatcgcggaggcttaaaaattttctattaaaattttcaatccgtagttgagagatggtgaaagagctttaatctcgaagccgatagaaagatttgtagatatagaatcaaaacggaatcaaacgaaaaaagatggtttgtcccttgc

SEQ ID NO: 39055 - DNA, 2535 bp, Cannabis sativa
  modified_base (50)..(61): a, c, t, g, unknown or other
aatagttcagggagaatttttaaccgccaaaaaagttcaggggcatgatnnnnnnnnnnnnaaagttcgggagaaaaaattgctaattagtcttttgttttttgcatgagtaatgattacgacacacaaagcttactctcaaaagttacacacaatggccaataatgtggcttaatttttaactgatatgtatatatatgtatttttaaattgaattataccatgttcattgatggctagtaacgtgccataaatcgttaattgagttctgcatgtaaatttctgtttgtaatgtaagttgtgagtttaaactgtgtttctgagattataacttattcaaagttaaaccaagttgcttccgaccaactatttggtttattttgtgatattatggatattacttttgtccttgttttggttatccttgcagaaaatggagtacaaattgtttcatgtggctgaatattttgctttactgttgactgttttagaaacagcactagatctttgaatttgaccggtttatcacttttacagtgccgccttagaggaaagatagattcaaatggctgcgtggccgctttcctggaagagcgattaaatatgggtcttaatttcattctttctgctgaggtgaggataattgaatattttctttgtcatacattattttaaaggttccctgagaatggtagatttttacaattacacataataacagttctatatggacccagggcaggcaattagtgtttagataattccattaacaaaatattgtgggtttattatggtgtgcagctagatcacagaaagaaagactacaagtttgggtttggattgactgttggagaatagaatggctggacctaatggtgttcttttttctaatttttttttcccgccttttggtgtcgccagcaacacaagttcttctgccttaatttttcatgtgttgagttagattctaagtttgtacttgtgtaattttggtaacattgtttgtgggcagcatttgttgcagtttctctgttagcagcagcaaatcacggattttgcctatacagttgcagaattttattttagaataatgcaaattggattgtttagcggccatattcaccttcaatataatatagaatatgaagtctatttattaatacaagagatatttattctgttttgtggcttttcaacaaacttgcctcaatccaaaatctcaaacgactgtgtttttgtaattggaacaaatttatggttatatatttgtagaataaattggaattttctttatgattcttgtagggttttctaaatgaataatgtaatttctcaccgaattataaatcattgtaatgtactaatgttccaagttatagaactaagggcacgaaaactaggaaggaattagtgtaattggatgtagttgtacaattttataaaggaattattggttgtaatttgaggtaattgtacagtttgatttgtttgtctatgtaattacaatataatatgagaagtttcaaatacattctctatataatatttgtgtaattatacaccaaaattaatttaatagttaatataaattttaattaattgttaattgtctttttactttgggataattatattattgacttattatttgctcttataccaattgtaaaattatttaaatgtaaaacataaagcatatataattgttataaaaatactgaatgaactgtaagtatattgaaattgtatatatgataaaggaccgaaatatctgagttattgattatttgagtttcaattccacaaattttgaatttataaaaaaaaaaaaaccaaaattgacgttagtataagtattcatttcaatttcacgccctttcttacgctcttacaattaatttaataaatttaaattaggtaactaaaatatttaataattaaatagtgaacataattaaaatatttatactttacaattagaatatttttaattagttggatggatatttttttttatctataatgtattaaactttaattaattatttttaatgaatgttgactattttttttatataatgaatgttcatttgttaaaaaaaaaaaagaaaatatgaaattaatcctaacaaaaagtaataacaaccaaattaagctgtaatatatgaaaattaaataaaaataaaaattcttcttcttctcctccttcttctccttcttctcctcctcctcctccttcttcttctcctccttcttcttcttcttcttcttcttcttcttcttgaacataccctggcaccgtgtgtcgtggccggcagtggtcaatgaccttgcatgaatgattgtgctatagggactgaccgtttgggtctaaacaagagaggaggcagagagagatggcggagcaacgacgtggttcgtgggtctcattgtttgggtttgggtttggcctttcgcttgcaccgcgagaggggaacaaagagagaagggaagcggttgggatggatgaagagctaaggtttttttttttttttt

SEQ ID NO: 39056 - DNA, 2477 bp, Cannabis sativa
  modified_base (2423)..(2426): a, c, t, g, unknown or other
atggataattggattggaatcctaatcctatttatagatgccaatcaaaattagagagagaaaagaagaagagagaagacttttggtcttttgcttttcatatatctttttcttttgattctctaatttttccttaatcttaatagcattaggaattatcgttaccttttaactttagattcctattcctatttgtgtaggaatttctaaatatgcttaaaaagagaatagaaaatatataataatatcttttacttgttatttatctcttccttaaaagctttaaatttaaaagactctcattagctttaggattaggagattgaactcacctataaataagtgagttgacactactacaaaaatgagtttcagtgacacttgttgagagactctaaaatgttttagtgacacttcactgcgtgtcactaatgtggatgtctggaaaagtaatatatagtgactcttcatatgcgtcacttaaaccttttagactctctcaaagcgcgtcactatagacttttagaatctcaagttgtgagactctaaatacaacagccacactcagaacgtgtcactatatctatttttattttaaaaaaaaattaatttccaaaataagaccacactaaaatagtgtcactatatcatatttttcttaaaaaaattgcataatatatcaaatttattttatttctatttttatttttaataaaaaaattaaatttaaaacaacaaaacaaaataatgtgtatattaacaattaaacattaggaacaaaatttgtgtaatttgttttcttatatttaattgtacctagaaaaacagtacattaaaatgggtattagctatgaaaaaatttgaatacaaattttaataatttgaatacaaattttaataatttgaatccaatatacagattaatcatacattcacaaacccaaaaatttacaaacttttaacccaaaacaacaaagaaaatacacctaacaaacctgtgaagaatacagtgggattattcataaagtttaaaacatacaaaaaattacaaacaaaaaacttaacagaataatgaaaaggaaatcaaatccttcatgagtgcgctgatatctaacaattgagcttcaaacgccaccaaacaggaagcatgacaccatgaacaccgagatgtaatacgagcatcaaactccgtcttcgtcgaccacgaactcggacaataaacaatgagatccctgtaaagaaaagagagagagaaagagaaagagagagagagagagaaatagataaatgagaaagaacagaggttgacctttggtttctaggttagaactctcaaatcttcagtagccagccgttgttctaggcgaggcggagagaccgatcgacccataatagccacccatgaccatcgttccaaaatcggcgagacccactggaaagataagtcgtccattgatcgaagacgttcttccatctgggttgggaaatcgggaccaactcaccgtctatgtagaagaagattcctcttgctcaccgtctgtgtagaagatgattcttctttaaccatctgttggcatgagagagaagggctgttaagagatgaatagactttaacacaattttagggtttcaaccgaccttttaacttctcaaaagaaaactccttttatttatattgcttttaatcttttttagcaaattaaaaaaacattattttaacttttgatgcaaccaagagaagtaatatttataaattgattattttttaatatcctttgtgtatagcgtcactctatgcatgactgcaaaagctattctagtcacgcgtggagtgatgtgcaaactaattattttttcaaaaataattaaataattaaataacttttagtgactctttatatgttttagagttgtgcattttgggacataaagttaaatgtttagtgtaaaataatgagtgtcactaaaaattattctatacatttactgaccctcacctttaagcgcgtcactaaagagtgtcactaaaggctatatttgtagtagtgtgacaatcaaattttcacacttcctcattcatactccacacgcctatagcctttagagagcactttggaatctcatcttcatcaagccttcaagaatccttcattctaaggtagaaaaacacatttttttttcttcttctcctcatttgttggtcttactccaaggatttttagactccccaaaaacctttgaaataattttgctaaactttcaaaactccaaaacacttttctagtgcctcaaaaaattcctccaaaattgatatgacttttctgagtttgacttttcttgagttgtaagcagcttgtgttgttgagcttgagatggctagtgttgacttcgcttttatccaacgacaatgagtctttttgatnnnngataaacgatatgtcgtaatgaatatgtaatagagcaataataagatacac

SEQ ID NO: 39057 - DNA, 3983 bp, Cannabis sativa
ttgatgaaagtcaaagtgtgtggtacatgaatttggtaaatgtttaggtaagtgacaaatcagtcgtattgttagcttcttaattaataactttatgaaagtctttttattttgtaaagtagtctttacaactcacattaaatcagtaatattgtcttttaaatttaaaagtgtaaagcctttttatggtggtcaatgataaaatatataatagatcccgatgaagaaaaaaccacactataataaattacgcatataattagtgttccattggttggttaataatatatgaaattgtattattattttctcatgaaaaggcagtgtgtggtcccaaatatgtaaatttcatacaataaatatttttatatcaatataaaatatgtcttctttctttggagagagaaattaataagagagaggcaaagggtggtcagtgtcaatagctgtaagaagccaaaactcactaataaatattgtctggttaggacattaggaagaaaggcattttcattcatttacatataattgatttaagagagagagagagagagagagagagagagagaagagaggatattcatctccaaagttccttcataagatgttggtttgagagattgaagctgccagcatgatctggtaacatatccatatatgcataatgtatataatatatattatttatagatttataaataattaaatcataacaatttttcattcaaaagttgaacgattgggcagatctgttttagatctttataaaattcgttcgagtaatgaaaataataaatggtggtatgtttccacaccttaattttttgagtaaaatatactataaggatttatacatatttacatatatttctcaatatagataatatacataataagaatatatatatatatatatataaatggtatatggctcgtagtcgttcatacccaggtcatcttgtagcttcaatcactcagaaaccaacagtatataacagaagcagttcgttctgcctttttataaaaagaattgtttcacctataatgatggtcacactttgcagatcgactacacaattaatgtcatgaggtaattattggacgcttataaatgttaattaattatttatatctgatacttaatatcacatgctcatatatattaatatgtatacacacacataatgctcatatatatatattattattgtatttgttttatcctaaatctaatcacttaattgtttgttcaatattatgcatacataatagatcaatacatctcatattaataagcgatagaaatttagatcaaaaagcctatacggttaaaatattaaacgaccttagttccctatatatctctagatctccaggatcgatactgtgtggcctgaacgatgtatatattctcatggcatgtgagttatatttgtctttactttattggaattagttaaagtacaaattaattcgttatataaagaatatatgtatatataaattatatgtatgtatatggttgttcttatgacctgctgcagaagtaacatataaatattcgggttaaattgtcccttgattagaaaaatttatctggcttatctacaagttctttgtacaactacttttcagtcgtatatacaagtgtttgaatgtattgggttataccctaacacttctgtatacttcttcaaaaccagaaaagaaagagcttatttggctgcgtttttagtttttttaaaaaaaaacaattttttgtcgttttaaaaattgaatgatgttttacacaaattttttaaaactatttaaagtttttttcttattaaaaataatcaatattttaacaccataccataccatgacatgaacccatttgaattcaagttcggttcccggcaaaatgtaaaatataatatgttacataaaacaaaaattgttttggaaaataaaataatatattttaatgttttctgttttctagtattttaaaactcaattttcaaaaaaaaaaaatgtttttaaaaaattttgcttaatggtctctattaatatttaaaaattattttcagttttgaaaaataaaaaacaattttttagttatgaagtcacacagtgtcaaagaatccaatttatgatttaatggtactctttcatgtatgtgtaatatataagaatacacataataacttttctactctatttgttaaaatatatagtgaagattctacattctctaatattatattttatttccatcattgaaatattatgtttactttaaatatattctattagttaaaagactaattaagaattttattcttcaactttaacatgtatcaaattataatctctgaataattatcgttaaaaatttccttccaactatatcaagattgttagattcaaggatttctctcgaatttcattaaaattttactaaaatgacgattgttcatatactaaatcatgtctccaaaacattgatatctaccaaattgtgtcccctaaatttcgaaataaccaaatcgtgcctcctaaactttttagactattaaaaatttctctcaaactattgatcaaattattggacttaaggagtctaattttactaatgaaatagtaattactttggggagagaaataagaaaatagaaataatattataaaagatatttgaagatatctacatggtaaagaagaatttgaagaaaataaaaaacagagataattttccttacttctttggaaaatcaatatttgaataagttattataggagttttctaatgcattatttctaaaatagaaataactatggggagttaaaaaaaatctcttttgggtatttatgtttgtttatcttggttcgttggaatttgaaatacgaattaatttgtgggaaaattacaactaaatgtggagaatcaaatcaatgaaactctaaacaatcgaatgattaacaatgttaagcttagcaaattaagaacaataatcgacagtaaaacagggccaaacaaattatgtaaaatcagaaaacgataaacgcaaaaaataaagaaatcaacaccaagatatacactagttcaagtcaaatagatcgatgtgatctatggatctactctagttctggaacaccaccgaaattcttcttaattatttaaataaatatctataaccgaatttcattgctgatattttagatgagatcagaatctctcaactattttgaaatatctttaacatcttttcaaatttaaatatttatctatagggtaggcgcttacctagtcttatttatgacaaagatggtgccttttgtcctgataattttttttcaacaaatattgtcttgataaattttttcttaacaacttttgtcttttcactatttaattaatttgaaaaattattttttattccaaaaactaaatgattaatattttttcaattaaaactagattttttcgaacaacattatacaactatttatctcttcccttgacagtgttttaaggtaccaattcgacaaccataaatctataattctaagatccaataaactagattatttattaagtctcctcagtcaaataatcgttatttattaatttcatgattattccactataaatatagtattgaactaattaagaattatatttactgagttttatactacagtgtccattgttataatcaatttgagtaattatccctctatatgtcggtttgtaattagttttggtcaaattaccattttactcttgtaattacttctttatccttcagtaccattaacccactagtggaagtataatttagattccatctaaatttgtttacaactttccattcccagaataaacacttaatggaaaccaacatttgatccgttaggaaagtaaggattccataattgtagatcatgttcctagccatccacattattatatatctaaaacagatattgtaagaatc

SEQ ID NO: 39058 - DNA, 1527 bp, Cannabis sativa
ataaaggcctcatattaactgttaataaatccatgttatgcattaaattttaagttaatataaatatcttgtgtatttgttgttattggtatgaataggagctcttttaaaatgcattttacaaaattttaagtatatttcctcatagcacaagctatatagaaatgtcagttctattttccttacttgtgtttacaatcattttattgtaaatgcattttcattctacaatatggcttcatctagttctggtctttagttcagtctttgaagggttttatgaaccagcacttcagaattgtttttcttcggtatcaagtcttctcgtgttgctaaattgttttgaacaactcaggtggatcagttttagaacaacttgcaagtaactggagtccactgtatttcgcattgaagaattataaggaagtaatgtccactgagcaaccttgtgattttgcttacgaattcggggatgggcaatttgatatccatgagtacccacaaggctttcctagaccaggtgagagtctctagttactaaaatctccatgagtactaagtttatttaaagaagacaagtgtattgttcctttcaatgatattgacttaagtactaactgtatttagctactaaacatgaattttgctacattttgtttcagctaaacatccctatcctttcaacgatcaagttgttgtatacgttcgtcacctgggaccaggagtgtctatcgggcaagcatggcaagaaggaaaagcactagaacaagtgccccgaaagttatgtagtgagatcttgatggttagagattattccactgcatcgaggaaatgaacggtgtcttgtattcataattgagaaagaggtaactaaatttcctgcaattcctgaaatattgaatcacataagacttaatggtagaaagggaaaacaggttgaattttgtgctgtgcaatagtaatcagattagaaaaaaaaaatatacatatagggagcgttttacatgggggcatcacttttgcccttaccgtaatagcgttttctgtttttggtatctagggaaattatattctatttttttttatacgacaggtataatagtaggcatcatgtttgttttcgagaatttctgaataatttacgacattaaaaataaagtttaaaataattagttggacgcatataaaataaaaaaggcgtgcatacaattgactatttgaatcatatttttggcaccataaattactcagaattttcccaaaacggacaagatacctactatgattataatgcatgctatcatctaaaaaaagcggtttacaattctctatataccgaaaataagaaatgtatttaccgtaggagcaaaagtgatactctcgcttaagaattttcctataaactactttcctgcaattcatgtaatattggtcataaagactcaaggtaaaaaaggatgtgttactacacaaaatagagcctttggattgtgttgcaagagagagtttgcacatttttctactctc

SEQ ID NO: 39059 - DNA, 2386 bp, Cannabis sativa
taaaataatttccaacatattccttacttgaaattgtggtgagaaaactcattgaagcaattgttgctttaatgagtggatgaccttgttgatttttagggttcgtatcagagtcacagcgaacgagaaatcaaatttagttaaaaaaatattttttaaatctgataggaaccttaaactagatctcaacacaataatacacaatacaaacttaactaatcagtatagatgtttaccccttgttgcctattagggtttccttactagtttttcgtattaacaaaataaacatctgatccagtataagaactcgttgaagatagggctgaacatcgggcgggtttaccgggtttcaggttcgcgggttcgggttcacgagtttcgggttcaaaaaaatgaaactgaacccggacccgaatagggcacgggttggcgggttggcgggtttcagttggccgggttgaccgggttggcgggttgacccggtcaactctttaaaaaaattaattttttgttcaaataattattttttttatttttcattaattaattaactctagtttataaattctaataaatgtattacagaaaatgacaacataagaagaataagaaaaaaaaacacatcaaaacattttaaaaaaaatagagaaattaatcaatgtaatagtgtatacattgaaactataaaaatgcaaatatttatttttatttaggagcagcattatttattggggaataaaaaccttagtgaaaaaagcggaacggtcatgttgtggcgaagagtcgatgaatggtgagtgcatttttagaattgaagagagctctttggagttctcatgatgagggttaacttatgatcatgcacatccgcacccacataaaacatctgatccggactcggacctaggcttccaatagtactattaagtagtaaccatcccataacaatgatgatacgaatgatattgaaaatgagggttagggtgagggcaatgagggtcagcaaaatatgtgatacatatataatataatatatctgtcgtctcactctatcgtgtgtgtggtgaagttcaaaaattaacatataatatattaatatgtaataaaaaaatatataatgtatttatatgcgggttggcgggcgggttcgggttcaacccgaaacctggtgtccccaaaaactcaacctgcaaacccgcccgaagggcaccgggttgaacccgacccgcccgaatatttttttaaaaaaaaattacgggttgaccgggtcgggttcaggtaggttggctggatcagggtctaacccgctcaaaatgttcagtcctagtcgaatatttcacaccagtgtcttccagatcagcctcaacactcgtgaaaagagtaggcttttagatttaatgggatgaaaataattttttgattataatgtattctcaattcatgagatactgtgattgaaattgggaaaatacacacacacactagtatgtgtatgtgtgtcgagtagagataaatggagagagagcgagtacccgagtagtagagagagagattgaaaagctgttttcaagttctattctctttctgttaatatattattctcttgttatatatcatacatataatgttttaaaaacatatatttaaaaccctttttaatcatataaaataaaaaatatttattttaattcaaattcaaaaataaatatcatataactgaataacataaatcaattatattcctttattttatattatattttaatttatatacattatcttataatatacttaatataataattaaaatacaattatccatttaatcttatgtattttataaataaaataatcaaacaaaattcacatgagctcttacatgtcaccctacacgtgtgagacaagacttacatccatattttaaagcctaaaattgattttttaatcttgccacaaataagatttatatttattttgccaacaatattaattacttctcattaatttcttatttcattaagattaaaataaatattatatttaactaattaatataattttaacaaataaaactaaatacttaaataccactttaattatacaatacataattattaagattattcaaaataatagttttctcaaaattaatattttgcccttaagaattatttcttataaaaattaattctatcttaactttattcatcaaattaaaccttcccttatacagtgttgtttataggtaatttgggatcattgacctatatttgaaacctccaataaacacttaattattattgaactcgtcaatagaataatttagtttattaattctattattactcaactataaatattgaattgcactctttgacaatat

SEQ ID NO: 39060 - DNA, 1742 bp, Cannabis sativa
aaccagttcaggtggaacctgaacttgtccagggctttcagaatagggtccaaaaatacattgacttggaagaagcccaaatagtggcttacgaaggatacttcccgactagggtatcgggatatgtgcctgtagctcaacttcttggagctccatctcttgccacttgccaaacgagcgggagacaattctccgctactctaggagacaatcaaagtctcgctttagctcccgaaatatcacactttggggcacccatgagcgatccctcggggttgagtatccaaacttcgtcccaatccacaccagccaccagcatggcaagagcttcgcagagctccaggagtgagatatcctcaaagggtagtacccggatcaaggaaaagcgacaacaaagagggtataccccccattacatcaaataaatggagcttacagatactcaggagcgtgtatacttcaccactcaacaaaatcacattatcggaagcctcaacacttgtacagggatagctcccagagagatcccaataaaagattcgagtaccacaacgacattggccacaccaccaacgagtgcaaaaacctaaaagacgaaattgagaacctaatccgattaggtcacttgtatgaatggatcaaaagtaggttactgcacttaaatctggttccaacagtaggcccgttgctttatggaagaacaggaggtatgcccgaagggtaggtacctcccagaggagcgcttcctctgcaggcgcctggattaccacctcggtcgaatggaagactagccatgatctttggtgggcctcatatttgagaaacaaccaagagcgagatgaaacgttacgctagagccataaaacacgatgaagtgtgggaggtcactcaactctcagcgcaaaggcctagactcatggacaaacctatcactttcatagaagaagacgcgaaaccagtacgcttcccccaccatgaccctctagttatagaaactcccatcgccaataaggtcgtggctagaatattggtagataacaagagctccgtaaatctattattcaaagaagcattcatggctatagggctcacagacagggacctatcgcctagtggttcacagctcacatgatttaatgggatgacattcatccgaatgggggaagtaaggcttcttgtcaccctgtgtcctgacacccccacaaagcactttcaagtattgcacctttttgtggtagactgtcccaccgcctacaatgccatccttggtcgaccggccttggttgattttagagcgatcacctccattcgacacttatgccttaattccctactcaagaagctagagtgggaacggtgagggggaaccaaggagaggtgagacaatgttacaatgttgaagtacatttgtcagttttagtggtacaaagggatgaagagcccattatgacagaacaagacgagttggatccccatgtgggatccaaaacaactatagaatctatggaggacatcaaggaagtaagtatgtgtgacctcgactccactaaaattatccgcctaggaaaaaacctagagccggaggaaagaagtaagatcatagatacgttaagggcagctacggatgtctttgcgtggtgacacagggatatgactagaataagcccccacatgatcacccatgtcctaaatgtcaaccttgacatgcctccagtacagcaaaaaagacgctctcttgatct

SEQ ID NO: 39061 - DNA, 1869 bp, Cannabis sativa
ttgttgaatttagtaggagacagttaactttttaggatgggaaattcatttacttctatttgtatcacgcgttcatgtagattgatctataacccttcttatggaagagtttgaatatcttatatattcattcatagtgaaataagttatgagaaaatttgtgtgctacggtgataacagaaggttgaaaattatgattcagtgaagtaaaatctgtaaaatttgtgcaatgcggtgatataaggatgagaacttgtgtattatattattgattgtagttgaaattaacaaatggttgaggttaataaaagagaaaaaatattgtctaatttatatattttctcttgatatattaacaaatgtctattgtcaaaaatttggtaaatttttgaatttttagcaaaattatattttaatgtgataaatttgatattctctttcctttttattaattttggcaaataaaataaaaatatataggaaaaactgatgcattattagttcttaaaaaaatagattgaggaaaaaaattataaatttagatataaaattaaaagtcttaaaaaaaaaagagttgggtcgcatctgattcgatccgtataaggcaggttggatctgatctgcataactggtctatcggggtggggcggggtagatcattacatgatttgaatcaagtcagatcatagctggatcatattcgacccactctattgacactcctaactgccacccatgaatcctcaaataaatgaaaagtgctcacacgtgtaacatcactcaagagtcgtgatcaagaaggcacagttggatttggtatggcaagtacccaatgtaggcacttctttgatcacttgggggcatacatgttatgttatggtgtacgagagccatatgttatacaagcattcaatttttttggacatctatgtagacgttactcccaataaccgagtttcttaagacatgttatgtgcaagtgttagtcaagcggtaacagttaaagtagaaaaaaaagtaaatatgtattggaattgaagttttattaagttggaaataatttttgatttaactaaaacaaaattctaatcacattctactaaggcttatccacatagaaaggtcgcccagaaaacgacgaactaacacactaaagttaaaagctaaaacaaaaaagaagaatgaattcaaagaaggtcctggagacctgtcacattaacaagagtctcctccatgcctttagtctccccaggaggtgcctcaccaacacaaggagggatgtcgggacgcttagggtagtatccttcaactcctgaagtttctccaacaactggttcgctaacatttacggtgaagtcaatttcttcaaaggattctacagcaaagcacttccaacaccgcttaatgaatcctggaacttctttcccggggaaaccagtccagttgaacaactgacacttactattggcaaccctagctgtgtaaatggcattgaagcataaatcattgtagaatgtgacatcaagcatagcctatttttcaagactgagtggagacaattggagatgtgaccttgaattattaaaaaaaacttttcaaatcacctttcaaatgattaattttttttttaaaatttattttatttataaatatttatttatatgggtcaattaaattgtgatacgtgtacatttttttgtccacatacagtctaacatggaatttcgccgcaattcacactttcataattttacatacaaagttgtaagcttgaacttttctggccgttaaaaattctctctgaactatcaagattgttagatttaaagacttttgtcaaatttcattcaattttactaattcaatgat

SEQ ID NO: 39062 - DNA, 2169 bp, Cannabis sativa
tctcattaaaatcaccaatcacaagccaaggtaaaagaggggcaacatctcgcagcctctttaaagtcaaccaagagtgacaacgattgcctcgtttcgaagagccatagaaagcagtttagtggaaagtaggaccattgccaaaagcaagatagcagtcaaacaaattaaaattaaaattcaacagagttatagtcacatcatctttccataataaaagtaaaccatcacctaaacctactctagcgacttcaagtccattattaaaatttaaagcttgtctaaaatgagaaattacaataggacattgtttagtataataaataatacatgaggagatcgcttcttgacaagcacgaagatgatggaatgcgctcggattccccagaccccgcgcattccaactgacgattttcatgattgattgcggggctgagtcttagccaccacagatttgtcaaaaaaaaaaccagattgatccatttcagaattggaagtgttctagtttgtttcctgtccagtagacaaagttggataggattctgagtgttgtggacccctacatcttttgagtattttcctgatcgaggtgttctgaggaagtctctttggctgtcgatttggaggacaattttctgtatcaattgtttgctgcaatgttgtgttaacattattaattgtgatttgcctcaatgttgcgtgttgggagccagtcccacttggaggagcattaacagggaggcatgggcgggtaggttgcaatggtattgttttttataccaatatctggcatataaagttcagtcaagtcatcaacatctggaatttccattgctggtgtgggacagtgtgatgctgagattggtgaggccatattagtggacaacattccaattgaatggttggtaggattatttagcaatgttggtgcgaacataaaatttttggtagttgactttaatagtggcattattctgaacattccttgtggaccaaacaaagtcaagtgaagtagcagcaatcctaaccgtgggtaaggggttattcgtgactggtactaaactggagtgatgtgtttcagaattggtattttgttgttgatcagatgattatcctggtaatagtggccaagggtgagaagcttgtctgttggagaggtttggaattgcagcagtaaaggatttttgagccaaacgcgtaagtagaggccaagcatttcctttcgaaaaattagttctgtacctgtcataactattatttggtagagcaacccctttcaattaaggtccataaagtagatcaggctctattccattatcgattttttccatcgatactatgcatttctggtatagatgaccaagcctaccacattccatgcaccattcggggagtctttcataacgaaattccacccaaaatttatcacgaacttgttggagtctaatgtttcgacccttgagcagaggcttagtgatatccattttgacgcgaaatcttaagaatggactccaaacttcttccaccgaatcatcatggacttctagaaattctccaatgatgtttcccaatgcttttaccaacgatttagacttactaagaaaaggaagtctatagcattggacccaaaacggagagtagatgagatcatctggcgagacattttgtaaagcacttggtgtgtacaacacaatgcgatgattttgaaaatgaaaaagctccttaagaagaaccctctgtttgtctccttcgcatccaaaggttagaacaaagagatcaggaggtttttcagtgattttagtgtgaaatctgccattccaatgaaccttcatctatttttgcaaagtagaaagaaaaaccatttttgttgtaagaatttgtgcaaccagaacattatcaatactagtagttaagttgtcttgatcatcatccaaaatcagtgttgagtcgtcctcatcagtgaggatcatcgttcttttcatcttattagttgatggattcataattcaaatggggggaattcagtgattgataagaaaagagaagatgcaagtgcgtggagcggttaagggaagtaacataaatgatcaggaagaaaagaagaaaaaaaccagaaagtggtacaaaataactgctttagagcactctaacggcagacgctctatttta

SEQ ID NO: 39063 - DNA, 5236 bp, Cannabis sativa
catttccacataatattgtcacaatccaacacgtttcagcacgtatttatctgttttaatagtaattaatattatacgtatatttataagtaattgaccaaaatatgttgagaattatggagtttcatctcaaaaccaattgacaatgaataaagtagtctatgttcttatatatgactcaatacttttacatttaatccatgtgggacaatgttctccaataatgtacaatttaataaagtttattttgttataattaagcacacaaatagttgtaaagagagagtatgggtgtttatcgattgatttgattttaatttttttctaaaaaaattcaacactgaaccaaactaattaaatgctcaaaccaaactagattaaggtttgtaattcataaatgttctaaattttcttttgctaaatttttttactttaaagcttatatataataggtaaataacaatatataaaagtaaatattcttaaaacaatattcatgtaactatcaatattatgcttaagattgttccaaaatattaatatttaactaaaaaaatcatattaagtttatataaaatataaggcagtttgattttgtttaaactacggaaaagaattgtacgtaaaatcatgactgaaccaaaaagttataaatggtcctaaatttactaaaccgttgatattgaattcattttgtccagtctcaaacgatttggtgttggttggggtttgaaaccacaaatcacaaattatataaacaaccacattcgcaacctcctaagaaattgtgtttgatgcaaaagaatttattgatgcaaaaatttagacacagaattgtggccagcactcgctcgctagattggcgagaggagatataagttatgtaattaaattaatgagaaacacaaaaaatttatagtaaatcactcactatgtcaggatggtaatggagttacgtctaatttgagtttttatttctcatgagaattacaaaaaaaactagctaaggcaagacttccaatttctagagagagaatgtagagagaaaaatgctcaaaccttatggggacagaagaatgtgaaaataagctacaggaggtctccttttataggggaggagatcctaataacatatttataaaataatacaaaaaaaatgaaaattttactttgggctgatcttaatgatctattggtgaaaattgacaaaatcgtcaatttttagagtttgaatctcatttgttgaatcgtttttgggcatgttgtgaaaaaaatcgcaactatattgggcatgaattttggacttgaaatattcataattgtgatatgggtgtgatacatgactaaatatgtatttgaaatgcttcaaaaaaccaagttgaatcgtcaaaatcacaaattaaaatattgagggagttatgactattttactaaaggttattcagcacccagcgaccaggttgacaacccagcgaccaagttgacatccagtgcacacattcaatctggatgctgggtaagtggaaaaacgtcacagacttgtattttttgatgtctaactgatatgttgacatcacctggtcagattctttgttttggtgaagttgttcaccagttctcgaagatgttactttttagtgaaattgggtagactcgaaactctccaatttttttcatatttcaccttgttggaagggtgaaatatcacagtatgaatttgacctgtcacaagtcgtagctctcatttactacgaaaaaaagtcagatggtcaagacagaatcagattttgataagcagaatcaggcgcaccaacctacatatcaactgggaagctgggtgcttcccaaatgacttctcaggacacgtttttatactctgaaggcgttcgagattgtgaacgaggtatcgtagcccatttttgacaaaaataataagaatatctggagaaaaatttgtatttgaggagcacattcatgcgaactaggttgcacgtcaacctgggcgtagggcccagtgcccatgtcaacttgggcgttggggccttgttttggctcccaaaggatcttgtttgctccccgagatcaattgtctctttgatatttttgaagacgaaaaagatgcttggaacattttttgggaaaatgactagaaatatcccaggttgataaaatttcaacctgggcactgggcccagtagtagtgtcaacttgggtgctgtgtccagcttttttcctctagatagttccatttaatttttggaaataatcgtatcttagttattattaaaaatggagaatatgcctgaaagacttcttggaaaaattgattggaaatagcctagctgacaaaatgtcaacctaggcattagacatagcaccgaagtcaatctaggtgatgtatcccagttttggctcccaaatgactacgtttgttccctgaaagcacccaaatcttaatatttgacaaatacagaggtttttattgaaagacttcttctaaaatgctaagggaaatggcctaggttgaaaaagtgccaacctgggtgctcgatttagggctatacgccaacctgggtgttaggtccctattttggcctataggttgatccatttcttttctagaaagtacgtaattctttgttttttatggagatgaataaaatgatcagtatacttctttaatattgtgattggaagcgccccaggttgaaaatatgtcaacttgggcgttgggtgtactaggtgcccagagtgcttggaggctcaggtgctcaaaaatgaaagcacactgattctaattatggtgcctcaaatatgttcatgacaagttttattcttgtaaaagtacaaattttgaaccatttgcactaagaaggacccaaaaactgaaaccctagttgggatgtcaacctgggcactgagtgaaaaccctaggcacctgggttgacttatggggtgcaattttgaatattttaagtttccatgcctttgacttgattctttcggtctttttgatgcagaatactaaaagattttaagttgaaaacagctttgcaacatccaaacacccattccattgttcccggagtcaacttgggcgcagggctagggacccccccaagttaactgctatgactcgggattactcaactcttggatattttctttcttgccacgtgttagatattaatatccacatcaccagggtcagtattttggtaaatttatcccccaagtcaacgttacacttgtgtgaggttgacttgatgacgtgaactaagcccatttctctcgaaactaccaagttggcatcaattttgacaatctcagcaattattttctattcttcaatgaattctattagaacaaggaatttttaattcctattcctctttgaacaaggggattctaaaagagaaaagatagcaattttttctctctttatctttctttttaaatttaaatttaaatccattccttattgacttaggtatagaggacatcaattgctataaatagagagctcatccattcatctttcccacctcttccacacgcttagcacaaaaaattgagagcctaaaaatttagcttttatcagttcttcaatttcaagtatttccttccaaaatttttgaactatttttttttcttctcctcttgtagaactcagttcaagaattctaaatcttgttgtaaatacttaacgcaatggtatgccttgtaaaattcaaaaataagattttcatatgagttgttttagctaaaaatttccattcctgcaaggtgcactttgtctgaattttctttaaaaagaatgatttgagctgaattaagttaatattcagctggtgaattttgaggagaattgtgtatatagcaaatatgcctcgatgtgagaaaaacttgcagaaaacttaaagaatatgatcgactactcatgacccaattcatttgtgccaagctcatattgcaaaagtccaaggatctagataaggctcgtggtggaaaaatcatgatcactgagttactgattgtttcaattgaaagcaggaacccaagagattgagccttcaaagtaagacctcttatcttcagttctattactcagtactaagttgaactaatatgggatgagtattcactcgtcattaggaagcttaggattggatgtcctagcagttctcaaaacccaaactacaatgtttggtcaaggttccatatgaatacaggtgcattcttgcctggtttgtgtcaattactgattactttgtggtctatccatatcagataaatttaaatggttactcaattttatctacattcttcatcttttattgtctgtggaactgacccattctaactcctcatgagatcaacttcttgtgtgatctaaaaagatgtcccacccacaaaaagaatgacttctactatttccatcaatttagtgtgtatattaacaacatcattaaaagtaattatggtctttctcataaacaatacttttatactcatgtcatcccctcgtgacatgtcatctttcaaaaggctggatcttttaaaagacttactccattgaatgacatgaagcgtagagtcgatgttatgttgactgatattagcacaatatgattatttcatgtaggctataacaaatttcttttcttttagtatgtttctttttcaaacaaaatagtcttgctcaattggttataatattttagctcatttaatctacaatcatatatatttataatttcaatacaattattttgtttataatacaaacataatctacatgtaataatttagactatatcattcaatgagtacaaatatatatggaaagattacaaaaattaggtgatgtttggttagtagtaacaaaaatataagaataagaatgaaaataaaaattagaataacaatgaaataaaatgtgaaatgcataacaaaattattaattttttttcaaatctcacaatttcattctatttcaaaagaaattactttttatttcattagctctaactaaacattaactgtgtatataaagaaagagagctagtaaaataggccatatgagaatggtgaaagaagtgactgggttatatgcaaagcacttttctaaaacccttaactgtattattggggaaaaaataagataaagaaaagaagaccctacttatcgtgtgcaagttgccttattttatatccttcaaagatgagttgaatt

SEQ ID NO: 39064 - DNA, 1516 bp, Cannabis sativa
  modified_base (806)..(822): a, c, t, g, unknown or other
tgtaattgaaggatcgttctccctttttctcaagaaaaatgaggctatgcgcacatgggggaaagggcacaccctttacctacctaggctttcgtactccatacgccattgaggcgtgtcgtgtgagaggaccatctgaccgttggctagtaggagccttcttcatcgtgtggtgtacaactgtttgtagagactttcgcatgcccttggacacatgtcgtgtaaaggtttgtcctttacaaaatagtctctaaccaggctgttggacaaaaagcatactcaagggtgcgtacacgtactaccacgacttaaaacaggggacaagatatgatcctttgtcaaaaaaaggtttaactgtctatggggtgatattttgcaagatgttgacgtggccaacgtctttaaaaccctcatcgtctttcagattccttacttaagggaagttactcccggaagccatcgtctcttatttccctccaggtccgggagtcatttttatccgtagctaccacgaataactcgtgttatgaccgtatcctctcctctgattatgccacgtgtctgattgatgaaaacttgaataacaatagctattgttgaatatggaatgagaaaaaagaactttggttcaattgggagattgacactttctcaaagagtgcatttcagagatttgtcctatctcgaagagaaatcttttatctaatattattcaatatacaaattattatacaaaacataacttaaaaaattataaaaataatactaaaataaaaatactaacacatattataaaatataaaatnnnnnnnnnnnnnnnnntaatatacaaacacttagagtaatgtaaatgtgtatttatttaacttttcaatttaatttctatttattcatattatatataagttatatttaatttaattatattaataataaaataatatatatgaaaaaaaatataaaaatagatttttcacaaaaaaaataaaaaataataattatattaaaacacaaaattttaaagctgaaaaaataccatagtagtaagcccctatagatggagtcgtccgttatttcataataaccgactctatagggttcctacaacgcccattactctataataaccgacgctattgagatcttatgaagttgattacttcataataactgacgtcatagagtttttatgttgtcgattatttttcacctatagcgttgcttaaaacagtgttggtagcgaatttatcaaaatcaatgctgatgaaatgctttaaaaattgcctctaaagtctaattttaaattaatgtgattcgattaaacaatgtgtgtgagtttttttaagtgttttgttcaaggcatgaaatctattgaagatgattgatttattatgtgaacgagtgaaattgtgccacgtatacactgtgtacaggtggacattacaccatggcagttaacagtcaaaaatagatggaaagggctaagtgttaacagaacacgagtttaggaggtttt

SEQ ID NO: 39065 - DNA, 1630 bp, Cannabis sativa
taaaaggataacatcatgctatattttaattttatatcacttatttatatctctattaaaataatttaattaattacataataacttctcgcagtggagagagaagtacgtgttgacttgtggtctttagggaaattacagagaaaattatgatggaaaatacatgaataagatctagttagctagagaaattcattcattcattcataataatcttttagctatatatgtcaattattgtaattaaagactttccaaaaccacagcagccacaccatatataaagagcattattataatgtaggaatttttcaagccaagcccttttaatatttataattattatacatatgatcctaataaaaaaaatagcagtaaacatattttattttatgattttgttgtaatcgtactttttttttaactattaagttttaattcagaaatacgtggcaatatattattattcgactatttattaaattagttaaagaaatatattaccacgtgtttttgaactgacatttaacagatttaattgacacttaacaactaaaaaagagtacaaatataacaaaatcataagataaaatatttttatgctacttttttaattaaggtcatacatataataattacaaatattaaaagggtttcactacaagtatgcatataatgtatcagtggtgtctaatattatttacagatggtattttacaattaattaacgatattttatatataaattttttttattaaataaattatataaaatttaatacttaattataaaatagtattaaatagcattagtactttttatcactctatatatcattaaacgcacatgaatttctataatatttttttaatggtgctaaacatccacttgcacatgaatttctataatatttttttaatggtgctaaacatccacttgcacatgcatacgaaaaaagttgtaagggtgaatttcattggttgaagaaaagcctactcatgaagttgaactttcctagaaaattagtgaagggataagtatttaggttatgtttgggttatgtttggttggaaggaataaaaacataagaatagggattagaataaaaataggaataggaatggaatgaaataaattttaaaattcaaaaaaaaagttgataaaaaaattattaaattttttttcatcatatattggaatagtctttctttctatttcaaaatagattagttattccaccaaaatgttggaaagggttattccaatactttgatatgcaaccaaacaaaggaatggaatgaaaattgtttcctttccattccattccatttcattaccttcaaccaaacgccaccttaaatttttcaatttgtaagtgacataaatttaataaattttttagcagtataaatacctaatgtgagtaaaattttaattttcgtcattacactttgtttgaatttattgaaaaaattaaaagtaacggatatatactatatgttttatttaaattagtgagcttataagtgccttatttaagatactaagggctcgtttggaataccgtattaggtcgtattatattatattgtattatattgaatttgattatatatcatatttttatat

SEQ ID NO: 39066 - DNA, 1954 bp, Cannabis sativa
atacccaaaattatgtatcaaaatatatattatctacagtgggatatggtaatagtgtttataagagtagtctctcatttaaagtaaatattgttattaattaaaaaaaaatgttattgcatgttattgttatttttgtgcttggtacgtagttagttttagctagccagcaatctatatatcacttccaaattccaatcagtgagaactttaatttgctaaaaataatatgagatgcatctataaatactcactaatattaaagccaaaccttatatactataatagtaataataattaattgtttagcctaccattgccaataattataaaacttaaaatcacaacctagatatattgaatcaaaattggccaacaataactaaaatatattataaatacataattaccaccatataataatgattaaatttaataatcctgaccttgagagagcaaagtaactcaaatgaatccaaggacacttcaaatttcaaaatgcaaataacaataaataaataaataaactataaatgccctaattcccaatgacagcgtggctttggctggcataattggcttctaagccgagccaaattaaacaaaaactttattattaattagctaagtggggtcaactagattccaaaaaaagtcaaaccacgttataaatattagtatataaatatccaaaaagacaaaaacaaaaagaaggcaaagggctctattctatgggctgttgtgtgggtggctggctttggattagaaaaatgttaaaaatattataagtctctaatatcttcttatacgttaatatcgttattagttaaattaattattgtgttatataatttaatataataattttaaaagagtatcgctaaataatcataatgcgacatgtctagaagtactaagtactactggtacccaataaaaatactttcgattaagcaccaagtaccaacccaaacaaagcaaagccgccgccaaacaaggaatttacgtgagccatgatgagttttatttatattttgccatgcttctagatgagatcatcgtctctttatttcataataacaaattttaataaagccaaagatcttaccactaaaaccaaaagcatgcaataaaataaattataaaaagtaaaaaagattgacccataatgcatttcttatatattacattctatatataatacatggaatcttggtagttagatattatgaattgtatataaatattttattattattattattgttcaaataatattaattatatattaatactaattaatgctgatatagctcaccctagtttaattcttaatattatagatttttcttttatatgaatgatgagtattattaatataatattggtataaaatattgattattgtcttgctataaataattactatggattaataatttgtttcattgagattgattattagtttagtgtatcactaaagagaagtatatgacccaagaatagacagctggctactaaaggaaatgaaagcctagaaattgtgtgtatatgtacatatatatacacataataaaaaaccaatacaatgaataattattgttcaaaaaaaaattatgtatgaaaagaactttggtccaaaaaaaaaaaaaaacttatagttgacagttctcattatgtcaaccctaacaataagtcatcattaattataaggctttacaaaggtcaaattttatggcacatatttttcaaaataaatatatgtattgcccttaataatttaaagatgcagttatgcaatcgcatcaatctctctgttttctttttttgcaaagttagttttgctaacccctatttattagatcttaattataactaaatttctccttgaatattataaatatatatacattctcattatcacaagttttattcgttgatttgataattatat

SEQ ID NO: 39067 - DNA, 5373 bp, Cannabis sativa
  modified_base (3234)..(3239): a, c, t, g, unknown or other
tccagatctagatcacaatctcgggtcccagtctagttgcactttgggtcccaggtcacgatccgagtcctaggtcaatgtccgggtctggggtcgggtctttggtcttagtcccaattttgatgcccgtgtcctaggtccaggtcccccatcaaggtctgagtctttcgtcccagtccgagtccaagacccagtcggggttcaagtcttggcctgagtccaggttcaggtacctatctcgttttgggtccagatctgggttcgagtctaggttcaggttggggttcgagtctcgagttctgatctgggtctcggttctgaggcccatgtcctggtccaccatctaggtccgggtcctacgtcccagtctgggtccatgttttggtttgggacctagtcccagttttgatttcgattcagtgttttgcatcaggtgtgtgtctgggtctggatccaggtctgagacccagtctgagtctgggtccgtgtctgtatccggatccggatcccagtctggctctgggttcaagtctaggtccgagttcgtgtcccgggtgcaggtctaggtctgggtctgggtcagggtctcggtctggatctaggtcctaagttttgatctcggtctgggtttgggtctgggttcgagtccaggtttgtatcaaatcgttatcaaggtcggagtttgggtttgggatcgagtctcaggtctaggtccaggcccggtcttggtctttgtctaggtacacgaccgtgtctgggcccgagttccggtctcgattttggtctggggctaggtccgagtttgtttctatgtctgggttcgggtcttggcacgatcctagtcttgttcgagtgtcctagtctggcagttctagtgtaggttccaatttgtggtcccgggtctgggtcagggttcgggtttgggtcctcgtttgggttcaagtcttggtctgagtcctagatttgaatccatgtcgcgtgtcctggtctggttctagttcaagtttcaggtccctggtccgaatttaggtccgggaccatgactggagtgcggttttaggtctcaacctcagttatatgtctcaagtctattttcatgtttgggtctaagttcaggtcctgagtccaggtgtaggttggcatccgcgttcgtgtctcagtttgggtctaggtcttggttggagtttgggtcctcgttcggttaaggtttcggctctaggtccaagtccagttacagatccatgtctagggctaagtcctagtttcggtcccgttatcgggtcccaggctacttcaggtcacagggtacgggttcgggtctaagtttgtgtctgggactgggtttaggtctgagtctgggtccgggtcaacttcctggtcttggttcgggtccgaggctgcgtcccagatccatacaccaactttaagttcagtacaagccctaggtctagatccgaatcccgctctcaggtcccagtctggttccattttgggtgtcgcatcacgagctgggtcctaagttcatgtccgagtctggggttgggtcttgggtcccggttctggttccattgcccaagtccctatcccggttctggtctgggtttgggtcccgatctaggttcgggtttgggtcctagttgcagttcgggtttgggtctcggtctagatttttattttggtttgggttcaggtctgggtcttggtcctagtcctggtcttagtccccttccagttccaattgcgatttcgactttgagtttgggttcgagttggagtcccaggtctcaggtcccagtcctagttaaggtcttgatccaggttttggtctgagtttgggctggttctggtgttaggtctgggtcctagttacagttccagttctgattctgggtctaggtttggttccgggtcttggtccatgttggggtcaagttctgagtcttagtctgagtccgggcacgggtttttcgggtcccggtcttggtccaggtctgagtctgggtccaggttcgggtcctaagtccgggtcctaagttcgggtctgggtcttcgtttggctcttagtctaggtctcgtgtttcgatctcgatctgggtttgggtcggtattcgggtctgggtttgggttcgtgatcgagtcccaagtttggattcgagttcatgttcgagtctcaatcctagtatgggtccgggaccgggtcagggatgggtccgagaccgagttttggggctaggtactggtctagtttggggtcccggtccaggtccaagtcctggtcacagtcccggtcctgttccagtgtcctagtcatgttctggttcatgtttcggtttcgggtccaaggtttgggtctgggtcatggtcttggtctagcttcgggtccttgtttgagtcacagatcaagacatcgactatgggtgttgtcgaagccctagttctcggatccctggacaagatttggatcccaatcacgggtacaagtctagtttcggttcatgtcccaagttcctgtctgggtctgggtgtaagttccggaccgagagtagggtccagttctcggtctcgatcccaatttcgggtcctgaggcctgttcaatgtttggctctcagtttaggtcttggttagggtctcgaggttttgtttcaggtttttaccccaagggatggttttttgtcctgatttgggtccggggcgaggttcaggttcaggttttagtctcgtttagggttcgacaatgggtccgattctgggttcacgtcctggtctaggaaccagtcacgttccaacatcccagtccagttccaattcaagtttcagttttggttctcgagtgttggtctaggtcttggtatgtgtccgggtcctggttagagttcgagtttgggtttgggttttggtttaagtcctagatccagacaccgactacaggtcgtgtccaagaatcgagtctcggatcccaggttcgtgttctagttcggggtcgattccagtccgagtccaggtcccggtttttgttcgggtctgagttcgtgtctcagtcccagtctgggttcgagttatgggtccaactttcgagtttggttcttgggtcctgggttcagcaccagtttttcggtcagagtcttggtctaggacccagtttggatccaggttccagtcttggtttaggtcccaggtcacaaaacccagtttgtgtccaagtcccggtatgggttctggtctgagtttgggtnnnnnnttgggtcctgttacagtcccatgtttgggttctagttcgagtcctgctcttattcttgttacgggtccgggtcagacctgaacttggcacccgatcccagacctagacttagacatagacatggatctagatacgaaccttgattcaaaccaagatcgaaacttggaacatagatccgggccgagacccagacccaaaccttgacccgtacccaagactttgactcggccggacccaaaccaagacccagaccaggatccagatttggacccctacccaaccctggacttggacgaggactcaaaccccgacccatacccggacccgaacccgaacccagacacggaatcaaaatcggaattaggagtaggacccgaacccaaacatggacccgaacctgtatgtgtgacctagtcaagtctaggttctggtaaaagttcgggtcctagggtcccaagtcctagtcaaggtctcaatctaggtttttgtcagagtttgggttatggttttggttcggttctggtctcaggtgtgggtcctagtcacagttccaatttttattctgtgtccgagttagggtctgggtctaggttggggtcggggtccgagtcttagtctgagtccgagtccgagtacgcattttttggatcccgtgatgagtttaaatcccaggttcgggtttgggtctttgtctgggtccgagttcaggtcccgtgtttcgatcccggtatgggtttaggtcggtattcggttccgggtctgggtttgtgtccatgtccaggtccgaatcccagtgtcgatcaagtcttggtctgggtccaagattgaatcccgagttaaggttcgggttctggttcgagtctcaatccatttctgggtccaagaccgggtcttagaatgggttcgagcttgagtttcgggtcttggttatggtctaattcttggttccggtccaggtccaggtcttggtcatggtcacggtcctgttccatgatcctagtcatgttctggttcaagtttcactattgggtcccatgtctaggtctgggtccaggtcatgatctagctcttggtccttattcgagtcccagatcaagaaaccgactatggatctttttcatgcctcgaatcccgaatcccgggacaagatttggatccaaatcacgggtcccagtctggattaagttcatgtcccaggtccctgtctgggtcttggtctaggtccgggactgagactaggggcagttttgggtctcgatcctaattctgtgtcccgagtcctgctccatgttggggtctaagttcaggtctaggtttgtgtctcgagtcccgatttgggtttggattcagtttgggacccaatcacagggtgggtctttgtccgagtctgggtccttgtccgattacagtattgggtctaagtctaggtcctggtcttggtcctattcctgggtcctgatctgcttctggtttcggttcaagtttcatatcacagggtacgggttcgggttgagtttgggtcagagtctgggttcgaggtgaggttcaggtttggatttcagtttcggttagggtccgagggttggtccagttccaggtttgggtctgggtccagatcccggtcctgttcctgttccaagatcccgattcggttccagttcaagtttcggttttcgttcctgagttcgggtctgggtttgggtatgtgtccgggtcttggtttgagtttgagtgggtacgagttctgatctaagtcccagatccagacaccgactacgatttgagtctaagcatcgagtcccggatcccaggtcgcgaggtggttcctaggacttagtttgggtttaaggtggggtcccagatcccaattaaacttttgaggcccatgttttggtcccgatttgggggcctgattcctgagtctgggtcccccatctatgtttaggtcctaggtcctggtccgggtccaagtttgtgttctggtttttgtgcgggtctcgagtctcggtttgagtccaagtctcgatttgagtttgggttcgagtttaggtccaagtcctagtgtgggtccgagttttgggtcccaagtccaagtctggttcttaggtcttgggtttggcaccggtttttgtgt

SEQ ID NO: 39068 - DNA, 1909 bp, Cannabis sativa
  modified_base (1073)..(1075): a, c, t, g, unknown or other
  modified_base (1445)..(1477): a, c, t, g, unknown or other
ctttcacagcccattttgaaaaaaaaaaggtaattatttgagagaatataaactatttggaaattatagaggtgtgcttggaatatgatgagttgtgattgtatatatacaagatgaaattagaaatttatttatttcttaattttataagaataaaagacaaccgtttctcaaaaaaaaaaaaaaaagacaaccacataaatattagggtatctataacttttataacttttataaaagtgagaatatttgtaagctttcactgtgtaaattacctaattaacctttattaaattacaaattacaagttttttttagtaaaaattacactatatatatagaaaaattataaaaatttatttttttatagcataaataaataataccatggggttatgagttttttttttttatttattttttttacatttatatggactttttaataccatatttttgtaaaagaagatagaaatttcatatttgtaaattaataataagttttgtcggaaaaattattggtgccgaaaaagtcaccaaaaaagttagtgtcaccggaaaagtcactgtcgccggacaaagtcattagaaaagtcactaagaaaatcaccagaagtagatatctcagctgtaaacaaaaatagaatcggttctatataacataataaatataaacaaataacacagaataactcaaaccgtttataattgaaatataacaagttctgtaacataatgaataaaaataaataacacaaactagttataattaaaatagaaccggttctataacaatattataatgaataaaaacaaataatacgaaataactcaaactggttataattaaaatagaacaagttatataacataatgaatgagtatttttggggtagatatgatatgagtgtaattatttggtggattggagcatgctgaatgaatatttttgtttgagttattttatttaattgattttttttgtgtgagtttttatcttagttgctttacagaatcaattttttatcttaaatttgttgattaatataatcggtttctttatattatatttnnnttattgtgtgttattatttgtatttatttattttgttatgaaatcggttcttttcatatttatgtctcaatattttttagaattgatctccatttaaaaaaaaaaaattaatcggttttatgagatagtatgtgttaaggtattttgttgtgaaactacttttgtttttaatttatgtttcaatgttttaggaactaatttcctctttgtttttttaattgtaatcagtttgagttattgcgtgttacttgtttgtattcattatgttatacaaccagttctattttagttataaccggtttgagttatttcgtgttatttatttttattcataataaactgttgtagaactggttctattttaattatnnnnnnnnnnnnnnnnnnnnnnnnnnnnnnnnntattcattatgttatagaaccgattatatttcaatttgtaacatcctgatattttgccttattttacaaaatatctttttaatgtataatttaaaaagattcaaaaatatttgaaaaacaacagtgggttttagaaatcaaaatgcaacagagaatgatcattcatttataaaataaaatacgataagcaaataattttaaataatatattttcagtgtgtttagaattatcaactacttaaaataaaactaaggcaccaccggtattcttgatcgtttgctcgtcagtagtctcttacagtatacatatcagaactcaccctgctcattatacgtacttccatgtctaatacatgtaggagaaagtaaggaggtgagctaaaaacctagatagtaaggaaatatttgtcatacaatatcacacataccatt

SEQ ID NO: 39069 - DNA, 2721 bp, Cannabis sativa
gggggagcactctccgctaatttacggtctcgtgtgcatccttaatcattcttttattttattttcttttataattgactagaatttaattaaaaagaatagttttatttggagggatttggagtttaataaactccatatattatacatataaattatataaataattatatggaattttgttattgtatatataaattttctagttacaaaaatttcttatgtactttattattctaatgcacttaattaatttttatatagttttttttggtgataaaaatctttttgtagttcatctatatatggcagctaaaatttcaacagttacacgtttgatataacattagtctctgagatagtaggaccaaagggacaataaacattgtagcaaaatgtgtacacttaaatttttatggctatttaagtgaatttttgccaaaaaaaattatataaaaatttaaatgtaaaatgaagtacataaatatttaggccacaaatatttctataaattgggtggcaaatatttagctcagtctttgttgattagtgatgcaaattagtattggttggcaaatattttagttttaagttaaaagtcaatatataccaaaccaattttatagcaatattagatattttaattaaggagtctaatacgacgtgacatataataagttgtcatttagagttatttgtgccataaatacttaagattaacttacatttgcaaataaaaacataagtttaaattttggcggtaataatacttaagttgtatttttaaaattttcgtaggtacttaactgttaattatcaagtcattattcacatgtcattttattattagtatatttaaactaacttttttttaaaaaaaaaaaaattaatgacctagactaatcaaaggttgtcgcgtggtaatttacttaacacttaacagtcagttacctacaaaagttcaaaaattataacttattattattatcgccaaaaatttaacttagatatttatttgtaacttagagttaaacttagatatttatgccgcaaattactctttatattatatctataagtgcaatttagtatacatgttgtctcacataattatgtggttattgtttgtgatgcttataatataataagttatccaatatcgaatagaacataagaatactaaaatagttttgaatacttaaataccatacctaacaatcaatttgtaatttgcataaatgaaaagcaggaattgtttctagcatagtagataattcatacaacgcaacagagtgggtgctatcagaaatgttaaatcagccagagatgcttgaaaaggcaacaaaagaaatcgatagagttgttggcaacaacaccacactcctccaagaatctcacatccctaagctccattacctaattgcatgtgtaagagaagctcttcgcctccacccagttgcacccttcaatgtcccacatgtctctacttcagactgcactgtagctggctacttcattcccaagggcagcaacgtcctcctcagccgcttgggcctcggccgcaaccctactgtatgggatcaacccttgcgcttcaatccagatcgccatcttcatgagaagagatgtgacttgtcagagacggatcttcgatttattagctttaccacagggaggagagggtgcattggaggggagctgggaacgaacatgacagtcatgcttttgggaagactattgcaaggttttaaatggacgattcctgaaggaatggagagcatagatttgagtactgaagaaagctcgatgtttaaggctaaaccattgtatgcccatgcaggacctcgcttgaatccttctctctatttgtcattatcatcaacattattggattaggttattttagcttcttgttatataaatattaatgatctcctttcctaagttaaacatacaatattaataattagatgcagctaattaaataattgttgttgtacgtacttatatgttatttttgttgtatatatattaaatataataaaaaggtaagcataattatggtgctttatacatttgatagttccacattaggagtgggaattttgatattgaagaggacagttacatagatactctgtgtctaggtgacatgtgacctagactaggcgacatgtctcgtggaacacgatacatggggcatgaattacgtaactttgactctgtcagagtgctctaggaggcatgtcgcctgggatatgagatagagttaccaaaaacacaaaattaaatccccgagtgaaagttctaggtgacatgtcgcctggtactgggagacatgtcgcctagggcattaaaatgcaaattttagctttgcattttaatcgtgttttggctccaaatttaaatccaaatgtcctgatcctactggttgagacgtatgatgacttctacactatttagagggtttatgagagtgaaaatatgatgatcacatactcgagcacaaatcatggtaaattgagtcaatatgatatattaatatgaaaaatacaaagagaaatcttaacgtggcaagcaccttgctattagggcattacatttttatttaataagcaatataaaaaatcactaattaattataaaacgtaatagtagtgttggatattaagatggctataacaatgctctattaatatatatatggctatcgagcacctt

SEQ ID NO: 39070 - DNA, 1322 bp, Cannabis sativa
acctagtctagggatggccagccatggacataccctcacctagggtatggccggccaaggtttagctgaccaagggcttcagcccaacatataaaggccactcggtcaagttcttactacatcagatccttttgtacaagcataactgaatcaaataagagatatgataaagggcctagtcaacccaaaacgattagaccttgaactagattggtcaagggtgtctccatttttgtcatatattaatgtcttgcccttgcctaagtttaagatgtcagtatggaaaatgtatactagaagagaagatcctcttgcggacatcaagtactggagaagttgacatactacctactttagcatcaaggatgctcagactgtacttctaagcccacccaataattgtgtacactgaccaaccattgcgacaggtattacaaaaacatgaagcatctgactgattacttaaatgggccaactagctcagccattttgagatcatataccaaccaaggatggccataaaaggccaagctcttgccaactttgtgtatgaatgtacaggcatatctcgtaaaacctccgaagattcaggagaaaagaaagagaaagagcagaagcaagagaacaaagatttagcctagaagttacacgttggtagaagctgtactgaccacctgtctggtgtaggcattgctcttattacacatggagggcaacagctgcacaagggaatcaagttcaattgtaaggcctccaacaatgaggttgaatatgaagctctgattgctggccttaagctagcgcatgaagtatggtccgaccacctagacatatacaacgattctcaatagttgtaaatcaagtcctcagtgaatatacaacttgaggtgaaagaatgatagcctagttgagcaaaacccaagacttattaagtcggcttaaaggctatacaataaggaaagtccctaaagaagagaatgaaacagctgatgccctcgcccgtctagcaagaagcaccataatcgacaagggaaatttggtgcccatacagttcttaaaagaaccaagtattgccattctaaaagaggttgacatgttggatgacagtccaacctagatgatgcccattgcccattgcagcatacctccaaactggagccttgcctaaaaacaaaattaaggcaagagaaaaatgaggagaaaagctgctaaatacctaatcctagatggagtaatctacagacgaggcttctcaatgctgctccgaaggtgtgtcactaagaaagaagtcgagcgattattgataaaagtgcacaaaggct

SEQ ID NO: 39071 - DNA, 2604 bp, Cannabis sativa
taggccataatcaatagaaacaattgaagtcaaagccctagttcttattaaccgttaatttcctatttaattttattgcttattcttgcactatttttattttctcattttaattttttctaaatttttatttaaccaaatagaagtagaagtttaattttaacgtacttaactacaatctttgtgggatcgacccactcctggtgagtttagtacttgtaacgatacgtgcacacgcacaacaattcctacggcataggtcatgtatgccctattttgtatctcttgggaacttgtgcacttacattactagcactcaaagacaagtgatccatttttagctatccttaccaaactctataaatacccctgaacaaaatgagaagggaatcgatcgaaaaaaacaagagagagagagaaactcaccaagaacattctctgtataagaactctcataaataaaaaagacttgtggactacggctcattaatgcccgaaccacgtaaaaatcacctacattaattattcaaaagctctcatcattatctcatttaattggttgccaaaaacctcagtcaatattttggtactttcattaaaagctgtcgaaagcattgttcagaaaacaacagtaaaagaatcagaacaacaatggtggaaactcaaaacaacacacgccaaccttgtcctccctaggatactcagaacctagaaggcaaagaggtggcctcacgagtaaatgttggctctgaagaatgagatgagacgaatgatgaggaatatgaagaaaactttgaagggtacgaaacttacgaccaaggtagcaatactgaactggtggtcgtaaggcaaaaaacggctaatcatgaagccgaactggctgccctaaaagaaaagaataacaggatgcaagagataatggtcgccatgcaaaaagccatggacacgactagaatacatgtacatcctaaggccatacccgtaggactagaggaaatacaagaggaatccttgccaagcgctcagaggctcaagaccaaggagccaagccctatacggtaccctttcgaggagaaccctaagaaaaatcctacttttatccctgggagacacaggaaggcataggatccgtgaaaagtctgctctgatttcccaaaaggcaaaggtccgtagaggggcatgctccttcctcaggatcgagaggaccgaaagagcgtattcgtgcaccaagaactcagggaaacggggaggaaaagtcagaggtataccccagctgatctaaggcagaaaatcaatgagtagcatggtgacttaagaaaccatcttaaaaagaaaaaacacgcattgcaagtctccagaggcaccttgaacgaaggaatcttggctgaattggcatactacgcaaagacattgccagagtctcccggagacaaaaaggggatgattccgactctaattggaaagactaagagccatgcgctcgacacatactggatgcagaactgcccaaaaattttaagatgcccgaaatgacaacttacacaggagattcggaccgcagtgaccatctgtcccgatttaatagggtgatgactgtgatgagggtcagcaatgacacaaagtgtttatgctttccactaacgttgggcagttttgctgaggaatagttcaaaaagttggagcaaggatcggtggactgatggaacaaattacaagtcagttttcgaagacagtttttcgcggcatggaagatcaacctcgaagttagtgccctgactaacataaaacagctgccattggaaaccctaagaacttcattaattgattcaaagagaaggcttcaaataccaagaaggtggatgacagagaacagatgacccttctttaggctggaatccgcacggggacccctttctggaacgaactgcagcaagagggagcagcaaatctccaagactttcagaggagggtccaaaaataaattaacttggaagaagctcaaatagtggcttacaaaggatactacccgaccggggtgtcgaggtatgtacctggacctcaacttctgcgagcccagtctcttgccactcctcaaacaagcaaaatacaattctctactaccctaggatataatcaaagtctcgctttagctcctgcattatcacactttggggcacccatgagcaatccctcggggttgagtgtccaaactacgtcacaatccgcactagctgctagcatggcaagaccttctcagagctcttggagtaagagatcctcaaagggcagtttttggattgaggacaagtgatacccccaacacactcaatacatggagcttacggatactcaagagcgtgtgtacttcaccactcggcaaaatacacattacaagaagcctctccccttgtacagggatagctcccggagatatcccaacaaaagatgtgaataccacaacgacattatccacaccaccaacgagtgtgaaaacttgaaagacgaaatcaggaacctaatccgattaggtcacttgtatgaatggatcaaaaacaggttaccgcacttaaacccgattgcagtaggaggcccctcgccttaggg

SEQ ID NO: 39072 - DNA, 2720 bp, Cannabis sativa
agggcataaaacccaacaggaacagttcatgatctcagagatgatctgaacagaaggagagggctagacgagcagcatgtcgcgccagtcgttcatcccagagcccgtgctcaaaatctcgctcaaagagatgtcgacgtgactctggtcggccaagaggctgaacaagttaatgtgcaggcacatttggatgaactaaaaaatatgttccaaggcctgaccgatcagaagaacaatgacctcgagttggaccgagcacgtggatcccctttctctccagagatcaatatcctaaagttgcctcacaagtttaagatgccaacctggaagatgtatactggaaaggaagatcccctatcccatctcaagtattttgaaatacaaatggaactacaaggagcacgaggagatgtatgttgtagagtttctcctgccaccctctcaaaagccgcccagcagtggtatttcaagttgacacccagaaggttcaactcatggaaggctttctcctcagaatttcatacacaattctcttcttcacgccaactcccgttgcacttagaagatctggtcgaagtgaagcaaagagtaggagaacctctccgagcttacatcagcagccaactaaggttgcacggttgactgaagacgggaaattgtttgcgatactgggggcatcgaagttcttggagaactttgaaaggatattagagaaaacggaccaatagattctatgagtgacttccttgaccgtatagatggcttcattaagcttgaagaagccattcagcgagcagaagtcgagcataaacctggccagccaaaagctccctccgctggaacatccatccagctccctcagtacccaagcagttcaagctcgggtggtaagcggtccaacaataacaataggcaagacaatgggaaaaagggaagttcgctggcaaaaccgaacaggccccaacgaaaatcctaccaagtttactgctttctctgtcctgacagaagatttagaaactatctacatggctactcagtcatcagctccgtacaagaagctcacacccatgaaaaaagacgtaagcaaaagagacatgaccaagttctcccattttcatggggattatgaatatgaattatatatattgtactcttttttctttagctcaggttttgtcacactgagttttcctaacaaggttctaatgaggcaactttttttttttgaagtggtaactttatatcatgataatatacttgcactttatgcaacaagtagagaatttgtgggagtgagatcatgacatacatattaacatatggattacactcataaagaagtatcaataccagcaattctctatgaagatcatactgcttgcattactcaactaaaaagaggatacactgaaggagatatgattgaaacacattttacaaaattcttcttaatacatttcaagagaatacatattggtgtccaacatattcaatcaagtgtcaatcatgcatacttatgcacaaagttattaccaacattaacgtttgagaagacgacaaataaaattgaaattcgtcaattaaaaaatctccttgaatatatacctaaatgaggagttcattcatactgtacactttttcttttaactaaattttttaattaatgtgacagatattatgaatattcaagtgggagtgttataaaatattatctatataaatgtacaaatcatcaaaattaatgtattaattatcattatcaatacttaattgtatttctttttattttaatattaatttagtttcttattattctactcatgcttttatataaataggagttgatctaattaaaataaactatttaaaaattctagttcaatttctttttctcccctcatcatcttcttcttcttttcttcttttctttctttatttgtttctcttctaaaatggatcattctctccatgttcgaaaaaaagaagaaaaaactgaacgtataaacaatatattataatgaaatcaatgaacatcactaattcttgaaattgatgaaaaaaactgtccctcaaaacgaatatattccaattttaaaagaagttagaaactgtccctaaaaacgaacatattccaattttaaaagaagttggaaaatatataacagggttagagtcggtcggtttacaacgataacaacataggagcaatcaaactaattgtaacttccagaatctgagaccaactacacctacaaagacgcgtgtaaatcaaatcaaacacaccgatccatcatcatagacatagttttcaactaattgaaaaatacttgttctatttttccttataacaattaaatctttacaccaaatttgacctgaaagtattattttattatattttttttaaaagaaaggatgatgaggccacattgcataattcatatttaattctgttaagcatcttatacagtttttttttttgggaaagtagcttttaattttatcacagacgcgttagccgactcagccacccttctctttttaactttatttttatcttattatttatttttattttttatcattaatttttaccttctacgaaacatcctcttcgtagttcgtaatatataaataaggtctgcaaacatcttcattcatatccaagttttcaattatttcattcatatcaacaaacttagcttcacttttcatataca

SEQ ID NO: 39073 - DNA, 1543 bp, Cannabis sativa
atcaatagttaatgggcttagcatctgtgtgtgttaagtctaggtaaagcagaagtgtgggcttttctagttgactaaagcctttgatcatgagcaggcccattccaactagggttatgtaactaagtccccttcctaactctataaatacatattgtctcatcacaattgtatacttttaataattagaaaaataaaactgcatctgatttatagacctagggagggaaacttagttaatagtattgcactatcaaattgtggtaattgctatgaattaatcaggtacgcaaacataattattatctaattagtgtatatattatagtgttcattgtatacaattctatattattgaattattaatttatctaacaaccaaaccataactcatgatacaattttggtattgaataaatgttatatttagtgtgattttataaaaataaaaaataaaaaaaatccccgcaactgtgttccctaattttaatatatgccactacattgtgaaaagtgctagttaagagaaattgatgattccccatcgtatcctaacacatctattgtggtatactcaacaacttgatcatgattcttaatatctgtattactgatagaaactaatgattgatcaccatgatcaatgacgagtaactgatcagtctcttcattaatattttgttgagagttattatagtatttgttattgcctttgttaagccaaacaagctcttctgctacttctttcatcgtcggtcttctttcgccatatccttccaaacacttcattgcaagctcagcaactgtttctatctctgtctcatgactttcatcgtaaacaacattaggatccactattttttccacatatctctcacccttgttttctcttattgttgaaacaaagtattgaataatattactcttgactccgctcctcctaacgccggttgagatcggcttttctcccgttatcaattccaccaaaacaacaccaaagctataaacatcactcttcgtagtcaatgtaccagtagtcaagtattcgggatctaagtaaccgagagtcccttgaactgttgtggctatgccagtctggcctggagggatcaaaactgaggcaccgaaatcagacacttttgcagtgtagttttcatccaagagaatgttggttgacttaatgtctcggtgaataattggaggctgagcaaaagagtgtaaatagtcaatagagagagcggtttctgttgcaatgcgtagtcgagttttccaaggccttaacatggctgatgatgatgatgatcccttagcatggatgtgttgagagagggttccgtttggtaccaattcgtaaactagaagtgggatttttgtttcaagacataagcctaagagtttgaccacattcttgtgattgacttgagaaacaatggcgatttcttcatggaattgttggtggtttatttgtatgcttttgttttgatcatccttctcaagttttggtttcttcacggctattagttgagtacttgtgttagtaata

SEQ ID NO: 39074 - DNA, 1833 bp, Cannabis sativa
gcagcttgcacttggtcaaatgttcgtgctttccatgagctggtccgtgagcgtttggatcgagttataggcgacttggagtggcatctatcctatccgaaggcgggagtgaaagctttggctcttaaggagtcggatcatgctcctattcttttggacttgttgttggatcgtgaacggttttttaccccattttgattcttggatgcgtggactcgggatcctaggtgtagagaggtgatccgacaagcttgggatattgaggtttggggtgctaaaagtttccaactggtagttcgtttaaaggagtccaagaaaagattatctaaatggaaccgggaggtttttgggttttgtaaagataaaatggctctgcttgacaaacttttgatggatgtccaaagccgcactccatctcaagataatttgaaacttgaggtcgatattcttctcgaattagaagagatcacgaagagagaacaggaaatctggaagcagaaatctagggaattatggttgagagacggagaccgcaataccagatttttccatgctccaccatcattcgtcggagacgtaattttgtgggtgctgtctcagataacgcggttgattggattacgggtcgcgagaacattgggcagtacttccggaacagattcctggatgtattttcttcgacccatcccatgctaaaccagggggactttgataattttacttcggcattatcgccgtctgagaacttggagttggagcgggtccccaagcggtgtgagatcaaggatgttgtttggtctttaggccctctcaaagccccgggtccggatggtatgttgggtcggttctataagccacactgggatattgtggaagatgatgtttgtgagacagtcatccaatttttccagactggggagtttgttcgcacgctgaatcagaccttcattgttctcatcccaaagagatataatgcttcttgctttgatgattttcggcctattagtctatgcaactttgcgtataaggttatctctaaacttcttgctaatggaatcaagactcttgttcctagtatgatctccccggcgcaatctgcttttgtgccgggaagatggattgcgaaaaatggtataattgctcatgaggtgatggattcttttaaaaagatgaagggccgcaaaggttttgttggtcttaaattggatatgtctaaagcttatgaccgaatggagtggagtttcttggacaaaatgttggagacttttggttttggtgctaagtttcggagcttggtggcaaagtgcgtctcctcggtctcgttttctatcctcctaaatgggggacctttgagacaattcaagccagaaaggggtctaagacagggagacccgctctcaccgtatctgttcatcttgtgtagtgagttgctatcgcggatgttgttgaaatctgaacaagatggattactgaacggctttagatttcccagaaatgggacacctctaactcatcttatgtatgtggatgacacatttatcttctgtgaagcaagtgtggataatgtattggaagtccagagatgtttaaaccaatactgtgatctgtccgggcaacggttaaacgttaacaagtctcccgtggtcttctcctctaatgtggcggcggatgtgaaatgtgaaattaaggagcttttggggttccgggacttgtcgagaaatgataaattcctggggaacccgattctcttctcggggagcaagaccaatgatttcaagtttctcatcgacaaaatggctaggcggatagaggggtggaagacgaagcttcttt

SEQ ID NO: 39075 - DNA, 2207 bp, Cannabis sativa
acagtatttttgaaaagatttccgtgtgacagtatttttgtaaaagttaactcaaattccagtatttttgtaaatttcccttaaattacgttatcactaaatttagtattaaaaaagtattttcactctagctacaacactaaaataaaataaaataaaataaaagttaatatcatattaattaccacttttaaaaaagtgtattatttcaacgtgttaaatttttttgaatttctcaaaattttactaaatcgattaaataactataatatacataactataaaaaaataaactaaaaaaagcctattagatactcaaacaaataagaatatatttgtatatcacttttaaaaaagtgcataataaactttctcaaaaataagcttttaattctataaatacaataatataaatattaattaaatatatataaaatactgtaactataatacatggtatatatgtcgtggagtgtagaaaaaactttaaagtagtgccctaattagtctttccttatagtattaattacagcaataatgttgttttagtggtttcatttagttgctctaagttgtccttcgttcaatatttgtacttttatgtgtgttgtatttatttaagagtatttattgtgagttttcataaaattaagaatacagcattaaaagtaaagtttaaacacaacacatataagaaaaagcttataacaaaactagtaaacatcccgcgcttcgcggtgcatatataaaatattttaaattatatataaaaaataaattgtgtatttaattaataaaaaatacttaataaaattatattacaattttaattttactattaaaaaatttgtaacataaatagttaaaatattaaatttgttgctaataaatatcgaaattcgaaaaatagtagcataaatcatcattcatggtttaatttttattctgatgtgttaagttctgggttcgaattttattgcgtgttttttttaatgtttgagttttagtgttttactgtggttctaatgtttgagtttgtgtttatgagatctgttttttaatttatttattttttttatagattttgagaacttgaaatttgatgttctttctattgattattgaaattgagagtttgatttttcatacgggaattaaagttttcctttttcgttttattgattgaaaaatattagtagaaagtttatggaatgtgaattttgactatatgaaaatagaattaaaaaatagcatttgaatcgagaatcaaagtttattgttaatctccttacaaaaaaaaaaagtttattgttaatctgtaaagataatatagctggaagaaaatggaaaaattgatttttattttcatttaatatgtatataatattttttcttttttgaataatataaatttattttaactaatgtttattttttaaaactattttttctaaaagaattattagtttgaccaatactatatttatatgtagcactttattgatcaactaaaaaatataaataaaaaatcgaggctaatgaataaataatgaataatttaaagttagcgagtgtagttgtgtgcatcaaaaaatatattataaaatataaaaaaaaaataccaattaaaaatcgagatttttaatattgttcattaatgttattgttaatgctctgttgaggtagtctaaacaaacaaacaaaaaaatattaatatatataggattagagaaatatagacaatgtgcactacaaaccaaaagaaaaaattaaaaagaaaaaaaaaatggaaagagcatgagagataaaaacataagggttgaggttgtatatgttttaaaattgacaccttatatatataatgtatataatataaatatatatataacaaaaattgacaccttatagaagaaatagagaagaataagaatgagaagttactgtaatactatttaaatctcatttatataataaaatatagaaataataacaattaattaattaattaatgaaatttgaattgttaaatctatatataagggtgggtagatttagtagttaggatttttttttataataataattgtaacgtctataaaatattattaaaaattagaaaataaaaaaatattttatcaacgtatagaaaacaaattaaaacacattataaaatcaaagaacgtatattgaggcgtttggttgggagg

SEQ ID NO: 39076 - DNA, 3053 bp, Cannabis sativa
ttcaatcaatggtgagggtaagggggagagtaagggttggggttggccttcggtgccgcatgagagggtgggggagagagttgggttggggtttcatcagtgccgcacgagagggtgagggagagagttagggtttttttagggttttcaaaatgagggggagaaagtttctatttataccactttttgtattctaattttttttttaaaaaaatgtgtttataggtgttggtttataaccgagaccaaatgatcttttagtctcggttatgaaccaacacttatactcaatctatgtgtatattttttttaaattttttttggtctcggttatactagtgtcggtctactaaccaacactaaaattcattacaggtgtcagctataaaccgagaccaaggagttggagtggtctttattgttaatttaaaaaaaaagtacttcagaccgacactaaaagtctattttgtagtagtgttggaacaaagagttaagtatctattttgttgatatgtatttgatttaattgaaaagaaaaaaaaaacattattattatatgttgtaattaatttgaagtaacaataatgtaattattcttctttatttatcttaaaaaaaatgatgttcttgttttctcttaatttctagtagtagtctttttgttttgaaaggctaatgttcttatttttacttaattagaaaaattgcaaacagtgctggtattccgttatggaggtgacggtgatagtgtggagactaaacgacagacaatgacggaatataactgaacgaaatttcgtgatcgacgttacagttgacgtcaacactaaactgaagcacatggccacgccttaacgtccttctcaacatatatcctaaagtaaacaatgatattaaaatatcaattaaaataaggtacttttagctaccaataattctatttccaaaaagtatatatatatatatatgaagtgaaaattattacggtggtcaacccaattatgctatattattattgctactattataaaatatgatagcttggaattaatgatgaaaaagttgtgatccacaatagaataatattgtttgatgggttgtaaaaagattaatttcaagatgtaaagtgtttttgatttgtagtactccaaacaccttttgaaactacttaaaatcaataagtaagaatacataattagtcaattcacttgagaaaaacaaattacaagcctcacaaagaataaaaattaaattataattaagcgcccgacgtgagacaaacaaacattcacgaatcagtacgtaagattttatatggcatatagcgagttggatgcatgtttttcttttcgataattatttattaattttgtaatcacatcttgtgtatgattagatcgagttaatcaatttgttcatatctttttttttcttgaaaacagatctaatatatacttatatgatggtaaaataatacgtttggaattagtcatattgaaaactaagcaatttaaaaaaataataatttattaataaaataaataatagcttacaaattattctaaaatataataacactaaataaaatcatctacttatatattattattattaattttatttattaaaaaataaaagtccttcaaatatataaaataaaaattaagtctattcacaatattcttaattattattgttaactcaggaaacttttttcgatgacgtggacatcaatttttgacacgttgcaagaaggatgacgtcacggagttgagtagactcgagtcatagcagttgacttgggaggggaccctcatcctgcgcccaggttaatttcgagagctccgggataaaagtttggacttcaataactttaatccaactcactgcctcttactattataccatgaagtcatggagtaacctaatctaagccccgagagctgaaatgacacaaacctgtaatctgaaagccaacttgggaacctagggtttcaccaagtgcctagcatgacattctcaactagggtttcagtttctgggattgtgttagtgcaaaagggtcaaaacatacattggtacataaactagacatatcacggacatacttgaggcatcagaataaaaatcagagcaattttatttttgagcatatagggccctaacgcccaagttgacaattcgtcaatctgtgcatcttccaagtatcagatcgacaatctaacttttgcatcttcttcatcttcatcataaataggaaaataggtccttcttgaagaagaaacaacacttcatgggtgccaaaagcaaggcccaacccccagagcgttctcgtgagaaataaaaactagaagtagacgtagctctattactatcgcgatacagggagtgaactactataaatttattgtaactcttttataattacttaactacttttttattctctccaatctagtgagcgggtgtggcttagaagtctagtcccgatttttgattcaatattttagtactttcattgagagccacatctcaagaaaattacatgcaagatggttgcaacacgttctataagtgttgacagatagactcatatagctagccaaacagttgggggcacaatagttgatggagttagaactaagactacttttacgccccaggcgccaggagcaggcccccaccaactctccctctaaggccaccaccaatcgttcttgagactggcacaaatgaccagatcccacctagggagcctaacatggagattgatgaccttgaggtaaatccttgggttgcccagctcagccaaactgtggttgtcttacaacaacagctgcaaggctctctcgataatcaacatgaaaatttttaagactagttcatggaaaactaaaggaacattgaaagccaacgcattgatcagaaacaatggagagctaacctgtcttaatggattagagaagcttatcactctaattgtggaactacttcctgtagaggtattttgagttagtgagagagactccccatcgaccaactggtgacgaagg

SEQ ID NO: 39077 - DNA, 1683 bp, Cannabis sativa
gagctagaattgaagtattggggccagaggtctttgttcaagatcgttggccagttaggaaaactagttatggtggattcagttactagggaaagagagaggctgaactaccctagggtcctggttgaggtattgatggatcaggaatttccaaacttggtggaatttgagaatgagtttggttcaaacacaatagtgggtgtgaaatgaatggaaaccagtagcgtgttgtcattgctatggtttaggccatcttgctggagaatgtaagaagcacactaatgggaaacaacattggattgttaaacatgataataggaaacaagttcagatggatgaggagggatttgtgaaggtgataaggatcaagaaactagatggaaaagagaaaatagtggttaatacttcagcaaaggttgttacagatgtaaggaattctttccacctacttgaggaattagtcactgaagcagttgagaacttatcaaaggaaggggccaagacaggggggagaaccctctctctcaaatggataagttgctatgttaaaatgtccgaggagccaacaatcaacataaacaaaatctaataaagcaaattattcatgttcaaaatgttgatttttggtcttctcgagactagagtcaaggccccaaaacttgagactttgtactcgaatgtatttgagggatggtgtttctcttctaagatagcttggcatgcagggggaaaaattgttattgcctggaatccttggagatttactgttgatattattaaatgcactagtcaattaatgcatttgaagatatcaacagctgatggctttaacagtttcttaactatggtttatgcttctaataatcgacttgaaaggaagcttttatggaaagacttatgtgattagctactgtagacaactggttactcatgggagacttcaatgatatccttgctaaggaagagaggattggtcaaagagtaaaatcttatcctgattctgacttcctgcagtgtgtcaacacttgtaatttggaggatgtcaaagctagtggtaattttttcacatggactaaaacgcaacctggtgaagatagaatattctccaagattgataggatttttggccaatcaatcttggattaatagttttgagtttgctgaagcagtgttccttaatgaaggtctctttgatcattctcttggtcttctaactctacatcctggtttggtgagtggaaaaaagcctttcaaatattttcgaatgtggaagacacgccctaaatttgaaacccgcttgaaggaggtatggactttgacaataaaagggtctaaaatgtttcaggggattaccaaaatgaagcattttaaggccaaactcaaggagattaataaggaggggttctcggacttacaaagtgttgttagtaaggctaaatcagacctagacaacctgcagaatcagattcagcagcagccactgagtagtgatttacacataaggcagaaggagtctagagaattttttattagagttcagaaagattactcttctttcttgcagcagaaagctaaaatagcttggatagaaaatggagactgcaattctactttgttccatgcttgtatttgttggaatttatttaccaggatcttagacctactcacaagtatgttgtttaa

SEQ ID NO: 39078 - DNA, 1440 bp, Cannabis sativa
ctctctctctctcttttcttgtgtatatatataataagtgtataattttatatctcattctttaacactctttctctgcttattaaaaaaattaagacaaccctccctatatttttctatcttttacatgattaataaaagcaatattttttttggatattttatagtttaggtaaagttgatttataaatgatttgcatatttttacaagattgatcttttgttatttttctgttaatgtatgactgtctttttgttattttatagttattttattattgttttatgttgttatttaagtattctatagctatttttatatatttttttggtacaattatttagtttatgtgtattttttatcgtatatatttttagtttattctagacaatatttttgttgtatatatgtggattttattttttgctatttttatattttttttttttagtttttttaagtggtttccataatttttttgtgaacatttattttttagttattttttttattcatgtgtatttcttatagtgtatatttttattcctgttatttttttttttgtcgtatatgtgttgctttgtatatatagatacatacatttagtttattttttgacacattttttaatatacaatgataagattttttattttttaattaacacaatgtgcaatagtagatattgacatattaattatatattatccattatattatatactccattttgaaatcataagattttattatttatattattaatgtaactatttatttaacttttaaaaaataaattatcatgtggtatagttccatcaattgaaaaggtcttcgcaaatgtcatttctgggaagctattctcttgctgttatcgatcccaaaaggtgtcttatggaatgatagtcgagtccgaaagggagttcccggatgacaataatgtcctcttgggcctagtcttctagatagatagctttccctagaaaagagttccagctggctagttatctttcttgaatggtagatccggatagtcaactacaacagactttatcctattcgaaagcgtctagcgagattcgtggtcctcaagtttggaagctcttatgtgttctcagaggccttggcacttaagctgacatggaaacttcactcaagaggagttggttacactactacaaaaaccccctttagaggcagtttttaagccctttcagcgtcgattttcgtaaaattcgctaccgacgctgatcagagtgacgctaaagggtttttatgaaccgatgctatatgtacccctatggcgtcgattattagctaggaaccgacgccaaaggtacttatggcgtcagttcctagccaataaccgacaccatatgtggcgtagcaaccgacgccaaaagtgagcagatttgagttttttcaaatttaattatata

SEQ ID NO: 39079 - DNA, 2108 bp, Cannabis sativa
tatcctcttgctcgggggaactagttggatagttttaccgttattaacctgcccatagtccctgtctgaactattgatgagactctctttcaaaggatttcttattagattctggcctcttcctataattatctcattgaaccgccttattaggtcattgacttccctattgcggtagttgaactctacttgatgggccttgaggatggccttttggtcatcaatccatcttaggaatttgcatctctattgtttgaaagcaacgcaacaaaaaatgtgtggctcttctttttgggtgacctggcctacagcttctttaagcctagccaattcgatatcctctcccaggtctacatgaggctcaccagtagttggttcactaattccttgccctaatttgcctacatattactagggaatagtcctagttgtgctttgtagaggttgttttgtgttaacaggaccttttgtttgaggtgctattggtggatctattttgggcgacaaggcctgattattaggatttatcatgttagtaggatcaatgggattagtggtattggctctatttacaggacttgtagcatttgtcggagtgataatatgagttagatcagtgaggccttcagtggttggaggaactttaacattgggatcagtcatcataggatgttaaggaagatttaaggaagtggaggtagtggttctccttgttacaaccatgatgaaagatcaggatgactaataatgctctcactgaaagcacaaaaatgttatcctcaaatttggtgaactgacagtggagccttatttatgatagacaatcacaacctgtaaattgtaaaagctagtaataaacaacaatttatagaggttcaacccccttgtatagtgggtaatgacctactttccttttagttgtattaattccagagataatacaatgtagattacaggcttttccttgtaagttcaagatgtggctctctttgaatgttacaatggtgagaactgatgtatgacagattttgaacaagtgagatgagaaaatagactaagtgtctaatgcttgggtaatggcatgtgagaaaagggttgtaaggacatagaatttaggtcccttttcactttgcctaatgtcctttacgtagtttagggattagaaaagatctattttcaagtaagtaaatattaattaaaaattagaaaaatccctcttttatgatatatttaagttacaaaataacaaacaaatatccctaattataggcagatagtttggggttaaacccctacttttgtgggttgttagagctatcttgtagcaaaaattgatttatgatcggtgcaggaggatggctgtggaccccaccattcaacttggcttcctttgatgctctttattagtgctggcaaacctacctttttcttggggatggccaccacatagtcaacctttgtcggctagagtgtggtctgaccaaaccctcatggtcgaccattttcttgtaagttgatcttgccagtgtctttggatcccttgtcaattgatgtattgtgcatggtgatttggcttagctattgacacgctatattccacgtgaccctactcttgcttacgtagatatgtcacgtcatgtgggcaaaaattgggataatagtttagattcaatttacatatattatgttgagatccttaggcttatagttcatattagataaaactatttttatcgaattttgcttgtgcctttataactctgatatggaccataaaaaccgacaattcacatctgacctcgcacgttgggttctgcttatcaaaattcgattttgtttaaagcattgaactatttttctgtagtaaatgaaaggtatgacttttgattggtcaaatgcatagtttgataatttaccgtttccataaggttgaatatggacataattggggagttttgagtcttccccatttcacaaaaaatgaaatctccaagaactagtgaaaaacttcaccagaacgtagaatctgactaagttgtgttaaaatagtacttaggcaacaaaaaatacaagtctgggacatatttttgcttatccgatatccaagt

SEQ ID NO: 39080 - DNA, 940 bp, Cannabis sativa
gtgatttctcgcttgatgggtacgttttggcacgaaaatatgtgtgtatggtggggacgtggtgttcctagttcggaaaggcatgaccattttaacccaaaatagggtttgggtttctagtataccccctttgaagaaattcagctaaatatatatatacttcatccttttaagcttggtttatttcctttggtttcaaccaagtctctttgctttgttccatttgagtttctctactacaacctttctggttttattgtggtcatggccaagttgaaaagccctttggttcttgaattgtgtgaggaggtctttgaagaggtgatgggtttagtcaaaagtattagtcttttttgtaataaattaactacataattgattatataacaatttatttactaaatacataaataacaggaaggttttaacgtgattttgaagttaaatcttcatagttcacgagtctatcttattaaggatagtaatatttaaatacataatacaatgatataaatagcaataatatctcttttttctctagattggcggtctctttttatcctgggttctatccctatttatagatgtacggtatgacagttattccttagatctacgcattcataatcgctcatgaaacgtggacaatcctcacgttttatctttgtgcatatgggaaaatatataactgctcaaccgttctttgtctttatccacagacaattatgctgacagtgttagattgttctcgccgattgcatgttatcttttttactcgtatttttaggaaaaatgctaagtgttaagatacaatacttctcgcggttctcttttgtcgtttgaaaggcattagcgaggcggttacttcaatgcgtcaaaagtaaggtgaacgatgttgttgtcattccttgaacacactcacgagtatatggattaatga

SEQ ID NO: 39081 - DNA, 3151 bp, Cannabis sativa
aaattttcagctttattttcttgcggaattttctctattctatagattgttgttttttgaaatatgatcaatttatacattccaagtgtgaaacctaaaaccaaagaaaacaagagtaattcttttccaaatataataatgaagaaggaaaacactataaaaagtgacccaaaacgtaggctaaaaatagcctaacacttagctgactttcttccgtaatgtcttataagatcctgacagatcattatattatcgccaatgaatctcctttgaacaaagccactttgattctgtgaaaccaaatcagacagcacaattttgagccttgagtatatcaactttgtagcagctttatacaacacattacaacatgctataggtctatgatctccgaatgagtttgggcacttatttttgggaataagtgttaaagcagtagtgtttatctctcttagaatctttcgagaatgcaaaaaagaggttatggcttcttaaacatcatcccccaccaaatcccagttatcctgataaaagaagctacagaaaccatcaggtccaggagccttattgtcagggatatcaaagatttcttgtttgacttcatctttcatgaattgttgtactagcaacttagcttgatccttagagagaacattttctttcttaataatacttttcatcacagagtttttgttatgcatcttactacccagcagttgaatgtaatactctaaaaacaaggaagatatttgttgaggattatcggttcttaccccattagtgtccatgatagataaaatttgattctgacttcttctagcacgaatactattgtggtaaaaagataaattagaatccccatccttaagccaaagtagcttagctttctgctgtagtaatgataggtatgctacctatacagttgcatattcctctctagctattgcttcttacatctgcagatcaacattcaaaggattctgatgcagcaatgtttaacaggcatccaatttctccttagccatatcattcagagcaggaaaatcagtaaaatgttgcttatttaggcttcacacctttcaatttagtgaccgcctgatacattttagagccaacatccttttccagccacctatttgcaaccagacttcgatattcaggatgagaggaccacatcctgaaataacaaaatggcttattttcaccaagaggggctgtgaaaatggttaacacggttggggagtggtcaaagagaccctcattctaaaaaataacctcagttgcagggtgcgagttcaaccaagccagattggcaaggacgttgtctattggagactaaatcctctcttctccaatctgcttattacaccatgtatagaaattcccagtatacttcacatcttcaagatgacagtcattcacacagtccctaaaggtctcttctcccaacctcgtcattaaaaccataaacaaaagtaacaaagaaatttgtttttctatccatagtttcaacaaagagattgatgagttgacttgtgcactttaagatagtgacactaaagctattggggttccaactaactataatccttccacccttatgccaggcattattcgatgtaaaacaccaacccgaaaatatccgaacatataaggctcccaagttccaagccttaactcttgtctcgagaagaccaacaagccccattttttgatttccaatcaaatgcttgactagattttgttttagctggttgttgatccctcggacattccaactcaatgtcttatccattattatgagagggacctcccccctctcctgtgtcatctgcttcccattgcttccctttcttcccatgatcctcattaccatgtatctctatttcttctacactattgtttttctctgtttcccccaggattttaaaggagttgttggtagttgatgcaacattttccattccttatcttgttttccaacctttaatgacaggttggaacccttcagtatcaacatttcctgctttctcactctcttttaacccagcatgctgcttccctgagtttttcgaaattcaatattgctgtttttttttggctctcttttcctgcaatctcttgtagaatgcccaattccattacagttagcacaaatgataggcttccattcatatgttagagccattgttgtattattcccattttcatcctctaactctataagctcaggcaaatcctgtttaatggccacttcaattaggaccctaggaaaactcagtttttctcttagtttagtagcttcatcaaccataactggtttgccaacgtgcccaattatcttgaacaatgacttttcctcccaatattttaggtctaagtcatcaagatgaacccaaattggtaccaccctaatgtcttctttcttcacattgattaagggctcccaaaggtttcatgacaactggcctacgattaaagaaaatgtatcctccttgaagaacagagtccctatcttcaactgaatgaaaacgaattatgtatatgccataagatagcaaacctaccctttcaatcttatcagcccacattcctctcacaaagcctactaacacagtaagaggagggttggctcctaacacataacacactatcgagggcttctagaaatctacttcatcttgaatgtcatctttcgttatcttcaccttattaatcgaagaactcaaaaataaactttggatgacagaaccagatctcggtttaggggattagcatccataccttgagatatcttagcagagcaatgcttggatgcctccaagaaatgagcaaaattcttctgaatgtcctcctgctgtacaattgggagaagagatgacttaggggagagaggagcaggttcttgaaatccaggaggagtctctccattatcttctgcaaagtctttatcttctacattcgagaattcaataggagcgattccgaaaaccgcatccatagatttagtttttcgaacatcagaagctgaattaggtcctttcttcttcgaaatctcagtcaatttcaccttcccacgccttgtacctcttgtttttgccatagctccagcaccagcaccagctgcaaggagtcgagagagagagagaga

SEQ ID NO: 39082 - DNA, 2000 bp, Cannabis sativa
cgagactaaaaaagtatttttataaaataaaatataataattctgaaatacaaaatttaaaatgctataaactttaaataaataatacatataaattaataaatgtaaatataaattaaattttaataatgtatttattattacacaacaaataacatattacatcttatatgttacaacaaattaaatatacagtataatacataaattacaataaataattttctcaaaaaaaaaaaaaagattacaataaataaatatattacataagcttttatttaaaacaaataaaataattaaattaaaaaaaaccctaaatccttttgtttttctccttcccggagccaccaagaccacatcaccatcaccgccgctcgaccacaaccagaccacgaccaccaccgcgagagagccatccctgaaacccagaacacaaacagaccacgaccactatcaccgtcgctcgatcacaactagaccgcgaccccatcaccgccgcccacctcgaccaccaaaacaaacattccaacaaaaaaaactcagcaaaagcttcaccgccgctcacctattatcgaaagagaaatagagagtgagagagagagctagagaatgttaccaagagagccactggtgtatggtggcagtagaggttgagagagatagagaagagagatggagcagtagagagatattgagagatagagagagaggcggcagtagagggatattgagagagagtggcggcaagattgagttattagggttattagagttcaatatgttatatatatacctcaaaaaaaaaatatgttatatacatataccatttataaaaaataaaaaatcaaatctgatgggtttatttttagaataaaatctgatgggttaaatgtcttttatatatttttttagttatttttttattaaacaaaaaaaaacatataactttttttattaaatataatttatttataattaaattcaaaataatttaacataataatattttataatgttctatttacattttttttgtttgaattgttgaaactttttttttttaattttttaattaaatataattttttagaatggaatttgattaaaaaaaaaaaaaaaaattattataactaaatttaaaataattctctaataatattttaggactccaaataattgtccaatagtctccaataatttttttctttcacaataatttttttaataactttcacaataaattttcaaatacgactaatttctaaaattattctctaattcaaaatatattaattcctaatttctcaattttataaattatcaaattataaatctattaagcaaaaaaaattattttttaaatttgaaactttttttaggtattttcttttattaaatagaattttttttattaagaatttttttttttaaaacataaacttttttcttttgtattttcttttattaaacacaaatttcttttattaagaaaaaaaattctttttttttaaacatgaactttttttttgtaatttcttttattaagaaaaaaaaaatctttttttttaaacatgaaactttttttttatatttttttttataaacacaaacttcttttattaagaaaaaaaaatctaatttttttagtattttcttttattaaatacaaattttttattgagcaaaaaaaatacaaatttttttgttatacccttaagtgtcggtttataaccgagaccaaaggatcttttagtctcggttataaaccgacactaatactcaatctgtatttgtataatttttcttaacttcttttggtctcagttatacttttactgccggtttattaactgacacttaaagtcattataggtgtcagttataaaccgagaccaaagagttggggtgatttttagtgtcggttttttaaaaaaaacgtccatcaaaccgacactaaaagtgtatgttgtagtagtgcttattgactaacatatagttcc

SEQ ID NO: 39083 - DNA, 3495 bp, Cannabis sativa
ttcattcgtgaagccttctatcctatatgggtagcaaaccctattttggttccaaaaccaaacaggaagtggcgaacatgtatcgacttcactgacttaaataagacatgtcccaatgattgcttttccgcttccttgcattaattaactagtagatgctacccctggccatgaacttatgtctttcatggatgcgaattctagatataaccagatacccatgaatgtggcaaactaagagcacacaagcttcactgtgatgccttttgggtttaaaaaataatggtgctacctatcagcgacttataaaattatattaaacatggaagtatatgtagacgatatgctcgtcaagtctaaacgttcaaagaaccacgttgacgacttggaagagtgttttcgtatactaaaaagatataacatgaaattgaatctacttaaatgctcgtttggggtatcatcaggcaagttctttgggtttatcgttaactcaaggggtattgaagcaaacctagagaagctaaaggcgttgattgacatgccttcctcaaaaagaaagaaggatgtccaaagtctgacgggacgcatagtcacactcaatcggttttgtccaagtccaccaatagatgtctaccattcttcaacttattgcaaggaagtaataagattgaatggacagaagagtgtgaacaagcatttcagtcattgaagagacacctagttgtaccccctatcttgtgaaaaccaattgtgggggaggtgttttatctgtacttgactgtaattaagcatgcgttgagcgttgcattggtgcatgaagagaagaagattcaaaagccagtgaactacatcagcaaacagttcgtggaagcagagtaatgttatcccaccgtggagaagctagccttttgcctagtccattcgtcaaggaagttgcgaccctacttctaagcacatcacatccatgtcatgacaaatcaacccctacaacaagtattgatgaaactagaggcattaggtcgacttcttaaataggtcgtctagttgggtcaatttgagatcacataccatcctagatgaaccataaaggcacaagcacttgctgacttcattgtcgaatgtactgggttactagaggaagacagtgtaagagaactaccagagtgtgtatggcaattgtttgtcgatgggtcgtctaacaagcatggcttgggggcaggaatcattcttgtcaccccggatgggtataagattcattctacttagaggtttgggttttaagcatccaataacgaggtcgagtaagaagccttactagctggactaaggttagaaaaggggcttggtgcgaaagccatttgttgttttagtgactcccagctagtagtcaaccagatgttgggtgactaacagggaagaggattaaaaatggtggctaacctctcccaagtgcaaaaacaactctaacaatttgagctagtactagtccatagaacaagtacctcatgaacaaaacttgaatatttatatcttagcatgtgcttggccaccaccaaggaagttgatagactcaatgtcgtctcagtagagttccttcctgaagcatcaatgttaaagagaataaagaagctagcatggagttggttgatgctcaaataacatggatgacttcacttattgagtacttgaccactaggagtctctcttctgataaaaatgaagcaaggaaataactgtataaagtatcaaggtttaccttgttggatgagaaattgtatagaaggggacattcattgccattattaaggtgtgtgacaattgaagaagcccaaagcatatattgaaataagtctatgaaggattttatggagattatgctggcatggaggggatcgcttagttaagaaaataataaggcaagggtactactagcctactataagtcaagactctctccaatacgtaaaaaagtgtgataggtgtcagcgcttctcaactataccaagagccccttcagtggaactcacttccatgacctccccctggccctttgctttgtgggggtagatttgatttgatcttaccacaaggtaaaggtggagtcaaatatgcagtagtcacagtgaactacttcatgaaatgggctgagacagaacctttggctactataacttcaaagaaggtactcgacttagtcgtgaagaataatgtatattgttatggagttcctcacaaaatattgttgtcacctccccaatggtcacaagcataaatctacaacaagacaagtaggggggatgagaaaaccaacatgacaagataaattaaaaataaataatacatacaaaactaaattaaattctctaataaattatttatgctagttaactaaaaatgaattggataaagactaacttattaagttagatataaaccaaatttgattaagtttagaaaatctaattttgttatagttaaattggaacaaatctaatttatttgactaagctaaaataattttatttccaggaaaaatttattttgagttagtaattttcgggcccatctcagcacaaagccaagatgatcatttctgcctaataccaattagagggttaagatcattgtttcgacctgatgctgggattcacatctcagtcccaagtgtaattctcaacaacaaggaggtgagctaagaccatgctcaagggagcaaaggatcacctcgaccctggccatgaccatctcagaccaaaatggccaccacaacctttggtcccaattttgaattttttttttttttttttttttggattgggacatcttggaccaaacccaatcaagaaaaaaagggctatatatgtacatcctattgtttgtggtcatcatcttgttcgtttacgattttcttagatccactacaagaaatgtcacttctgtcagtatatttttgtgttgataaaagtttagtattgcgatagtaaaatgaaatttacttctgatgtgttggtaaattaacgttggaaatagaatttttgccagaagaaaatgaaaagtgttggcaaaaatgacttttctcagcgtgtaaatacgttggtaaaaattagattttagccactgtaaatgtgcgctgatcaaattttgacatttttgccaggacagtttgtgaaatgcgctagtaaaagttactggtaaaagtgatatttcctgtagtggtccattgacaaaatatcgcatcaacaatcttcaattaatgttgtttgatggtttgatgctcattaattttaacatttttaagatgtaaatttgcattttgttaatattagagcatctctagtggagatccaaattggtaatctattactaaaatatagcatatttttgctctaattgtgtgccaaaagtttattcaaatttgttacacaacaaaaattgattaaaatttggattacaatatgacttgatataaactttgcgtcatcataaatgtactat

SEQ ID NO: 39084 - DNA, 2453 bp, Cannabis sativa
gaaaacaaaaacaaaaaaaaaaaataggaaaagattatgaggaaagaaaagaaaaagaaaaaaaaaatttaaagtaaaataaatttttgtattttttatttttaaaataattaatttttcattttttaaaatatttatttatgtggaccaataaaattgtgtcacgtgtacactgtgtacacgtagacattctactatggcagttaacagctaaaaatggatggaaatgttaaactgttaacagaacacgagtttagggggttttaccaccaaaattttaaaattaagagttagttgaaataaactaaatacttaagaaggttatgccgcaaattattcttcttttagcttaaaattaaaatttatatttgcatttagtttttctgaaaatacactcccaataaaatattttgtgtgagtaactctttaataaaattttgataatttgatataattaaaactatttaagaaaaaaacgtattttatgtgagtctcaatgttttaagtttacgaagagggaatatttcaaaaatatacaaaaatagcaaaacaaattacaaatatacgattatataaaattttaaatatttttttatgatttttaagattttatttataaaaaatacgatcttttaatattttttttaattatttttatattatactcttgttattttgttagcattttgttatttgtatattatttttatgttgttttgatattattttcttattactttcatgttatttttatcgaacattatagttatttatgtttccagaaaaatgacacgtgtaattccaatattacttagttcagctactataagcccaaacataggtccaaccaagataatggagcaaacccgttattgaagtcaagccatccagatgatggacaaatgacttgtccatccaggtgaagtaaagatccaacaaaacaggttttcaaataacatcaagcaatacttttagaagagtaattaatgggcctccgaatgtcaaacttgagatatcgtccatttattattcaattccactatatcagaactttattttcgatatcatattcgagaatcggatattctgaataaggaaataaggtaattgtcaatcaagcatttatatgtctttattatctatgaagacagaacacgttttgacaactattaacaatatgtgacatccacgtcagcagaagatcaatgcctcatgagtcgggctccaccaaacggaactcaaaatcaatatgtaacttgtatttatctaattagtgggcaaggtttacaaataaaaaccctaagagcactcacgttagatgatgtataagtgttttttttttaaaaaaaaaaaaaaaaaaatttaaagtagagaaaaaataaaaaatagacaaaaaaatgtgctacatcaattgctatattataaagaactaaataaaaatgtaatagtgcttctctgcaagtagaaaaacactatttattatatacatattttaatattatatatattattttattcttttaaaaattcaataacaatatataaataatattttatttatattttaataatatatcattatatatattgaaaaatatattatttaaataatatagagagataaaataaagaagttgatgtatagtgtaatgtaaaagtttgaggtaaaataaaaaaaaattgaattttaatgttgtattttaaaaaatagaatagagaaattaatgtgagtgctgaacatataaatattagaaaatgtattcatacacagtcttggaatccgaattcttataagctaagacaatttcttgggttcgtaaatttgacaaacacttgtgtaattctctaaggctattctaaccataataatattgactcgtggattagaggtcgttaatccttaaaccacataaaatattttgtattattcattgtcttttatatttctttagccttgatataattatatttgatttctaaattctcagtaaacaaccataaaatgtaatatatatatatatatataaatatatatatatttgaacataagagtataaatttttttatcaaaaatagcagtttgtataacttgtcttttataaaatgataaaattgttgttaaattttgtgttaatcaagcccttagagtaatcctatcagattctttactccactatttaaaatacaacactaatttaattatttttgaaatgacaaattataacttttaatattagcgatctgttggaggatctctttattttgatttaatattttactagcattagatttttcatgatattagtctgttgagcttttaaggcttgttgtattatttaatatatttatataatatttaataatagcatatatagtttcgaatatttttcttatttacagctttagcatatataccgttatttgtgcgattttaattacaagactattaatat

SEQ ID NO: 39085 - DNA, 2021 bp, Cannabis sativa
attgttcactcctaccatattcccgggccgatagggtggaggccttatttgagatgtagttggcccttctattcgtgaggtttttccatgatccttagggcgttaaatgccctttgggacatagggactttttccccaaaggggggcccttatgagtggtggttcctctactctagacctagccctttcgttgaatagtctaataatttcattcacttcctattttggtagttaagctatgcctaatggcttggaggatcacaacataccgattcatccattcttggaatttgcatctctactgggtgaaagtatcgctcacagcagcacatgtttcttcttgttaatggtggaggatatttgtgtgaccctaaacctgccctatggcttctctcagcctggctagtttagaatcatcccccaagtcaacatggggcatgttgatgccaagttggcaaacctctagccaatttctctagcatatacataggggtggccttgtcaggggtacccccgtagtactctagccaggttgcccaacattgatcggtacttgcctgacacctatgggatcctactcgacaatgattagacccttgagtttagtcactattgatgggactaactgaggtggccagacagagttggtcgggttctcactagttggcggaatctagacattaggattcataaccattagatcttgaggctttgttgacctgctcctccttattagaaccatagtgattaccaagtgatgagatcttcgcaagaatgttgaagctcttaatgaagcaccaaaatctcagctgggaaaatagccaactaacttgaagtctaataaatgttgattaataacttgtaaggaggttagaataataaataaataaaaagaacacatgatttatagaggttcgacccccttgtatatgggtaatgacctactcccctttagttgtattacttgtgagataatattgggaagatcattaaggaagacaaattgatttctagctacggctctcaaagtatttagagaggatatctttcagcaacgtgctcttagattcaaaagtacaagtatagcactttgttttcgagccccctccccttgtgaatgccttcactatttatagggtgacagtttttacattaggctccataaaaggagtaaacaaatggtaaatattcctaaattttagggtgcatttacaatctgttgaattgaatctcctttattctcagatagatttataaaattcgagtttgtaggactcaattgtagatatgtgaggaagcttgttgaagacaaaataaaggatcgtgtatctctgtttggtatccctaaaattgcaagatctgcctggtatgttggtcattcggttaggtctcttgacacttgtctccttatgagattggcttgtagaatcatccttgcagggcgtcgctctcatcttatctagctggcaagttgataacctgaccatatgattcatgagacatttatagcctatggtcgttactccttatatagacctgccagacatatttttctgtgaggttctctgctaggtcaaagagatggctagatcatgccacatggaaggaccatgttagttgtgcaaactttgggataaataaggtgtcaagcaccacaagggctgctcgtaggttctggattttagtgttgtctccaactggcctctgagcattagttgtagatgggacctcaatgttgggagtggactgatcgcggctgaattggtgtttccagtctcttgtacgtctggtgtgatcccagccagaggggaagtcactcaatggtccactttaggtggttgtgtattaacgtgcttggggtttgtcatttgtggtcctctcgtgtttccaggagtttgcacattgggatctgtcaccattgggttgccctaatcagcaaggcctatacgagtttttacaaccatactgtttgtgtgtcaaaacttaagacaaaggacttgtgtttttgctcttaatgaaag

SEQ ID NO: 39086 - DNA, 2346 bp, Cannabis sativa
taaagggttgcaaagagcctagacaaactctattttgggagccttattgcattgccacttcgtcataataatattatccattggtataaatcgatggcttcactacttaattaattactgataatccattattggctacctttttttttttgaataaaaaatgattttatttaataactttcagcataaacaatagactttaaatcaagaggagaatcatgctcactgaaagtacaatctgacttgaaacaagaccctctcgcaacacaatgaaaggccttgttagcaaaccgtttgacaaaaactatagaaatattgcttaaagaagataataaaacttgacaatcccgaacaagctaaccaaattgggacggcatatcaatcgaactcttaatagcttgaacagtgatcaaggagtcagtttcaatcaccacattcagccattgctttcttttttatccagcttaaagcctcctttatgccaattatctctgctacttcaggttgcaccaatccataacgacttcccgaaatagcttcaataagatgaccattggaatctcggggcacaccaccatatccaaatttactctctgtttgaaagatagcgccatcaacatttacctttaccatatttaacattggtttcctccagtgctctgtaacattgttaatatcatcaactaacaatacccccattttttgtgattgaaactaatccattggtcaaggatagttctagctgatcgcaccacttctaaagcagatgaagtttttccattccacacaatatcatttcggacagcccagattttccaactcaccattgcagcttctcgaaccacttcactagcttgcgattctagcaatctaaaaaaccatctgctgaaatcattaccacctacagcagcagtgttgacacaagagatgttccagcattctctactaaacccgcaatcgatgagtatgtgagagatggtttcctcagctaagtcacagaacaggcacataatctccacattaacatgttttgtattcaattgaaccttagttggaagacatcctgaaatagcacgccataaaaaatgatgtaccttaggaggaatatcaagctgccacaatctcttatacccttctctgtcagcttccaatgccacgctattattggcttggtgcaatgcaatataagcagacttcaccgaataaaaactagtagcagacttattccaaaaccaggaatcactgaccacactttcactcatctggatagaaaaaataagctctttgtctctatcattgaagagatcattcaccacttcagcatcccattgtttcgaccctaccgagagcaaattagacaccaaatgaccctccaacgcagggtggttagagctaacataagggttttgcacatcggggatccaacaagatacttacctcattcccaccaccaatcgatcttcttgcaccagacttcactaactcttgggcttcaaagatacttctccaaataaaacttgggttgtgacctaaagtagcattaagaaaactacctttacgatagtacattgccttataaatcttgcttaccagagagtgttcattagttaggagtctccatccttgtttaccaagaaacgccaagttataatcacgaagatctcgaaagccacttccaccttcatgtttatgtctacaaagtcgcttccaactcatccaactcactcctttaaaagaagaattggactgagatttccaccaaaactttgacatcattccttccagattcaaacaaatctcttttgtaaggaggaaaacgctcatacataactaggaagcgcttgggcaactgattttaacaacacctcttttcctgcttttgacaaaaactggctttcccaagaaaagattttcttttgcattctatccttgagaaatcccgaaatagcattcttatttcttcctatagtgcacggcaatcccagatacaaactgttctccatagcttccaccattcttaacatttcacacattatgtgcctagtatcatcacctgtatttttcctgaaaaaaaatagatgatttcgcattgttaacttgctgtcccgaggctctttgatacacttgtagcagctgtagcactctagtcgcttcattctcattcgccttgcaatacacacagctatcatccgcaaatagcatgtgtgaaactcgaggtgcgccccgtgcaacttgacagcccgtcaaccaatttttattctcataatgccgcaataaggatgaaagccccttagcacaaaccaaaaacaaataaggggacagaggatctgttggaatttattttac

SEQ ID NO: 39087 - DNA, 3650 bp, Cannabis sativa
gtataagagccattagtctgtgggtgtaaggacccaatagaggcttgaagcgggggacattacaatgtatcactaaattaatgcataaatagagatgctttaaaagtaattttgtactaaactaaaactaataaagggtgtgagtataagagttttattttatttttttaagagatgcatttagaaaatgaggaaagaaaaagtaggtgtcaataaaagtaattcatccatctagttcaaaactgagaaatactaaaaaagattagtgggtcctcgtatcactcgaagtgtcatatggttattgataaaatttatccaaacgtctaataaacctagtgcttccagtgtttcaaaagttgctgatttgttgtcagaaagcagtggttgggatgttcagaagttgtacgactttttttaacaaagagactgtgtctgccattttaaaaggttggcaacctacgagtcaagataaaaataagtggatttagactaaggacaaaagtgtgcgcttctcttgcaagtctacctatctgatccaagctttatagagagtccttcattgtgaggttgccccctctctctagaataagctttggaatattaaaattctagagtgccataaggtcctgtggtggtgtatcctgtctaatgctctaccagttcgagagattctcaataagaaattccatgttgaggataagatttccctatttgtagggttgaggattggcatttcatttatggaggtcttctccgtggggtatctttcccattgtcagtactggtattcgcatgtaggattgggtgaaattcatctaggattgaaaaaactaaggcattaatactgatgaggtgttcctttacgcgtcgactactattgataccatttggcgggttcgcaatggtaaggtacacaataataggctggataatgtgacccattgcattgtctctatgtgtacatcttatgcagagtattgtggttccatctttctctctccctccccgacagtgtggtggatgtttggcgccctcctctctaggattgactcaaactaaattgtgatgttagagttggctaggagagcatgtgtatcgctgtggtaggaaggaaccaccttgatgaggtggtttgggttagaacaaaacttttagagtttgttgatgctctggctaggttagcgactgcttgatgtttagcgttagaagtggcaaaagcgaaaggccacaagtttattatggtggagagcgactctagggtatttatcaacactctctctggaaaggattcctcttggattcttttgaactatgtttcgttttgtaatagcaccttttctttttttgacagttgctttttatcttttaatagaacttgtaattttgtagcccataatgtggtaaagtgagtgttcacccactatcggtatggttgcttacttctagatttcatacatgcgaacttattttgtaatgaccgcgaggtctaatcctttttatttttgcatgtttgtttttcaatatatatatatatatatatatataggggatggctgttgtcacgcatgggttttttgagtgactagtgccgcacacgtttatagcctttagattgtcttaaagtgaaggaaactttttcagctctaaagaacttcactttcacaaactaaaaaaaataaaataaaaaagaagctccaaaaatctcaaactttagttctctttcattgtttgaagatcattaccaaggtattttagtgcttttattttcattttcgtgttcttataattagttctttttagggttttaaacctcctttattacatctcagagggtatcgccactggagaagctcacaaagaaagagatcgaagaagatttcatctctctattaggtcacaaacctcctccccgacccaagaagcgaccaaggaacgttcagaggaaattgcatgtaagtcaaatgttctcaatgtggtttgcctacataataattgttttacttttctagtctcaaaattgtagagtttggagggaatctagttgaaaaaatcaagtattttgatgttatacttggtgtgtatttcatagtgaagcttttgggtttttcaaatgaagtaatatactctacgtttacttgtattagggtgtaatttacaaggctggaatctttcatataatgttagcctcatcacatatgtgtttttaggaatgtttaattataactgatgttgagataatgaaaataatagtttctaattaaattgactcaaaatagacaaattgtaaaaggattatactagaatctgtcgtccccatcatgatttcaatatttataaggttcgactttattacgttgttagtggaggaactgtgttaatgagggttcattcagagcctttactagagtctgaaagcttaatcttaacacagtaatcttgaggaagaagcctattcatcaatacattttgttgtaacactattctcatatttttttgttctttttttttttaacttatattttggttagatcattcatggcctttgtattcccttctcggtcaagtttttattctcatacttcgtgttggtgtctttttggtaaaaaaactgtttgctgtggattattttattctatacatgattttattgctaaaagtgctattactccataatgttctgtgtcttcttaagaggctgctgaggcttattgtaagggtatactgagaatttataagaaaaaactttgattcttatactataataaataaacacccttgtaaatgactgaattcttattagtctatataagaacaagctttgattctaataagcctgttcttcttgcctctaatataaaattttagttgactttgatagatttcattcaggtactgatttatttagaaaatgttaatagatttgtatgtgcaattagagctatatgaagaataatattataatttttagaataaatagtatttttgcctcctaaactttttaccctatcaaatttcgcccctaatatatactgcttgttacggatagtcctcaaattataatgaatgcagaaatgtagtccttccgttcacttctgtttatttttgccgtttattgacttatatgccagtattattttaaataaaaaatgatgtggcaagacatgtggatattaattttaggtgatgtggatattttaatgtaacttaaatatttttttgttttttttacattaatgaattaaaacaacaaattaaataaaattattttaaaaagataactataaacgctcaaaccctagctgccctttcctatttcctctctcttcttcacgccttcttcacgcatggttgtgttcttcaacctgctgatttttttttttttttttttgcagaaaaaaaattggatagataaaatttgggcttcaagcacgacgatcttcacgtctgtgttcttcccttttcaattttttaatgtcttcatcatcttattcttataaaagtggagatagatctatgaatatgtatgaatggagaccaccgacgtgtaattgtggtttagaatgtgttgaacggacttctttgacaaaagataatccaaggagaaggttttttgggtgtccaagatggaagatttgtttaatttttttttt

SEQ ID NO: 39088 - DNA, 1295 bp, Cannabis sativa
aatatttatagttaaatttatttataacccattaatgggtaatacccattaagaagtattccacatatatatatatatatatctatatataatatcccaagactcaccttcacaactataaatcgaaatacattcccaaatgtacaagagagaacaagaagtcaaaagagtcaaagttcaaaatgaagaatttgggaatggtgtctttttaggaatttaggtctttaaaaaaaagctaaaatcaggtcgagtggggcctggccgggcccgaagcccgataagaacccaatataatcgggccaaagtccccgcatcgggccaagggcccaacccggcctgcaaaaatggcccaaattgccattcctagtttagattagtattttgaccataacttcttcaatacaattaggaattggacgattgaagatgttttgaaaagatgagaatgagatatagaacttttatgcttagctcgaagtctagttctacttcaaaagttgtcaaaagttggatttacttttaattttgtcaaaccgagctcgtcgacctctactattttccaccaaaatgtacttgttgactgaggttttcaccaaccaattaaataatatgtagggagagctgtagaaagtttaatgcatgggatttttacgtggttggggcattaaggagccttagtccacgagtcttttttattaatgcgagtatttattacagagaatgttcttggtggatttatctcctattttctctctttgattcctttaaacccagaatgtttgacccctttttttctctggggtgatccctaagaatagatcacttgtctttctatgttagcttcataggggcacatattcccagtagatacaaaataggaaatacatgacctataccataggtatcttaagagttatgtggatataatcttttatcctctttatcgatgtgattcctcataaaatagccgtcactagcctttttgattgtagtgtaatagccaaaaaaggggggttacaccatctgtcatgtcgtttatggagatttgaatacgtcttctctcatgcggcattaaatgtgaggtgactattcaagagatctatgtacctcccaaaactgccttagcatgccctcggcttcttggagagtaaacatacttcttatgtctactccatgacacaccttcttgagatactcctctttcgcctaagacttagtcgattttcgtaagtgttggttcttatagatccacgtgtcatccttatccaggcccacgtatttagggaaaaatcaag

SEQ ID NO: 39089 - DNA, 1985 bp, Cannabis sativa
tacctggttatatgtgttgttcttaatgttgtactttgaagtatgttgctgagtttagaagatagttaaattttcggttctttgaagaattaggctttgttgaattggttttaccatatcgtaaattttaaagggtagcttcgtaactttaatggtattttgtatgcaggttgcttgccgagactttccacattctcgacatgtttgtattagctttccttttaataccaccccacatgagaagcattgtagtctggtaagataacatcgacaatgttatagtcggaactgttgtatggttatctttcgactgcttttaattttgtcctttaatatatgcagtgccattgttatgtctgtgacttacctgcaccctgtgtgcattgggcaactagcactacaagtattggccattgtcatgccaccgacaaagaggatttatggaaaattcagaggaaaaactttaaatcggggaaaatatcttcattaccaccctcgaaaatttccgctagtccattgtcggtgtgtgtgcctaaacataaccatgtttcaccacccattattcaattgtcaccttgctcgagaccaaatgattttgtctccaggccttctaccgtccaaggttgctcctcaactaattttgctctccctactattataagccgtggtaggagccaacaatcaggaatgctttcgtccaaaaacagatttcaaccgtacatggtaccaggaggaccacgcatggtacgaggtggaccgatgcttggtgctagtcatacaatccgaaagggccctttgagctctactcatgctatgtttaaaagacaaggaaatgttggggtcactttccctaggaatcaaactttgtacccttcatcaaacaccaggagtcgaactagtggtgccactcaatatcctaggatccacactccagcaccagcattggcaaacttggcggacttgagcacgatcatgttaaatgagattaactccctctcgcgtcaaaactcctatgatccgaactttgtttgtgcagcattaaatactccaacttctgagccccaaacttataatcaacaacatattcctccatcgaatatcgatagtcagaatatgtttcatcaacatgggaatcaatttcagaataacgaccaaactatccttaacccgcgtggagatgaaactcaaaaatttgttcttgatgaggacattgaattcataggtgcgaaagatgttagttctgtagattgtagtttgccaaaatggttgaatgataccaaccaaagcaaccaacagcctccagtggaaaatactcaacatccgaatgcagcagactctttttttgctccatctgttaaggactctaattctcagtttagtattagaaacactgatcttaggtttgacgactggatttttgaagaccgaaatggtcctgtggttgcagatggttctatggcaccttcattagatgtcatctctcctgagcctgctccaattgatccaggtatgcttttctttgattttgaaccgcatggaacggtcttgcccacacataatcagcccgaccggactgacccttttactctttggagtttggatgcttcttgaacagataaaaatggagtctttcttccattattatggtcattgtaaataaaaattgatgctttttgttaacttttgtgataggcaaaaaataagcttccccattgaaagctggaggagagcttagtgttgtcttgtcagtatataggattatcttatattatatatattatatatatagagagagagtagatagtactgcttattgtcaaaagtgggattatttttaaggattagagggtggttaattttaactccttgatccttttcatcttgttaaatcccacattctgagattattattattattattattattagcaaatcttgcttagttttatctcaaaggttcttagttggtcattgttttttttttt

SEQ ID NO: 39090 - DNA, 2955 bp, Cannabis sativa
agaattgtatgctatactttagattatatgacttattgatttaaatatttagcaacttaaaaaatattataaccgcgcgaagcgcgaattaattgcctagtatatatgtaaaggaaaatttaaaattttccaagtggcagcttaattagcatagttttctaatctctcttttctccatttttcttattttgtttaatttttattctaatatgccaacaaaaattatctataatctttaactttcaatcaatgaatattaatttagttaatgtgtgacttttgatttttacataaccgtaagctcacttttttattatcataatagttgatattaattttattataacggttttgatttttaaatgactgtttttgaattctatattaatctttttattaagtataatttaaaaactatcctattttgcttcttttagtccttttttttttctctctatttttttattcaatttttttgttatcccacaccaatatctcttcgtctcttcatatctcgctcccaatctcggtgtggtcgattacaaaaaaattcgtcaacagtttcaattgtacacattttttcggtaattttcttatctctaatagtttgattaagcatttgacttctcctcactatttctttaagtgataatttagtagttttctctttagtttaattatttaataatttggatttcgagttcatcttttaattgttcccaagtcaattttatttattattcattttttttgcatttgatttttctataatagattgtttttgtgtataatttaatttgatttctttattttggattttctaagttttgataggagcaaataatgcttggaggagaaaactaaggtttgaattcaatattatagttggtaattcaagccaccttcattgtaatttaatttaatttatttactttgagcttttttttaatatctatttatttctttattttattgtagaagaatgtataagtctctaccttgctttagatgtacttgagttgtcttcagctaaataatttctcaaaattcaattgtaaataacttttccagatgtgttctctgcttttgtcatagaataaattaggcacctttaactatatgattataattattttttaaatttatatgtgtatatataatattttgttgattatttattttttattttcatttgatcaatatcaataactaaaaatagagtaataaacttttattgtttgactttatttgtagctaactataagtaaatgtatatgtttatatatattctttttggaattaaagttacataataacttaattttttttaggtctgatctctatgatgcttaagtattaacattttgtatacttcaatatatatatatatatatatatatatagttagtgtaatgataatatccatctttattttgatattgaggcaagtgtatgaaaattttaatttgaaaagaattcttaattatctgaccacacagaatggtaattagagtggatctggtagtggttgagagaactattatagtggtaaataatatatatatgtgtgtttttattagacaatatctatatgagaaaagaatacattgttgacagaaaagattactcttttggtatttcaggagcaagactcaagagaccaagatcataaaattatatttgacccaatttttagcttgggccaaatttgacatatattttacatcactattagagttaagttttaataaaatattctaaaaaaaaaggcaatacatagctctatattggagatgctctaacatctatcatgagagttagaggtgttcattagaacacatccaatattttaagtatattcagatccgatttaattatatattagatgttaatttttttaaaaaaaacatgatccaatttatcatttaacaaaatagattatccaatcaataatttttataaaatacatggttaaaatggtatttactttaaaaattattgtgagaaatagttgtctccaaaatattttctcatcctcccacggtatcacatttttacatatttagaaatacttcaaactatatttataattttaattaactattttacttaattaacaagcaaaaaagtataacaaataaatattttcttatgtaaaaaattaatcttatttatcatcaccttcatttttaatattgtaatttagggtacaaatttctcatccacataatttgttaaatttaagggtgtctacacatttggtaccctgtgttttatctaaatacaagttaggtatactgtgttttcaataatgcttaaatgatatcctgtattttaaaatcataatacatatttggtacccctaaatttaaaattttttaataaaattttattaatacaatcaaagtactgtttaaaattttatgaaatctgaatttaaatttaattatttgattacatataattgagatctgtttggttaaattaataaaattgtattgattaaatcttactttagggtaccaaatatgtacaatttgaaaatatgaaataccggttaagtattattgaaaacacaaggtaccgaatgtgtttttcatgaaaacacaaggtaaggtactaaatgagtatattccctaaatttaatcctcttatctaaacatttcatataataaaattctatcactaatatttttatataaattcttcatttcagtcttcaaatacacataatgttgtgcaatgtactctttttacaacaccataaaacaaaatgtccaaaaattttattaatagttgttaaattattttcgtaattggttctttttttttctgaaattagttgaattgttctctctttcttctatttaattttaaaaaatattgattccatcatttttttttttcaaaaaataaccacaccaatcttcatattttcaaaaaatatcaaaattt

SEQ ID NO: 39091 - DNA, 2497 bp, Cannabis sativa
  modified_base (2401)..(2417): a, c, t, g, unknown or other
aagagacatcacacaagaagcttcatcctccgaggcttgtcaataaagatagctatcgtctacgaaaggaatatgggagactgaggggacaccacgggcaatcttacagccataaatccactttctttgctcaaaactccgaataagagacaaaaggccttcagcacacaagatgaacaaataaggggacaacggatcaccttgtctaatgtcacgcaaaggaatgattggaccgatcctctatcatctatgaacaacattataattgacagaagacacactgcttatgattaaaacaacccaatatgatggaatcccatccttaaagcatagctaagtcccactcgattctatcatacgctttgatcatgtctaatttaagggccataaaaccttttccccctttattattccttttcaaattatgtaaaacttcaaaagacaccaaaacattatttgagatcaatttcccaagaatgaaagcattttggaagggggagataacatggtcaagaaggcccttcaatctattagctaacaccttgaagataatcttataaagaatgttgtagagaggaataggtctgagatctcccataacagaaggatttcttttcctgagaacatgattagtatcattgagccccttgggaatgaaggtggagattaaaaaatcttgaaccacaaaaacaatatctgttccaacaacggactagaatatttggtaaaaagcaagggtcataccattaggtccaggagctttgtcaggatgcataccaaataaagctcccttaacttcttccatagaaatcggttccaataaggcattgttctgagattgagtaatagagggtgtgatccaatcaacaatctcatgccaatcaacgaaagaagctgattcaagccattattccaattggtcgagttcccttgatcatcttgaagcttttgaatggaatttttctttcttctagctgttgcagaagcatgaaaatacttactgttttgatcaccatctttaagccacagttactttgatctttgtctctaatacacctccttttgatggaagatattggccagcttctttttttcctccaaaaatagtgaacacgagtgagcatcccttagctttctaagcctttagaatgtagattttgattgagcgattctacctttaaaatctccagtaattatatcccgccacttagctacaatttctccacaataagccactttttatttaacagaacttcctagcttggattcttagctgtctttaccaagttgaaaatacataggttcagacaaccacgcattctcaaaatgaaaaaaaaaatggccggagaaagagacttgagtaacaagatccaaaaatagagcactatgctaagaagatgagtaatcaagattaaattattttgctaaactaaagacattacaccatgcaacagaagccatgccttagtccaatcttaccttaacccatcgatcagtaccacgacctcgttcccaggtgaattgatgcccatagagatctatatccataagattgcaatccgagagagtcttttggaagccttcaacaagcaaagaaggatagggtctaccaccccgcttatcagcttgtgacaccatgttatcaaaatcacccaacaaacaccatggtaaagaagagtcctacttcaagctttgaaataaatcccaggtatgagcacgaagtgagcgtttaggttcgccatagacaccagttaactgccactcaatcaaactaggaactctagtaattaaatcaatatgatttgtagagaagctaattacctcagcctcctctttagtgttccagagcatagccagtccccccttctcccttgagcttcaacacatagcacctttgaatttcaaacattcctcacccattcaacacgatccttattgcagtttcagaaagagagacaaattttggctgcttttgagaaatcatctccttaagaaattgtagtgtcattgggatcccaagtccatgacaattctaacttagacaactcataattataagcgagccccaaattgttggcccgcttggatcaagttttttaaaagtccagcacccttttgttcattctttcaacccaaaagagagccattgccacattcaaaatttttttttgaactataattgttgactcttttggtccaatataaaaaattgggtccacttatttttctttactatcggacccaatatcatcaacaatcattccttcttcatccataacagtaggcccatcaacagaattgtaatatcccaataagcttaataattaataattacagtttatatttatattatgagttaaccaggtaataagtgttggaaataatttaccaggatctagannnnnnnnnnnnnnnnnttcattaacatcctaatataaattctggaacaatgaaataaccacatataaagtttagtaaaccttacattgggtgtagc

SEQ ID NO: 39092 - DNA, 1134 bp, Cannabis sativa
tctctagatagtgagttgtctagtgttctaaaagtggctaatgatactaaagcttgagaaaatagctttatgaagagcctagctacttcttggaagaagacttcatatgtttacgagtcttcttgtcttgcacttgatgaacagaccttagttgttgctcaacttagagatcaagtaaaggtcttaagagagaaggtgactcaactcacagagcaagctgctacggatgtaactattatggcttatgctttgatgccatctacaacaaatggtcatccaacagagaagcacaatcttttaattggtcaactttccccgatacaaaagtcccaaagtttataaagtgttatgagtagtgtttcaatgaagatgctctctagaattaccaaaacaaagctttgttcaatgtttttactcatcaaattaaatacaattacataattgtgagctaagttaaaataaaaagtatagttaaagtagtagttgcagatttccttcttcagccaagctttgttaaagtgatcttcactatactaataccatattaaactttttagtataggagccacaccttagcgatggacctctaaactaagagacaacttcatcgcatctcatcaatttaagaggcaactggttcacttgtagaatgcgatataaatctcactgtaaagcaagctgttttggagaaaacttcttttattagtagtaccatcgtagatgcaccccgttccagtaccttgttattggtactagattcaagttgtagtcatagcatgctaacttgtatgtcccaggttctaattctttagtgatgacatatggccctttcgaataaggccccagtacttatgctgatgcatcttttgtgtttaggaatactcgtcgtaacaccatatctctaggcttaaattttctatctttaaccttggtgttatagtgttttgtgaccttttgctaatacatcacctgtcaaagcttagacctttctctaatcttttcaattccatctaaagacacggccaacagttgatggttggtttactggttaaattttagtctttgatgtgatggtggtgtgagctttacatgtatcataacttcatacctgtaggttagagcaaagggagtgtg

SEQ ID NO: 39093 - DNA, 1396 bp, Cannabis sativa
aacaaaataagtcatatgatagcacaaatcaaaactcacacaaaattaacaggtttaggtttgctttaaataggctaagttatttttaggttgatctatctaacatgtttaataaagggaaatttacacctaacaccttgtaattcatttaattttcaaaaattaggtggtcaatttttcattaggtttatttgatgttggctcattttttttgccattttttaaagtacagtctatttcaatttgtttaggcctatttctttaatccatgagcgcacgctcacatcacgcatcacttagcttgtgttcaggctagtttattgctttttttttaaatgacttctcattatcatttcatttcttcataatttcttcttctcattctctttctttagtgttcttggcttagaaagggttaagacaagggttaggtttgagtatatcttctgtaaatttttattgttttttgttctttttttgattgttttttatggcaatcactaggtcttcttgttcttcttttgatttttatgatagtaagtttgatacttaaagaaaaaagaaaaatatgtaggtcggattcttcgagtgatagtgagtatatatcagtagagaagctaggggttcaaatgtggatccaaaagagaacttaaaaaaaaacgtggcaaggagaaagtggttggtaaagatggcaatgatgagcatgggtctaagagaggtaagattggtgttcaaaaaaataattaagatgatgaagaggttgatgttgatcggttcataataaataaataaaaataaattatgcaacctgatataggtgacaataggctcttttcaataatctttagggttttacaaatttgcttattatttttggggagaagagtctcattaaaagtgagaaatagagagataggtcaaaatgacttatctcatcaagtttcataataatactatgagcattactattaggcgctagtggtgcctagcatcttctcgacatgtcgcgttgcgatcagctagcgatacttctagaaagctattatattaaattatgtgggacccgatatttagttggaccaatagcgatatgaacacataggaggatgctacaccactagtgtcttttaacatttctctaatattattggtgtttgacgccgtatttttaaaacaaataataattagaaattgaatgtgcacccttaacaatatatataaaactctattatacttttattcataattatctataacatagttttattaataattataattctaatcatctatatatctatactagtatattgttacgtgcgatgcacgtatgctatgttttatattaagtattatattatgagttcggaaggaaataaatgaataaaaaataaat

SEQ ID NO: 39094 - DNA, 3775 bp, Cannabis sativa
ttggcttcatagtcaatgttagggaaatagaagcaaacccaaacaagatccaagaccttttggacatgaagtcacccacaactatcaaggaagtacaaagcctaacaagatgcattactgcactaagctgatttgtatccaggtctatagacaaatgtgtacgtgtacccttcttcaacattctaagaggcagaggcaacaaaagatttgagtggacaggggaatgtgaaaatgcattcgaagagctgaagaaacaattggcttatccacccgtgttgtcaaaacccctaaacatgaagagagctagaggcatgtacctagtagtcatagaacatgctgtgagtgttgtcctcacaaagagaagaagatggtgtacaacaccctgtatactacattagtaagagactaatcgacgcggagagtcccactcatggagaagctaacctacaacttgctctaggcttccagaaagctaagaccttacttctaggcacaccccataaaggtgtacaccagtcaaccattgcagtaggttttacaaaaacctaaagcatcaggccaactacccaagtgggccattgagctttgccaattaaacattacatatcaaccaagaacatccataaacggtcagccccttgcagacttcatggatgagtgtgcaaacttatctcttgaaatctctcaagatttaggagaaaagcaagagccagagaagaaacaagagcaagagaagcaacaaaaacctaaagaaccaacatggaaactccatgttgaaggaagctacaatgacgaattgtctggtgtaggcattgcccttataacacctgagagcagcaagtgcacagagtaatcaaattaaaattcaaagcctcgaacaacgaggctaaatacgaagtcgtaatagctggccttaagttggcacatgaagtatcggttgaccacttagacatattcagtgactctcaactagttattaatcaaatcctaggtgagtacatagctcgaggtgagaaaatggtggcctacttgagcaaaatcaaatacttactaagtcagctaaaaggctacacaatcaggcagatccctagagagcagaatgctacaggatatgcgctagcccatctggcaagtagcaccattgcaacaaggccaacttggtgccaatacatttcctactggaaccaaacattaccgtccctaaagaagtcgatatgctggatgacactccaacagtgatggcacttattggagcttaccttcaaactagagccttcccagaaggcgagaatgaagcaacaaagataagaaggaaagctgctaggtatctaatcctagacggagtaatgtacaaacatagcttttccatgtaactcttaaggtgtgtcaccaaggctaaagctgaacgtctaatgattgaagtgcatgaaggctttttgcggcaactatgccgggaggtaaagcctatcaaaaaagatactcaaataagggttttcctggccgatgatcgaggactccatggactatgtcaaaagatgtgacaagtgctagagattctcaaaaattctaagagctccacccaatgagctcacgatgatgcaatctccttaacccttcgtagtgtgggggatagacctaattggtcaactctcaaaaagaaaaggaggggtacaatttgatgtagtcgcagtagactagtttaccaaatgggcagaagctgctccaaaaaagcccttgactttgtcgtcaagaacatcatatgtcgattcagacttccccagaagagattgcatcaaataatggaaaatagtttgatagtgacaagttcattgatttttgtaacagaaatggcatcatcaaaagcttctctgtcgtggcctgtcctcaagaaaatgggtaggtagaagctataaataaaatcctcaagggcaacctgaagaagcgccttgaggaagcaaaaggcaactagcctgaattgctcccaaaggtcttatggtcacacaggactacggagaagacggccactaggtaaactccatttgctctaacttatggctatgaggcgatattgcttgtagagttggtggcaccatctcatatgagaacaacctatgacaaagattcaaatagcatcctactggtagaatcccttgacgaagtagaaggaagaagagattaagtcagcctaaagctgcaagcctactagaaaaaggtagcaaggcacttcaacaagcaagtcaaggatagaaaattcttcataagagaccaggaacttcgaagtgttcctgaataccaaagatcccacaacagcagtgttcagacccaactgggaaggcccctatcaagttacatatataactagtaagggagcctacaagcagggaaggtataacaagaacttggagctcattctcctaccaagatattggaatagagagcacctttgcaaatactatcagtttccagcttacagaacactattccaaagtagcagttctacctacttaatattagaatacaaaagagctagtacccatgatttttatggtgtggactcccaccgttcttcaatgatggcttctgctgtgcaagtcagtagccacttgatatctagaagcaaaactgtgttatgtaagcttttagattcaatttatgtaagttgtacaacaacaaagaccaattaatgaataaataacaatgtttatgttcaaattattatgtctaaaccacttgctaatagattaacttctcaaagttattctgttttagttccacatggagaaaacaggtagcaccccaagaaaagtcccgtgcaaggtctatgaaacttggtgaattacaagtgaccaagagattgtaagtctgcatgttcatttgggggcacccacactgtacaatgcatcaaactatcacaaagaacttatgcaaagaaattttaatgcttagaataagctactaaacctgtgtctaagtcaggtgcatgcatactttggcgatagataagtggtatgtcctttccaaggcattggcaaagtatgctagtatcagatgtatggagtatatatcggactggaccgatattgacattggataagacatcataaacttactgttatatctttctaagtcaatatcacttagttgatctttggtcaatagatcttaatcttgagatggttaggttctggcttaaatatattatttgtatcttttacttgtacgttaatgttgatcaattggatcgacccaatatttacatcttgcgaacatggtagtacaaattgagtgagagcactaatcatagatatgaaatctatatcttctataattattagaagtgaaacgatgattttcttcgagcttgacttaacgcaataaatgattgtggtctcatttcagtaattatattagtttacaaaaatatcatttacaaatagctaagtattttaaggataaaatgcattgaagggtagaacagtaaatttgtccctactcgatgtagattatccatagaggatctttgagtatttggattgaaataataggtaattcaaatcgcatctatttttggtaatagagtgttctatgtaattaataagttaagaaatttacttggtaaattttggatctactaattgaaagtttgattacataaggccatggtccccacactaattaggataatatttttttgtagtctcaattaattggttttaattaatcaattagaattctaaataagtctatatcttgtttgtgaatttttcactaagca

SEQ ID NO: 39095 - DNA, 1846 bp, Cannabis sativa
attgcccagggcgaaaaagggttttaacaacctcaaaagttagaacatatgtataactgtattctaaaagagagataaccaagaaaaataaaagagagttcaccagtatcggatcaggttattggggggtgcgtgtgtgaggaggtcatgggattgaatctcagcttgtgtaactcaaaattatgcttcgataaaaaagaaaatatggtattcattttacatgttctagtcctttttaagtataaatcaattcaagttcatcttcgtaatctgttctgttgtgtgacttggagttcaacctgtacggagtgattagtgaatatattgctctggtcaaaacaacacaaaagctaactggtattaatccgattagggtaacatttgacataacaagctactaaaattatgagattaatacaaattacccttgaaaatagtgaaacaagtacaagcaagttattctaattattcatctccagaagaattcttgaacagattcttgccatgaaagtacaagcatgagcatgattaagaccccagcgagtccccatgatgagctcccaattctaagtacccatgacggatcaggagagagaataaacgaactgcttgaaggcgaagatgaagaagacgatgaaactgttttaatggcaataataagccctgctagaaccataggcagaacaaatccagaactccatttcgtttcaaaatttcgagtggtctctcttttccagctaatgttgtataaaggagaaagcactactgcagcaactagagctagtatcatggccactgatctaagagatgatgttggtgatgatgatgatgagttttggtatgtgcaagaattgtaggcactagccattgttataaccgtagaaatttccagtcttttttctttgaatgaaatgatttaacttgatggtcaagaatgtggttttgtgggtgatttataagagtaaaagaatacgatggtatgaatggttaaggaatctagttggaaagctttttatcataatattagaaaaagtgagatgatagccgtccaaaacgtgagaaaggaaaaaggtaaaaggcattgttaatagtatattatcaagatgtgaaagtttttggaacaggaaaaggaaggtattttgaaaaaaaatgtatatcacaattacgaaaaaataagcattacactaacttgaaaacatcaactaacgaggaagttattttgttcaattaattgcacatattttattacatgattaattgttattagtacaagcatttataaaatcccaaacaaataagttataattacggtcacgatagatgatatgatttacttacacacgatttccttatagtcaagtttttaaatgatagagtacttttgtaattaagtttacataaatatcatgtataagaaaattagtgctagtttaaataaaagtagcaatgcagtgcaaaattaaatctctattttgttttttagaatatctgtatttagcttaagctgtgtcttaatatttctatgaataaatttgtggcacatatcattactcttccaataattgtgataacctgaatcagtggtagtagttagcatttttttcttagaatcaatactttttttgatactaggagaggaggggttcgaatttaagaccttttctgtttgaggagaaaggtggaaccactatagctatgcctgtgaccacttttagaaccaatacttctgcattaaaaataatcatacaaatcatcacttggtggtaattctattcacaagtacttctcatagactaaagttcacttggtacgtttgaggggaaaggacaccctctgtgactgcggc

SEQ ID NO: 39096 - DNA, 1998 bp, Cannabis sativa
gcccaatcggagtcagagaaaccccggaggtgtaatgaagaactggttgagtatattaggccctgcccaggattgccttttaagtatcgtaaaagatgagtaacagcttgcatgtgtgtggttctcggagttgtcatgaattgactcaaagtgttcacagcatatgtgatgtcgggtcgagatagcgtaagatatagaagcttgccaaccagttgacgatactgagaggggttggtgagaagagtaccggtttcatcgtcaagcttgactttggggtccataggggtctttgctggtttgcttccagagagaccattgtcttcaaggagagtcaaagtatattttcgttgtgtgagaaccaaagcatcctttgctcgagctatcttaaaaccaaggaagtacttgagatttcctaaagttttgagagagaatttctggtttagttgttgttgtatctgctgtaggagggtgagatttggtcccgccaatataatgtcgtcaacatagactagaagtgcaacaaatgactcaccgtgtcctctagtaaaaagggtgtaatcagcccttgattgaacgaaaccttcttgaagtaaagtgtccgagagcttgcgataccattgtcttgatgattgtttcaatccatagattgatttgttgagtttacataccaagttagagtttggttctattgaatccggtagcttgagaccttttggtagttccatgtagacttcttcatgaagatctccgttgaggaaggcgttgtccacatctatttgtaatgtgtgccattgttggatggtagcaatggcgagcagcagcttgaatgtaaccattttagctacaggtgagaaagtatcgaagaagtcaagtccttcttgctgcgtgtatccttgagcaacgagacgcgccttgcagcgctcaacagatccatcactattgtatttaattttgtatacccagcgacatccgatgactcttttgttaggtggcaagcgaacatatgtccaggtcttgttcttgaggagagcaaataattcacgctgcattgcttgattccaaacacggtattgtgaagcctgattgtagtttgtaggttcgaaatgagctgttaaagcaaggatgaaagatttataagtggtagataatcgatcataagatacaaacttatttaaaggatggggagtagaggttttatcctgaataacagagtgacattcgtagtcacgtaaataggctggctgccttattactcggcttgttcttcttggcagattatctaattgaggttgctgaattgggggatctgttgctgcattctgatttgtttctgaggggcagtttgtttcttgcgagtgagagtcattattttgagagaaatcactgatttcattctcttcttcggctgctggagaaaaatctgctacactagtatcattaacatcagcagtaggtaatacaatatgagagaaaggatcaatatgcaggctgtcattgttaagtttgtaaaaaggatatatgttttcgtggaaaacaacattcctagatatgaggaattgtttgttgtttatgtcatacaacttataaccctttactccttgaggataacccataaaaacacatgtgcgtgttctaggttcaaatttagtgcgatgtgcagtaagagtagatgcaaaaactaagcagccaaaattccttagatgttcatatttaggagctttgttaaacaataattcataaggagtagtattacctaagttgggagtgggtgttcgatttatcaaatatgcagctgtcataatgcattcactccaaaatttaataggcaaattagattgaaaaagcaaagcacgagcaacatttaaaagatgctgatgttttctttcagcgaccgcattttgttcaggagtttccacgcaagtaaagtcatgtaaaatgccaaatttagcaaataaatccttaaagactaactctggggcattatcagatctgaagcat

SEQ ID NO: 39097 - DNA, 881 bp, Cannabis sativa
gttttgtgcaataaatggcaaataatttttttttttttttttttgataaataagaaacagagaatcttgacagacccaaaaaattaaggacttaatgatggagccaaactaaggaaattcccccagaactgaaaagggaaactctcaagtaaaaggctaaatccccttgaatatgaacatcttggctacagagaaaataactaagccacttccagattcttcttcatttagtgtcataggagataaagctgaattactaaactaataggcaagtatagcatcttcactgaagaggttgtgtacaatgataaggcctttatattaccctttatggatggtagatcaaatggttagggatgtggtttcctctgacaaggtttgagttcaaatccctcatgaccgcctacatatcaattgctacagtttcccaatcttcaaatgttgtagggttaagcagagacaagtactaaaacaatgataacctttttatatttaagatacagttctgatcttggaggcacagtttgtgactactcactagcagtacaaagtacaaaccaataaagtggaaagatacaaaaaatcaaaagagcaggaactcaaatcttatccataaattgatgaggtctatatcaagaagatgaaatcaagtttcaacatcttgatgttgtataatgaaaagtttcccttatctccataatactttttggatcatcagaagtaatgatagataaatattagaatgcctagaaaacaaagttagggatcaagacattggaatctattctagactaatttagaggaaatgaagtttgaatgactcatacttactaaagttatgttgccctaagctccccgattaagggtatattggaagtggg

SEQ ID NO: 39098 - DNA, 6380 bp, Cannabis sativa
  modified_base (876)..(879): a, c, t, g, unknown or other
  modified_base (3386)..(3388): a, c, t, g, unknown or other
  modified_base (3937)..(3937): a, c, t, g, unknown or other
  modified_base (3999)..(4012): a, c, t, g, unknown or other
  modified_base (4276)..(4276): a, c, t, g, unknown or other
  modified_base (5452)..(5453): a, c, t, g, unknown or other
  modified_base (5788)..(5795): a, c, t, g, unknown or other
ttatatttaattctggaaaggttaaatgtaatggacttagcttgaatgacataagatcttaatcttattagattaaattagaaataacataggaatatattatatccttgtgtaacaattgagagttgtgcttgtaatggtattcttgagcttgcttggcataggaatatgtttgaacaggtccaagaattgattgcataatatttggaagagttttgtgcactttattggagttcttataacctgagatttttgctaaagatttgctaacattttgctgtagcaaaacgcacagtttctgctaaacatagggggggattcaatagttcaaacctttcacaatgtaaaagcttacaactcatttttatttccatattgcatcaacttttgagttaatttacttattttcttgttcatttagttgattaattaatcatttcattttggttgttaggcttgttgcttggtaattaatttttgcaatagaaattttatttctatagtccttgtggagacgatactcgctacttatcattatattacttgtttgtgactacgtgcacttgcgtatatctaattttagcacaatagtagaggacggggatgtttccagtgtggcatgcctggacattacaaaagagactaccttcaactcaagaaagaagagcagaagacagcagtaatgcccgctttagcaagggtgtttgctcttacccaagctgaggcagaagctaatccctcagttgttacaggttagctctcggtcaacaactcttatttctctatattgtttgattctggggccactcattgatatgtggcggctagaatttttgataaattgggtagatcgtttgatagttatgataaagggtnnnnaaccctactgcctggcggagaattagttatctctaaaaggtgggttagttctatgccaattagaattgaggatagagaattgagtgatgatttagtggaattggacttagcagatttcgatatcatacttggaatagatatcttgtccaagtattctactaatattgactatgagtggaagatggtgattttccaacccaagggcgaggaaccatttgtgtttgtgggatcagtttaagggtcctgaatcctagtaatctcagtattgaaagctagagatttgttacaagatggatgcctagggtttttagcagtggtattggataccacacggtctgaatcaattcggccagaagacattaaagtggttcaggaattgttagatgtatttcttgatgaacttccgggtttacccccgtagcgggaaatagatttcgttatcgatttagcacttaaagcagagtcagtctttaaagcatcttatagaatggctctgtcagagcttaaagaattgaagattcaactttaggggatgcttgacctagggttttcacgacctagtgtgtcaccctagggagctcacatgttgtttgttaagaaggaatacagatgcctacgcatgtgcattgactaccgggaactaaataaattggctatcaagaataagtatcctttacctaggttcaatgatttgttcgatcagcttcaggaaaagatgctcttttctaagattgatctctaatcgggctatcatcagttgagaattcgagaggaggacattccaaagattgatttccgcactaggtatgggcactacgaatttttggttatctcttttagactaactaacactccaatagcttttatggatctgatgaatagagtattcaaggatttcctcaatatatgtattatagtatttatcgacgacatccttgtgtcctcttaatcagaagcagagcatgagcaacatcttcaaatggttctgcagcgattacaagaacataaaatgtatgccaagtttaaaaagtgtgaattttgactatcttaaaagtcctttctcggacacattgtcagtaaagacgggaacaaggttgatccagggaagattgaatcagtcagggattggctgagaccaaagatggtcatagaaattagaagttttttgggtatggctggttattattgtcaatttgttaaaggattttctaacatctcaacacccttaacagaactaacctaaaagaatcagcggtttctgtggacagacaagtgtgaagtaagcttcaagagctaaagtagtggttgatcacagatccggtattggccctaccatttgataatgagaagttcatggtttactgtgattcatccagatagggtctgggacgtgttttgatgcaagctgatcaggttatcgcttatgcctctcgttagttaaaggagtatgaatagcgatacctaattcacgatttagaacttaccgcggtagtatttgctttgaagatttggcggcattatctctacagagaaaagtgtgagatctacaccgatcacaagagcctcaaatatttctttactctgaaagatttaaaaatgaggcaaaggtggtagttagagttggtcaaggattatgattgtgaaatcccttaccatcccaggaaagctaatgtagtggcagatgccctgagtagaaagggtcccgggcaagtaaccaatatgattatgatttcacccacctagcagatgaaacagtcagattatgcattgagtttgttgtaggcaaacttaataatttgacattgcaatttgatatgttagacacaattaaagtggctcagttaactgatttagaattggtgaagattcgagaagtggttttagctagtcaagctaaagactttacagtgtcaggtaatggaatgctgctgttcaaaacagtgtagagcttgaaaatgagattctcgaggaagctcataccactccttattcattacatcctagcactaccaaaatgtatcaagatttaaaacccttctactaatggtgcgagatgaagaaagatgtggtagaatttgtatcccggtgcttgacttgtcaatagattaaggttgaacaccagagacctgcaggattgttgcagcctctaactcttcctgagtggaaatgggaggatgtcaccatggatgttgtggttaggttactaagaaccataggatgtatgattcacacattttgtacaagtgaaaataacctttacagtggatcaatacacatcattatatgttaaggaaatagtgtggttacatggggctcagaagttcattatattggatagggatccaaaatttacctcaaaattttgaatgtagattattatttttcaaatctcaaatctaattatcagtttgaaattaattaattttagatattagtagattttgaacttgaaaatggacaaaaatctatcttttttgcttaattggttatcttatttttaaaatttnnntattttatcttatttttaaatataaggtcagatattttatatttttaattatttatataattttataaaatgacattatttaaaatttaaaattagatatattttaataaaataatctaaaaaaatttgaaaaactaaccagatattttgtcaactttcaaatttttgttattttttttttaaattaaattataaaattagataaatgatattcatttatcattttattttattagacattttattttatttccttttaaaaataacataatttttgaaaagttagttgatatttttgaatagatatttaggtttgtctaaagtctaacttttcaaatttataggtttaattttaaaattaattatttaatttaattatttcaaaagtagtattttaattatttagattttttgaaattaatttaaattaaataaatcctatatccaactatctaatttgttgcatgtgtgcgttttatatattatttaactattcaaacttgttttataaaacctattattatttgatttaaattgctatgattaacntgttgacagatccaatgatttgattttaaccatagtcaaattgtcaataggtcaaataaatnnnnnnnnnnnnnnaaattttgtaatcttctttcatctttgtataaacctagtaacatgataggatccatccaaatcaatgtgtgcctgtgcctatatgtttgatttaggcctagatgcatataggaaactcatttaattttgataattaaaatggactacgttgctaaaataagattgtcacatttgatagattttatttaggtccaattagtattgggcttattcaatgaataaaagttgtttaattaagattaaatttctctcttttgggccttntgtgagagttagggggccattaatagtgggaacgacatactggacccatccatccctcacatgaataacccgaattgtgaaggcccatttgccttagttgaacaattgtataggttagttacactagtttaacctaataaaatttattagcaacataattaattttcaaaatatatgaaatttatttttcatcaaattattttaaaattaatttaagaaaaatacacttagtttaatgaaatatattcgagataaactatatgtatttttctgtatttaatcaaataaagaagttataactaattagatttttctaaatacttaattatttgaatttacatagaatatatatttaagttgaaaattaattttttcaaattgattttgaataaacttaaattagaatattttgaaattgataattaagtacatttttctaggaaattagttattcagacattcttaaatttttttttttttaagttaaaaatttgttaatttaagatcaacttaaatagagatattttttcaaattaaggtgattagttaaagatacttatttgttatttaattaaattttaaaaattatttaagttaaaaatttagttattttagaacaacttaaattatatattaagaatttattttattatattttatataatttcaaaattatatatattttatatatatttaatttttcgaaattaaattaaagttgaaaattaatttgagaccaacttaaattaagtaatttttaacattaaaatatatagattaaaatgagtgattaattgaaatttattattttaaataatgagctttaatcaaagagatattcaatctccattgttgaacttacatggttaattatttcaatataacttcgagacgctagacttcgtcccctttatggattgttattcgatgaagcattatcaccataagatctcatatgataagtattttgaaagttttcatttttattagactctcccctacggtgactacttagaaataaacttacagagtgtgaaataatggtcgaagctcataaaataagaataactttgactctctcctaccgggacaacattacattcttattttgatcgaataaaaggttgctagaataatgtccattttagatgagttgactactctattcaactaatnntatctttgactctcacctactgggacactatatttcattatgttggaaaccttggaaaataattaatatgtttactttttgatatttttgcaaacatattttttgaattttgtgtatgaatttaatcaaaccaataatttatttctgtttattgatatttgcagtatcaaaatatacaacccacatcccaatcctcaattagtttatgcctttgcaaatgaactccaaagtgtgaagatgactcctggtcagagtatcagttcacacttgctcatgatgaacatgaaattccagaaagcaactatgctgagaattgttttatctagagagcaaannnnnnnntttgttctcaacagcttatcacctgagtttaaccaatttgttgtatcttttatgactaacaattggaactcgtccgacatagacaagctggacgctgaactgcgtgcttatgaaaggacattgtcacttgcaaggaggtccctgtccagtactacaaataagggcaaaaagaaagttaaagatattgagaatgattcctccgacaatcttactacttcagactcagttgagaagaatatagaaagtaatttcacttcctcagattattcttcacaacagattgaaccagcaattagaacaacacaagaacaattaatcagacatattattcaatgttctcattgttaacagaaggaacattttaaatcaaaatatcctagacttctcaatactaagaataatggtaatgctttagtttttgaatcatgtattttagagaatgacaaatccatccggattgttaattctgaatctactaaccatatctgttgttcattgcaacttcttacaaattgaattatttaaaatccagagagttgaaacttaaagttggtaatggcgaaatggtatcggttagagctagag

SEQ ID NO: 39099 - DNA, 1676 bp, Cannabis sativa
tatacattggtttaaaggaattacaatattcaaaattcatgaataattaattcaagactaaaattaatgatgaattttaaattcaatatcactacaaaaattacatttttagtgattgagatttagaaatatgaattgtacaagacaagataactttattacatattaaaaaaaaatgataccgacataaaataaataaataatcattcttgtatgtgcatgataacatagtagtgtgtaatgtttatcaccattactaataatgcttactttattattcatttttatcaattatattatttaaatgtcaactagatggctttgatattttttctcattaaaagaattaagaattttaaaaaaatactttatcttggttcatagaatactagtaatagtaatcactattggttattctccctaaaaataaataaaataaataaataaatcaccattggtaattatacaaagaattgtaattagagtgcttttttttgttgttgtcatgattagtggcatattctccgcatgctatttttaataattattttttttttcattaaatgttcaaaaaaaattacaccaaagtgttccaattccaaggttaaaaaagtactaattataaattaaaattattaattttgaatcattttgatatatatgctctgcatttgcatattcatttaattgagacactaattatatatttatcaattacataataaaaatatttaaatataaaaagagatttgactaattattataaattatatatatgttgaaaatttattagtgtttcaatagaaagaccaatactaaaatcaggggcggccttcagtaaaattagaccctaaaaaaaaaaataagtttttaggcttttttttttctctaaaaaaataatagtatttttaaaaattattaatttttttttattcggtctctaataggagtgggccctaagcgtcttagcctaagactggccctggccaaaatataactcaaagacaagaaatacaagaataataatattaataaaataatattacatctcttaacaaaatatacacataaatataaaaatgaagatgaagagaagattacaaacacaataaataaaatcacaatataaatagtatatatatatctatagatgagagaacaatctcaacaccactaacaccaagtgttaagtagagaatcacagaacttgaactaggttttatatctttgtccaaaagcttatttccccttaccacaaacactttgggaagaaaataacggacatagctttctggatttatcaagcttatagtttatagtaaggttctctctttgatagaaattcacaaataaagtgtcttcacaagtgaatcaaagacctttatttatagtgtttaagatcacacactttaaaatttaaactcatagcccttatgaatattatgaactcaaatgtaactcatgcacacataacaaggattttaaattaagatgtgtaatacctttttacatacttaatattgatgataattgtttagattacaaaatgtaagtaacttcacgatactcttatgttataatttatgtaaatattacatatatatttatataactcataatcacattatatacattaattttatattaatatatattatataatatgtcacatttta

SEQ ID NO: 39100 - DNA, 1407 bp, Cannabis sativa
ctcctcctcctcctcctcttcctcgtcaacattgattgacacctgctggagaggcgccacatccaaagcagtctcacttgcttctcttttggaagaaacatatccacaatagctgaagaggtttggggatgagcaaaagtttctaaggtcaaatctagagaaatgacctcgtggcccttaaccagaggtgctggcttcttagctccaacattataagatttcccaaccttgccattgcccttgccacctttggcgacatccttaatgtcattggacttcttggtgatggttcccaaaatttttcaaccaaactcatctgaaaagtgtgtggattttctgcaaaacaaaatatataagtgttaatatcacagaagcaataaacgacaaaaaatatggaaaacaatacacaagtatgatccagaccatttattctagcatattgggggtattctatagcaaaatgtgaaaacatatttaaaaattatatatcaatgttatattaaatgtggctatatagcaaaagttttatttttaaaaaaatattacaattcaaatttaagattaccatacatatttttcttatcttttatcttgtattaaatgtgtctatataacataaagtttcttttttaatattacaatttaaatttaacctcattacagatatttaaaaaaaactatcttcttattatcattttttatagaaaaaatatatttctatttttactatttaaaaaaataaaaaaaagtgtatgatatttaaaaaaaaaatattatgataattaaattaaaattataattaacagtaaattttaaatattattatgttttttatacaaataatacttaaattaaacatttttttaaaaaataattttgtttattgaataacatccacacacaaaaaaaaaattatacaattaaaataaaaattaagaatataactaaatatacgcgtattttccataacttcctattcgttcggtcataggaaaaagatttcctattgaggatgacagctgccccctgtgtggaacggcggtcgaaactatggagcatctattcttgtcttgtgattttgcatttcacttatggcggtcaactccttggggtatcttccccatctgtgatattggtattagaatgtgggattgggttaaattcttatgggacctgaaaaacaaaggcatcaatgcagatgaggctttcctttatgcttcgttaattattgacacgatctggcgaactcgaaatgtaaaggtacacaataattgtccagtcgacatttttaaatgcattgacacaatttggtcttcttttgcagatcatcatgcttacttgctcccttgccccatattatgctcgtcggatctttggcgtcctcccaggattggttgaagctgaact

SEQ ID NO: 39101 - DNA, 2488 bp, Cannabis sativa
actcctccgaacaaagtagaagaagaaggaggaagaagagaaggggtttttgttcgttgtaagccatggctaaccacgaatgatttctgggtctgcttcagtagcagacttcctccataagaccaccatttcctcctccacatttctctctgttcttctaaacagcttttttttatatatatatataaaataaaaaatatatctttatatgaaaggccccaaaatcagtttacgctgctaaatctaatcaaaggtcaaacaaagataactgtcatttacaggtatagcaataataatgggaccacaaatatagctctctctctctaatctccattagtattggctataatctattcttagaaatacctattatataactggggatttcaatttctttctttggaaattgagacatgggttttattgattcaaataaacaaagaggaaataaagaaaaaacaaaaaataaaatcaatattctatttatattaaatagttcatttatattctcgagaaatggagattggagaatataaatatctttattaaaaatatataataaatctaaaattggtgttgaagaagtgggagggtgagaattaaagagcaaaaaagcaaaaacaaaaagccaagtgcaacgtaatgaagcaaaggtggatctccaagcacctgttggattggttcatatgatttttttttctctctttttctttctttctttctttctccactatatgtctttacacacttattagttatttctgggtggtgtggtgtggtgttagatagtaataagtgaaaattataagggttggtttagaagggtaggtaggtaaagtgtagcctttcagccacacaaaagggtacctttaaggcaatgagagacttgttagatctatcgttttttttttctcaatttctttctcttgtcgcaatcgaaaactgagaaaaatcgagactctgttttattgagtgttatatggataataaagatagatacactactcggacacgttatgggaatgttttggactcgttttgtctgtacagttaactagtgtttgaatttgaacccacacgtaaagttgggagttgggacccttcattctcagttaataatacccttttgaattctaggattattacttaatggagtttaagattattaataaaaggaggatgagttgagttgagtgggaggtcggtcactctggtggtgttctcggttcctgatacgttacactatgcattaacacaaaatatgtgggtgatgattttcttttcatttcttgtaataataatcaaacacaatcactggaaaaaaaaaaaaaatagtttagtgacaattatacaattttcctataaatttgttattgtgtgaaggaaggcctaacttccaaataacccttttactcctttattttaaatacaaatactagaatttaattttgtattttcttttagattttttacacactaatttttaatgtacacgatatgagaaggaaagaacacaaatgatcaaacaataattaaaaaaattatttagctaaaaagtaaatcttaactaaatgttgaagaatattgagttattataaatcatctattgaaagtagaggagtattactgtcaaatctctattacaacctcttaatcaacttttacgcttaaaaatacacgtcgaaatatttttttttcaatttttttttcacaatggtattcattatgcttacaatatcattcctgtaaattttaaaaaaaaattgaataatttacagtgccaaaaatacgtttaaaattttttaaacatgcttgttaattaagctggaatattaaaaactctgttttgggcactgtaaactattcaaattttttaaaaaatttacatagatgatactgtaactataacgaatatcgctataaaaaaaaatattccgacatgtgattttaaacgtggatgttgactaaaaaattgtaattagcactcttcttcaagatattttttttttttttttggaacaaattgaaagtattttgttagttttaaaaaataacttaactagaataatgatttgcacttaaaatatacaccaaaatattacattcaatttcaataacataagcactactttttaaagtaatgaatctcagtttaaatacaacaattacgccaaggtcttaaagaagaccccaaggcccattcatctaagggtggtggtggattggttggcatgtataatgtacatatatacttcacacaatctaaaaagataggagtttgtgtcctaaaagaaatgaacaaaatcatccaatttgtaataataatgtgtgtcatgcacgttttatgtcgcatcactatttcaatatttgtaggattttattattattatttctttccaatacttatcttatacctttgtcatcaggggcggaggtacataatgcattagggtggccctgacctcccacaatttattacaaaatagtt

SEQ ID NO: 39102 - DNA, 1181 bp, Cannabis sativa
ttatttcatttatataacatattaaacaaacaatggttctcaaaactaaaaacaagacaagaaaatgaatgacgtgaattaactagatattagataaggggcataaggtgacatgtatttatagatattatgtctacatgtttgctgtttttaactgtaaaaatttagcagaggtagtcaaatttcactacaaacaaacattccaaattccaaaatggaaacattagcagatttttaaatttcattggacaaggaaggacaacaacatactaacctacaaaatatgcattggaaaaacttctgtatttttttaagaatgaagatgaagtgaaaagtttgcatagaattatagtctcataattttgtcttatatgatgtgatatgatatatattcaaattaaaaagaagtaaagtagtgagttctgttctgttcaaattcagttgttatgtcactaacaacaatcaggaatacactaactaaatgatgagttgttacatgtttattgatttgagtcagcataaagtcagcacgcactctacagtttgagatttaagtctcaattatgcaacaatggtgatcaacactaaaattacattaatcctcctcactctgttatttacagttcttggacaaaattagagagtagacttgaataaaagttgaatgagattaacccgagttggttctaagctaactgccttgaccttccaggaatataatctccaacaattattaattcaatatgtgaattagtttcaattcaaattcacttttaaaagcagttataatcaatggcttaatcaatccacaactaatcagaccaaagaaaaagataaaaagtttaaaaattcctctacacaacaatctattgagttttaaaaaagactatgcatggccataatttaaggagaatggaattatttttccacccaattccatcatgggcaatgagtttttcaatcggattttcttttcttaatttttttattctctgattaatttatgaagataacatactaataataatagttgtctcttttagtttatagcatttgttttttgttgcttctttgcttagtattcttaattaatagataaaaatgaaagaagaaaaaaaaacagagtaactatctgtagaaacactttccaaacacaaagctttattatgcactttccaaat

SEQ ID NO: 39103 - DNA, 2305 bp, Cannabis sativa
tagagtatgtgaagacttatatataagataaatatttttatctattatttttcatatgcgggacttgaattactaacattttaaactatatatacgtactaacataaaagtgtgacaaaagatatgcactaattaattaataaataatgtaagtatatacttaaaactaacttattaacttaattatgctcttgcattattatgaaagagctgtaacataagataagagattgatcttatccaaatatattttacatgtattgcatgcatgcatgaatttcaaagtggtcactttttttctttatgctctaatattggatttaagagacaattaaactcatctctgatttaatataataagcaaaattattcgctttgaagtcctttcaaactttacatcacaaattgaatttttagggtctatagatatatacataattaattctaataatcaaactttgttgaccataattatatatcaaaaagattaattaattaaatattattaattttttttctatcacgttggaatgtttttctttcacaacacagttgtatagatcctgacccttttggctgtactcaattgattttctcttattaattggagtcactaccttgccaaatggttgtaaaatctaaccccttgggggctatataatcaaatatatatataaatacttttattatatattaacgtttaatgttaagttatattcaatagattgtcgttacttagaaaaaaatccaagaaggaaggcttgcattttctttagtagctgcctaattattaataaagctttgtcttattacactattacaaattctattattggtgatatctatcatcatgaaatacaaacgtgttatatacgtacatatatatacacataattttatgtatgtgtgtaagaccttttttagaccctttatacacttctatttatatgtacttgtctagtttttgtttgggttattgtttgtgaggttgttatttatacaataataatactaataaactcacaaatattaattaagcacatagaaaagcttggcctacttttgaataacatataaaggacaaagaggagtagtactacgaaactcaacttgttcgacagctaagcttaattggcaaatggtcccaaatttcatttattattaacacacttcaaatgtgtatatatactatcatgaaaatagacctttgtgtgaacaattaaatttctttcaaaagaaattaattaatttagatacatgaaagcataaatgagatgatgaaatggaatgatgaccatgagaatctgtatataaataaataaatttatatacaatatttctataatattcaaaccaaattcaaattgcatgcaatttacattattttgcttttttatatgtgtcacgctacattatagtcgtagttttgtagggtccattaaatgattgctttatttatttatttttttctttattattttttttatattatttttcatatttgttagatattaaatgattagtttaaggcttacatccattcgtgcatatacgtgtatgtatatttctctctcagaatttattacacaaatcgtaatgtcgggtaagagcaatgatattgtgtgaattaaaattttaaaatgaaaaaaatatcttctcacattttaaaaaattttacaatattatcaatatatataaaaaattatatttttttacaatgatattaaaaaaaaaaaaactgttaaattattctctacacccctttacattatctcttcacgtacaaaaaaaatttaaaatttaaaaattagcaaaattattttaatattataattcaatcaaaaccatatacatacattattttatacttattatcgtatatttattttcagaaaaagaaaaattataacatataatatatgcaatacatatgatacccaaatgtatatatgtacctataatcaaaattactatcggctggtgtccataatttgtttatcaattaccctttttttttatcacgatcagtagatttaatcctatttatatatatttggtactactatacttactatatatggaaagaaaattgaagagaaagaaaatataatggaaaccaaaataattagaatgaaagaaatgaaaagtattattacgtacatggacttttaccctatctttatgcttagtaaagaggaaagaaattaaggggaagaattgaagcgattgagcaagggaaaaagatccgattattttaaaattataattctaacattttatgtatgattattataaaattaaatta

SEQ ID NO: 39104 - DNA, 2641 bp, Cannabis sativa
ctttttcaaatttcttaaaaatttgcagggtgtcttaaataactataacgttcatgaccatgagaaaaaatttgactaaaaaattatttcgggtgttaaaatagattaggatggtgttaaaatagattagaatgcatcaatatatctattttaatcaatatatctattttaaggggggtatatggtataatttccaaaaagtataatactaaaaattcatcaacttgagggtccacttaaggcacaaacaacttaataattaaaaactaattttttaagaataaataaattaataattagtcggttagaattttctaattgataaatttattattatattattttgaataagataagttttttaattattaaatgttgtccttacatacacaattgtaaaaaaaaaaaggttttaacgagtaaacggaagtggggatggagttaatacatcactataatatggttatcacgacactttatttaagagtcattttgcaccttaacaacatagatgaaacttggacacagcagattttcgttcctcattttcaaacttcacttcattttcagattaatattactctctctttctctcttcacttagatacaattaatcctctcttagttgtttttgtttttgtctaattggagtattttaaaaaccatggcaacggcggcatgcgccttagagactgtggctagaacactggcgtgtcgtgacggcgtggcggcggcgcagctgaaggtgacgtccatcttcgtcatcttcgtcacaagcgtaatcggcatactctgtccggtgctattggccaggctttttcaaggcaaaccagcttacgataaggccacactattaatcaagtgcttcgcggccggagtcattctctccacatccttagtccacgtccttccggacgcctttgcagctctctccgattgccaagtggcatcgctccacccgtggcgggacttcccttttgccggtctcgtgaccttgatcggcgcactagtcgctctccttgtcgacgtcaccgccacctcccacgctggaatgcacggtggcggtgacgctgctgaatacaaaccggtaggtacaaagggggagatggtggtggtggagacggagactaagaaattggtcgagtcgagaatcgaaatgggtgagttgggtggggctgagggagtgacgttggaggaggatttggtgagaatgaagcagagactggtgtcgcaagtgttggagattgggattatatttcactcggtgattattggggtgaccttgggaatgtctcagaatcagtgtactattagacctttggtggctgcactggcgtttcatcagatttttgaaggcatgggtctcggcggctgtattgcacaggtaccatggttacacttaacactctttttcttcctgatttgtttgatcaatatttgaattatataagcatatgtataattacttttaagcatattacttttcaaagcttaggatacaatttgtgtaacaatgtctccgattgacaaacaattaaagcaacctagttataaaatacagtaaagaaataatagacaaatagatagttaatcatattaatatagccaaatataacatataaatacagtgatatcatgttattattgacaaatactacactattattaatacaatataatattaaaaattacatttttatataaataattattaaaaggtactaataatagtggctaatagcacctagagctgttatatatataaattatttttagtgtaatttaattctgagtctcatatatatatatatattttctagttaataagtaaaaaactaattttctaacaactcgtgaatcactatcaaatatagtataatattgaataccttaaaatattaaataccatttttttattaatatattttttgaagaataattaattcaataagtggagttttgtttgttatgatacaggcaagatttagttttggaacgacagcgtatatgtgttttatgtttgcagttacgacgccaatgggaatagtactgggaatgatattattctcggccacagggtatgatgatagtagtacaaacgccttgataatggagggtttgttgggctctttctcttccggaatactaatatacatggctcttgttgatcttatagctcttgatttcttccacaacaaaatgatgaattccatttcatggttgaaaaaggcttctttcattgctcttgttcttggttcaacctcaatgtctatcttagccatttgggcttaaaacaacgaaaaagtgctttcaataagattggaaaagtgttatcaaaatattacataccactttttgatgtgttaagtctaactcttgttattataatatttaaatgtaatgtttatttgatttattaaataaaagtgttacatatatatattgcaaaagttttgacacaatacttgatatagtgaaagaatgttatattattaatataaataatataaactagattaaataactgtgaaaaaatatatatttaacatatagagtaatttgcggcaaaaccccctcaactatcaatttacttacaaaaaaccatccaacctcatattttggtgggaaaaccctccaaagt

SEQ ID NO: 39105 - DNA, 4072 bp, Cannabis sativa
ataaattagggtataaaacccaacatactgaaggtttctctgctgccattcgtctttatgagaacgctgatgcttttactggtattaaaatttgtaggggtgctccttccttatccaatctcttgttcactgacgatagtatgttgtttactcctaacacctcttaatctagtgatgccattaatgatattcttcataattatcatcaggtcggtggccagttggtgaatcgtgataaatcttccatccttttctccccgaatactcccctggactcgcaaatcaggttcaggactgctttgcaactcactggtgaaggatttataagcaaataactgggagttcctcattgtgtgggaaggggtaccaattctgttttccattaccttatacagagtgtctcttctaaactaaatatctagtatgataaattcttttctagggctggtaaggaaaccctcatcaaagttgtcatctagcctattccttcttttgcaatgtcctattttaagatcccaaaatctatttgtcaaaacatccagcgcttgacttcaaaattctggtggggttctacttctaatgttagcaggatccattggaagaattggtctgctctctcagtctcaaaattttttggaggattaggttttagaactctcactcatcataatcaggctcttcttgccaagcaggcttggagggtttggtctaatccagactctctccttcattccattcttaaagctcgttcttttaaaaattctgattttttgctcgctccaaacggatacaactcctcctttacctggaaaagcctcctctggggtcgtcagcttcttaagaagggcttgtgtggaagataggtaatgtcaattacatacctttatctgcttccaattggattcccggaatctctcattctactcttcttcaccccattgacccttctcttactactgtgtcgtttttcatcaatcctgatagtacttggaatgttgcaaagttaaaccactatcttcccttgtatcaggctaaaatggttctccaaatccccatagaccctaaccctgttgattctctaatttggggctttcaccaatcaggcatcattactattaattctgcttaccattttgcctctgccgctgccaatgtcacatctccttcatcctctgacccaaatccttttaagatatggtggaaaactctctggactcttccaattcccccgaaaataaaacactttacttggaaagctttcaatcacaatttaccctgtgctttaaatctgttccacaagaaagtcctaaatgagcccttttgccatttctgtggaggtgatccggaatcagtaactcatgtacttattgattgtaccagagctcgtcgtgtttggaagcactcaaaatttaagaatttccacaatgatcaccgaagggtttatatcaaggagttttatcttcaaggcattcacttaattccaaaggaggatctccctctttttgttagttcaatttggcacatttggaatactagaaattcaatattatttcaaaaatcctatgtttctaacaatgtggaagagtatgtcattaattatttacagaaatacaaggaagcacaaaaaatacatgctgctgctgattcagtagcaacttcgcatcaacagagtttttcctctcaatcctcagttccgtgcataatacaagaggataccccagctttgtctgttgttgcagccttagatcatgacaattgcgttacaggtctaggttttgtcttcaagataggcctacatcgagttgttacgtctacaaagatccataaaccaggagcatccacaccaatttttgcagaaagccaagctcatttagatggcatcgcttggtgtctctcttctcagctgaagcttaagtttatgttcactgactgcctaaaccttgtatccaaagttaatggacattggaaggaccaatcgactctttctagccttgttttgaagatcagacattccttctccaacttccctgatgcctctttgaagtacttccctcgccaatttaatgccaacgcacactcccttgctaaggaagccattaggttgcgagaggaagattaggaggaactttttttagttcctctgttcgctgctgcttgtgttgttctgttctcttttgcagcttttatttactaaaataccacttacacatatccattcattttagcccaaatatattaacttttttttccttttatttttcattttcaaatttagtatttagtttcttatttattttctttctcagtttttcatttccaaactacctttcagctattactttcgaaacccacattcaaaatctacgaaaaaccacctcctacccataatttttgctatcttcttcttctaactgccttctttatcatttttttatatctttcatttagcatatataatcattacaagaattttccacattactgaaggagacatcctccggtattaattattaccggcgaaattcgccagtaattactcgctggtattaattggtcgctattattgggtattaacggccaaaatagacttctgccgataataatattaatactgatagattaacatcggtggggtccgccggtataactttctgtgtttttacacgctgacacattaataccggcagaccacatttagtgttccgccggtattaataattttttatataaaaaaagattttattgtttttaatatttatataataaaaataattataattataatattatatatattattaatatatataatattatatattgtaataattattttcaaaatatataattaattaaaatttaaatttaagaaaataaacattaatataaatttgtccataacaatatacactaatatcttaattaatattataaaattgtcttaaaataaactctaaaacataaaaattttcatatagaaacctaattatcattgttcagatcagtaaatttcataaaatcatctgcattcgagctaagtcttgaaccttcacgattatcacgagattaaggagccgacggggtagggtaataaggttgtcaagtctgcggcgtaggtaagatctccacaaattgttgagtctgcggacgaaccaaagtataggttgctgttgttgctgactcttcgcactgataatttgaccatacataggctattgtggagatccttccatttgaccatacacaggttgttgctggaacattgacccaaattgaccgtacacaagttgttgttgggatgacccaaattgaccatcacaatctttacatttcgaggtcatcactaaaatacatttaggccattccaatattgtggacatctaagatttcgcaatgtggtccaagacatgtcgattgtcatctaaaattttataaaggcatataagattttataattttcaaaaaaattaaatgataaaattttatgctatttaattattaataaattaaatatattttttttatatttatctttcaattaattattactacatattttattattaacttattaactttaatattttaatattaatatattaatttttttaaaaattattatattaataattaattgaatttaatttgttaatttttagataaatttttattaataaaatattaaagtaataatttttaaaaattaattatataaatatgtaattgaatttattttataaatttatatttcaagtaaatattacgtataagtttttttattattagaaaaactacaatattaaatttaatattaattatttaattatttataagttgttatattattaattaattatatttatttgttatattaatcttccaattaattattacttataatttttttataaaatattacattaataattaattgaatttattttatatgtgtatttgtcaagtaattattacctataaatttttctaggctaattagtaatttttccccctaaactttgacaagtaccaaatcgtgccccctgaactttttttgccgttgaaaattcccctc

SEQ ID NO: 39106 - DNA, 2455 bp, Cannabis sativa
caagcactgggaagcatgtaaacaactgcttctgtatctaaaaggcactctcacagaaggcatatggctcagaccaaccgataactttcatttgcaaggttacactgttgcagattgcgccaactgcatcgatgataggagatcaacagttggttatcttatgtttttgggtgacaatttggtgtcttggtctgccaagaagcaacatgttattgctcgatcaagcacagagagtgagtttaaagctcttactaatgttgttactgaagttcaatggatcttatccctcctttctgaacttcaagtatctcagtctaaaccacctgttctatgggttgacaatcaaggtgccactgcacttgctgccgatccagtgttttatgcacgatgcaaatacattgaaattgatctccattttgttcgagattagatactatcaaaacaactatcagtctgctatgttccatcgtttgatcaagctgcagatatcttgactaaacctttaactacaaatcggttcaactacttaaagggcaaatttcatatggcatcatcaccatttcgtttggggggatattaacccagattctgttagttaatgtttagttagttaattttattctgcaagttgttagttagttatttttctgttttctcagcttgtacttgttttctcagtattataaataaagacttaagctaaccattctggctaagcttttcttggcaatcgttttctttgctctgcaattcactctgtttctttctgttgtggtttttgccttgatgagcttctacagagaacaactccaatgcttgctttataatgattgatgctctcaacacatattggtgatgcatgctagtgctggtttaatccaaaaaatccattacccctatcactaaaattaatgtctaattacactatattataatataatatatgtatatatataaacgtgatatatgaatgtttattttcaataccataacaccaaatattttctaacatataattctcttacaagaaaacacatttgtagaatgatcgataaaattatataagtacaataatataatatacaaatgtataagtatataaatatattaatcacgtgatatatatatggataattatctattaccataacaccaaatattacaacacaaaatattttctaacatataattcttttgtaagaaaacacatttgagaatgatcgataaaattatataagtagaacatgataattgaatttaacataccgtgacaaaaacttaaaactatgatagaaaaaatttactttggctctatgatttcttctctatcctccaccttaattgtagataaaaataattcagttgtgttgagagagtaaataaaaatttgtgttcttctattattaacttggattgttcataaaaattattgccttgagagactaagaaaacgactgaaaataatcatatttcagattgttatgtttttagtttagggtattacaattattatatttcaatattattatatgtatatatagatatatacatataatagaacatacacacttatttttatattttgtttgtattcatgattaaacatatattaaattttcatgctaactcactattatgacatatagtaataacaacggtaacatcaaataaattaaaaaaaattagggtttttaaatttatagctacataaggttatcttttttctctggccatgttcgcaaccttcccttaacataggtgtgctaggtcgggattgtgttttgctattgcgattcgatttttgctactgtgattagtcttatctctgtgaaatagttttgagtgttttagtcttgtctttgaaacatgatttttaatgttttagtcttgtatctgtgacatacttttgagtgttttagtcttgtctgtgtaacatgattttattttgttgctagttcttattttcttcgatgactcaccatcaaatctttgtcagtagttgggaataacaagttctcagtgattgaaggagttgttagtagtgcagatacgtaccttgcaccatagttgagtgctcaagctacgaagttgaataaacctgatgcaacaatttttactattgtgtcttctgaccggtagatgaaactgaatataagtattcttaagtttaactgtgatgttgctgtaatctttttcatttgattttatttttaatttttttgtcaaacaatcttagaattagacgattgattatttgactcggttttctatttttaatcgtgatcgtgtctccaaatgagggagatgtcccaatgggattgcagactatcattttagttaattgctattaataaaattgtatgatttatcaaaaaaaaaaattatattataatattattcttcaatataaactatccctatccagaagaaaataagaaaattgtgagttggtaca

SEQ ID NO: 39107 - DNA, 2759 bp, Cannabis sativa
  modified_base (853)..(867): a, c, t, g, unknown or other
gggtctagtcctgggttcgggtttaggtcccaagcccgagttcaagtctcaggtctcgagtgcgagtctgagtttaagggcgggtcccgggtccaggtctgagtccgggtccaggtcccatgttcgagtccgggtctgggtcccaactcttgggtctaagtttgagtttgggtttaggttcggttcgggtctaggtttgggttaggtaaccgggttcagtcagagtctgagtccgtgttgtgtctgaattcgggtctaggttcgggtttcggtctgggtcccgagtcttgggttcgggtacaggttcaggtgcgagtccatgtcccagttttgggtccaggtccgagtttgggtttgaatctaggtcccgggtctgagtcatggactaaacccgggattggcccgcacccgggtttaagtttcaacaacctctaataatattaactcgtggactaatattctcaaacatccgaatcacataaaaatcattatgtcatttataataaaacctaaatattcatatttttttatatatatatttttgttctaattaccaaaaatcttaatcaaccatactaattttccaagttagcatattcatctcaaaattgttcaattaaaacattttgaaattcaattgattaataaaattatactaattctcccagtttatctcattacttttagatttatattataattgctttctatttgatgttggtttaaaaaaattaaatagaaaattagtttaaattagtttagtctgagttaagaaaaaattaatagaacttttgttcataatttaattcacacataataaactaattctaaattttataataataataataannnnnnnnnnnnnnntaataataataataataatctatacaatgcgtaactaagaataggatatcacaaacaaaatttgtaactagcatgtaactgcatgtatacactgcgtaactagaacacaaaaacggagctacataagcagtgacagactcagaatttttactttgtgggagcttatttatcattaaaaaatatttatacctatattataattactcttactagatttatttaattttgtggggggctttttctactattttaatctataattatgaaattaaaaaaaaatgcatttaattttttaaaaggcagtatttttgttagtgggggctatataaaagtgggttcgtccctgattggagggtgaggtgtagggatgcacgggataagaaattagcagggagtgctctctccgtctccatcctcgctaaagattttaattccccgcttatctcccatcgagaatgggacagaaaatcccctaatgggggcaggtatgggattggacgaaaaatctcttcacaaaaaaaataaagtttataataaaaatttaaatgtataaaaatattaaactacataaaaattaaaacattatatattacttattattcaataaactaattattatccaaaatacaactttaaatttataaaaaataatactaatatactaaaaaaaatgtaaaaataaattacaaaatataaaatattgctagaaatataaaataaaatattaaaagggtcattgccagggcaaggagtgtgatcctcgtccccgttctgttacatttaggaaaaaaataatccttgttccggcctcgttcgccatttacacgagaaattcctgctccattacgggcaggtccccgcgagatctatccccataaggaaaatgtacatctctagtaaggtaactttgacccctgaaatttttatattttcttaaaaattaaaaatcacattcaattatttatattttcttttaatttcttctataattatgttttaccccctttaattttctctttagattttggcccccattagtttgagatttccacccaatcacttagattattaaaataagtaattaaagatagtttataccaaacaagtaacttagattatgtatttataatatttcgtactaccattaattttctagcaagtgaaaaaaaaaaaaaaaacagaatataaacaagataagacaagataggcacacacgtaaacaaattttcagctagattgttttgatatccgtatttacatcataaatcatgctcttttacaattccaattctaattgcatgattcttactatctttgtttaaacttatttcattttgttacataattgtttattttatcaattaacttcgacaattagttgcaacataactctcaagtctctcaacacaccattttttttttattaaaaccattttttatttaaaaaattactttaacaacatttatttgatgtgtaacggttagattagatcaacctcagtttttcataccactttctttttacttagtttcaaagcagaacagttcatttattgagtactaattataatattttattaagtatttatcaatctccacgtttaaaattgtatgttggaatattattttttaatttttttttataacggtattcgttatacttatagtatcatccttgtaaatttttgaaaaatttcaaataatttacaataacgaatgtagaattttttgatattgcagtttactaaatatgttcagaaaacttcaaacgtatttttagtagtataaattattcaaaaaatttcaaaaatttatagagatgatattataaacataaagaatagcacctagtaaaaaaattaaaaaaaacaccaatatattttttcaaataa

SEQ ID NO: 39108 - DNA, 4320 bp, Cannabis sativa
caacttttcaaagcagaagctgaagttcagctaggtaaaaagataaaaattgttcaaagtgactggggaggtgaatacatgtctctcactccctatctcaatcagtttggtatcattcatagacacccttgtcccaccacccatgaacaaaatggccttgctgagagaaagcataggcatgtagttgaaaatggtctaactttattagcacaagcctctgtgccctaaaagttctgggatgaagcctttaggacagtcgtgttcatccataataggttacctacacctgtattgaacaaaaaatctcctatagaaatgctgttcaatataaaacctgactactctacctttaaaacatttggatgtcaatgctatcccaacattagaccatacaataggcacaaactacagtttcgatcctctccctgcatctttcttggctatagcattaacaacaaaggttttaaatgtttagattccactggccgtgtctacatctcaagggatgtcaagtttgatgaaaatgtctttccttatgccacaacaatccaaaaccaaactgatacacaaatagaatatcatccttttgctcttataccaactgcccaatgtgacaccggacacatttctgaaaccatcccaacaccagaaaccaccccacctgtcaactctattccaactcagtgtcctctgtttactcatgtgtgtgtcagtccaaccattacaccttctcaaccatctgaaactccttcatcaccctctctcccaaataatatcaccagtactcaacacaacatgtcctctacacctgtcccaaatgtatctgttgagtccactgctgttccacccactgtttccacttcaattccttccacaaacacacataccatgaccaccagggctaaagcatggattgacaaaccaaaagtactcttgtctgaaaagattcccaagagcttcaaatctgcaatgcaatatgaaaaatggaggaaagtcatgtctgaggagatattagctctaataaggaacaagacctatactatagtgccacttcctgaaggaagagaacccatagtatgtaaatggattctcagaataaaagaaaatccagatggctctctcaatagatataaagcaagacttgttgcaaaaggatttcaccaacaacctggctttgattacactaagactttcggcccggttgtcaaaccaatcaccatcagagttgtcttaactatggccattacaagaggttggaaagttagacaattggatgtaaacaatgcttttctcaatggggtattggaagaggaggtatacatgacacaaccacctagttttgaagatacaacacaacttaacctagtatgaaaattacacaaggctttgtatggactcaaacaagctcctagagcttggtttgaaaggttgcaccagtgcctactgtcctttgggttcacatcatctaaatctgatcactctcttttcatcttacaaaatgcatcatccattacactaattttggtgtatgttgatgacagtcactggaagtgatccaaaaacagttgcttcactcatcgattccctcaattgcaccttctccttaaaatatctttgtgaactcaaatacttccttgggatcgaagttgcagaaacaaccaggggactcacactatcacagaccaaatatgctacagaccttctctctagagctgatatgacagatgcaaaacctatctccacaccaatggttagtggtcagaaaatgtttgcataagtttttcctaatccccaaatgtacatgtccattgttggagccttacagtatttgactataactagaccagaactctcttacagtgtaaacaaggtttgccagtacatgcaaaaacctctacaacaccactggaatgcagttaaaaggatccttcgttatgtggcaggcacaactccctatggtctacatcttacaaaggcttctagtttcaaaatacaagcctactgtgatgctgactgggcatctgatgttgatgacagacggtctaccttaggctttactatatttctgggatctaatctcattgcctagaagtctcaaaagcaacaagcagtctcaagatccaatactgaggcagagtacaggagcttagctaatgttgttgctaaacttgcttggctcaaatctctcttcactgagctacacatccatctgtctcagcctcttgtggtatggtatgataatctcagcacggtcttactcactgctaatcccgttcttcacgatcggacaaaacacatcgagttggacttgtattttgtcaaagagaaggtgcagagtcatcagattgctgtcaagcatgttccagccattgatcaacttgcagatggctttaccaaagccatttcgactcagaatttctctgcttttcgttccaaactcaccattgttgatgcaaccaatgctgagtttgtgagggagtgttaagagtattcaattagtctcatagttagctacaattaattcagttaattctatttttattgttgcttcaactggtgtattctgttatggttgttatcaattcggttacaaatgatcttgatcagttgaactctatcatcttgtataaataatgtactaactgataatcaatgaaatgaactctttcactcaatctttcaatctctttcttctacctttctctctttccttctctgttctttgttcttgttaagtttcatgttcaacgatgtcaaggaaattcaactctcctaacacccccacactatcattactgtgtgcgtatctgaagaggactatgtcgaagttcccttcaaaagacccactactaagaaatttggctttagaggtggtttgtggccgacgctattctaacgttaaataaaaggtggtgaaaagaatgaaagtgtaaaaccctctacatcgtcaattattataaaataaccaacaacatatgaaggaccttatttcataaacttcctatcgcgtcggttattacaaaaaaaaatcgcatgtgtcaattttttttgtaataatcgacgccaaaaaatgtgatatatatactttaattttgaaattaaatatgaattttatttaaaattaaatttttatatttatattatatttataagagatattcggtgtaaaaacacttgaactttatattttttaacactaaaattttaacggtaaaatctactgaactcaagttctgttttgctcattacatttctgttcaaaaatcttagttaagtgacacagtcgactgcctatgtgtacacacggtaaatttttagtggttcacgtaataaataattattaaaacattataaaaaataatttaaaaataaataaattataaaaaacattttttattttatttttattttctgttttctattcttttttttcttttcctttttctttcttttcatttttttccttgaaaccctaatcctagcctatcttccttctcatttttattcttctccattgtcacagccaccatgagaaccatcagtattaaattaacacaattacataagattgatattgataaagacccacttaagaaaaactatttaatctcaaccaaataaatattattcaaaaaaatcaatccaaaaccttaaaacaccaaatatccacaaataaataaaaaaaagtgctaatttgctcatacaacctgtaagtgccattattttcacagattattttaatagtgagtctagtcgtatctggtatttctagtctgttataactacacacctgctttctgttacagtccgtgtgagtttgttatgacttaacagttggtgttagtttttgttaggtcgactgaactattgcatataaatagttattttcattctgtaaacgaattagctatctgattgatgtctttggttagttcaggttcatcgtgtgagttagcgtagtattatgcttttcttgttgttgtttttacaggtatgatcgcatagcttgaagatggtgatctatagtagagagatcaaagcctgaggttgatgagttcagactgaagggagttcagtgtcatcttcgtcatcagatctgaaaggatttcagattgaagagaaatgtcgaagacgatctcagttgctgcacaagggattgtgttcatacaattaagattcttgattgttgttggtaattcattactaattgctgtaaagattgttttaaatccctaagagtgaactggatattgtaatacgaatcttttggatttagtagatgttattaccttggttcggggaacccaagcactagtcggc

SEQ ID NO: 39109 - DNA, 2126 bp, Cannabis sativa
acactagaagtcaccatggcacaaggagacaacctcgcacaacggggcactagccgcaggttgagctccctgtgcccagctccccacggccagccctctgcgcttgcatgtgtcctccctactccctgttgctcactcactctcttcctcaccctccatgctccatctctcccactctctcactcctctttcccttctcatcttatcttcccacacatcactctcacatgctcatcacctatcacttgctccacacttgggagcaataacacttagccaaattattaagtgttgctccctcattataagtataagctatgatgggaagaacaccaaaaggatgtacaaccaataactagtctattaaagctaggacgcctctgatatggcctaaagagaaaaggtggttgtacaacaggtatgacaagtacaagtagtgaagataccatttgtctcactcaaggtacaagctgacatctgaccaacactcctgcattacccctccatcacactgaccctcatggtacaatcaaatctttgtcccctacttttgggacaacttgtattttagagtcattagagcttaagtataaaaacctcatttggatacttgtaattagctagaaaatggccatttgtaagagagctctaatattcaatataacagtattttactccattgatggctgaatgttcttaatttttcttaagcttttcatcctcaactcttcgcaattaattttctaactaaaatttagttgacgagttctcaccgtcaataaacttttactagtcagtttaggaataataattattttgttttgttaaagtggaaataaaatggaataaatgaccaaaatatctttattttaatatattttttaactttaaaatatatttaatcattaaacttatattctgtatgtaatttttttcaacttaactactcatcagggcaataacaataaatagctttttaacgaataataataagattatcaaatttattaaggatgttttcatttaatttatagaatgagttccaattaattttgagatttatttaagtataattttatttgatcacttatagtattattttagttttttggcaatttaattttagataaaaaaaaaccactttaagaatgtgttatactcatatttcgagcatcaatatggtcgcgacacgtgtaagaagactgaaaaacaaaccagctcgaatagtgaagaaataaatatgttaaataatttgcctcggagaatacaaatgatatatgtatctaagtttctccttaagccattaaggacgagccatgaataacaactaccatttggtaagaccaacgagatgaacaaccaacagaaaaaagtccatattggaatacacagagtaaaaaaaaacaaaacaagtagagtatgtaggaacaagtcgctcgaaatggtagataatgagttctttaagagcttgcaactcattgaaccacatactcgtaagtatgttgaaagactaaaggatatgagtaaaagaaaattcacctcaagatattcatgaatgacttgagaggatagcatcttgcaaaacacgaccagtcagtcctaacactatgaaagaacgtgaggaccatcttggatatagtacttcgacaaagaaactaccttcaagataaacacaaaaagcggttgtcagtatacgttgcaaggcataaaaacttagtcagcataaccgttttggataaagacgaaagcaattatttatttattctagatgttgtaaatatgaaacgtgagaattgtccatatttaataaacgattatgaagataaaattaaaaaggaaataactatcaccctcaaaaacttataaataggggaaaaaatcccaaagttatggatgactaaatttagaattctaagagaagatacaagtatactgtaatactctacaaactaaaaaatcttgtgaattataaaaacttgtggattataaagaattaattttaaaacagcataaaaattttcttgtttattattattattattattattatattctgaggtatatttattaaatataggcatttgctttaacaaaatagaattgcattcttgttttttttttttttt

SEQ ID NO: 39110 - DNA, 2535 bp, Cannabis sativa
ttcatatatcttttctgttaccgattctatattttttctctttatctccaagcttttgagtaactcatagatactccataatcatcaagtatgtctttcataatatcacttggtacgtctaccctcttgattgtcgttaattttatcttgatgagcactctaatgacattgcaatccgcttgtctatgatcctccatatgatgacttccaatgagcatgtgtgctctttcacatattttctaattttaaaatattcagtatgtttgaatgtagaagctctaacatactgcttacaattgtttacacaaaatattataggccccattttacttccttattaaaaaagaaagaataaacttcattaacaagctactttaaaaaaaaaaaaataacaaatttctttgtttaaaaatagagtcacaactcaacacactcaaccttattcaagagtggtaccatgttacttttagaagcaaaataaaagcctaaaattgaatggtaaggcgatcttttaaaaatatgagaattcttcattagaaaatacagtcacaactcaacacacccaattttattcaaatgtgtaggtaccagattagttttagaagaaaaatagaaacttgaattgaaataccaggtgacctttttttttaaaaaaaaatatgaagattcttgattaaaagaatacaagcacagctcaacacacttaactttattcaaaagagcatgtaccagttactttcaaaagaaaaattagagtctaaaattgaattacgaggtgactttttcaaaatatgaggatttttcattaaaaattgcagtcacaacacagttaatattattcaaaagtaccgatactaggttactttcagaagtaaaataaacacaaaattgaattactatgtgactttttcaaaatgtgagaattcttcattaaatatccaatcacaaatcaacatactcaatcttattcaaaagtgcaggcaccaggttactttcacaagtaaaataaacacctaatattgaattaccaggtcacttttcaaaatatgaggattcttcattaaaaacccagtcacaagtcaacatactcaatcttattcaaatgtgaaggtaccaaattacttttataagcaaaatagaagcctaaaattgaattaccaggtgacttttacaaaatatgagaattcttcattaaaatatctagtcagaactcaacatactcaatcttattcaaatgtgaaggtaccatgttacttttataagcaaaatataagcctaaatttgaactactaggtgactatttcaaaataggagagttcttcatcaaaaaaatgcagtcacaacttatttcagtcttattcaaatgtgaaggtaccttttactttcataagaaaaataaaagactaaaattgaattatcaagtgaatttttcgaaataagatggttcttcattaaaaaatgcaatgacaactcaacacactcaagttactaaaaattgtagtcataacacaaaacattcatacatattcaaaagtgaaagtactaggttactttcaaaagctaaataaaagtctaaaattagactaccaggtgaatttttaaagtaaagatatgatgatttttttttttgttaaaaattgcagttaaaattcaacacactcaaccatatttagtgaaagtaattttcataagcaaaataaaaatctaaaattgaactaccaagtgactttttgaagatatgatgattttttggttgaaaattggagtcacaactcacgcacttagccatattcaaaagtgaaagtaccaagttactttcagaagaaaaataaaaacttaaaattgaactactaggtgatttttttcaagatatgagggtttttttttgttaaaaattgcaggcatagctcaacacacttaagcatattcaaaagtgaaagtgctaggttatttttagaagcaaaataaaagcttaaaattaaactatcaggtgacttttcaagatatgagagttttttttgttataaattgcagtcaaaattcaagtcactcagctgaaggtactagatagtagataatcatgagaaccaaaataaaaacttaaaattaaaatttcttattattattttattccaaataacatgttaattaagtcaagaatgtaatcaaagtcaatagtgaaaataacaagagaaattaaaattataattatcatttcttggagaaatcaatcaatagaattcaatgtttcttacctttcttagctttttaatcagatgaaataaacttttattaattttgcttcatcagcagaaaagatcatgaagaagaagaaaatgataatcacaccaaaaaaatctaaggaaaattataatcacaccaaaaaaatatgaggagaaagaaaaaatagttgcagagtagaggattggagttgattattctcttttggatattttgtgtgaataaaatttaaaaatggaaataccttttataggtattctattattttcattttttaagattttttttattttt

SEQ ID NO: 39111 - DNA, 2620 bp, Cannabis sativa
cagacgtttcctccaagctgcatttaatgcatttgtataactcatctttgaatccttgagcccggtcttgaaggcttttcctaacttggagaggaacaaaatattggtcccttcagtcccaactttagctcccagagggacctcttggacatgtctactcgattcgtgacaattttagtcgacatttctgaactcttctagatcttaagacttaattgccacgttatcaatcatatgactgtcacatattttcggacataagtagggcaacactaaacatatttttgatatagtgttaaaaataaaggttttttttatttttttattatatatctaaattaagtatagaaattcaaatttctcttttattattcgatatttgaattaaattttaatgttttattatttatagtaaaaaatttttaataacgattaatgagtgatactcattgagaagtgttctatatatatataccaccatcaagattgcggtgttaaatttatatcttgaaaataaaactaaaaatgttgtatacatttgttgccactactagaccattttttgtgaatcatactagaataagaaaccatatgggttttttccctgtacatatttatttgatttagctcttatcaatgatatacatccaatctagttgaatcgacccattcaatctaatactattataaaacattcaatatccaattaaaataaaataagattggatattaagaattaaattcgattagattagattgcctgttagatgtcaatctagaaatctaattagaaatcgattcaattcaattacatttacatattaaaaatataatttatatttatttatatattataaaaaatatatattttaattacattgttagtggcttttttgtgtatgtgttgaatttgtagttggttattttctgtatttttttcatgatattttgttccaatatattacttttatatattattattttaataatttaaattttcgttgcataacatttataaagatgatatttatattggatatcaaaattaaataaaagggcatatttatggtgcgtttggtaaaaaataaataattttttaatcatttttttatttttaaaatttacaaaataaaaatatttttaaaaatcatgttctataaaactatttttacttctcaattttttaatttaaaactaatattttaattttttttttaaaaaaaatcactttcaaatttttttaaactgtttctttctcaatattttagaatcccaacccaatctagacattggaacccgactcccgacctagatcctaacccagactcggacgacatccatgatccccaaacttgtcttaaaaaaccaaccaaaaaaaataaaaatgaaattaagttatagaacacttttattttttattttaaaattaaaaaacaagagcggttatataacatatttttatttttcaaaaataaaattttaaaaaaattcttttatctttgtgtttaaaaaatttgaaaacgttagtgttaccaaacaccaatatagtttttacatatttttaagaatattaaaaaattaagtatgtaattagatatcaaattaaaaaactcatataatccaattagtaattagagtgaatttgatgggacaataaatttttaaatctaattacaaattaaatttaatggaatgagaagaaaaaatttagacagaatcaaatactcagccctagtatacgtggaattcttcattatttttttttttttttgaatcaattattaaattcttcattaaattactttgttgttaaaaagttgtacatatccttatgtcccttgtccctttggggagccaactcttgaaaagttgtcaaaaacattagtcttttggctaatatatacggattttgtgcagtacagatgaacaaagtggatgtcttagttggtttcgtatataagattatataatatgatggctctattatttccactatacttcaacttttctagtggatgagtaagcaagccccttaataacattactacttactgtataggagatattgtttcaataatgtttggggcagaatatcctttaaattccatattaaggtatacaaatatatataaaactaggaaaagaaaaattaggcatcattatatatatggagaaaattgctagtacaatcactattacgtgtactatatattattttatcatttctattgggaaaacaaaatttttaaatagtactttatgctacttctttttgagttagtaactctcttttctttttcaattccatattctaaaatccctagtttcaggatttccctagtacttaaactatttattaggtaatgtcacgtaaaccaagtttattttcttctttttccttcatccttcaaacattccattattctgtgtgaatttttttataatatttatctttgtgttgacttcgcttttaacaaccgacattgagtctaaattgtaagtgacaaatagtataatatgtgcgtaatataataaagtaaataaagacatgagaattttatagaagttcagtcccgagcagttcgataatagcttaatcctcttggtttgtattgactta

SEQ ID NO: 39112 - DNA, 4532 bp, Cannabis sativa
ctcaacgatggcggtgaagacagagtttgtggttgatttgcaagtaccaaatccaacggctggaattgaacgaccagtactggaaagcttaaacgacactgcgtttttagcatcttcatttatcaaacttgcatctgccatagttattagttatctttctttctttcaacaatttattttggtgaaattaattaaaagcaactgaagtgaagaagatatttttactctgaaaactctctctgtatttctatactattttatacatacatattacacaagtaacgaagcaaatattataattatattatttttttgaatatttatggtttgggtggagaaatgattagatggcatatttgcatgttggacacacccaaaggcctaataatgccccctacatacaaagtcctcttacgtgtccatcatagatcttatgagaaattttaaataatattaatattattattaatataatttaatattaaattttgataaatttatattaataaaaatatatatataaaaaataattataggactctacctctatctactatttttttttttgtttttttaaataaaaaaagtactctgataaataattatataaaatgtttgtcggaatggaagttaacaggataactctaaacctcttgtaggtaaaagtccaatcagtcattatgagcggcaaaattacaataactattaatataagaaaaaatacaactacaaaataaatgagagtaatttttacgaaatgagacatagtttttaatacttcagtgaaactcttttccattgagcgcattgataactatcctcgagtcgctctccacaattacaaacttggcaccaatatcctttgcagtcgaaatggctaaacagcaagtcgccgcaatcccacacagagcatcagagaaatcaacagaggacgtctggacccaaaccactctaccaaggtggttcctgacaaaaactgaggagcacatgctatcaagcccaactctaacatcgcaattaagcttgatccaatcctaaggtggaggagaccagctcaccgtcgaaggagggctaggtaaatggaaaattgtagcatgtaaatctgcataggaaatacaaatatagtcaatacacttcttcacatcatgcaatataattattatgtattttgtcattttgagtgcgccagactgtatcaaccacaacagacgcatataaaaaaatctcatccgcattaattcccttatgtttaagatcccaaatgaatttgatcgagtcccacatacggattccagtgtcccgaatcggataaataccccaaggagaagatcgtcaggcatggaaagccacatcacaagtgagaaaaaggtgttccaaagattcatcctccctcccacacaacgggcaactcgcatcctatatgaaatctttttcttagcacagctctgacagggagggcactagagagaatacatcacaacataatcttatggagctctaacactttactgttccacaacttattccagagagtgggagcaacctcacaaaagggagctctttccaaagcctgggcaagatatgcagatttgtaagagagtcgcccgttactttctagggtccacacccactggtctttaccggtgcccgagggggcaccaccttgtaaaattgcagaaacagtctcacgatcgaaaagtctgttcaacttgtggatatcccagccaccatcattagaaaaaagctcagcaacacttctatcgtccatgacaggagaaccatttggcctagggaggaaattacgcatatgaggaatccaagggtctccccatatacgcgtgtctttaccatcagccacccgcttacaagcacctttctttaaaatggccttagactttacaacatttttccaaaaccaagaatcaaactccttataactacagttaaagagctcctttcctttaaggtattttgctgccaaaatcctacaacaaagagactgacttccgttaagtatgttccacccccacttagccagaaaggcctgattcatttatcttgttttcctaaagctgagacccccccgagatttgggaagacagagtttgtcccaagcttttaggtaaagactgtggttatctttctcaaagccccaccaaaagtcacgcactaaactatcaattttgctcgctagacggaatttagtggtttgcatagcatacaacggcatcgacaaggccacagacttgattagggtagcccggcctgctttggacaaggttttcactttccacccctgtaacttggaagtaagattgtccaggatgagattgaaatctacatctttttgtctggatctgaacaggggaaggcccaaatacttgacatttctttcaggagaaccaatttccaaaacctccctaatctcacgttttagaccagtggacgtacgtttactaaagaagatggaggttttgagtttgttgacttgttggccaaaccaacaacagaatctctctaggcactactagtaacctctgacttcatccaaatttgctttgcccaccaaaattaagtcatcaccaaagaaaatatgggaaagaatcgggcctcccctgctcagtctgatgttcttaatagtgttcttacacagggcttcttgtaacagcctagacaggacttcagctgcccaaataaacaagtaaggagacagagggtccccctgacgaaggccacaagagggtttaatctcacccaccggcccccccattgaggaaaatattgggtggtggttgtggtacactgagagatccaattgcggaactttcacggtatcccataacaagaaagcacatggtcaatgaacttccaatctagcctatcataagctttcatcaggtcaatttttatggtgaagtacccttctttgcctctcttccggttgaacgaatggaaaatctcctaaacaatcacattattatcttgtatattacgaccgggcacaaaagcagcttgagtggggcaaataagattaggtagaattggcttaattctgtttgcaataatcttggaaataaccttatacatcacattgcaaagagaaataggcctaaagtggtttgttcttttcgagttctgcactttagggataagaactatattcgtagaattgatacctttgtgcattttgccaaacctaaagaagtcagaaacagcatcacagacgtcatcacccaccgactcccaatagtgtttgaaaaataatacagacattccattaggtccaggggctttataattattcatggcgaacagagtacttcgaatttcctcaagagtaggggccgtaaggagcacctcctgatcttcataagatattttctctcgaaaaagataattacagttaatcctctgatcaccaacagactcagagaagatccttttgaagaactcctggccaattaagtaacgggaagttatccaaatattatctttgtccaaaatactctcaatagcgtttctccttcctctaatagcggtcgtaaggaagaggaattcggaacacctatccccatctttgatccaagaaatcctagccctttgcctccaatacgaagctttcctttctaaggacttgttgagggatcttcggatgttactttcagtcttccagtcgcgagcacccgcaggtaaactctgcatcaaattaagtcttttttcaagctatttgataccagtgtccagtttaccgaactgatatctatgccagtgaagaagagcaacctgagtggttccaatctttttgaaacagcgagcaagggcccaagggtgagcaatggacttccaggcatgggccaccactagattactatgctcatccctcgtccaaccttcttcgaacttgaaacatcttttaaacttggcttccagcccaccagaaaagagacacagaggtctatgatcagagttgctcgtctgataagagcaaataatagcttgcaggaataagttggccaagctccgttaaccaatcctttatcaagcgcagacttaacatgattcttgccagatctgtgattgttccacgtcaacatatcgccctgaatattcatgttaatgaggccccaggactcgaccagattagaattgaaaggaataaaatggtccttaccagtggcaccttcacgtttcgactcgcggagcacaaagttagtatcacccaaaatcaaccaagggccgccaaatctatattcaatcttcatgaactcagcccaaaaattcttcttggcatggaaatatggagggccatacacacaagatagaagccacaggtgggatgggagatccgaataaacaatgccagagatatgattacgtgagcaagacacacactcaaaaataaaatcatttttccaagccaaaatgataccaccagcagctctaatacccgtcacaaatatatgaaagtaataatgtaaggattttagaatgcgtatgtaacgcccgcattttaaatttactaaactcaaaag

SEQ ID NO: 39113 - DNA, 3010 bp, Cannabis sativa
  modified_base (710)..(737): a, c, t, g, unknown or other
ttaatagaataatatatttacttattcaaaattaaaaaacatcaagaaaataataaatatcactaatatcaagaaatcactcaataataaaaatatcaaatacaaaagtatgtataaaaataaaattgattaagaaaataatagtaacatatatatatatatacactaataccaatcaagtaataatatatatcttgagttgcatataatttttccacttaaatacttttgaaatagctataaaagtgacaatgattatctaaatggatggaaaaagagatgaaagtatatttgaatatttatgaattaatagggttaaggtcttgcaccatccacctaaaaaaataagaaagagtagaggttaagttagagaatttagaagttaatgaataaaaaatagtcctaaactattattaaaatgtaaataaaaaaattgacgatattaacaattaattattaaaagtttatgaatataggtatacatatatatagtaagtatatagtatataattatttaagaaaatacttacttaaatataaatctatatatatagttataaaaaaattaaatacaatttgagtttaacaaatatatatagttatgaaaaatcaaattcaatttaaatttagcaaatggatatataaattgattttattaattaatagtttacaaaattatagatttttaaatctttattattattattatnnnnnnnnnnnnnnnnnnnnnnnnnnnnattattattaattaataattttaaaaaagtgtgaacaaaaaagtagataaagttgtttagaaaaattttagagtatcatatcattttcctttctatatattgattattttgaaaacaaaactttaataaaatttttaaacaatatattaactcaaaacgatgagagagaaggggaattattattaattcaccatcatgtaattggttgttattccaacctattaaaacctgttaaatataccatcaataattttctacccattaacatcgtatagatttttcaaaaaagaaatcaacgaaaaaagaagaaggaatgagatcaaagttataaaatgaagatttccgcgacgtgttctttttgggatgattaagatggaagaataaaattttcctaattcgtattcagattttttttctttttttttttttagcactaatcatattataattagattaagtactctctataaatagttttgtctattgacatatgttagataattttttttagtgtgttcgtgtgatttaagtgtgttgcgtgtgttctaaggatacggtttatgtgttaagatcttgcgtagaagttagggctagggttattgtggagaatttgtgttcacgttagtcgtgagatttcaaaagtgatgtgggaattgtgctggtcaaccatggcttcgagtagcatgtttgttcgtgatctggagaaagaatgtgttagtattgtgattgaaggggaagaggagcatgagttcatatgtgatttctctaagaatgaggagtaaaagattgatgagcactgatgcattgttggtcgttttttgactcacagacctattgattttgacgtgatgcaacacatgatggcctcgttatgaaagcctcgcaagggaatgtatgtgaaagagctggaagttaatcgatatttattttagttttatcatgatctatatctcaaaagagttatggaaggatctctgtggacgttcaatagaacaaaatttgtatttgcaagattaaagtgaggggaagatccatggtctgttgtgattaataatcaggatttgtgggttcaggttcatgacttgtagtatggattaaaatctgaccatgtattatgtggggcaactaagtatatctttgcacttttgtagaaacaggtccgaaaaactttcaagggttgtggcatgattatttgtgtgtatgtgtgactgttgatattactgtccccttgaaacggtgcatgaagattgagcgtacgggggtgagttctcttttgggccaatgtcaagtatgagtatgttcccactttttgttttatttgtggtattattggtcattacagacggttttgttcaaaattgtttgagttatctccaaaggatattgttaagacttatggttcatttatgagagcccagcttgaaaggaaataccacttgattggcgtacattggttgaggaacggtaccaaagatgataacgtattttttgttgagcagttgtctaattctagtaagttgtcaaaactatcatattgtactaataattttcttgaggaagggcgtgaataaggcagggtcgtggtggtgacagtgggtcctcaggttattgtttcttagatagatgagggtcgaatggataagaaagggtctgaggttttggtggttgtagattctaaacggaagcgtgctaaggggttttctagtatatggactctaatgtggataagaatatagtttctagtgagaccattgatgtggatatgggaggaaacagtacaaatttgttggttcaaaaaaatgagttattggcgagttctctgttggtcagacacgctgtgcatcatgagtgtccttagttggaactgtcgtgggcttggcaaccgacaaaatgttcagttccttaaaaacgttgttcgtcataagaggcctgtttttatttttctttgtgaaaatttatgcaagaaggataaaattgaatggattcttagaaaactagagtttgaaggaatatttgtggtggagccgaggggtaggagtggggtgtagcaatatggtggcgtgaggaagatcgggcaaacttaattattttttctcgaaaccatattgatgttattacaaaggtcgatggtatggaggcttggaggttaactaggctttatggtgagcctgatagaacacaacgtgggaagacttgggattcacttcggactttggtgcataattctagcttaccttggtgtgtaattagagacttgaataatatggtgaatt

SEQ ID NO: 39114 - DNA, 2783 bp, Cannabis sativa
  modified_base (2752)..(2757): a, c, t, g, unknown or other
tacccggtgtttccccttacggatcacgggactactgactgtcacaataacagatagaggactctattgctatcgagtaatgccttttggtctcaagaaatccggggccacatataagagatttgttaacaaaatctttaccaaccagattaggcgcaataaggaagtatatgtggacgatatgttggtgaagtcgaaaaaggcgggggacttgattaaagacctggatgaaacgttcaccaccttgatgaagtatcaaatgaagctcaatcccgccaagtgtgtctttggggtcttatcggaaaagttcttaggcttcatggttaatgaaaggggaattgaggccaaaccagaaaagatacaggccctaattgacatggaatcatcgaagaaccctaaggaagtgcaatgtctgacagggagggtagcagcactcagtcgatttatcttaaggtcagccgacaagtgttttccgttctttattacacttagaggaaacaagcagttaacctggggagaggaatgtgaagaaactttccaaaagctcaaagaacacttgggaaagccaccgctgctagcaaaaccagagaaaggagaaccgttgttcctttacttgggtgtgttgaaacacgccaccagcgtggccctagtaagaggggagaggaaacaacattaactagtgtactacgtcaataaaagattggtggacgctgagacctagtacctggatatggagaagttggcttacacactagtgatggcttcaaggaaactgaaaccatactttcatgcccactcaatcgccatgctggccaactatcccttacgccaagttttacacaagttagagaccttgggacgcctcctaaaatggataattgaaccaagtcaatttgacatctcctatgtaccgcagacaaccatcaatgggcaagtgcttaccaagtttatagttgaattcacctaccagcctgacaagttagagcacgcggaagcggtagagaaggaagcgcaggatgaaacaaggaggtggaagttgcatgtggatagggaatcaaacgatggcggcacaggtgcaggagtagttatgaccgcgcctggagggcagaagatttattccgtagtaagattcaggttcatagcttccaacagtgatgctgaatattaagccttactagccagcctacgttcggccaaggaattaaaaaatcactaagctagatatctatagtgactcgcagctagtcgtatgccaagtcaaaggagaatatcaagtgaaggggaatagggtggtggcgtacctagccaaagtgaaaaattacttaggacaactgcaacactacataatggagcagataacccgtgatgataatgtcaatgctgatgcattggctaagttggcattaacacgggatattgacaccttagagtcaatacctgtggagtacctagagaagcctaccatcgaagaggagcaggcatacgtggtgaccagtaaggactcttggatggtcccctatcagaactacatccaaagaggagagttacccaccgacaataaagaagctatgagggtagtgtatatggcgacccgttatgtggtgatggatggggtgttgtacaaaagaggattttccacccccctcctgcggtgtgtgggcgaggaagaagcactacgaatcttgtctgctatacatgaggaggagtgctggaaccatgccaggggatactcaatgtcataaaagattttgcaacaagggtactattggccctccttggagggcgccactgaatttgccaagaagtgcgataaatgtcacaggcatgcgaattatagtcgacgtgtgggggatagatctgataggatccttacccacaggaagggcctgggtgaagtacgctatcgtcctattattagtgatgatcttataggggaccccaaaccaaaaaatgatgaacctattgatgaaggaaacgacttgtttggctgttatgtactacctatcaagatgcaggtaagctcccacaaggtgaaaaactttgaagaagtgcggaacgaggaggtgatggcggggaacttaaacctattagaagaaaagaaagaagaagtgcaaataagggtcgcagtgcaccaatagagggcggcccaatactacaactcaagggtgcggctctgtgccttccgagttggggacatagtattgaggaaagtcctcccaaaaaccagggatcccgcagcaggtgtattgggggaaaattaggaggggccttaccgcgtcgcccaagtagttctttctggaacgtacaagttggctcgaatggatggcacagtagtgcctcgagcgtggaatgctgaacacctgaagagatactaccagtagaaggctctagttttcagtcaagaaggagagtgactgccctctagaaggaagtaagaagtttttttttttattatttatttaactggctagtggacaattaaggaggacgttcgaaatgtccactattatgatgtaacttaagcacgatgtaattcaaaagctttattgcaatgcatgatatgatgagttttgtttagataactgtgcagaccattccaacaaatgagaaacacaactcaagcatctacaagcatcaatgccaggacatgcttaagggagataagagtaaaatgcttcaaaaaaaaatatatatacaggccaaatgttcttccttaaaattatggggagtagctgttgggttttatgccctnnnnnnaactccatttcaatgtaatctatttt

SEQ ID NO: 39115 - DNA, 6095 bp, Cannabis sativa
  modified_base (1004)..(1008): a, c, t, g, unknown or other
atatcgaggagaaagatatcatttgaatcaatatgcagatcataatctttcaggaaaaaaggagttgttcaattatcgacattcgtctttgagaaatatcatcgagcggtactttggcgtattgaaggctcgtttttctattttaaagcaaatgcctttgtatgatttgaaaatacagaagtacattgtgattgcctgttgtggaattcacaattttataaggacaaatgtagaaaaagacatattttgatggagatgaagacgtccatgaagtacaagatgctactatacaaagcactcacgaaactttgaatgatattgttgggtttagcatttcaagagatcaaattcgtaaaatggcgaatgtctatgatgaaattgctgatcatatatggattatggagagcaaatcgacgatgaagataatgaatgaaagttattaacaattagaaaaattttaatattttcttcaagattgaacaattattagttcatattttattatgactttgtcggttttatgttatagataatgagtttcgtgattttaagttacttgaatttttttaagatgtaatgagtattttttattttattttatttttataatttttatatatttgtttaaaaataaaaataaatgatattcataatttttttatttaaaaaacaaaaaaaaattaaaatttatgttttttgtttttaaaattgtaaaataaaaatatttacgaaacatacttttattttgtgtttttaaaattataaaacaaaagtagttacagaacatatttttgttttttgtttttaaaatttaaaaacaaaagtggttatagaacacatttttattttcaaaaccaatttaataggtaaatatctacttattttatctgctaattagagtttaagctctcttatataaagagccttagctcaatcctaaaactctaagtctcatttaagtcgtcaagctcaaagtctgaaaatattctctctctctctctctnnnnntctctctctctctctctctatgatctgattgttttatctgattgttttttctttcttctacgatcaaccttgctaaacaaattctcacaccatcttttcatgagctcaatgatatttagagctggttttactggatgttcttagtataataaggttaaatattttagtttgtttaatatctatttctgttttttattttgttcgtatgaaattcttattttatagtgcttcatagtgtctgataaaattcctcattgaacattgtaataatttggtaatttttaaatggctggttgattttgtgcttttatgatttatgtcaaagcacaatagtaatagggtgaagtagagaatagcaaataaaatggctaatggcatattgtatgtgggtgtcatgtcttgagttcgttattgatgtgttcttatttcttgtgtattgttctattgccatttgtctcttggtttggttttctaatttaggagaggatcaggtgacattaatttcatgattttatttttgtatatatgataatgatgattttacaatgtttgcctgtaaaagtcctaaaagcattgaaagaaaaataggcttttaaagtattgtatatatgatattaataaattacttataggaagagccaatgatcgatagttgatttaatttctttaccttcacaacaatatttatattagaagctaaattatgacgagctagctaatataattaagaacaaactgatgattttgatcaatagttgttgttcataagtagaaaattgaaatcatgcttctacctgtatacttggagttgttaaatttgattgaagtaatttgttattaacttcgctggagactttgaacctctttacttatattacctgctctctttgcctttttcttatgtggaacagtctgtttttagtaggtttttgattgagatgaaataatatgagatgttttatttgttattattattttattctgtgtgtgcatttacttgctgaagtatatcgttgtactctgtatattcatcaagtccctctccaatccttgtaagaattgaatttcaatggtaagagttagaatattaatcttgccatcattagtttaggatccatacaagcctctgtcaccacaatattatccaccattgctaacttatctattttagcatatgttcattagaaaaaaatcaaatcttaaatctgctttagtcatagtcaacaactacttaccaaatagtttggtaatatgattatattcaccatcacattttttccagctcaaagtgaactacaattattttgcacattactcaagatacatcaagactgtaatatgtctagtttgtgctgaatgttatgctataagttttgattgggtgggtgtatttagttgagttattgtcatatatataaatgtgattaaatagtatatatatacacacatatattttgccttattcgaaattttcattttagaaaaatgtagtaataagacatgaataatatataagttaatgaataatatcatggaaatttaaaaaaatacccaactaccttggtttacatgatttatttgataaaattaattcttattttaaatacatttaatgttatctatctttgattttacagttccacgataacaagtcttacatcaatgaggagataaagaaaatacaagatgaatggacatttttgtgaagtctgaaatattgaagaaatgagtacacaattattactttatttttttgttatgatatatgtagaatatataacttttatatgaccattatttttacttatactgagttttattgatatactttatagttatatcaattttttgttatgacgtgtagaagacaacttttatgatcgttacttttaattgtattagatttaatgacacacttcatagttatattaattgtttggttatatgaagaatattattgttattatattacaaatgttatggttagtgcataaaaatattgttacacaaagcgatttctaaaatttaaaaatgtaggtggagaaaatcgcaaagaaatttgcaattttcccttacatatgaccatgcgtcattttataattgacacaaaaagtaaaaagcaaatatttttgcgtacacgaatgcgtctgttatgaactgaagcaaaaaactaatttgcgtcggtttcagtttgaagctaagttttttgcttcagttcagaaccgacgccaatagagcatactttctgcttcagttctcaatcgaagcaaaaaaaagtttgcgtcggtttaaaaatgaaacaaataactggactatttgcgtctgctgttattacgtcggtttacacaaccgacacaaaaattttttgtgtcattttacaactgaagcaaaaagtcatttttgtagctgtggcaagaactttgtcttgatgagttaaagagtttggagtacatatcagatgagttcttctgctctgcttcatcatcattctttccttcactcactaaaatttcaatttacaattgttctaatttcaaggggtggtggaaagagagtgccaaccaaaaccaaacacaagatcatttggtacccggaagtaaatgaagacgaaaatgtagaattcctaactgagagaattgacaatctctcctcattacaatctcttcaaatttgtgaatgtgataatttggcctcactttagaagctaaaatcttcattttcgattcatacaaatcgttgcaattaggatataattagctactgatcaagtgaggaggttacacttacacttacaagccatactatgttttgttggtctgcttgaattgttcagtgaggtagagttcatgaccgtatgctgaacttagactctggtaacagaaaaagatgtatccaaattcccattgtatggtacaaaactacctagtattcatctcagtcttgttgagataagcatctactttgaagtacaaggagctttgatctttgcagactgcgagagaaagagctacaagaattggattcaagcattattgaattctttcttgagttctaagttatagagcaaacaaaggttgattcatttcccagtcgccggacatgttatgttgactcttttggtgactatagggagcagttgacttgtgttctaattttagttgccatttttaggtctcaacatctatttccaatctctgtcagttcgtacatcaatataataaaatctgtaaagaaaaaaagaaagaaagagtggcttggtacaagatgagtgagtgatattaccaatatttggtgtttttccaagtctagtcttgtatgagtgatattttgtataatgcgacatgacatgcattgatcaatacaagagttgtatcttgctgtgattttgtattgttgcaactgagactggggttggataaatctcaactacttgtttgtggtaatttgttttccctcctatggactttcattctctatccattttaacattgaataaacacaccatcgggattttccttgggtactatgatatattagacaagaggcaaaatttgacaaaatatcaaatccccctcctctttgttctcgtcatggagtgtttgtcccgaagaatccaaaaagccgccagagaaaagaattttaggtaccatcccttatgtaaaaaaatgaaactcactaatctttgtttcgcagatgatttagtgatcttttgtaaagggagtgagggatctctcaatgctatcaaggttttgcttgatgagtttagcaagacctcaagtctctccatcaattttgctaaatctcaagtttactttggtggaatttctcaatcgattcctcttgctcaaaagataaacctttctattggagagttccctcttaagtatctcgggatccctctaagaccaactaaatggagacttgatgattgtggatcgattttgaagaaaatgaaactcaagctccactcttgggctaataagcacttatcctatgctggtcgaattcaattaatccaatctactttgattggattaaggaattattggatgagagtctttcttcttcctcaaagtgtgataaaagagattgagaaactttgtcggggcttcctttggggtttgaaggataatcgaactagagttcacttgataagttgggagagggtgtaccttccaaaagcctacggtggtcttgggtttaaggatggaacaaaatggaacaaagcttctttagctagatttatatgggacttaatgaataaaaagatttgctttgagttaagtggattaactcggtatatctcaaagggagtgatttttggtcctataagatgagcatggatacaagctggtattggagaaagcttcgtaggttgcgtacagcttacaataaagctgatatcatagcagcaggtggagagaaattcaaagtcagcaagatttattgtagcatgttgcaccaagtagtatacccaaagcaggtggactgtttggctgggcaacacaaggccaaacttgattgacagaataagagttcttatgttagcagccgcgatctatcacatatggagcaaccgaaacacttgcttgttttcctattattctaactttgttaattgtatagtaaataaaattaaaagtgatgtgaaatatagactcattttgattaaagataggaaaggttctgattaaagataggaaaggttctagggacgagaagaagttacttcaaagattgatgtgtaattattaggagcttgtgttttgttgcttctcttttgagaagtgtagtttgtttgtatttggtgagttgattaatgaaatttttttcttcttgataaaaaaaaaaaggaatttgtgtctaatagtttgttgttgaaaatcagttcacagtctctacaactgtgatctgacagtttaagccttttctagtttattgtcatttttgtatcacataccaatctctatcggtttgtacagcaatgtaaatgagtctcttgtatttttttttatgtaatctagaaaaggagcagttagggaaaggcgtttggttggaggtaatgaaatggaatggaatggaaagga

SEQ ID NO: 39116 - DNA, 2495 bp, Cannabis sativa
agatctcttgggttgtttcctcaagaccaatctaatctaaatgtccttcctaacaaccatgatgtcgttttgttaagccgttacaagaatttcggtgtcgtttagtcgcaacagctttgatgtcggttttccatatttcttcataaacgacatgtcgtttaaacatccccgcctcactatgaaagtatgctattattctcaagaggatttgagggttatgaactcttttcctctaaagttataggaagctccaaactgtcactggccctctgaatctttaaaattacttggtcaccaacattatagtcatcgaatgctttgtacaattctgctttgtttttcacctaaacacaaataatttttgttattttagaaattttatggatcactagactaatgctgcaaacactagccaaattacaaaacaatagcttacaggtttgttgtcaactgctacaatgatatccccgagtacaatgctaccggcgaagccccttgtggtcggaagtagccctgctttggcagccacactgtttccgggtacctatcatatggccacagtacaaaaaatttatgcaggaattgcagtaatgtttagggtgcgtttagaatggaagtaaacctggtaattacacaacatagtaattacgctatattttaaaatacaagtgtttgaatatgggatggtaattacttatgaattccaaatgtcttgtttgaaaaaatagttggtaattacagagaaatagcacttaaggtttaaaatggaaacacccaattctcgtgggttatgtgaattggagagtgtaattgaaacctctaaattacctcaaattacacaattacagtataattacgtgatcaaataaacatgcaaaactgtttaattaccttcaattatattgaatttccaagtaattagcaataagaaagatggtaaaccaaaatgagaactcaacaggaatacctgtagaacaagagctccatatcgaacattgagctgatttgcaatcagatcaggagcaatctctatattcaaaccagctcgaaaagcctaatggatttgaacaagaaatatgtaagtagaaacttccatacactgagaaattctttacaatgaaaaatactcactttgccaaattgaattagttgggggacaatcttggctacagttgaggattgaatggcaaaccctacccctgctgaagttcctgcaatacattaaggcgaaaaagtttttagaaaaggttacaatgtgaaaacccgaaagaaaactgaatgaagaggagactaaacctaccagtttgcgtaaatattgcagtgttaatccctattaaatttcctttggaatccaataggggtcctccactgtcacagttatacaagaatgaaacgaatttggatcaaagcaaggagaattgacagtttaaagtttaaagcttcgatcaaaaaattagcagcgtacctgttcccgggattgatggctgcatctgtttgaattccaccgctaattgtgactccagcttgactgaaaatgtctcggttcagcccactgatgactccaacagtgagggtatgatcaaaaccaaatggatttccaatcgccaagcattgttgaccgactttcagtgaagatgactgccccacaaggattggctttaacagatcttcaggggcttcaacctagcaattcgtagaaaatggtacatcattatatttttcatgttactacatatttatgtcaattgaattttcctcagccaacactttgcaggaaacagtgatgattatcaattccttcctatataagttcatttcttagaataaagatccaactcgaattttaacaaaattgaatcagacaaatggatgcaccaagctaaaatcataaccaggatttaagaaaattaagtgtttcttgatacacacatgttgcatacagattatactgcaatcaaatgaagttcaacgaaagagtaggttcaacacggataagaatcacgagattcaatctcaaaatcaattagtgatgagtgtatcccatgtctttatatatatagggctcaatattattacatttaatccatgtgggacaatgttgtccgataagagaaagcaacaagataaatacataccttcaaaacagcaagatccttggcacgatcagcgccaatcaacttgccctcaaaatttttttgtaccctttgaaaacataaaagaagagagaaaatgaatcatgaaattgatgaaacaaaactcaaataaaacaaataagcaagtctaagatgcactgtttttctcacccatctgatgttaaaatattaactcgtgcaacaacctccccggggcttggatttctagtgagggcattgccaatcactagcaataaaggagaataatgtcaataagatatcacagtactaaaataatccattggcatcagattaaatttgaacaaactttgcataacagacatacaaggtctgacccttttg

SEQ ID NO: 39117 - DNA, 2251 bp, Cannabis sativa
ggattaataatgaatcagaatatgcatgtttaattttacttaatttcataattgttgatagttataattatatattttacaaaacaaataaataaactaggaagaaaaaggcattattgcccatttatatattaataaagtaattttagtgttcagtagtagtgtaattaaattttctcaatgatattgtagattgctgctgggctatcagcacagctgatttggatgcttcaactcataatgcgctacagagagagagaaatttaaatctctctgcacaacaccttgtggactttagctggaaaattaatcgtaataaagggtattcagtttggcgtgctcttgattacgtcagggatcatggaatcacgactgaagaactataccccttccaagctataagaaccaatatggatgatgataggaaagcacccgaggtattttaattctttatcttaacactaactacaacgacataatataataataaaattggaattacttatattcactacaccaaaatttggaagctatcaaaaatgaatttagatattggcttggatgcttactgaattagcttcgatcgaggtctcccaaagagtgatgtgtggtgaattattaattttttgtaactcattattattatttgttagaatttatgtacatcttttctactaagcttttttttactaatcaatattcttttactctaaaactagctagtgtaattatgaaacgcagggactaggttttattaataaagttgtcacacaattttttactctaataattttacatatctgattagcatttaagattagtaattaagactaaaaaaggttaagatacactaccacacgcaaagactctgttaatactcatttttttttttttgttataattttaatttacttttaacgtattatattgtattttcagtttcagaggttgtacaatatccaccagtactcaatgttcacacatgagaatgaagaaaaaatcattgcaactctaaggaatcggcccatgattattggggtagaattcgagaaaccttttacgttattgttgggagactggagcatttacgatccgccttacgaatataccttaaacccagagaccaaccagtatgaaatatactatcaaaagtatgtattacttctggttggttatggtactgaagttataactcatcgggttcaaaaaatgataaatgggcgactggaagaccacgtttatactgaaaacaagccatactggattgttaggagctcgttgggaactgaatggggaataggtgggtatggacggattccgagagatacattaccattacaactagaggttccagactttgcacagccggaatttgatgcagaatcagaactacactgcctgagacacagccaaaggttcaaggaactacactgcctgagacacagccaaaggtgtttggaactacacaagttgatttgaatttgttgaagaggaatatgttgctgaagtagaagttgaaaggcaagagtatgggccaaccgaccctaatacttggttgggtagtgtgcttgaattgagagtagatgatggggatgaggagcaaaatggggttgaagatgaagaagatttgagaagcgttcatagcgaagaagaagaaccaagtggttacaagttggaatataatccaactcagaaaatagaagacttcaagtttgctttggaaatgaaatttgcaaatataacacaacttctctcaaagaatatttcatttacatggataaagagtatgttttgctggccaatgacaataagaagtttagggccaaatgcaaagcaaatgggagaccatggcttgttcatgctcatgtccaagaagataagaggacatttaaggtgacatctaacaaggaaactcacaattgtggaatagcattggataatagacacattagtgccaaatggttgtccaagtatttcttagaccagtttaggatgcacccaaacatggacttcaaatccttcaaggagatgacactagacaaccaagttctcaaaagtgactgagtcgcaattttatagggctaagaattatgctagggctcagttagagggatcagtagctcaacaatatgcaatattggaggattattacaatcaggtgttagctacaaatcctggtagcacagctatgtttgagtccctatggccggttatgcaacaaatttctctctttacgtactcataattgttt

SEQ ID NO: 39118 - DNA, 2528 bp, Cannabis sativa
actaatcagattgtaaagagttttatttatggcataaaacccaacaatgacctattccccttttggttgtattgatagcagagataatacaactcaaatcataatagtagtgggatctcgagtggctctcttaagattacaatttaaataccaaagttggcaaatctctagtgagaaggatgcttgggaatgagagggaaagaagaagagaaagattgtttcaaacttactgttcagaatttagagagctagagacttagggcctagagggttaggatttgagacttgagacttctgatttaggatttgagacttcagacttcgaggatttagcttagcctaatgctctttatatcttacattcctaatatcccttaaaaaagggtaaataaagctatatttagataattaattaataaagtttaaatgactacattatcccttgaaaatagggaagttgcttatatttttgtggtactttcgtgggttgtcaaggcccagctcacagtagcttactctccacagatgaaggcaacgcaccaaaggcttcctagggaaatggttggttggccatgttcctgtcagggtctggccggctatgtgcctactagggtcgggcgagccatgtgcctactagggtctggctaacatgtacctggcagggtctgtagggtacacatcaagtgcttgccaatctgcaggttgcacatcaagtgatggccatccgttataggtgatggccaacctttttaggtgatgtccaacctttgtatttgatggccaagctttgtagaacttccttggaaaaggtcaggcttccttggtcgaaggggccctttcttggtctggtaatcactttggccaactagcttatgctcaaaccctagctggccatacaagctcctcctagttagcctatgtactccttttggcttaccaaacattgttgtgcagcttctttacgactttcttagctcttcttgcttgttgcttgatggttctgccatgccttataaagaatctttgtcttgctattggcaaggttgtattccatgtgtacacagtcttagcttaagtggacatgccatgtaaggtggacaaaatttaagataagagtaggcatcaagggggaggttgtggcttattgcgaaagggtgttcaaggaggccaacaacaagtacgagcaaatgtaccatgagtataaagccaaagctaaccaggacaataaggttgatcgagatcaactggtcactcaaatagcatctcttactagagaactttacgatagtatggaagcaaaggatcaagccgaaggtcgggaaatgacaaacaacctcaccattgatgacaaaaatagtgagatcaagggcttggaagctaagttaaccttaaggatgtactgttcaaacgtgcccaggttgaagtcgtgaaattaaaggaggtgattaaaatgaatcagaataagttagattgtcaagtagaaactttgcaatgtgtttaggaggagcaagatctttttgctagtgtcgagaggcagctgcaaaaagagtccatgttcttactgactaatggtaatagggctattatagctatatttgcaatgaaaaaaatgggaccaataacttccaactatatatccgaggatactgctgagcacattacaaaagtgaaggctgcggtagaatcccaagcagagaaagtttgtgtcagatccctaaatttgtccttctcaattgtccttcataggctgtagaaacaagatcctacgattctcaggcttctccaaggagatgaagaagagtactcaaggagagtggaggttattgaactaggaacttatcttgaactttattacgttgatgccactgaagaacctgctaaagaattcagaggtgagcattctatagaagtcatggagatttcttcctagggttatgcttaaggcctgcaagaccctttccaagacgaacctcaaaattttctctagaaccaaccttaagatcctcttcaaccttgattactatcatttttatttcctttacattattttttcttttttttttgtccctcagtttaggtttggagagacaatttaactatgccttaaccgcgaggctcttgtaatagctatagaaatttctggcttttattttatttgcacttgctatgttatccttgattttttcttgtttactgagcctgttttgggtcatctttaggatccttaaaacttttagttccaacagccaaagctttgaaccttagaccttctttttaggctaaccttaatcctttgttaagctttgagagtattttggaagcaagtgcaacttccatgcatcaacatttttggatgatttagggtctccttattgcataaataatcttcagccaattaattgttgagtatcatagtaggatcattagctagctcccgtattactaaagcggtcgcggagcttgaatccttttttagtacttaaagattatctatttgattagattattaaatttgttgggttttatgc

SEQ ID NO: 39119 - DNA, 4161 bp, Cannabis sativa
  modified_base (1137)..(1146): a, c, t, g, unknown or other
  modified_base (1279)..(1283): a, c, t, g, unknown or other
  modified_base (2594)..(2595): a, c, t, g, unknown or other
  modified_base (2828)..(2835): a, c, t, g, unknown or other
  modified_base (2936)..(2950): a, c, t, g, unknown or other
ctctctctctctctctcttcgagcctcccttgtaccaggaagaacttcagcttttagcagtgcttttggagggatttcgactaaaatcaagtagagaaatcctaaggtaagagctctagtttttctttttggtgttcttaagttgttatttagtttaagcatgtgaaattataattttgctactgtttgagtaagggttagtgcttgattgttttctagtgattaatggagttgatctaggtctgaatttactggttttggagcttaattcttaggttgagcaagtttgagtgctaagaactcaaacttatctcaacaatggcatgtttggtttctatgtgtgtttctggtttctactacttggattatgttgtttgaggttattataggtgttctagaaggtttggtaaggtttgagcgcgttttgagcaagatttgaattgtttgggaaaacctggtgcaaaccagttaaccggtttcgcaggctctgtaaaactagttaaccggaacaggggcaggtttctcgaactgttcgattcatcaattcgtgttagtttcaaagccttggttgagtgattccttgatacttagtgtattgttgtgttagttagcaatagcatgatctttagtcgaaggtttgagtttcccgaattagggttttggtgtgtcgtttacctgtttatgttatgtgattacggcaccgatccagcatgagatttttcgtttaggtcggctaatacacttgaatttagaaacaaggtaagaatagcatagaacatattatatatgtatgaatttatgtatgtgtgatatatatgcatgcttgttgtgatttgtacactaccaaaacttgtacggtaggggtacatagtgcattggtatagtgtaaaatatttaaagagtacgttatagtgttaccagcacaagtacagaaaggtacagggtgtgtgtggtacaacacttagtggtactcagggtatgagataaaccctaccaacactcgtaaaggggtggtacgtagtgtatgtagtacaatggttgtaccctagtaaaaaacgttcttactcatttgttaagccttgtaaataggtgtatgggtgcctagatacaagtcgatattatattatttgttatatnnnnnnnnnnctgagtctgtcgactcacagttgctacttccatgcgtaggtaaaggaaaggcgaaagctgaacaggagtgagctccgagctaggatgatgattgtacatgttgaggcgacgtgacctggagtgttcggtctcnnnnnatctggggttgtattttgtagtcgttgtgcgaccagattttattatattttgagaatgtttgtaaagtttaaatacgggatcccgacttttgtaaataatatataaaatgttataaagtttagtaaattaattaaaaaaatttatttggcacgattttcaaggaaaactctttgatcagtaaaggtggcatattaattagaaaatcactataacatgtctaagttttagggcgttacaatgcctctccatccacgcgtgtttgcatactctccaaatttttctaatttttctaattttcaagttttttaaaaataatttttaatgaaaataaacttcaaattttggtagatttttatgtagaatcttatttttgaaatataaatctaattaatttaaattaattttagatattaggagactttaaatttgaaaaattaatttttctacaaatttgctattatggttgttttaaaatttgattatttattatttattattttatttataaattttaattataagatcagatatttacatattatatttatttaattaataaagaatatgaaatgattttatttgacattaaaatgattataaaatttgaaaataatctagatattttttaaatttctaatcataaatatcaactttcaaaatttagtttattttaatatattttgttaatttaaattataagattagataaatgactatttatttgctatttatcctattagatatttattttattaatttatattttgtttgaataatataaattttgatagttagttaattattttgaataaatatttagggttgtaacaaccttaaattttcaaaattaaaggtttatttatttattttttattaaatataaaacgaataaaatctttaaccaattttccttatttgttgcatgtttgtttaaattttaattttttttaacaaatctattatttatttaatttaaatggctatgattaacttgttgatggatccaatgatccaaattaatcttagttaattgttaataaatcaaataaataatttgtaacaggtaattttataattttctttcatctgtgttaaacctagtaatatgacatgattcatccaaatcactatttatgtaagcctatatgtttgttattgagcttagatgcatataggagcccatttattttttgatatttaaatagactaggttgctaaaaataaaataatcactttgatagttttatttaggcttaaatagcattggacttattcaattattaacaattatttatttaaaggttaaattnntctcttttaggccttgtgtgagaattaaggagtcataatagtgggtacgacatactgaactcaactctccctcacatgaaccactccgattgtgaaggcccatttatcttatttaaataattatattaggctaattatattaatttaacctaattaaaaattgattagaaacataattaattttaaataaataaaattaattttcattaaattattttaaaattaatttagannnnnnnncttagtttaatgaaataaattctaaataagtaatttctagtaaactaatttgtattttttttaatatttaattaaatataaaaatatatttaagttgaaannnnnnnnnnnnnnnacttaaattagaatattttattaaactagaattaataattaagttgatttatttcaagatacttaattatttgattctattttaatatatttaattaaatagaaaatcatatttaagttaaaaatttattaatttcaaatcaacttgaattaatataatttttaaaatatattttatttaattataataatcattttaattattttttaaataatttttttcaaatgttgtaaatttgaatttttttattttgatttaaattaaattaaagttaaaacttaattgttaattaattttaaatcaacttaaattaagtaatttttattaatatttaattaaaataaatatactaaaatatattattattaagtgatacacaatttttactacaagcgtacagtgttgttatagcaaagttttaatactaaaaaagttgttgaacccacaaggattaattattaaattttactaattattatacttttaaattttatactttaattacataacacaaagtaagttataattaagaaagaaataataagataaatagaaaaataaataaacaaacaatgatttttaatctgaaagtaaaaaacctagagcattgatttctttatttcaaactatgaatcttaatttactgattatcctaatttatcctataatttgtagttttaagaatcctaatgtaacctattaacctctctcgagggatgatagatttaacttagaataactaacatgatatgtctattcaatgttaatcaaataagcactcataaagcaatatgattctctttaaatgaaactcatagaattagtagaatctctcaatctcacacttttcctatgttatgcaattctaagtccgattttagattacctctctcaagtgtaaaacctaaaatctttatactaattaatggtgatcaagcattaagaagatgataattagcacaaaattgcataaataaataacaagatcaaatatgggaataatctaaaaacttaaattcataatctataatagttccatcaacactctagaatgagtgtttagttcataatcacaaacataatagccacaaaaatcatgttcatacttaaataacgaagcaaaagaataaagaagaagaagaagaagaaaagaactctaatgatgatagttgataatgattgcttgaagtctcttctctcttgctcttcaa

SEQ ID NO: 39120 - DNA, 1798 bp, Cannabis sativa
ccagatgatgataggttctgatgatgaggtgatgcagttggtgccagggccgcagtgggtgcatatgcagcaggtgttgttagctggttttgtggcactgcatagggagaggctgctgctggtgttgaggccagctggttttgaggaactgcataggctgaggccagattttgtggtggaagggcagctgtggtctttgtgtccattcttggctttggcaaagaagaatgtcaaagacactaactagtaatactagaagatattataagaaaagaattgataatttgtgtttggttgccatttggtttagttctacgctcctttatatagtgcatgcataagggtaaaaaaagtgtagtacttactagactgttgtttggtaccttgcttcaaactgggtttagttaccttttaaaagtaccattattctagacttgtcaaagtttcggatatgggctttgcttatattccgtctcaatcatattacttctttttatcattcttaatttgcctttagtaaaagtttttatagatttatatgtgacttactcactgtgtactcaataaactatacctactctttaactgtagaatattcctcgtgatacatgtacattcattaaatatataatattaaaccatattgatcagtagtgtactatagttacaaaattgatcatatatatataatcattctttaccatatatatctactattacatgttgatgtatatagatatgtttgagaaaatggaaccacaagcaaagtaaatttgacaaattgaaatcaatgctctttatgggcagagacccttttattagcttgacttgtatgctttcacctttgattattggctccattgttagatgacaaagaacatattacgtatgtacggttcctctcatatgatatcatctgtcccttctcttactttttctttttcctattaagaagatcatagttttaaaaaactttatataaggtttaattaaattattagcatgacatatgtatcaatcaatatacacatgcacgtactgtatatatatagtaatttaactataatattgatgttagctatagtgaatctcccctgcaataaaatatatatacgaatgctttgtacaaagctacacctaaactgtgattaattaattaattaatcaacattattagcttttaaatatttttttctttttctatcaatattatatcatttgacttaatagtactacttagatacaaataaaatgtgagaaacatagaaagacattcattatcctaatggcattggttgaatataaattagagaaaatatgttggttaggaaataaacaaggaaaagggggaatcctaaccaataggaatttttttttatcaaataaccaataggaattttgtgttgtgtattcttgacaaaatctattggtcacggctggaatatagggtccacaaaaatgcatagaaaaagaaaaagccttggcttaacactaaagaagagtaatcatttttgttctctctaccaaaatcacttatctcattgccctactttataacaagataaaatttgttatcccaagcattttattactttttgtgatgttaaggttatcattacacaaacattaatttaaatactatgcggtttcaaaacagccataatgatttactttaactgccccactctcatatgacaaatatatagcagcacactttcgtgctcaagaaggatccaagcataatctcaaagactattaatgtaacatgagtaattgtagcctgtgatgttttacatac

SEQ ID NO: 39121 - DNA, 1830 bp, Cannabis sativa
  modified_base (1255)..(1257): a, c, t, g, unknown or other
atttactaacttaattactaaatttagggccattttgcatctcaacccaattaaatttcccttctggtatccacctgaaagcttctacattccttaattatcctatcttatcttgtcttaaactagaaactttttcccgccaaaatatctcgtgtttatcagaataaaccatatttttaatggattatttcaaaaatactcaaaaattgttagagagttctacattattaatgcgtggaaagataatagaatatataagataaatagtctactccttctattaccaattagttttgagatagaaaatcattcatcttatctcaaattctaacaaaaatagcaaaattttttatatttttacgaaattctgagtttttttttatttcatttttacgaacttttttatcctacagaccgttgtttacacattgttttaaaaaaaaattggtatttacacattgcgacaaacatgaaaacaacacaaaactgtaaaactgcaaatataaaaaaagtttataaaaatatataaaaaaaactctaattttctatttttttattattaaaataaaaacttaaataatagtttaaagcccatttcaaaaaatacaccactctctggcataatgggccagttgaaatttactcaggcccaaaatattaatggaccggaactaagcccaaaccgtaattgtcaaaaatcttattttcatgctagttcgaaagtaccatttcatgcaaggacgacgcaattatatatgttgtcaactattgattaagtatataaatttttttttttcttttttattggaaacgttaaaaaagatgagtattatagcatcagttaataaccgacacatttatgttagccagagttgatccacgacatgtctaacgctttgtgaagtattaatttacccaataataacctaatacatcagttcttactagacacctcactctcactcgaatttcagtcaattagcgcacatggattgacacaaaatattattcttgttgtactgtaacttatattatttattatagctattatacacttagttttatcaattatagggtaatacaaattttgggatgttttgataattttagagtgctaaaagagaaacaaagtcagcaattcacatgtcgctccatgcatgcaaacaagtgacatatagcgaaaaccatactggcttatactataaaatttgttgttgtgaccgaaagtgataaatttaggggtttttttattttnnnacttcaaaacagtttttttattttttttttatttttacggaattctatatagaaactccctattgcaactagcgttacaacttaaattgcaacaaaaaatcgtatagaaatccctattgcaactagcgttgaaaccactttagaaatctaaaccgtaaatttgaaagaaaagttaaaaaaaaaaaacagtatatgaggtaattccccataaatttataactaattataaacatacattcttattttatgactaaagggtttgtggataaaggtattagttataagagcatatccaatggagagctataaatatggtgtattgctattttttagaatattttactaaaagttaactttaatagtgatgtaaaatgtgtgccaaatttggctcaaaagatagcatgtgtcatattttacctcacaataaatgctattttttttattatctatttgctactcattaatactatccattaataaaaaatatttttatatttataagttattaaagtaatataactaaaattaattgtttgtattttttcaatgagtatcaatggtattattaacttt

SEQ ID NO: 39122 - DNA, 1137 bp, Cannabis sativa
ctcagtgtggattgtaacaatataaatctctctcgtgtagtgtattaagttgggattggaataattttgtaataaaaagtgaggttcttggaatgtaaaaagcttatagtatagttgagcctaaataatttttttttatctacccttacctaagtctaacattataacctgttaaagtccttttgatttcaaaatatttatttttgacattagtggagaaagttaaatgatgcaagcatttaaaaaattgatttgtgaaattattttgtatgagttgagctcatatggtggagtctaaatattgaggtcatttatcaatcatattatttatttctctaattaaattttaaggttgaatttcgaggcaattgagctaaaaatgtggttgaaaattataattgagatttcatggaaaatgcaatgtattatcgatagcaatggtggcttaattttgtgtgtgttttttttgttagcttaacttggtcgttactcgagtgtgagtaaatgtcaagtttggggaaatgtattaagtttatttttatgcattttagagtctatttcaatgtgtgttttaatatttttattattttattgtagaattatgcttggttttattttctatttgttttttaggaaaaatattagtgatcttcaattttggtaattttggtattctgcaagcttttttaagtaaaaataaaaaatataataaagagaggaaacttcttttagcttggattgagttcctattgcctaaaataggtcaaagattgcatttttagctccaaatttcgtggtctagggtcaagagtgatcactttccaaaaataaattaaaaaaatctaagttttggatgttcaacgtgctctatttgtgatcgaaaataaaatctaaagcttcgagccaatttttgactatgatccattcacttttaggaaaaaagtttctctacgaaagttcttataacaccctaatctatagggacgccacgtgtgtgattttataaactagtttaatactaatagattaattaattgttaaaaaccgtgataatattaaatacttgactaaataaaaacactaaaaacgaacattataacgacataaaaaacatgttttggggatccctgttataaa

SEQ ID NO: 39123 - DNA, 1884 bp, Cannabis sativa
atcattttatggggtgcaaatagatttccccttaagaaaataattttggcgcaataaatacataattaatcaaattttcttttagggtcgtcaatcaagtaaggcggctgaggccattgctcaaggcccctacccaagaagcctcacaatttctttttctttaaataatttattttaacattagtccataagacttaatttaatttttttttttctaaaagagagtttaaaactttttgaattttaatttatttctcaaataaaaaggtctatttttaaaattttgccccataaaatgacatgtttgaaatttaattaacagcgttcatctaattagtatacaaagaggaatagtgctactaagttcggatactttatattttaaaaataatattacaaattatataatataatttatttacattattcttaacacaaataattttcagtaaaaagggctcaatctaaaaaggtagaatataatgaaatttggtttgtcttatgctaatgaaaaataattatttttttgaacatttatttgaatttataattgagaacaatattttgaataaattaacaaatttaatttgaatttaaaaaatttataaaatcttacattaggttgtagttcattatcaaatttcaacttaaacattttttttttttaaaaaaaaaaatatatacgaaaatctaaaatttacaccttaaattttaaaattataaattaaacatgacatttatacatacataagtagattttttttttatttattaatttttttttttgaggaaaacgttcccaaccaccaaacacccagagtaacagacactccaaaagtgggggtagagatttattcgaaaaatagcatccgctattaatacgttttgaatacaagtaggattccttagctatcaaattatactttttaaaacagtcaaagtaagtttggccaaagcatgtgcaactccattacaagatctattacaattcacaaaattaataacttaaagcctattatcaaggtcaacaatatcatctaaaactagacccaaagaagtaataatagaaacattgtttttcaatttaagtacaatattcaaataatcagactcaataataatgtttccatacccaagaaaaatgcattagaccagcgccttgcgaatagtcaaaacttcagcaacttcaggaataaagtagccatccacatgccaacttgcaaaagctacaactatacccaagtgattaagaatcaccatacccaagccattacaattgtccaaagaactgataatagcatctgtattgactttgagagaatcaagtgggaaagattttcattttgggaccatctaaaaagggcctatctaagacatcatcccaccagtaggacgtgagtcgcctccctacaggggagccgtcgtcgaggcttgtttgttgtgaaacgtcccagataacacaagtccaatgcacaataagcacaagagtcagcttaacatttttatggaccattttattctgtctgaactacatcctccacaaagtcaccataaccaattcaatcaactcatttaaaaggggatcaataaccctgtgaatgaaattaagaaaatccacacgtcaaaaaataaacgccaaaaaatactatttgaattattgatgactctaacttattaaaaaaaaagtacaaaattgcatcataactacaataaacattattaaataatgtattcaaaatttcaagtttataattaatatagacttaataaaatttttagtaggtaaagtatttaatatttgtaaaattataaatttgtccaattctattaatacaaattcttttagtgtcttaaaaattactcatgtaagatccaaatgcgaaa

SEQ ID NO: 39124 - DNA, 1277 bp, Cannabis sativa
atttgtcatcacttaaagaaagaataatagtcaatagcattaacaactgggtaattgaaacaacttgattcatatccttaatttatcatctatatttgaacaacttttattgttttctttaattttctgtcaatctatattattttattttaaagattatttttcaactaaatagaaacataactctagttttctggtactcaatttcaatgcctatgagttcgaccttacctgtgtgagtactacttgatacgtgcacttgtgtagcgtaattttcgtaataaatttttggcgccgttatcggagaattgtttaaattgatattacattaattaaattaaattctactttggtttctttttctacttcttactaacctgttttttttaaaaaaaaaaattgttcttatcttatttcagaaactgataactctatggtatagagttatttttagtgcctttaaacttaaattatcatgaaaagagtaatgaaaatgtgtttgtttgattgactttaaatagttttatttttattttttattagtaagctagcttctaagtcttatagaaattgttatttttagttgtgtttaattaattaaatattgcttgtttgttgttgggaaagaagagttaaagtgctagggaaaaggaaatgatgcaaggacaaagtgggcatagaagctaaaactgagctgaattgctaaagcattgctacaacaaatgcagcattctaggggctttgggctgacgtgggaaaagttacaaaaaaaaaagaatttcatccatccacatcagcatttatgtagcagccacttaaagtcacgccagctggctgttatagagagaggaggagagctgccatttttcgaagaattttattgcagaagaagaaagtactgaaaaggaagtgactaaaagaggaaattacctgacaaagaagaaggaggagacaagcttcatttgtttgaatttctattctatttcttctattttttctcctttatttaaatacttgaagtttgttaaattgtaaaaactaagtagcagctatggatgaacaacttttattatagattttatttactggtttgaacatgagctaagcttcttgagacttgaatggctatgaacccctatggttcattcaagtgagtttactgtcattcatttatacttattggttgtaagtactgctaagctagatctggttctggaaaggctagatctagtagttacaacttggatgatgcaagtgaattcttaagtttaggtttt

SEQ ID NO: 39125 - DNA, 1816 bp, Cannabis sativa
aatatactctatgtttagaaagaatcgtgttatgcatgaaagattgcaaggttttacaggtgcatgtgtagaacaccatcttaaagtaggacgatgtttagctaaaaaattacttcaatcaaattttacctttttatttctaaatgtgaatccaaatatataaatacaaaatattatacatatatataatattttatatataaatcacatgtataagtgactacactacctgcttgttcaccaaaactcgaaagtttggtttgaatgttgttgttgcaattagggttagaagcacttatacatgtgattgtgactacatagtagaatttcttcttctagttaacatgaaggggaattagaaaaatatttgtagttaaacaatctctctgttatatacattatgcaaataatctacaagagtttgagaataatttaagatgtaaaagttggaattatctcttaggaaggatcagtcccaaactgcatgtctttgccaggggagagttccaatatgctacagtcagatgaagacatgagttcatctatgaacttcccttgaagttgtctctcagaaaaaatgaggcacgcgaatcaaatagtgtccataaatagtcatggggaagaagaaggtagatagagaaaaagtaaagtacaacatagaaaaatgtaagttcaagtattcatcaacaatacttctcaagaagtctcaagaatattgcaaatagtattaaagttttccatactacgctaaaaagaatttgaagacaacatgagataatgatgaccttttcatacataagaggtaagtcgatcattaaggaagatatacaccgtacttgattatttttagggggttgagggaggtttgaagtgtgatcctaataatgagggacttgtggttgaaagctcaatgagccaagtgcataagttacaaaagaaaagtgcttctctacaaaattcatattctacactcattgtcaaaatggaggagataagtgatgtaaagatgtactcaaatcaaattcctataagatgatgacgaagcacaatatcatcgctccaactaattctactaaagacttaaagattgcaatggaagctcagttaaaaccagctagtgtaacttttttgaaaaaaattctattggttcttatcatgcaatagaaggcatatcgaatcatagcaaatgcagttcaaaatttaagaattctgatgctcatgttcaagctctcaataagtgggtgatgatatggatacaatggaggatggagaagatgaggagcttcttgaacaaaaaaatttgttaaaaaaccactcttgggctatgcaaggaatctacaagagtttgagaatagttttggatgtagaagttggaattttctctgatgatacatttcaggagggattgatcccaaactttatgttttttctaggagagagttctaacatggtacaatcagattgtgacttggattcagctaatgaacttccttgaagttgtctgagagaagaaatgaggcacgtgaagtaataaaagtccatgaacaaccaaggggaacaaaaaggcagatagagaaaaatgtgtttgagtgttcctcaacagtattttcaagcagtagaaagatgatgcaaaacgtattggagtttgcccccactactctaaaaagaatttgcagacaacatgcgatctaattatggccacctcgtaagaggtagaccattcactaatgatgatacaaactgtaattgattctaataaagggattgagagaggtttgaaatttgattcgactactgaaggacttttggctgcaag

SEQ ID NO: 39126 - DNA, 1501 bp, Cannabis sativa
  modified_base (1285)..(1291): a, c, t, g, unknown or other
ttaaacttaagtatttattccgcaaattactctttcaaataattccactcacaaacatctcattcccctaaacttattcctaagcttgtgacataattaacagtacaattgagacgaaaagtagtgaatagatacattatgggtttaaataagtggtaaaaatttagaaacaggcttagactcaaacttggtaatctagggataataacataaaggtagactcgaaaagctcaaacgatctaaagaaaattgcctaaatcatataagcaaacattgccaatgatttcgcctcaagagaataaatcatgcaagttctatctcattcaagcaattactacaaattgaagtagtacaattatgaatacaatttaaatattgacaatttacaccgatacacaatttctaaaaggcatccaaattaatccaaagaataaaagaatcaagcacacagtttatgatttcaatccaacccataaataacaatagcaaaaaaatcaatctattatatcaccaacttaattagcaatacactaaacaaagaaaactcaaaaatattcccacaaagtaataaaacaaaacaaacaaacaaaccaaagtaataagtcgcctaactaaaatttcaaattgtctcaaatgtaaaacaaaaatttaaagagaagaaaacttaccttaggtctatgccacattaacaagcagttgacgcccataataagcgtcatgcaggacaacttgaaaattgtttttgaaaatgccttcaagcttggtatacgatgagtttgaaccaaaagttgttagggtttatgtcttgaaaaacttgcaaggataattctgattattaaatagagagtaaacatttgatatatatacatgtgaatattaaatttttaatatttattattgaataatttatattaaatataaaaaaattccttattcatatataaggttgtagcttgtagctgtacagagaactaagaccacttggctatgaataaaacagtcaataatatgttaaaattatggaatcttttatcaatggttgctagtacggttcactgatacctgttcttcgatgtaaataattttggtttgaattacggatgtagtaagacatcaaaatgaatgttctataaataatagagattatatatgacaaggactggcataaatgaagatgtctttactaacatgccatttaccataaagacctaattcatatcataacgatgatcaatagtagattgacctaaatcctaagttatcatgaactcttgttcatgttatnnnnnnntttgattcactcgttaaagtttttcagagaagatgattattacaacttctattttgagaatctaataacatggatggttaggaacatgatgtattatagaatcttaacggatcaaatgttgatttcctttaagtgttaattatgtaactgaaatgttgtgcacaaattcagatgggatcttgaattatacttttactagtaaattaatgg

SEQ ID NO: 39127 - DNA, 1569 bp, Cannabis sativa
  modified_base (1496)..(1507): a, c, t, g, unknown or other
tttttttttttttttgctggtagtaattttcacatatcctcgttgtttaattttataaaagaagtttacaattgtcggttgctgggcgatatatataaaaatatatatattagctaattgagtcaattctttttttcttctttttttattaatgataattaagtcagttcttttaatgacattgattaaaaatattaagtattattatatagtgcatacttaattagttatcaagtatcttctataactacgtacgtaagacaatttatctaatcatataattatttctagaacttaaatttattaattaatagaggagaaaaaattaaaaaagaaaggaaaagtgtgggtctggttataaggtttgacataaaataccaaagcatattattagatctatcgctcaggcacgcagtaggatattacttatgactatatactgtatacacgctcgaaaagattatatatatactagatttatattttttaaaaaaaaatattctagattttaaaaataaaagtaatgtatatttatgtagctatttttagcaatacagttggatggcatgaaattctggtggctgatcatgttcttgctgaagttatcgaggttaaggagatgttaagttggttgaaagaaataaggtggcatgatgtggtggtggagttagacagtttagtcacgatccaagctatatctaaagttcgttagatatgatttctgtttttggatcctacatttcagagtgtagacaaaatttttctagttttaataaggtttttagatttttgtgaagcgatctatcgtgttactcactattttggttagaactttgtggttaaatattggttgtacttattcagattttacaattatgagtagtttaggtgatcttcttttgaatgaattgagttaataaaattgcatttttattcaaaaaaaaaaaaaaagaaaaagaaaaagagcagcgtttagtaatattttatttttaaatttttaatctgaaaaatgaaagtaaaatttgtatttttgaaaaataaaaacgtaatcacatttatttttcaatttatagaaaacaaaagtatattttataaattttatttttattttcatttgttaattttatttaagtcgggttcgggccaaggctgggtgccaatgtctaggttgaggttggagtctaaaatattgattaagaaaaagaaaattgtttaaaaaaattaaaattaattgtttaaaaaaattaaaattaaatttttaaaattaaaattaaatttttttttaaattaaaattaaattttttttttatttaaattaaattttttttttatttttaaaattttgattctcaattaaaaaaattaaacagtgaaaacagtttaataaaaaaaaattacttttctaattaaaagattaagaaattaattaaaaaaatgttactaaacgcactcttatacacgagtgcgccacgaaataatgactcttatacacgagnnnnnnnnnnnngctgcttcatggactgatgactgaacctacagaccaacacgagtattttcagcatgctttgt

SEQ ID NO: 39128 - DNA, 2009 bp, Cannabis sativa
agaaccgttacaggagaaagcagcgtgcaatctctacactggtgacctagcaatccacatttgaagcaaaaaactctcagcttctcatattttaattgaatccacttattgtctccatttattgtcttgaagaagcaaccgcaacaaagaggtctgttgacgtccacttctaccaaaacccgaatccacttcttccaggtaactggtttggattcctcaagttcaatcgtcaccactttacctgccaatgcccccagcatgttggcattagttcgatctcgagtagtagtcatggggcagaagatgaatttggatccaaaatcggattgagttgaacaacagtgcacaggcaccaaaaccaaaggatcacgagatgagtgccaacatatcaccattgacacaccaatattgcacttattattagatttaaatttcaaccatttgaatattgttttgagaaaacatgtactgaccacattagtcaatgaagctatataataactaaaattaatttaatacatgtcaaaattaaatggaataatgttacaattatactatattagtgttggtttaacacaaaaattagggagtaatgacctaaattaaaatcttatttttagtataataaatattatttgggaaaggttgatatgactatagaattgagattattattgaacagaggatagtaattaaaaaataaaatgtatctttcatagacactctgtattatcatatcactaaatttaatgaagggtcttttagctaaaattagacgaagaacttaggaaattgagacgtgtcacatgtacgaacaaaaagaaaatcaaaataagggtccaatacaaagttgtgaagtttaagaggtctttagattaagatgttgaagagtatgaaaagtccatgtccatgattcttgatcagttctttctggtaatgtcattataactttgctgtgtatattgtactaatgaactttgtacttatttattgagatattgcacaattcggcaatttttacggaaagtgttggccgtacgtaccaattgaaggccagttagtaagttttagcaactttaaattagtcgtcctatgactattaataaggatctttcagttattatatatatatttttttgaaattagttttattatatattttataaacaaaaaagtgtaattattgaaagtagctagaattctcacacacttttgtgtaaagtttttttttctttacatgacgttcgtatccattcccatgcaagttgtatctcgagcaccacaatgaaaccctatctgtcttcttatttttttgaagctttcttttagtcaaattgagatgagtaaataaacctccaaatttgaactttggttccataataaataaataaataaataaacctccaaataaggtccacactccacaccacgcgtatattgtatgaaattttggagaacaataatctaaaacaaaatataagtgtgaaaatcagttttaaacctaaaacaaaataataaaaagaaacttaaaataaaaaatatacaataacatcataaaatagagcatctccgacgacttttccgacaccgaccgctactccagtgacttttccggcaccgacagcaaactccggtgacttttccggcatcaatgacaaataaaattttctaaaaaaataaaaacattaaatatgggatttgaaaatctaattacatatatatggcatatcaaataccataaaaagacgtaaaaataaaaaaataccattcaaattgatcaaacttaaatgtgtcatatttatcataagaacctttattaaaatctcataataaatgtaatttcctctattaaaattattgtaagtgcacaatatctttttattatcaacatggaaggatatttatgtaattgtatggcgttggccatttcgtttctccctttgtttttggttccctacagtccccgattgtagatggccatgaccccctttcacttgtctagtggatgg

SEQ ID NO: 39129 - DNA, 2023 bp, Cannabis sativa
aggcatgaacttagatcggaagaaatcctgaaccatcttaacaacatccttacccacaatatgccaacacttatgatagaaagcaggcgacaatccatcaacccaggtgccttgtctgggtgcatttggaagacagcatgccttacctcctcctccaaaactggctataaaagagcaacattatcctcatatgttatggatggttgtataacatcaagaaccttcgcaccattcgaccccctagaatgaaaaatatcagtgtagtagtctaccataacctgagacaaacctgacccccactgaacccaagaaccggtctcatcttttaactcatgaatgaaattatttttccatcttgagctagcagcagcatgaaaatacctcgtattctggtcaccctccctaagccacaattgcttcgatctttgccgccaaaagatttctttttgatgatagatttcagcaagttgttttctcgcctccttatattcagaaagagactccacatccaaccgacctttaaggagaccgattcttgttttacaactttgaattctttccttaaaattgtcagttaagctccttccccgcaccccaagaggaccctaaatttgactacaaggaccgggagcattgtgccagaaatgtacttgaatcaaacctcccgaagaactttcaaattcttgaaatgaccctgcacacaggagacacagatcctagtgatcacttgtcaaggttcaaccgagtaatgacagtcatgagagtcagcaatgacgcaaaatgcttgtgtttcctcttggaggatccattgaggaatggttcaaaaagcttgagctcgaatctatagattgttggaacaagttacagactaatttcataaggcagttcgtagcagtcagaaagaataatcttgaagttagtgccccaactaacattaaccaactactggtggagatattgaaatctcaccctacacatctcaaaaaatagtaaaatttcacagggatgaagccaagagcattgtgcatcacttttctattggacacattgagagaaaaagtaattttcaagtactaaaaatcattttaatcgaaatagtgaaaatctcacattttttatagtaaacgtggcccgaacccatctcaaaatatttttcctcactagtcacaatgatttcagactactaagacgtgaatatttagattgttttcccgttaaatctagttaaaatgacctcctaattaaaaaaattgaaaacgttttgctttttagggtaaattttaacttttttgtaaatatgtttttaaattgtatagatttttattattattttttacataattttttatatacactaaaaaaaacccttaaattaatctgcttagaaaataaaatagaatagctagagagaataatgtttatatagtatatggtaaagaagcacaatcttttataatctaaaattagtgataagtgaagtaatttatactctcttaattggtatgatattttctacacattactttccaagtaaatactctaaacatttccaagtacttaatcctctaacgaggattatccataatgtttcattacaatcatttaaacacataaacataacttttattaaaatatacaaaattcaataatccaaaaaatatagaggtatttttatttttacacttcaaaactgttttttttatatatatttttatggaaattcacataacaaccgacggagcaacctaaatcgcaatcaaaattcatatagcaactcacatagaactcacccaagcaactattaaagcaactcaaaccgtaaatttaaaaaaaaaatagtatatggtataattacccaaaaataaaatatcattgtatggggtaattccccaaaaataaaatatcaaaattggcttatgattaatattttaggtaattatctcctcttaagcaacaagaataatccaatggccatagttttatcatcctcagatataggagaatatcctccaattttcttgga

SEQ ID NO: 39130 - DNA, 1239 bp, Cannabis sativa
  modified_base (27)..(30): a, c, t, g, unknown or other
agaattttagttatataggcacacttnnnntagaatagatatatatatattaaatataagttgaatttgatatttttattccgaccaaatagaaagaaatcctcacgtttaaaaataataattaaaaaagaaaaggaaatcctaatttgggcttttagtgtgtttcactatggtccaaattcacgttatgccattgtacttgaagtcttcatggttaacattcaggccccatgacttacaatatagcgttatacttagcccaaactcatagtttcgtattcttgtaaataaatgtggacatcacatgaattatggatatttatactttttgttcaaaaaaatgtcattttttagaaaaaattattttatggctttttagttaaaaatcttaattgatgggctatttgtttctcacatctttataaacaaaacaaattaagccatactttttacaggagtttttaccaaaaaaaaaaatattgaatttcggacaaaaatttgcaattttccggccacaaagattctttttttttttttttttacataaatcatatttttttttaataaattaatcgtaaaacaacaaaatacaattaaaaaatagtgaaacaattaaaaaataaccgtggaataacaacaaaaacttaacacaatacatagtataaaacttacacaatattttttaaaaaaattccgtcccacaataaaaatgtttaaaatttcaatatgtgatataaaaatccttatatcagcccatttttacttatatataagtaaatttactatattgctgaaaaatataattacctaattttatataattttataaatatttacaaataaatatatatttataattttaccgtgttgattatttttaagtaattttctaaaaaaaagaaaaaataaacacataaagttaaatctataaacacataagtcaatatttctagtttgttatattactaaaatgatatgattactataatttaataggaaattaaaactaagtatatacaaacatatttaaaaaaaaaatatatttgttttataaatagtgtatacataattttattaaatgtttaattagtattattaatgtttctaatattattattaatctagcttgtttaatgaaaaaaaaaaattctactatttttattatgataatatgtcaatagaatcaatatagttttctctattaaaagtttacaaataatttaaaaattaaatgcttat

SEQ ID NO: 39131 - DNA, 2970 bp, Cannabis sativa
cacgtacaaatctcttgtgtcaagtgattttattttctacaattatttttatattctgctagttctggtttgtttctgcaaaactggtttctgcagttccagaattatattctactgctgcaaacgtatacagttatatatatatatatattatatttttgtaatatttattgatatttgtaaaaactcgatttttcagagagtaacaacaaaagatagaatgatgaggattttgtcaaaaacgataaccaaggagaaagcagattgatttgaggctttgtaaaaagtggagaaatataaaaagaaatttacatttggatagataaatatttgaggcttatttaatagtcttttttaggttgtaaaaattttggtttgtgattaattaatgaattaagctagttcataaaaaaaaaaatccactaattctttttggatcttatgattttgtcatgatttatattaattttcattcaaaattaattgcttatatataaaagatttactctaaatactaactttttttttctctaaattttacatatatactttgacaagcctaatttttccaaccttaatggcacaccaaattctaaaagtgttagatattaaatctacaccaatttagtgtacaacttttctttttgcattctaacccttattttattttactttaaaaaaataatcgtacattttaatcttcaaattaaaatgtatcacaaaaataattgatttaaaacactaacttctttgaaaatacaaaataacaataacaaaaatactaatattaaataaaataaaaacaacataacattaagttataaaactcaaaaaacaacataaataaaaataaatattgagtacggaataataatgagtaatttgcggcataaatacctaagtttatctaccagttacagtttaatacttaagttaaaattttggcggtaaaaataccttctgttacacttttgaaagttttgtaggtacgtaccttgccgttttctgacatgttgggtgacagatggcaagacacgtcatttaaaacaatgccacatcattttattaactatccacgcgtgaaccattttagtccaaaacaaatttaagttaaactaacaaatatcaaaatattaactatatgaacttgaaatattttgagaacgttgatatttttgagagacttgatattgtttgtgaggttttttttttttttttttttttcttttttgcataatccttgtttgtttattttaaaattggtggcgtatattaaaatcaattatagaattttaatatatatatttttaaaaaaagtataatgcttaattgatttaataaatactaaattatttcaaaatttaaattcttaatagtagccatgatagccatgatatttcataaattaattatttttgattattaatgtaaataatataaaatacaagattttttaaataaaatatatttatttgataagtgaattattagagatattgtatcaaaaataaaaatttatgtcaaatattaattagtatagatttcacaccaaattaatataactattaattagaaatggtctaacaaggggaagatttttgtgtgctcataggtaaagagaaatgctaataggtacgttatgatactaagtatcaaaagagatgttatatatatggcttacatttatgtttttgttttatttctcactttggtttgatttaaaaggaacataataaatcaaaatccattgcacttccaacaagtttaggaattcgacaaagtttcattggcatcatttctatatgaattggatccaatttggtccatgattcgaccttgtactattttaatggataactaaagagaataagaaccaatcaacaatgcatggcatatagactttttcttttttcaaacttatattataaacttaatttaatttatctgtgtacgcactaaacacgtgataacttttcaattatattactaggttaacctaatagcttttctaaattaaatcataatataatatggactcacatcacataagaagcgattagcatttaatatatatgtatatatttatatatataataaattattcaattcacccgactcagacccaagctccgacctctgaacccaaacattggacagcagacctggtggccctcgacctaaacgcaaacattagacctgcacaaactcatacacaaactcatactgtgattctggtctcagccctgggactcgggattcaagacttgagacttggactcccactctgacccaaacctcggccccaaaacttggaccccgaccccgatctcggatccaaacattggtcctgaccccaaccctcaccctttgaccatttctagatataaataatgcaaactaataaggacaatttttaagtataaatagaataatatttttgtcctcctgaacttttgacacaacctgatcctgcaccctaaaacatacgacttgtcaatttttttttttaaaaatataacagttacataattatactctttttgttaggttttgtttcttcaaccgttaaaaaattaaaatttttaccccctgaactttgaccaatacaaaaatttgtccccttttataaaaaactaattttaaaaattataaactaaatatttatagatgtacgattctcttttctatatctgacacaccaccactcttcttcttcgtcttcttcttctagataagtttttctcattctcacgtcaacgtcttcttttgtgaggggttcaagagcagtcatctgagagtggttcggttcggctcaacgacgtccttcgtttcagatttttgttttcatttattaatttactattattatagcttaattccaattaatgtttttatggggttagaattataaggagttcattccttaattaattttaatgttgtgatcgtgtttatgtgttgaaactaatt

SEQ ID NO: 39132 - DNA, 2440 bp, Cannabis sativa
tcttgttgcttggattcatggtatgtaaaatgattgtaaaaatattgttacatcttattgttatgattttagtaagctaactggaattggtcctagactttactttgcggatgacttggtttgcctccatctaatggagtgttgccacaatcaccaatgcacacaaaaagcctagcagttctcaagaggcaattgaagagaaggaaaatggtggagagtgccaaagaaagcataaagctcaaggctaccaactctgaaatctatggcaaaatgcagggtgtgtttgtcgaaatggacagaaatcccgttgtaagtacttaaacatgctaattcatgtgtttaaatatgtaacataaaccactaaaatagacataatcttcaggtattagttttccaagaacacaaggcaagttatctctatgattctctctctcggtggaaaaagagttgaattgaacgatgttatgtttcttggagaccaataccaatattaggactgtctgtaagaggcttcccagttccagactccttttcttttaagattttgtgttgtaactagttgcaagtgcagaattcagttgttcaagagctggaagatttaaaagagccagtgatgaaaggcaaaagcgaatcggaaaatcgaaaggatacatttgatcccgaaaagcatatagatgcacacttgccagttcgagttaacaagcagagactaagcaatctactacagtcacttcttgtggcagcatctgtatttgtcgtacctctaataaaattgtaccaacttaacttctttggggatattttgcctacatggccattgatagtctacccggaaaccaattttgggaaagaattcttcttctttttgtcactcccggctgaagatacaagtaaaatattaatataaagatatatgacattaaatctttgagaatttcaattgaacaaaacactgatatattgaatttttcttttgtgcagtgtgttggaaagagttcatgcttcgtttgtggaattggttccacacaaatacatagccacatttactctgtttcaagttgtgtatttacttgtgtgttttggtgtgacatggattccaatagctggaatactattcccattgccattctttcttctcatcagcttaatacaatatgttcttcccaagttttttgggtcaacttatttgagagaacttgatgcagccgagtatgaggaaatcattgccgccccaagatcttttagcttgtctttcagggtatgttatgtacataatgattccaattcttcattttccataattttttgcaaaatggattcaaattttatagacaagtggtcgaatgttggtcaaaacgaaatcaaaatgcaaaataacttaaaaaagagaggtaattctacctatcattttatttctaactactcatttatttgaagtcaacagtagtacacttaaatttagagggtattagttaccactgatcttctttagcatttctctagatttagttttgaataacttttgcaaattgacctcccacactcaagacaggtgctcaactttttttcatggttgttcaaatagttcagccagttaattaaacttttagccaggggctattttgcaatacaaaaatgacttgttttgccaattatttctgtattttacataaaaccttatacaaatgtatggacagtcatgagaagtaggtggagttgaggaggaagatggagtacttgagatgtgtgatggtgagatattagatgagttaacaacaagcagaggagaaatcaaggtcagagctatgagtttcactgaagacagacgtggtcaggtgatatcattatcccacaatcgatcaatatataaattatacataatggcatgcataatttgataatctataggaacctctcaatatcttaatatatttcatgttttcgttaaattttcttttatagattcatccaggggatactgtggaagggatcatgtcgaggaggaccacgaatgaaatagaggagttgaactaatataatataatataaataataataatgtctacacttcttaattatatatttatatatagtctcacttattgtggcatgtttacgaacttgatggttaggtttctaaagttgtttttgaatttctgaactgctgattgggtaaccagtgaatttcagtttagcggtttctaagaagctaaaagcagaagctcgaatccaaccaaacagagcctaagtaaatacatgtttaatgtataaactatatatgtatttcgtctgcagtttagtttgcttggtacttagtgtaatgttaaaacttatataataaatcgaatgaagtgcagactaaactggttctaacattacattaatgtgtatatacatgtataaatgcttctctgtacttcatttagcttgatgcttatca

SEQ ID NO: 39133 - DNA, 1419 bp, Cannabis sativa
aaactctaaagagaaaatgtgttttgagagagaaaaagatttgggattgttgtaattgattgggttgtgatgatgtttgggaatgggattatggcttctatttataataatttgaaatttagaggaatattttaaaagtgtgaaagagagagtttcaaggggaagatgcccaaaataattggttgcctaatttatttttagatattttattcattccaattatttgtgtggtttttttagacaaaatttctctgtatattcaatgcataataattaatattaataataataaatttaattattatatatagagtaaataacggtataagtacccaaacttttaagtttgtaagcggtataaacttaatatttatttttagcagcataagtactaaatgtttgtaaaactgtaattttcttataattttgttagtacagattccgttttgaatttattaaaataacatttaaaagtaactgatactacatatttctgtatagacccaataatctagaatttgagccttatatattatgtgtcatgtttaaggcaataacagagtctgtgcagataaaattagagaaaaattataattttataaacattaggtacttataccgctaaaaataaatattgagtttgtaccacttataaatttaaaactttaggtacttatgtcactgtttagcaatatatatattagagtttattatatattattatttgacattattttcaaactaaaaaattaatacaacaaaatgtcaataattaaagccaactcaatcaagaatatttagtatttatttcctgttgtcttttatgttttgtaatatcttaattatggaatttgattttgttcctacaaaatcttaattccttgtccttactcttaactttgcaggtttagttttgagaaacaacttaattatacatagaacaagaatattgtgtagttaattaactacaatcatggactataattattgtatcaaatgtataacattatgattaatgactagaatcgatatttcatagtaacataattacgtattaatacataattataatgtcatacgaaacatattttgtgtctatattaatatattatattgtgcatttgatacattatgttagcattgaggcatttcattaatttttaactgatacgatctggactcaaatattagttcataaatcaatgtccataggtgttatattgctacgggtagagtttaatatcgagtattatatattttaatttaataataattattaaaaattattaaccatttacagagtgtcatgctattaggagtgtaaatgggtcgggtcggatttgattcgactatgatccgatctgatcgagatcatgtaaggatctatctccccccccgccccctagattagatgctcgg

SEQ ID NO: 39134 - DNA, 1576 bp, Cannabis sativa
  modified_base (527)..(528): a, c, t, g, unknown or other
tacatagtatttcaaaatctcaaaaaattttgtttttttttcttcttatgtttgaatgcatgtaaaaataaataaattaattttatgaagatttaaaattatttagatattttttctgaatattatcatttatgaaattaacatatatttgaacatatttatgtaaagtgggacaaaatattacatggactcgattatattgttcaattatgggatattatcaatttttttatataaaaatgcaatacaatttaataaaaatttcaaataatattctaatggtacaatttatattaattatgatttactttaatttaagaagactttagagcttttcctatatttaaaatttgaagtacacactatacagaaataaacagcaattagtatttttgttacaatacaatattaattttattttggtgcgcatattttgtcaaagtaggttttaggactaaaagccatttgaatatcaattgctgaagttgattcatctcacaaacaatcatataaatatatatatatanntatatatttatatatatatggtttgaggagtttgaaattatttgattaataataatattaattgtgctataaatacgatcatattttttgacacgacataaaattagcacgaattcggaaagcacgaacataactaagcacgaaaaaatatgagttttgaaacgacatgacatactataaattagcatgacttgacataagaaatatgtgcttaattaagtacgacacggcacgagaaacaggaaagacacgagacgtaagcacaacacacgacaagcccaaaaaatacgacacaatatattaaaaaccttaaaatttattattattattattattaagatatgaatttatcaattatatatcttgaaataattataaaagttaaatataataccaaatggaacacttcttaatgggtattacctattgatggttactaaacaatttaactataaatattaattttaaaaatattataattctataattaaaattgttaaaacatgaaaaactaagattttatactaatttatttgtggggtgtgctataaaaatttgagtatttataagtaaatatttaaattataatgatattaataactttttatatgattatttgtaaaatattgtttaaaatttatataaatataactaaaactttcaaatatatataatttaataattgtaaaaaaaaatatttaaaaaagtaaagcacaagacatgagcaagaaacgatacgaattcaagcacaatacgaaaatatcgagcctaccctttaaaattattcacacaacacgacacaactcatattttttttttgtgacatggcttggctcttttttttaaaaaatacgaataaatatagatcgagtcagtacaacacgcacgaactaatttttttaaagaaaaaataaaaacaaaaaaaaaaaaaaattgtatttggttgtaaataagaattttaagatgagagactttaaaaaaaaatgaggaagctacattattattacgaggactgataatgaacatacaactaaaaaaagaatgagct

SEQ ID NO: 39135 - DNA, 1983 bp, Cannabis sativa
  modified_base (284)..(294): a, c, t, g, unknown or other
aaagtaaattttttgtttttaaaactttatttttgaaaaacaaaaatgtattctataaccacttttgttttttaattttaaaaacagaaaataaaagcgtatcatgtaatttttttttttgaataaatgtgacgtaaattttattttcattttattttttgattttctttaagtcgggtccgaggccggggctggggtctgggtttaggtccaaggtcgaggttcgagtttggagtctaggttaaggtatggggtcggggtttgggttcgagttcgggttcggnnnnnnnnnnngggttcggggttcgggccagggtcggggttcgagtccgggtttgggtgtcaaggtccaagttggggtcagagtctaaaatattgattaagaaaaaaaactgttcaaaaaaattttaaaagtgatttttttttcaaattttttaaaactttgattctcaactaaaatattgaaagcaaaaataattttttagaacatgttcttagaaaatatttttacttttctaattaaaaattaaaaattaaaaaatatgattaaaaaagtattaccaaacatatgttttttgatttttttttcttcatatttttaattaaataataaaaaattatttaaataaaggttatgaaacgcaccctaaattttatttcatctaatcttatttctatttccaatcttatttctttgttttcattactcttacctaaccttaattgataaaatagacaaaattcatgtaatgaagctataacttcgtgcctcactatttaccaccatatgatgtacatatcatcatgtttaagagttttttttttttttttttttgtaatttaagtgtttatatattataacaatgtataatttgacactcgaactcatgacttccaatactcacgcacccttgtatgtagttttacttctacatacaagttacttcttctttagagtctttcaggtgattatgtttcataagtacgtactcacctgtacatatattgggctagtcttgaaatttagtaggccataaacaataaaatttttgagcttttatttagagtaaaatatgatatttttcaaaatcagtaaaagaaatatgtaattttaaaaggaagaattttttttgagctcaggcacacgcctaacccgcctatagtgagggcggccttttatccacacagagtattttcccatcaaactagttctcatcaacttattcatcaaactctcaattgtatttgtgtcttgatagtttacttttttgttttccaaatattgtttttataatgttcttaacatacctgaatattttaatgcagcttcactttaattaaatcaaccttgtatatctaaaagattcaatcaaattgagatcagataggataggccatacaaatatgctaacccctgtattatcttgagtagtagctggattggaacacattaataattagcatgtgatctatatataataatgatctcatattagtcagaggtatcaaaatatctcatccagattaaggatcatcaatccttgcatgttttttaataatcaaattcttaaggtgacctattaataatctgaataatggttacaattgaagagtttggaaggaagacaatcccatgtcattatcagtccttatcttctatttaggtccctccacaaataaaactttgttaatatgaaaatgcatcttaatcattagtctaattacatgactttgctgaaataagtacaggaattatcaaaaaccttgagtgtgactaaaaaaaataggcaatgaaatacaattgatactgatccatagcccataatgtgatccatgggacaagccaaagacatcttaaaatgagattttgttgtggggttggaaattaaagcaaaaatagtataagagaaagaaagaaaaaacttgtttataaggtgtcttgtgtgaattcaaacaagtcagctcaaaaatttgaatcaatag

SEQ ID NO: 39136 - DNA, 1384 bp, Cannabis sativa
tatcttatggtccactttgcaactttggatcagcaactcaactctaaagaataatatcttatggtccactttgcaactctggataattaatccagctagtcctatttgtttaggattatttatcttatctaatagggtgagatagataatattatacaggtgagattttttattatttttttaattttgattttgttaatgtattttaaatttaataagaatttaaataaaagaattattataaatttatttataagaatctaatttgttcaatcctatgtactaaataagccctatagataaaagcaaagtcgtgctaagaaaaatcattaaaaacattataaataaagatggacattataaaatttaatgtatatatatctattaatttactggttttcaaacattataaacaattccaaagaatgacatattcaccacaaagatggacataagagattttgagcacttgtcaagcattaaatgtgaaagagtgtttattgtccttgaagaaaaattagggtttcttgttcctaaatttatagctatcgaatgttatcttttttctttggccagacccgttggccttctttgggcttaggtgcaacgtggtcaggattgtgttttactactacgattagatttttgctactatgattagtcttgtctttgtgatatgatttttgaatattttagttttgtctctgacatggttttgagtgttttagtcttatctctgtgatatggctttattttgttgatttttctttgttcttctatgactcgctatcaaatcattgttagtagttggtaataacaagttctctgtaactgaacgggttgttagtagtgcagttatatacattacacaatagttgagtgctcaagctacgaggttgaatgaacctacaacaacagtttctactgttgtatcttctaagtggtggatgaattagatacgtgtttaaggttaattgtaatgctataattttttttttttttgaaaggatgctacaatcttttttatctaattttattttaattttttttggtcaaacgatctataaattaggcgactaattatttgatttttttttaaaaaaaattctaatcatatagtcgtgtctacaataaaaaaaaaaaaaaagatatctcgattattgcaaattattatattttaattgattatcattaataaaattctatgatttatttaaaaaaaaaaaaaaaaaacctaaaagaaagtttatttcatgaagatagaacaaatatgaatatcttcaaagtaataatcactttatcaactaatgacacgtttactatacagtaatcagaatcgaaataaattaatggaaaaatataacagaataaatgaaaaataatc

SEQ ID NO: 39137 - DNA, 1272 bp, Cannabis sativa
ctattcattataattttagtatattttctataaatgctagaaaagttttgaatactttattgtaaaaaaatatgttattggttttttttttatattcgtagtaaactgatatatgaagaattttggtgttttgatgtcgatattgatatgacaaaaaattaaaaaaaaaaaaatagatcaaaaaattgagaaagagattgataatggtatttcttattttttagaaaataaaaaatcattattattatttgttatcactattaagaagaaagcacaacaaagttttatagtaagtaataattagttcaaacaatctttagtgatgaaacttcttgaataaattagtagaactcattatacagcaaaaattagtagaaaggccaataacaacattgaatattatccatatattatgattaaatagaagatgcacttgtgtttttttttcttctcttttttattgagtatactatatatgtaaataagtagtagaatatattatagctagtctacttcttctcccaaactgcatagtcttgaccatcagtggcaattttgtagtaatttgaagaaggcaaaaggttacccaaatccattttagggcctattttcataataatcttctcatcaatttcagccatataaagatcaccttctgcagctaatatcttcacattactattcatatttataccatttcttcctctaattccacttaacttgcttatttgctccttaagcccccactcaattaggtgatcataaaactgcaaacaaaaaaacccacaaaaaatctcaatcactttataatcagcattgttattgggtaccagtggtactcagtactttttacagttggtgccctacaattggttagcgatattttctaaaaaataattttttaaattatatgaaactcgatatttaattacactaataacagtatgataccgaagaaggtaataagcatcaatagtgtttttttaccaattctcttttataataataataataatgttaaagatacttatatatgatgcttagaaaaccgctaactatttataggatttcatgagatttttctaaaataaagtaagtcctgatcttataaatgagttgatatgctatatatatttcttatactaattttattttaaataataaatatgagattagataaaagtatatttcacacaaaaaattgaatactatacttaaaaaattgtactaaagttgagagagtaaatagtcacttacaatagatggagttcc

SEQ ID NO: 39138 - DNA, 1706 bp, Cannabis sativa
tattttccttctgcttttaatttcactatgacttccctctttccactgagctcttatctaaaggtgttttgatatcctctttcaacagatgatttgatgactaatgttgctgctccaagaaggccactgaagaatttcgttttccgtgtagcaagttcagcgtttcacttcatagtccatatattagcgtgtatatatttaattttcccaaagctgggaagaatatttacagtacaacaacaacaaccagagagacagttagatatcccaaacccaacaccatcatttgcggatgcaaattctcaggagcaggccactgcacaggctacagaagtggatccactctggcagaggctgcagcaactggaaactgttgtcaccgagcttcttaacaaacctaatagaatacctcaagagaaagaggatatgcttgatgaatcactaagtcgaattagatctatagaatacgacttacaaaagacgaaaagagtgagataacctttttttgctcataaaccacatgctttcttttcgatgcataaagttaccaacatgaagctcttttttttttttgtaggcactacttgcaacggcatcaaaacaagtagaacttgctgaatcacttgaaggttttcaagaggacagcttcactgtaagatccatatttcaatttgcctagagtgccagttataactgctcgttcacattaaatagtaggaattttaccacatcattgaaaaatatggtcattgtattaatttaaggccttcatttgtaacagggaagaagctcttgttggccgagaaattgtaggacccaaaacccggcccaaggaggaagatgagcacaataactttattaagtgacacactataatgaatgccgttcacactgccttctcgatttacaaatgctattacaatgagatgtgaaatgactcagccaagttaaataaagagttgtcatttcaggtaaagtttcttttcataatattatttaaggctaaatattctactcccttctgctcatatccctgatgcagatttttttttttttcttttttcacaggttcttatatagattttttattaaatgggaatatataaaagctaaaaatatagttatttacctaccatatatatatataaaaaaaaaaaaaaaacttgttcagcggatggttctttcaccttgaagatttggcgtagctgagtgtgactaagatatagctcaaaatcaaatatcttccattttgatgtacatattcaataatccttccttcttttgtttattttcttttgaacatacatagcatgcaactttacccctgcatgcatttatataccaatagaaagttgacaaaaaaacagaattttgttcagattttatcattaatttctaatccttggacttaaaacagagcattaaaccattgttattgaacaatgtccaccaatactattgtttgattcgatattaaataatgttaattactaattatctaataatcatgatgttcagtcaatatacttaatagcatcttttactgttagctatttagcttaaattgcggttctttttcttcaccgtacaagtacaggaaaaaggtgagaaagttgtcatatgcacgtgaagttttagaatcattttcaaagctttcttcctctgaagcaagaataataattgtgtggtaacatttttgtccaaaa

SEQ ID NO: 39139 - DNA, 3579 bp, Cannabis sativa
ttttattttattttctaaactcatgaaatcatgagccaaaaagtcaaaacgatatttcataattgatagtatactcacatcaatttttttttggtaaggaggctcacatcaaaaattttaaatattctttatagacaaattgtgtctctaataaacgtcaaacaatatagtgaaaaaaaaaaactatatagcgcatgcatagggaccagaatgaaaacatgttttgcggatgagaaaaaatatatatccttttcaatctatcaataatactaataatatttcttcccaatcatatagtataattacctaaagagttgatatatatatagttcgtatttattattattattattatgaaactgaaacttttttttttttttttggctcaataggaccagaagggaaaccatgtacaatggtagtaaggactctgcattggacagttccccattactggatttggggtttaccatttttccttttttattccacaaggtctgcacagtttctccatgaaaggcccaaccagagcattttgagggtcctcctttgctctcttttctctccattaatggtaataacaagctaacaattatttataatcaactcccttgaataattttctgaaagtaatgtacagagttcatatgtatatatgtattgatgatgtgatgttaactgaacgatatattatacatcttgacacagaggcaagcagtttcaaagttcatagaatcttatctgctaaagaagcttcctttggagaagtatggactaaaaccagaacacccttttgtggaagactatgcatcttgccagatggctcttatgccagaaaaattcttcccagaagctgataagggaaaaattgtgtttaaaaaagcatcaaattggtggttctgggagaaaggaatcgagtttgaagacaagtcgaaaattgaagctgatgttgtagtccttgcaactggctatgatggaaagaaaaagcttaaagctatcataccagagccattccgcagcttattggactacccatctggtcttataccactatacaggtttaaattactaaaaagaagaaaccttttgatattgattttcatattttgttacaagtttatttatctctgttttttacaggggtacaatccatcctttgatcccaaacatgggatttgtaggctatgtcgaaagtatttcgaatctgcattcatctgaattgcgttccatatggctatctcgattggtggacaagaagtttaagctcccagcagtgtcaacaatgcttgaaagaacacttaaggaggtggaagttatgaagagaacaacaaggttttacaagaggaactgtatttctacttacagtatcaatcacagtgatgaaatatgtgaggaaatggggtggaatgcttggaggaaaaagacttggttatctgaagcatttagcccatatcgcagtcaagactattttaactgataagattgaaattaagttaccataccataaaatgcagtcaaaaagtttctgcagcatttagtttctaagtattaagctaagcttactatgtactatgagatgagtctaagagtaggaagaaaagaagagaaaaaaataaattttagggaaagtaaatgcatatatagtgtatccagccaaattaatgatattatctaaataatattgacttttaaaatctccaatggcatttctctttcatgttagaatttaatagtgccgcccactaaacatgtcttttggttgagttgagcactagagtagattgtgaaaattgacagaaatcagctacttgcagatttgtcaatcaattggtgtggaaatatgacctcatggtcggctaatattagctaacaaaggcaaataggaccactaaaatggagcaaaacaggaaacatactttataatcctaggaacctatagatgcagctcatttggacacagttcggccgccgtggtagatttggtgtcccctataaaactctatggtggagtttggttgtatcgtgaacattatcccacatagaataaatagtaaaatattgagccatatataagaatatggactattctacttatcaccaattggttttgagattaaatctcattattctcgacatggtaagagaaccctaagagatttggatgaaagaaatagaataaaatttgaagatacataaaagaaattattaaatattttctcaatccaccaaaatgatagaaaaattattagaataatattctaatactttaagatgcaaccaaataaataaattaaaagttgattttttttcctaatctttctatttctttacttctaaccaagcgtcacttagtgattagccaaagtattgactaagagcatctctaattgagacaacaccaattattgtcaaaatacacacattattataagatattttattattattttctctctcatttctcttaaaaatactatggtctcacattatattgaattaatgaatttttaagtaaaaaataatattatttttttaataaaaaaattaaaaaaagagagaaaaaatgtcttgtgtccattgtatatgttgaccgcattacatatacacatgtggcaaaaccactcaaatagacaaccccattagagattagagatgctctaagccattacctttcaggattaaaaagaagaaagacaaataaatggttaccattattaagttgtttgtttttttgttcctgatgaatttaaccaaaatcatctgcttgactacatattgagcagaaaatgatcattgcctttattcacatatgaaagaaggttcaaacattgacagctctagttttagatgagataagattaaatcatacatactgatatacttgtctacatcaaaggcaaaatgattcacagctgagaagatgatacaaaattaaacaagaagacacattcaaatgcttttaagtattttaagagtctcatcaatgtgcttaattttcaggttggaactagttgttataggtggcggagccagagacatatcctagtgggcgtaataattttttattttttatatatttttttaaaaaagagtactatcattaaaaaatatatatataatttttaatggaatattgtaaattttatagagaaaaaaaattaaaaacaaaaatgtgaggtgttcatacaatacccaatctatctaatgatctaacttaattccttctgctaagtgcgaatatatacacttgtgtgaattggattgtaaaatttaaaatttatatttgtacagattgaatgttgattcacatgtaaaagaaactgatttaatccatccacacatatttatatatagtttttaaaattattaaatatacaattaatgtaaaaaaataataatttaaaattttaatatatattatgatacagataggctaaatactattttagaccatatatttcacaagttagtaattgaaccctttattttattaaataataatttagacctcatatttttcaaaatggtacaaaatagacattgaattcaattttaatcaaattataaaacataataata

SEQ ID NO: 39140 - DNA, 2419 bp, Cannabis sativa
aaggtggatagggaaggccaaaatgagcaaagtcaaaataatggtgttttttgttgtcattgcatccttagtttactagttttgaactagaaatgccattttatggcagggttgtagtgaaagtgtagataatctagttgtttaagtcaagatgtaacaaaaaaaaaaagaatttcatgtatatggccaaatagagctaccaatggtgaaaaatagttgttcaacactttgtaaaaattatatagatatttaaattctccaccattgggagaatgctattagattgtacaaataatttttgtgtaatgatacacatctgattcatcaaaaaattcaaatcaccactcatagtcaaaactgctccgtggcaaacataactatgaccaccttcatagtaatcgaaacaaagtatcgttggaaggtcacaccgaatgacctctgagccatctaacctatgtataacctgtctcttaagttctcgaaagcagttggtactgaccgtctccttggccaccaaataattgattgcaaatattacaacacattattgactttcagcaagaagacctcctttgctggcataacattcagggggctgataaagacctcgtttactattctacatgataggggaaataaaagacctcctttgttgtcaacacaaccaaagggacaaagaaggcctcttcctttatgaatacaacagaagggatggcaaagaccttcaaggttaagaccaacgataaaatggagactacaccaacaataattttagggtgcacccaagatagggaagacatcacccccatctttggtatattaattcaggagttggttacttcctcaattgatcaaagaacaactgacaactgctaaaacacattgtggacaatagtcaagaagacctcctccgctgcagagctaaggtgatggtgaagacctcctttactgtaaagccgaggatatggtgaatacctcctccactatgaagcgaacgagattacgaagacctcctctgctataaagctgggtgtatgattaaggcctcctctgctgcaaagctgaggggatgttgaatgcctcctacactataaagctaaggagttgacgaaagcctcatttgctataaaatcaaggagattaataatagcaccttagctgaaacacaaccaaggaaatgctaaagaaattcaaggctacaacctaagagaagacgaagactacatctatactcacataaacccacattgtgatgagagagtcaatgctaagacaacagccgaagatcagagtaaatgttgacatttcaatatcaccatgatttcaaagaatctcaaatcaaaggaaataactatagtagtagacaaaattttaagttgaaaaggaaaagataaatgatatggaaagatgatcgtcgttcttcttctccttttgtacataaaattacgaattccactatgcaacaaggattggagattgcaaatcctactctcattgggaatgcttgaagaacagaagacataatccaagattgtcaaaattgatgcccacctagaagttaagagagatacgagcttagttcacatcattaagtcaatctcacacaagtgtgaaattgacttagggaaaatatttacacaaattagctttgatgatgtggacatcaatatttgacacgtagcaagaaagatgacatatctgagtttagtagtcctgagtcatagcatgtcgacctatgaaggatccctagcctgatgcccaagttgactttaggaaatccggtgaggaagttcagacttcaataatttgatttcaattcactatcattcattattttgtaccacgaggacatgagcaatcaaatgtaggcctcaagagttgaaattacacgaacctacaccccaaaagttaactttagcacctcaaatttcacccaatgcccaagttgacatccttaactaggatttcagtatctgggaccgcgctagtgaaaatgtgtcaaatttttcaatgggacatacataacacataaacatttgaggcatcaaaattagattcaaagaatgttcattaacgatccaacttttgcatcttcttcttcttcatcataaattgggaaatatgtaattttggtgaagaaacaaaacttcctgggtgcaagaagcaaagcccagcgcccaggttgacatctagggctagcctaccgcaaaggttgacaaatggggctggcccaacacccaggttgacattttttcaacttagcccaatttcgatgatgcttttcaagaacacttttaagcatcttctccattttcatcaaagattaagatttaactatttacgcagaccaaacaaaacttttgaagggcaataaaggggacctagcacctaatttgtcatatagcactaggcctatggc

SEQ ID NO: 39141 - DNA, 1706 bp, Cannabis sativa
tatataaatatatatattcatataattgacagacaattaacaaagctactcatctgcagtaacatgcacctaatttaattatcttatctctaaattaagaaacgtaatatatgtatgactatgttgacaatatttattttttctgggagtaaattcttatttttcttatttattagtttcaactttcgatgaatttgaacgtgtcacgtaattaaattcttcagcttcgtccttaccaaaaaaaaaaaaggaaatttttgcttaatagaaatattttatatatatagactataatacgtattaatacaactgtaatttacctatgaagtgactatctaaacttgagtttggttggaggtaataaaattagaaggaattatattatatattattttttgactttttttttgaaaaaaacggtttgagttgctcccgtgatttctatgtgggttgctggattttgattgcgatttatattgttccgttagttgctataggaatttttgaatgaaattccataaaaatacaaaaaaaattattttaaagtgttaaaatgaaaaaccacataaaattaaatggaatagaataaaatttttttttaggagaattaccatgtactatttttttttaactttttttcaaatttacagtttgaatttctaaagtggttgcagcgctagttgcaatagggattttcatacgattttttgttgcaattgtggttgcagcgctagttgcaatagggatttctaggtagaattctgcaaaaattgcaaaaaaaaatattttgaagtgtaaaaatgaaaaagaccctaatttttattaggtaaattacagcaaaactctcaaattttttaatttactagtatttaatctccaaaactcattttttagtgataaaattcccaaaattcgtgttctcctaccaatttattattttaatcaaattttactgttaaatgtgactgttacatatattgttgacgtaaacactcacatacattctattaaaatgactttttcattattttagtaaatatcatttcaatataaaatgaaaaaaatttaataattttttatataattttaaatttaattctactctatttctatttctattcttaaaaccaacccgttctaatatatttattaacccatctccgatgttaataaattaataagttggttaggctacgtacctacgtcaactgagatttcacatcagtatcactttcatatcaacttttgattttgaattcaggttgcgtaacaatatatgtatatatataaagtcaacttagtttcaagattaataatatattcttggttggcagcacagttgaaatttggcaatttgatcatggtttcattgtgttggagtcaaggaaaccttgacatataacgaattcatcattagaataatgttacaatatgaattcaatgatttataagttaatctcatcaaaacatgcaaatttctcttcatcacttaatatatatttttgaaattaatagcctctatgtatttttttattattagtatgacacaaaacaatggtatatataaatattacgtgtaattgtctgattacgtttaatttaaaaactaagggcttgtttggaacgctatattaaatcgtattgtattatattgtattatattgaattagactatatatcatatttttatataatactatgttaaa

SEQ ID NO: 39142 - DNA, 2005 bp, Cannabis sativa
  modified_base (1647)..(1652): a, c, t, g, unknown or other
  modified_base (1820)..(1821): a, c, t, g, unknown or other
  modified_base (1941)..(1941): a, c, t, g, unknown or other
ttattgggataataacaaatggatgactcatagtgtatctatgagaccattcttttctttttatactaattcacttaggattaagattgaatacaacccacaaggagcgaatgcacaacatcctgtagccccacgtgccaatgtgcaaccataagtggcaccaggaaacaatgctcctaatcctttggcacaaacacaagggggatgaccgggacataacttggaccttcctacacttgtggaaggagaggacgtttggtcatatcaggaggaccacactttgaaaggactaggaatggggctcaaaagagatatattaatgagctcaaaaactcggataagactcctttcacaccagaacaacgtgctcccaagcaaagccgaatggaagaccaaaccataacattatccaatgaggatgcccatcatgtacaaagtccacataatgatcccctagtgatagcatctcaaatccccaacaggagggtaaggagagtcctggtcgataacggtagtagcgtgaacttattatacaagacaaccttggagaaaatggaattaagtgtgcatgacctacaaccatgcaccactaatttggtcaggtttattagagatagcatagccagcacatgaagaatcactctcccattgacactcagggaggccccaaaaaagtcacccgaatgactgaatttggtaaattataaattttaaagtgatgtgaacagttaagattgtattataataatggcaatcttataatctagtttattataaccacaaatatataaaaaaattctgttatataaaatttttattttctatatatttttattatattttttttctatagtataaatttatatgcattttaaaaaagtaatttataatatttttaaattatatttttataacttataaaaaaaaattatactttataagaaattctaagttgatgtgaatttttactaataataataaaaatataaatatatttttttttaaaaaaacaatataaaaaattaagaaatttaaatatcaattattttaaatatctttttctttctaaaaatatttttatttttgtaatatacgataaataactgaatacatttttagtataaaataatttattatagagtcttttaattaaaattgctctagcttctccatagattattcaataagctatttctcaactgcttatcaaatatttttttattattgcttttttaaaataactgaatacatttttagtataaaataatttattatagatatagagtcttttaatcaaaactgctctagcttctctataaattattcaataagctattttttaactacttatcaagtatttttttatcatatcttttttaaaaaatagtttttagcttttccaaaaatgacgccaaacgaacaatgaattctcctattcatattttctttttcttaaaaaaaaagttgtcacaccaaatctacaagtagttcctacaaaattaagagtataatttttaagggcttttttcatttttaaccaaaaaagtaataatattacaaaaatacttctagctcgccaaataaacaaatgtacaacccaaataaaaaaaattacacaaatatcacttacacacaccttcaacccannnnnnatgcttcctgggcaactatcgcgcaactacgcagcaacccaacacaactgaaaagaaaattcaaccagaaagagaaccaccattaattatgacgacttcatctgagaagacgacgagaatcaatcaaaacaagggttgtttcaaattcataaaaaaagtgtagaaaanntactacgaaactaaaattcaaccgaaaatccagtttaatttgcataaaaactaataatttttagatcaatgaaaggtagatcttaaaaagttgaaatggagttcccaaacaatccaactnaagtataatccaaaaaaattacatcaatactatagtaaaatatttatcgtggtgtatttttgtt

SEQ ID NO: 39143 - DNA, 2348 bp, Cannabis sativa
gtactaaattattattattatttttattatggttgttgttgttgctttatttttgagggagagaagtatataaatatatatatatatatggacagtctcaacttctttaacacacacttgctttttatataacagtacttattttctttttctttttttttttttctttttagttttgatgataggtgataatagctagtagagatcatgataagtatagtttatactatttatatatgatgatgtcgatggccgtaaatatatataaaggaagaggctagcttgaaacggcctaccaatctccctaagcggttttaaaaatcattccccaatgtgatttaggatattatatatagttcattgtcttccatcgaagaggcgattataatatccaattcttttgctaagaaatcccacgtttggtaatcacccctttccaaggaagacagtgaattaacaatatcattgattacaatgaaagcttcctttgtactctgtcatattgtcaagccaaagaagagagaaagcttagcccttaaagcaagcctgattcaccttcacatccttcagtgactcgaggtcttctagagtgaaatcactctcaagtttcattttaatgaaagctttatcgtcaaaatatatatttatatatcccgcttcctttggaaaacagaaaaattgcagcagtgcatgaaaatttgacaactcaacggcagcatcatcaaaaaattataactatggctgctaaccttccaaagaacgtgaaccccaactctaatatttggattctagtgactaacttgacatgagcaatattactccacaaatttacaaaaaaaaaagctcgtcattttctaaactgtgtgatctcccatatatgtgaaaactctcttcctaaatcctcgagctaagtcaacaatttcagattctctcatcatcctaatcatgtcataaaactgatcacttagatcttttcgtgccaacctgtttgcagtatcaattgacaagcaagccctatctctgtttctcgtcaataattgcaagccacatctctgtctttcatcaataacttcagattctctcatcatcctcaccgtctcatcaaactcaccacttacatcttttcgtgccaacctgtttgcaatatcaattgacaagccagccatatctctgtttttcgtcaataactgcaaggcggggacagaatatacaggattcgacacaagtctattaagaaggataagcgcctcacgcattagtaatgtcctgtacagaaatggtgtgctaaaatataaacatcatgcagaaaaaacatgaatgtaaatattcactgaaatgcatgcttcaaaaattccagtcaatattttatgaaagcaatgttactcaaataataaaaagagatatgcagttattgacgaaaaacagagatatggctgccaatcgtgcataatatttattatttacctctctttgaatatttcataggaatcgggaataatggttgcttctgtgtcaatctcagacaccattacttgcagaattaacataagaaagtttgcatcgttagatagcttatgactgacaagaatatcaaatccagattttccagaggaggccaagatagccagcaaaacaatagcattccttcgaagcttgaactcctaaaatatacaagaatgtcagaaagacaaacaaccccctacatagagctggaaataaaaaaaatagttctacagatgaatggagaacgagctacttaattttagtgcatagtaaagtaataaacttgtgcaacatccagtacttacacagcaatgaaagaagcaatatggtgtgatagcatcatttttaaatatacatcgtgagctgaacatacctacagtgggtttatgttaagttacacacaatgagccctaagcattcaatcttcatcttagacatggtcattgaagagctaatcacgatctcttttatttcaattcatcagttcttaagtatataagggtaacttattaacttttggctttcttattaagtcaaagattataagcttattatatgactttgagagcaattgaaactacagaaataaaaataaacacttattcaatggtaagcattgattgttcaatttggagtgtttaaaagatggcacttggctgaaaaaatgatttaatcgattggagaaactaatataactcaactcaaaaaatatgttagtatttttcatagtggaaaaatagttgcaaggtatttaaagaacaacaatatgttagtatcagcaaccattattaaaatatactttcgcacacacgaaatgggaaaatcaattttcaaaagatttgaaa

SEQ ID NO: 39144 - DNA, 3198 bp, Cannabis sativa
gtaagtactcatcatacatatatatcaatttcaattataattctaagtttgatattgttgaaagtcttgcttaatgttttcattcgatatagaaatttgttaattaattgcatcaattcaattgctcgatgactctgtttctggccaaattaattttcataaaacaaattttgagcctgtggtctttagcaaattctttacattgttttatccttatttttttattttttttttctttctctctctattgccgtttttactcttttgggtttgtttttaatttttcatgtttatctggaaatacatggaacatggtatgtttctattttccgtactttcaagtaacatggaatgcttttttccacgattgcctcaatctaagtggaaagaaattaatattaataataattaaaaaaaaaagtgtagagataagagaaatatgcactcataaaatgacacatgtacctttacgaaaggggaatggcacatgttagtgttacccataagaatttggaaatcccatgtagccccagctgtgtttcacgtggtaccttagccttatacattgaaaacttgtgtacgagtcatcacacaactaatgtactttatttccttatttttatctatacattctctcttagaatattactacttcttcttattatagtctcggtcggtcgataagacgataatagactttccttatcaaaaaccaacaagaaaacaaaatggtcggttctgtcattgctatatacttatctttcttggcattacttattaacattttttattgttctttactagcttaaaaaacaaatgttattctcgaaatatatatatagacaaacataataataaaagagttcattaatatcataattaggagaaaatccttattaataaaccattgagttggtatagttgcattggtggcgtttaatataaattaataaaacactatcttctaatataattagtaataactttaagctttgtgagtctgtaaactcattgttctgccttaagtagacagtaattaatattattcaaaagggtaattaggatattttttccttaaaatgatgttccttaaattttttttttgaccttttaaaatttttccaactattgagatgattaattatttattgtactaaactatttgatttctaaactatgctcacataaatcatgtcttctaaactttcagggacatttttaacgactaaaagttctcaaaattgagagataaaaattttaattaacctattcaaaaaaattacgatattaatgcatgtagctaactagtttattattacttttaataatttggttgttttaactgaaaaatgcagttttcaacacaaacaccaaccacacagtggtccaaacctataacgaaacgacatacaaactctgcgattacgacgatgcttcagacaaagacaccacccagtggtccacggcggatccttcaaacaccgccaccagaccgatcacagtaccggtgccactcttaaaagaaggcaaaacgttcttcttctccggcgactacgacggtgatcagtgcttcgacggtcagagattccaaatctctgtagctcacggcaaaggccttcccaagagtctccaagaacccactgaaaattcccctggtcccgtcagtcctcagtccggagaagacgaaggcgattcggctccggataccaatgttcctgcaaatttcgatcatccgaaacaggtcgcttccgatgatacagaacgggactcggattcgtctgcatcggcgtcgttgttgtctaaattcttggtcgttggtttaggacttgtttggctcttttagtttgaattctgattttaaattatttatttatttttttaagatataatttacatatataatagagaagagaaggtgtgattggagattagatttttcttacgggaataattacgattaattttgtgctgccagtgtgtacaataaattctctagtatctaaaaaaaaagaaccatcactactcacagtatagatattgcgttgtggttgtgctatatgtacttgatacatacccatttttaacacctggaatgatgttatttatgattggagaaagaatgaatgatcatgagaatgtggtgatcgaagaggaggatgacagactggttttagaagatgatgatggtgatttatcggagattgacgatcgatggtgcttggtgggtcgttttcttactagacgcaatatagattgtcaagccatgcaacacaaaatggcttccctgtggcaacttaatcgaggtttgtacgttacagaacttgatccgaatcattttctatttcaattttatcatgagattgatattacaagagttattgatggtagtccgtggacatttgatcgtgtccctttgatttttgagcgagtgaaaccgggtgaaaatcccagacaaatgaaccttaatcggttggatgtctggatacagtgccatgagatgaagacaggttttatgtctgagagtacactgaggcatatggcgaattatattggaactttcgtgaaatcggatcctaataatttcacaggagtttggagagactatcttagagttcgtaccactatcaatgtggaaaagccactgaagaagaaaatgacactagaaaggaaaaatgggcaaacgtgcacagtccaattcaaatatgaggacttacccactttttgttttatttgtggtatattgggacattccgagcggttttatgaacgattatttgatacccctgctgaattgattcatgaaatatttgatctatcgttgaaggcggcgccacggagaagacaacatactatcgattcgccatggctccaataaggtgcaagctacaaggcccccgtgactggcgggctggagcatcaaagagtaataatggtgaagagaagaattaggggctgattgccaatctgcctactattagaaaatctcagtagctcttacgtgggaatttacctcatttattggaagaagatcctaaggctaaggaaaagtcaactcaaggtgggaatgaggtggcatctgaggatagttttaatattaatgctttattggtgttagaaaataaaagaaggagaactgatgtggaagaagggttaggtgagaatgtaatggaccaaagtattgggccgaatacttctata

SEQ ID NO: 39145 - DNA, 1740 bp, Cannabis sativa
  modified_base (27)..(31): a, c, t, g, unknown or other
agaggtatgtttcaaataaatataaannnnnaggtaaatttgattaattgatgaataaaagaggcatttttcaacttaccccgtttttggatcctaacccgatccaaataattgtcattcgaatttaacctaattctaactcattgtctatgttgttgcaagaaatcatcttggtagagtgattagagttcagacggctcgggaggatttttcgaatgctctttgtagagaagccgcagcttgctgcttggctgtgtcagttgccttgaatttcgcctactagtatgttattgtggagaatgactcgagagtggttatcgacgctatcaatgggaagcgatctcgttgggcattagagaactatatctcattttgtactaaatcttctccctcatttagtagttgttgtttttcttatgttagtagaacttgtaactttaccgctcataatgtgactagatgagcctttacccatcagatttatgggtctctcccgatctcttctataccgaaaactattttatgacttaaacccacaataattcgtatagagtgtcgtgttgttgtgtgaattgccacccttacttaaaacacataatcttattattactaattaatatgctgcttgtgcaaaaacatgaggatgacatcttgaaatatttgggcaataaatccctagcgaaatccaaacgacaaaagcggtgccgttttcattccacgagatcacgtcgtccgtgatcggatcatccaccaactgatacatcttcgtcaaaaacggcgccatttttcttccaataataacagtgagtattcgatttgtgatctcctattcgatgatgatggatgttcagatggaacaactaaagagaagaagagcagtgaggaactcccaaccccaacagtagaatccagagagaaagaaattagcagagtcaacgagattggttgataaattaaatgtattttttttttaaatatttaaatattacactcttaaaatttttctttttgataaatttactttttctttcagcttaacaacgtttgtttccaacaacaacaacgtttctctctctctagccctaacactctttctcttgatcgactcactggtatgtgtttaatattatatatatacatatttgatttgaagaagaaaaaaagtatagttcttttttaatttttcctcaatcaatttcagtttgtttgagtattaaaagtagtatatttgttttatcagatgcataatcaaatcaagtattgattaatttataatggaaggagatgaggaacaacattgtagccctaactttattgaaccatacaataaccccaagaagagaaagtctattacttcaacaatggtggtacaggacaaatccccttttagtctttctaaaggagctattttgtctcttactaaaccctcatatgttcttggtttgggttccaagactttgaggaaagacaacaggagtaggttgagttatctttttactaagcttatgagttaccatcaatggagtgaagctactggtgttcttagtgttttgttgaaagggacttgcaaagataggtctatgcccaataatcgcttgaagtacactgtatgaggaatctcactactgtttctttctttttcttttttgtttttctattgattaaaatctaagggcgtgtttggaggagtttcaattatactctccaattcggatttgtaattactaggggactttcaaa

SEQ ID NO: 39146 - DNA, 3668 bp, Cannabis sativa
atggttagacaaagaaaaacaaatgtatacaatgggccaaagaaaaagtaaacaaaagagctactagaaactctaaaaaatgtcttgcaaaactctcatagcaagggaaaattcaaacttcgaacccacatttcagtttgtgcctaaaataaaagtacctctttaaaaatcctaaaactagaaatatccacctatgaacctagcgcataaattccagacatcacaaatcctaatccctaaaaccacgttctacgcatgcaaaagtgatcgaattctcctagtataaaaactacatttcaatcaagtattgaaatcacagtttgaaagaggaggaatacttacttgtactgcgaggaaagagtcgggggtggtggtgatgcattgagattccacgggttgcacgacggtgatggtcctcctagctctgattgcaggacggcctgaggtaacagtaggtgtcaatgggatacagtgacaaggattgggagaaaggaggttgattttagggcaaagatgtatgaaaagattgaggttttctgagcaagaagtctgtgcaagaaaggaaagggttctccctggttcaaaaatggctgaagtgaagaaaatgacttcattcatcaaaagccccatttatatgggtggcaacggcttgaaggatttttaaatgcacgatcctgatcaaatggattgaaatttagatcatccaacggttggggatacggaaggttgatatttaatatatatgaaagaagagaataaagtatttattattcatcatttcacaatagcatccctaatgcacctgaggatagacgtattttcaaaactagccgtcaatcgtcctcccaagaaacacacctaaagtgaagagtgtcagtctcacgactctactaaacaagcattaaactttggttagtcctcagaaatgtctctaggaaggaccatcacggaatgcatccctttagtctcataatgactaaattagaagttaaagatacaaaatgaacctccgggaaagatcgcaagctcccagttattacaagttctgaaagcttgggggtaaatgttatccctcttcccggatgggttctacacagaagtagcaaaggggtgccacatcaaatcgtatggaaatatcctgagttccacttctttttaagatagtatcaagaaaggcatcagagtctctgggagagcgcatccactgtgaaggaggaatcgatccttgaagctatcacctaacgttttcggtatttgaaggcatacacgaagcccaagccttcagggagctcttgggaattggttattccaggaggtcctgggttgcgcttcctataagcccctatgacctaactaggacatacactcaacggttacaccttacctgacaccaagtcagatcttgtcccctttgttagaccatagctgtgcgtgtacgtgcctttgtagtgcttattgtccaacaacttgtctaggatatttcttttaaaggagaaacctttgaacaacatgtgtccatatcctcatgtgataacttgcgtcaattaagcaccgcacgatggaagagctacttaccaaatcaatggttagatggtcttgtagtattgcacaaccccatttgcatgctgagtaaggaaccctagtagggtaagagggtaagccctcatccacctatgggcctataaatacctcaattttttatgtgcaaaagtagagtatactctgctaaaattactattgtaaacacttgtaatactcaatcatttgccaaagaaggctaatactactgactcatggactaaggatcattaacggctgaaccacataaaaaatatgtttatctattattaaatattttgtatttccttaagctcttattaatcagtttccgaaaatctcggtaaacaaacataaattagaatattttcagaatatattttattttttgaaaaacattttttaaaatgttagaattttgaaatttaaagtttaaaaattaaattaaagttgaaaattaattcttaattaattttagatcaacttaaattcagtaattttcattattaattaattaaaatatatcataattagaaaaccaacacttagtttatgaaaaaaaattatagataattaatttctaagtaagctattttgtattttttttcttatatatttaattaaatagaaaattaatatttcagttgatttaatttaagatacttaaatattggctaatattttggtgacatttaattaaatggaaaattatatttatgatgaaaaattaatttattaattgattttagatcaacataaattagaataattttttcaagatttattttattttattttaatactaatttgaaaatgtgttttatttgaaatacattgaattttgaattatgattattgtatttatagaaatttaagttgaaaattaattcttaattaattttagactaccttgaattatgcaattttcataatactaagaaaataaatttttaatttattttcaaatcaacctgagtaaatattttaataatactacatacttcacttgatctggacataaagatgatgagattaattgcaatacacttttagttttatattaatgcaagtgggagtttgttgagattttatgccataaataaaaatatttcaatataatcaaatatactaattaataaaagatcagaaattattttatgttgcatggttcacttgattaatttcatgattatatgtttaatatataaattccattaaatcttgaacgtatagttattcataattatagtgttgtctacacagtgaaaaataatcatgattatatgcttcaaactacttagtcctacgatttatcagtgcactgaatttacactgacgtgataatcaacaatgttatttacttacacttttataagtggaatgttctttctagatgccttaggaatctcctcagtaaggggtacttcagcagacgataccttaggaatctcctcaggattcactagggccaaatgaatgtcactcccttcactagacactgaaaaaagcaaaaagaaaatccaagcagtcagtaccctacatccaaaagacaaatagggtacctagggaagcctcccccaaaactgcttggagaggttcccgccgtattcatcaccattaccatcactaccatacagtagcctgcacggtgatgaatcgggaacccaaacatataataatagtggaaaagatatcataaacttactatatgtcttttctaagtaaatgacacttagttgatctatggtcaattgatctcaatcttgggatggttatgttctagcataattgtattatatgggttctcttacttgtttgttacagctgaccaataggatcagactaatacttaatgttggaagttattgttatcccacattttttcctcctgacgtggcatgctaacatggaaaaaatcagtgctacgtggtagtacaactaaccaataagaaggccaagtcagcacttgagcaaacagagaccccgacacccaaacaggcatcaagtgacagatcatctccctcttaggagctggccgaccctatggtcggtcaaccttggtactgcaccatggttggccagcctgacctccacaggggcctagccggcca

SEQ ID NO: 39147 - DNA, 4328 bp, Cannabis sativa
ccaaccaatagccagccaaaagaacccaagctgatactgaagaaggcgcaaaaacaagcctttttcagcaagcaaaactttcatattcctcatgctatacaacctgtaatgaactatgtctttaattttcttagtataacaactatcattataaacacaatcatttctattcttccaaaccatataaacagtgacagcaactacaagaatgattatacttttacttgataaccaacacaaccagccattgaagtccaaaggccacgccaaacacccacaccagcagaatataattaaagttttaaatatacatatattttagtaattgactcattagaattgtaaaaataaatgtgagaagtagagtataaatttgagcctaaatatgaaaatggtctggcccatttaagaaaaacggcctaacacaaataaaaatttgagtacggcacaaaaacaccaggcatacgggccgtgccaacgtaccctttaaaatattagtacgacacgatctataattttttatgacacgtgcaattcatattttaaaaagcacaatataatttaggttggaccgacacaacacagacggatttacaaaatcatcaactggtatatgtataattaaataaaataaaaaatataaggagatgacaagttaatcacgacatatatacatattttttaaaaaaaaaatgcttacttcttggatgagaagtgcaggagatgagttgaaattgggcatgtaagcagtcaagaaaactgcaagtgaaatcttatgtgggaatttttgcatagccaaagatatgcaaagaccagcatagctatgccccacaagaatcactctttggtcctcagggagtttagccatgaactccatcagtggttcaacataatcatcaacattgggtacctcttcgagcaccttaggatcgatccccgaggctccaaggtccaacgccgtcacgtggacagagcggttttcaatctctgcatccactttgagctggttcatgagcttgtaccagcaccatgcaccatggcaagccccatgaaccagaacaaagtggtttcctctcatttctatgatgattaaaatttaattgatgaaggtatataggctattaataataatattgtagtaggatttataaggtaggctatttgaaaatattaatttatttttagcaataaagaacaaataaagtgtgtggtgcaatagtgaatatgcatgaatgggttatatgttatgtcgacacagtattttcttcacgtggcaattgtcatgctttgctgtaacccttaattaattgagttagataggagcaacgaaatggggtcaaagcacaatgtcaataacaagattcaaaactcataaaagatacaatatgatttaaagatacatcaaagagttaggcaaaaagttttatgatgtgaataaatatttatcactaaaagtagctgcttttttgtaataaaaattccacttaaaaatataaatgattaatatttattatatatcattgtatgagataagtttgtatgtaataagtatgtatctctcatcactcttttcttttaaacaaatttaaatatttttgagttgacacatttaaattagataaaagttcttaaatctaattatctcaatagttcatggagaatttttaacagcaaaaaaagatcaagagacatgatttggtacatgttaaagtttaggggtcaaaaatcataattagcctttaatttaaaatttatatttatcacatattaactgtactaattgttcccaataataagctatacctaattataaattaacatcaactaaattaaataaaaattaagatttcttattcctaaagttataggaggttgacttttttctccacttaagttcaccggctttccttaagtataggtgcgacttggccgaagttatgttttgctattgtgattcgatattagtggttaggaataacaagttctctgcaactgaagtgattattagtagtgcagttacggatcttgcacaataattgaatgtagaggtacgtattcatctaatccaatccgcactattttgctcatagtgcatctgatccgcactaagtacgaattttatattttggatctaatctaatctaatctgtacaataactcaaatctaatccaatttaattcgcaaaaatgcgaattgaattggttacttttcaatattaaattatttaatatttatcaaaaatattttttttcacataactaacaacaaaataaaaataattattattgttttatgtttccatcaacaaattaaataaataaaactaaaaagaaaaggaaaaataattgtatgtacaaaaaatatttaattttgtttaaattatatgtaaatatatatatttatatgtaagaatgaaatatacatttgatctattatattttgtaatatatttatattatatttgttagatttttaaattacttttttttaaaaaaattaaaatattaactatatataattttttaaaattttatataaatatgtgtgaattgaattggataagttatttttacatgtcaatcaacatctaattcgtaaaaatacggattttaaattttccaatccaatccaatatgtacaattgtgatatccacactttgcgaaatgaattggattggattgtgcggattagattgactattttatgaacacccctagttgaatgcttaagctacgatgttgaatgaacctgttacaacagtttctattgttaagtcttctgagtggtagatactgttgtatcttttaagcggtagatgaaactaaatattggtgttttaagattaactgtgatgctgcaatcttttacatctaattttgttttttttttttgtcaactgatctgggaaataggcgaccgattatttgactagtttttctaattctaattcttgttgtgtctccaatgaatgagacgtctcaaatgaatgagatgtctcaattggattgcagtctattattttaactgattgctattaataaaattgtattatttattttttaaaaaaattattaattacattctttttgaaattgaaaatattgtctgctagagttttttattcttaaatcttagctttcaagggttgtcctttttctctgaccaagcccattgaccctccctaggtttaggcgtggcctagttggggtgtgtggttttgttactgcgattgggttttgctattacaattagtcttatttatgtgacatgattttaagtgcttttttatttaggttaatgtgagtagtcttgtctctgatatggttttattttgttgttggttcatcttccttatttttcgattgctctccgtcaaatcgttgttagagtggttgagattaataagttctctatggttcatcttctttgaagggattgttagtggtgtaatcacgtaccttgaatgctagttgagtgctcgagctaaggggttgaataaacctggtgcaaatatttttacttttttgtgtcttttgagcggtgaaagaaactgaatataggtgctcttaaggttaacagtgatgctacaatctttttcatatgatattattttagtttcttttatcaaacgatctgggaatcaatcgactgattaattggctcatttttcttattctaatctatgttgtgtttcaaatagggagatgtctctagggttgttcacaaagtatctgatccaatccaatccaatccgcaaaatgtgaatattcgctcttgcgcggattggattggattaaaaaatttgaaattcgtactcgtgcacattgaatgttgtttgactttaaaaagtaattgattcaatctaatccgcactttatatatatatattttaaaaatgcatgataatatataatattatattagctttctagtaatattaaaaataaaacatacacaaacttctaatttctaaacctactaaaattatttagtagtaatatattgagttggtgtattttatctgtttaatttatgatggaagatacatagaaaataattcctattcgcatagacacataccataaaacttatttattctagtaatgaatacatatatattacggtgtaaagttaaatatatattataatgattgttttattttttgtaatatgtgatgagtataaaatatatgcatattggtttgttttgtatgtaaatgaagatgaaaagagatgactctgtaaatggagatggaaagaaatgattgttggagattgaaaaatactagttttttttttttttttttttaatgttttttaaatttt

SEQ ID NO: 39148 - DNA, 1384 bp, Cannabis sativa
aaaaaaaaaaaaaatacatacaagaagttcattttattcatcaaaaatcaacaaatgatctccacaacaaggtgtaaaaagtctacagttactaccaaaaattcatgttcgagaatattttacaaaggtaatgtccttcaaatacttacttctaataaggctcctcttgcgaaattcgagcccattggtaagataccaatgttgagcattgaggtcttttagcctttggatagcttgaatgaacacattcctggatacatcaactgcatacaaaaatttgttgctattctttgaagcttcaagatagctcaaaggtgcctattatcgagccaagaacgatgaatccagaccactagcagaaaagaaacatgtaaagtttagaagtacagaacaatctaaactgataagttaaaagcaagcgtggaaatgaataaataagttcatgcataacgttcccaccatctttatgtataagaagattggcaaaatggatgaaaaggcaaagaagtagcgaatattaaagcaagtcatcaaagcagtaattcaagagctaggaaagcaaagaatatggataaaaagaagcaaaacatacaaaatgagtaaaaagaaacctatataggaggagagaagagatgacaagcgcaactaagtaaacttaagagtttgaagctcttccatgggaggaacattgtgaagatcgagctctgaacagtcacgtgccacatcttagaagaagagttggtcgctttaaggtcgataacctaattaggaggatcatccacaatataagaattgacttaaggtgatacagtcgatgagattgggagttcagacacacaatattttctgcctttcaaaactgatgagatcatgagctcgtcatcatcaaagtcagagcaagagttgatgagctcttcactgtgattggatttttcatttaaatcctcatctccaaaataggctcatgtcaagtatacattttttgccaaggcatctccacgattattccttaattatcttgaaaggtaatcgctctctcctccaaaaaaaatagtctaaagatgctttggccatagcaccaatagtgttgatctcagtggaatgaactataattttttctgagcttatttctattatcaagcctcaactgagtataattgactttagattctgacagtttctgtgattataatgtgtatcttagtaagacaataatagtgagctaatgaataaggaaatgttggaagaagaactcagattttgagcttcaagtcaccttcactattgtgcaaacgtcgagtttgccctaaaggttgacttttttggctgacagtattagtggaaacagagaaaattgtttctattgatgaaaaatgaatactgt

SEQ ID NO: 39149 - DNA, 2541 bp, Cannabis sativa
  modified_base (74)..(74): a, c, t, g, unknown or other
  modified_base (2252)..(2267): a, c, t, g, unknown or other
  modified_base (2502)..(2502): a, c, t, g, unknown or other
gtcaacacagtgggatgtaattgtaattatatttttcaaaagtttatgttccatgattcatcagtgcactgganttacactgatgtgatagtcagtgataaagtttacttacacctcgaataagtgttatatcatttttaggacattggcaaagtatgctagtatctgaagtatggagtatacattagactaggaccgatattgatcttggtaaagatattataatcttactgttgtatctttctaagtcaatattactggttgatcttagatcaaaagatcaaaagatcttagatattaccgttagtccttcacgcatcctatgcccgcgagcttatgcatgtaaataaacagataactcgcaccattaaggtcgcgtacgttgttgtatttagtaaattgagtcgaaactgtttttcatttattccgtttatgtttttcttgatttaatgttgatattcaatgtaaaacgattcgatattaaattaagtttttgtgtaatcaaaggacgcttgctttgtatataaaggagtgatccaacatgaaataaaacaggacagaaatccttgcaacagttgactaaccagaccgtgatctgattgaaccactataatttccttgtgctcattgtatttttcagtacgtctgagtgtctattatttgaatactcaccattttaagtggagtaatgtatattttaattaatatctatgttttaattttttattcgatgttgtcaaaattcctccaacaacatagggagagactctcttttgtcatgtaataatatttctagtttaatctacataaaatggactttatccatggttaaaaaaaaagggaaaacctaaattacaattatgcataaacaaaaaataaaactaaacatacggacaaaaggaacttttcccaactatcgtactaacaaataatttttaattatttataactaatctgcggtaccactaaaccgctaaaattatatcactgtgcatttttgcttatttaccaaatttccattgttgacgataatttaaggataattatattttaacatacaaatatggcacaagcattaattaattccataattaatttaccaatcacatatttgcatatttctttataaatagatcttaaatagttcatggacataaatcacataataaaataatttatattttattatacttcatatgataaattattaaaattctcttttctaatcatgcggtcattattgaaagacatggccaagaaaagtgattcattttgtaccattaactttcacctggatgacttttgagctttgacaaataagtattttaagttgtttattgtattttaatttggattattttactatctttctttgatattatatatttgtatcattaaatttttttgcgatagattttatttattattatttgtaggtcggttttgttaagaggctatgatgacatagattttatggataaatttaatttcaatataatatgttgaagtgtcgttttcttataataagttttgagaatttttttttaacgattttattaatatcattataaggggactaattcatctatcattatcttattttattttgtagatgttttatggattgttcgtgatatattattacgttgggcgtgcaagatgttgttcttatatttgtattgtcttaattttttgggatagtatttttaaataatagttcataaccttttgtataaagtttttgatttcactgagcatattttttggttagagtatcagttatctttgctgaaggaggtctacgttttgtgaatttattagtgattataatttttgtgtcaaaaaaataataattaattaatttgtaaaaagaatgaaagagaaagtaataaaataattttgaagaagctttattctatctctacatgtagccatggatttaaaggatcattaaaataaagaagcatttaaagaagttgatagagtgtcattttaagcactttagcaattttaaagtaagaataattagtaatttttccttttgaactttcgataatattaattttttcccctaaaatatacggcatgttaagaatcccttggactattacatttacagaaatttagtcattctattaggttatgtcccattattcattttaaatgatgacgtttctttgtcaattatcaactttgccccctaaattttgacaactatcaaatcatgccctctcaaaataaaaatgagaaannnnnnnnnnnnnnnnagtaaaccttaaaaaattaatttagatcttaagaaaaattattttgaattattaagaaaataaaaaattatttatttttattagaaaatttatttagatattaaaaaaatatatcaaaaatataatttgtaaaaactaaattttacaagaacaaacttgaatatattttatttttataacatttttttttggttaatttattattttttatcaaaataattttatatttttattnaatttttaattatttttctttatttgttaagatatgagt

SEQ ID NO: 39150 - DNA, 5574 bp, Cannabis sativa
  modified_base (2808)..(2808): a, c, t, g, unknown or other
  modified_base (3971)..(3981): a, c, t, g, unknown or other
  modified_base (4225)..(4226): a, c, t, g, unknown or other
aaactacatatattaatataacaccaataatatctaatacaaccacaaaataaggaacgattattttttaatattattaaattcaaatttataagaaactataattaattatactaatcatgtcatgttacttggtaataattttggcataactattatgaaaatgtagcttcttctatgtaaattttgtcaaaagtgaaacacttcgatgtgtcctagttatctcttctctctaaaatcatcattcttgtgtctcccaatattatcatcactcttaagcatattgtaatttatatacattagtataattttgtccaaaatttgtcactacattaatcaattatttaaaaaaactaaaataaagtaatgaatatatataaatataatcttactagggaatctccaagttactcaagataactgccacttgaccaattgaaggcctgttcttcctggaattaccaacacaagccaaagcaactttacctaaccgaacaaaaggcttaacatcagaaggaaacacaagcctgggatctaacaactcgttaaacctcatttctttgatcaaaggcaaacaccatttaaccaataaaccttgttcacattgtctcccagtcaaaagctctaacaaaacgacgccgaatccaaacacatcactctctttgcaagctcctcctcctgcaggtctcgcccaatactcatcgtccacgtgtcctactatgcctcttctctctctggggcccaaaaagccaagtccataatcacaaattctggcacagaaattcacatcgataagaatgttcgaagctttaacacagccatgaactatgttcggcgccaccccttcgtgcaagtactcgagccccttagccgcaccggcggctatcctgagacgccggctccagtccaacagcgaaacaccatctgggttttggtgcagatagaaatccaagcttgcggagccaacaaactcagaaaccacaattctctccccaggtgcttcggaaaaacctaaaatgggtactatattaggatgttgggccagagatagagatttaagaactgtggagaatccaaatccggcattactcaaaacaagcctgggatgaattcgtttcgcggctacaaactctccttgatggtccaaaacggcggcgtacacggttcccaagcgaccctccccgatgattcttctgcggctgaagccatcggtggctgagtcaatcttcgtcaacggtaatgaggtggctgttaccttggtgggttgtggttcttgggattggatgggtttttttttacagatgaagatgagcaggaggatgatgatgagaacgagcatagaggttgaaagaaatgctatgagaaaatcatagccaattcgctggctgtgattcatcttatatatgtataactatgatgtttcttcgtctctgtatgtgtatgaacatttaaaacaaatctttttttttttctttttatgtagaaattatggctattcagtttcagtatatgaaagtgcgttgttcaaaactagacatatataagggtgtaagggtgtcgagagagagtaaaaaaaaaattaatttgattagattgagacaaataaaaagaatcttaaatataaatatatttttgatagtcaagaaaatgagatattttttttatttatttagaaagtaaaattatgcgcataaattttaattttttaattattattagttattggattacaatttaatcttttataaaatgaactagattatatagccgcctttcagtattaaatattagttatattattttaaaaaattcatatttattaatttttttatatttattgaattgatattaatgtataaaatacttttaattaaaatgaaaaaaataaaaatataaatataaattttaaattttaaaatagaaaatttattaaaaatatttaaaattaggtataaaattatttatactataaataatataaaataaaataaactaataatttaaatttaatttatattaagtgtatataaattttttaaatattttagtagatatttatcatgaaattcaaattatatatcataaacaatttttattaatatctcttaaatttaattaactccaatattttctttattttctatgtgtaaataataaaaaataaaaaaaattaattaattaattaattaatgtgattaaaattgttacaatataagacaaaaattatattttagctatgtaaattgaaaaataaaaataagtttaaagtactgtatcttactagtacttgtcactatattcaaagttattttcattaccgtatctcacttgtagtcgtcactacttttaacgttattatcatcagtatcgcatctcactcatagtctccacactatcaaactcattgtaattaccgtatctcacttgtagttgtcactatgttgaaaactgttatcatcaccatatttcacttgtagtcatcactacatttaaagtcaaaattttcagtaccacatcccacttatagttgcaactacatttaatatcaatgtcattagcaaaaaaaattattaaaattaatagaaaaaaaattaataaaaattgtttgaatcaatcttttgattatatatatattaaaataaagggggctattatagtagggattgggtattttacctatgaatagaaatagtaatttatagccattgatttaatccaatggctcaaattaattcttgaaaactacaccactaataatatatatttttattatttataattaatcttgaatattattaattgtaggtncaactaacaaactccaaacttatttttttatctttttattttatttctatttaaaatttaattttaattatatatttttttatttcaaatttacacaaaaaaaaaaaaattaatcaaatttatttttaaaacaataattatacttataaaaaactataacatattcaacttataataattttataataatcactcttaaaataattaaaatatcatgagttcaattctttagaagtaatatttcttttttttttctttacttatatttaatttaagatttcaattaatttaatagtttaaaaattctatcatattatattaataattttatttttcaagattataatgttcaatgtatttaaaaattttagtgttgactgagattttcgacaaccaattaaatgatagaatgagaagagctgtagaaagttaattgcaagagatttttacgtgattggggcattaatgagccttagtccacgagtctttgttatttatgagagtgtttattacagagaatgttcttggtgaatctctttgttctttactctcttcgactccttaattaaatcgatcgacccctttttcattctgtttgtggaatatttatagtatttttctagggagatcggtaggaaaagggatcacttgcctttctgtgttagcttcttaggggcacatattcctagcagataaaaataagaaatatatgacctataccgtaggtagttaggggttaggtggatataatcttttatcctctcttgactgatttgattcctcataatgtagccgtcactagactcatcgattgttgtgtaatcgccgtaaaaagggcttacgccatctgtcatatcttttatggaggttccaatacgttttccccatgcgccattaaatgcgaagtgactgttcgaacaatctcttttcttcccgcaaatgccttgttgcaattctagcctcccggagagtaaaggcgtgttttgtgctctcctccgagaggctcactccctgagatgcacatccttgcccaagacttaattgatcatcataagtggaaattctcctaggtccacgtgtcaccctcacacgcggccacatattttggaaaaaatctaaggcaacatttagatataaaattaattatttacatcaattacatnnnnnnnnnnntcatgcatgaactagtaaataataaacattcttagtatacttattctataacttagttcaaggtagatgttcaatgtatataaaatttgtaaatattgaattaattatttactttaattacactatctataaaaagtatgcatgaacttattagtaatacacattattttcaacataattatattttcttctcaataatcaaaaaaatatatttttttggatcacaccatcaacaacattagcnnggtatgtgttttttattcatatatgtatataatattattgtattattattatattttttttattttgtgtacaacttatttttcttttttttaagatgttcgttgcaccaaataaaacatttgatcttaatgaagcaatacagcgtattgtgaacaatatattgtctaccaaaaaagagataagttcacttgctactattgttggaacattacaacttagttcaatggttatagaaaaacgtgtggaagaaatgtgtgttgctaatgagaaaaaagaaaagaagaaaaggcaaaagaaaagaaaaaagaaaaagttcttgatgaaaatgaatttcaggaacaacaattagaattaaaattcaaaaatatttttgagtctttaggagaagattttaagaaaaaggacagagtgttccaaaaacaagagggattctcaaactctgctagtgagaaatttattgtaaacaccccatttaaaggagacaaaaagaaaagagatgatggagttgcaagtactgatacttattatgagcatcaggtatgttgttattttttattatagtttatttattttttttaatctattgattagatttatttaccacttttttttcctaatatatttgttataatttaatattttattattcgttgtaggataattctggagaaaatgaagatgaatgaagtcattgctcatatttctaaaagtttgttgattattttttgagaatgttttgagttgttttttatgtgttggaatataaagggaaattggaagggccttctaggaacacacggttttatctctccagtctcgtggtaccggacatgtcttccgagtacaaattacttaaggcggaaggttttacgattgcagaaccaagatatgttcatggaaggacatatccaggtgggattggcccacttctcctttgctgagggtcccactgatatgtctaaggtgctgatctggagtccgagtgtccaataccaaaaacgcgcataacagttacaattttgtttgcacgtcatcaggccaaaatttgggataacaattatattgtgcaattgttatattttattgtatacaaaattataaaattttaaaaaacaaagtgtacaatagtacccatactactaagtttaattaacatactatcataaaaatttaaaatagtttacttctctgtacaatcttaatgtatgaacgaggtaaaattttatgatgacctgccttgctacatgttacaatttttggttgcatgtcatgcaacccaaaatttgggataacaattatattgtgcaattgttgatcttaaaatataagggtagcaatttgatcatt

SEQ ID NO: 39151 - DNA, 1730 bp, Cannabis sativa
ccacttttatgtaatttattttcataaataccatattgtagcaactattgagaaaataatggataagttacctggactcttggaaccaaatataatatcagcaatggcagcaccaccagcttggccagggtatccagcccaaagaatcgcactaatacgaggctcattcttggcaaatgaaatatcgattggaccaccggacatcaagaccaaaatagttgggcctctagaggccttagctactcttaatatgagctcttgttggtggcctggtaagagaagcccagttcgatccaaggactcggcctcaattgattggtcaaggcccattaccaagacggtggcatcagcatgtcgagctgcaacttctgcataaccaaagtgttggttgtcgccacaagcaacgcttgtgcacccattttggtgaacagtcttggcataccttcctattccttgtagcggtgtcacataaccacaaggaacacctaaaaacaataagagataaaagttttaaaaaatcgaattgctaaagtggtaaaattaaaaatagtgtttaatgtggtaaatttgaaaacgtaaaacagtaccagcatagtttcctatcatggtttgagtaacatcagaattgggcccaatgacagctacagttttgtgaagtcgagttgagagtggcaagcttttgccaaggttttgaagaagaacaatgccttggtgggctgcttcaagagccaattgttgatgggctggactgcaaacatcttttgggcccaagtttccaaatggttgggctgatggctcaccatcaaacatgcccaatctcatttggactgtgactgtgttaataagagcattgttaacatcattttcactcaataagcctttacttatagctccctgggtgtgaactgctaggaacggcccacaatccaaatccaaacctatatgtcaatacaataataatgtatcactatacatgtaaatctcatctcataatataatataatacttgtataaaataatggtatttttctaaaaacctgatttgatagtgacagctgctgcttcttctggtgtcttagtataatgttgagaatcatatagaacaccaacagaatcacaatctgagacaatatatctgttttttgccaatcaaaaaataattattattcatttcataaaaagtttttaataataaaattgaaaataaccaacttacccattgagatgccattgacctctgattgtgccctttagtagattagggtcagcacaagtgggtactccattgacttgattgtaagagcacattacactagcaacatctccttccactacacaagctttgaatggtacatcataggtatcttccaagtcttgcttgctcacctttatattaagaaaaaaaatatatgatttttgtagtataaatttgtaaaaatatggtttattcttagaaataagaaaattttagaaaaatgtaaaaaaaaaatattaaaaaaaataacataagatacctagttattctcttatagtagctggttaaccttctagttactataagggtacctagttactaaaaacccataaacttgtagtttactaaaaaaaaaaactataaatattataactgtatatagaattgaatttttcccatgcattatgttctccctacaatggagtccctaattatcaaagatgctattttattacatacaaaatagtctttaatt

SEQ ID NO: 39152 - DNA, 1940 bp, Cannabis sativa
aatttttttatataaaaaattatatcttatataattatccctatataatatatattctttaagcatatataaccatcattatattaagtttttattaattttcttttttgaaacatatcatgattagtttgaattgatgactgcttggttagggatgaaaattttatccgtaggttgttacgggttctattaatgggtggtgattccccgcctaaataaagagcaggacgggaacaacaataaagacaatttttaatcctcgagtgctaaaccgtggcggggatggggatagcaaccccaaccgatgagcctggtttaatagtttttttaattatttatatataaatatatattgtaatattatttagttattatacatatatgcttatgtgtttttataattttctagtaacttcttaaatatatttattttatgttagaaaatattatatgttttgtatatatattattttttttattttatataatttatttttatttgtttttaaataaattaataggttctctatggggattaccgacttcaacggaaatttctcgcctcgtccataaaagcatctatggtagctttttttaaaagtgttatataactccatatcatctgaaaatataatattttttttttctacattattttcgatacctttatttctaaaaatactttaatggtataacaccttttaagaatgctataattatgatctcacatgttataatatatatatataaatcttttttttttattaaactattatgtatattgcacttttaattttttatttaaaaaaaaaacataggatcaatgtcatggtgtggcatcaatgtaaatttctaaaatagcactcttttatctctaatggtatatcattattttattcttccacctaagtttttacctcataagtattcttcacaatactatattattggcgatgcttttaaatgatatatgtacgaagatggaggcaggcgtgcgtaaattgttaattaataggcaggtacggaggtactctatggccttgggtggccatggccctctttcaactttttatgaaattatagtattaataatatattaggtaaagctaattaagaaaactataaattattaattttcttactttaattataaggttactattataagatatagattatattatatggcactttgttgtaattttctaaattaaaaatgggtcattaagtaacatattttttttagtggtaaatattattttagatttggtgttttaaaaaaattattgattgtactctttattttgttaaatgataaattggattctgtattctctaaaatggtacaaaatagtaccctgaactgattttttatctatataaaagtaaatataatagcctgatttacagtgattatgacaaaatttgataccttttctgcatctatttgtgttaaatttttttcaagttggttatatatataattattaaaaattaggctcagtgtactattttgtaccattttgaaaaagacaaagtctaatttatcattttacaaaacagatagtccagtcggtaatttttgcaaaacacagaatctaaaatggtattaactcttttttaatagaaattataaatcttattttatagtttccatacaaaacaatttataattcttacacgtatgattcttttcttttttaaataattgaagaagatattgactaattaataatatatattttaaaaaaaattattgtaattatatgtgtagttactaaattcttttattttaaaggttaattattaaataatattaattttatatgtaaatgctaattattttactaaataaaattgtaagaatttatatataattactatatactcttatatttacaaaatgtacaatgtatttttaaacataataatgtaattat

SEQ ID NO: 39153 - DNA, 4625 bp, Cannabis sativa
aatgatattaaatattctaattgtacaataaatttatgatgtactaaaatatatgtacaattcacattctattcaataatcaaatataattttaaatgacattttaaatttgaagcctagtggactaaagatgagagaagcaaattagtggtaaatcatgcttggtctactgctgttcatcactgggctccagtaaatttgttcaaaaaggtcggcgctacgcgagtaggcctccttcgatggaatagaagttaatttggtgctattgactccacttttcgggaccttgagaaagagcttatgtcgttacaagaccaacccaagggtcaacacaattggaaagaggagtcccggttcagaaagtcacttaatgaggcattgattagacaagcagattattggaaccaacgatctcgtatctcttggctaaaggatggtgataaatactctaatttcttcttcatttcaaccattattaggaatcgaagaaatgcgatttactgtattatgtacagaaataaggattggatcactactcggaaaagcattgggaaagaattttgtggaatacttgggtaatattttcttggctccccgtgcaatcccgttggctagcatggaccacttgattcatgactctatctctagtagggagcaggatgtgttactaagattacctgatgaaatagagattaaacaattttttttactatgggtagtcttaaagctcctggtcctaatggtatgcctgtcttattcttcaaacattattgggagacagtgggaacggatttctatgaggtagatttggatttttattttgttgcgagaagttacacaaaggtttcaatgccactaatgtggtcctcatccccaaaggagagaatcctcaaaaagtctctcaatatcggccgatatcgctttgcaatgtaaactataaagtgatttcaaaaatcattgaatagaatcaagccaattctgccaagacttatttacccaacctaggttgcatttgtgctagggaggaatatttaagacaataatgttatcatataggaagtcatttactcctttaagggcaagaaaggaaaagaagggttttttgtgatcaaaattgatttgggaaaggcttacgataagctaagttggtagttcattgaccatgtcttaaagatcttcaaggtccttgacaactcttgcaattgggtgtattagtgtatttcttctactaatcttaatatttgcattaatggtggtgatgtgggtacaattaccccatcttgtggaattaggcaaggggaccctctttctccttatttatttatctgggcatctgagatcctttaaaggttattggaagacgctatgaataaaggtgtgatcaaaggcattaagctaagcagaaaaggcccaatattttcacatatattttttgctgatgacctgatcctcctaggttgtgctaatataaaggaagccaaggggttctgggactgtttagacaacttctgttcgtggtccggccaaaaatttaataagctcaagacctccatattcttctgtaataatacaagtgacatcatgcgttgaggcattaaggaggctttggacttgaagtgcccatctaaaaatataaagtacttgggtctccctctatgtagaggaagacagaaggatgccgatttcaatttcatatttaagaaccttgtttcaaaactccagaggtggatggcaaagtctctcttaaaagtaggtcgtgctaccctaatgaaatcagtggggctttctcttccagtatactcaatgcaaaccactaaattctccaagagattggctactaaaattgatggtttagtagaaaatttttggtggggtagtgatgaaggtaacaagggccttttccttagggcttgggatagtttatctcttcctaaagctcatgggggttttggatttcgtaagtctttgaagatgaaccaggccttcctggccaaatggggatggtatttgttgaatgatcataaatcgttatgttgtgaaatggttagagccaaatacatgaggggtggagactttctcaatagctcctgcaagggatctgattcctagttttagaagaatgtagtcaaaacaaaacatatcctcaagaaaggagcctacaaagtaattaaggatggaaagaatactcgtatttgggaggatccctggataagccatggtcaagagtttatccctaagccaaagaggatgcctacacagaagaatatacttgggttgcggatctcctaactgataatggtaattaggatatgcagaaggtagactatctttttgaagcaaatacaatatccactattcttaaaagtggaagccggaaaagaccagtgggtttggactaaggaagcaaacgaagaattttctactaagtctgcctacttaattcaagcattggacagaactcctcagtgtgatgttgccccttctctgtggaataagttgtgaaataggaaaatttttgaacgccataaagtcttgtggtggagcattctgccttatgtgcttcccatttgcaaaattattgggcaacgaatgacaattgaagatacgacttgcccttttggcaaggaagcaaatgaaaccatggatcatctctttctgcattgtaatttgtcttaccacttttggcgattatcaccgtggggactcattccgatcaatgaatctggagcaagaatctaggactgagtgaaatttttgtggaaccttaacaggaagggagctaatgttaatgagattttcttgtatgcgtctattgttgctgacacgatttgcatagctcgcaatgataaggtacataacaacaatttaaatagcatacaacattatattgactctattaagcattgttatgtaaattatgccttatctatcctccctatgcctgtttttactactgagattggatggtcccccctcagaaggactggattaagatcaattgtgatgtgagaaatgagacggagaccatgtgtatgactgttgtggctcgtcgccatatggcctcgtttgtgtggatagctgtcaacaatgttcctttttcaaacccccttattagtgaagttgctgcttgtttattggctctagagacttcagtagctttgggctacaattttgtgtttactgagagtgattcggaaatcaccaacaacgctcttagaggaagttcaccaagataggatattgatagctatttctttttctaaactgttggtgggttgtaattttgttaagatccctcggtgttgtaattttgtagcccataacgtggttaattgggcgtatgccaaccaacattccagtttgatcgaggtgtcggcaattccaaaaaaatattctatgtaatgaccatatggtctaattttcgtaatctatgaaacactaattctttttttaaaaaaaaaaaataaattataatttgtcttatttgaaggattgcacacctcaatagcaaaagaaggactacataaagacccaataattatttatataaatttatcacttgcattgcgtggctgataattttctcaatctagctatgattgtagtttttcgtatccatatctttatatctagctagcattgtagcttttgtatccatacaagtactagtgtaccaccacatgtttcccctcttatctgtcacatattatcccttaaaaatattttctaaaagcctcagaaaatgtcaaagtatttatgtcaatattggtcatatttattttgatttttatatatagaagaatttacactaaaatggaaaccaatattgtatgcatatttagttacaaatgttatcttctaagggtatgctctagggacgacctagaataataatttaaggtgagcgagcattgttgtaagttatgatcacgacgaacgaccattaatgaaaaacgaaattgtaagtagataagtaaaaagaaatacacagtaaatgcttaccatcgtaactaaaaaattaattttttttttttttacaatattaaatgtacttggccatgctgttagaaaacaaatttataaaaataaagttacaaaaaccatttttttttaaaaaatattgtttctattttaaaaataattaattttatcaatattttttcactaatttatctcacataaattttcacttattattttctctctcctatggttgggggttccggctctgcgcttcgaactggggttcaaggttggcttcagttttggggttcaagtccaacccctaggtctaagatggggttcggatcggggctgagatccaaattcaagtcaaggtctgaatctgggtctgggtttgggtccaagttcgaatcggaattcgactgtcgaagtcaccaatttaagtcacagtcaagttcatattggagtttcaatgtatgagagagtattttctaaaaacaaaaaatgttcttaaaaaatgccaaccaaacacgttttgtgttttaaatttctcttaatttaattactgaattaaaaatatatatataaaaaaaagaaatttttacactaaaaatctaaaatgataaatttattacattaatacctatacacggctaaaccaa

SEQ ID NO: 39154 - DNA, 2556 bp, Cannabis sativa
ggtccaaaatggtatttatccattaaaatataacaattaaatataaaaaaaaaaatattagtgttcagtctagacgggttaacccgaccaaatcgatcaatttcattgtaccgagtgcacttaaatttttgtaacacgatcattacattgagttaaataaaatgtatcataaaccgtccaaaccaaccgaaataaagctcctataaacctttctaataaagtgctcttactatggggtccgtgtccaaaaacatttattctaggccttttatttgattggattatattttttttatttaataaataaaaactttaatgaaggacagctcatacaatatcaaacccttctcttctcttctacctctaaatttcttccccaattctcattcagtcaatctctctcactggggctacccctaccctaggatcgaccttacctagtcttcgccacagacgagatcaacaacgccggaggaccttccctccacgcaggtaaggtaaggttgttttatttcttttcttctaatttcgctataaaagccttatcggacaatgtatggatctctttcattgtttatcggccttgtaatgtctgcaagtaacgatatttgtgaatgggttttggtttttccgttattgcattgattcaaagtcatgatagggactgaagtgaactactctccaactctatttttagtctaacaaatttcctagttaattattaatgtgtaagaatctgttaagcttattataataattgattaagtttatgtgaaagagttgaatttaattttgtcttgttgtcttcttggtcaaatctatcaacttcagtccaacaacagtcatatatatttacacttacacatattcgtgatcttggtcaaatttgagagtgacatatgttggtggtgatgtaatcttgaagagtaattgattgggtttttaaaaaataaagcattgtttctttgtgtttttgaaggtgtttgtgtttgcatatcttattttgttgatgtaatccaatagttaaatcttagggttttatgcatttctatctaaggggggttagattttaggtttttgaattttctagtgtctacagctccgtatgtttcttgtatgattttttttttttttttttttaaatcattcctcttattctattagtttctaactgttagagagaattgcagtgattgattggtttctttattctgtggatttgaaagatgcagaaattgggcgattttaagctacctcacttcttcaattacccaccttacttcacgtaatcttcttttctctttcttaattattattttctactggtttttaagtgtaattatcaagagagaccacttgtaataaggagggttaataatttagtttctcgtgctgctgaacagactagtgctctgtttagtgcaccacttcacgtatgtaaatacacacattaaacaagaaatacattacacgggctgtgtatgtttagatgttcatctatattatgtgtatggtgtactgtattatttgtgtgcattcatgctcgtttgctgaatgtgcgtaatagaaacctcgaaagaaagcattgtttattgtttgccaaatataggttgatagaaagctattagttgaactagcctagttattgcaatcgagtttctgctgtagtgaagggtgtgtacatttataaaaagattctttatttttgtatcccttttcttcaaagggacataaagtttgtgctaagaaaagatctatttgcaatttttgtcttctttcttacattgtaacttccttttcttaatgatatgtttcttgcaattttcatgattattaggcttcttgcaaaagccacgattttgtttgtttgttttgttttcctttattttgtggtggctcattttgtcatatagataatttcttttcgtttctcctgtttattttttatcccttttcttcaaagagtggtatttgatcaaaagacataaagttagtgctaaggaaagatctatttgcaatttttgtcttctttcttacattctaatttccttttcttcatgttttgtttcttccaattatcatgatcattaggcttcttgcaaaagtcacaattttgtttgtttgttttttcattttccttcattttccagtggctcattttgtcatatagataaattgttttcttttctccagtttgcagccagtaagggaaatccgtgaaaagaaaatacagctttggaaggaacttattctagagtactgtagattccaaaagatatctgtgaatggattgggggaagattttccttaattctcaaatgctgtaaccaaagtaagtgatatcttgttcttggttgttagtgaatggttaaatttcacaatttaagaagcataagctctggaggtagttttggaatgacaaaagtggggattaatgtgatgaattgctttgggattgatagttttgacagcattttccaattgttggaatagaaaatcaaatctttaatctgtccacacctttactcttccatcttttcaaccgaaaatgtaaaa

SEQ ID NO: 39155 - DNA, 2106 bp, Cannabis sativa
aggattgttcctctaaagtgtgttatattgttttgaacgaatttattaattaataaattttatgatttttattcaaaaaataaataaataaataaataaactaacacatcacacatatatatagtctatattatttactaactaaaatataaaattatatacctataaaccctactatatatttaggaatacagtatcaatacttgtcatttttgtcaacaatatcaaaaaaaaactatttctttaatttttgttttttttttctttggtttccattgttgcataaattattttattaaaaattgttataatttaacttaattgtacagaatattatagttatgttcgtaaaaatattttagtaatcattttcaaaagaaaaaagtaataaaaaagattatttttataggaaattatttgtgctttataattaaaattatggagaataataacaaaattatatatatttgagtatgaaattatttattttttaatttatagtttttcttcgccctatgtaaaataattttctagtttcagtcattgactaacactattaaattaaagatgttattttagcatttctcatacgtatttgtgtaagggaaaacgactattgattaatttggatgacgctatacttagaaagataatatatggaaagaataatatttttgacttatttaaaataagttagtctaattaattgccatttgttgtgttcaccataatcacacgtatgggtatagtttaattagcttattagttcaatatgaatgccatttcaacaactacttatcttgattactatatataactgatacaccaccttagtctaatgatgagatgaaaataataatagataacaaaaaaaaaattacaacaatatggttgtacaaaattttaaacattttaatgaattatagtttgtgcttttatatattgtttttggttattttactattgttattttttttttcatgttatttttataggagtgtaaattataattaaaaaataaataattgtaaaattaaaaaaaaaatgtaaaaaaatatatataaaaaaattactttggcaatataaatgttaaaattataccaagtggaataaagtttcgattgctcgacatatttgaactctttttacgaaacagaatgtcttgtgggttaaatggatcaatgccatctgttagaaaatttctcattgcaagaaggaaaaaaaaaattacaatcaaaatactcaaaatacaaataaaagtattacattaagattataagaaaactagagaagaataaaatacaattggcttgaccaaggcttaaggacttttgtcttaaaagtcattttctccctcacatgaacaattaagtggcgtttggttggagataataaaatggaatagaatggaaagaaacaatttttattttattcctttgtttggttgcatattaaagaattggaatgacctaaacactatttttgtagaatgactattctatttttaaataaaatgaaagatcattctaatgcatgataagaaaataataatttatcaaatttttttatgtattttaaattttagtctatttcattcctatttctattgtcatcttcattcctattcctatattttattcctcccaacggtggcatttggttgagagaaaggaaaatataggaataagaatgataatgagaataaaaataagaatggaatgaaatcaaattaaatttaaaatgcataaaaaactaataaagaaattattaaattttttgtgatcacgcattggaatggtctttccttctattttaaaatagagtagtcattcaaccaaaatggtggaaaggtattctgctgctagttggagaccgaggctgtttgctagtattttattgatgtttgtatttattttgttgattaatgaaatcatttcttctcaaaaaaaaaaaaaaacataatttatataagtctgcgatctcgttaaaatttacataagtctattagaatatttctaattaaggaaataaaataatattattgattctgataaatgaatattttatatttattgaatctggacagaatcaattacgtaatattct

SEQ ID NO: 39156 - DNA, 1499 bp, Cannabis sativa
gaatacaaaataatatttacccgactttatatatatggaaatatagtcaatgttatattattagattcaatctatttatttgagtaaataatgaaaagtgttatataaaaattaactaaacaaagcttgcatatacatataaatgttaagaaatttttaagcttactagagaaaacaggggttgaagtgccattgactctgccattagcagtgcaaaagatagtgccttgtacacgtattaaacccaagagtgggcccacgatcccattaagaagttgggcttctgccaccattgaagcacccaacattaacacacacatcacaaacacaactgacattttcaaccccattttttctctttcttttgttctaatcaccaaattaaacaaaacccttttcttgatgaagttcaatgtttataacacttcttggcttggtgaaaatactcttcatataaacccttatttatagcaaggccaaacccaagttgcatgcagttttgtttgacaaaaaattatttatttattcaacttaagttgagatagaataataagaacaaaacaaaaacaagtaggaaattcaagttttaaaatcttttccatgcatgcgtgcttagtttgtgggcttcaccctaaagaaatggtagtgatcttcccttattagaatattgaatgccctttttgtgaagtttaatttgtttcttattagattgggggcaagtcaaattgccactcccacacacctagctatagcaaaattttggtctttttccaaaaaagtttctagacccaggtccaaacatataagtagctgtagaattatatatagtattagggagttttcttagtttaatttggttgcaactcttgcaactcgtgttgccgtgtcattttcgtattcgtgtttgtattatacatgttgagatgtctaaattttgatttgttgtatttttcgtgttgaattattgtgttctcgaccatatacttatcttgcattatatattaattaacacgattaatattgcattatatatttttaattatatcaatttgtttgaaaccatcaaaataatacactcaattaaaaatatataaagttataaataaataaatttaattaattaaatattttataataacttatcaatacagtgaacaaattttttaatatctagtataaataagatatcttatattcttgttaataatttattttctactatagattaattttttatgaaataaataataattataaattaataattttgaggattattttaaaaatatacgaaaacaatcaaaaagttacaaaaatatagctgtaagaaattttatatatttttacaatttttaaaattttatttacataaaatacggtttttgacgtttttttattgttgttgtatgttttgttgttgattttttattatgtttacattttttttatattgtttggaagttgtttccatgttactttcactttcatgtggttttttt

SEQ ID NO: 39157 - DNA, 1878 bp, Cannabis sativa
  modified_base (1727)..(1737): a, c, t, g, unknown or other
aacaatctcaatagttcaggggaatttttaacggccaaaaaaattcaaagagtttgatttagtatatgtcaaaattcaaagaaaaaattgctaattaaccttttttaatacaaagacagacacaaaattgggaattacatcttttatctactttttattttctattttaattttattattttttaatttatatttaattttatagattatatttctattatttgcgtaaagcacttctaattttaataaatcatacagagttaatataaaactttaattataaaaaagagtatttatccgttaaaataagtcacaaactgacaagatgatgtaaaactctagtaaacccataaataatcaatattgatcgttaataggaaaatataataggacccactttatccataaaaataccacgtggcagattttgattgcagaaaagaatcttctcttggaattgcaatctatctttcccacaaaaatctgtaacagaagaacaacaccaccacatactctctctctctcacacacacatttctcactcactctaaaaaaatacagaaacagaagaaaaaatggcatcaacctttgccaccgcttcaaccgtagtgggtcttggctcttcttccctctcttctcccaaaaccaagacaacaaccctctcttcaggttatattactttattttttttctttaattttttatatatatattttttttatagaaaaataattaattaaattaatatatatatgtaatagggtttttgaagtctagcgtgagcgtaaggaacccgttgaagcaagcacgcgcttcgggtgggaggtttacctggtaattaaacactaatcatcttcgttcaaaacaatcaggaccgttgatttttgttaatttattttaaattatatgttaatgtagctttgagagagattggttgcggagggatttcaatgtgattggatttggattgatcggatggctagcaccgtccagcatcccagtaatcgacggcaagagtttaacgggccttttctttgatagcattggtgctgagctggcccacttccccactcctcctgctcttacctcccaattctggtttgtatcattctctcactctgcctatttttttttacatgttataaaaaatggtcaactgtgcaaaattatttttttttatctattaattaaaaatacatttatattatatttcattaaaacctttgctctccacttaaatatagcacataatttatattaatttaagggatataataggtacatcatttataaaagtgagtatattttaaagaatatggaaataaaggtaaaaatgaaaagaaataaaacaaagcgggtatataatgtaattttcactcaaaacttgttatcatgtagtgtttgtgtcatgttttgtgtgactcacttctatatttcgtgtaaggcgtgtcgattcgtttttgactgtgtctaattttatcaaccataacttgacttataaaaaataatttcgtgttcgtttaaattcactttgacctattttactattatcaaaactagtataaaagaaatgtatatattgattttttttttatatgtataataaaaattatttttttaaaaattatttttaattttttttaaagaaaattaaatattaaattttttaccataacattaaatcactacatatatatttttttacataattatattattattattannnnnnnnnnnttattttattttattttaaaaaactgtgttaaacatatcaaattcgtgtttagcgggtcatgtcgtgtttaactcgtttttttttcgtgtaaagttgtgtcgacccattttcgacctgcgtctaatatttttaatcctaac

SEQ ID NO: 39158 - DNA, 5322 bp, Cannabis sativa
acatacatttcctcaaagatcaaatgtcaaaaatttcaggatcctggcaaccagcagtatggggggccggcaagggatcttaggctcaacaatagccctttctatccatcctgttgccggccaaccactagtaggagccccatggcccgacaaactcccccagaagtccccatggccgaccagactcctccaaaagtctctacgactggccagaaaagagcactccctccctaagggaagcaaatcgcttgaaggtcaattttcaagcaaccaagaccgggagcaggtggaaacacccaaaataataattggagaagtaaagttaatcacttgagacacttggatccaccaaactccaacaattgttgtgatctactctatgtaaatgtgcaagctccaccagctaagaaaagatgtgtgggttgccaagccttacccagtttagggctggctgaacatgtacaagcactaaactcaaggctggtacgctttgagtacaccctctcctaaggtatgaacagccaggctctagccaatctgaggctgcaactcaatcatagaaggctaatcaaccccttaagagtttattatggttagattggtaattctgttagagttagttatggttagaatagtgattctattattcattttattttaaacatagctggatgtaacaaaccacctcgttcttaagccttgtataaatactttgttctcatctaataatatttagatttttgatcactaatatggtattagttatctctgccatttttactccatggctagaataagggctattggttcaaggaattttggccaaactcctacgtcgcataactcatcttctatactagatgctccttcacaaattcttccaatcatacctcaaacttctgctatcactggagatatttccacttaacaaatcattgctccaattcaccctgctcatgaagataactctagcccttacttcttgaactctagtgataaacatggtttgaacttagttagaccattgttggacaagatttccaaccatgacaatgagattttgggctttcaattggtgcaagaaataagattgtcttcctcaatggtacttagccacaaccccaatcgatgatcctctacataaccattggctctactataattatatggtgatgttatggatcctcgacttcgtgacactttaaatcaaaagaagcatattattcttagatacagctactaaaatgttgaaagaactccattcgagatacgattaagggaatggtcctcacatcttcaaactcagggaagcccttatcactctacatcaaggcaatgattatgtaagtccttacttcactaaactcaaatttatgtgcgatgatactcaagaactttgaccctgcatcccatgtacttgtgctgctttgctttataatcttgctttcttgaatcaaaaatacgtactcttatttctaacaggattaacgaatcttacattcatgttagagctcaaatactattaattgacccttttccatccaagtccaaagtattttatatggttatccatgaagaaagacaaagaaaacttaaaagtcctcagatcccttcccttattgcttcatcaaaaaattcttctcaactctcagctcttgcttaatctcaaacagcatcagcaacgaatgcgattcaaggatgcaacaagaagatgaggccctattgttctaattgccacaagcctagacatctcaaagaaaagtctttctttctgattggatttccacctaggtatggagataaaaggaaaactgaaaaactcagccttctacaaatcaaccatctacttccactaatcctctctcccttcttgctaatttgactaaacacaaggacagtcaaactctgatttcactgctaagttagaaactacaacaaacaacatccacttatgatgcatcttccccctttgcatccaacatctctagtaaactcaaactttctccaaaatttttatggatagtagatgttggtgctactcacaaattttctttgatatttctattttctctcagttacataatactcctatttctacttccattaaactcccatatgatataaacattaaaaattaataaattatgttacataaaattcttacataatttatacttacacaatgttctatatgttcctgattttaaattccatttgtgtagtgtccccacttttctccaaacattaaccaacaacatattttccactagtgcttgctgcattctgcagggttcacaaaacaggaggattgggattgctaaaagagttggtgacctcaatttctgattgcaagattccaattcctctccttcttttgttcataataaaaaaacttgtaaaacatcatgtaacattgctcattcttggcattcccaacttggatacccttctatgttgagtacaagttttatcaataaaatgttacattttaaagatcctacttccccctacaatatatgtcatttaggtaagaaaaagaagtttccatttaattcaaaccataatgttgttgcttcaccttttgatttaattcatatcgacatttggggacctttttacatcacaagtgttgaaggatttcgatattttctaaccattgtggaggatcatggtagattttcttaggtttacatgctgaaatccaaatttgatgttcaacaattaattccccaattttacattttagtgcgtacgaaatattttctcaacattaaagcaattaggcatgacaaagctaaagagttaaacatgtcctacttctatgctcaaaagggtatcgaaacaaatcatgtgttgaaatacctacaaaaaaatctgtagttgggagaaaacaccaacacattttaaatgtagctcgggcattggcttttcaatcttccctagcattggtcttctggccttttttaatacaagacccccacacctttactaaaatataaaacatcttttaaactccggcataacaaacaacttgcgtatgacctcataaggacatttggttgccttgcctatgcatcatctctagccagtaaaaggcataaattttctcctagagcacatgattgaatattcattggttattgctatctcaaaaaatttccatggtgatgtggacataaatatttgacacgtggcaagaaagataacatctcgaagtttggtagtttcaagtcatagcaattgacctgggaaggtccataaccttgtgtctaggatgactctgagaactccagaatgggtgttcgaattccactaagttatttccaactaactatctttctgtattatgtaccatgaagatatgaagcatccatgtccaagccttggcagctgagaatacatgaaacaacaccttaaaaatcaacccaaacaattaggggtttcacctagcacccaggttgacaacccaatgttttagtttcaaggattgtattagtgtaaatgggtcaaaattttcatttggacatgaactaaaaatatcacacacttatttgaggcattagaatcaaattcgaagaaattttattttgagcactcggtacctgggctcccaatgcggttgaaaatctgtcaacataggcaacttccaagcatcatttaaaaaatatgacacatgtatcttcttattcttcatccaaagttgggaaacaagtgcttttcgggaagaaacataccaactagggggcaaaaacaagggaccagtgcctaggttgacacttggtaccggcccaacgcccaagttgacaatttgtcaacctaagccagtttcgaggagtttttccaaaaagccttttaggcatattctccatttttatcaaagattatgattcaattatttttgggagcaaacagaacttccaagtgacctgaaatcgaacccagcgcccaagttgacatctggcattgacactagcggtaaagaccacttaactttaatatgataaattagcaaataattagggcttatttatgaaattatacttttagttatgaattatgaatttgtggagatacatttgtgttctaggtgtgttatttactttacatataaaatttcatgttttcatattttatgcccagcaacattagaacacagtatttggccaataaaatcacatattagtattttagtaatagcgtggcaatttaattagacattggaaatgttggtaatatttgagattttaaaaattaccaaaatacccctaactggtaaggatgcttttggcttaggcatgggaaaaattgtctttttgctacaagtttcttttgtcctttagtgacttatcaataggctagttaatatgatgtagctaagatatattttagattgttattaagatttatctttaccatttaatgaaattacataatcaaatatcaagctttttctctctaagaattctctctctctcgatcccttaggaagcctgtagaaactagggcttctcaacctcttttcttgttgattatagctagtcttgacataatcttagtgaactaagtcaatgtatgattgctcttcctcttctcttcggaattttatagtttttaagtttagaaattcatgtacttttgaggttaagctactgtaggtgcgaatttgttattgttttgatttctaaggttaaattaatgtttatatagatgatttgtgttggacttagtgcttagtgttgtggttaagcaaggtttaagttttagagctcaaactttgctctccaacggtgatttgtgtttctatggttgattcttgattttgttgcatggattcttcttattatggtgtaaataggaggtctggaaagtttggagatgtttggggttgatttgagttgtttaaaaggaattttgtgttttgtacattgaaccggttgggagttgtaggaactggttaaccggtttgccctcaagaaactcgacagaactggaatttcgattagggaaccagtctaccagttgggacattttagggaaccctagtttttcccattttttaaatatttagggtattgcaatgtcattcaatgataggaaaacttttaggttcaagtttttgtccctaaaaagtgatttagcgtgtcactcaccaattttacaaataatgttatttaggggcctataaatcgtcgagctgctgttccactcaggttcgccggcacacttgaattcgcaacgaagtaagattagtataatgatatgcatatgtgttttcatgtttagcgtaaatgttagttcagcctggtagattacattataata

SEQ ID NO: 39159 - DNA, 1419 bp, Cannabis sativa
cttcagtgcatccctcactccctccgagttagcttccctcaaaaactcgcctggttacatccactccaccccagatcgtcctctggaactacacaccactcactctactaaatttctcggaatgagcaccacctccggagtctggccggcttcatcatacggcgaaggcgtcataatcggcgtcattgactcaggcatctggcccgagagcgagagctttaaagacagaggaatgagtcgtgtcccattgagatggaaaggaaaatgcgagacagaacaacatttcaactcttctttgtgcaacaagaaactcataggtgctcgatttttcaacaagggaattgtagccaacttccccgaaatcaacataacactcaactctgctcgtgatgatcaaggacacgggtctcacacggcgtcaactgctgcaggaaactttgttgaaaatgcttcctattacggctatgctgctggaaccgccaggggtatggctccaagagctcgggtggccgcatacaaagttctttggaaaaataaggtatttgcatctgatgttgtcgcagcagtggaccaagcaatcaaggatggagtggatgtattgtcaatgtcattgggattctttgcggccaaggataaattttacgaggaagacgcaattgcagtggctacatttgcagccatggagaaaggtatcttcgtttctgcttcggcggggaacgcgggtcgtcttcatgggacaattaacaatggggcgccatggttgacaacagtgggtgctggaacagttgaccgtgagtttgaaggagcgttgactcttggaaacgacactaaacaaattacatttgagtctttatacgcaggcaacttttctggtctccgagaaccacttgttttcttgaacaagtgcaagagcttgaagaagctgaaaaatattaaagggaaagtcattgttgtatgcaaagatggaaagacaacaactttggaagatcaaatcgaggtaatcaagaatggaagtacttcggtgatttctggtgctatatttgttaccaacgatgaatggaaagattactatgattactcatttgcagctacattcgttgatgaaaaaaataatcagaaaattgtgatggactacattagtaagaacaaaaacccaactgggattttagagtttcggaagacgattttgggtagagcaacagctccgaaagttgccaggtacagttcgagaggtccatttatgagaagcccaagtgtgttaaagccagacattttggctcctggctcggaaatcttggcttcatggtctccactcaacaaaatagtcgaagtccactccaagcctttgttcagtcacttcaaaatcatatcgggaacttccatggccgctcctcatgtttcaggtttagccgctttaat

SEQ ID NO: 39160 - DNA, 1633 bp, Cannabis sativa
  modified_base (30)..(54): a, c, t, g, unknown or other
  modified_base (1159)..(1164): a, c, t, g, unknown or other
aacaaaatttcaacataaaaagaccgtatnnnnnnnnnnnnnnnnnnnnnnnnncgtaaaaatgtttaaaattccgtagaaccgtatttttgttgtttttgtgcatttgtgaaattaaccttataaattattccatagtcaaaattggaatactaggacatatttacaatttgttgtctttcttggctaaacaaggctatcggttgttttctaatgatacttctatggctcgtaggaactacaaagctagatattatcctaatggtagttttttatctgttatattaagacaaaatccaagctttatatggcatagcatttttgaagctcagaacctggtgcgggcaggagttcgaagattaattgggtttggtgcgaatgtcagtattttaagggacccttggctacctgatttaagtaatccatacgtttcttcaaaccatccagggttggagaatcaggttgttagttcattgctggttgttgattctaaaacctaggatgttgaggttataatggatctttttaatgagcgtgatagtgcactgatcatgtcaattcagctaagtaacacggctgaggtggatagctggttttgggcgaaagaaacttcaggaatttttactgtaaagagtgcttacaagcatttacaattggttaaaggtgagtttccaattgttgtagaaagagatggctggaataagctttggcagctgcatattcctcccaaagttcacgattttttgtggcgttctatttcgggatatctccctacgaaggctcagctgcacactaagcatgtttatgtcgatctcatgtgtcctttgtgtcatatggctgtggaaacaatttttcatgtgctagttgattgccgttttgctcgatcatgttggaacttgtccattttgtctgctgctactggtgtcgagcaatcttttagcagctggttttttagtttgctggagactaaaccagcaacaatctgtcttgaagctgctatggttagctggggagtttggaaggctcggaatgttgtgttttgaaataaaaaagcttgctcagcgacagaagtggtcagatcagcgcgctctgtccttgatcattggattactgctcaaactcaaaaaaggggccgattaggggtgttcataaaatagcnnnnnnaatccaatccgcacgatctaatccgcaaagtgcgaatatccgcacttgtgcagattggattggattgaaaaattcaaaattcgcacttgtgcgaattggatgttgattgacatataaaagtaaccgatccaatccaatccacacatctttataaaaaattaaaaaatatatatatacaaataatatttaaatgtaaagaaaatagtaatttaaaagtttattatatataatacaattatattttaaaacttaatagataaaatatatattctattattatatataatttttttttacctacaatttaaaataaaaataaatgtttctttatacatataattttttttcttcatttgagtttgttatttgtcatttattttaatgtattgttggaaacataaaaaaattataatttgttttattttgttactagttatgtgaaaaaaatatttttttcataaatattaaa

SEQ ID NO: 39161 - DNA, 2201 bp, Cannabis sativa
tttaatatcgtgtgagccattggcccacatatcagatattaaactgataagaacagatactacacttgatcttagccaaaaggccgagaaaggtatgatttgtttgttcaaagtccaagagttttataagtcactcatgagctgcttaaagcttgtaatccatgtgggagtatcgagactaaccatttaacagcaatatcatttttgcattataatcttaattacatcttaatcttgcaagttaataacatccttaattctcagctcatatgtcaagtaaatgtggcaattttaattttataccccatacaaacttgagaattatagaggtccaatattctcaaactggactagacaactgcattctctcaaatagagaagcatcacacttttcctctgtttggttgtttagaaaggttagcaattgaaaatatgttgctgtggaaacaatggtcatttgttattcctcaataaagaatgtccaaaccttaatgttggctgaccttgtttgttatctacctaccatacttacagcatctcactttctgtgattgtgaaggaatgaaggttttgcaactgtcctcatgtggtgttggagtcacttgtaaagatatgggaaacaatcaaaagagccttagtatatgggatctgcatagagtctcatatttggaatgaaaggcttttcaacagctaacatcccttaaatccttaccacttttcttaccacttcatcaatcaaggagtgccccttgctaaaacaaatatgcctataaggatgactagattggcctaagattcaacacatctcagaagtgagattggattgttttcagccacattttcttgttttgacattttacctagcaatgtatgattcagtttttaaaccttgccattcatattgaaactttgctgaagcctttcacttccagaagtgcacttatggaaggctcatagtcatacacaacaaaatgtataacttacataaccatgaggatttaaccaattcccgtaaaccattttgagcataaaataatattaactcatgtaaacagtaatactaaatagtattgacaagcattagttaattctgtaatgtaatgacctattaataatgattagggaaaggtgataaatggcaagtaaatagccagggaagctcatttctccaatatgtaatcttaacttaggctccacaatgcttgatcaatggaagaaagctcaagataaaacatgcctatcttctgtctctagggacaaatggagatggtgctgagctttgagttaaaccagctactaataaaatcaagcttaatgttgatgctgccttatttctagaggatcaaagttatgattttggcatcgttgccggggatgcttcaggcaaactcctagaagctacagctgtccatcatggtggtacttatccggctgagacaattgaagctctgggagtgagagaagcactcagttgggtgaagaggaactcttgggaaggtgttgaggttgagactaacagcatgcttactgtacaagcaatccgtaataatcacactatgtcatctgtctttggtcttattgataaagattgtcagtttttactttcctctttaaacaatgttagtctttgttttgtggaacgatcaacaaatcgagttgtccactatgttgctaggcaatctcgatttctttctggttgtagcaatcatgatcataatgctccggctgatttacaagcccttatgtactccgaatgctaaattttaatgaagttgatatttcattttcaaaaaaaaaaaaacttaggctcccaaaatctcaagtggatgtgccagccaagttataaaaagcaagcttgatgatatatttaaaaccattttcagaactaaaaatatcttaaagcttattgattactgaaattgaaagaaagaaagaatgaaataataataagaaaatatacctcaaaccagaagaattttatagctgttttgttagttgtaaataccatatttgaagtctgtacaaatgagcttgtcagcctattcaattttggattagagaaaggtgataaaaggcaagtaaatcaaaattgtttgattagaatgtagaattagtgggtattgaatgcaaaaaacaattaaaaaatttaaactaaagttggaggggtgcgccaagcccatgcaatagtgcaaagcataggc

SEQ ID NO: 39162 - DNA, 2555 bp, Cannabis sativa
  modified_base (1462)..(1462): a, c, t, g, unknown or other
gggagatcaactatagacaggtacgaacccctagggctcaaatcacgtgggctgggacacttttcatatggctgcctaacgaaagagctgagaagttcacatacgaccatacattcctaagaggacttggggacaaatattatcctaaaaatcacccgagcaacgtggcacgagacaaggtgacacgtggcatagaaagaaaggtggtcagcacatgacggacccatgaagtaaaatgttgggcagagtcacgagaaataaagaagtacaatgtgttacatcaacaaaatcttcgaccattgaatttagctgaccagaatgaggaacttgattcatctcgagcggcagaggggctacatactggccagaacatacaacaaggattatcaaaaagacttgttccaaatccacattatcttcactattcctgaagactatgtcataatggggacctagaattgtgggattaagagaatcgtgacattgaataacataacctttaatgtgtaaatctttaattaatttaatttcttataacttgaaattctgtaaatagtagttcatttcagtgtttacgagatcgaatctaaaattgaaaagagagttattatgctgcaaaaatactagttgtaatttacaaagaaaatagagaatctcactagaccatggtcttgtgatctttatatattttagagaaatattaagtaaggggagtaggttattaccagaaatctggggctgaacttttataatctgttgtgtcgtttattgtttccttattgtcatttcgcaaacacttttattatcgtttatatgactctgcgttgttgaccaaaaatgaggtcaacacatatatataatttaaaaaatttatcaataatcgcacacgaagagcgtcatatttactaatatactgtaataaaatataatacaatattttctaaaaaaagaaatcattaatatttttatatgaatattgcaaaattttaaatgtggaaacacaattaattatatgtctaatatataattagtgtgcaaacactatttcaaacatattttgatatataaaatgtagctataacaagttttgttggtttaacaaattattttaagaatataagaatactgtgctaaatttaatggtgttagtaggattagttttatagatatatataaatattgatataatttagttttgattaatttaaatatataaaaatattaatattatctattttaagttatttgaatttatactaattttagattaatttaaatatatgtaaatattaatatattatgattattaacttttattgttgtttttaatatttgttcaattttaattttaatattcttaaaatttatatttatttttctcaaatttttaaaactttaaatattatttttttaaaaaaataaaaacttaacatgtgactttctttaatttataaaattttanaaatacacataataaaaataaaaattaaaaattcttcgctgatgacagttacttgttttggcaagctactcatgaggctgcttctaacctgctcctgctccactcttttgagaatgcttcaggtcagaatgtgaatgtttctaagtctactatctttttgagtcctaatacgaacactcttcttcgaggtaatatttgcaacacgctcgatgatggaagcttctgaaggcaactactatttaggcctccctaacattatcggtcgtaacaagaatgctattcttagttttctcaagaataaagtcattaatcgcctgaatagttggcacaataagtttctctccagagcaggcaaggaaattcttcttaagacagtaattcaatcgcttcctaattatgccatgagtatttttttcattcatattggcatttgtgaagagattgtaaagcttatggcccggttttggtggaaaactagttcaagtaaaggtaacgggatcatttagatgacttgggatcgaatgaccactcataaacatcttggaggtatgggattttgacatttaagtgatttcaatcttgctatgcttgctaagcaaggttggcacttgttatgtaatcataatactctagctagtcgggtttacaaagcaaggtattttcctcactcggattttctcaacgctgaacttggctccaatcctagttttgtctgacgaagtatttggagtgctcaaaagctaatcaagttaggagctcgatgcacaatccggtctggtatgaataccagtatccttcattatccatggcttcctgataagaatcaaccttatgccacaactcagacccccgtcctcttaaaccagcaagtttcttctctgtttactactggtgcggctagctgggattatgatttggttcacgatatgttcaaccctagagatgccaatctcaatctaggacttccactcagctctatagatgaagatggctgctggtattggattggtgaatccaatggcagttttagtgttagcagcgcctatttgctgctgcagaaagaaaaagctcctcaacctgcagcaaataattt

SEQ ID NO: 39163 - DNA, 1003 bp, Cannabis sativa
ttggctgcttctcttgatgaaatgattcacctttttccctcatctttatcagacacacggtggtcatttctgtggtctttaaaacttcctccaaaggtaaaattttttacttggtgtgttgttcgtgatgccctccttgtagcgaaaaatctagttcagaggaaagttataaatgactcaacttgttctatttgtaaacgagcttgggaatcggtgggtcatgctatgttcgaatatatgaatgcactgtttggcgatcaaacggaaaggtttttgattggtcccatgctaattccatgaaataaggtaattatcttctgcacttatctaaaatttatgacaaaccagtcttcgaactgattatttgcacaatgtggtttatttggtctgaacgcaatactgttgttcatggtggaaatgcacgaacaacctcagttcttgctgctgctaattacctgtataactatcgccaagtgcagcaaacgtataacatagctaatcaagttcctaaagagggtactcagtcaattgtttctctaattatatggtagcctcttgcattagatgagttgaaactcaatttcgatgctgctgttgatagtagcagaattaaaataggtgtttgcacccttgttcgtaatgcccatggtgatgtgctagctgccatgtagaagcctattgttggtaattttaaatctcatgaaatggaagctacaatgatatttcatagtttaaattgggttcatccaattagagttaccaatttctatagtggaaactgatgctctagtggtctccaatgctttaatgaaacattgttttgctatctctatctttaaagatttaattgttgatgtttctagtcttttgtcctttctccctagagttgctattgtgcatgtcaatcagaatgaaaattttgctgctcatgttttggctaagtatgctttagggttggaagaagctagttgttggtcgaagaattttcctccccaattatact

SEQ ID NO: 39164 - DNA, 2909 bp, Cannabis sativa
acctgaaagttttctttcccatttgaaaattatggttaaatgtaagtgtgctggtgagtggtcaaagataccttcatttaaaaagatagcctcagctccagggaaagcatcaatccagttggaattagcaagaacacggtgtacttttgaatagattctagctgcatcttgttgtttgttgcaccatgtgaaaaagtttcgtgtatatttgatatcctctagctggcagtgagccacacagtaagagaaatctaatgtagtaatatgtctaattttacagccgaccctttcatcctttgcaattatatcattaaaatcccccaccacaatccaagggtctttaagaacaatctccattaattatttccgtagtattttcctaccttctacatcattaaatccataaacacaggtagtaaagaacttcttaccatctaaacaagagacttcaaggtggatgagttgacttgtacatttgagtatgttgatggagaaggaattaggattccaagatactacaattcttccacctttgtgccaagatatgtttctagtgaagcaccatcccgtaaatatatttgagtacaaggttccatgtttggaggccttgacccttgtctcgaggaggccaaccaaaccaacattttgtgagtagatcaattgcttgaccatgttttgcttttgtttgttgttaactcctcagacattccaacatagtagcctatccattttgtagaggaggcactccccctcctccactcttctctgtttctgcaatagcaatctcctgaacaccttttgcaattaccacagtggcacatgacccttgctgatcgtttaagacctgaaaagagttttctgtctttgttccagctgttgggagttttgcttttggtttctagcctttagttacaggttggaaatcattagtagcaagaatattgtctgcagtagcctctgttagtgttgtgtccttcttttctttagcaacccactgctatttttgctggcctggtttcttcctgcattcatcatttatgtgtcccaaaccattggaatttttgcaaaccagaggcttccattcgtattttacaccaactaatgaattataaccatgttcatcttcgaagcttatggttccaggcaattcttgctgcagtgtgacttcaatgaggattctgggaaaattgagcttatgtctcatttcggtggtatcatccaccattatagggttaccgagctaccctacaattttgaaaagaattttatcgccccaatatttcaggtctagattttcaagttgaatccaaattggaacaattcgaatatcttccttcctgaagttggtatcggggtcccatggcttcattatgaccggtctattgttgaagaaggtatagcctccattaaggatggtatccctgtcttcaattgtaacaaatcgaatgatgaaaacgccataagagagcaatccaactttatcaaccttatctttctagactcgacgagaaaaaccttcaaggattgataaaggcggattagccccaagcacatagcaaacaatggatgaattccaaaaaaaacttcctcttctatatcatccatagttatcttaattttcccttttccaacactactttcctttttgactccagagttctcagctttgttaaacaaatcattcaaattccttaaaaccgtaccagatcgcagtatagggggaccgatgaattacctttctcaagctctttactacattggatatttgcttccaaaaacaatgcaaaatcagatcgaacatcatcttgttgctccaaagctcgaagtgatgatcgaggtgataatgcctgaaagtgctcatcgtgagcagttttcccttcaatagagttttcctcttcatctatcaaataagtagcttcaattccaagtatggaatccacggatttgaattttttggtttcacatgatgaactagggccttgtttcttaacaacattggttttctttgttactgattgttgcttcctttgcgccttggatctcgtttttgccatgaacttcttttcttctttgaacgagtctttaagagtagggaatttgagaataagaaagagcctctcatccattaaggtctaagttgcaatgtactctaggcatcctcaaactcctagtgcggaaggttttcttttctagcccatctctttctcattgaaagatggcacaacctcgagagctgagagagcaagaaacagaggatgttttagttttcttaaaacatactattaaaataaactactaatgcaataaaggcttactgaaccatgagacgaactgattgttgatgatggttgtacatgttctgacgatcttcagaagacaacctggaggctctgataccaaattgtaacaccctactagtttaggtgtgttaacgtgatttttaatttaattgtgcaactcattgctaatcaacgagtttattgaagatcttgaataattaaaactttatttaactatttataaatatcaaaacattatacttatacatagtactcgaattccgtttacaaaatatttacaaaagtttcacaacgcataatgcaaaaattttcgcctagcgactatacaaaatatgctcaactatcccaaagaccatacgctcaaggcctaactgccctgacatgtataatcttcatccgcccgctctcacggttgctcaacctaagccttccctttacctacacatgcaagcaataattttgagttgacagacttagtaagaaaagcgtaatcataaacataaacatatattcaaaccgcagccaggcgccaatacacctaatcacaatctactaactgagtcaggaacattctcgacaaagtatgaataactgcgaatccagcctata

SEQ ID NO: 39165 - DNA, 1957 bp, Cannabis sativa
ccttcatctggaatttttgagcaaatttttcgtgcatcacgttgtgctccatctcctcttctccttcattgaccacatctgccataacctctcctaactccttcatcacaacattagcatcatgctcctccctcacatctgagtttgaaacaggatctggtgaaatccatcgaagtgctggcttcttggttgctcttttcttcttcgccatggaagagagaaaaatcggaccaagaaaacctaatatatcatttataattaaaattatatatcataagcttaagtcataaagatctaatgacggtaaggaactggtaatctttgtgcattacaagtgtgaagatattttttttctcaattcttagtttcatctttatttactttttaatttgttggaagactttagaagtatgagactatgacactatatttgagttatatatatatatattatatatattttgttttttgttttttgttttttgtttttttttttcaaactttgaaataaatttattttttatcttttattaggttattttttttttaactttgaggcagatttgtcttttatcttctatagattatgacgacataataaatatttgtgagaatattagtttaatttaaatttatttttttttcaattattttaaattattacatttgttttttctatttagctttaatggatactcgatgggttccgaatgcttcaattccaagtctagctagttttggatcctagcttggccaatgaaaagattagtagtgtttttgtggtgggtgagaaaacttgggatgttgtcaaagagttgtttgatgaggaagtggcaaccaatattcttggtaatcccctttctatttggtttctaaggactactggtattggggttttgacttttttggcaagtataaagttaagagtgctttataattgttacagacaaattgaaatggtagtgtgttgggggaggttgtggcgttttggaagaagttttggcaacttaaacttcctccaaaggcaaaaaaatagtgtatggagggcgactagtgggtgtgtttcgacaagagttcagttgaatactaaatatgtggatgtttctttggtgtgtccgatttgtcatggggcaggtgaatcaattttgcattggttagtttcctctggttttgcacggaattgttggtggtcgtgggtttggctatgattccaattaatgcagggtcgtttggggactgattttttcatttgttctcacagctgggtgaggaacaaagtgttcaagcgatgatggtttgtgtaatttggttcacacggaatcaactcttgttgaaatgtgagaaatgtcgggtggagttcattgtcaaattggctcgtatcacttttgatcaatggagaaaagctcaagaatgaagcttgtttccttcatttggtaattggtatctttcggatgaggttgagctatactctaaactaggttacgaaaaaatcaaggtgaatattgatgttgcattgtttgacaaggagggaaggcatggttttggtagggttgttcgagatcaccacaatcagattgtggctggaattttgggtattggtacaagctgttagaaatttgaatattttgtcatccactttcggtggtgttgttgaggagtgtatcttcttttggtgatgtttttttttttatattttgtcaaacgatctgctaatcgggttgctcatcttatgactagagtgtctcgtttatatgttgatcgcattttttagagtctaatctccattttgatgttgttgacattattaaggccgaattggtctaattgaatgaaatttacctttaaaaattaattaattaattagtaggaattattacatagaaaatataaattgacattttatttacaaaaatacctccataaggtaaagacaacatttataccttttatgtgattt

SEQ ID NO: 39166 - DNA, 1493 bp, Cannabis sativa
ttttttttttttttttctaatcttttctttggatataagctaatctcacccttatattttaaagactattaactttattgaaacagatgatatctttccttcttttctttgtcaactaatacattatctgcttaaggcattagaaatattccctgtacttgtggtgtgcatgtgtatgttttgtttcgcatgtttgcacggtgcattgaaatttcttcagaagagagctgcaggtttctgaaatttcgaattctaaaattgtgcaggttgacagtggtttttctggcatttgatgtcttctttgccatcttctgtgttgttttggcatgtttaatcggcattgccctttgttgctgtttgccatgtattattgcaattctttatgccgttgctgggcaggtatatagtaaacatgaaatcattagtctacatattaatattttcatatgtaagatcctttctctgtaactttggtttttgttcgttgttacaaattaggagggtgcatcagaagcagaccttagtattcttccgaaattcaagtatcaagtatcaactaccgaggaaaagccttgtgcgggagctggaaaaatggttcctgtaggaacaagcagcgaatacttggcgactgaacgtattcttttacctgaggatgctgtatgtgttttcattaatactgcgtacttcgtttcttatttctcgttgtcaatgctgttttacattttttcacctgaacttgaaaaatctacctactttttatcataccttggaagaatatagtaatgaaagatttctatattgcttcccgattcaatttaacatcccacttcctaacattggcttttccgagatggtttgtttttagttcaataatttgttttctggttattgaacttgaatgtcaatagaagaatagatcttataaattccgctgttatttatttcttttcttaaaattgattacatttggcattatattttcaggagtgctgtatatgtctcgtcccctatgacgacggagaagatctccacgctctcccctgcaaccatcattttcattccacgtgtattgtgaaatggttgaagatgaacgcgacgtgtccactctgcaaatacaacattctcaaaggaagtgaacaggtttagaggaattatataaaatatagtgatctgcctatatttgatttcagtcttcccaagtgtttgttattattatgtacataaaatgtcaaggcagaaagaagagcaaaagcatagtgctatttttattgagtcaacagatttctattttagatgatttggagatctgttagtgcttgtttctgtatatgctgtttcatgattgtgcaaaactcactcagcaatcactttgcagggctccaaaatcatgcttgtcttttttgtttttgtgtagacaggaggaaatgattgtttgcaatattagcatattgaactactcactctctgttctgtaaatgtaggtattgatgcca

SEQ ID NO: 39167 - DNA, 1835 bp, Cannabis sativa
tttttttgacattcattatttgtcttcgtatagcatgcctagtttcacttttgctcttttgttcgttttagttgtattttataagtgaggctccataataaatttgggaggaggtcaatctcagtctcagacatatgatttttgtctctctctctctcaaaatattttatccttccctttcttgtatttttagttttttgttattacttgaagtgttgtgtatgttttctagcataaagacttcctaaagtttttgcttttcaatctagcttctaagatactttttgcaattgtctttgagttttaaaacaataacatttattttttattgttaattttctaaaaccaatttttctgtttttaaatggaaaattttgaatttctactgcatttgtgggtgtgtaggatataaagaaatactttgcctttaaaaactgtgaattttgttaaagaaaataaatcaaagggcttaattactatttttttaaaattcaatgtcttgaacttgcaattttgttcttaaagacaatttataaataacaaaaacacttagcgggtagtaatgctgaaatcctgctttatttcttaccaaataagactccatggttaaagttcttgaagcagcttctagtggacagtttgaggatggcatggttcctacctctctttttaatcagaatttagttctgtaatttttttttcttacttttgtaattatattcatttgtgtttacatttctgcagctctttatattaaaaaggggtacgtaccacagtttatagcttcttggctggattgtcttaataaaaagaaatttggaatatttgttgcaggagaattgttcaaacgagaagtgcacaagttcattcaagaaaatggcagaatcctttgcagatccttccaaagtggagaagtgctttgaaaaattgaacgatgtgaaagaaaataaaatatttaattttctcgaaactttgttaaaagacctagggcatgtaaatgctgagactaccagagtatgttgattcctttttccctctaattttgatttaaaagtattaggtcttgctttgtatgaatgttcatactgttgcagcaaaagctgtcataaaatttgggaagtcaccaatgcctcttaagctttagggacttcaacactttggtcattggttctccttcattcagtatcgttaaatactgtttgcattttggaattcaccacacgcttcttgaactacgggttgttatacatcaattctcaaattctattaacatgccatgaattttttccaaaatgtgaatgatgttggatggtggggcagtaggtcctacaaaaattatgtttaggaatggtgagggctcacaaaatgaaatttgggggtaaagtgtgtataatactcattgaggggcactggtgaaattaaacctgagtaatctgtttataattatatgttcactctaaatttaagctgcttttttttagctaatttgctaggatttatagctaagcctttttttttattgtttctagctttcagattgtgaaaataaatggttaataatttttttatttgtactttttagtatgcacatttcttacttcattttttcatttgtcttatttgcagaacaagcttttgaatttgataggagataaaagtaaaatttttgagtttgtgcagacactttccttgaaatgctctcataacatattcagttcagagcatgtccgctgtatcttagataatctttccagtgacagttttggggataagcactacaaggattcttctctccagcttcttttggtacgaataattgctgttaactagatgtt

SEQ ID NO: 39168 - DNA, 2199 bp, Cannabis sativa
ttgaaaatgaaaaacatagctgatggtttgtctgcctcaggtcaattactcttagatgatgatctaattttgtatattttgggaggtcttggccatgaatacaaagcgcttgtggtgaatctaacctttaggcatgatcaagtatctttgcaagaggtgcaatacatgctgcagagtcaagaaatctgccttgagcaactcaactcaacccatggcgattcctccatgcctgctgctcaattcgccacacagattcgcaaatccctcaatattggatggacacaaccaaaatcagtcttctggtggtcgttcttacaattccagaggtcgtggacgcggcagagggcgctccaacaacaacagacctatatgccagctgtgtagcaaacctgggcacattccttcaaaatgataccgctggttcgacatctattttctagctcctggttccagccaaccttcagcctctcaaaacagcaatagcatgcactcaaacaatgattaacaagcctttttaatagctcagatgctcatgtcgacaactcctagtatatcgatagtggagccaccaatcacactacatctgagtcctccaacattcagcataaaactgacatgaaaggtactactcaactacttgttggtaatggttttcccttagacgtgactagatctggctcaagtaaaatccataactcaacttgctatttagtgctcaatgatattctttgtgtacctgaaatctctaaaaatctattgtctatatctcaactaaccaaagataacaaggtgtatgtggaattttatgctgatttttgtgttgtgaatgatctaatatcaaaggaggaggtgctacggggagtgcttaacaatggattataccaattgaaactcacagcatcatcatcatcacatgttcctgtccacaccagctcaagttttacagtttcctccaagagcagaaatactgccaaacttcccaaattaacagataaatcgagtcaatctcataggtgtctttctttgtttgttgagtctagctttaattcagatatcaatgtgtggcacatgcgtcttggtcatcccaatagcaatgtactaaaacacatgttgattaatgaaaaagtctctttcaaaaattccataccattttgcaatgcttatcacataggcaaatcaaaatacaaacattacagcacctcacacacaaaatctcactcaccaattgagctcatacacaccgatatatggggtccctcacccatactatccaaggaaggatattgatattatgtgcacttcatagatgactatagcaacttcacttggattttccctctcaagttaaaatctaatgttaaaaacacctttctcaacttctaaaaatttgtagaaagaaaatttgatgccaaaatcaaaactctccaatcggattggggaggtgaatatcgaaacttagcatcattcctagaatcaattggtcttcattttagacacccttgtcctcacacacatgcccaaaatggcaaatccgagaggaaacaccaacatattattgaaatgggcctcaccttgctatcacaagcctccatgccattaagatattggtgggatgcgtttatcacatccacttacctcataaatcatctctccacaccaaccatggcacacaaatcccccatagaaaaattgtttaaagttaccccaaatctgaaatttctcaaggtttttgggagtgcttgcttccctcacattcgtgcctacaatactcacaagctcgattttagatccaccaaatgtgtcttcctaggatatagcccaaatcacaaaggatacaaatgtcttcacctaaatggtcgtctatacatagctcatagtctttcgttcaatgaatcagaatttccatttgctactggttttggacagccactaggtcacaccactcctacacctctgattattcaatatagtcattggctcccatttatctcctcacctacattttaggataatgatgttgatgatgctactgatttttcaactgacataaatccatgtgatgcaagtcccacggctccttctcattctccaatatccgactgtgcttaaccaaatctcagcatgaaaactctactacatccaaatcatacaccaccatccctcttgccatacatctccctattcaaccattatcaccag

SEQ ID NO: 39169 - DNA, 1698 bp, Cannabis sativa
  modified_base (1476)..(1481): a, c, t, g, unknown or other
caagttttaataaaaccaataaaacttaatgtaagcccaaataaaaagtctaacagttcaaagatcatttaactgaacttggaattgaatcccacacaccacacaaatatatctaaaacatcaatttatcatccaaaagagcacagaacccacacaaattcaactaatcttaagaatatacaaaaattagcatctaaatctatgaaaaatataatttttattttaaaaaacttaccttttgtttgaccttggtggtggtggcaacagttatttgaatcgtggtggtttcgtggtggtggaggataaaactgggtctctacgcctgaggtggtctctgcgctggaggaggtcaaatttgggttaggtgcgcctgaggtggtctttgcgctgaaggaggtcaaatttgagttcggtttgatttgggtcaaatttgggttggctttgggttgaatttgagagcaagagagagatagatagagatagagatagagataaagagaggatctggcagagtctttgggattggggaggttatcggtcctgcgtgagaaatttttgggcatgcgaggaagagggagagacagagagaggaaaaattaaatgtcaggggtattttgggtataatttgagaatattagtattgttttgtataaattaacaaagggtctaaaatttgatatgggggtattttttatgtattcaaaatgaaattttccttgtacattaatagtaatatatggagaaacaactcttagacatttgtaaacaaacttaaatattaaccaattgaatatattcatataactaactatgttataaaagtttttttaaagagatttgtcttgcactgacaatattaaatacctgcaaatttgataaacactatcattatgttatcagtttgtaatcattgatatgttaagtttcagagtgctagtaaaactttaatgcaactataatgcaacataaaaaactagaaccatatttcgatgtacatggctctagattcatacgaatttaccatacttttttcatgatttgatattaacaaattcactattgaaatttgcaaaacaaaatccatgcaacgggataaacattagctataatattgttgtattttttttcctttttttggattatacttgattttgattgattagaagctctagatctatttgttagagatctgcattttatgaatatgaaaattgatgttaagaggattagttctttgcaaattaaattgaaaatcaaggttgaattttagttttgagctagtttttctgctctttctttcatcaatacaaaacaatatttgtttggattgatttcggtcttcttcttaggtgaagttgccagaattaatggtggttttacatctggttggattttatttcggctgtcttgctgggttgatcaatcgaaacttgcattagtgaggtttttgcttatgttatattattttatataatnnnnnntttagattaaataattaagtgtgataaagtattaattttgtcgaattgtaacatacattatggagttacaaaatgtgtgtagaatgatctcaaaataggagttgcaaataatttaaattgattatcacttgaatatgtaactctcatctctttttcactcttaaattagtaaaagatgttactaattgtttatgaatgtgaatgaatgatagctatt

SEQ ID NO: 39170 - DNA, 1537 bp, Cannabis sativa
aatatggattggtttaccatcattctttcatattattttttattattatattatgtggtaataaagttttatttttattttgtaggttattttgtggatgacctacaattacagaaaatttacccataactttaattttaaatataatttgtttgacttttagcaattttatatttaaggtgcttgtatgtggttattagtaaaagggttatacctttagctagtttttcttaaaaattttgttgattttaatttcttattaatgttgagcaagtgatatggtatgtgcgttaatttttaagtttgtatcttgatttgattttgaagattttcattctaatataattgtaggaattttattcctaaaatgccctacacacagcataaagtatcaaagaaaacccaaggtcaaaccagaccttttaccccaatcaacccacgttttgacctctggccttgaacccaacgacaaccctttttgtttatactacatgtggtttcaattttaaagtagtacccctaaaagcatcagtcatatatatatattgatttatatctcaaacacacattcagcaacataaataaaacctagtcgtgagcctccttcttcactgttcttctctgaagaacatgaagaacaccaacaatgaaacccaaaaaacagcaacaataaaaacccaaaaaaatcccttcccaaacaaattcaaacccataaaaatacaaccagaaaaatagctaaacacaatagaaaaatcagaaaagaaaaggaaaagaaaacaccaagcttttatagaggttccccaaaattgtgttgggtacgtcctcttcgagctcgcctcgttcactatggatcttcaatgatcaaacgattacaatgggttggattccaaaacacacatgtattaatttggtaatccgaatattttacagtgattttctcctctttttttctctctgtttttctctctaaatcagtactaataatgttgtgtttttctcttcttttgcatgaacaacaccctctggctattggatatccgaagtaccaccttggttccaaagcttactccattgtaagcctcctccaagaacccccaaaatcaatcggtttcttctctgagaaaaactaattgattttgaatatcttgttctgctattgatctctatttctgtagtatattttctttgtactgatctggtgtttgtattgctctgctcttattttttgatgctactggtttatatatgttgttgtattagagaacaaagagatgagagttagttacaaagtattaataaactttgtaactaacttaactactttgtctaaattacttagaggccaaaggccacataagtttttactacttgtaatcttattgtaaatgttgtggttttacagtgaatgtggggatttactatcaaaaatttccacttaaatccccatatgcactgtattgatgttgtttgagtgtaactgagggtcttagctcgaacccattaagggttttaccaacctgtgtcaatccccaataag

SEQ ID NO: 39171 - DNA, 1663 bp, Cannabis sativa
ggacaaaatcatatcccattaaattttatataatgtaagataattttttgagaatattgttaattaatcatagagtattaactctaagaagtattcaataacaattttatttttcttaaacgatgcattagttgtatatatattagctagtcaacattaataattataagattattagtacgtgttgtgtggtgtagtggtaagaattgcctttattgacatatttccttgcttggatcaaaggttcgaaatccactccagcccccctcttgtaagggattaaagggattcaagctaggctcggtctttactggagatggtgccatctgtgtgatgtgaacccttaaagtgactatcgatgacccaattaaagtaggttgatgtatatataaggctcctatagctgacacgtggttcccgagattgtaaaaaatgatcataagggttgggaagagatttgcaccacatgatctctttttcttttcagtaaaaagaataaaaaaaattataaaattattcaaaaaaaaaaaaataaataaaacattaataatcattaataagatatttttatttttattaaaaaaatattaataattaataagaagtatattttttaaaaaatatatatgtatttatatgtatagaacaagacaaacattatatatttatggcataagagttaaatataatttatactgtcaaaaatataattaactatacctgtaaaataaaataaacaaatattccaaaataattaaaataatatagtatattttatcatataaaaaagattaatttatgtttaaatttttgtagaaaatcattaactgataattattgatagttgaataggtttggaagtttaattagtatacttcatacttctttaatacttgactgttgcctgttggtagcttattgagatcaggttgttgttaggattttttttctattttgttataaaggatttggtatgcctagttttttataattttgctctttgaactatatatttcatgtaatgaattttgtctaatttacctactaatatatatttttatttctctcaaaaaaaaaaatataatttattattttaagggtaattaaatacatgctatatttttttgtttttggctcgtgatgcacgaattccttttacatgtgaagtaagcaatatgatgtaaaagataagggcataatcataatatgagccaactactttatgcaggggtattttagggatttcatatcttggttaggcctatatatatatgtaatgttttcatttcaatataattagaaaaaatattctcaattctatcaaaatatataaaatactaaaatactaaaaacaggttcttccatcaaagtaagcaaaaatcaaatcaaatcaaatcaggtatgaaataccacacaatcttcttctttttttctttacaatctttacatagcaatactcttatatatacagagatatatcctccatgaaatatatattcaataataataataaattcttttaaaaaaatattattattttatttttaaaaagatatatttagggttagtagtacatataaatgataaattgtgtatgttgattgataattttatagtgttatgataggctgaattgctcaaataaattatttaattgattgtg

SEQ ID NO: 39172 - DNA, 1774 bp, Cannabis sativa
tttttttttttttttttgtgagagtgtgagggtttatggtcgggtaatcatgatgtatttatagcggttgatgagtgagtgagataaaaaagtgttgggaaggaatatagattagagggtaaagttaaatagactatatacggcccatttgatgacttgggactcactaaccaattttatttgttttgagtaacacaaagagttaagccaggtgttgttgtaacccaagcaagattgacaatttattatttttcaatcacactcctggacagattagagaccaaaaaaaagaaaaacactgccaatccactaagcaaatttttttggttgaatttgaattattgcgtggcattaaggtataggcatattgatattgtgcattaattgttagtcaatgaatagtccgcatccaccggggatattaaatcattttggtatttgtcctcgagaaaatatcctgggagctattaataatatgcaggaaaaggaaatttaggaggcatgagcaatacctattttgacccgaaaatgctaaggaccacatccattctatataggctgtagatgtagtaataatgtcattggtgtgtctagatattaattaagtactaaatccaaattaaactatgtaaaacttgctaaataaggaccacacccatgctaaatatagaatcacatggtcagagtcaggaccataggattctatttatgccattggcacatgaaaacttaaggtttttaaactctccccctctattattgagagttacttattattgctataatcttttggctccttgatgagtctagtctcatagttggctcgtgatttatgcctctctcttgctctcttctgtgtttctactttttggttacctctgctgtgggggtcacctgttctgtctggggttttcgttggtgctttctttttagtggtggtgggtgttctttggtaccggcggtggtgtttacagtcatgagcactgtaagcggatgcgaggaggttacagtgagagttgacacggtcaatcctgctgctactaagttattggagcgtgacattgagcttgaaatcgaaatgatggaactttttgaagatttaactctggaggatattgtaatagacaaagcctgtgtgggaaaggtcatgggatcgtaagaatatggccgtttcggttgtcaagaaaattctcctgagtgtttggaaccttgaacaggggtggtgcatgaataaacttgaggatggggtccttggttttttcttttactctgaggatgactgcactttcttcatgaacaaatggccatggcttgtcaatggtatgcttttgaacctgaaggcttggccagtggaaggggaggtctgaatgtcggactttgacgttgctcgcttctaggtggagttccatggcttacccattcgttgtctgttggaagctaatgttcctattttggccaagaaggttgggcagttgataaaatcggatggcaagagcagggaggttattgttcgaagaggatttctcaggtgctggattaaagtgtggataagccatctgcaggattttccctcaaagcagaagcaaagccggagtcgtgggtccaattttttgctacaagcaaattgctccacaaatatgtcagttaattgagcaaatgaagaaatagaattattgggtaagtttgtgtaccactggagggttggccttaccagactaaaaccaaaccctcactacaagaaaggggaccttttatcccacttttttagttaaca

SEQ ID NO: 39173 - DNA, 2037 bp, Cannabis sativa
gccacgactaagccaaaaaatcgacgacaaatgacgaaggctctgctgtttttttcttcatttgatatctcgatccagctactccaactgtagatctgagatcccaaccccaacaacccaaagttgacatcacttgaattcttttttacttctctatttctatatggctcacttgctttttttcatgcagtcggacgtcgttgaacagcaagtttcgacgtggtgttgatagtttttaggtttattttgtttatatttattttttaactattatgaaaattttctaggtttgtattgagcttcacacccatattcgagctatgtattgaattttattgattcatgggaatatttcacttcaaaatgttatgtattttttttaattaatctataaatcaatttttatgttgagtgtatactgattagtatatccatttcttatttaattttacggaacaaatataattttttttgggtttattttttttattatatttttgacatttaattttggtttttacataaaaattgggataaaaagcctctttttatcccggtttctatgtaataaccaggatgaaaagaggcttttatctcagtttttacataaaaattaggataaaagacctctttttatctcgatttttatatgactttttatcatattccggtttttattttagcgaaaccggcataaaatgcccttaaaaaccgggataaaaagccttttttgtagtagttacttagtaaatattttggtgctttcattgagagctgaagaaagagatatgcatggcgactactggcacacgtccatctgaaagaaggtctgtgcaagaaaagaaggtagacctcctgacgattcgtcgaggtctggccaaaggccaaaaatgcgcagatccgaggtgttacccaaaaaaaatgttgatgcctcagtctactcgagaaaggtggaaaaaatgggtgcgtgagaccctaaaatgcctgcttcatcgatgttcgtccttagaagctcaaatctggccagccaactctccggaggcaagaccaactaccgatatcctcaggctcaaatcccccaccgtgtcatcatgcataaacagagtggcgtgagaggtacaggggccagacaacactacaaaaaatgtcacttttgccagcatatttttgtgctggcaaaagttagtattgcgctggtaaaatagaatttacttgtgatgtgttggcaaaaggggataggcaaatcaatgttagtattagaacttttgccagcataaaatgaaaagcgctgacaaatatgacttttcccagcgcgtaaatgcactggtaaaagttagattttagccactacaaatgtacgctagtaaaactttgatcccttttccagtgcagtttgcgaaatacgctggtaaaagtaacttttgtcagcgcaatagcaaactgtgctggtaaaagtgacatttcttgtagtgcaaaagagctatgacccgatgcagttacaatgattaactcagatagggtcgtcatatgcaacgactctatccaactagaaaatctagcgccaatgccgacatgagggctagatctgtcttctaaaaactactttccctgcctttcctacaggtggtaaagttgcacagaaacagatcctgcgatggcggctgcaaagaggagaccattagtactgtcgctggttgctgggctaccagtgagacctaattattgtactattggtagaagcagacaacttttgacaaagttttctccatgccattctcctcgcttggtgtagctacaaccccagagttacaccagagggaagcaactcgagacattataaacaaattagggagcccttgcgacattcttgtcccattggaagtccgagtttctgctttagcctcaaatgccctgtgcctcactgatggacacaaactgcctgggagatcttgaaggtgtaagcatgcaccagccaggcccttgctaggccctggagacgcgcgccaacatgttatccaagcgtggaagatcattggg

SEQ ID NO: 39174 - DNA, 3164 bp, Cannabis sativa
ggtcaacatcattatagacatatttgacatcatctacttgtgaaacttatacagctaattggatttccaaggaatttttttcttatacatttgaagtgtcttcatcatcctcatttgggaaatctaacacattacgtggggtgtaagcatcgacaagcttccaatcatctaaattatttaggttgagaatataacatatcaaatttagttaggatgcaagtataaataatttattttgacaccattcacgggcgacacagacgctagtagaaaaagcatcactttctatcttgttaccatttgtgtccaccacttacacttaaaattataacattataatccttcaagtaagtcaattaatagatttgttggagaataccataaaaattctaaccaccttaacccgacaccaaaatactactattttaggttttgtgattgtcatccctttcctcaattaggaatttaacactattaacaatacatcccaaataacaatagatagcgagattagatgaatttatgatggcacacatttcatctgatacttccctaaggttgtctggtgagagttgattgatctatcattgaattaaaaatataatcaatataaacatagatcatatttaatgacaaaatcagtacaaagtagtacttactcaagatttgaactaattgggaaactcattctcttgaactgtgtgaagattttgatcacccctaaatagtagctagttcatatactcactacacataagtatatttttgtaagacaaggttgtgaatgaagaagtgaataaagagcaattaaataaagtcaactaaaaatatcttacatgatatacttctccccttcagtaaaattgtcaaatatgtcccactcagcctttatcttttcttggattggcagagactcaatggtcctcttaccaatatgtttcctaacatgcttgaatatagagaattctctttcaggcttatttaggaagaaatcactatttaagtccgatccattgagtcaagtttaaacttttgaaaaatacatagaaaaaaaagcttaacgcctcattaaccacataagcctcacaaatagatccttccgctcgagaataatttttgacatattttttgtacacggacatttctcgtttaattggatacatccacttgtactgagctagtcccccaagtatcgattttaggcaaatgcatcactaggtaaaccattatgtcaaagcatgttagaggaaaaataactttaattttttaaagaatgtccaaaatacttttctcgcatgctctccaagtctccaacactcaatgtcttctaacacagttttttgtaaaacacacatagttcagttattgtatcctaaacttctctccttaaatatttctaatattgcccgacaatgagcattataacaacacatgatagtcatgtgactttagtccagaaatattgtcctcatttttactcacattcttctctaaattggcaataaattcgtacggaaactgcattgacttgatatatttacaaaattcacgttgtcctggaggactaactatgtaaatagtaagcaacttcttccaattcccattgcggtctttatataaccacatttcatgatgtattttgaggtcttccaaatcaagtcttgctttgtcagctgctttggacttgctcttgattcttaaaagagttccaagtacactattatttaacaaaatttttggaaactgattatatttagagcttaagaaaataagagataataaataacaaacaaatagattttttacgtggttcaggcgttaatgatccttagtccaggagtcaatagtattagcctttttgggcaagtttttacagtatgggtttctctattcctcttgtttctgttaggagaaagctctctaagaattttagcagagtgtctataaatgaaaaattgttctctccttgctcaaagaaaatgggagtatttgatttccaggcttgatccaacgattactcatcatccgtgctgagctctttccacacatcgcatcccttcgactggaccgacaaagctctttattaggagaagcatttaatttccaggctaggtgcgaccattgcatcgacttgctttagagctttcaggcaagattttccaacacacaactcttctctccctattcgacaagtaagtacactaacccactatttgaacttttggcatttcgtatctagggcaagaacttttgttcaggttaggtctaggaccgctcacgtgtcaaataggaaggtagtgtgcatgagagaaactctgctcttacacctgtcaactgagaaactaggttgctaggggccttaatctggtaattgttttccttccatccatcaatcatttcaaggggtttctttttccttcatttttgtgttggtagtaatgggcttgaaactggaccttcccacaagcacgattggacctatcaagggtgtgcttatctcttctgttgaaaggatttttctaggacatgatcaaaccgtggctcttgttttgacctttcaccttgagggagccttggaaacttttctatagaatgaacccactgccgaaaaggaccccccaacaggaattagaagagaaaaggaggtcaaaactctcccaccaacaccgacccataatgactccatttgggaaatggatcagaaaggcaactactttcgatcttatgggatgctagaagcttattgtgatgtcgctggccatcgcaatgttcctaaattaatgtagcatagactttttactatgggagaatctgcttctgttaatgtagagggattcagtgcatggagttggtcctacttttgtagtggcgctcacctctctctgagaacttattttacaaaattgattgcaaggatcgggattacccctttccaactgatccattcatcatataggcttttggctgggttgtacgtgttctgcaagataaacaagctagaggacctttcattagaggaaatcctttatttctacagcatgaaggctaaccccataaggacaaacaggaaaaagttgaggttctttagattggataagcaccgaattcttatggccctgttgttagtttataattagtctatgtttcgggtctttaaagttagc

SEQ ID NO: 39175 - DNA, 2033 bp, Cannabis sativa
taatatataaaattatcttttgttagtaaattataaatacgggcgttacagaaagtatctaagtctatggacctcgaggtctctgaaacagagacccatgaacagacttctccttcggttgatcccaacaccagagcacctcctcctaatacaacccatgcctctacttcctcgagtcaggccattgaaacattgtcttccgtagtggggaagactagttcagaattttccctagtttgggactgcctactggtgccaactcaaggctctcctcccccgatagggatataatcaatcatgggaatccagaagaaatactttcgaggatcttgcatcatgccctcatggtaagtttactgtattaatccatatatttcttcttttttttttccaccctgtttcttacattcatttgctcataaatctccatacttctttcttttctttttcctctcatcagggaatcttggagtagctcaaatacttggagagcgaggtccaaaagtcactagcctaatgcagcgctgtaattaaataatggaacgacgctcagcaagaaatcaactgtcttaaacaggaagccgagaggtcaaaaaaaggcttgaaggagccgagaaggacacaacgaccaagactgatgaaggcaatgaacttaataaggtgctcgcgaggaaagagaccaaactcgaagggaaagaggctgaaaccacagagcgatgcaacaaggtcggccttcgtaccgtttatcgagccttgatggcgaatcccaacatggacacaagcttcttggaggaggatgaggaggagattttggcttattatgaaaaggataggaaggaggaggaagaggccgaggcagtggaagagaaagacccatccaagtctcctacaatgtaggcttggttgttatttatctcctttttttattgtaaggaaatggccaactttgctttttttttatttttatttattttatctttttattccttgtacttttatgtttgaagtttgatatgtaattgtttgcttgcgttttattcacaatttcaataatcatatcgtgatcatgcacaaagtatttttggggtttccatcgctcgtaaatccttttgacattaagtagttaatagcctattttacgtgcgagcaatttatcatttgccatgcactcgatttgcgaggagtcattgattctgtcttgcaataatcagttattatctgctccaagcaaacttgaatgtatttttaatgaccttgtgactttgtacatatatttttattgcttacatgaatagttagatcctttacccatgtgttagatttaagtacttttttttaagacaccttgatgtctcgtttaatacattcctttagtgcgagtcgttagtattcagctttacacacgagttatgagttatatctcatttataactgttaatttttttttcccgtcaaataggtttctaatcaaaaaattataattgtttgatccctttctcatcaaaaaggtttgatcaggaagttataacaattcgatccctctctcgtcaaaaaggtttaatcaggaagttataacagtttgacccctttctcgtcaaaaaagtttggtcgagaacctttaaaaaagatttttttaagaaaaaaatttatttttaaagtggtgggtttacattatactatgtatttctagataaattcaggttaattatacgcatatacccctcaagtaattttaaagggtcgcactttataattacttttcgaaagaaatgattctctttattcataactgaagtttaaaatattacattagcgatgtgagttacatcattaatttattatcgatttaatctcacaagagatttcttggttcaattgcttattttatcaatcttctagaatcatctggttttgaaaaaatgggctttaatatccagggtcaatccctaacatattcccacaaggattttgatattcagggttaatccctgccatactcccacaattgtttcgatattcagggtcaatccctg

SEQ ID NO: 39176 - DNA, 2084 bp, Cannabis sativa
cttttagtcacaactaatctttctgactaatagttgttacgatgtcaccacaattagtcacaactaccctttaaccacaaattatatatcttcggtgacaacttttcttgtcactaatatttatttagtgacaagtacttttgttgtcactaatacttttttagccacaacttagatatttttagccacaatatttattattgttaatacatattaagccaaaacaaaaaattcttactaataattttttttagtcacaacaaaaatttatcactaatacttgttgattaacaattttttattgtcactaatatctttttaatcgcaactcattattaatacaaaataaaatatttagatatactttacggtagatattagataacgatgtcattagtaatttttttaattaaatgtacactacaactttttttcaaaattaagtcacataaaaattagagaaacaaactcaaaatctaattgaaataattcagtcatcaattagaccctttaatgatctcttgaaattcattccaaaaccaaagtaatatcaaatcaaactaaataatcaaatcatcaaaatatataatatttttcacagagctccatcctggaagatccctggtgatgagataataaagtatacatactcattcaacataagaaagagtgatgcccccattacaagggacctattgggtcaaatggttgtgttccaatgtatggcaagatgaaaaccaatgagttagtggagaagaccattagagaaataacagaggtgatcaagatgagcaaaaaaaacgacacttaggaaaaataagaggaatttcagaagccaaataacgtatcatagcttaggtaataaaataagcaaaaatttaagtaaaaacaagccattattgcatacaccaagtagaataggtcttttgaattccatgtataatcaaatcatcaacgacatcttttgtagacttaaacaaactatattattgcattcgcacaagaacaagagatcaaatcattcaaatcattatgtgaaaatgcaaaatcaagaaagaacttaactctttcttcatactcgcgacttagtgaattttgattttccatccaactcttatccattcatacattaatcaaataaattgtgtttagtaaaaagatcttttcctttgctgcttagaatgagtatcacacatgccgagaacaaaactaaaaattcttcaaacttgaaaaaaaaaaaaataatcactaggcattaatatagatatataagtacttgaaaggaaaaaataaatgaacacataaacacattagatataaaagtacttgaaaaatatagaataaaaattgaatttagcaaacatcataacaataagttttgctagtttacatttaaaaaatggctagtaaatgaatgaaagtaaccaaagatggactaactaaccacataggtgtggtacttgggatgcttttctaatttaatacaatctagagttggagttctgtaaatgttactctctattctaaggagtttaagagctttcactctagattgaaaatgcaactctcagttagaaccaatgacaaaccagttgagttgaggcccattcactctcgatggcttcaggattctttttgtaataaagatagactaaagtatatttaaagaaaagatcaatcaaaattgtttagtggcacaaaaatactgtattcaagtggggcatactattttgtttgatcataaggataaaaaagaatgggctaaggttgtttggggcaggttaagtactcccgaacacagattcattatgtggcttgttatgaggcagaggcttagaacaaaagatagaattgtgaagtttgatccaagtttagatcttcattgcctattttgtggggaagatagtgaagacaccaagcatttattttttgcctgtccttacagaaagaagtgtttagaggaaattaaaattcagctaaattggaaggtaaaacctgagaacattgctgaattgctttgtaagatatctaaagccaaaaagctgagcaaaataagaaaaagcatgttgttgtccatattagca

SEQ ID NO: 39177 - DNA, 1560 bp, Cannabis sativa
agtagtggcaagagcaattgcaggatactccgattctgtacttgaacgagccacaaccgtctgttttcgagagctccacataatgaggttgccaccaagttagacacaataacctgatgttgagcgtctgttgtctattgaacttgcccagtcagcatcggtgtaggcagttagttgaagtgctgcagatggtttgaagtgaaggccataatcaatggtgcctactagatatcaaagaagccttttgcaagcaagccaatgttcattggtggggctcttgagaaactgagagagcttgttaacaacaaaggaaatgtctggccttgttagggtcagatattgaagtgctccaattacacccctgtagagagtggggttgtccataggagtgcccatgttagatgacaatttggtgttcggacacataggagtaggggttgaagctgctgcatccatgttggttcgagccaacaaatctgaagcatatttggcctgtgtaagatagatcccagacttattttgagtgacttcaaaacccaaaaagtacctcattgggccaagattttttaaagcaaactattgatgcagttgggaaatcagatgatgaataaaagtggaatcttcacccgtgagtaatatatcatcaacatagattaacagtagagtaagtttgcctttctttctcagaaaaataaagaagtgtgagtctttgagttgcaaaatccccattgcttaagagagtgtttgagcttatcaaaccaagcccgaggggtctgttttttagccataaatggcttttgtgtagcttgcaaacatgagaatgataattatgatctataaaaccaactgattgtgccatataaacacactcgtgtaggtacccatttaggaaatcattattaatatctatctgctgtattggccaattgtatgtagttgcaagagaaaaaattattcttattgtgcagggcttgattactggactaaaggtctcaaagtaatcaaggccaggggtttgttggaatcctttggcaacaagcctggatttatacctaatcacagtgttgtcaggattgtattttatcttatgaactcatttattatcaaggactgtcataccaggttgaaatggaacaagactccatgtcttattcttgacaagggcagtaatttcactctacattacaccaaaccagatggggtcttgaagagctgcattaagtgtcttgggttcaatgctgatattagaggaggttgtgagagctttgggcttatgaataccagctttggcccttgtgaccatgggatggttgttgacaggtcgagacacaatggatggttgagtctgtgttctgtcaacaagttggataggtggtttgggttcatggtcatttgatgtttgagaagtggtgctgacaggtggggatgttggtactgtgggaatggttgttggtggaatgggaaatggttattggtgtagtggtggtggggaagtaggaggagaatgaagtggggtagtaggtgggtttgtagcatgtggaggtacaacaggtgatggtt

SEQ ID NO: 39178 - DNA, 2527 bp, Cannabis sativa
tcaagaaactgcgaccttatttccaggcccatagcattgaagttttaacgaactaccctttgagacatgttttggcgaaaccagaagcaatgggaagattgttaaaatggtaagtagagctgagccagttcgatatcaggtacagaccaagatctgcgatcaaggggcaagccttggcagatttcatactcgatttcccgagcactgaagtggcactcatagaaaagaaaattgatactgatgtaccaaatggcgaaggatggactttatacgtcgatggagcctccaatagcgaaggctccggcgccggcataatactcatcagctctagcaattttaaggtacaggctgctctaagatttgaattttttgcgtctaacattgaagctgaatatgaggctttgattgcaggattaaagctcgctcttgaaatgaagctcgagtacttacaggcttttagcgactcccaaatcgttgtatgcaggtaaacggagaacacttggccagaggcgggcgtttggctaggtacctcgccataacatgcgagttgctgcagaaattcaagaaattggttgtctgtcgagtactgtgtgctcataactctcacgcaaacgctttgacccgcttggcctccacaagagaagctgaattgctcgatgtaattcctgtcgatgtattaactcacccaacggtgaatcaagatgaagtaatggagatagatactgccaaaggagttacatcgatgactccgatagtgaattacttggaaaaggagatcttacctgaaggcaaaatagaagcaagaaaaatgcgatatcgagcttctcaatatgtcatatatgatggcacactttatcgcagaagcttcagccaacagctgctcaaatgcattgacggggaggagtgtgattatatcctccgtgaagtgcacagtggtatctgccgtaaacatattgggggtaattctctcaccttaaaaatcatgcagcaagggtattactggccgacactacgacaagatgctttcaacttccctaagaaatgtgacaagtgtcagcggatagccacctatgtcaaccaacctccgagccacttgcactccatcacaagtccctggccctttgcaatttggggcatcgacttaatcagagaattacctaaaggaaaaggccgagtcaagtacgttgtagtcgcggtcgactacttccccaaatgggctgaggcaaaagtacttgcaactattacagcggccaaactacgcgagtttgtctataactccataatctgtcgatttggcattccttacaaacttatcttgcataatggaaatcaatttgattgtaaggaaatgcaacaattgtgagatgagtttggaatgaaaaaggcattttcagcagtctcttatccacagagcaatgggcagatagaagccgtcaacaagataatcaagcatgctatcaaaggaaaactcgaagagcgtaagggggtatggctagaagaactttcacaagttttatggtcatataacacaaccccccgatccacgaatggtgatactcctttctcgctctcctacggatgcgaagccatggtacaagtcgaggttggggcaggttcctggcgaagagatgttttcaacattatccagaatgaagaaaaacaattgctccaccttgaccttttagaagaaaaatgcgaccagactcacctgaaaaatgcggcctattagcagcgtactgtgcgatattttaactctaaggtcaaggagagaattctgcgagtaggggattttgttctttgaaaagtcatgccaaacacaaaaaacccgacacatggggtttttggagacaactgggaaggaccataccttatcgctgaaaagattggcaacgcaacatatcaacttgtagaactagatggtactgcaatccgaagagcctgaaatggtgaaaggttgaagttttattatcaatagtactcgcagtgtgtcatttgtactcgttatgtatttatacttagtcaatttatctacataaatgttctaagtatagggggcatatagcccactcactatgtactattgattaacttgtttttttataaaagttgagttttctcgagctttaaaaaattcattttaccttagcgttttttacaccaagctgtaaataaaaccgcaattgaaatagcaaaaaaacacgagtacgcgtgtactgcgaaaaacatataggataacataaataaatattcccgaagggatatatgttgttcgaaatattatagacaataaagataaatttgtttaagtacaaattgcgagtacccgcgtaccgcttaaaaagaagtttggcaaaataaagtattcataaaataagtaaactaagcatttggcgcagtaggagttgttggaataatggattcatctgcgactttgctagcagcctcgtcagtgacttcttcagcattcgcaacttcaacgtcctcagggaaaatatttcccccacctccttgggtctgcgtaggtgac

SEQ ID NO: 39179 - DNA, 2508 bp, Cannabis sativa
aaagaaatctcgagtttctacaattgaaaatctaaatcgttcatgaatttagaaaatgcaatcttccattacacattacgaaaccggaaaatgcttattcgagaaaatgaaataattttctagtattgaatcacatttaggagaagaatcaaagttctctacaacttaagagttacagcggagaaattgattaattaatgagtgttaagctccctctcttttggtcatggcagaaggtatttttaactctctttctctctaaagtcttttgaaattgataatggagaatgaaaccaggtgaaagtggggccacaaaatgttgtctccaatgggatttggtacatgggctcaggaaaccagcttctttgggtttaagccactaagttggtagtgtcaaccataagcttatgggttttggggaacattagtagacattgcttttaattcgtatacaccttgtacaattgactctcaaatggtctccttttctcatttggttcttctaggcctctgcttatggctaatcaagaacaattccaaagcacaaagtttcatttgaggccaaattactacaattatttgttgggtaaggatgcagaattgtttttctttttgtgcttgttttccttttctatgtgttttaatgtgtaataacataactagaaatattagttataaggtaggtaatatgaaattaaagagtaatctacactttcaaaatgcaaataaattcatttagatgagatagctctttatatttgtaatttccattcacaattacttgttatgatttgtagttacttatgtttagatgacaattttatattctcactacactaaggtaattcttgttattttttgttttgattccacattttttgagccttataaagactgtaaggttgaccttcttgctccaaagttgctcattatccttaatttgggaggtttatcactaagtgtttggaaggtgattgttccactctccatgttttattagtttccttatcgttttttcctaataatcttgaacaatccaatacatgttgaatgattcgcacttggtcatcatgtgttctagtgaatgattatgaggtaaaaaaatagatgtttttaattaggataagtttgttctttagtgtatttctttctccaatatataccgaaatgaaagaccttatatgtactcaatactttcatgtaaaaattgttagtaaattataaattaatttagttttttttcttgcagaacattgagatttaatacaatctagttgattaaggttttaaattattttaaattattaactagtcctcatattattatctctaaactgtttgcatagaatagtttcaatgtaatgaaacatgagtctttttgctgtgttagaaccctacagaaaagtaaagaaagtagaatatgtcgtgaggtaactaattatttttattttcctttttctttttaaatagattttggtattgacagaggaataatatgacatttgtttcttatcttctcatacatatactagtattttcacaactagaagaattttgaaaagaataatggttgtccaacatcttttcctacaaatggaatggaatcttttaaaaggtatgtatacacacataaaaataatctataaaattaatgttgtgaaaaactaatagatatattgtaattaataataaatgttctgaaaacagccacacacaagatcagttaaggaatgtcttaatctgttttatttgtcacagttggtaaaacaactttaagtattaacattaaattttactattaatcctatgcttcttgtgataattaagcattataatgttttagattttattttctaattgatacttaatgtgttgttaagcaggacatgttgtaggagttgcagctttagggagtgttcaagtttggattaagttttgtagattcatgagttgtttgttgaatttgaaagaagaggaggataatgaagttaaaaatattggaaaacaagtaaaagttttggaaaaatagctttgttgtactacaatcaaatgttgagcatcactagattttgcttcaatcagatcaagaattaatgtattattattttgcatatcgcctagtcattggatatgtaagtaactacttctgtttgttcagatagttatgtctgtttcctttgtttttttctagttttaactaaaatagatcatgaacaattaatttttttagccaaaaagtagtaatgaaagacattgccaatgcatttattgaattaggcttatatattatagcttaaaaagtaattgatatgtgtataccctaccatatagctttttttgggttttttttttttctttttctgaatcaaagatgattttattcataaacttagagcataaacaatagtctttaaagcaaaaggagcatcatgctcactgaaagtacaatctgacttcaaacaagaccctcgagcaacacagtgagcgaccttattagcagatcgttta

SEQ ID NO: 39180 - DNA, 2117 bp, Cannabis sativa
cactattcgagcagcaaaagacaagtacctggaactccaaattctgatacgagctgtcatcttctctgccaggatagcgcactctttgcttgatatcttcctttcacatataggaaccccaaggtaagtaaaaggggtatctggatggttaaccccaggcaaccaacatcctatcaatttcattctgtggcatattgctgccataaattggagatttagatggattaggaaaaagtctcgatgtagctgagaaaagtttcagtccttgtagcatgtacttgacacttcttaaatctcccttagaaaacaagagtacatcattagtaaatctgagatgattgagcttcaaacccctgcatctctcacggaactggaaatcatatttttccacaaccttcttcagtattctagtgagatattccatccctagaacaaagatcagaggggacataggatccccttgcctcaatcctttctgtgatgcaaaaaagccatgcatttgtccattgaacattaaggagaacttgggagttttgatgcatatcataactaattaacaagttcagtattcatatatgataaatataaagtttttaagggtctcaaccggtatttgcttgatattggtcaaagcgctgtcttgaaggttaattttcctggctgctaggtctgccttcaaaagctaacttgtagtttgttcaagcaatctacggatcctggttccaacatcttgaaccactcctcagtggaccctcctaatgtcagcaggaaacacaaacacttcgcatctttactgactctcatgactatcattacgcggttaaactaggataagtggtcactagggtctgtgtctcatgtgtacatcgttattttaggcattttgaaattctttgggacctctgcttcaaggatgtttctagtgtagggttcctggtcctcacaatcagactctatcctttcagtggatagcgagttcagccaagattccctcatttaaggtgcctcccgagactagtattgctcatttcttcctctctaattgattcctaagatctccgtgtttggcattgagtttctgtctcaaattgataggagggtttttccaactttcccccatctctcccccagctcctgatgcatagatatgcatttttcgatctccccgatcctgagaaccagcattttcccttgggaacctacccctttgtagaccttttccctttgggaaatcagggcaaaatttttacggatcctaagccttcttatttttttggggaaggatgtggggttcatccttggtgagccttctatgggataccgaatagggcttggctctcgatttttatgcctttgattatttggtgcagactcttctctcattttgtctagtccaatgggcttgacatttggatgcacgtggatgcccgttgtttcgatgctcttttgcatagagaccattatttctttcttcttcatgttctgttctttttgttcttccaactcggcttcatggtcatcagctttctgtctcaaggccatgagttcggtgtaactgccattatcatatttgtcctactcttcttggttttcatcatattctatatcttttgtttcatcttgctcttctacttctacatctattcgggaagccacttcttcttcatctgggcctctaggaccccgaggtggacatggttgacgtgcatggtttcaagtctccaccatcgtagtgcaaagttacttttaatatatttatattattattttcttacgtagggatttctatagctctcaatgaaagaacaaaaatattgattaggattttcattaactaattaatgaaagctatgtaaatgattagaagagagttaatacaaatatttttacgtggttgcgacattaatgagccttagtccatgagtcactgctatttaatacagtgatgtttctttacaaggaatgtttctttacaaggaatattttacactatttaatatagtgatgtatttatagctttatgaagagagcaaaaaaggtctctattgttggaattgttcatcttcgacttgcacaagttcttagattcaaataatagggcatgcatgtttgcatag

SEQ ID NO: 39181 - DNA, 3814 bp, Cannabis sativa
gaaccacaagccgtatacatattaatcaatttcgtacgcaagaactcgtttttctcgagcccattgatccgaataaacgtatggatttgtttaccgtggttgagagacttcgtacggacgcaagcggtgataagggcggcgaatgtggtggggttgacgggaatgccttcgtggttgagatagtccaagatggtgatagcctgggtgagcttgttttgcctagcgaaatttctgaatgtccttgtaaacgaaaactgggtttttgttgtgaagtggtaaagactctggaaaagcgtccttctcagtgaaaaacggcggcgttttgggtttcctttggcgcttctgcggttgttgctgctgttggcctggaactctccgaaacgacgacgttataggagggtttggcgggaaaggttggaagtgaagtgatatgggtgaagaggttatagatttcatggtctgaattgttgaaccataatctttcgtttggagttggactaaggaaaacagaataaaaagactaaaaaaaatgtagtaaaagattttttttttggtaaggtttatgtaatgttaatttttcaataattacggtaatatttttatttttaaattttttaattataaaaataataatgtgttttataactaattttattttttaatttaataaaataaaagtatgatctgtaaattttatttttatttttatatgttgattttatgtaagtcgagttcgagatcgggaccgggggtgggttcaagtctagggtcaggtctgtttcagtttctaaggtttaagttgagatcgaagtctaaaatattgattaaaaaattttgaaagtaattttttttttatttttaagatttaaattcttaattaaaaaattaaaaaagtaaaaagaacataattaattttaaaaataaaaaattaattaaaaaatattactaaatgcaccgcgtatcaccttaaagtaatcttttcattattatcataaatttaagcatcgtgctaatgtacaaagttaatatgaatcaaatcatttttgttgtttaatataataaaaatatttctatctggtcaaatatgaaacaagcaaataaaaatgtaatcttttttaagtatgaatttttacttaatttgatcattgtgggagttgggcatggctgtcctcaaaagtttgtcaatttttggtgtttttgtgactcataagatccaaagcccaaaaatatgaggccttggatttggattaaacttattcattgcgcttcaaaactttataaataagttattttaataatttttattttacataaaataaatatatttaattatattagtttttttcattatttttccttccaatacatattcttaaaaattatacctttcaaacaaaataaattatatttaaaaacttataacaaaaatattaaaataaaaagttatgtaaaattttattgaatgtggctaccctgctccccgccttaccagtgtcgtggctacccttgctctgggtgagttaaaattgaatgcagacactgccttaaatgaaaccagaaataaaattagtgttggtgccattatccgggatgcccatggtggtattgtagctgctctttcgaaaccaattgttggtaactttacttcacacgagatggaagtgaaggctatgttccatagtttaaattggattctccaaatggagttaccaatcacacaaataaagactgacgctttgatgggttcgaatgctttaaataataattattctacaatttttttttaaagacttaataatagatatttatagccttttatcttttctccttagctagagttgttgttgtacatgtcaagcgtacaattaatatggttgtttatatgttggttaaatatgctttaaaattggatgaagcttacttttggtttgagaattttcttctattcttgtaattaatttatgatagctgagtattttatctaaaaaaatatcatattttatagacgcatgttattacaacctagtgtatatggaaatttacgaatacaaagtttggttaatgatgaagaaacatataaaagtttttttttttttttgagtgtagcgtaatggtattttacaatcatatattaacttaatagtttaaagtggaacccaagacctttccctttttcccaaccctccctcaccactaagctaacctagtggcttatataaaagtttattcaatttttgttgtttttttaattttttttatgaataaacttcataaaacaaaccaaagtgaaaggctttactgctctccatttaaaataaaacaacaagaattcttaaagaggcatgcaagcaaacttgtggacataatgacataatatattattgtaagtaaatgtaacatgtcatgcatgtaagtgacaactcaaatactttggagttatcgaggacactttctcatatcttaatatatatattgcaaatttagtcccatgcaacaacaaaaataattatatatatagtctcatattattagttagaaagtgatatacaatacaaacaccaataatattagattattattttgtctctcgtttgagggatccaaccttattttgtgacttttgactcactactacatcgatatggagcttgattgagttcacaagtaatgagttacaactaaactctcaaattcttttttcatctcattttgtaaaggtagttataattatatttatatatatatatatatatatataatatccttgtatttatgtttataggaaaatatatttcatcacaactcaagttgggctgggcaataatgaacaatagttcataaatgaatgaactttgggagatcaaaatctctggggcatttttcattaagcattagtggtacataacactattgatatcttaagaatatattttataaaaaaaatattatattaaattaacatgatacttaattatatccatagctatttgacatcttgaattgtgtaaaatactactccaagatgagatgtctgtttttattttaatttcttacatttatgaaaaaagtatatatttggaagttctattatttagttatatataaattaattttgttagtaaatactaaatattattaaaaatttacactactcggatctatactcctagctaatgtttaaaaagttttaaattatacaagataaataaattagttaataatgtaatatataaattagcttataataactgagtattgacattgtgaaattgatccaatatcatctttactttctacaatatataatatttaatatatggagaaatgtttaaaccgatttttttattttattttttattaaaaatatttaagaaaagagagagaaaatatataaatcgcaggataggggtttttatgtttttttttttaattaatttaatttaggtagatatttgttttttttttcttcattaatttagttaaaatataagaacatcttttttaactgatcagttacaacgaaaaatttataaaacttttttacgttcatttcccaataaaaatttaaagaataaatttttataaatcaaagaaaaaaaattaaagatatctattttggacattttataataagtcaaacatataattaaatttttgaagtgtagttataattttaaggagtgtgaatataacttccctagattctagattgagagagaagagagaggaatccatgttttgaccctcattaacgcacagtggttttgtaaatattaaaactaagtaacttttatccctttttatggggttgtga

SEQ ID NO: 39182 - DNA, 3049 bp, Cannabis sativa
aaatttgcttgtggacatgttagcaaaacttgcaacgaaccctaagatcatcaaacactgagtagtcctaatttgtcacctatagaagccaagctttgaagtgtaggggtaaatgtcatagtcgacaactctcactcatggatggcatgcatttacaatttcttgaatttaggagagcttcccatggataaggctgcttccagaaaggttcagtattaagcttcatgttatgtgatcatggatgggaaaccttatcgccggggactatcaatgccatacttgaggtacatcgctggattagaaattagcaccatgatccatgagattcatggtggcttttgcagagtccataattcctgaccaagtttatccaagaaaatcctttgccaggagaatttttagcccacaatgaggaatgactgcgtagagtatgtaaagaagtgcgagcaatcccagagatatgctaaggttttgcgtgcaccccctactgagatctcactcatgagtagcccatggtcttttacagtttggggaatttacttggtaggatctctccccacaggaaaaggagaagtcaaatacgggatagtctcagctgattacttcatgaattgggttgaggcagaaccaatgaatattgtcacatcaaagaaagccctggactttgttattaagaacattgtgtgtcgatacagacttccttgcaagatcatctttgataacagaaagcagtttgacagcgagcactttatcaaactttgtgcccagcacggaatcgtgaagaacttttcagttgtagcctggtcgtaggccaacaaacatgtagaagccataaacaaaatcttaaaaacaacattgaagaaaaagctccaagcccgtaaagctcattggccagaggaacttctgcgagttttttaggcctatagaaccataaagaaaacttctacgagacacatgccatatgcaatggcttatgggtgtgaagcagtaatccctatggaggccacgatcccttatcatcaacaagacacttacgacccttctcaaaaccattccctgctccaggaatagttggacttaattgaagaactctgagaacagtcacaggttcaacttaaaatgtaccaaggcaatattgtttggcacattaattccaaaggtgaagagtcttacatttgatgttggagaccacgtcttgagaagagtattcgtagctttgcaagaattgggactgtgggtacttggcccaaattgggaaggcccatatgaaatacttgaaaaagtatgccaaggaacttttcagtttaaattaatggatggatcgaggggcccactattgggatggagcattcgatttggcattgggatcttgagctggcacttctgaggtattctggggcaaaggatcattctctcctaagggaatgtctatgatctttagcaattgatcttcaccagctggtgcattctcactcccttgggcaatagtttcagcctcaccatccttcacgaccgtgaccccgtcataagtatcgagatactcatcgacattgtgcttgtaaaccttgactctttttgaaaactcctcagcatccttacacaaatggttatagatgtcggggatactttcctcaaggtgagccagcaaaagaatattggctaggttcacgaaattggttagggctcattggtgagattattgctcttcttgatactcttccctctctgtatcaagatctatgcgcaaagaggtgaactctttcaaagcatttccccggcctcactaagaaaggagtttagtctcctgcaatcaatttattgttttggactgtgccttaattttcttgtccttctcctcaacgcaaacttttagagttatgacctaatcctctatgagctttatcagtgcctcgaccgtgttgaccttggcctccaaccctttgatgtattcattttcgttttggtgtttaagattcctggttactgcctagttttcaaggtctgtcttggccttcacaacttcctcaagcttttgagtgagagtggatttggcagcttctaactccttaagatgagccttttatttttccttaatttgggatgtgaaggatgccttatactcattgtacttttgtaagtacttcttatcggctattgcgtcagcttccttgaaatgtcattcaacctctttcttgatggcttcaactcagagttctaggtacttccgagcagtcaaggaaaggtccagctggaccactattggctgcacctccttgcaagttttctctgtgaagaatgccatctagaataaattgaataagtctgggaaaagagtgatgttttgcactaagtgaaaaggaaaaatgaggtggagatgagaaataacccagccacttattgcctcaaagtgttggccaggagcacgaggtcaagctactgccaatagcccacttctcaattgttgaatcggtcaggttgaccttaatgtccttgattgcatcagaaatgaaggatactaactccatacaaaagcaaggaactaactattttcccatagcagggaggtctgttataggtgtcgaagtaccccaaattaaaaatgccctctgtgatcttgaccctctgcaagcgtacgcttgatgtatgcatctgcctttcgtacctactccaagacctcagcccaaagatgagtgggctttataagaaacttaaatggtaagggcaagatgtttggaaagctagcttagttgggttagctaaggaggttgaggcagagattacttggtttcttgagatttggttgggtggtttagattggttgtattgttgtttcaactgaatttgggttaaagtattattggtcatgaggaccagttgcctttcatttgctatgtcgattggtgatagagttgatgaaggtggttgttggatttgggcaggaaggcgtcccgctttggcagatctagatccctgaggagctaagtgcctggccctcttctcctcccttctaggatgagggcagtgttggcatatttcagtaatgcatcca

SEQ ID NO: 39183 - DNA, 2735 bp, Cannabis sativa
agacccatagtcgatctcttgatcttggagtcaaacaagaacccgaagcttgatcaagatctggacccagactccaacctgggacccgaaaccgaaacttgaaaaagaacatgactaggaccctggaacatgatcggaacactgactaggacctggacctggatcgggaccgagaccgtgacaaagacctagacctggaccaggttctgtaactagatcaacctagccccaaaactcgggcttaggccaatccctaacccggttctggacccagacaaggattgagactcgaacttcaacccaaacccaaactcgggactcgatcatagacccagaccaagctcgtgacccaaactaggattcagacctgcacatggcacgaacccagacccggacctaaataccgacccaaacccagaccgggatcgaaacacgagacctacaccaagacccaaacttaggacccagacttaggacccgaacctggacccagactcagacatggacccagaccgggatccgaaaaacccatacccagactcagactaagactcgaaacctgaccctaacatggacccagacccagaaccaaacccggacccagaatcaaaactggaattctgactaggacccagacataagaccagaataaacccaaaccagaacccaaactcataccagaacctggaccgagaccttgactaggactgggaccgtagacctgggactcgaacttggatcgagacacgaaatgggacctggacctgacctggtcctaaaccctcaccaggacctgagacccgtgacacagacaaggatccagacccgaacaaggactcaaaactgaatccagacctagactaggatcaagacctggacccgaacccagaccgtgacctggactaaaaccaacactcgggacccaaacccgaaccttgacacaaaccaggacctaggaaccggactttgatgggggacctagaccacggacctatgccctggaacccagacccagatctaaatctgggactcgaaccaaaaccaggacttgacctagatctgggaatctgaagtcaaacacaaattggaccggaaacatgcccgggacccaaaccatgataggaacctagacatgaacccatcctaggactgaacctgaacccggacccgaaccctaaattggacctgaacctggaacccgaaataagacaaggacccataataagacccaaacatagacctacaacaagacccgaactcgaacccagatagggatcgacaccaggacttagatcctgaactaaacccagactcacatcgagatcgaaacctgagacttagacccgaacctagaccaagacccaagaccctaacccacacctagagctcgatccaaacctagaccgagatccagacacgaacccaaactcggaccaagactcgaaccccgacccgaactcgaacccaaactcaaactcaaaatcgcaagtcgaactggaaccggagtacgactaggatcaggaccaacacccagactcgaagccaaacccaaataaaaatctagactgagacctaaacccgaactgcgtctaggacccaaacccaaacctagatcggacccaaacccagactagaatcgggatacgaacttgggcaatggaactaggacagggactgaagacccgaccccagacctagacatgaacttaggacccagctcgtgatacgaccaaaatggaaccagactaggacccgagaccgggattcagatattgacctagggcttgtactgaacccgtagttggtgtctggatctaggacccagccccggacccaaacctagaccaggacccggacccaaactcagacacgaacccagtcccagacccaaacttagacccgaacccgtaccctgtgacccgaaaccaggactaagccctggacatggatccgtaactggacttggacctagagccgaaactaaaatcggaccaggacccagactctaactaagacctagacccgaactgggacacggacccagatcccaacctcaacctagactcgggacccgaactcagacccaaacatggaactagactaaagacacagaactgaggccgggacctagaaccgcacccagtcttggtcctaaacctaaactcagacctgggaccgaagacttgaacaagaaccagaccgggacacgtgacaaggattcaaatctgggactcagaccaggacctgaacctggaccaggacccaaacccggaccctgacccagagccgggacccaaaattggaacctacacaagaactactagactaggaccctcgaacaagactaggaacgtgccaggacccagacccaaacctagaaccaaactcagacctagccccaaacccaaagcttgaccggatcgggcccagacacggtcgtgtacatagaccgagaccgagacccggacccagacctagacatgggactcgatcccaaacccaaagtttgaccaagataaggatccgaatacaaacctggacttaaacccagaccgaaacccagatcgggattaaaactcaggacctatatatagagcgagaacctgacccacccacaccgagacctggacccgcatccgggacccgaactcggacctggacctaaacccacacctatactgggatccggacctggatgcagacccgaacccaaactcaaactacgtctcagaccc

SEQ ID NO: 39184 - DNA, 2459 bp, Cannabis sativa
caataaaagtgtggttttgccagagcttggaggtcccaacagcaatgtcaatctaaatattaattaatttcatggtaaatttaagaacaaaaaaaaaaaaaagtaataaattagatttatgatttgtcataaaagaaagaaaaagaaggacaaaataataattagctttaattactaactaaccttcctggctttataactccactaacatcttgaagaatattaagatgtttctttttggtattgaaaataggcagaaatcccaatagacccttcaaaaaattgaacaaataatatgtgagaaaaatatcactgctaaaataaaactaggatatgattagtgttaattaagtattattataattattattacctcgacaatattaatggagaagttaataaatgaaggcaaagctctacttccaacatgaatctctgcctcaacattaacatgttcaaatctcacttcaatagttggaacatcaagtccaaccctgtaattttttaacaaattagaattatgttataacaataataacataatatatacatatatatttatatgttttaatatatacctgtctatacgatttttgagcttgaacaagaacttttcattatcttcctcagcaactttaacaagtctctcaagtaaattctttctttctttaaagccaagctcatgaatatcaacctcattagattcacctttggaagtagtaagaattcctttcctcaaacgagaataagttggaagcttttcaagagcagcccatttaagggcatcttcatcatcttcttcccttgaagatttggagaaaacttccatgttattgttcctccataaggaagtgctaccatttctcatactatttcttaaactgttccctgctctgtatacatcaccaccatccatttttaaccaaaaacagagctttttactctcaaacttactccaatgcgcctaccttcaatatattatatatgacactacatatatttatatatatatatatatatatgtgtatggtacgtaagaaattaaaacttggaatgatctacaacttgtcaagcactcccgttgatttatttgtttggctgtagtgtctgcgctcttcacataaaatcttagttaagtaataatagtataataattaagttatctaaactttcacatgtactaaattatattttcgcggttaaattttcactaaactattaagattgttaaaacttccgttttatttagttcaatttcataattaatgggtgcataacgtgacaattgtctatgtaccaaattttttattgatatgaactcaattatcctctttgaacttatgttcttaaatccaacaatgttaataatttggaagttatttttaaccccctaaaaaattaaaggcacaatttaatagtttggagaaaaatattataattaacctacaattaagttattaattatgtgtaactttattaaaatcattaaacattatgcttatttaagctctcactctctcttttctttcttgataaatcaatgctatgaacttgatttaaattacttaattatttatttttaataggtttaatgtcacaactcacaaacttcttttgtaaaaataaatgaaaaaaaaaaattagcatgtatgtaggtgtaacccttcagtaaacagagcacgtcaatatatgggagttgtacccacaaatttattgatgcacttcaatattaagaaaaaaaaattaagtttaatcaattataaaaaaattatttttaacatttttttttcaaaattttctttaatcacattattattttgtgttgatttcaataattatttaattttttcatttatatttttttttttaaaaaaaatcttgtataagtttttaatttttgttttacatgtatattttcttaaaatatgagaaacaagaaaaaaaaattaaaaaaaaaattatataaattaaagataaataatttgtgtaaaataaagtatcgtgcaaataaaatttttcttcatttaaaaaaattaataaaaaacacttaataagaaaataaagtgtaaatctttttagttggccagttatgactatttttattttattagaggagaaacagtaattttgatatattttttttaaaaaagtaaaattattaaattatatacttttgaatatgaaaagtaaaatgtataattgatttttttttttaaaaaaaggaaaatgtaattggttctagaacctcgtcatgattctattctatgatcaatatgatgaaatcggaagtcaatacttttacttttatacatatttgaaaattaacgaaactcgtcaacatatatactcttttgttctctttcttatctcaaaagaaaaaataaaataaaataaaataaaaggtcctcccaaagtatggttcaaaaaacacgtggtatgacattatctatttttccaat

SEQ ID NO: 39185 - DNA, 1490 bp, Cannabis sativa
ttttgtcataacacctttagatcagattattattaaattttattttaataaaaaatcagttcaaagtcttatttgtagcattttgaaaaatataagattcagagagtctaattggtattttttataaaatacatagtttaaaataatatttaccctattataattatgtattggaaaataataataaaagttgatataaaaatattagaaaaatactttttgtgtgaaatataaatattagaaaaatactttagtgttagataaacaaataactaaaaaagttctaagctaaaatggggtgtaggggtttttagctcgtctatcgagaagaaaattaaaattttaactattttttttaacttctaagtattataaagcatctattggcttgacatgctgtacaaatatagctcaaatcaaattgaaatttgaaaaggaagctcaagttaaaaaaaaatagaatatttggtgctagtgctaccaaaccatgtacggctcagactcagggctgctcaggaaacttgtatttctgctcttcattccaggaattctgggttggggacctgaaggtcattacgccacttgtaagatcgcagaggtgagttatctatctttatatatacagtgtatataatattattgtacacaaacataatgtgtatatgtatatatgatgattagggttatctgagtgaggaagcagcggttgcggtgaaagaattgcttccagaatcagcaaaaggggatcttgcatcagtatgctcgtggccagatgatattcgcaaacaatatagatggagcgctgctttacacttcgccgatacacctgattatgtctgtaacttcaatgaccacagtaagtctatatcatctctcatcagtttttttaaaaaaaaaaatgtgttgccaagtaagggttatttagtgtgatcttactgtactgcactgtaaaaattgcaagcagtacttatttgtaattgattatatatttaagctgttaatgtttttgaaagcatttaagcagtgttaattttttgatgaatttaaatgtaaaggacgtaccgattgaaaataatagaggtcacggatggaatatattttaaaagacggaaattaaaagcaaaaataaggaagaaagatcaataaatacaatgttataaaacaaaaaaatttcaagctagcccaccaagtttttttttttgcccccaacttttctttccaacaaggtaaattaaaagaaaatattaggggaactaataagggtgaatcaggctgcaaattaagctcaaatctttggaaggttgtcgtcagtaaactaagcaaattaatatctcgatctctacaataattataatatataggagactgccatgacccttctgggagcaaaggtagatgtgtaactggggcaattttcaactacacaaagcagctatctggttatcacaaccccaccctcgaatcaaaatgtgagtatctctttcttcaat

SEQ ID NO: 39186 - DNA, 2770 bp, Cannabis sativa
ataataataataataaaaataaactggatattacaaatatacaagtgctaaaatttaatattttttttttctttcccctgtatttgtttaacttgagagcttataatgttttatgttattctactattcataggtaaccttacactattctttgctctaaatttgttttattagtttttagttttaaattattttttatgtataagtatatgtatatatttaaaatgaataaatatattaaatatagaatataaaagaaaataataaaaaaaaactaatgaatgatgtaatgtaataatttgttgtaaaatagataaaatataattaatgatgtattttaaaaaattgagaaaaaagttatgtgagtgccctaatgaataatcctaagaactctttcttgctgacttttgtagccaaaggattctcataaaaaattaaatttaatgatttataatttattagatggcactgtacaagcagtaattttccaaaccacatcacaaaaaggtggtgtaaacagttttcaccattcacaaactagtttaataatcaaatattataataaataaaataaataggattcttacctttaatttatgatttagagttttattttttgaacttttctttattgccaatcctgtaaattgttgtaaatattctcattcagttacattttgcccattcctctagttacattatgcctatattttaaaataatttacttacgtgttacagtttaaaagtttaaaaatcaaattacttaaaatatgtattcttttttttaatttaagcgtttatattacatgggactcgaactcaggacctctaagacacacatccatctattagctcgagtggttgaaatatgtattcttataattcatcattatattattatttacacatttaattttttgtctaaactcttaaattgagctagattaatgtatcaattgcttcaataattgagttaatgcaagtataggggatatttgcataggaactttttctttgttttttttgataaatactatttattctattaaatttcactagatcataaacaaattaaattcataactaaatatgttcccttcagttagcggttgatgcatctttcaaagatgagtgaacgaatctagttcagtatgggaagtccaaactaagacaacatcaacaggtaacaggttcaactcttgaggcaaagttggaggccattcgaattcccttgctgtgggcaaagaacatgaattggactagggtgacaattttctccgattctttggttgtagttaatgaatctcatgtctgattagaagctttataatgtatttttaatttaactgttttacgtgtttgtgaacagtctaactatttgatgctataggaatgcggccaatggtgtaaaattttaaataatttatgtcgcatggactgtttgatgaacacccaatgtagtagtactctctaaaataatgtagacatcatgtgatcagctttacattacattattgttataatgtaaatcatttttcaaagttaggaggaaacccatgatatatatagccattataggtccttgaatattcaaccaatatatctctgtagtagaagataaacacacgactttggacatctagaacttgattacttttactgctaactctcacaataacttgaggttattaagtgggaggtcaccatcaaagatgtggagccagtttatgatagtggcaatactagtagtggagttccattgtcaaacattttggttgtgaaaaaaaaaaaaaaacagaaagaatttgaagataaatgagatggattgaaagtatcaataattatccatatttatatataagatttgcaaaaacttgtttagttccagatcaaaacatatgtgaatgaattagaaaaagagaatattttttattattcctcagttctatcatctttatatctggctgttatattcaattaaaaaataaaggctagatgttatacgaatactgaaatttagcacctttacttcatcactaatagtgtaaaaattattgttgatcaaaagataataatgagtattttctcctctaaaagtggtcttaactcaaaattaaaatctacacatcaccaaccatgtgaacaaccccttaatagttaaattaaatagtatagaatctcctacagaagctgatttcacagacataaatttaatgtaataacacaagtttttccgactaagctcaaatgaataatcaattagataatacattaacaattaaaatcaacacaaaattaattaaataaataattaaagaagcataagtagtatttgatccatataattaagaactcagctgattaatccagagctagttaagactatacatacatagagtacatgcatatattatactagttcatcaaaagcaaattaggaaggaagtactatgggttctgaggggggccaggggctcgatgccttacaacaaagtggtgaaacaaggccagagcgttttcagtgacctgagccacattcaacacctttgccttaaccgtagccttcatcttactcattctcacacccgcaggaaactcatcaagacaagtggttgcatcagtcaaagcagagccaacccaagtctccacattccctatgtgccaatccacgttctctctcgtggtttcttcacgccccaattggcggagctccttgatggacatgctgagttgatccacgcacatgtctatctgttccaagcagtcttta

SEQ ID NO: 39187 - DNA, 1567 bp, Cannabis sativa
tagaccactcagaattctccaaatcattacctccaagtgataaataccatacctttggtagaatggtgagttggtaaggtattggcccctcaagagaattgttgaagagactcaaatattgaagctctgacaattggcttatctccactggaatttctccttcaaaataattgtcactcaagtctaacaaagtgagcttggtgagattaccaatggctgttggtatcgaaccagcgagtttgttgttgttgatgttgaagacggtgatgttaagtaatggagcgaagttgaactgatccaatgtcccattgaggtccatgttggagagatctatttgcgagatttctccaataaaatcatcacatacaacattagtccagttgcaaagattgcccaatgttattgttggaccatgagttcagagaagatggtctcaccaccaagctgttcttccatcttataagagcctctgcttgtgctcttggtgaggaagcaaccttcaatggaagtaatgaaatcacaaaaatatgaagaagaagaagaagaagagagaaacaagttattggagctcttttcatggtgttgacttgatggtcctaataattttctgctctctctcttatatacatatatatagtaataacacaatgtatgtatcatgttttcatcttataacttattagtattaaacacacatttatatatacaataataacaagctctcatatagtaataacttaactattaaattagtatcacgttcttgattctcaaaagtaagaatccaaactctctttttatgacatttttataataaatttaaatcctacacatattaattaattgagttttgaccaaaattctgtagatggtagttccaaatcgtgattcaattaccagaaaaatattttgggtaattgataagtaattagcaattgccatcaaagcaaacatttgtattaaaatacatccaaagccgccactcataatcaataatttacagaaattactaataattaacaggaaaaaactataaacatcacacttctctgtcacacgcatagtcaaaactagctctacaatataaaaaaaaaatttaaaaataagaacactttgaaaaagttcatgcaagcactaattattaacgagtaaaatagtaattacctggggcatgtaaccgtaagagaattagttaattaaaaaaaaaggaagaaaaactcaaattttcttgctctctctctcttcccttctagcctagcaagaacctggggtttttggtgtgatttggaggaagtgttaaaatcaagtggtgtaaatcaaaggtaaccaatatgtatgctctttgtgatttgtacactaccaacactagtacggtagcagtactgagtgtattggtatagtgtatgatgcttaaagagtacaatacaacattaccaatactagtacggataggtacggagtgtgtgtacgtggttaacacttagggttactcgaggtacggggcaaaccttatcaacactcgtacagtagcagtacgtagtggatgtggtacaatggtcgtacctta

SEQ ID NO: 39188 - DNA, 2937 bp, Cannabis sativa
  modified_base (1870)..(1879): a, c, t, g, unknown or other
aaagattacattgaaatggaattttagtcattacctgctaactaagggggtcgaacctctataaaatccttgtcttatttactttactgttcttgttgtaacacgtagaaaatattagattcatatgaccccgctgtcgattgatcactttttaaggtcaacagtaataactccaagaatagaatataagagcaaaagaccattttgccatttacttcactaagaagtaacctaaccacttaggggtaaaatggtccaaaaccataacctcgataaaaccctacattccaaatgtctaattatcttgcctcgctaattcaagatagtcaaccgtatctaagtgactttgttggcactatcatcgcattccattgttaccaagcataaaacttaaaaattataaaatttcacatataacatatattttttttttttggataaataatggaattttattaatggcaatcaactaaataattacttgcaatccaatcaggacatctttctattggagacacgaccaggattagaattaaaaaaaaaatgagctaaataatcagccgcctaattcccagatagtttgagaaaaaattaaaataaaatcagatgaaaaagattgtagcatcacaattaaccttaagaacacctatattctatttcatctaccgcttagaagacacaacaatagaaattgttgtagtaggttcattaaacctcgtagcttgagcactcaactattgtgtaaggtacgtaactgcactactaacaaccccttcagtcacgaagaacttgttattctcaactactaacaatgatttgatgggccattgattaacaaataagaaccaacaacgaaacaaacaaaaccatgtcacacagacaagactaaaatactcaaaaccatgtcacagagaggcaagacaaaaatgctcaaaactatgtaatagagacaagactaaaatactcaaaatcatatcatagagataagactaattatagtatcgaaagtcgaattatagtagcaaaatacaatcctaaccaagccacacctaagcccaaggaaggtcagcgggcctggctagagaaaaaagataacctctaataaatatagatttaggaatgaaaagccttaatttttctcctattataaacccttgtgccttctatccatatataacatatttaatacacctagaattcaaatatatctttgtaattaaaaaattatttttatatggcctatttctgataataagccctataaactactaagaacacataatcataaattaataattaaattattaattttctgttaattcttatgatttaattatacggtctatcacatttaattatttaaaatattctttatcttaagtctaattaagttttattattttattaagtaacaagtcgaagagctattttacacggcttatgatcactaaacaattaggaatatagtgaatattatgaaaatattaaatatgttgaattattattattttttatggaaaaaaatggatctattctttttgactttgggagaggggattgtggattcgaacttgacatcttctttttgtgagcagaagtgtggaaccattaaagtatgactatgactaaaatggatctattgaattgagcattgttattggtaggagtatacgttggtcggtttggtcggtttatggtacattttattcaacccaatataaagatcgggttacaaaaatataagtgcaacccgcccaattaagaaaaaagaaaatattaacccgcctaataaaattgcttgatttggtcgggttagcctgtccaaaccgactactaatatttttctttttatttttacattcaattgttnnnnnnnnnntaattgtaataataagacaaatatatatacagattgaatttcaacctatttcaaaaaaaaaaaaaaattaaataaaccataataaaaaaaaatatatattagtttcaattttgtattttttaaatagtcatataaattagataatctataaatatatataataaaaacttataaaaatatataaaaatccctcataatcgggttgatcgagttagttcgggttgatattattttcaacccgtccaatataaagattgtgcgagttatatttttgtcaggtttttcggtttgcatttttgtcgggttatctcaatttggtttggcgagattatttggtttggacggtttacaaaaatttatgtacaaccctagttattggacaccaatagtatatgagactcgatacttagttacactaataacggtatcatactgaggagggtattttttttattgaatttgaaccatttaattttgggaaatttacatgtgaatacgtgtttatccatttaattctaataataacttgatgtgtctaattattgatataaacgacattttataccttctctttaatttaaactatattagatgggctattaaacatgctgaagggattaaggtgaagggattgatgagggaatttgatgacgtcagggagtactaatgtgatgtgcatcaattatcttttttatattatgtttaattttatttgttcttttttgtgaacaacctattttttttttactctacatatatattataaatatttagattcaaaatattttttctttcctcactttttttatatttaaattttttttttttttggctacactaataattatttagtctcaaaaactaaaccattataatctactattttaaatgattattttgatacatgaaaatcatatgttttttcactagccgaaatcaaaggttattttagtttcgttcagatttttttttttcaaaagtttcttttatatttagtataccaagtagacaatattcaaattatgaattatactaaataaaattattttatgtttatg

SEQ ID NO: 39189 - DNA, 2081 bp, Cannabis sativa
ccagcaatttcttttttctttttttccttaaaaaaaaaaaaaaaaaaaaaaagaacttcttttgttttttggttggttgttttaatttttttagtactagcatggtttataatttgttgactcataaggccaaatatcacttttgttagtacagtttgttattgtgttggtaaaagtaatttttatcagtgtatcttgcaaattatgttagcagaaaggccaaagttttaccaacgtatatttaaaaatttaacttttagtagcacatttacgtgctgggaaaagtcacgccagcgcttttcattttgtgccgacaaaagttctaataccaacgttaatttgtcaattcctttttgccaacacatcaaaaatagattttattttgctagcacaatactaaacttttgatatcacaaaaatatgctggcaaaagtgacattttttgtagtgagcatctctaatcaggggcaacacttatagttggcaaaagtgtacacatcttcctaaaatattttttttttctcatccgcataagatttgataacttttcatacaaaaattaatccaataattaacaactccaaaagttacctactatagtcccacataccacactttctttctctcggcatcttcataaaccaaaagaaaagtagattttccttcatcattttgcagccaatttagctaggaaagaatcaagggaaccaagattctctatcttcaaatcatccaaggaaaaactctagctctttttttttaaaaaaaaaaaaaaaattcttaagttttaagctaggtgtgaggagtgattttgaaagatggttggtgtgtgattccagagggtttagggattgatttctagtgttaaatatgactgtttgggattggtttgaagggaaatggtcggttttggcaagtgttgagttcttaaactcaaacttggctcaatatggtaatttttattccgttgagtttcgggatgttattccttgctgaattatgttgtaaatgatcttattaggtgttataccaagtttggtagcatttgggattgattagaccaagttatggaggtttgaatattagaaatttcgggtgtctgttttagacgttttatatacggttataaacgagctctgcaatatggtatataaattagagccaaaatatgtattttattttagggtattttcaccacatggttttggtagaaaattctagattgttttgtacgtgtattaggcagtattttggaatagacacttatcggtttatcactgttgtgacatagggctcgggattgtcgtgtattctccactccgacgaacttgaatctagattgaaggtaagaaaagtacaatattactacatagcatgccatgttgggatataattattaatattatcatttataaaatacgattattatcggttgtgatacgattattatcgtttataagacacagtcattactctaatttaaaaccgttgttaggtttcttactcatcgattgtctcattaagcaatgatagttacatttggttgcctaattaggcaatgataaaaagattatcttattaggcaacaatttaaaaatcacctcattagataaagggggttgatagttactttattaagtaacaatataagtttgtattactaaccagtatagatactactgttggttgttttcaatataagtggaatgactgttgattatagatttgagtatgtgatcatttgattctgattacttgagtttaattgataatatttgtgtattgttatgttgtgatattatgcaattgattttcttgctaagtctttgtgatttacgggtgcaggtaagggataggaaatatttggacaaccatgagtcatggatcttctccagcaaatttacatattagcttatccggctagtggtgccgaccaaaattcatattttaagatgttctaaactttaagtgtattttattacaatactataatatcttttgtaatattctttaagggggattctcgatcttaaaagtattataccaagaaatttatgtatcaaaattagttaacacctttt

SEQ ID NO: 39190 - DNA, 2034 bp, Cannabis sativa
tcattacttaaaggagtaagtatatactgtcctctctcaacccccgtttactttggcaaacaatacttccaacttgtggatgagtattctactcactctctttattgcttcagttactgcaaaaggaaccatcaagaaggttaggcagtggacctagcggaggggacgagatcaaagctcataaatggtttcgaaccattaactggaagaaattggaagccagggaaatcacaccaaagttcaagccagaggtgaatgggaaagattgtatagccaactttgacaagtgctggacagtaatgcctcttgttgattcaccagcatccacaccaactacaggtgagtatttccaaggttatacttatgtagcaccaaacccttggctctcatctgattcaatttgatcctcccatcaaaaagaacagaagataaaaagatatatatgaaaggggaaatgggcacatttgaataaattatctctccatatgattcatttgtaacataacttaccttaaaaagtcttatcataatagctcatgtacattttattctagtctgactaagatggttaaggagtcttgaaacttgttattcatgaatgcaatccttggggattgaactttcatgaacagcacagatgctatgcttgcttcttgttgtattagcttttttgttttgaaaaggttgttgtattagctttaacttggcagaaatgtcttgaagagtatttatccttcttattctttgacccaaatcaatcaagtacagtagttattagcagtagaagttaaagttacatctctcaaattagatgagatgaaagatcactcttttctttcaacatttgcttctctttttttcgccgcccaactcttttcttttgtgccacaaaaactcataaaagaattatctttatacttatgccttaaggattaagtagttgttcaaattatatttgtattactggataggacaaaaagtctttccctacctaactattactcaagtagaattttgaactttaattttctatttgtgtgtgtgtgaggcaaaattacctcatgtgctcttttttgtttttttttttgtttttttgagagatcacgttctctctttttttgttgcatattgtttattttttaagtaggtgctatgtaacaaatatgatagactgaaaaaaaagatattgtgtgattttaaagtccagatagaaatacgtacacttcaaaattcaaattaagaaaatatgtatttgtatatttagagctaatgttgatatattcagtgataatagtttctatgcatgtaatccttttcaaaaaaagaaaaaaaaaacactatgcatgtaaccacatttgctatagtttggggaagtgttgcccacaacaaaatttgaggaccaaaattatacaaagataacagttcaggaaaaaaaaacaactatttctgctattcgatattataatcacacttttttttttgttcatcttaccgttgagttaatcaaaatgccttttcaatttacaccactgttctaaaaaaaaaatataaaaaaatcaaaattactttttagagaaaaaaaaaatccattttaagtatgttaaaaggaaaattgaaatatgtactaaaaatatgaaatgaattaactacgttaatacattaatttagaaatattttttttttctaaattcgtttttattcgaggtatgttctcaaatcaatatttttccatttttttccttcttctaccttatagctaatagagttgaacatcaggcgggttaatcaaattttaggttcgcgagttttgcgtttaaaaaattgttcattgacccgatttgtaaaatggtttacgatttgcgggttcaggttgactgggttggtaggatcaacgtgttgatccgatcaactcttggtcaacattttatttttgttatttaatttattttgtttttttatcacccaaactctttatagaaaaagaaaaacatttgaaattcaaagtaaaaacgtaaatctaataatacaaaacta

SEQ ID NO: 39191 - DNA, 1413 bp, Cannabis sativa
acgaaggggtgattcttttatcccaagtttgtcaatgagaaaccagaaacgagtgtgtgtgagactcttagttaagcaatcagcaatttgatctgaagagggtatgtagcgtatgtccagttccttcttgatcactttgtctcgaataaaatggatgtctatctcgatgtgcttagttcttgagtgataaactgggttagaagcaagtgcacttgcactttgattatcacaccaagtaactggaacactaggcaacttgaacttcaactctgacagcagtgactgaacccaagtgatctcggctgagacatgagccaaagctctatattcggattctgtactcgatcttgagacaaccgattgcttctttgaagaccaagcaatcaatgtatctccaaggtacacacaataaccagcaaccgatcttctatcatcgcgacaacaagcccaatccgcatcagaaaaaccttcaagtgttaatctttcaatgtatccaatgtgtagcccatgatgcacagtacccttcaaatatcttagcacacacttagctccactccaatgacttgtggtaggagcttgaagaaattgactcaatttattcacagcaaaggcatgtcaggccttgtgtgacataaatattgcaaagcacctatcaaacttctgtaggcagtggggtttgtcaataattcaccatcatttttcgacaatggtttgcctgcaaccataggagtaggacatggtttcaggttcaccatgtcatatttcttcaataaatcactgatatacttgccttgagttaagtacatccctgttccatcacgataaacctctataccgagaaagaaatgaagctgtcccaggtctttcaaagcaaacattttgttcaatttttgaacaaagttgttcacttcagtgatgttgttgcccgttactatgatgtcgtcaacatagattagaacaagaatgattacttgttctgtcgagtagatgaacagggagttgtcagccttggattttctgaacttccaactgttaagagtgtgcttcaatctgtcaaaccaggcccgaggggcctgtttcagcccatacaacgatttattcagtttgcacacatagtcaggcttgtctttgtcttcgaaccctggaggttgcaccatgtagacgtcttccttcaatgttccattaaggaatgcgttgttgacatcaagttgtttaacttcccagtttttggacacagcaagtgttaagacaactcgaattgttgctgactttattacgggactgaaagtttcactgaaatcaattccgggtctttggtgaaacccctttgcaacaagcctagccttgagtctttcaagtgttccatctgcattccatttctctctatatacccacttgtttccaaccaaatta

SEQ ID NO: 39192 - DNA, 2139 bp, Cannabis sativa
  modified_base (366)..(370): a, c, t, g, unknown or other
  modified_base (708)..(708): a, c, t, g, unknown or other
agcaaagaactatccaatcaacccaagttttaataaaaccaataaaatttaatgtaagcccaaataaaagtctaacacatagatctcaacaaaatatttgaacctaaataattacaagatgataataaaaaaaaaaaaaaatagattaaaatgcactttaaaataccaaaaaaagaaaaaagtgtattagaatagaatgtatactatagaattactcatatatacatatgtacatattaaaaaaaaaaaagtcaacttaattagttaatttacttaattagaatttttttttggagattatttcacaaatacacaaaacaacaaaaaatttacaaaaatacatttttacggaattttaaatatttnnnnnatttttttaattttatttacataacatacggtctttttatgttatactcttgttgattttttgttatctgttattttttgttgttattttcatgttaattttatgtagttttttttttcttattttcgtattatttttatgaaaaaaacgtaaaattgtaaaaaaaattctttacacgtaagaatataatttttttaccgaaaatgatgtcttatataattttcctatttcttttttatggggcatgcttttctgccttggcacttgtatttaattagaacattgataagttataatttttaattttttacaaaataataaatctatatatatatatntatatatttatataaaggagaagtatgaggcggtgacgtggcggtccaaaatcacttcaaatagcactatctcttctctccttaattctctcattttttaattttttactaattttataaatactaattaatcttaaatatattttaatatatatcataactctaaatttaaattaattctcacgtttttttttttttgtttgaaaaggatatttttttaaaaaaaaattaatatatataaatatatatgtgttattaattaattaaaaatgtgaattgaaaaaaaaaaaaaaaaactacacacgtgtagttattatttttttaaatgatttttttttttaaaaaaattatatgtattattaagttattaatattaagttattaattaattaaaaaaataaaaatttaaattaaaaaaaaactacacgtgtagttatgatttttttattattataaatatcgataataatcaatatattctaaaattattcaaaattatttttctctctttcctgaattttctcaattttaatattttattaaagaataaagggattttttctataataaagggatcttattaaataaccgagtattgacaaaaaagtaaaaaaatggtaaaaaatgacaccaagtgtaaaaaatattaaaacatcaaatataatgaatcgtaaattttgttttagacataaaatatcaataaacatatataccttaatgtttttggttttttttttttaaaaaaaaaatataataatcaatatatatagaggaaaaatatgaggtggtgacatgacggtccaaaatcactttaaatagcactatatcttctctccttagttctctcttttttaattttttattaagtttataaatattaattaagctaaaatatatttttatatatatcataactttaaatttaaatcaattctcacgttttcagttttttttttgtttaaaaatgacatttttttaataaaaaaattaatatatattattaagtttataataatatgttattaattaattaaaaaataaaaatttgaattgaaaaataactacacacgtgtagttattatttttttaaatgatttttttttaaaaaaaaattatatattattaactttataatattatgttattaattaattaaaaaataaaaatttaaatttaaaaaaaaaaactgtgcacctgtagttatgatttttttactattataaatatctattatgatccatatattctaaaatcactctaaattatttttctctctctccttaattctctcaattttaatattttattgaagaattaatctataaattgatattttactattattttaataatttttctataaaaaatgataaatctacaaattaatttttactattttttaaaatatttttctataaaaatacaaaatat

SEQ ID NO: 39193 - DNA, 2723 bp, Cannabis sativa
caaatttagaaggattgtaaaaaaaaacaaaatacattttacaaaatacaataactacccttaaaaaaataataaaattttatttttaaaagaataattttgtaattttactgatcaattttttcttcatccttcacacctcacacctaagaccaaacaatacaaaagatattaacagtcctctctatctctcttactttccatcctctttaacctctccatccatcctactctccctccatcccaccaaacatacccttatattactacttaatttacttcattgaaggaaaaattagtgaacgttattaataagatgtaattttctcagaaaaaattggtgattaaatcggatttagtctactcttggttaagaagatgcgtgttttacacgtcccataattgtgcgtggaaaccacacaactaaggttcgcagcagttgggaaattgagccggaaaacagagtcagactcagacagagagtgtgggacccatttctataattattatatttattttattccaattataccgtacttttttttattattattattatatatttgagtctttgagacaggtcagtaaaccaaggaaagttcttatgagataacaatgctaaactcacctgacttctgtttcttttactgtcacagctcactttatcaccgttagattctctttcatttcatttctttctgtcacataataatgatattttagccgtcatctaatcattgggctgtcacatttcaacaaaagataaagtaaaaatctctattaatggatttttttgttttttttcttatcttgctgttgataattaattaaggtagataattttttttgattatttgaatttatttttgtttttctcaaactaaagaattcaataatttaggaaatagtattggcctatttgtaccctttttttttcaattattattttatataaaaagaagcaaaataaataaataaaagggcaaagtgtaggttttattgatttttttctgaaaaaatagaaaaatattgcaacattttatgattatttttttggtgggtgctggccaaaatatttaataatatacactttacagtaagaaaatgctgatatagtgatatataagaaaatgtttaccattgttttaagagttgaatactctatttttagaaatgaagtaattaataatgacattagaattttcaggtaattggattatattttactttgggattgaaacttcaatctagcaaaccatattattagattatgtacatatatatgtaccatatttaattaattatgaaatatatatgtacctacctacttccaacaaatatatgttatattaattatatatatttatatattgatttatttatgtagaatgagctaattcgaaagcaaccagcagcaaggaatatgaactggagatctcactactcacttactatataaactttaagttaaggatatttatgtagaatgagctatatatattatatatacgaactcaatagggatatcttaattaagttaattaagttaagctatataaatccacgtagaataattatttttaaagaaaccttataaattttattttaattatagtcgtacgtaatagtcggatcgagtatccctctcttcttttgcattatatatataaataaatcaattaaactatgtataatataatattaattaatttatcataataaataaattaataacaatatcctacacttgattatttatctcaaatacgtacttacttataattatcccacttattgatagaagctcttcgacgtaataagagcatttattttttaattaatacttaattacaaaagaagctataggtggcatgattatataaagaaaggatataatgtgtttatatataaatataataaatgaaaaggaaagtcaagaacgcgtggcgagacttattcaaaagtcaatgaaatatatttgcatgcatgaaaatattgatgattatgatttattatatacgttacgtccttgtcaaaaatcacctatacctaactacttttatcatattatacgtattattattcgtatatatacgtaccttgcctacatatttatgtgacaattattgactctggtatcgtgtaaaactaactaattaataaccttccattcgttagaattgagattaaaaaatgtccattccaatggcattaataaattcatgatcttttgataattagtattatatatataataattctaccatacacataataaaatcaaagttatacatgtgtatatttttaggtacttaaccctaagtttgactcattaatatatatatatatatatatatatatgtatacgactagaaaactttttaagtatttttttatcgatatttgagtgaggacagatactgatcatatggacatatcctgttaccttcctttttattattcttcatataaacttgattttacgtattttattaaaagaaaaaaaaaaatgagaacttcttaaataaagcatttttaatttatgttactttcacatggcgaatttttaatgatgcaggattcatagcatgatttgtgtaggccttagaagaaggttgtttagggttattgttggataaattcccatactattgtaaagttacaaggaaaataatttagacctctttataaagcctcaacagaccattataactcatagagtt

SEQ ID NO: 39194 - DNA, 2237 bp, Cannabis sativa
tgttgtttccaaatcagcctagtgaagctcccctacagaccttaatatagtggtgagttcttggacctcttccctggaatctcaaggatccctctaggacgcaggtataatctcgtccctggccgtcaacacctcctgatggttttgctccataagggcttccctcctctgggcttcgtcccagatcgccttcttctgttcttttgactcctggagactcttcatcacctcctccattccaccgaactcagacatggtaaacccatggtcgatcaatgtcttagaaatgcgaccggcctctgcagcaatctggcagccaacaggaaaaagttagagtctggtataaaaagatatataggaaatttaaaaggtgagaagttactgcagtaagggctacactcatgtcctgaattcggtacacaggattggcaaaagcgcaagctgtatatctcttggttggaagttgggtcagatcggcggcaaaatggctcatcatttccgaggcaaaaggagccaagttaggccccacgaagtgcttaaaccagtctgtcaaaggatttaaattcaaatcctagacatccctgacatactcaccttgaaaaggtccatcttaagcatccttgagccacttctttagagcctccacctcagcatcccccttggtaagctcccccaaggtatagttgtgtttggcgatgcgaagctgaaccctttcctcattgggatgaataggagtcaaaataatacctggaggtgcatgatactcgtccacttctaaaggaattcccgagtcaacactgggaccaggagtgtccgcccaccttggcttcttagaaggctcccgctcaaccatcttacctttgcgcttgtggtcaaggggaggtattatttctcctgcttcttcttcttcttccttatcaatcaagacaacttgatcttcgagggttttagcagaaggtcctcgtggagaaacaaccatgttgcgtggctcgggtaagttagtttcaggactgtgtttgtgcaagggcatctaggatttcatccataggtttcgatgttcaaaaataaacaaaggagtcagaatattatcaaaaatcatccatgcaagaataacacagtgaaactagtcctaccctgatggtctaattctgccttagcaaaggtatatatttaaggcaggtgtcgtcatcccctagaaagatattcgagagaaggaaccaacttgaagtcaagtataaagaatggtctaagaggatcggtgcggggggaccagaacccatccgagaccaacccaaaaaatgactaaggtttgaaaaataaaaacttttggcgttgtcaccacaccatgaatggggcattcgaaacctatacaaccgtttatcaacttccactggccttaggctagcgtaatcttgaacagaagggacgtgatgaataatcaatggggaattacaagttccaaaagtactggcaccaggagccccagagttgggaatcaggaaaggtaacttagggcaaatggggttttactccttctgagcttcctccaaaaggatcctcctcgaggcggcttgcgcattagtataggccaactcatgttccttcttgaatttgtacttattgtatttgtcttctgcataagaaatgatgtcccttcggagcgccttctcagtctcaggattctgaatatgggggcaaaaaaccttagacagattgaagtcatcctctgattggttctccgagatcagcttgccctccggtagttgacggtcgtgaccaagtctcctacattcaactcttccttattataactagcgaatacttttgcatggtttaggaaaagttcggtgggagcggtgcggtgcatgggtggaaccttgacccagtcagtgagcagatccggacgttcaaaggctttgaaactggaggagaagaaaaatcaatgacgatattcctttacatttttctaaaaattaaaaggcaccagaccctcattggcagggtgggcctggagttaccatctttaaacttgtccccttttttggggaccgacaagagttcataaaaatataaaacctcagccggactgggcggggcccagttcttggcaacatagaaaatgtacaagcttgagagcagacagtaggcttggggaataagttgctaagttgtaaggccaacaaaaattagaaaatctacaaaatagtcttggagtgggagcatggctccgaacataa

SEQ ID NO: 39195 - DNA, 3434 bp, Cannabis sativa
cagctaatcaagattaacaacccagaaaacaatcctaactaactatattacacgtgatctaaaacatctatctgatctagattccctttcaagactcataaaaaatgtccagttagtttagtaatgtcttgttccgatgttttgttttgtttttattttttactattaactgtaaatgcaatgctaatgtaaagcattgtctaccagttcatttttgtggatgatttatgtacaaaaaaaagtactgaaaaaaagaaactatgatagtatattacattacacattgatggagttgaattatttagttcttttcgcttgtggtgtttctgaattgacaataacatctacgaacatccaatgcaaaacccaaaacatttgattttgacccaacttgtctctatcttgcatagatttcaggagcttaatcatgagtattactctttttcaacatgaatcatggtttagtgattttagtcttctagaaacttgatcaagtgttttccctcctctcttctaggctggcaagatttgtgaaatagatgaaaagaaaaacaaagaaaagaagcaatttagaggttgtttggcttcataacttaaaaactgttttttgttttttaaaactgaaacccatttttaaaaactaatagaggccgtttggcaaaattttttaaaaacagtttttcaaaattgagttttaaaaaattagaaattagaaaacatcaaaatgtagtttttaatttttaaaaatattttttttttgtctaacatattatatttaatatttttgctcgcatattcggatcctagacccgaaaccatgcctcaactcggattggttcatgtcatggtatggtgttaaaatattaatttttttagttagaaaaaaatctaaaaatagttttaaataatttgtgccaaacaccattaaatgtttaaaatgacaaaaaactgttttctattctcacttttaaaaactgaaaactgaaaacacagccaaacaggctcttagctattttatgtttagagaattttatgtcgtataatagctgtcttgttgctatttgcaattttttagggttgactaaactttttgtatatgcatttttttctactttggttagtagaaagagttattcatattaaaccacaagattataatattatgcttacaccaacaaacagctcaaaaacacatcaatgccttccaataacgtataattatgatttagtctaaatatttacatgacatgataattggtactgatacttgtccatatcaacactgtttagtttccaactttgttcatgttgttcttgctatgctttggtttggcaaatgtaaggcatttcgagtttatggttcatcccttctattctcttcttgttgaacaaacagtataattttgatgctatactttacaagtttaaaataatatttatgtaaaccctattaggatagcaccagaattatactgtctgtatagtaagcccataaagaatgatggggccattcactgggtccaagtagatcgatcaatctccccataagcaaagttgaatgaaacattcaggtccaatagtcactttctcacgactaagccaaacatgtggttcctgaaggcaatcacacatttagttgaaaatttaactaattaaataattttaaatttctccaatgcacaaaataaaaagataaaaaatctgtattataacctcacaaatgttaaatggaaacaactaacatttaatctcgaaatggaaactatagtttgtgaaatagaaacaactagcatttaatctcaaaaaatagaaatcatttaactttgaaatacaaactataatttgtataatggaaacaactagcatttaatctaaaaaactggaaacaatttaatcacaaaatagaaactatagtttgtaaaatagaaacaactagtatttaacctcatatatgtgaaatggaaacaactattataaaaaaaatagaaacaactcacattgaaattatagaaacaatttaacctcaaaaatgaaaacaatttaatctcgaaaaatagaaaccatttaacctcgaaatggaaacaactagcatgtaacatcatatatgtcaaatggaaacaactagcatgtaacatcatatatgtgaaatggaaataaatataacagaaaatgaaaacaactagaatttaacctcgtatatttgaaattaaaacaaatgtcataaaaaatagaaacaactaacattgaaattagaaagaatttaatctcgaaaaatggaaacaatataacctcatcaaaatgaaaacaatagtttctgaaacggaaacaactagcatttaatctcatttatgttagatgaaaacaactggcatttaatcttgaaataaaaactatagtttattaaatggaaacaactagcatttaacctcaaaaaatagaaacaatttaatcacgaaatgaaaactatagtttgtaaaatagaaacaactagcatttaacatcatatatgtgaaatggaaacaactattataaaaaaaatagaaacaactcacattgaaaatagaaacaatttaatctcgaaaaatgaaaaccatataacctcgaaataaaaacaactagcatttaacaccataaatgtgaaatagaaacaaatataataaaaaatggaaatgatttaacatcgaaatggaaacagctagcatttaacctcgtatatttgaaattaaaacaaatatcataaaaaatgaaacaactcacattaaaattggaaataatttaaccttgaaaatagaaacaatttaacctcgaaaataaaaataatttaaccttgaaatagaaacaactagcatttaacctcatatatgttaaataataaaaaaaatatatatatatatcataaaaaaatgaaaacagctaacattgaaattggaaataatttaacctcgaaaaatagaaacaatataacctcaaaataaaaattatagtttctgaaatggaaacaactagcatagtttttgaaatataaacaactaggatttaatctcaaaaaatagaaaccatttaatttcagaatgaaaagtataatttgtgaaatgaaaacaactagcatttaatctcgaaaaatagaaacaattaatcacgaaatagaaattatagtttgtcaaatggaaacaaatatcataaaaaatgagaaacaccccacattaaaaatagaaataatttaactttgaaaatgaaaataatttaatctcgaaaaatagaaaaccatttaacctcaaaatagaaacaactagcatttaacatcatctatgtgaaatggaaacaaatataaaaaagatagaaataatataacctcaaaatagaaactagaaactatagtttctgaaaaaaaaaaaaaaaaaaaaaaaaaaaaaaaaaaaaaaaaaaaaaaaaaa

SEQ ID NO: 39196 - DNA, 2606 bp, Cannabis sativa
  modified_base (1902)..(1909): a, c, t, g, unknown or other
tgggtactagctcttttatgggttcctgcacgataaaacattagaggaactaattgacaagttggctagtgagagtacttacaggatgttccctaatatagtgtttaggtagaagttccacgtctaagttcgcgttgtattcgccagactagtatgcacctttactgttatcttgtaacatggtgcgaaccttctcagtttggtctgaacatgcttgctgcaggatctttactatcaaggagtattcttcagggagtaattctcttacgaagaatttctctcctcgatctatatgttaacaggcgtggtaactttttatgggtagccatgctgctttgagttggcttggtctcttcttatttccaatttgttaagggatcctgctagcaagatgttgtttatctcttgatcactgtagactagaagtatgagagcagactactgatggatcggggcaagacaaggtggccagccattttggagcattgcttggccatttggaggaggctatggccggccgagtcattgattctatggccgacctgcttgtggaggtggtggttggcctggttgatgtctctatggctggccagcctgctgaggccagggtcggccaaccttttggaggtcaggccaatgctatagtttgatcctatctacactcgattggctttaccctccggcatgattgtcgtagatcctttgtgcactatatcaatagatatttaacttctttcttagtaatgcttcgtagaggtggtgttgggataccacttctatgtgttaggttgtgcaagattggacaccctacaaccttccccctagtctctgctttctggcaaggtttttctttggaggtatgctgctgtaggtgtatcaatatgttggttgtctagcatgtctattccttttgaaagaaagaggcttagttctttaaagaattgagcaggtaccaagtttgccttggttgtcaaggcacaactctgtagtcaagtgagtgcattggatgttgtgtcatctttgggggcttgccttttagtacagcctttgagctgacttaacagctcaggtaggctatcatcttcttgtattgagctgtatattcacctaggacataacctacaactagttgagagtcgtggtgcatgtctaggtggttagcctgcacttcgtgtactagcttgaggccagcattcggagcttcatgttcagcctcattgttaaaagctttgaaaatgaccttgttatctcatgcatcagttgcccctgggtgccctagggcccatgccagcatcagccaggtggtcaatgcacctcttgggttcttactcccgcttcttctctggctcccacttttctcttgaactttgagagatttgtggaaatatgcctttacgattggccatgaagctggtgagagcttgaccttatttcacttgagtggtcggcctgatgcttcaggtttctgtagaacctagcgcaattgttgattagtgtatctagaagtatggccttagctcttttggaatctaagagtaagctatgggtcagcttctccatgagtgggtaccgactttagcatcgatcaatctcttgttgatgtagtatacagggtggtgtacattgtgttcttctcttgtgagggcatcactcacaacatgttctgtggctactaggtgcacgcctttctcttctttctctagggatttgggaaacacaaatggccgagccaatttgtttcttcaattcttggaatgcagtttcacattcctttatccactcaaattttttgttgcctgtgagaatgttgaagaagggtacacaaatctgcttagtgcagtaatgcgttctgtttggctttgtacttccttgattgttgtgggtgacttcatgtccaaaagnnnnnnnntcttgtctgggtttgagcttcatgttgtagttgcagaggattttgaagcattttttgtctaggtccttcatatgccccaacctttcttgacttggcaagcatgtcgcccacacacacctccatgttgcggtcgataagatcattaaacattttgttcacaagcctcttatatgtggcccttacattcttcagtcttgaaaggcatcactttgtagttgtacatgcctaagtctatcatgaagcatgtatgctcctgatctaaggatgcatcttctctttcttggctttagaaaaggccaagttgtaacagtggtgggcagattattggtcttctctcaacatcgtaccctctaccttgttgggaattttaggtaggggtggtagctggatgttactgcctccaagttatataaggacgatcagcccatcatggcattggaagctgagggaacgttgattatgacgaactgcgccatcaaagccctagtggctggattttctccaatagtgaggggtaatctgatatatctgatggatgcgatgtcttggccaaggaggccatacatcacataactgcagggtaccaagttagcgagttggagccttatcttttcatatgttgatctaaaaagaatgttgaaggaggctccattcgtccaccatgtatcttgccacagtcatattcccgatttgtgca

SEQ ID NO: 39197 - DNA, 2030 bp, Cannabis sativa
tatatatactagcttatttattttagtaatggatacatatatattctagtgtaaatttaaatatatattgtaatgattattttatttatttttcatctgagatgagtatatatatactgacatatatgtatattgttttgatttgtatgtaaatggtgatgaaaagagatgattgttggacattaaaaaacaatattttttttttaatttttttccattttaatgaaatattaaataatttatcattaaggaaaagtaaccgatccaaaataaccgatcctatcggcactattaaggattggattggatttaaactgctatgcggataggaatcgatccaaaatataaaatccgcacttagtgcggattggatgttgttgaccaaaaaagtgcgaattggatcggatgaacaatcttacttgagttagagtcataaacactttctcatgcagatctctatggagaaaagcattattaacatccaattgatgtaaaaacaagccttgaattgcagcaagagcgaggatgagcttcacagaaacaagtttggtaacaggagcaaaagtttcgttgcagtcaatgctcttgttgattgaaacccttggcaaccagtctttccttgaacctttcaatagatccatcaacattgtatttaatcttgtaaatccatttgcatcctatggcatggtgatcaacaggaaggctaacaagaatccatgtgccattagactcaaagcttcaagctcattgtccatggcattgtcccaaacaagtacgcctctagcttgatggaaaaattctggctcatagtggattgagattgctagcacagttgctcgaaattttggtgacagcctgttgtaatcaagaatctcagaaagaggatgagaagttgaagacttggaaacttgagagtgaacactgttagtagaaagaaaacagtgatagtcttgaagataagactgtttttgagtgtgccttattggtctattagtgacaatagattcaagtatgtcaaggacatcaggactagaaacataagaggaaggtgctggttgagattgaggagaactttgtgtgaaattctgggaagcatcagcttgaaaaaaatcagagaattcagaagacgtaggaccattgatcacaaaaggaaagatatgctcatgacaaataacatccgtagaacaaaacacttttttggtattaagatcaagcaatttgtaagccttcatatcgatagggtatcccaggaaaacacaagtagcagtccttggggaaaattttgaccttccagcacctaaagtagaggcataggctaaacaaccaaaagcccttaaatattcttaactaggaactttggaatgcaaaatttcaaacggtgatttgtgtttaaggtttggtgtgggaattctatttatgaggtaggttgtagtgcttatgcattcccccccaatatggtaaaggaatatgagattgaaatagaatggctctagcaacatttaataagtgttgatgcttcctttccacaacagaatttgggcaaacaatgcctgaggatgagaatagagcgggaaattattactctttggcattatcagacctaaatcttttgatttgggcattgtattgagtttttactaaatgtatgaaggttggtatagctaattgagcatcaaatttgcttttaatgagatgaacccatgtgtacctagaacaattatcaacaatagtgataaaatatttaaagccttcaacagtttgagtattttatgccccctaaatgtcaacatgtatttaggtcaaaacagattttgaaaatgttatgattgctaacaataggtaactttctttgttttgcaaaatggcatatggaacaatgaaagccagaacaatatgaatattgaaattgtaagcttttatttaaggaatggttctttacacaagaggcatgaccaagtctataaagctacaaattctcatcacttatattggaattatacatagaacaaacaataagagattcttgctca

SEQ ID NO: 39198 - DNA, 4003 bp, Cannabis sativa
  modified_base (2257)..(2257): a, c, t, g, unknown or other
  modified_base (2284)..(2290): a, c, t, g, unknown or other
  modified_base (2891)..(2906): a, c, t, g, unknown or other
  modified_base (3444)..(3450): a, c, t, g, unknown or other
ttaggttgttaaatcaacatatttgtgagtagatgtaagatcctggtaaaaataattccaacagatccaactcatcttcttctggcaactttggctcaatattctcgtggagcatcagcaccggcaagtcggctgcgacattataacaatgcttgacctctccctggttgccccttactgtgcccactctggcctcctgagtagggaatttcaaacataagtgccgaatggatgtgattgcgccaaaatccactaaggctggtcggccaaggattgccttataagcagttgggcagtctaccaccacaaaggtgcagtacttaaaactactttgaggtgtatccgggcatagggtgactagcaaccttacttttcctattaggataagcgtggttccattgaatccagtgagtagggaatcgctgggcgattgatcccagtctgtgaggcctatggctgtgaaggcttctttgaataataagttcacggaactcccattatcgatcaatattctagccaaaattttattggcaatgggagtctctatgaccaaggggtcatgatgagggaaacacaccagtttcgcgtcttcctccgtgaaggtaataggttgatccatgagtcggggcctttgtgctggaagctgggtgacttcctagattttgtcgtgtttgatggccccaacataacacttcaattcttttctggttgtcccaccaatgtcaggcccaccggagatcatagccactctaccattgggtcttggtggcagcccaggggtctgctgagggattgttcccccgggggataccacaggtgccaccactccgggtgcaccccttgctaccccttgaggtaacgggcctactgcctgaaccaggttgagatgggacagccggttcttaatccgctcatacaaatgacccaattggatcaagttttcgatctcgtctttcaaatttttgcattcattggtactgtgaccaatattgttgtggtattcacatctcttgttgggatcccttcgcgaactgtccctgtacagaggaggaggcttctgataatgtgtattttgcctcgtggcgaaatacactcgctcttgtgtgtctgtcaactccgtgtattgggtatattagggagtatacccccttctttgacgcttgtcgtccgtccggttgctgccttttgaggacctcttgctctaggagctttgaggaggtccggttaggcttgcggtaggagcagagtgagacggggcttgtccattcatccctgaggggttacttaggggattcccgtaatgaaattatgcgggaaccaagactgggctctgattgtatcctggggtagcggagaattgtatgtcgctcatttgtggagtaaccagaggaagggtccccgagagctctgctccaggtatatatcctgatactccaattggatagtacccttcataggccactatttgggcttcttcgaagttgatgtatttttggaccctcttctggaagtcttggagattagcagctccttcccgctgtaattcattctagaatggggtccccgtacggatcccggcttgaagaagtgcaagctattgtccgtcatcaacttttttggttttcgaggctttttctttgaacctctttatgaaattcttcaaggtttcggtgggtagttgcttgatgttagtcaaggtgctaacttcaagattaatctttctcgctgcgacaaactgtctctggaaactaacttgcaacttgttccagcaatccaccgatcctggttctaatttcttgaaccattcctccgcatagctgctcaatgttagtggaaagcttaaacatttggcatcattactgaccctcataactgtcattactcggttaaaacgagacatatggtcactggggtctgagtctccgttgtatgctgccatctcgagcatcttaatgtttttgggaagctctgcctccaatacgtgtcgggcacatggctctcggtcctcgcagtcggagtctgagtcatcccttttttgccttcgggagactcgagcggtgtctttccgcaatgtcgccaactctgctaaaattccttcattcagtgtccctgcagagaccgatgatatttgcttctttttgtctaggtgatcccgcagatcaccgtgcttttcgttaatttggcgtcttaaatcaacaagagggcatctccgatttcccttcctctctccctgggctcttggtgcacggaaatgctntctcggtcctctcgatcctgagggccnnnnnnncctttttggagtttgcccctctacggacctttccctttcgggaaatttgagcggacctttcgtggatcctgcacctttttctttctccctgggatagaactagggttttttctttggttttctttggaagggtaccgtataggacttggttccctactcttgtgtctttgagtgcttggagaggattcttccagcgtatcttcgagtcctgcctggacggccttagggtgtatacgaatccccgctgtctccatggctttttgcatggtgaccatcacctcttgcatctttctattctgctctttttgggccgcgatttcaacttcatgatcagcgaccttttgccttaatagcaacaactctgtataactgccctcgtcgtaggcgtcatactcatcaaagtttcccttctactcgtcgtcgttggccctatctcgttccttagagtccacgttcactcttgaggccacttcctcgttctctagattttgagcaacctgaggaggacagggttgacgtgtgttgttgcgagtttccaccattgttgtttcaacttctaaggttactgtctgtttgaagacgcttccttcagctctcaatnnnnnnnnnnnnnnnntgaccgaggttttcggcaactagttaaataatatgtaagaagagctgtaggaagtttaatgcctgagatttttatgtggttggggcattaatgagccttagtctacgagtctttgttattaatgagagtatttattacagagaatgttcttggtaaatttctctcctattttctctctttgattcctttaaccccagaatgttcgactctttttcagcctatttgtggggtatttatagtatttttctggggtgatccctagaaatggatcacttgtctttctgtgttagcttcataggggcacacattcccagctgatgcaaaataggaaatacatgacctataccataggtatcttaggggttaggtggatataatcttttatcccctcttgattgatgtgattcctcataaagtagtcgtcactagccttattgattatatcgtaatagccgaaagaaaggggttacgccatctgtcatgtcacttatggagattttaatacgtcttcccccatgcggcattaaatgcgaggtgnnnnnnnagagatctctgcacctcccgaaactgccttatcataccttcggcctcctggagagtaaaaaatacttcttgtgctctcctccgggagacacctccctgagatacttccctttcgcctaggacttagccgattttttatgcgttgatccccacagctccacgcgtcagccttatccaggtccacatattttaagagaaaataagggcaacatctattaataaattagatgacttgttagaatgatacgagggaaaatgaatcttatattatgattttatctatttgaacattacaacaacatgacgaagttgtcatgtaccttttaaattatacacatcattgaattgatgatattgattcttaaataaatataaagtttgatatacgtatagtgactcctgaagagtatatatgttttggagattaatataattattgtattcatacatataaaaataaatcctataatgattatttatatgttgtagtaattttacattaccttatgaaagttttattgaaatacaaattatagtgaacttgaagttcatga

SEQ ID NO: 39199 - DNA, 1842 bp, Cannabis sativa
aaaaaaaaacaaacctgttaacaacaagtacacccaagaagaagctagcaatgcaaaagagagatacccatctggtagaaactccattgccagtcttgtgaggtctaatcagacccatttgagttagaaaagaaaaaaagaaatggcttcaactttaagtaagaaaaagaagaagctttctcccacctatttgaagcttaaggggtataagggaaaggtttataataataataattgtgatggtgttacagagtgaaaagaaaggaggaccccattagagaaaaataaggaaccacatccaaaaattatgtcaaagaaaatagtcccataaatggaagggagaaagcgacacacacaagagtaaagagaaaagaaaaggcaaggcttttttatatgatcttcctaagctttcacaactcataaattttgaagaggaaaggaaatgggcttgtgtgttttgtaattatgttccacttcattgttttgtcacgagaaaacaaaataacattaataattctttaataatttgaaataaccaacgtcacgacaacattatagcttaccaataatacccctttattttcaagcaatgcctttacttttatcattaattaataatttttattatcgccaatttattttttcactgctactataaaagcatggcatattttatttaattctaataaattggtttccattccaatttccaattatactcaaaaataatatgtttaggtgttgtggtggtgggtatcattttcttaaaccatctttttttaaaaaagataataataataattaagtgtcttccatgctaagatacctataatggattattgatgagttttaaattgttactaatagtgggtgtcacagactcaaatgtatctgttactacttactactacaattggtacaaaattgtcccctaaaaaggatggtaaaagatttataagtgatgcccttttggtaatatgtccaaattaatctgtacttatgaattgtttattgtattagtatgaactatgaagtataacaagaattgcttcattattattattttattgttttacttgataagtatgtctaaccaaagaaagagattgattgataacaatgcgaatgttttgtaccagtaatttaaggtgatctttcagatttttttttacttcttcaaagttagtggctcaatgcttcagataaataaataaataaaagttaaggggctcaatacacgctactatagtaattacaagtttacaacaacatgccttaatttattatttatttatttgtagttattgattgatattaatattattgcctaatttattactgaagaagtccataatcacttaagacagtcaaatatatacaatttatacgtttagaattaggtaggtttgaataacttaactaaataccaattacaacacgctcaagtaaattagtaaattaaattaaggacttttagatgaaataatatttgttttttttgttttattattgtaaattttttttaaaaaaattcaataacttgaaagagagtataattttcaccttcaaaaagaaaaacaaagagggtgtaatttatttatattatttttttttttctgaatgtaccactttccaacataatgatgaagtaacgttccaaccaacaacaaagtgaaaagaagaggaaagagagaaaaatctaaacaaaatataatacatatgaaaaatcaaaattaagattctcaacctttttcacaacaatacttataatataaaaaattaaattggattatggtataaaaatgatcaaaactaatttgcatttcagaactcaaaaaatgt

SEQ ID NO: 39200 - DNA, 2513 bp, Cannabis sativa
gtaaaataatttccaacaagaagacccttccattttcgttttttattcctgtacacaaataaggaaattctagttatcaggtcatgacagagtatcatatcaagattaatggggaaacttcttataacaaatattatgaaattaattcacacattaattgctcacaatcagtgcacgcgatgttgaccaaattaatccaaatttaatctacctagtcagtaaattgtcttctttatgggctggacatcacgaggtagcctaagggtattatttactgtaaactccaccattaaaggaaaaagggaaacctaatataattctcaaactacgataaatgccccacaaatcctatggattaggggttcaactctcttgcaaactttgctcagacaaacttgagaactaactcatggactaaggcttgttaatgccccaaccacgtaaaaaactatttgtctcttgttactctttctcttttgattatttattcttcatttctttttgtttatactctatttttgaaaatctcggtaaacattttggtgcttttattgagaactgaataaagtggtgagaccacttgcagattacattcgagttatcatggccctcagctgaacccaatttggtcttcatttcactggtcctagggccagagctggagattctagtgaacaagaggaggtgacagaaaagtcatcaagacgaagattggaatcaagacgatcccatcattgaggatgctaaaatttggaaaaattagttctaaggttgttgaagttaataccaaagatgcactagaagatatgcatgaagatgaccctgaggataaagtcgctgatgatgatgctggagagaagagctagcctgatgagtcaaattccttggtcatcatggcaagacaactacaactggccgaaagaaggttaactgggcaagataaattcaatgagttactacttggcaagatgaccagaatggtggttgtaatgactgccttgactaaactatctcttgacgtgataactcccccaacaatagacgcacctgagaaagtagatctgaaggacccaagaacttcaagtgttcgcaaagacaaagacaaaggaatcattgttgaagaacaaaagaacaatcctttcacaaaatagcctaaaaagtcaaaagctacttaccaacctcaatagaagaggaaaggtaaccatgccttatggcacgatgaccaaaccaattctaggcagagtcatgcaaaaacacaagatagatgtcagagtatagaagctagagtctccaaggaaaacacctcctccaagtgattccagtatcccagacgaggatatttaagaagtacatctggtatcaaatgacagtggaaaaagcttttccataaatgatctccaaagaaaattgaatgcctagaaggaaagtgccaaagctaaaaaagcaagaccccacaaaaatgatttgagaaacctcatcaacgattgcattcgcggaagagaatcctcgtgtgataagacttaatgcctagaacataaagttgaggagatgatgaagatcaccaagaagatttctagaaaaaaaaaaaattgtgtcatatctgacgctgaggaagaggatatagagccttttgtgaagagaatcattgatgcaccattgtcgaagcatttcagaatgcccaggtggagttgtatgaaggacacactgaccccagagagaattttttcgaaatacaaccgcatcatgcaagtttctaaggccagtgatgatgtaaaatgtttatgtttttcattgacattcaataagtctgtagagggctggtggaagaggttgtctctaggattgattcacaactagagagacctacaagtaatgttcagaaagcagtttatagcagccaaggactatgacttggaagctagctccttgacctgcatcaagcaacaacaaggagaaaacctgaagaagtttattcaacgtatgatggatgtggctgctaaaactaaagtcaataattacataaaaattgtggctctaacatcaagacatacaactagatctttacttgggagagatctccaacacaaaacggcagatacattgagtgaattcttaataagatcccaaggatttataaacgtagaagatgcttatgcccaagcatatagagtactcctagtgccttccactgaaataacaagtgcccaaccatcgccatacaaaaactacatctattaccctttaccaactgcttttactactcctacagtatatggaccaagtacttccgtatagccagctgtataggctagtttttttggattcaaagcttcagaggcttgatacagttctgcttcttgtgtcaacaaactgaaaagcaaaagttccaaagtccaatataacctactcaaggagtaaaaggagtgcaaaggttccaaattagagtaagttcgagaagaatggtaaaacccaagaatcaagatacattgagtacacaagtttcatagatattc

SEQ ID NO: 39201 - DNA, 1622 bp, Cannabis sativa
  modified_base (1577)..(1590): a, c, t, g, unknown or other
atacatttacggctattatccctaaaattgtgggatttgattacaaatcaagccaaataaatgaggtttttacacagctatgaatatctcgcctttattgggtcgagatgagtgcataattaaagatatacggtaagttgtatctcatagggatgcctcgctgaggagagagccaagatcactttgatatcgagcagctgcatgtcattttagcttctcgagactaatactgtcttaaccatgatggttatactctttgaggttgagaagatcttcctcgaatgcaaaacatcttttagcgagataaacgcctcgctatactatctatactcagtttgtatatcgcataatatacgctaagtatttttaatgttgtcactttctctttcacgcagtgagtttgaggcctcgtcatgagcgtatgcaatcacatggtttctcgtcaatacataaattagctattcatatgtttttgtctcgcagaaggctattcagccacccgcgttataaacctaccctgcgaattatatttccaacgagttattccatgcgaagcgtacttgtcgtttgtgtgtttgagttcttcccagctcgacacgtgccctcctctgatgtgcttaccgaacttcgggtatgacattaataaaaaagattctctttaaaaggatttcattatgcattacttttatgaaattgagctttatcctctataacttgtatgccctgaattatatttatatatttatcatgtttttatgtattttatatctatagaaaatctatggtgtattaatctttgcaaagagataatgccacatatacacataaaatttaaaaatgaatgtttatgaataattttccattcttaaataattattaggattttgttttataaaagatcttataatttgataggggtggaagaagttattgatatatgcagttcaaagttcttttccattaactctagactatattcaaaacaccacagaatctctataacacataggggtggaagaagttattgatatatgtagttcaaacatcttttaccttgaactcaagattatatttaaaacaccacagaatctctatgccccacatattttgattagacatcgatataatataataaacaaattagcaaattagaagaacttattcttaatcctgtatgtattccaatatttgttatgatagtaattaataccactaaagtccctggatatagaatcaaaatatcttatcttagtgggaggattttaaaaattctagcccattataatttggatgacactggtgattaatttacaatgatatgttcaagaaaggaacattaaaataaaacaaaacaaagttcatctaaccattcacatggatagtaataacttatcagaattacgaggataagatatgaaattttacaatgtctattcgaaagactcaagcacagttcctggtccttatggaattttttatggtatctctagtgattacttaatcttaagtaagtattttaatttaatgttaatactagaatgctatgttgatgacttagtgtaaagaccgcttagttnnnnnnnnnnnnnngcagttaattatgatttaattatggaaaatta

SEQ ID NO: 39202 - DNA, 3832 bp, Cannabis sativa
  modified_base (3173)..(3176): a, c, t, g, unknown or other
atccattggatcagatgtctcatccaacaaccgatccgatccgattggattttcaaaatttacatccgatccaatccaattatgattggatatctgatcatattggattgatcggttgtaatttgatcagatgactttctccacacccgcaattttaaatctttatatatatactagttcatcaacacgtgtgtcatatttgtaacttcagagcaaattatcctcaataatatcaagatagatttaaaaagtaatacatattgttgaggcaatttttcgttatctgatctaagaaaatcgtaaaataaagaggactgtgatgaattaatttaactaaataaaaccacaataaaaaaatagacaccagggatttatagtagttcacccccatgtcgcgatggtaatggagctacgtctacttttacttttattaattagattcgacacactagagttatgttctcaagagtgagtggacaataaaacaacaatggacttctaggtgaaatctatatcaagatttatgaacacaagactcatgggagactcaatattcacaaatctaatcaaagttggtggttgtgaggttcttgggaacaataaaccaataaaagtaagaaaagagaatggtccctgtacttggtaactgtgtggatcaatggtgctttgatcaaggagatttgatgtcgacaaagtatggaagactaaaaaaaaaaaggtgaaggaaaggatatggtgttcttagttgccgtcgagtaagtcataaaaaaagatcccccctacttcaacatcgtactctcattatataggcttagggcttgttagtgatccctcacatgtcggggtgtttcacaaacaaatctcatattttattcctgataatgaatgaaaaattataaataaataaatatctacaaaaatctccttatttttaggtcaaaatcccacaaatattggaaaattagttattctcgattatgcatcaaattgaagtggagtgacaagggatgtcacctctcagcttgaaattgatgacattggtgagaagtgttagaaatatgtgttttggggtgccatttctcgcacaagatgccacatgggctatggcattgttctctaacatcctacacttaattacactactcaattcccgagtaaagtgtaccagcctgccttgtgagccaattttggactcgataacttcagaattgagctatgactattacacacacttagatttttattgaatatatctttccaatgcaagttgaaccagatcatttggataaaaattgagagagttatgcctgctttattgaaggaaattttatgtattttgctccagctgtgagcactgacatggccaagtggcagctctcggcaatgcatgttcttggaccccttggagtgtgttttgacttgtttttttttagggtgaatcatattttggtggtcccgggaccccaaaaacctcatttcgacgtttgaaaccctaatgggagaccactgccacagtcggggccgaaaagtggcagtggttggccatggcttatgggaagccatgaatggtgtttcttgcttatttcaatcatatggatgctagaaaaaccactttggtcacattggttcttgaccaattgcttaagagagcactaacatctttttggccaaaaagagggcagtggtcgcataagagtgctatggagccttgggtgacttttctcacttatatttgatacatgaatgttggaaatacaatttggccaatgaaaatcctcctcctatgtgatggccaaccactgccaccatttgtgccaaaaatgtggcagtggtcagccaagtggtttctataccacttggtggcttttttcacttagttttgacatgttattgatgaaaaagtactcttgggaaaaaatcttgtcccctttcaatgtggctgaccactgccacaatttgtgccacaaagatggcagtggttagctaagcttgtcccttggtgagaaatggtttctttcacctgtgttgcactccttggtattgagggaacacattttaacaattccctttggtatttagtgagtggcgagagctgccatcttcttgtggtagtgctctctaaaaaggaggagaatactaccatcttcatgtggcagtcctctccataaagcaggagaatactgccatcttcatgtggcagtggtcgcatatgccatattgcatggggttcttgtgtaattttcactttatgttcaagtctaagcctttttatgcctaaatgaattaagtccttgttggtttccttgtcgaattgatgtctcaagggtgaaaacgctcgcccaggcccataaaccctagtttggacacacttgggtgtgtgagtcccgacaccaaataattggccgatgttttcgagtctcatagaggtgccatgaggcccttaagtaggatgtcttaactcatttggcctttgtaagtctggttcaaagttgggttgactttagtatcttcaaggcactcttggtatgtgagcccttatgcaagagtaatcattttatttttagcattgctatgaggcacccatggtgcttagcaccacgatgaagtgtcgccgtataattggttagcaattttctataatatttattaaagtaaagtaagtgggacacgatattgagttgcaccattgggtattcatccaatcaaatccgtactattttgctcatagtgtatccgatccgcactaagtgcggatttcatattttagatccaatccaatccgtaaaagtgcagattagatcggttattttggattggttacttttttaatattaaattatttaatatttatgaaaatatatatttttttcacataattatattgttattttatgtctctaacaacaaattaaaataaataataacaaatttaaagaaaaaaatgtatgtataaaaatgtttaattttattttaaattatatgtagaaaaaaaattatatataagaatataatatacatttaagctattaagttttgaaatatatgtgtattatatgtattaaatttttaaattactattttctttacattaaaattttaattgtacatataatttttaaaattttttataaatatgtgtggattggattggatcagttacttttacatgtcannnnacatccaatccgcacaagtgcaaattttgaattttccaatctaattaaatccgcacaagtacagatattcttactttgtggattagattggattggatcgtacgaattggattagattaactattttataaacacccctaaccaataacaatattacacatcacaaggtactagacaccatgagtacctttagcatttctcttttattttgttggcaaaaactaggtataacacatattattggtgaagttctcaaaacatatgttttagcataatacctaaggtatcatttttttttctttttgaaaaaaaaatttatactctaatcattttctaattatgttaaaatagttttgtttaattataaagaatatttttatttaattacgtgttagtatgttataattcattaaatttacatagaaagtgttaaaaaataaaagaatttcattcaattaatttttttttaattaattgagacaaataaaattagacaaccacttattataaaaaaaaaatttgataaagtatacttaaatacttaacaaaatctttaatataccacattaaaacaaatatactaactatttttctaaaacccttaaacctaataatacttttacaattcaaaacatcttttctctctctctctctct

SEQ ID NO: 39203 - DNA, 2020 bp, Cannabis sativa
  modified_base (1981)..(1988): a, c, t, g, unknown or other
aaaatacagagtctattttgtcatctaacaaaatagaaggtctaattagtaatttttacaaaacaaatggttcaaaatagtatttactctttattttactagcatttatttcattttcacaacataattgtgtaatatataagggtaaatacgtattattttaaattatgagtttggcaaaaattacgaattattttagtaaatgacaattatttcagattttgtattttataaaattgtaaaaaataatatttcaagttcaattttagttaaaatataatataataataacttgattattacattttttttttcttggcatatatttatactagaaactgatttcatctccgatatatattaataaaaaaattaacaaaaattgatgagctcaaactactaattgaaaattttatctttgtatatctattatctttcaaattcttaatattatttaaaatttccttattatatattataatgcgatgacccattttttattgaagactagagtgtgtattgaggtctagtgttgagaacacatggctccaacactgattctttttctctattattaatgttgattctactacattaatttagttacgatgagttgaagttcgatgaacttaagaagaatttgctttggtaatatatgatctgattttctagagttaagttttcaattatgttttagatttcatttaatttttttattattgttttttatatttattttatttcttaattaaccattttttaaggaacctataattaactggcatttaacagcaaaaatgacgtgaaaatgttattgaagtcaattaagttgtaacaatataaaatgattagaaagattttaccacaagttagtatcttttttattttatgtatcactaaaataaaataattacttgctccaacaacacatggtgtctatgcatgattagctgagttagctagtttagaaattattgtattcatgttataaaagaacacgttttatttgatgtgaatgtgatattatattgttgaaaatcttttctgaaaaaaaaaaagatattattgttgaaaaccaaatctcatatttaatttaaggatactagactctagagtagtgacactttttaattgaaagacccacatgcatatttgatcctcctaagatatatctatctggtcaccatgagataataataataataataataataataataataagagtaattaaagaaacgttgtcgtttaatccttcatataaattttctttatttgttgaaaaaaaaaaagaaaatataacattgcacccaaagcaagattggaaaagaaaaaataaataaataaaatttttattatgtacagacggagataagaattttcatccgagtagatgaagatataatttttttataaaaaaaaaaaaaaaaacgaaagaaaaaatcattgaaatatactataatcaaatattgaaatggtaaaaaaaaaaaaaaagaatattgaaattgtttttttttctactaatttattatctaaataagacctttaaatttggcaaataaataaataaatatcgccatcaaattgaacatgaaataactatgtagagaaaacttaatacattagtattattattttttttttaagaaaaacataattttttttttgaaaaaaagtaattcattaaatagcaatatccgctattacaatatactgaagggcagaaggaacattgttttcagtaaaaatacgatcagaccaaaaacaagctccgcgagcaacacaatgtgcggctttgttagcagatcgtttaacatgacaaatagaaacattatgtaaagaagaaagaatcaattgacactcctgaacaaacaaaccaaaaaccgatggaagagcaactgagctattaagagcttgaacaacatcaatacaatcttttatgattctcttaataggaatacattaaaaaaaaaaaaaaaannnnnnnnaaaaaaaaaaaaacattttttaaaagaaaaaa

SEQ ID NO: 39204 - DNA, 2715 bp, Cannabis sativa
tatatatatacatgcatagacacaattacaaaggatgatcaaaacaattaattaatacatctaaaactgatacatgtgcttctgtgcttttgggtttgtaaattgtttctaatttttctcataatattatgaaattaattaattatatataactactgcatgcatgcatgccttatatctatatttatatgtacatgcaatattatgtatatacatttaataagcacacataattatattcacgtactttattaatatattgggttaattcacatcagattattattattattattattacatataatcattttcatctgcttattatctatttaatttcaatttttgtcaaagtgaggttattttgtctttagtgatgttgttattaaaatatgcatttttggcactataaatttcatttttattatatatttatatatataaatgtataagtggtgaaggaaaatttaattgttcaatgagtaaattttttccctttaaattgtttgtgtattttcttattcttttttatattcatactaattactatttatgttttttttttgcagcaatgacacttattttttactttgttctctgtatagtacttcctcatgtactagctgaacataactatgatgactattatctgaatcaaaacactgaagttttgctcatgcttcttttaattggggtatttttcttaattttgataattaaatgcattcatactgtatatagcgctaattttcatggcgacgaagaaaatccatccgtgcaattaactatgcaaaatgtaccagaagataatgcaacggccgtaaattatttacctgcacaaaatacacctgaagaaattgtaccagtacttactatagaggcatttcccgaagacaagtatccatgtggagacaatacaacatctgaaggagaagaatgcccaatatgcttagaagtatacgaagagggagcgaccgtaagaaagtttccttgcggtcatatatttcaccctgagtgtatgcaagatatattaaatagtagacttaagaagtgtcctaattgtagatttatgtttgcttaattagtacttattttattttagtttttaaaataaatgtaatttggttgaaattaattatttaatagtgtatgacttttttcttcctaatagtataattaattatttaaggtttttttaagtttttgattatgtatgctttaaacaattatcttatttttgttttagttttattttaatttattaattggttttactttaattagttaggtgaaaaaaataattaagacaatacacgtgtttttaatagtaactctgttaatgggtactaatgaacaagagaatctaaactattgtaaagtggggttttgacttttgagttttaatacaataatttttagaaattgggtacttattaacaataaaatgaacaaaattaatatttatgtgtaagtggtttgacactaatgggagtagaatggataatgatggtgactagcatgtgcgtcaaccgagagtggtaccaaaatgaattgttcatacttgcatctcaaaattgatatattacattcctgatcttcagaatggtaaagactggctgattgtgaacgagtacatcccgcgaaatgtctgggacttcccggacactgatggggagacaccctttatacaggaaaacaatttagctgaaaccgacttaattgttcaacttccacagtcggatgatgttgactatgttcgccatgatgtggaccaaactgaagttgcaaacatccatcgtgtgaattcagagcctcaacagttagatgatttcattgtcgatgatgacattgagggtctaaatgaccaagacgataactacttagaataagagagtgacagtgatgataatgttgtatatgtaactgatgatgatgatgatgaattgtaattgtaacagtgttttaataggaataaaaattcaataagttcttatttaatatgttttgaatatggttgtttattttaaataataaaatatgtgttgtatacgtagtatgtctaccccaggtggcagcacttcgaaagaaaaaggggtcagaggtaaatacaaaggcaaaaatgttgaagaagcgctctccaaaacaccagctgccaaactacacattgaattgcatgaagagacgggcaccccagtcggcaaaaacggaaaaaagttcaacaatatgtgtaaatggatgtctcgcatgtccatccccatgaataaattcaaatgggaagatgtttctagagctaaaattaatgtattgtgggacaaactttaggtatttcataatttattttttaatttttactttactatattcttcttaaatttctaattaatgtattaatgtgaatgtgtaacttttttgcaaacaaagtttgtcctcccacaagataactctacgttcgtagactatggtgagtacgagatgtcaaagaatttacgtgactggcgatctgactgtaagaaaaaatggatacaaaatattgaggagcttggacaggagagggcaaacatgttacctcctgacggagtaactcagaaggtgtggagcgattgcattgcttagtggagcacagacaaacaaaaggtacttaataaaaattttaattgtagtaaagcttcatgttatatagtcaataataaataattaattgttagaaaaattatt

SEQ ID NO: 39205 - DNA, 1405 bp, Cannabis sativa
tatatatataaatatatctaacattttgatgctcataaaagagagaaaaaataacttttttttttgtttttgtgattttttttttttgaataatttttgtattttattttttggtaaatgatttttgtattattattgttatgtggtatcttaaggtgtttaatatcatatcactcaataattagttagtaattttccaaattatttattaaattaaaatttataggagctgatattgaaatgcaccaataacgatatactaccttttgtagtagttggcatcttaatatgtcctttaattagcaaattttgtaagtaacgatctcgcaagttgtacaccgagtttccaggggacaaactggagaagaatacgatggattgaatccaactcatttcaaagcaatcttgttctacaaaatccaatttcgaaacacctgatgaatgaggaaatgtacttgatttctagttctgagataaaagcctttaaaagtaactgaaattttagcatgagtagttgtgattttgggcaaccctgtaccaacaaaacaggacaagagtcatctcccaagttgggagcaacaacttgccactttgctactagcttcgctatttgggttactgtgcttggtcttgtgacaatgggtggaactttcaacaaattgattttccaaattttggatatagcagatgaaattttttaaattttagatactcgacacgcttcgtttgtgattgaaataaagtttgaaactttaagctaacttttactgtgattcgttcactttgaagataaacattcgaaaagaaagttctagatctctcttttaacttttcaaaatatcttgaatcgtttaattttgagctatatcgaaagagttatgactaaaatatcatcagtcgttgtagcaggatttcagaattacaacaattttgtaaaaaaaaatccaagagcagcgactctctatcaacagtcgcaactcttgaatattttttggagttcttgtttcgaccttaaaacgagtacggagggtagattttcatctaaaagtcaactttaaagacaaaaaggaagcaagaaaggacggctggatataagaattactattggaggagtaagtgttctttttcatctttttatcttttatgtttttaattgaatatttggatgtttaagatgattgttattggctaaatcttttaaggggtgttatgtgattctcttaaaactctttttatggattaaagtagaatttattttcttcttcatctcttattcaatttcgtacaatctgttttatcgttctaattatttactggctgttaggctatttttagcttacgttttgggtcactttttatagttgttttccttctttgttattctttttggaatagaattatgctt

SEQ ID NO: 39206 - DNA, 2367 bp, Cannabis sativa
atctcgtttaggggattaggatttaataagtgacttgagtagcgtgcctaattatttagggcattacaatatcgatagaatgttgacattttgtttagtttcacggttaattaatattatttgtcattgattattttattatatttttttcacatattgtcgatatgatattgataggttgtcgacatttgtttgtgtttgttgcttttgaagatagtgtcgattgtatgtcgataggttgttgaatgtttatcgacattgtattttttaactctaaggtatgtcgataggctgtcgacatttatttagttttttatttttaaaggtatttttgatcgtattttgacatgttgtcgattgattttcgacagtcatttggttttttgttttttaagatattgttgatggtatattgacatgttatcgacactatgtcaataattatctaattaatttgttgtattactgtatgcttactgtattattttggtatatattttaccctcaacccactgcatcatcttcaagacttagtggtgccgagtacagagaattagtgtggaggttggataggatcaaggctgagcagaagggtctttacgcttgtcatgtcgagctaaatgaggcatatcagaatagccatataaagctaaagggtggtcagaacctcattatggagcaactcagaactatattgagcatgctgcatcgtacgccaatggcagatccagcaccggggccatctgtagctgcatcaccctcaccatctgctatgggtaaagatgatgaggtctttcccgacgagtatgatccctatgaggatgctccaaatacccctatcgatgcatctattatctccataggtgacagtgagtcacatggtgacattttggctttagaggcaccgcttggaggggttgagtttggcaagcgaaagagaaatccccctacttgatttaaagactatacaaagatgaagaagaaacaaaggccttcttcaacatttgatcccctggctccaccggatgagcgattgttggatactttctggaagtggtgttctggacttattcccaaccatcgacttcgggatttgaaaactggtgattatggtccatcgttcttttggaagttgttgacattgcaggaatgacttacagaaagtaaactaatctacaattttactacattttataagtcaagtaatctaaaattaatatatttggttgtctaaatgcttcctctaacctttatatgcaacatatagatgtagccgtccatatgctgaggaggcgatactacttctttccattgatatttcgtcagaagggtatcattctctcaacatatgtcacgactattatcagcagtgcatgaacaaaccacaggggttccagaaaaaacttcatctgggaggattatatcatggagtactgcagatgtgttcattaggtattgttttagaaaatttttaaagtttcaactataattacaagtttattatagtttgttaactgtttagctgttctccataattataggaccaattctatccgagatggggggtaatgagttcatttacttcattatgcatcttcccaggcaaaggctttgggtggctgttgaagtcaacattgagttatagaaaattaatgtgtacaactgtgattccagcatttgtaattggaaggacatgaaagccatcttttagacctaggaagatctattgctattgttactctatgcatccggagatttctaaaacaataactagatcatggcattatatatgaacgatgtggattatatatttggttgtgaaaagcatcagtcttaaacttggagttcacattcataacaatgtggtgatagcatgcatagtggattgctttggggaaaacaagttaaacagcatggtcaatactttgatgcctatctaacacaaacactaagttctcaaccaccccaattgcttccctcaacttttgtaagaaatgcgtccaagagtcgttattctcattgtcagcggtactaaaaggaattggaaacaattggttgttgtcatcgtatgccacagtaactaacattataccgccatacttcgtcttcaagaatgtgccatcgatactcaaaacaggacgatagaaagtaaatccccttctacaagcaccgagtgatatagaatagtacttgaaccgctcatcctctaaatacaagtcagtaatggtacatggattcttctattccaacatgtacaagtattcaggtagcttcatgtatgaaaactctggcgtaccgctaacatacataagtgccttctccctgcacctcaacgccatcacattgttaggattttatgtcctaaat

SEQ ID NO: 39207 - DNA, 2514 bp, Cannabis sativa
tgtactaattataaaatatataaattcatcactgagactatattgtaaaaattataattaaccaagtataaatatatttttttctattactacaaatgataaatatcatttcaaaaggtgtatcataaaagttattaatttgctactttattttcttaaataataatttttttaaataaattagaaggaggatttaaattgtttctttctgttaaaaatggaatctaaatagtattttaagaaaacctacatcactagtcataagcataatttattaaattcagaaacttttacttttttacttttattttcttataaaaacacatgtaatttttttgttgcacaatttcaaatatttttttacaaaattgctatctttctctatattttaaaaataacaaataatgtttctaattttaaaatattatattttagattatatcacttaataagtacaatatatatatgtatgaaaagattataaaatttgggcaacactccgcaaagcgtgacttagttccctagtatatatttaaaggaaagcccaagaaaagtctatgcgacatcctattttttttgttttcctatttttttatttttctaatacactcttattttctttcaaaaatacactacatatacaaactaaaagtcccacattggttaaaaaaattttaggtgctattattttacttacttttgtccaagaaatattatttattatgggtagttgattaatatcttacctaataagtttgttatatatgtataagtagttatttattttttaatagttaactttgtaataataatttttaattttatatatatttatgaaattaattttagtttacgaatttattttactattctaaatttttatattgcgatttgttcgagttaaaaatatattttacaactaaaatattttctcttaatttttacaaaagttaaaaatttatctataaaaggtgaccatacttatatgattatttgagaattcttgattatatatatatttttaattttttgttatttttttattatttaaattttaaaatatagaaaatatctatttctacaagttgttttttttatagtatagcatttttcttattatatattttttttaagtttagtttaaattatttaaatagttataattagagataaaaattgatgttttttcctaaaaaataatttttgctgttttacattaaaaattaaaaacaaaatatgaaatttaaaatgatttatgtggcatatcccacatgaattttagttgacataaaataaaagaaataaagaatatgaggtgacatcttttgatatttttcatccattttgtctattttattagaattttaataaatttaatttattttatatatgtgtagatattgagaaatatgatttcttagtaagttttttctttttcctttgtaaaaatcttacctggattaaaaactacatgattagtatacttccaactatatgaataaggtattcttacacaatcttattataatatgtagtcattaggttacattatttttaatttaggcccaatataaaataaagaagtaaagaatatgaggtgacatcctttgatatttttcatccattttgtctattttattagaattttaataaatttagcttattttatagatttgtagatattgagaaatatgatttcttagtaagtttttttttccctttgtaaaaatcctacttggattaaaaattacatgattagtatacttccaactatatgaattaagtattcttacactcactttgatttgtcaaaatatatgggtaattgataacttgatgttgtccaattaattataatttttatataattattttgagtcatcaaatcaaatctatatatttatctaatatatctatatatttataagtcaaaaaatgtgaggcaggattctattattataagattttattttcttaattttattttttccatcttttaagtgatgtttgatatatttacccaaaaaaaatatatacaacaataaagtatacatattgatatattaacagagtaaaatcttaatatatttaaattaataataggtaatcaatttttttattctaactaattacagtaatcactaataattaaatcaagcgataagaaaaaaagatgatggaataggaattaaaagattctttcttttttatttaaaaataattagaaaatactaaatgatcatgagttataatattatttcacttattgagtaaaaatattaacaactacttaaaatatgaatgagggctatgcattttcgtggatatttttgtagcatcttcgtggctgtcaaggcccaactcacaacttgtcttgctgtctatgaatgagggctatgcatcatagcctggcaagcaaaagttttccagccatgtgcctgcaggatgcaggatggcctaccatacaatgtctgcatgttgaggcctagctggcctattgggattttatgccct

SEQ ID NO: 39208 - DNA, 2040 bp, Cannabis sativa
  modified_base (92)..(96): a, c, t, g, unknown or other
atccatgcatgtttgtgtagaataaaatacacgtgtaatgttcaaaaaaatacacgtgtaatcgtacgagagagaagaagaagaagaaagannnnnaagaagaagaagaagaagagtgagctgtgaaaagagtagtgtgtgaatttaatgtgtgaaagtgagtaagaaggaaatattatattgagatttgggtgaagagattttaataatataagtttattgttataaaatgtgtaattttatttagtctttctttgataaaacaaaatcatatttttattttgctaatataatataattaatgtgaatttgtttatttatttttagaaaatatatattaaattattttaaagaaaatgtttgaattatatttttttagtaattttgctgtcattattagatttttatttcatatatagtttttttttgtcgatatgataagatcatatgattatagatttacaaaatttttaaatttatgtatttttaatgtatacatactaattatttttagaaataaatatataaaaaatataacgaaaaaataaaacaaactatatctaaatatttttagatctataacaaaaaaaagtcttatctatgaataatgacaaagtattattatttttttagcattgttattaggcatcatatagtatccaatatcacactgatagcgcgttgtgattaattagcagcttcttatattatttattaattaaaattatgtgagattctatcttaatttacaccagtaataatatatgatcactataaggttgcccttagtatatatcttattttttgtttaaaaaaaaaaacaaaatacatataattgtaaatgtaagtcatataatgaatttttttaatatgaaataatatgttttaagttgtgcatgagtttttttttcaaaatgagaacaagtagggggttaagggggaccccatgatgagccaagagattcataataataaaaaattggagattggattagggatgaaaacgggcaggataggtgtgatgattgcttccctatcctcatacatgcttcttaaattcacttttatactcgccttaatacccgtttaaattaaagcgagagcagggcgggaattacctaatgggagaaggattcctatcaggtacccattacatatattttttaaaaaaaatgatgtctaaaagagaatttaaaaaaaaaaatcataaaaacttattaaaacaataaacatgagtagaatagtgtgtataataaatggagttagtacatacaaaattagtaattgaaaataaatagttaagcgttactttttaaagcagttaagtatgattattaatatgcatcaccgcatatattttcataaaaattaaaatgtctcattactataatcaataaaaaaggctaaagcatgaagctgtttagattgtagtagatatgattttataatttaaatatatacatacatcatatcgggacgaatttaggacgggtatctattcttccgctcctatcgcattttcaactcgggtatgaatatttaaacccatacccccgctcctaaaagtcaactctcgcctcgtcctattaaagccaagtacctgaaccctcacatataattatcatccctatattggatcacaaaatttaaattacattttgaataatactaaatacaaccttctattataacttcttagtcaaaatatttcatggtgttcgttatagttacagtatcatccttgtaaatttttaaaaaattccgaatagttttacagtaccaaaaacagagttcctgatattctagtttaccacgagcgttcaaaaaacttcaaacgtattttcggcattgtaaagtattcaaattttttcaaaaatttataaagatgatgttgtaagtataacgaacaccccgaaaattttgaataaaaatattccgacatgtgttttcgggcatgaaaattgactaaaaaattgtaacagaaaattgacggtaggactctccctaaattttaacaagtgcaattaagactatgcagat

SEQ ID NO: 39209 - DNA, 2847 bp, Cannabis sativa
ctagctagccttgggactgcacaatggccggccaacctagcctccacaagggcctggctggccaagaggtgcattacaagatttcttggacacttctacacatggacaataacacatgggttgcgaattaggccttaaatgcccaacagaatgattgattaatatctagaattaatggcactttgttcttctataaatatttaacaaactatgcaagtattaagggattcgaactgtaaaactagggtttgaggcctcctatataaaggccttaaccttcggctagaaacctaagttgcatctaagtatgaaacctgcctccaaactctaagtgtctgactctctctcttcctcactttctctctctcacatgcctaccctagtaatcctaaatgtactatagcagatcccacctatagtgatctagatagtatttccctcggtataaatacaactaaaaggggagtgggtcattacctgctattataaggtggttgaacctctataacaaatcttattgtttattacttttcattcttatttgtgcaaacatgtggaaatcattagatctatatgaccccgctgtcggttgatcaatttttgaagtcaacagtttggtgctttcattgagagcgtggatatcataatctgattaaatgccatggtgaacacaaggactctcgtcgcaccatctgcatctttgggtctccctgaagacccacaaattgcgaatctaagcactccagttctagtcacaactggaatccccatgactactacagatgtagtgaatcctgttaccacaataggcactacgagcctgggcaatacagctggccaaattgatacgagcaccctggtggatccaagtggcaagctcgtgcctccacctcccactgaaggaagtacccaggggtgacaaccccctggaacgacaactagatctcaactccgattctacgctagagagacaggcccaggagttagtgagccagcaattggcaagcctcacttggacctaggagaagaccttgagttggccagactcagggaagctgtaggccgcctaactgaagaaccacacactattgattacgatgttttcgctcagaagagatgcaaattcttgagatggatggatgaataggagcacatccttcgatctcaccaggtagagttagatcgccccgcaactgggaggccaataatctaataagacggttcaatcagaaaaccgatagaagaggccaggatttccttagagatccactttaaggaagactaccgccaagttcttcaaaaactaggatagatcttcccctgccagagggaggacagacctttcctcaaaggtcaaacaacgagaacaactagatcctagcaactagcggcatagggggctggccagggatctctggctcaacaacaccccccattgtgcagccactagcacgccaaccaacaataggagtacccatgaccgaccagagtatacctctctccctaaggggagtgaggttctcagaggtcaatctttgactgacgaggaccaagagtgggtggaaacatccaaaatggtgatttgaggtgtaaaactgatcacttcccctatcaacacacaactagatctagtcgaccgtggagtcacaagcagccaaaccttgcccaatacaggtttggccagctaaggaagcttcacgggtagcccaatgcaggtctggccagccatggagcagtacagggcggccagaccctgcccaatgcaggtctggccagccaagcacagtagctaagtttaggcctgaccaacctagccaactctcgtacttgggaatggtcgaccagggttcgcagggtctggttgaccttcacgatacactctcccaaggtatggccatccagccctatctctttagaatctgtagcctccccaaggacagatccttctatgaaagcacagttagagtgactcagggacatgatccagcgcatagctggcccaaagccttcagaccttgaacctgatcagtcaaggggatcaccattcttggcatacataaatgccttgcccttgccaaagttccaaatgccggtatggaagatgtttatcggatgagaagatccactagctgacatcaaatactttgagatgaaagtcgacctctaaaaggttactggtgatgtgcgttgtcgcatattcccagccacattgtcggagatagcccaactatggcactttaaattcaccttgggaagattcaactcttgggctgagttgtcacgagaattctacacacaattcttgtcctcaagacttgtaccattgcagctggaagaccttgtcgaagttaagtagcggcaaggggaaccttttaaggattacattcaaacatttatggtcaaggctaccaaagtcaaaggccttactgaagaaggctgatatacgaccatactggggggcataatcccactaagtgacttctagaaagatattcggaggatatccaccaacaacatgaaggagttccttgatagagatgatggctttatcaaacttgaagaatccatacaacaggcctaggcagggcatgtgaacaataggtagtcacgaggcacccagcaaccttatgacccatcaggcgcacatgcagacaaaaacaactctgcccaaacttctagttgtataaacactagaaacaagcacgacaccaacaactctgggaggaacaatggaaaaaaggggaagtttaacacttctcccacgccacagaagaacaatatggagaagtacacttgcttcaccctcttaatagagaagcctgaggccatctgttggaaattatttta

SEQ ID NO: 39210 - DNA, 1072 bp, Cannabis sativa
  modified_base (720)..(720): a, c, t, g, unknown or other
tttatatgtgtttatttacattattttataaattcatattaggatgttaaataacatacattgtagtaaatctagatcctggttaaataatttcaacagaaagggctactcctcccattgccaattggttttgagatggaacctcattcatcttaaccttaaatcgtaacaagtcaagcaaattggtatcgctaaacatggcggatttgacatgataatcgctgccaagaagaatactgttattttccaaactttctttttgccaaactttccaaaagtgaaacataaactgataaacatggtaaatgtttgaaaaataaataaataaaagagagagtgagagagactatccaaaaagaaaaaaaaactcagattttactggtacactctcttctcttcactgagcttattttccatcccatttagggttagggttggcttcaaagatttttctttttctttcttcctttatcaatataaagctcagaaaaaaaaagaatggaggcagatgacgaggagagaagaaaagagagagttgtaatggggggccattgttgtgtttgcttcaatatatagcaatgtcgagggttacaaggaaaaaaaaaaaagaaaaaggaaaaggaaagaaaaaaaaaaggaaaaaagaaaataaaaaaataatttttttatttttataattttttaattttaataattttcaaattatttttttaaaaaaanaaagaaaaagaaaaagaaagtaaaaaaagtattttaaatttttattttttaatttttttttaatatgtataattattttttaaaactaatattacgtgaaccaataaaaatttgccatgtgtacaagtgtatacacgtaagcagtccaccgcggcacttagctgtgatttttggatagaggtgtacagagcgaaacggaatgggagtttaggtagttttaccgccaaaatttcagtttttattgttaactgccactactacaaattaagcttttagtgacactatatagtgacacacataaaagtgtgggtcactaaaaaattaaaagtagtttttagtgacacacaacatt

SEQ ID NO: 39211 - DNA, 1286 bp, Cannabis sativa
tgctgatgaatcattaccattcttataagcatgtttaacgaaagcactcaagagactaaggtcgagttgtgaggctattgtgatttgctcggtctcacgagcttatggtgttccacccctcataggtaccgacaatttccaagtgttccttacatcccagagattgtaggtttcagcaagagaactagtttaaagaaagaaaaaaaaagttctaccgaagcatttatctttttcgatttacagtgtaaaaaaatatgtttaactaaatccttcttttcgatttagatgagttatctaatgagttttgttttcttaataatgcaggagatttgcttgcttggctaggttggttcacatggtcgattatgtttgtgtttgttacaaagtttttgatttttttttggccccatttagattagatggcttgtttggtgattttagactaaaacaaaatttcacctcaaaatttattctcattgatgtgatatcttttctaaccactccacttgagtatagtcatgttagaaaatgtgttatattattatgtgtaaattttgaaagtaaattttgtgtcctaatcatttataatgacaattgacaatatatataactgttcattggctttacttgggctttgatatttttaactttatgttatatcaaatctcattgtttaatcatacataaaaatcactcgagtactcttcttcttcatcttctttttctttttggtaagatataattgccattttttttagattttatttacaaactctaaggttgcgttcttttttgtttttcttttttaattataaaagtgatctaaaaattggttgtataaaattgctttcatttttaattttttaaaatgagaacaaatttttttaagtcacatttaaaatttatttaaatagtttttcttttcttaattatagttaatctgcatttcttttattccacatcaattccacaattggactccaatcttacaattggactcgaccacaaccttggacctcggctcgagctagaccctagcccacatacaaaatcgaaccctcgactccaaaatcgcaacttgaacttagattggtctgaactttgctcttggatcctagaccccaactcttgctcccaaacccgagcctcaggccccaactcaaaccttagacctcaaccctgttgccaaccccaaaccttagctcaaactctgatgtcgaatcttgacctattttatctcgtcttagtttctcattcttcacttaaataaataaaataaaataaat

SEQ ID NO: 39212 - DNA, 3191 bp, Cannabis sativa
agtgaatggtcttagttggaatggtcagatagagatttgatttgaattattattgttactggatcaacatcgtgtcatcaatatatagaacatcgatctatacatttactcgaatttatacatatagtcaatttgaagctcaagttgctttcttgaaaatgatagggaagaatgggaaaaaataataagttagtaattgtaacaactagaaataaataaatttaggctacaaagattatcgaagcccataatattaatcaatgaggattttttcatagtaagggttttgcaataatgttatggtttgtcaagatctcgtccaaaattatagaacgaggaactctaattagacctttaatttgtccaaaattagttctcaagtgagcttttaaagtcaaaaagagaatctattttacaattgattttataatttttaggagtgtaaataggttaggtcgaatttaattggactatgatctaacctgacccagatcaggtaacgatccatcccgcccgcttgattagatgctcgaatcgaatcatatatttgacccaacttattcagatcgtatctgatctaccagacttcttctctttttttttgttagaattttaattttatatctaaatttataattttatatccattttaattttgtattagtattatttaagacaatactatgtttggtattgacttgtgttgtataaagataatatattttcaataaactttaccccaacaccaactccgggtctctgatcctgtgtctgggtttgggtccagctcctgtgtctggatttgggtttaggtctcgggtctaaaacaggatatagttctgggtttgagtcccaggtctcgggtacgggtccaggtttggatccaaatttgagttcaagtttagcctaggtctgagtccaggtcttaggtcccggggcctgggtctaggtttgggtctctggtcaggtccaggtcctggtttgggtcccgagtcttaagtccgggtcctgatcctagtccggaactcggatctcgtgtttgggcttgggttcaggtccttcgtttgaaactaggtcctagttctaagtccaggtcccaagtcccaagtacgggtccgattccgggtttgggtcttggtctagtccgggtcccgagtttgggtctcgtccctagcatgagttcaggtctcgggtctcacatccaggtcccaatctccagtcccgtgtctggatctgaatccaagttcaggtctaggtccagatcttgggtctcgagtcttggtttgggtccgggtgtgggtttagattctgaattcaggttaaggtcctgggtctagaatccggtgcgggtccaggtctggtttgggtctgtgtatgggttagggtcctaattttgggtttgggtctcgaatcgaattcgggtctaggtctgggtcagggtccgagtctaagtccgatctcgggtttgggtcttagtttgggtctaggtctgtctctcgggtctccgtctgggtccgggtccaagtgtgggtccagtcctgagtttgggtctaggtctgggtctagtttcgggtttggatcttggtccaggtttgggtccaagtacgatcccaagttttggtttgggtccgagtcctgtaatttggttcggtctgggtctaggtcccgggttagcacccttaaccgggtccgtgtctagggtccgggttttggcctgggtcctacgcctaggtcccaggtctggcttggggtccatgtttgattcccaagcgggttcggtctgggtctgggtctcaggtcatcagagatttgggttcggggttcgagtcttgaattaagtgtttttttaatatattgaaaccggaccggatcaaatctaatccaaaaaaaaaggtggggcagagcagatccgatctgagatctaaagactatccaaaagttttgaatcagatgtgctcgatcggatcaaaactccgacccactctaattaaatggatctttttcacatgcttaacttttttatatgttttccattatgagtttagggtttcttattaacccaagttgagttacatttaaaaaactaaaatactaataacataacattctaaaacatatatcttcaaaacataataatttcttgtagatattcttgtattttattattatttatttaaattattatacatatcaaaatagtggttgtatcatttcatttttcttaaaataaatacctaatattttcatatgtttttttacggattaaaaaataataccacatattatatttttgttacttgtcactattagtagtttttttaagtgctaagtaaattaatttaaaaatgaaaatataaagtatttatactataaatatttctaacgcacttaaaaaaattaaaataaaaagttctctttgttgaaataaataaaatattaaatatagataggtgttttgtaaagccacctaaaatttaattagtagttcaaaatagctcgaaattgccagaacaacagctcaaaatgctgaagacagcttgttgtagcaagatagtaatgatactcatttagataggatggtttatttactgctcttcctgatctggtgtgagaaaaaacattagaaggcaaatcaggtatgtcattatggttagaaatagcagcagactcaacagaagcaggttgagaaaactcacctgatgcagagacatgttgaaatggagacaaactaggatcaggagaatgattagaagagttgggttgagaaaactcacctgatgtagtacctggtgcagaagaattcaaagtttctgcagtacctggtgcagaatttgaagtttctgcaatacctggtgcatgatgtggtgaaggagtaaaaaaattatcatatgcaggtgggatacttccagtagatacaaagggaaaatatgctcataaaagtaaacatctcgagagataaatgtgagatttttgtttaaatcaagcaatttataaacccttgacacctggaggatatcctaaaaatatgcaaggggcagatctaggtgagaattttgatcttgattgactcaaagtagaggcataagctagacacccaaaagcttttaaatgttcataggccggttctttagaatgaagaatagcaaaatgtgtcttatttttgagattaggtgtaggtgttctattgatta

SEQ ID NO: 39213 - DNA, 1875 bp, Cannabis sativa
cattaggccacgcgaacagttgatgacagattttctacttttgtgctaaatatattatctaataataattaattcagtaattttcttcctgacacgtgcgaaaacaagaaatgtgcgaattccacttcggggacgacggcttaaaactccattaaaccttggagccccgactttctcccaaattgattttcgagtcaaagcaaatggctttggcaatctccaattcccttcgctgccccaatcccaagcttcatcttccccgacggaatcctactccaaatgcttcgctttccacttttccatcttccttcctcaggtacaattttctcgggaaaaagttatcttatcgtttcgtttgtttgtaacgtagttgttattagttcttggactcttgcattgatagtgtttcggtagtttttcttatcagtttcttttgggtatttggtggataagatgcattcaataatattttagtgtttgtttgttttatattttttttttaccttttgttttaaatgaatgacactagaagtattggccaggtttcagaggacattaacatggaagggaagggtagtttgtagtgctgcttctgcagctggaagttctagtccagacagtgacttaaatccatatgaggtgatttgagctcatatatgataatatatgcacctgttcacattgattgacaaatgggcttatatataaatatatatatttatatatatttctatatgtgcacacaattgggttttctcttcactgttcttgtttttcaggttcttggtgttaacccaattgagggttttgatacaataaaggctaagtataagcgaaagcttaaggatgctgagagcagaggtgatgaggcaactgctgccagagtaggttacaactctctttaagctattatgtaaatgaaatgatattcatctatttaaaattgtaccttttttttttttggtttgtgtagctggaaaaggcatatgacaaggtcatgatggcacagttacagaatcggaaaaagggcatgacatttggttccttcaaggtacagtgtgataatttgtctatttgatggttttccattatagtttgatttgaaactattaaaattatggaaaaaagaaaacgtgtattccttttctttatggcatttgcaatgtgtcaagttattacaattgaatacactaacaacatcgaaagcaagatcatgccgcatatgcattatctgtgtgtatgtctactctactttgttcatgagttctcttttcggtaaggtctctcttcatttgcattttcaaacaattctagattctctattgcttgttcttgttgtaacctcgtctgctgttaacatttcatctatacagtgtgaagatttaaagaaactaactttccttttttattagtgtcatacgtatttatagccttttgggtactacaaatacaatgtgtagaatgtgtatttttttgtagcttttgtctttgaagatattatcaaagaataaaacactaccattaccatctatttcaacttgtattagttatccttataaaacgaacggaaaatgcaggtctcgaaggatgttaaatatgctgataagcagccaattgtaccgtggggaccaaggttagtgtctattaatatgtgtatataaataaatatatatgtactgtagattatatctctataaatatttactttttcgctgtgttcatatatttgagaatatatattcttctggatttcttaatgatttgagattttaacatctggaagtccaccaacttccaaaaggaagtgaataggatggctagacaatttttttcttaggcaaaaatcataattttcatgttagatatgtgccaagg

SEQ ID NO: 39214 - DNA, 2627 bp, Cannabis sativa
  modified_base (2487)..(2493): a, c, t, g, unknown or other
ttttcttggagaaaataaaggaacaatttatggatcagaaaaagaaagaatcttttgtaaagataattaaaaagttatagggtaaaatatatataatttgtgtgtataattaaagaagctaatataaggtcatctcgtactggaaaaaaacacagtgtggcagagccacagaggtgttatgcatgccgatccatatataatatatatatatagatatatatatatatattagcatggttttttaacaaggcaatggatcgatcaatgatcatcaaatcctctagggaaatgatgaagcattgacctgacataatccattgctttttctgtttttctttaatttattggttattttatatatattcattcatgaccaaattaattaaaaaaaaagctgttagaaccatatggtcagctttattgttccaactttatttcaataaggaaatattgttttcatatatttatgtgtatatatatctctttgaatttggttactaaagtcagcttgcatgtgttgaagaagaagataaaagatcgaccataatgttaattattcattaatatataatatatatgtaattaactaaacactcgatcgtatcaatatgatgatgagatgaaatgtaaaataattatggcaatgatttttgaataaattgggatccatcttaccttatatatatacaaaaaagagggataatttaaaaaaaaaaaaattacaaaaatacttgtatgaaattttaaatattttttacagttattttatttacataaaatataatttttttggtgtatttttatgttgtacttttatattctatgattaattttttgttatctgtatattatttttttagttgttttgatattgttttccgttactctcatgtggttttcttgtgtttttatagaataccgtaaaattgttaaaaaaaaaatttaaacgtaaaagtgtaaatattttaccaaaataacaatttatgtaattttttgaaaagaaattgagatccatctttttaactaaatgttatattttatcaacaaagttttagtttacttaatggttatgttataatttacctatatattagagaacaaatgtgctatcctaagtttaactaccttataagtttaatggttaaatttgcaatttttcaaaaatatatatataccgccatcttaaaaaattacaagatataaaattatgaaaaaaaaagaattaaaaaattatcccaaataaccaaacagataaaataccaaaaagtgtacagtagatttttctactaagaaataactaaatatacaggctaaatatatctgatcaatagttattaattatatataattagctagctaaatacaattttaatttcttgattagttagagagtgataaacatattatatatgtatatgcacatgtatgccattccaagctaaacaacatgcagaaaagttggtgattataatggagtactactagaaataagaaccctatagtactactactagtactgcatggaaaatgattgcatagaataagagatatagtatttgcatttgcatttgcatttttatttatttggatttatgagataatatgaaatcatggaagagatgtgaaatttgaccaccaacaatatttttgccaaatttgttactgggaatatatattagaattactatggcatgtgacccacatcacatttgaccgttttcaaattcatgtttgactctttgaccctataatattatcaatatatatgctatcatcctttccattttctcagatcaaaaacaaaaaatcatggcttccattttctatgatatttaacatatatattaatcccttccctaattattatataatgttattttgattttggttaatagttactagtttgggttatatatgcatattcataataaaatgttataaatataaaacttatatgaattcaatcataatagcataattagaagggaataatcataataacatttaaataataatagaaattagtccgcgtatatttaattattaaaattcaacattatggtgtagattaacaatgggtcttcttaaaataaataaaaaatatatattgacaagtagttattagttgtaaaacagaaatattaaaagagcattgctattagacactagtagtgtctagctagcgatattccctaaaagctattatgtgagactcgatacttagttagaccaatagcgatatcaacacttaagaaggtgctaggcaccactgatactctttaatatttctcatattaaaatctaatgcatcatatatgaaattttgaggataagtcatgaccatagatggtcatatttacaaaaagcaaccacggttaaattcaaggaaatatacaatagagaaaaatgttaaagggtacgtatttttgtaggatatatataatagtataatttaataatgagttccacttattttattttaataannnnnnnaaaaaattattaattaattataaatcaatattttatcgtggtgctaagaattataaataccttgtaacaatactcatacgtataatatgtaccaaggtgttagcaaatacaatgaccaaaatataattaagtaa

SEQ ID NO: 39215 - DNA, 1468 bp, Cannabis sativa
ttttttcaacaccttttgccatattatttgtcaccaccataaataaagccataaactccttttattagagattatatgggctaattggacctagatgtttaattagagagaattaattgtctgaccaaaaatgttttagagtatgttcataggctccgaacatattagtacattatgtccatctcattatgatacaataataatatcaccgattatataaccatcattatatattaatactaatagatgacaacacttaactatattagtcttggtaaaatattttaacattatataatatgaagtaagttctctggataacaacaaaataattcaaattgacagacataaaaaatagttgaaaagacttgagagagtaaaaattaaatagaaaaagtgggaaaaatacaaatgaacttatttatatcactactgaattattgctcttttcatatcagatttaactacatgtttccgagaatatattgtagtacaatcggacatgtgaagtttgccactttttcaactcataagactgagctcatagccttatacttaattaatcttagctagtcttgagcaaaccttttcttggttaattaattaattaattaattatatgttacatgaaaaaaaaaaaaaattaaatccaagaaaatcaacaaatcaatctatctgtctgtccataaatatatctttatgtatgtgttttgtgaaacaagttactcaaacaattaacttaattactcgttgactcgatcaaatatagatatatattaatttataattatatataatatattatgggattttttctctcatgtagatattgttgacttaaattttcatgaaaagatatggaaatatgcaaatataaagaagttaatttcaaataattagctccatctatatatttaataccaacttgcatataataacaaattaaattataggatcagttgagtcaagtgttaatattggttaccgtgaatgcatgtatatactcattttaagttaaagtgctgccaagattttcagatgttaaataatattggaaagcccctaaaaatagggtgtatggatgcaattttctctattttgtggtcagcaaatttttttagttcaatttattttaatggtcatcaagtacgttgtactgcaatttttagaattaaaaaaaaaaataatagtacttttttattttatacgtatatgaaataaaatatttaagtattatttttatattataaattattttaaattttttaatatttcacacaatattataaataactacaaaaaatagactaatatttttttctagatgccaaatagtaaaaatactacaaaaaatagttactttttagtgccaattttttaattataacataatttttttgtgattaaatgtgacttttagtcataacaaaatattacttgtgattaaaatatagtctttaattacaag

SEQ ID NO: 39216 - DNA, 1337 bp, Cannabis sativa
atttttttagatgtgtggcttttttagcagtgtctgaccagtatgagtgtggtctattttatcaataaaaattattttcccttaagaaaaaccaattttattataatcaaagataagatatcactgaacatgtcaaatttttcaatagaagatattatgatttttcttaaagtatttagatttgtaggacattattattactttttattgttttttttaccactaccacatcaacatacaaaaataataataaaaaaacataaaatatcagtaataaaacagctgattaggattttcccctctaaattttgacatgtaccaaatcatgtcctctaaacttttttagccgttaaaaattccccatgaactattgagattgttagatttaagaatttttgtctaatttcattcaattttactgttttagtgattgtttatttactaaatcatgctccccaaattttgatatctacaaaatcatgtccctcaaactttgatatgtactaaatcatgccccctgaactttcatctatgttaaattttttttaataaaattagacaaaagtttttaaatctaacaatctcaatagttcagtaagaattttaaccaccttaagagttcaggagacataattcctaattagcctaaaaaacattcaaagaaaatggctgccacctagattaataggaatttgtacagaattagcctcattaaaaaaattgtaagtttggtgtaattttttttttaaaaaaaaaatggttaagatataaaattgtcatctcttattaagtctttcgaggctcggggagagttgcatggatgtagggtgtgtaatggagctccggttatttttcacatgctctttgcggatgatagctacctatattgtaaagctatcgataaggaagctttgaatgtcattagattgttgcagttatttgaacaagcatctggtcagcaggtgaattttgccaaatccaccatcttttttagttcgaatactacagaatctatcaaagctagaatgtgttctcttttgggtatgattgaggccccgccaaatagtctttatctgggtcttccttgcactatgggtcggaataaaaatgctatccttggttttcttaaggataagatggaaaagagaattttgagttgggagggtcgtcttttatctaaggctggcaaagaagttcttgtgaagacggttgctcaagctcttccctcatatgttatgtcggtttttcttcttcctgttgatacttgcaacaagcttgaagggatgatggccaagttttggtggcggtctgatagttcaaagtcacatggtgttcat

SEQ ID NO: 39217 - DNA, 2066 bp, Cannabis sativa
tcgggaaaacccatttttgtagtagtgtcttttcctaaaaaaaaaaaaaactaaacattaagtaattgaaaaaaatctttgatagattaactgattcggaaaaaaaatctttcatgtaccttaaataatttacatcttaatttgaattgaacacatttaagtgtagcaattttattttatttttttaaaaaaaaaataaaatttatatcatccatatttatgtataaagaggtaggtgattttttttgaagttatagagagattgatatcggtaattttaactaattttgaataaatttatattttaagtaaatttaaataactttggccaaaaaaatgtgaattattttagtataataatttaaatctaaatataaatttatgttacagaaatattaatataataatatatataatattctactaaatttagtttaataatctattggccataggttagcataaaatacatataaaaaattaatgaaataaaaagaaaaaataattagttttcaattcatatatcacaactatgaaaataaagcaatcttaaaacagttagttttatgtggattttttttttatatagaatattataaaaatatatataaaaaaactttgagtgtaaatgtgtaaatattttaccaaaaataacttcaattttttataatattagaaaaaaattcaaattaaatgtttttatttaacatatatgaataggaaaggaaggtgaagattacccaaatgtctttagtgtttaataagctttcaatttatgctcttgacctattatttgaatatatcaagaaagatgcatatacctcaaaatatttaaaattatccataataactccaaagaatttgagaaaaacttgaagaattatgtgagcatttttggctgtaaattaatgaatattataccattcatatttgggacaaacccaccaaaaattattaaatttaaggagatcaaatttatccacacatagcaagtgaatcaatacttattaattgatgcacatgcatatgtaaaccaactagtagttttcttcatgagaatattgaatatgaatggatggcatatagctaacgtaaagaaatatctgaatctacatatgaaagctacgttgagtagtgatactgtgatacacatacttgagttgaacaagttatctataaaataaattaaattataaacacaccacacatataattttagaaaaaaatataataataagtagggtcacctatttccacttatagctatacttgaaaaaaatgaataataattaataggatttgttctcttgaatgatatatgaccattaattgtggagttctccatttctctaatctttttttgttttttaatgttgcaaaaattttacatgaactataaaaattattgtaaatatcttcggcctttagttacattctgcttatttttttaaacaatttattgatatagcactaatgtgacgttaatctcatccatctaaaaaatttaggcaaaagataaacattactacaaaatcgtcagttttgtgagtgccataaatatggcccctttagtttataactggtggaaaatgtcttttcgaataatttataattgacacgaaaagtgacacgtgtcaattataaatcgatagcaaagactttgtgacatgcataaatcgacggtaaaaaaaatatatagacctggtccttataaaaaaaatatatctagtatttcaagaaccaaatttcaccacttcaaaaatacccacaaaatttaaatctataaaaatcaccaccaacaaattatatatctgtattttaacgaatcactacaaaatatatctatgtatttatggatacgcaagtatatacgctgtggatattaaattcttttaaccagtcaagtcagtatactcatatctttgctcatcagatgaatctgaagaaagctactgttatttataacagttggatttaataccaacttaaaggggacgtaccatcaactatatataggtgttgctctattctcaaaaggagatttctgatctctaatctccaatgct

SEQ ID NO: 39218 - DNA, 2709 bp, Cannabis sativa
agtctatggaaagttctatacatttttgcgcttccaatcaagaggagggacgacttcttcttcctcatcaatcaagaccacctcacgttgcgttgcttgggtaggttggtctcaggactgtgtattagagcaagggcgtccagaaggtcatccatggattttgctgctcaaaataaataaaggggtgtaaacattatcaaaaaccatgtatgcaagtataacacagtgaaactagtcctaccttgatggtttaattctgtcctagcaaattcagtaattaaaaggctggtgtcgtcatcccctagaaagctatcagagggaaggaaccaacttgaagtcatatatgaggaatgatccaagaggacagagcccatccgggactgacccaaaaagtgacttaggttcaaaaaataaaagctcttggcattgtcaccccaccgtgaatggggcattcataacttatacagtcaattataaaattctactggccttaggccaacataatctcggacagaagggacacggtgaatagtcaaaggggacttacaaattctagagctagtggcaccgggagccccagggttgggaaccataaagggaaacttaggccgaattggggtttgctccttccctgctttctccttggaggctctcccttaagcgacatgcgctcgggcaaacggtagctcctgttcccttctatatttgtacttgttatatttatcctctgaaaaagagataatatccccccggagcgccttctcagtcccaagattttgagcattggggcaaggaaccttcaacagattaaagtcatccactgattggctctcgaggataagcttggccctcctgtaattgacagttgtgatcaagtaccccacgttcaactcctccttttgtaaccatcaaacacttgtgcgtggtttaggaagagttgagtgggagcagtgcgatgcatgggcaaaaccctgacctagtttgtaagcaggtctgggcgctcgaaggctttgaagctggaggagaagaaaaactgatggctgtactccttcacattcttttgaaaattgagaggcaccggaccctcattagctgggtgggcctaaagtttgtagaaaccgtctttaaaatcgtctccctttttagggaccgaaaggagttcgtaaaagtatagaatctcagccagactaggcgagacccaattcctggcaacataaaaagtatacaagcctcacagcaggcggtaagcttgtggaataagctggtagggcgaaaggccaacaaaaactaaaaaattaataaagtagtcttggagcgggagcatggccccatacatcaaatgggtttggctccatgccccgaaaccgttgtaattatggttgggcgtctcttcatcccacgcgaggcaatggtaagccccagaactggaaggtttgattcttgcaacattaatgatcttttccagctggtgggcgcacgtcagtgtcgaatgtagctcatctgcttcccaaccactggagcaacaggttaagtttttgtagatcaccgggcccttcattacttcctccaaggtgatcaatttctttggcccttttcttcgaagattttgctccagtaggggtgggggttgacatggtatggacctgatggagatctaagatttctcggtcgaacccgaagaaatcgtgagagtgaaggtcgcggagaacttcactcatctgaaaaagaaaatccagccgttagcccccatatcaaaccctaagattagaaaagggaatgggagtaccctaaccgctggaaagaggccccctccggatgcctgccaaaaaaagagaattcagagattctccaaggcaagcatcaggtgaaaaacatcctaacaaaaagaaagaaaaaagagagaaggaaaaaagggtatggaagtcgcttcgaacacccagaagtaagcaaacaaaaaaccaccactttctagtctcaaagtaagatgatagtgcacatgcagataaaatagcaaacgaaaaataacaacaaacaacggcggtcatcggacgccccattttggggaaacatcaccatgacattcaccgtaaccaccgtgccacaaaaatcaaccacaaccaaataaaagtatcaccatttttattttgccctaacaagcaaaaaagaaaatagaaaacgtttgaatagagacttacacaaaggtagtaaggaagaggttgacggcgttcagtggtaatatttcgtctgacagcggtgaaggaaaagcaggagatagtcggaggtgtctggaatttttccaaatgtgttggatggaataaaaatcgcaaggtcatgaaagtaacccagtaaaggaaagtgttggcttttataggccattaagggtgcaaggcagcattgatcaagcaccatcgtacggtgaagattcgtagcgattcgaattctgtgatccaacggatgggatgaacgggtgtgaacagaagaaagggcggttgaaacgtttgagtacctctctgacaccagcattaatagaaaagtctatcaatagatgggaagcaaatcgttgcctgcaaaaggaaataaaaattaatgatgacgatcataaatgctacccacgcgcctggggcacgtgccactctatttattaagaccggagattgctcacaagtctcatttacctactactaaataagacttgggggtaaatgttgc

SEQ ID NO: 39219 - DNA, 2388 bp, Cannabis sativa
attaataaaaatataatactaggaagaataacaccaataatattttttagcattttttaacgtatatgttttagcatttcaatattcttattcaaatgaatacaaagagcatatattttgactgtagtacgtactgtcttttattaactatatatggaaaaaatcattcacgtggaaataatgagataagctttacaagcacctaatagagtaataattaaattttctccaaaggttatctttatcaatatttaattagtacatatatagggtatataagggaatttattttatataatattttttaatttttttttaaaaaattaattatttcagtccttcaatgaattttagttgtgattaagttattttattaatgggtatgtagaattgtaaattgttatgttaatttccgtttcaaaagtgaaaaataaaaaaactcatagtatatataggtgttattagaagtgttacctctcgctcacaaaattattaaaccctagccgctactatagtctataggtggtcaaatggatactactcatttctcatctatcttcatcttaatcattccttttttcttattccaaaccaaaaaacgacatcgttgtggtgacaaaaacctaccaccatctccaccctcttatcccatcctttccttggccacctccatctcctgaagcctccaattcaccgcacttttcgcgatctctcccgaaaatacgtagggacgaaatcaaacggctactagatctgtaagctggctcagtacgataaccagctgacagaaaaaatagtagaaatgaagtcattactttcaagtttgactttcaacatcataatgataatggtggcgggaaaaagatattttggtgacgacatcagcgaggagagccgacgatttaggaagataattgaggattcaacgaagtacgcgggggcagcaaacgcagcggattatttgccccgggtgttgagttggtttggaatggaagaaagtgaagagtactgttggtaggaatatggatgagttcttacaaggtctcatcagtgagcatcgaaataagggtactacttcttcttcttccaccatgatccaccatttactttctttgcaggaattaatctcaacctcaatattatactgaccagattatcaaaggttttacacaggttattattataattcattaattatatactatagtactacagcaaaatattatttaattagttaccaagtaggtacttcttttttctaagcgctcgttaattaattaattattattaccaaacatgtcaggattttattaaattaatataaaaatattttttttaaaccaaacgtattattttatacaattatccaaactgtatcgtgagattaagacttaagctaaaatatataaatgctgaaaaatatgtgcgttttgggtacactgtgttttaattacaaaagttattattaattggatcatttcttttgtaaaataataaattagactgtgaattttttaatagtacaaaatattactttgatttaattttttattaaaataaaacttaataataattactctacttaaaagtattatgacaagattagttacatttttgtatggcattaaaaattttcttcaaattagttatatatattgaaaaaattataaaaaattgagttcaaaagtattttacactattttgatcatttttacaaaactcaatatccaaattaggattaactcttttactcttttataaatgacaattttttttatttcaatatagactatatttacagctggtacggacacatcatcagtatcattagaatgggcaatgtcgaatcttcttaaccatcctgatgtccttaaaaaagctagagccgagttggatgatgaaattggacaaaaacgcttagtggatgaatccgatcttcataaattaccttatctccaaagcattatctcaccttacgactttacccagctgctccaatgctatcaaataaatacatgatccaaaatatatcaccatataagtgcatatgtgtgatattgtaccaaaagtattgcctactaattaatattatagtgtggagcaacttaaagtactaaattataatattatatatctataaagtctcgaataattataaaaagagaatagcacttaatttgctcgagtggtatttgtatttatattatataagtgcaatttttaattatacctctcatatgatattagcaagaaatgctcttctaaattgtacaaatacaacttctacatttctctctcgcatacctacaaacccaaaccagggtatacgtaccactactatagtagttacaaaccaccactttattcttccttaccaaaaaaaaaaaa

SEQ ID NO: 39220 - DNA, 1872 bp, Cannabis sativa
  modified_base (50)..(58): a, c, t, g, unknown or other
  modified_base (1710)..(1719): a, c, t, g, unknown or other
tttgatatgtattaaattatgcccttgaactttcattcatgttagaattnnnnnnnnnaaattagataaaaatctttaaatttaccaatctcaagggaaaatttttaatagccaaaaaaattcaaaggacatgatttgaaacaagcatgacaaaattcgagagaaaaaaatcctaattaaccttacaaaaaattctacccttacaattaaaagttactccaaataaaggtttttttttttttttgtcaatttattcttttcaaagtattttttttttcatatatacgaaatatacggtgttacttcaataatttatgagataatctaaattataatctaatttaaatcgtaatttatattataacccacacagtaatttaaatcatgcaatttaaatcctaaaattaaaaaagaaataccaacaaaaaaatcgtaaaattaaaaaattaaaaataaatatataaggtgattttctaaaaataaaatattattttcaatgctaaacaatacacgatattaataaaaaaaaatatagcatcaaatatataatattatcgtaattacaatagcatatatgctaatattttgccttggagattcctctagcactcttttttggtgttttcagtcccctttggacggttgtcctaaggaaagctttcataaatttgtaataagttataattggatgtctacaatctctcctacaaaaagaaaaatatagatgtgcctctcgtgtatttggcatttgaagatataaatgtgttgcacacttaatatataccagggatacccatttttaaataatttataatataaaaataaggtttgatttgaaacattatgatggatgcacatttttcatactcatagataatataattgaaactctaatttgagtactataaattatttaaaatttcaaactaatgaaatatttattatacaagtttatataaaaaattaaaagattctaattatttaattatcatgaggaagttgagtcattataaaagtacatgcgattttttcttttcgtcttctcccttacttctagagctttttgtacttctttctctcggctaagtcgactgctactatattgtgctgttttggtatcttggccaagaggactcttctggataagctttggttgctcaatgttaggtgttgtccccttttttttcctccctctacctcagttggtgcccgtgttttgcaagttgctgctgggctcgattttgtttggtgatttgctagtgggttctattctggtgtttctaatcttaggcattatgaagagattgcaatcagaatggaaaggacattggtttgtctccgagggaagtagttcactcgtgttgttttatctcctgtaacgggtggtttctgtttagtagtgttcattatctagatcttcttgtttggttgtttgtgatttccctttgtgtaataataagggaaattattctataaattatttttttttaaaaaaaatttacagtttgaattgttccggtggtttcattggtggtttttatgtgaattgttatgtgaatttttgttgcaatttaagttgctccattaattactacgagggttctatgtaaaattctataaaaatgccaaagaaaaattatttgaaagtataaaaataataaaatgtttttattacattatgttagctttattgtgacagtcagtagtccnnnnnnnnnnaaggggaaataccaggtaagttgtgcaatcccacactgcctgtggaaggtcaaatgagatgattcggagactgtgtaggtatgagactacacagttgaagagaacttaaatggattgattggtactacctatattaacaaggtgcatcttgtt

SEQ ID NO: 39221 - DNA, 1675 bp, Cannabis sativa
atattgcttttatttttttaaagaaataaaaaataatatgaagagtaaaaaataaatttaccgtgaaattatttagatttaaaaataacagagaaaaatactatccaccatttaaacttataaaatgaatactatcaattaaaaaaaaaatcaattaaataatgtgacttaagtattttaatatactaaaatgatagtttttactatcttttataatacattaatttaactaattaaactaataatttttttcttttaatatattttatataatttttttttataaaaacaataaaaaatcaaaacaaccgcgttacaataaaaaatctaaacaaccgcgtcgggtgtagtatcgtagcctagtattattgtaaactaacaacttgagataactagaaaaaagagcgtaataagtagagaaaaataggtttgattttttaccctcattctctctctccttgcacacatttctctctcctcagtctcacacgccacacacagtgtagtgtggtgtgaatttatgatcaagtctatctcatcacaatctcttatgagttgagaatacactgtgatacataaatatactcatcctatagagtctaatagcccactttactcttgagtattgaggttggcttagaaaattatggtgtgaactcttcagcaaacttcttggattgaatgttcgtaataatactaaaagatagctaggatcccttgataggttataagaggtattgtctctctattcattagtctagttttaatctatatacattatgttgagatccttagtcttatggttcatattggataaaattatttttatcgaatctgctttcgtttttttaactctgatatggactataaaaactaacacggacccctgagtccatacccgtacccagaccggatttggacccggacccaaattgggacctggaccctagactcaaaccaaaaccccagacccagacacggacctcgtactagtccctcttcgggtctagaatccaagtatggtcccaatacggggtctgaatctggatctgggtctaggtctggattcggatccaggatctaagtttgggtcccaattcagagtctgaatctaggtccgggtctaggtccgtgattcgggtctgggtctaggatttggatctgggtccgtatttggatttgggtctgggtctacatttgggccgatctgggtcaaggtttgagcttgggtcagaggtccaagtctgggttcgggtctagggtccaggactagggtcggggctagtttactccagaacctttgtaaatattataatacaagctaatacgggtcatttgttatgtattaaataatatgactcatgttgtgttaaaatttatggtcgtaataattaatacaatacaatatttcatccaaacatagtgttatttattatttataatacagtacgatccttatacaacctaccaaatgagcccctactatgtaattatgtggtaagacaaacacacagaactgtgtaattaccttcaattatacccaattcaactccctcttggcattctaaacacggccgtaatattagcatgcatgcaatgtacttagaagatgaggattgatgggattataatgccctaacactacaaaaagttattatttttagtgacaattttt

SEQ ID NO: 39222 - DNA, 2330 bp, Cannabis sativa
  modified_base (1343)..(1352): a, c, t, g, unknown or other
tgaaattaaatttattgttaattaaacacaaaaaaaaaaaaataggacaattactttatatattattattatttttttaaatttacaatttgaatttctaaagttatttctcctgtggtttttaggttgttatacgatttttggttgcgatttaggttgatccgctagttgtaataggggtactagctagaattctgtaaaaatatatataaaaaaaaattgctttgaagtctaaaaataaaaccccccccaaaaaaaatactattttagcactattttttttttttatataattttaaccacaacactataaattacactaaaaaatattttcttattattatattattttaccactaaattttttctaattctaaacaaaagatactattcaattattaaaaagtaaaaaaagaaaaatatcttgatctacgatgtctataattattattaatgaaacactataaactctcaatatttcgtgaaaaaaaaaatcacattatatataacattttaagtttagggttggaaatgggcttactaaaaaatcatgtatatttttggtggctcatatcatcaattacacgacctataattataaaattataagataatatatatttgttggtagtgtatagggcacatgggcatgcaatgcaagcatccaaaatatatgttttcagagcatagcttttcacatgctgcaaatcgtagcactttctttcttttctttctttctttttttttttatttattttttattttaatatgtttataaataaataaataaataaataaatgtggttgtgtgataatgcaagcctgcaactagaatgggaattgaattatcctttgcacgtgtgaaatagttggtgatgatcactatatctagtgagttaagaccaaatactatactatatatatactatgatcgaggttcatatatattcacacaaattaatgataatatatatctatagtaatgttagagttacataaaaaattgtacctttttttagtaagtaatattttgggtattgtgtataataaaagttatttactgatctatctattttcttaaataataaaatagattatgtattttttaaaatggtaaaaataggactttaagtttaattttcgacaattttttttttatataactaacttgaagataatttataacacaaacagatacaaaaaatataaacagttttgttataacacatttaaatcagattattattattatcaaaaaataatctgatctagagatattatgacaaaactggttacatttcttatatctgttcgtgttaaaattatcttaaagttagttatannnnnnnnnnaaattattaaaaattgagctcataagtctatttttactattttaaaaatataaggtatatattattatttaacaaaataaaaaattcaattggtaacttttacgaaacaaaagttttaaaatactattttttatacacaatacattgtatgtaaactttggtctatattatctatctacaattctttgcccattcttatatatttgtaattattaatccaacaaaataaataaataatattaaaaaaaaaaggctggtatatatactacaacaaacaaaccatttctttgaaattctatacagtgtgggccttgtcccttgggcagatgatgactgtgttgactgactccaatgagaattgctattaatttgtcaaggattttagagggttcaagtgcaacataattttgtatatataaatattcttattttttttaaggaaaaatattcttatttttgttccttacaattttatttattttaatttacaataaaatatatgtgccccgctattaaattttactaatctaaatatagtagtatattaagcatgattggtggcactaataatctagaatgataataaagataaccttccaacttcagacccgaactaagtataggtgggttaggtaatatttttttttcgaataatttaaaatatatatataaaaataataaaaaaattacaaaaatacagtatgtacagaatttcatttttttttatgatttttaattttatttacatgaaatatgttttttttttatgtatttttatgctgtatatttgttatttgttgttgattttttgttatttgtatattaatttttaagttattttgatattttttcttactttcatgtgatttttttattgtatttttataaaatactctaaaaatataaaaaatttacaaaaaataatattttatgtaattttgctcgacttatccacttattggacttgagtagtgctaa

SEQ ID NO: 39223 - DNA, 1303 bp, Cannabis sativa
tccattgcttcaacatattgttccacagctttaccaactttatctgctaatttctcagtcaaaggatcagatacttcatgcggaacatcgggtaaaatggagtcatatccttgacctgcataagagaattatgaagttctatatggtccacaaacataatgcttaaaagattacataaaaaaaaatatagcaaaaattgatattgtgatgagctccacagatttagttttacattataaaaacaaaactcttgtaattttttattattcaaaacatttttcaacaaaattgtagacaattcaatacaaataagacaaatgtatgtgatcataaaaaacatttggccgatatttttcaaattcattttagtggagtttctttttcttcaaaataaggctcctcgccagtactgaactacgtatagattattttataaatgacaggataaaaagaacaacaaatgcctctagaattcaaatatcaactaacctgcaggtttagcaataaaactcaagacccgatttataaagttgcccaaattattcagcaattcgctattcagttttgcttgcaaatctgcccatgtaaataatgtgtctgaaacctagtttaacaagcaaataagaattattatggcctaagagggaagaggtgaaaattaatctattatataaggaatcaaataaaatgcgtattaacaagagtacctcaggcctattagtaagcaagtaatatctccacacttccacaggaatatttgtatcttttgcatcattaccgaaaactcctatgcctttactcttagaaaacttccctgcaaaattacaaaatcagataacctacttcttcaagacggccattatataagaatccgacaacaaatttccaaaggaaagtttgagaaaactatatacattgtgatagctatagtgccagacggatactgacctgattcataattcaagtattcagttacactaattgttttcatcatagtccattcttcaccagttccaagaagagtagaaggaaacatcacctgcaataagaataaactaatttattctcaaaagagttgaactttaaaaacatgtaaatgaaacccatattttcggatgatacttggaatgtaaaagagatgactggtaaaagtcacatctccttttgcatttaatctccagaaaggtaggagaacatatgtttccacattgagaaacattttaaaattcaaatgaacatctattttcacattgaaaatatgggaaggatccaaaaggagaaacaagaacttaagattttaaaa

SEQ ID NO: 39224 - DNA, 2266 bp, Cannabis sativa
ttatattttaaattatatcatttaatataatatatatacataaaaattataaaagttggacaacaccgcgcgaagcgcgacttagttccctagttagctaaatatttgtgagcaacaacaataaagagtctagctaggaacctttaacaaattattacatcctaaaaatgagttattcttacataggggcggaactgtttggtattgtggggtggccactctctaattttagattttttcttattacatataatttaattatttttttttgtttcaaaagaaaaatattacaataagaaataaaatagaagagagaaaaaggccaacccaaatttaatattagatggataacttattttgtgtactatgtatatattgttttatataggttgcatatttatctttttatattatattacatgttaaatgatatagtagtatatattgttaaaaaataaaatagaaataaaaaaattaagttggtccttttgtggttccactaggcgttacaagatttatgtttggttttgatgtcggggattcacttggctttttctggtgatatagtgctggaattcttgttgaggacaacacatccaccattggtgaggtggtatataccgacatattccttgacttacgattatgaatataccagtctatatatgctattggaaaacttaattattgatcgagttgattacttggtttctaattatgatatatataacagggttttagattttattaattgtatttctgatgttttattttctgaaattatttaattcaaatcatttcaagaaataaaagtgaggtttgtaatatttttgtttttcaaatttttaattacaaaaataaaagtaaattttttatttttaaaaatttaattttgaaaaaaaaaatgtgttttataattttttttttaattttaaaaataaaagataaaagtgtattctgtaaattttatttttatttttatttgtttcatataagtcaaatccaagagcggaacgagtttaggtcggagttcgggtctgtgttccaagatctaaattatggtgggagtttaaaatattaataaaaaaaaatggtttaaaaaaattttaaaagtaatttttttttaatttaattagctgtttgatatatttgatgtttacttcgttttttatttatatatatatatatatatttatatatatattcctcttaaagatttaaaatagatgttataatatatttttattttcttggtcaaaagatatatgatattatatgaaaattaacaaagaaaaagggaagaaagaaagaaacgttatagcataattttagtaaatatataattttatttttttttatgtgaggagagatttatcaaaataaataaataacatgagaggtattttataaagttttgaggtgcatgtcggcacttttcaaattctacagttatccctaccgaaaaataaaaagggattatttcataaatatttttaaaaaattatgtttttatagaattttgagtattattttatttaaaaaattatgtttttatagaattttgagtattattttcatatttttacagatttttttttcttacatattgttcttctgaaaaataaaatttatgtacaggttatttttcacattttagaaatataatataatattgtaacaatttaaataaaaaatttgtaaaaatataaaaaaaatatatatatattttagatatattatataaattttccaaataaaaatccaacgtattatcatttgtaaatgtacaaaaaaaaaaaaaatacacattagttattgcgtttaaacatttccttaaaagacattgataattggtcaattaattgacacacaaaagaagaaagttaccatttattaaaccaagtgacaattaaataatttaaatcaattgaaagcagccgcataccatatgtcccaattagagggattaaccgtaaatataattataaaaatatatttttatataaaagggttaagcaaaagaagaaggcaaattaaggggaatgaagtggagtgaaggctaatgggttttactagctgctatagaagaccaagcacaataataataagtagagatttcttgaataagaatagtatttaattttatttattcatttactatagcgaaaaggtcaagcctgtgagctgagtcttattcaaacaaatattgttgaccacatcacctaaccatacatcctctctctttatattctaatctctatatata

SEQ ID NO: 39225 - DNA, 1319 bp, Cannabis sativa
ttcaaaggtttgcctcttatcccttttaaacaattatttacaccatcatctgtgattatttaaggatccatttctcaatatatgattttgtcgttgtagttatgtcattgggcaataccttgatgggttttacatctacacttatttcatcctcatttcataatctacttgataaaccaatgttattatcaaggaatatcatgaacaacgattaagtccaactcatttgatttctttagtagtccttgcaaattaaccattttaatattttatcattcttttcatgagcagacagcacatcgacaccaagcaagtttttgaagagaaaactgagtcttgctcagatattggcaacacctttcctttgacaaaacatgtagatttgtccgaggaaaatgtggataaagcatgcctcagtgactcgaaagcaattcctgtatcgggggagagcgtagtccatatggcgggaaatcaggtcgacctacggccagttggtgaaagtgaatggagtgatattcaggcaacagaatcaaggatagctgacgtaagagaaatcggtcccgagaatgaaacaagcagcttggatattccagttgttagccaaccaatcaacaaccatcacgagcaaggggggaattcttttgatcaaccgtgaaaataaatttgtaactggatttacaaagtataaaagcgatgttaaacaatgtagggattcgtaaaccatatgaaagtgagttattgaagatatgtaaacttggttggtgtaatttctttatttaattgcataaactaacaggtttatttacctataatttgtggtctttggtttcatttcatcttcatggtgaagaaatttcaactcattctcgagagcttaacataaaagaacctatcttgaagtggaatgaatctgtttgtaagaactttgtagtaaactgttgaccatctttgatctccctcaaattatatatcatgttttttattttatatatataatctatttcaattaatttttttaataaaaaaattctaaataatatatataaatatatttttattacttattgtttttccttttacacaagtgtctttcatctctcagtttcaaattttatacgatactttttagttatttatttattaatatatatgacaattaaaagttatcataattataaaatataatactgaattattattcattgtttttcttcccattaagtttcttctcatatggtgataaattaatttggcaccacacatttacaggcatatatacagtgaaatcggatttttatttggcaacaagtttagatgaa

SEQ ID NO: 39226 - DNA, 2261 bp, Cannabis sativa
aagcttcccttattcttcctcgacgatttcttatagtgggtaagctttctcttctcgccattgcacttgatttggctgatttttccatgaatgcatgaacattatttcttgctttgaatattgtttgattcctatgttatattgttgtcctttttggtattttaatctgcatgataaccttaggatatgcaatgtgtgatttctagatgaaaaagacctgaaactgaccttcgttgtgattgttggctctttgagtcacgaagaacacaaagaacgcaacgaacatgtttgagttcttaaaaaaacacaagtttggatccgtataagccttagccggtcatggaggtcttgtttaagacttggccgaccaaggagggctaccagagggtctggccggcgaaagggatttaccccataggctggctgacctatgcctggaataagggttcctggtcggcctctagatgaggttagggggtttggccggccactaaggctttaaaccctagctgacgaaggccaaggctccaaggggcagccaattttcttccctctattgacctcggctagggtctcgtgacgtccttagaggcatataaaattatagtcttatgcatgaatccccttgggaactctttataaagcttggtagtgagtctatcatagtcaatagcataacttaggagctactatgtgtcttagtaagtgtacttaagacaattcttggtcgataattgaccttgcacactgtgatttacctggaaggtacccttaggtactatagactagactatgtttgtagctttgtcagattgctcacctccccttatcttttctatgcaggtggaactgagtgttggatagaggagttgacagccacgtaggtccattatttattttataattatggctagaacgaagcagactttctgtagagtgcctccatgtgaccctcatgtagccagggtggctacaacaggtcgagtcaggatcatagaggaagctacttagccccgtgctgatgttgatccagagattaattaggaggttaagagccacgatgctaagttcgatcttgaggaggctgcatcagttaggaggaggaggtataggacttgtactatcctctccgactgtcccttgggtcgttatgatgctaatggtaaaccgctgaacaagcttgatgagccttcaatgcttggattggatcatgtcttagatcagttttctgagcttgagatattggatgcgagatcacagggagacagttgggcctctcccgcttctaccctttctgatgaggcttttagcatgatgcttgttgggggcttagtaagggtgtccatggtgagatacctcgtagagattactgggtgcaccgactttccctaggttggttggcatggttaaagcatctcattgagcaaggggcagtgctactgcttcatccatacttcctagacattgctgcatattttggaatgagtctgacacaaatcacctaaaaagcatcaagtacctttcagtgatgtttgtcttatatagggagcaaggatggcctcagcctccctatgagatcaaatactattttgatttgaagtctactccgaagcagaataggactgggtacttttacttcaatcagatcggtcaccaatggttgggtgacactaatagtgcaactttgttgaaatttactgggtatgccaagaagtactttattgcttatggctttcggacgattggacaaaatgagttctggcatgtgccattctttagacgctctatccctaccttggaaataagggatagggtaaaccacatcctatctctctcagtggaacagaaaaacatactccggttgaccaatgtggctaacttctagaagtatggtttgtatcctcctacttatggagttgcgggagtttcaattgtagagtgagcctattttggagatggacaggttcctgacttatatgatgatgtacctttatctcgcattgcatagaacctggagaggaaagagagggccctccgccagtgcttggccagtggagctccagttcgtgatgcttccctctggattaggcctagaggtcagacttctgagggacctgctcaccccctgcctacatctagaggcaagggcaaggaaatggtagaggattatgacaattcctcctctgaagacaatggtctttgatagttgataacgccatattcttgtcttgaattgaatgtttatgattgctttctgactt

SEQ ID NO: 39227 - DNA, 2970 bp, Cannabis sativa
acaaaacgaatgtgttgagaatcaggggttccatgcatcttaaatggaattggtgataggtggagtagggatatggctctgatacctttgttgagaatcatagggtttcatcttaaaactaattggtgataagtggagtagctcatgtttttatatatagctcaatactttattatttattccatatgagacaatgtccacaatagtctgaatttcaaatcgataaattgaaacttttttgaaaaattactatgtaaagtactaatgtcatgccaatattatgaaattattcttaatttaagtataataaatcttagtgtacattttttttaaaaaaaattaccgattaaatcttcttctattttattaattgaaaaacttaaacccaacaaaatggaacataatggtttctcaaactcgatttttgttcaaacttatttcgagttaggaacagaatagaaattgaggcacagttgttagagctaaggagtaaaaatattaggatagttagcataaaaaacaattcgaccaaaattaggctcaaagtattaattatttccccttattttttgcaaaatacatccaaattgtcatataacaagacgataaagttagtgattggtaacttttacaaatatatatacctggtagaagccaatgtcgttaagaactctaccaacgatcgacagagtccgcacacttttaggttgtggatgagaaaagatccaattcatagaatcttttgtaacaacatttggcattccaatgaatgaaatagcaatgagtagaggagaagcagcagtaacaagtgcaattggcatatactcatctagtgttggattatgtttttggtgtaaccatttggcttcctcaaagtacccttttactagctcttggaactgaaaattaatcattaatttaattaattcttcaataaaatttaaaaaaatatataatttagttagaacatttcaattatgtatacaattgtattgaattgattattaatttaaggacttactcctttcttagcgtagttaaggcaatatgatttttccttagtaaattctccaatttcagtggaaagattcaaaatttctttgtaacatggttgaatgtactctggtagttggtcaatcaaacacatatcccacctactcatatatatacatatataaataaatataacgtatattcaaaatatataatcagtattagcaaacatagataaaataaaaaagagcactaaaaaattacttttagtgacaacctttcagttacaacatgaaaattttgttactaaatgtgacttttagtcataacaaaaaattacttgtaactaaagtatagtattgatcaatttcatgattaggatttttgtcatcttaattttgacatattcaaattgttggatttaaagacttctgtctaattttatttaattttgctaatgcggtgattgtccatgtactaaagcatacccccgaactttgatatatatctaccaaacatggctcaaactttgacatgtaccaaattgtgtccccttaactctcatccacgtcagactttcgttatcgaaatttgacaaaagtccttaaattcaacatttataatagttcggggggaggaagggaattttagctcaagaagaatgattggtacacatgaaattagttcaaatggcaaaaaaaatcaaattagccttttttttttatatccctattaatatatagacatttttatatacttttaacattaattgaaagaaattataaatcaattttatatatattcataaattatattttaatatatttatttatagtacctttgtattgcttcagttaagaggtgtagctcctggagagttccaaagttatcataaatatcatcaacaagagtgagcaaagcaatcaacttgctcatcagcaacctaatatgtgaggtttgagcctcaaaaaacactccaaaagtccaaaagtaacaatccattattctttctctagagaacgattgccttctttcataatcaaactccttccaccaccttattaattatcatatttttgtcacatagataataagttattacaatttattcaacatgtatacaaaaaattaagaaaacaacacactaaccttgtgagatcacttaattccttctggtaaagtttttgtagcaagttgaaatctagtatagctagagctagaagatgctcattgtgagaagagatttgatggtataaagacatgtaatgtctagcctgtctcctttgcaagctctttcgaatagggtttttcaacgcgtgatttacttggtttgaaatatgagagcttaatttcgaggttttagctgcagattcgaggtgatttgttgtgaatattagggcatcatctagtattttctctccatgcactcttagttgtgacgcttcatataagcttaacattcctcgaatatcgttacaaagtgactcttcaaatttccctttgttgttcgtgaacttattgaacacgtctgtatacattaatatatcatcataataatatattagggcgccatttcaaatggaagatgtaaaaatgagacatatttggtaccaaaaataggtctgtgacataataataataataataatgttgttgtacttaccacatgacatataataaccttgttgtctaaccaatcgaaatcgaagagcaacaacatagagatcatcgtcatcattattttcctcgtgaaatttgttacatatgttcttcaaaactacttcaatttgattttcaaaatagtacgacactcccaatcgttgaattgaatcaataaattcaagtgtctctaatcggttttcaacatagtcaagctcaactattttcttcttcacttctttcttcagaataactatttcactatcatcattattttccttcatatcctgtacaaattaattcaagttgagaaaaaaa

SEQ ID NO: 39228 - DNA, 2928 bp, Cannabis sativa
aagagcattctaagcttttagccttctatgaggaacatacatgattttggctctgtagacatatggccaaaccatataccaaatcacagagtttctccaacccgattgcactattgtattcatagacccaaataaatagcgaatatcaagtcccgtcccaatctggacaatattgtagatatttacaaaaatgccactgccatacaaactaagcatcaacatgcacctcaacatgcgccaccacttgtccaacttgtgggcatcacctagctcgtaacgtgccatcttagcacgcatgttacaatacgcatagatttttggattccttgattgttggatggaaagtgtatttctaaagagaagatcgtggccgtttatgtcctccacaagtggattgcctttttgggtataaatacccttggtaacttgcagttaccacttttccttctcttttaaatttttcatcccttcaaggtgtacgagtctccctgcaattcctaaaacttcaaatcgactttgaagcaaagccttcttcttcaacctgaaaatgctgtggacttttgcctctgtctactgctaaggattagggcatgagaatccccacactttccttattcggtgatagactattacagtagaaaaaattgcgagcttggattttgaagaagaaattgattcactgattgctcttgcatctcggcattgtcattggtgcgatcgacttccccaactagatctagcgacgatcagcttaacatctccactatcaatattaggtctgttgtctttctgtccatgggtcgtacttttagaagttactactttaaattgcatttgcatgccctattttgggatgatattagagtttcttttattgtgcgattgccatcttaggtagaattaggcaccacgagtcacataatctttcaaaattttcgcttaaatttttttgaagtagatcaacttgtggcagaagtgctggtaaattcttcctttcccccaaaatccatatggttttgtgtttgatgttaacttctgccatctctcttcctgcattgttcctgacttcctatctggaacgagtacctcttgtgaattctcatttttggatagttagtctagttgggacctctccaagcaatttatgggggaggacccccaactccctttctatgctaggtagttagggtggctaactgcttggattctcttctttttatacggaaactatgcttaagcgatcctgtcaaaaagaagttgactcaaaggaggaagcaatggaacaccaagacgctctaaaattggtcctgaatgacagtccatgggaattggaccaacacgtcaacatgttcaggaactaaaataacctgaggaagtacgaaaccttgtgtgggctcgagagtgttctaagataattctagaaaaggctctccatactcaaggagaggtctagcaagtgcgcggaaggaggtttcatcgtctgaagttgggctcacattgaaatggggacacatctacccctgaggtgctattttgatgagttctgtgttgtagtcagaatagcatctttctagcttattccataggcgtatcgtttgttatcggggtggtacgtcttctgtgttaaacatggcaaacccatgccaatgctagaggaaatcttatacatctacaagatcaagtttcaacaaatgagaggtcacaaagagaatgtgggcttctttaggttaaagcgatacagtagaagcattccctgccccaccagctccacaaagtacacgcatgactttagggactactatttcttcacctccggcttcccactgaagaggtttcctatccttaatttggattttaatcttgcaagtaagtcttgttccctgctttggattttaagattctgccttttcttctgtttgttatattccgaccctttacttttgatattttttttctcaatttatatagcgaacaatttaaaaagaatccaataggcaactgccaataaaatttatatgtagaacccaattatgataaaatcagttcatacaaatataaagttgtgaatgtgatatttcatcaaacaccttaagagcttcattttgattccatgtttttttttattatcagttctattcaaaacttgaaatcagtgtatgttttctaaaactgacagagaactatagaaatgagaaagataacaaatttaaaagtgaacgttgaacatatgattaacaagttatgggacccataacattccaaatcctccaatttgttttggtgtgcaaaaagaagatcataggaaaaaagaaaaagaggagtaccaaactattttatataaatacaagaagtatattttgtagtataatgaataaatggtggatttcaaagtaaaagggaaaaaaagatgattgaactaacattctttctcaaagaaaaaataaaaaatgttaaaaactagaactgaaaataaatataaatataaatgtatatgcatatatttatatatatgtaccatttcatttacgagcaccttgatttggttggatcttccatatatttcttgttgatcttctttttttttttttttgaatttggcttgtgtactgttgtgttgtgtttggttaaggaatattaatatatattatatatatatatgatatctatatttcttagaggggatagatgccttgaaattcaaacagaaaaaggagctccatttgaatggaattaaagatttgtcttctatttattaagatgcacttaataaactgtatagaattcagtatccctagaggattaatgcatatagaaaattatgttgcataatattttatgaacatgaaggaagtaatattggagaaagcatttacttactattgacttacaattcctgtaattagggtttagtcaaatacactatacttg

SEQ ID NO: 39229 - DNA, 2288 bp, Cannabis sativa
aaaaaaaaaaaaagaagttgaaaatttctggtgtaaaatccccattaattatgccgaaaattattgaacaagataatattgggccgaaattctttgttggtctattgttaatgggcttttgcccataaagtttcatcaggcctaactgagcaagcggcccaagtcggcccactgctagctagctgaataactacgataaacgattcactgtcacgattatcaccactttcttccttttttttttctttttttttttatcaacaaacttaattttattcatttctaaaagaaaatttataaaaattctagataggtgctgagaaatgattaaattagcttcaaaaagtgatatttttcaaaggcaaactttcttgtatgttggtgaaaatcaaacaattatgaacaccttttatttattggaatatgtttggagcaaatcccatcacatgtgttgttacaaagcttgttgcgggattaaccccttttgtccaaaccggggtctcgggttttattcattcattcattcatttggagttcaatctttgaacatctaccaactggtaaagatctcctcggcgttgcttctgcagtgggaggtttgtcctaaagttttgaaccgaaaaagttagtcaatccccgactcgttaagtttagaaactgaaaacatagtgaaacacaaaccttctaagctcaacagtggagtaatcaatctctgcgatgattatcgtctcttcgtgctcggtagtagcaagaacttctccaaactgtttcaaccaatgtttcggttaagggttttgttatgttaataacacgagggaaaagaagctaattatcgggatcaactcaccggtccaacgagtgtagagtggccccaagctacgtacccggattcagtgtctcgagcgggtgaacatgtcgctacatacaactgaaatactaaaactgcttattagacaaacgatttaagagtataaagaaaacaaacatgttattgaattctagagattttctccaacaaaatcttagaaaaaatctttaacattcatttcaattgttgaaacaaaaacaaaatagatagtcatagcctagtaatattataccgctcttattgtgaggtccaaaattcaaatctttcttttatcaatatcagaaaaaaaaacacaaaataaaacttttatgccaagaagaattcttaaatacttatttaagtataattttttatggtaataatacttaatttatatttttgaaacttccataaatactacaattaagtgtcaagtcaatagtcacattatagttcataactggttcaggttattaaatttttatattttatttaaaaaaatattctaagtatacaaaaaaaaaaatgacatgtggatattgacttgacacttaacgataagttacaaaaatataacttaaatatcattaccgtcaaaaattaaactttaagtatttaatatttgtaaccagaaattaaatttaaatatttacgctacaaattactcttgatacataatatgaaattcatgtgtttttctttccaaagaaaaacaatagatttgttaatacctgattatctgcagccctgcacatgacaaatgaaggaaatccaataagaaaaacttgatatatggctgtgaatacccataataaaatctaaagaacgaatttttttttcgggtatttggcgaaacagcttctttctttttcttttagtcagcattttcttgataatttattgcaaaatagagaaatggtctatttggactagttaatagtttctttacctcgctctctgtagtaattcccaatgcaaaggtccggtagtcatgttgaaagctccgggatagcatagcaagtgagcacctaaaaatcaacaacttctatgctgtcaagttcaataatttgtttcccgaataaagtgtcgaattggttgttcggaaattgtagaaaatcaaaataaccatggtttaataaataccaacctcttgctgcataaatcattgctagttcctggaaccgaagatcgtaacagatacctataccaattcttcccacatctgcgtaaatttttcaaacgaataagaaaactgtattccctttttttgaaaacaaatgaataagataatgtgatcatgatgacaaacctgtgtcgacaattgtaggagtctggccagcagtaagagtctttgattcaatgaaagtaatcttcccaggaatgtcaatatcgaaaagatgaatctgcagttataggaatatgcaatttacggttacttata

SEQ ID NO: 39230 - DNA, 3129 bp, Cannabis sativa
  modified_base (3102)..(3103): a, c, t, g, unknown or other
gaaatttgactttatatgcatattaattgtatgttaaaattaataaccaaaacttaagctacccaatattagtggaataggccaatttttatgtataccccaaaatacattctcatttcaaaactttctagcatctctctatttccctcttgctcgttctctctcttttcctctcactagttctcactgaaataccaattgaaaccccactaaaagatctaagaccgcgaccaccacgaccatcgccaccatgcaatctgaacaatcgagagggctccatttcaattcgactgagatctcgccaattccttcctcaattgcgaacggagagaccaccgccactaatggggaccacaaatgaagagcacgaatggagagaacacgaatgaagacgttctctgtaattttctggtttttttgtttttttgagttggtctgataatgtccgatataagccagatataggttcgatgggaggttcaaaatttaagtttttgaggttggtggagaaggtctgatagtggcccgatattgattcaatggtggtctgatgcatagtaactaattggtggacgtattttgtgttcgaagggggtccaatattattcgaatggggttcaatggggtccagaccaccatcaaatctatatcggaccattatcggaccttctccatcaacctcataaacttaaattttagaacctcctattgaacttatattgggtctatatcgaacactatcatatcgactcaaaaaaatgaaaaacaaaactagaaaatttgttctctctgttcgtggtctgtatttgtggtttgcgtttgtggtctctattcgtggcggtggtctctccattcgcggttgagcaatgaaattggtgtggactcggatggattgaaatggagtcgagagggttagtccaattgatttttcagtggatcgagtggtcttggatgatggtggtggtgttggatggtggcggttcgatactgttgaagagagagaacgagaattgaggcagagagagataggagtgagttgaaaaataggagggataatcttgagtttaatgaaaaattaacctaatctaacaatattagtacactaataattaggggatatatattggcctaataaatgcatataaagttaaatttcccattatattttccttataaataggattggaatatacatttgactgacctactaaatgttaaaatatatttatatgatatatatatatatattaaattttaaatttttgaaaatatgtattagattgttaaattattttttttatattaatatattaattgtatatgtattttttaatatatatatatatatgtgtggattcgattggatcggttacttttatatatcaatcaacatcctatcagcataagtgcggattttaaattttctaatccaattcaatccacacaagttcatatttctgcactttgtggattgaattggattggatcgtgcgaatttgattgaatattttatgaacactcttaaaaagaactaaaatgtaagaataattgcattacttgtaaatatcgagagttaaaaagttattaccatggattagggatgtttataaaatactaaatccaatctaatctgcacaatcaaatccaaagtgcggatatctacacttgtacagattggattggattaaaaaatctaaaatttgtacttgtgcggattgaatatttattgacatgtaaaagtaattaattcaatccaatccatatattatatatatttcaaatatatatacaatagatatgttagtgtaaaaaagagtaatttaaaagtctaataaatatgattcaaatatatttcaataatggtagattaaatgtatattcgattcttatttataaggaatagataatttaaaataaaattaaatatttttttatacatacaatttttttcttcttagaatttattttttgctttatttattttaatttgttgttggagtgttttattctgttgttagttatgtaaaaaaaagttaataaatattaaataagtcaatattaaaagtaatcaattgaaaataacagatctaatttaaatttttgaaaattgaattggatttgagttactatgcgaattcgatcagatctaaaatatgaaatgtacacttagtgcaaatcaaatgcactatgagtaaattaataagaacttaatcgaataaacacacttactatgaatacataaatgagagtcaaaataaaaaatattacatagaaaacttaatttgaaattattttacaaggatatgtttgttaaatttgtaaaagatggactaaaatgcaaaaatttaggggcagctgcccacccttagccttagttgggtccacgccagattatattagagtttgcagtgtttgccttttcttttgacaatcatttttttttccttgtaattctccaaagtccaaactcaaagtttgtctttcttcattttgaatgtttttaattaaaagaaaaaaaaaaatctcttctttaactaactcttaaataatgttcggtaagactttcaatattaataataatgtttggtaagaataataaaggagattggggagtttttagaagggtgaagaatgcaatggagaaacatgctatatcattatttattaggtatactaattatttccataatttaataatttataggagccttgggaaaatagacttttgaggtatataattttgagaaagttgtacacccctttgaaggggtttttcgattcctagttcggtacgaaggagaaatttttagtttaaattttttaagattaattaggatttttatattttaaactttgacataaattaaatcatgtcccgtaaacttttaaggtcgccaaaaatactccttaaactattgagattattggatttaaggattttttttaattttaataaaaagtctaatatgaatgaaagtccatgggccatgatttagtacatgtcaaagtttaagggacgtgatttcatagatatcaaagtttggggagcatggtttagtatataaacaattactgaaatagtaaaattaaatgaaattagannaaagtccttaaatccaacaatcttaa

SEQ ID NO: 39231 - DNA, 1135 bp, Cannabis sativa
ttatgatgcaagtctctttcttttaacattttccatacaatatatttacttactatgttattgtgttatatgtatattatatttttcttaaactcatatttggattttatgaggattttcaaaaattaagttagattaatatagattggaaaacaatgaatgaattatattttcagtcaatatttcaaatgactgataaatttctattattcattgcaatgaccaatactagagtcagatttataaatgtaagcgaaatattatgaaagcacttgaaaaaactcaacaatagtttgataagatgtgtgctactacaaaaaatatcttgatcagtgtagtatagtttaaaaacacgcagtgccatgtagaaatgaaagagaagcatttgaagtgggaacttcaaatccttttgatgttaaaaggaaaaaaataaaaaagttagtttgatatagcaattcattaagttactctttgggcctttatcttatttatctttaataattactactacgatgttacattgtattataattctttttattctttttgtacttcacataatttaagttgttcttatttatcatgaaacttgtattgtccttgtgctgcaattgctactttatttaatttaaatgccttatgttttttctttgacaatgattgcctttttcattttatagtagagtggactctgtttcggcatagttaaacttgtaagtttgtaggggatgatgacaggtagttcttattttgaagttagattgtatagtgctggggttaatctcattttttgcattgaaactgctagccaaattttattttgttaatgcttttaaagagaagacaaattctctgctttggatatctgtctaaccctttctctatatgtatgtatatatgagtgtgcgtatatgtatcataacaaaagcatgatggaaaagagattaatattattgttggtaatagagtcactcacacattttttttattgatcaacataatgtgattaatctagaataatggcttcagttgtgtttaatctagaataatggcttttaaagagaagacaaattctctgatttgaatatctgtctaaccctttcttttgttgttaattaactaggaagcggcggag

SEQ ID NO: 39232 - DNA, 2968 bp, Cannabis sativa
acatctgatctgatccgatcacaattggatatccaatgtttggcggtcggttgtaattggatcggtcaatttttattagattggatgatttatgcacacccctagcaaatataatcaagacgtagatgtcatagatatgttatataatcattataaatcttttaatttttatggtttctaagtttagtaatgttaaagagttcattattaaatgcaaggagttcattaggtctcagaatataaagctcgttttcatacaggcaataaataattaaaattgttattcatgttttcgaaagggatacaattaacattaaaatttaatggatttatgcctgctcaaaagccttacaaaataatgggacggagagatgagccttaagcccatccaagggcagaatatctacaaccgaagttgaatgtctccagatctgaaagggcccctcatctaaataaaaagaggcagcaaaggccttccgaatgagtatttaggatacatctaaagggtaccctggaagtcaggctaaggctgatggggcaatcttttgacactaaatcccaacaaatcaagggattatccctcatgtcagaccttgagagtgcacgtaacaaaaggaacatcccttttgtcctacggccattattctaacactacaatacacaacggcagcgctgttagagtttgtaccctaaaaacaagtatttaatagataatatattataaaatatataaaatacaattataagataaatgaatacgctaattatagaagtataattgataaatatctaaaaaaaattatattcataaagagatggtgtgatcttgtaaggttgtacaagagaattaagatcacacaatattgtttactaagatttttggaaacttaaatattaagttgcagaaattaagagaggaagactttttacgtggttcaggtgttaataaaccttagtccacgagtcagcctattagcctctaagggcagtattgatgaatttacagtattttgcaggaaatcctaactatttacccttagtttctttttgaagaagaagaagatcaaaggtaatttcaatagaattttagctatgtattttttttcttggcttgaccccttacatgagaacgaaggggtatttataggctaagtaacgggtatggttaaacctatgatccatctaagatttctgcttaaatcctgctattggagtaaattacatgcaatgtaaagctgattggttgatcccgtgggtagcattatgctcgtgcctgtagcagctggataatggagaccattttgtaccacttggacacatgtcacacaaaggtttaacctttaaaagtgagggacatgtgtcacttaaagcttgctcatttacaaatagaagtctgtagtgtccatctggtaaaaggaaggtgggggtgcgcacactactatgcttggatgtaggagacaagatctgattctgttagaaaaaacataaccattacttcggtgacctagcgtatgagaaaagttgacatttgcaatcccccatgaaggtcaacatctgctttagctctttcttctgcctacctggatataaactaagcgagcttccccattaggtctgggagaagcactttgccttccacatatgggaaataaaggcaggcttgagtgaacttctgcatccttgtcatcgtggatggttcttggttcaggaagaccttccagcagtgttatgattatgggaggattgatgtgattttctccctttcatgtcacgtgtcatgtcttgtaaaaatgcggataacatttaccccaagcttttgagacgctttgaggtccaagagcttgcaatacttcttcgcttcttgtgacaaattttggacatgtggtgttggtcgaacccgcaggatgcatcccataagttgtcatcacacatcgggataataaccaaatgtatcattggtgtggcccgcatgcagtgcttctgatgcatttgctaatgctacgcacacataagggtgtgttccttgggaggagtttctatgaggataggacaactgaggtgaccccccttttaatgcgtacaatacacggtatttaaacgttaaggttgagcattaaatgtggtcttttcgatttcccatttgttggatcaaaaggtgcttcttgggaggaacaatctaggccatttatttcgaactgcaatgtttgcgattggattataaataggttccaagaactcatttttcccttttttatcatctttaatctttataagccttcttgcaattttcttgaaccagagcccttattttctaaacacttattattttactgtcgccattaataatgaatgcaagaggtttttgactatctcctctgatatttctttaatctttgttcatttcattttccaaaggtcgaacccataaattcggacttgcttcacctctagctagatgagaaattcgacgttcaggcaggctacaaccacttgatcgactgggttcaacattttgggcagattttcgcgaaaactttccagtctccatccaaacaccaagtaagttcctcgacgctctgttgactttacactatgcctgggatataagtgttggaacttattttactaggatctagattcactaacatgtatgtttgattataatctataatctaacatcctaaatatgaatttcttaaaacaataaaataaacacatataaagttatagaaaatcttacattggtagtagaggaacgaatatatttcgacgactgctcactgactgacataaaaattgaaaaagagcattttcattcacaccttgattttgaaaggcattaaatatagagatactcataaatctttggtctccttggtcattggatgaggatcgcacttcgttccgaaaagatcgtggccatccactcattcctcacattttgtcttggagtataaatacccttggt

SEQ ID NO: 39233 - DNA, 3001 bp, Cannabis sativa
  modified_base (27)..(37): a, c, t, g, unknown or other
  modified_base (136)..(145): a, c, t, g, unknown or other
atatatgtatgttatatgatttatgcnnnnnnnnnnnagtctgttgactcacagtgctatgcttatgtgtatgtaagagcaaggctaaggccgaagaaccgcgacgatgagcagatgaatattgtacatgtcgggnnnnnnnnnnctggagcgtacgatcctcaaaacatgagggcttttgttgttagtcgctgggtgacaaatatcttgtaaatgaatagcaaacttttgtaaggtattttgtaatggtatcccaaaatattttgtatgtaatattataagttttagttaaataagcaaattttaattaatcacgattttcattaacctcattgattagcaacgagctgcacagcaagttcaaaatcaagttaacacacctagactagttaaggtgttacacgggcaatgttagaaactgtaaaagcaaaggcataatacaaaagagaaagaaacttgattagaattgccttacttttttaaccccaaactcccctgaatcgggcaacaaagtcgtgaacaaatgtaggttgatcttgtgatagaattctcaatgtacaacaattgatcgatcaaatcacccaaaagctcgttgtaaatcctgcacgagtgagaaacgtaagagccaaatggaaatcgttttagtcctcctattcctatatagctcacaatgaatattataacataccttgtacctcatagcctgaatcatggtgagagctgtcatgatactcagcatcatccatctcttccatttgaggcataagaacatcattcgtgtcttctaggctgttgtcatgatgttgcatttccatggcttgttcggaagtattcggtgatgatcgaggactcctcattttgttgggcagaacaatctgataagacaacatatgtctttttgtcaaggtaaggcctggccacatcaaatgaaacccaaacaattttaagatctaataaaattaggatactaataaaaatttaaattaaaataattatcatttaaataataaggtttggttaagtataattaggatactaataaaaatttaaattaaacaattttaaaattcaattaataaaagttaatgtcacatagagatttggttgatcaagataactaatttttaaatttaaaacattttaaaaaattaatcaaataaaagataatatcacaataatagggatttagttgaaatactaataaatatcttattaaattatttaatttaatctaattgattgattaaaattaaaaatatttccaccacaccatatatataataggagactacttaatggttatatttttactgtaatcatcatagttacatttttttacctattatagcacgtaacagattgaaaaagagcaagaacaagaacaaaatgagagcaagaagaacgtatatgaaatgttgtgtactgattacttcaactttatcatttttgcttcaaatgcatataatcatgaactggtgtcactttgtccttatgagcttaaactgtactttaatgcttgtctatggaagagaattgtgataactctttggcaatactccattttgccaaatgtgtactccatcatcctttcttgttttatttgaatgaaaaaattaaagacaatttaattcatcatatgatcattgaagttctttatttcgaggtgagctttcatagaatccaagaaaaacaaaaaaaaaattaatgttttaaatttgaacgatttgatgggagagatcacaaaaagctcaactcaagattttactattttcaaatatatgttggtttgtttaggaaatattagtactcaaatctccaacaattttatttcgaggtgagcattcatagaatacaagaaaaacatcagaaataggtgttttaatttgaacgatgtgataggagagatggtaaaaatctcagtttaagattgttttctaatctctcttggattgttatggaagtattggtacttaaatctcttcatcttgtttagggattacttacggttgatcatctttgcttctaattcaagtaatcatcaaatggtaattaattcttgatgaggttataactatatttaaatgcttaaatgttgaaaatcattagaagaattctttggtaatacacggttttgatacttttctacaatttttttgaaaattcaatggagtttgttggactatttatgtacagtaagaataataagaaggaaaagaagaagacaatattttatttgaatgatgaaattgaagatgaattagttcatcatatgatcattgaagttcttcgttttaaggtgagtttttctactccttaatctattcatacagggaacgacaactttaatggaagtgttatattaaaaggaatgggatcttaaaagcaatatttttaaggacaaatttaaaatagttattgataaaatgaaagaacattggaatcattttaatgctcaacattcagtccaagaaaataatgatggtgcttatcgataagattttgtttctcattttgatttgttttggcatctgttgggtgttgagattcaagaaattttgaacatgatccaaaattatggtacttagtgaatatagtttttctttaccatagcggttcaacaaaagaaggtgtgattaatactcatcaagaattcataaatgaattggaaaaactaatcatctgggtaagaagaggaacaagaacaagaacaagaatgagagaaagatgaacttgtacgaaatggtgttcatttcatgtattacttctacttgatcatatatgattccaatgcaagtaatcatgaaatggcgacattaagtccttatgagcttaaaactgtattctaatgatgccatgtggaagagaattgtaagaactctttggtaatgcatggttttgatactttctatgatttttcaaagatgcaatggagttggctagactatttttgcacaataagaataataagaagtaaaggaagaagacaatgtttagtttgaat

SEQ ID NO: 39234 - DNA, 1950 bp, Cannabis sativa
ggagtttccataagaaaaaaaaaagaaagaggaaggaaggaaaaaaaaagaaaaaaaaatatttttttagtaaattaatctatttataaagaaattatgattttttttttaatttttattttttttaaattgtttttttgaattttaaattttttaatttttaagattttttttttattttttttaaataattagttttagtataattttaaatatttattacgtggaccaataaaattgtgctacgtgtactcgtggacattccaccatgacagttacaattaaaaatggatagaaatgttaaactgctaacagaacacgagtttagggggttttaccgccaaaattttaaaattaaaagttagttgcaaaaattcggccacttaaggaagttatgccgcaaattactctatatatatttatataatacttataaaagactttgtatgattgaacaattgctgacgaggatatgaaaacggtagattacttaacatatatttgagattagaatatgttaatttttttaaaaaataattataagaaaaaaagagagcagttgccataatatatatgcatatttatttgcaaactagtacatataatatataattaacaactccatgacaatgtatgcttagttttaaggagtatctagctacttaattgacaattttattgtttagtactaatggaggagttagtccaaatattaagttttatagtactgtcttttggtgatcaacaaacctataataatttagagatgcttattaactttggataattaccacgtcgtacactatatagctaattagagtatacgtaattgttgagccactttgttaagtgacatgcaaattatttatttaactctacttttctaattcattaaggggttacgtaccatctacgtaaattcccaaaccctgaataggatcaaaagatgaattgatgttatgttagctagaaactgtataatcatcagtgctccaattcaaagaattaatgttatactttcattgtcatatagagtaaaatctcaatttcttaaatttaaattttagtcaattttcaagaataacttttaaattataatagttatatatttgttgaagtctcatactaaaaaaatatatacatttatttaagaataattaatatattttaattgaataatttgccgtgtttatattgcactcttatagcacattttctatttagtattcagaatttgaataaattaatggaaaaataatgtaacagaataaatgtagaataattagaataaatatttgtaatttgtaatatgttgcttactaaatcaacttcaaaatgaaatgatagtttatcttgtttactttatcaggaaagtaatggaatacttaaattgactaaattactcttttgacttaaactattatagtatatggtagttattttgtaagacatattttaaaaaataaaattgtcattataaatttaatattaaaaataaaataaaattaataaaagacaatacccttaatggcattccttagaaaattggtgggagaagctcttcctttcttttctcccttatttaatcaagttctccctattctaaatttaataaattaaagaaacaaatttaaaggaatgactcccttacaattgattctcattgcttattagtaaacatgacattatagtagttaccaatttttaatctcataataagattttagtaattggataaatattatgtttggtgtgattttaaaaaaaaataatacattttaattaaaaatgcataacgacggatttggaaagccagggaaaattagagatggatgtaattgaaggtaattacagaattttgtgtattattctgatcatgtaactacattataactacgtaattagtggtgattgagcagggccggtcctagacaatttggggcctaaggc

SEQ ID NO: 39235 - DNA, 2511 bp, Cannabis sativa
agcagtctcagggaatccacagatttaaaataatatgaccagatcattaactagcacctgtttcaaaagatctttaccttcttcaaagacagatcctgctcaacggatcgctcttacctaccatggggtgtgttaccttggaggcttggcccatccaactaactagcgctaaaggaatgtgctaacactcaaaagttcacatttaagaattcgaaaaaaataaagttaatctaattgcatatttaactaaatgctactaaaatttatttttttgtaacaatttgaaataaatgttattaaataaattgagaccatgtatcacatttttgttatagtgtaaacaaactcaaataagatatgacattgaagttcaaagaatcaactccatgaaagaggaaaattcaaattgagtattattataaatcagtgcaatatttattacattttttttgtgcataagcatttttttcttttttctttaaaaaaaaagtgcaataaacttttgctatagataataacaaaacaccaaaatgaacaattttcaactatggtcttcacacaacattgttggctggcttattataatcatcaccatgatctgttgttgttgttgacttagtagtagggcctcctattactgcctcatcaggtatgtacttaccccaaaaccagtgagctttccaaactcgattcatctcttcaatggggacatttttggtttctggcaagaaaaagtagatgaacacagtcatgatgatcacaaacccagcaaagaagaagaaaaggccaaacttcatgtggcaaagcatggataagaagacttgagcaattatgaaggtgaagaacatgttgactgagacatttatggcttgagctgctgatctaatctctaatggacatatctcacttggtactagccaacccaatggaccccatgaccatgcaaatgctgctacgtatgcacatatcaacactagtagtagatcagcttctggttttgtcagcactccttctcccgatacaccaaagttcaatgctattaggactgctactgcaatctatacatacaaaaacatgaagaaagtgttaaggatatctttaatttaactcaaaattaatgattaaggaactactttgagccaaatttttttttaattctatattactcattgtttgtttgagagggaaaaaacagagtgaaaaactggcacttttataggtactagtaatgatcatgtatgtaatacctgggaaataatcatttgtgtgccaccttcaaggaacaaaactctccttccaaatcggtcaaccgaaacaatggagacaatggtggcaagaacattaacaacaccagttatggcagaagatataagagaagcattgtcaccaaacccaagagtcttgaaaagcactggtgcatagaacatgatgacattgataccagtgagttgctggaaaaagggaaccaagatacagatggtgagttggggcctgtactgaggcaacaagatgttcttccatggattttggatcttcttggaggcttcgttctcttggcctcttcgtggttgcctcgttcgaggatggagttgggagtgtcaggtaagaacattgctccaacggttaacatcactgccgggactgcggcgagtcctagagagactctccatccccaacctcccttaatttgagcagtgccatagttgacaaagttggctactaagataccaatggttatagccatttggaatcctatgttgagagctcctctcatctttgctggtgccatttctgatagataaagtgggactgactgtatacatatacaattattcatgttatgatcatcacattaatacatacattatataactcagaaacacatttctttatgtatttgttttgcccaacttttacttgctactaatctcatcatgtgttatatttcaaattaaaatatatatttgatgatgttataaatggtattgagggttgtatgttataaatcgtttcatcgttcatttttctgtacacagatgggaaaaatctctttagaaaaggttccattgaaataactcctcctgccaaaaacaaataataattaaattcgtttatgcatcagtactatatatatatatttataataatgtcatgtgttaataatcgagattaattttatcaaacctgagattccaaggtcatatccgaagatgagacctcccatggcagcaaccaaacaagtgaccacaacaaaggcattgaggccactgccttcgtagttccttcccacatttgaaaccaccattcctcctatggccataacaatttagctcttctgtttttctttttcttatatgtaataaaataaacaagtagtaccgaccaagcttccctccagttgctgcccgacaatctggatgaaacgtttccttggagaagaacttccaaaatatggtatatatatttgttctttgtgaagagataaagttgtaagctttttttttttttttt

SEQ ID NO: 39236 - DNA, 989 bp, Cannabis sativa
  modified_base (614)..(616): a, c, t, g, unknown or other
ggttttagaaactagctttttaactatacaatatatagtgacgagaaaattatattaattattatgtaggtattcatgagggaccaaaaaatatattctaatttaaatagatataatatgtaccctaaacttattttagtaagtgtgaatttttttattattttaattattatgctgttccactattttttatatattttcttatggatttttttaaggggggttgtattattttattaattctttttttgttttttgtttttttgtaaggaagatattgtattattgattagtccctcaaataataatttcgagaagatccaataaaaaatcttttcgaaaaaaaaaagaagatcgaataaaaaatgaaaactaattaatagggatggtgatgggattgggaccatttttgcattagtctactactactagtagttgtagacttgtagtagtcgtctcttttttgctgttccactttactgagtcagtcaagtcctattcccaaaagaaaaaccaataaaataaataaaaatgagaaatgttaaaaggtacctctgatgttaaatactctcctacctggtttaatttgatatcgggtctcatataatttaatnnnatagcttttaggaagtatcactagtcaatcgtaatacgacacgtcttaagggtactaagtaccggtgcccaataacaatgctcaataaaaaaaaaataatgataagaaatgttgtaagagtcaatttctgaaaatttggtgttggaataatgtaacatacatacaaaaacataaagtaaaattggaaaggtggcaaggaaaagcatgtatactacgttaaagcattaattgaacatgtgccttgccatttatgggatccaccatcactgaaacttgtacgtatgttcatggaaaattcaaagattgaaacccttttcaaatgaatggtttatatttgttagtgcacaaaatcgtttcaaataatataataaaa

SEQ ID NO: 39237 - DNA, 2413 bp, Cannabis sativa
ttaatttgaaaatgaattttgaaataataatatatattatgtttatcaatataaacgtaccacgtgtacaagagcgtataaattagtagtccatggtgggagttaatcggatgacactttaaagttgctaacagttcagtattttagaaaactttgtggccaaaatttaaacttgaaagattaagtacaagtgagaaataattgaaagaatttagtcgctaaaaactctacattaaaatataaattgatttcaagtttttatttaattttttaagtaaaaactatagtaaattgaatgtatacaacgtaaaaagttattttttttaaataacttaaaactatttattattattaattttttgtaatattttattagtttcttttaatattcagtactaatattttttttgggttgatcactacacacactatttttaagttgctttttttattattctttctcatataagtgaaaaatatttaataaagaaaataaaatttcactccaatatagtatttttcaaatatttttaattattttctttatttagtatagcataaaataaagtttttttttttttgaacagagcataaaataaagtttaataaattaatatgctactttgagtttgcatacataattaaatgtaaattattagaattagatgatggagttcacttttatacttcacggaactcaacggatttcaaatatgtaatattatcaaatatggacattataaatggtttttgattaatttattattattttgttatataaaagttggaagaggcatgacgtgtagttattgtaaatgttggcctcctccatcaacggtccagattcattctcacatcttctcccatctcatatatctatctcccttcccattccactcccttcatcactctccccactctctcttctctctcttaaagtttttgagagagaaaccaatccaacaaaaccaaaacgaaaagatgttactcggaaagcgtccccgacctccaatcaagagaaccataagcatgaccggcatcaccgttgatccgagcagtgaggaagcccctgagccgtctgatccccagatccccatctcatcgaacctggaacaatcttcagggcatcatcatcctcatgttgatgatgggtctcagaacaacaacatgtgcatgaattttggtagcaaagggtatcaggattcattcatgtccatcttgtctcccagaatccagaggagaaactccgccgatttcatcgagaccgctcacttcctgcgcacgtgcggcctctgcaagcgtcgtttggcctccggtcgagacatctacatgtacatgtatgttgttaatcttttattgttgttttgaattttgtgtttgagtaatttcactcacaacaaaattaaatagataaattaattgcatgcatataaatcgcatagagatgatgagtttcagtattgtccttaatttgttttatatggttacgctagatccaaaaacctggttcaaacatttaacaactaattgttattattattacactgaaattcaattaatggattaattacagcaatattaatcattttttataaattatgattgaacaggggagatacagccttttgcagcttagaatgtagagagaaacagatgaggcaagacgacagaaaagagaagtgcatgggagcattggcggcgtctacaaacgaccaacgccgcgaaacgacgtcgtctgctaaggcctcgtcatcatcagctggtaaaagccagacagtggcagccgcttgatttcaattttaaaagaagaaaaagaaaaattggacggatggcttgagaagtgagatcgatctagaaagaaagatagtgaagaatgacgttaaaaaaaaatagggaagagaatgagatgagtaattgataatagaagagagaagtgcaatcgcctttctataaacatcactccccccccaaaaaaaaataccctatattgtcactatctacttaattatatatagtaattagtactctactgctttttcctgtaatgaaacaaaatatatagttatgtctaccattattggaaagagattaaaaaaaaaaaaaaattaaaagaagggtgtgtgtagtcgttttgtggacgtaaaattcttaatgagcatgtgaaatagagttgtgatcccttatgattcagaattaatcaacttttttccttttcactttgaacgtggtgaagtaattaatgtattaccattaagaaagtaagtttgtgtgataatgggaacagtagggggccggggccgccgggcttagtggccatagccccctaactttatgatctataatgtgcaaaaactgaaatggtaaatacattcatttatgacacaatgtatttcattgataatttataatataa

SEQ ID NO: 39238 - DNA, 2955 bp, Cannabis sativa
ataatgaaccaaaactctctccaatgcactccttataacttgtactgaatctttactattattattattatcttttggctcaaaacaatagacagttctaacaatgacagctatgttttgatcaagatttgacaagaagtaaaaacccttttgtgtttcctcagctgggacaactagacttggctcatttctcttcactttgatgagcttgttaggtacattgccattgttgttagtcatctcctccatagtatatagtagaaaagagttttagtttagatatgcaacaaaacaaatgatatagtaataatgattggaaagaaaaagaacatatatatggtttattatatgttcttttttgcagaatataaaatgagattttattgagtactcccaaaaggttagtagactcactatttatagcaaatttaataatgcaaggtaggtctctctcatttttttttttaattgttattaataatatgtacgggcatacccattaatgttttcgatattcaaatagctttattaatgttattttttacgaatttttttattttatttatagaaaatacgatctttttatattgtattcatattaatttcttgttgattatttgttatatgtatgttattttttattgttgttttgatgttattttgatgttatttttttggcaaaattttgcccgtaaagtaaggtgcaccggcataacttttgcgagaaaaaaaaataaggcaaaaatgttttgccagcaactgacttcaccagcaaaactttattatttgagctaaaatctgtataaaaaataaaaaatactattaaaaatgttcttatacaaatatgtgaatcataaactcttaaagagaaaaataatagtttcaataaaaaaaaaaaaagagagagaaaaataatacttaattataattaacagtaattaatagaaagaatttggaagatttcgacatcatataattaaataatattttataacaagttattatttttttgaagccttgctatgaggcataatgtccaatatgactttatttatatttgggtaaatagcataagtacccaaagttttgagtttgtaagcggtataaattcaatgatttttttagtggcataagtaccgaatatttgtaaaactgtaatttttctttattttcatcagtacagactccgttttaaatttattaaaaaaaaaattagaagtaactgatagtacatattttttgttcagaccaaataatctaaaatttggatcttatatgtttcctgtttataagacaataacagaatatgtacttataaaacgaaaaaaaaattacaattttataaacattaggtacttaattatgccactatttaacctttatattttgtttggggtttgatgaatgtattgtaatgtgtcattgttttggtatctatttttcttttgatgaaaggtaatatatgtgtaatattgtctccctcttaaatatttgtccaccttaattttacttatacttgttggaatgttttatttttttgttggaatgttttattttttgatcaatatacttgttggaatgttaaaccattaattgaatgattggataagatatagttatccatctcatcaatccaattgctcatcacactcatcactcatcagaagctatgtcaacgtgggtgggccctcactattaatgggggtagttgggccaattacagcttatttgttttaaatgttaaaaatagaaaatttcatacatatctacaaactaagttgatgttaccataatatctctttgagttttgttaagcgatatgttaatacgattgtgcattgtttggcgcggtcctctcttgttgaggctgatcgtatttttaatagtttatctttaccttttgtaatttcttctttagttttagatgatttgaagtaatgaagtttctattattattcaaaaaaaaaaaaaaaagttgatgttaccatcattttataattagttttatttttaattaaatttgattaaatgatattaagggcgtatgtttaatttttttaattaagtaatatattttattttttaatttttaaaatagtgtttaagatttaatttatagaatttttttaattattacgtctatattagtgtactctttagatgtgattatatatatacgtattttatattgatatctttatatatataaggattatattaaaaaatattttgacaaaatttgagtttgattagaaaattaattactttcaaaatacattttataaaatttttattataatatttaagatataatcatttttgtttaatatgtatattttttaagaatatgaattctaagaatatttttttaaaaaaaaaagaaaattaatataattaaaaacataaattttatgtaaaataaagtgcatttataaatttttgccaaaataaaatttcatataattttttgttataatatttaagatataatttcatataattttgtttaataggtatattttttttaaaaaatatgaattataagaatttttttttaaaaaaaagaaaactaatataattaaaaatataaattttatgtaaaataaagtgcatttataaatttttagagtgcaaataaaaactctctaatctgatatttgcaaggctattcatcaaactgctcaaaccgtttaaatcgtctgtactacaaaaataaatacagtttgatattttttacagtgtggtcgcagtttgaactttttaaaatgtactgtacggtgcggttttgaattgttaagatgcggttcaaatcgcaccgtaccgcaccgcacattataaaaatacaaatttttatatttatttaggtctaatatattaatgtccagcccaaaatctactaattattgtattgttgaaacttaattttttttcgtatttattttcaagccttatggt

SEQ ID NO: 39239 - DNA, 2199 bp, Cannabis sativa
ctattatgcccgttttacgacgatcgtataggcgacggttatagaaaccgacggaaatactttaaacgactatttaaaaacatcgggataacccatttttatagtactgttatctctgtataatagaattgtaactacttttgtttctcttgttcgagtggctttatgtttcagcttgtgtgtatataaactctaagctttttgctgatctcaataaatagaatttttttttttcttcagtttcattctttattctttacacgcacaattctttcattacacagttagataattattaattaaaacaatattttagttgactcgtataactaaagatgtttaccctgatcatataatattattttacagtacttaactataccacttgttttttttttattattttctgttgaacaattataagtatgtatatacttttttatggaaatatataaatgaacaagtggctaatgatcgtcgatcagtttcccatgctggatcacatacgtttggactactcacgtttacgtaccaaaataaaaattgtttattgtatgtaattagtttcacgtgtctcatcaattaaatttagggttcattaaatctaaccaattgttctaattcaattacaattattaaattagattaaatattaaaagttagattctaattagattacatcgatttatatagtatgtcaatctcaaaatctaattaaaaactgactcaatctaattatatttatatactctagaaactatttatatttatttatatataataaaaatatatattttttaattatatattaaaaaaaattaactttattgttttgtttatttatttttttataatattttgtttaattttttttttatcaagaaggaacaatcttcattaatcgccaacaaatgaaatctatacaatgcaaaagccaggtgaacaaacaacttgctattacgcaaaaatattctctacatatctcttctcatgagctttcaaagcatctattttttgctatttgtaatctatagaaaactattttcttaatatcatgtgtaagcttagttgttgtactctagtatttgttgaatttttgttttatttttttatttgaaaatattgttattttttttttttggatcaagaaggaacaaaattcattaatcacaaacaatttacaaccaaatctaagcaacaaacaagcttagaccaaccgaaccccttatttacaacataattgctctatgtacattctctcaagtctatctattttctacttttttgctatattcaacctatacaaagaagcttgtttaatttcctgcactatcttagacactagccaagaatagtcgctaaaaatataattgttcctgttaatccataagttgtaaatcacagcagctatgattaccatatgaatcatgttcggcttgttccttctgtcaagaatcaaccaatttttctagctatgatactcaaccgaccattttttttccccagccagcccgcgatctgctctagcaccatttgagagtagttgcacttgaagaacagatgttggtttgttttcagttgtagaatattgttatttttagttgtattatatttggtaaaggtgatatttttacagagtattaaactaaaatataaaaggttatattaagtttttatatattcttttaataactttaagttaatattaaattaaatgtgtaattagatatttaattttgaaaaaaaaaaagtaacagtttctattattattaaataaaaaagttcattcaccgttatgtaatatggatttttcctgaaactatcactcatgcgttggtggaacgtggctttgctgaaagctgttgggctcacgtggatataaggtaagatgatattgggataagttgagtgatatttttttttatttatttattaattaaaaatactcttacattatatttcattaaaatctactcactcttacgagtagattgtttaatatagccttatcttccatttaagtgtagagacatagtttataaaagtatgttttaaaaaatataaaaataaaaatgaaaacaaacaaaataaaatggatatacaatgtaatttttacgatagaaattgatatatatatatatatatatatgttgggctatatggaaggcccgggatgataaaagttttctttggttctct

SEQ ID NO: 39240 - DNA, 1869 bp, Cannabis sativa
aattgggtcgtggccattttcccactaaggcatcattatccatgctcacatttttctcttcatccaccatgttcaataacaacatacctctcaacatagaaaattttaatagccaaatttccccacatccaacataagcacatcaaggtgtttccaaaactcacttcaataagtagtcattgttataaagcatttggaaggatcctccatgggaattgtctggtgatgctatccgttgtccattgtgctaagaacatttactataatcttttccccatagtaattgttatagctttcttagtatagaatccacattcatttccaaagtcatgatgctcttcaaatcatccttgataatgttgactttcattccatgtcccactaaatgaccaacatgcattcaacaaccaagcctaaacaggtgctaattttattttatttttaatactgagccatagtcaaaatcagtgctctcatgaaatggagacttgtatttaataggataatagcaaattctaagccacacttatgtgaatcatataggaagctcatacacatcacacaaatataaacaaattcatgctacatactaactctcttttttccttctcaacacaagcaaagataataaacatagtaacaattgacttacctgtttggatgttagcaattccttgaacatcaaatcgatattccaatatattggtgcgaggctctatagaagcagtagcagcagtctgggaaaaaaaataacatatcaatgcataaagattaaaggaaaatgatgatttcctcaaaatatgcaacatgtaacgaaaagaaagaaaaaataatatttattatgtaaccaatacaattccccaagtagctttggtaatctacttctcataacatgaaaagtaagacaaaaacaaaatagacttgaaatcaagaggaaaagtaacatctcaaaaactatataaacagtagggcagtaggcctatataaaaacatgtttacatgtgtccgtagatatttagatttctttccttccaaggaaccaccaaagaagtggtatacacattaagtaataatcagatgactaagtagattaagtgtgtgtaatgcattacaatgcaaagtcagagcttatgttattcatgatctaagtaaacacaaatcaaactttaaacacatttatcacatatttaaaatttaagaaacaattcaattcaagtatccagtggtcaattcattaacagaattttcaacaacaaacaggaaggccactgatcctgtgatgaatcaatttgatacaatagatttgaataaggagatcctctttgttgtaaacttacttctccatcctcctgatgagaagatattcctatgtctgcattggtgtttttgcgtgacttgtcatctgtgtcatctgagaacaaagtagtactgttggtatttgcatcactagggtctgatgccaccagatcaaattcatagctcaagatgttcttctcagcaagtccaagctgccaaagaattatacaagtatatcaatactgattctacaaacaaaggctgtggataacaagaaaactccatagcttaacatgtatttttatcagatgatggcacctgttggcagttatgaacaaaaaatgtgagagggcgacccctagaattagcaaggaccactttaagcttcatgctaaatagatgtagtactacgaatcagtaatatgaatcacagtcctcatagtacccacatgataatattcaggggataaataaggaatattggaggtaaaacacatctaatcccgccaccatttgcaaggattgatactttatcttccatgaatcagtatgatgcatgttttggataaaaaa

SEQ ID NO: 39241 - DNA, 1709 bp, Cannabis sativa
ggctcaagaatctggataacaaagctgaataaattaatctcaaccaagataaaattacttgtgatgactatatcagccctctgaatgattgactacaaaaaagacagaagaaaaatcagtttttttaagtcaaaattcactgcaaaatgatcatgacatccaaatgaactcgggtacatccaaatgaaaacctgtttgggtttgttactttagggtctcacctttcattttaacaattgaagcaaatcaaactgcactttaaatcttaaccaatcattacactaattttttttagtgattttgggcacccatcagtgatgttgtgattttcttcacaataacataaatagaaaataatagaaactacaaaaacatagaactcccaattcaaataaatttacaaggatagtgagagcgcttaccgattgtagtcacccacggcacaccttccttcaactgtcttgaagccaactacagaagagcatcatgtcacatgagagagtcatattttagaaaaacctgattctcacaatttacaaagataagaagtgaaaaaaactccttaatgttttattccactgcataactaagaagcatcattcacagccacaaggaatcaaaacgacctcttagttgtgtaaagaatggctcttgaacatgaagttcaaaatcaatagtcttcaaaatctgagaaaacccagaaagtgatttaacaaaacaaacgatagccatcaaagaatgcagtcatactcatactttaataaaaacacacattacattttgaaattccaaacccttttctcgcaccaactcattccactcttccttattcttcaagtcctcctccaatcctccggaatcgatccactcacacaaaactgatgctaaacgcttgtaaagaggatctgaggtttctgctgagtacaaaatacaaaataaataatattctttctttaaatgataataataataaaaaaaattaagacaaataagtatggaaagcaagaagagtgattaaagtgttttcgaattgattaccagtgatttgggaatgggaacgatgaagaaagctgggagaagcccaaatcgatgggggacttcagtatgagcttgaggagctcttccatggagtctcttagctccaccattgatgttcccggtgaggatgcttctccttccatatgtcctatattcgtatggaaatccagggaaaggaaaccgttgtaaaagtagaaattgctgagcttttctcagaaaacgaaaactacaacaacaaaactaacgttacaatgatttatttataaaaaaaaaaaaggaagaagaagtgagtcccaattaaaaaaagctcagattacttacaatctaatagtgaaagtacttgtgtttgtgctgatctttattttactttaattatgtggactttaattaatttttgaatggtagcaaataaggtcaaatcaattagtgttaagtgaaataacaatgtctatcaaaagtttaatgtggactctattctaataacataatgcaacttgttatctgaaagaatctcacaaggtaaatttaaaattttgtaggaataatttttaacaccacaaagatgaatcaggaaatttgtggctatataaatatcaatatatataaataaaggaaagcacaaaagatttttggtggcatcttatctttttttctaactatttttactattt

SEQ ID NO: 39242 - DNA, 1853 bp, Cannabis sativa
  modified_base (475)..(486): a, c, t, g, unknown or other
  modified_base (1032)..(1043): a, c, t, g, unknown or other
taattaattaattatggtgttaattttgcagaaactatattatttaggtgctagaaaatttgtggtatttgaggttgaagctatggggtgttcaccatctgcagtgcttaaggcttttccaaataatcctaataagtgtgtggatgatttgaataatttggccaaaaattacaacacattgttgaatcaaattcttcaacaattagtgtctaattttaaaggagcagcagtcattgtgggtaaaaattatgattttacctatcagatggctcaaaaccctgcacgatttggtaagcttattctagattaattaattttgaaaactattttttctcactctattgacagttatatatgcaccacattaaattcattgcaatctatttttatttatttatttattttaatttttcaagtaatgatatgtatgcactagttatgcattaaaatatggaattatttcacaaatacacannnnnnnnnnnnaaattacaaaaatacgattgtatagaattttaaatatttttacgatttttataattttatttacaaaaaatacggtctttttatgttgtatatttgttaatttgttattgattttttattatctgtatgttattttaagttgttgttttgatgttattttcatgttacttatatgtaattttcttattattttaatgttgtttctataaaaaaaccttaaaaatataaaaataaataatgtaatttttataaagaaaattatgttttatgtaattattccttaaaatattacaacagtgataatggtgggccctgagattagttggatcttaggagcaaaaatattaggcctttatgaaaagaatatgttgtattttcacaaatcattaacaatatgtttattaatatgtttgtttttaaaaggaaaatgtacatatttttttagttaattaggatttttgtctattaaactttgacatgtactaaattatgtcccctgaacttttaaagccgttaaaaatgctccctgaactattgagattgttnnnnnnnnnnnnttttgtctaatttcatttaattttgcttatgtgctaatgctccttagactttaatatctatcaaattatgtctctcaaactttaacatgtactaaatcataccctctggattctcatctatgttagacttttttactaaaattggacaaaagtccttaaattcaacaaactcaacagttcaggaggtatttttaacgattttaaaagttcaaggggtataatttaatacagttcaggaacaaaaatagcctatttttgttgaagtagcaatatgtcagttatagcatatcattgtgcctaatgtcttgttgcataattttagtgcacatattatttataattactctttttattagattacgtgttcgaagaatgaacatatgttctcacccacatattagaaaacacataggaggagttaatttatgcattttttgttttgttttgttttgttttgtagggttaaaagaagcatttaagccatgttgtagcacaacatcgattggagtatgtgatgcgaagaaacctattacatgcaaaaagagaaattcttatgcatactttgatgcgtttcatacaacacaagcagctaactccattatggcaagtacatgcttcagtagtgctggcgcttgtttcccttataacatcagacaacttacacaattataatttataaatatacatacaatttaataaattaacttcccccttttacttcttattttaatttatatcattttttattcttcattatccccttataatatacttattatttttaagttattcatcatagatatccttatt

SEQ ID NO: 39243 - DNA, 2040 bp, Cannabis sativa
aacctttgttgtttgagaacaagaaaataggctttttatccaaccaaaccagcttctcttctttgccattgaatttagttccacacttcaaacaccattctcttgcttcaattcaatttctgcaataaatatgagaaagagattaagaaattattagaggaggaaatattatcttaataatgattttttcattaatcaaaacaaaatgcccatatcagaattaatgctcacacagctgaaattattattatatataattaaaaaaaaaaaaaaacaaaactcatatcttgaacttattcagatattaaatccaaaacttacagcaattaagagaatatgaattagtactttaaattaaagcaaggttagtacaaagagaaaatgttgataaaataaaacccattattattgttatcatattaaagaacctcacattaaaattaatgctcaaacatctgcatttattattatataaatatatatatataaaaaaaaaacattaaaataaacataaaatttccaagtcatcttgacaataagaaaattttcaaaagaaagaatctaattaaatccaaaacttaaagacaattcagagaatatatatgaacttgttttgatccaacaattcagattaatttatcttaataatgatttttcttctcttaaacaaaaagcccatatcaaaataaacattatcataaaacattcaattacccaaaaagaacttattcaatgtcaagaaatataaaacatgcagatattaaaaaaaaaaaaaaacatcataaattagtactttagaaaccaaactaaaagattctctgttacacaaaccaaacttgaagcaaaagaaaatgataataaaaatccaaaacttacaacaattcagaggaaatgttctttctttcttctctatacccttttgatatttcttcaaagttccaactgtcaaactcataactgtcacaaacaataagttcaaatgtctggtttttttcagatgattttactgatatgacctttgtgacatgtctacaaaggagaagaatgaggttgattttgcttacacttggcttgcctcttcaatctcatcataataattttcaattttcaatcaaaatatttatataaatataattttgtagaaaagggtccatttttggttcccaccatgaggaaagactttaatcaatttccataattattatgaggaaggaatacttgtacattttattgtttcttaaatatatatatgtatgtatttttctacctttaatcatgtaaatgcttttttcatattttaagggatattgttattaatagtattttataattaaaaaataatattgagtttcatcatcttattagattattgagtagttgttaagccttattatgaggagtcttttactttgaaattagaaatttgtttttaaatatttaatgccataggagttattggggccaatactataagatgcgacatataatgaatcagcgacggactcaaaatttttttctactacaagtaatgtttaacataatatttagttgtttatttttttttaaaaaaaatgaattattaaaactatataggaagtaaaatataaatattttgtacaaaatgatcaaatcattgaatagtaagagcgtaaatataaaacaaattacactataacgattacattataaatcgaaaaagtcactcatcataatggaaccaataattcttagccaactagcggctcaagattattgattccatcaagatgagcaatatggttcattattaaaagatcgtgctcgttacataaagtagaaaattgcgaggatagacaattgcctaatttaggcttaatgtggatccgtcaatgcaatgaataataaaattttatatcgaaatttatatattttatttgtgttcttttttatttggaaaataatttgttttgaatttaaatatgagagactcaatgagaaattgcactatcttaaaaatgaaatgtatataacatgacccatagctcatttggttatggtggt

SEQ ID NO: 39244 - DNA, 3664 bp, Cannabis sativa
ttattgatttgtattaaactcttggttgttgttaataagagtttaaattcaaaaaaaaaaaaaaaacaaacaaactttaaactaaacacaaaattatgtattaatcaactggttacttattcaattagtaacttctaaaattatagttttaatgttaaagtatttatttttattggttaagctatatttttatttatttttttatttattttaggtaacgttatattagcttgttgtttaagatactttgacattacttttacttataataataaacttataaaatattttttattaactcttaaaattaattggtatataaaattttgtttgagtttttgtatttgagttgaaagttcagtttcttttgttaatattagaaactaactaattacctatttaatattaaaattattacatacaaaatacaaattgatactttatttataaaaatacccccataaggtgtggacaacatttataccttttttgtactttcaattaccaaaatacttcttgcactatcacttacacaatcaaacgaaggttgttgggtggttggccgaaggttgcattagacgaaggttactggatggttgctgggtggttgaccgaaggttgcattagatgaagattgttaggtggttgaccgaatgttgcatcagacgaaggttcaatcccaggaagctcgatcgtgggttgctgttgaaactgtaatgcaacagttatatttgtcgcgagccaacttataacgtgcaacttagttgcaactaaaaaaatataaaatgtgaatgtgtatacgtaagaaattatttgtcagtattttttttttgtcatcgataattacttgtaccttaatagtaatatgtgaagaaataactgttagcaaaatgtttatgcaacagtaatgtaactgttatgaaatattaaaaattagaatagtattttcacgtacgtaaccctatctacatgtctcttcatgatttaatatgaacgaattcactattagaaatttggaaaacaacgaaaatacaccaggataaacattttactatagtattgatgtaatttttttggattatacttgatgagttagattgtttggggactctagttcaactctttgagatatgcatttcatgaatctaaaaattaaagtcaggacattagttttatgtgaattaaactgaatttttggttgaattttagtttagtagtagtttttctgcatcttttttcatgaattcgaaacaactcctgttttgattgattctggtcatcttctcaggtgaagtcaccagaattaatggtggttctctttctagttggactttcgtttcggttgcattgggttgttgtgcggttttcagatagttgtccaggaagcatgaatcgtgagttgaaagtgtgtgtaagagatatttgtataatgtttttttatttggctagttgaaagtatttttataatattgttaccttttttggttaaaactaaaaaaatcctttaatatttgctcaactttttcaatgaaagtaaaaaaacaatatgtttctcaaatatcaaaatattcactttagagttataaaattgttaaaaaaaagagcacgaaataaatgattaaataagacatacatcacattaacatgacaataacaaaaactctcaaaaatattaaaaaaataaaaaaaaaaaaaaacgtgttatcgtattgtgttcgtgttatattttatgtggcctacttctatattttgtgtcaggcgtatcgacccgttttttgactcgtgtctaattttttcaaccctaactcgacccgtaaaaaatcgcttcatattcgtatcaactcattgtgacttgttttgctaatattgaagctggagttgtagaaaaaaaataataaatttaagttccattaaaaaaaaaatatatatatatacatttatgtatgttatatataataaaaattaaaatttttaaaatagtaaatatatatttttttacataattatattattattaataattttttattttattatatttaaaaaaaaaaaaaaaaaaaattgtgttaaacgtgctaaattcgtgttaagcatatcgtattgtgtttgatccgtttttatttcgtctaaagtcgtgtcgatctgttttccacctgcgtctaattttctcgaccttaacctataaaattcatattgtatttgtattcgcgtgccatgtcgaaatctattttgccactcctattgtgttgtgtcattttattccaagaaaaaaaatgaaacttttatttcggtatacgcatacacagaatgattacgaaatgctagatattatttcatattaataaagtaaaacgcattttcataaataatttaaaaagaaacgcgtatcctcaaattaattttctcttgtttttatttataagtgacccaaggacttaattttctttaatgataatttataagttattggtatttttaatagaaaaatgctaaaatgcacattcctatgtgtcaacagggccggccctgggcataggcgggctaggcctgtgcctagggcccacctagttcaggggcccaaaaaaaaaaaatttgcccttttaaaattacacaatttttttgttgattttgaaaaatactattttttttctaaataagggcccaaaaattaatttttaccctatagcccactacatttcagggccggccctgtgtgtcaatatcgttattggtccaattaagtatcgggttccatataatttattataataacttttaaggagtatcgctagctaatcgcaacacaacatatcgagaaggtgctaggcatcactggtgcctaatagcaatactctttttaataataggaattgggtgggagtcgaggagtgaaaaggagattaagtggggagtgtttgaggttagtcaatccaccagagtcacgcatatcaacttggtcaacatctgatggggttgctatatgaaatccttgaagcaatgtggccagagtgaggtgaagaacttgaagggcaaaagagactgcagggcacattcttctaccactcccaaacggtatcaactcaaaattctgtcctcggacctccatctcatccattccttctctcagaaaccgttcgggcctgaactcgttgggctcggcccaaacttttggatctcgttgtagctttgaaaggttgaggaggaggcgtgtgccagctggaacgtggtacccactcacagtacagtcttcaaccgattggtgggggagtgcgagtggtgcggctgggtataagcgcattgtttctttgataacagcttggagataaaccagcttgtttatgtccgattgctttacttgtctttctctccccaccacttggtctaattcttcttgtgcttttctcaacgtgtcttggttgttgacaagtagagccaatgcccatgtcattgttactgttgttgtatcagtgccccctagaataagagcctgcacatttgaataagtcttgtcacactcacacaccttattgtttatttttttctttctcaaacatatagtttttagggtaattagtaattttttcattgaactttgacacgtagtaaatcgtgtcctgaatttttttggccgttaaaaattctccccgaactattgagattgtta

SEQ ID NO: 39245 - DNA, 1901 bp, Cannabis sativa
taattattattaccaaaatatattctattatatatagtgaacataaatatttattaaataccctacattatattattgattaacaaagtaaaatatactttttagctcacatttctcaacacatacttaaataaattaattggtattgtatctaatctaaaatatgtcatgagattccatacaaaattacactaataatataatgtgtaataagtattgttaggctataatactacataattagaggagcattgcaataagctataagagaaatactaattataatcttctttttaaattttgcgttcaaaaacatatgcagaaataatttctttttctcaatagtccgttgtagttataatttcgtatagactatttagagatcaaaacacaaattagaagcttttgaataggagtggtaaacttaaatattaaaaattctgttgttaatactatagactatttagaattttttaaaaatttaaaaaaatgattttgtaactacaaaaagcactactatgaaaaaaaaattataagaaaatattttagcaaatatttatgttacaagcgtgaaggttgagaaagatggccttgtaattaacattcatctaattaaaacataattgtgtttaaaacaataagattggcatatatcgccaccatgattccatttctttttttgaggtaccatgatattatattccacattttaatctaaattaaaatatattaaatttaacatttacgaccaataataatatgtgacatcttttttttagtattttttagcatttctcttttattaataattttaattctaatataatacaataagtttttttttttctttctttaattatttattatttatttgtttttttttttgtttttttaaatatggttcattgaaaggaaagcaaacaaaatgcatataattattgggcgcagacccaacatataattagggatgtcaactaccgttgacttttttttggagaaaaattaataattttatttttattatttattattaataataatatgtgtgcgcattttttattataaatttataatatattatgtaattctactttaaactctaaaaagattattttggtacattttttcttttttttttagcagtgttatttagttttttgtaagtgtacattgtaattatttaagacctaaatttttagaaaattttaaataatttataatatcgtaaataaagtttaaacaattacatgctatctatataaaaaaaaaataataaaatatctgaaatttatttttattactggacatgtaaactatttgttatgaaaatttatatatataggaaaattttataatgcattttttgaaaaagggtgtatcagtgtactcctatttgtttcagtatttaaaaaaatattttagtctagttttttgtatggttgcatacgttgtagttatttaaggcttcctgcaacattttgagagatttgaaaacatttaacacgtcaaaaatagggttcaaacagtctgttgcacgcataactcttattttataggcatgtataatagacggtttaaatattattttttacattgtaaattattctaaatttttcaaaattttataggatatcttaaataactataacatacacaattattaaaaaaaaattagactaaaaaattttccaaaatatcaaaacaaataaaaagtacaccaatatactttttttttagaattatattataaaatcaccccataaatatatatatataagttctaaataattataatatgcactattatatgaaaataaactaaaaaaaactctcctatacttactaaatcctccctcgtgaaacttatatattgcatgattttggtattataatggtctctc

SEQ ID NO: 39246 - DNA, 1758 bp, Cannabis sativa
tatatatatatatatagtcattttgtaagaactcttatattatattatttttttcttcagaatcaagaagagaaataataaaaaaaaaatgacaaaaaactaatttttttttaataaaatttagtaactttattaactagtaattgttaataacaaaaaactaactttattataataactattttaactcaaattttgaaaattttacatatattatttatcctttaaataatatttacttaatactttttattcatattatatatatatattaatttgtatttttatatatgttataaaaataatatctaaatgaatgtagaaaaaaaaaaagacattgatgtatctatcatgtaataatataatagtttgaaaaataaaaaaaataaaaaaatttagtaaaatattttaaaaaataaattttaaaaactgattagagttctcaaatgaattttaaaacctaaattaatcaactacaatatgcatatctcataatgatgtcatatatataggatatatcaacaaaaaacacacatttgactttattaatgtttactaatttttttcttaattatttacttcaatttttgaggtatatatatatttatacttaataatactaatatgagtcaagcttgttatgccatcattattttctttactccttttcttcatttcaaagatcttgtggtgaagattttgtctttattttcttttataattaatattggtaataaaaaacatataaaataaaataataataacgtttattataagccaaaatatagtaaaacctctgcctttactagtgtctagtcaaatatttcgtgtatatatataaaataattaaagctttaggctttaaagtgtcgtcctaattatgctatataaaattaagtgatttcaacatagatcaattttgtcataattaactcaaagaattaattggcaaaattgtctcatttttgaagttattttgtattttatttagttccataataattctttacaaaatgaactataaccaactgctaactgtctcgagtgtcaaataccattttgcaaaaagttattgaaactacacaccaaaggtataaaatgatttcaaaaaagaaactaataattctccaaagaagattaaacaacaaagaaaaaaggaaaggaagttaagattgagtttttattttttaaaaatatattttctcttagttagatatacagtgtttgtaaatataaataagtttgattttctcttcacaaatttttagtttgtttaggttatttatttaattttcagtaattttggtttgatttgttaagatatgtgtttataaataaaataaaatttgaaaatattttttaaaaaataatttaggttttttaattaaacttaatacaatttttattaatttaatacttttattaaaatttttaatttttcagaataaatagaaaattataatttttaaattaacttttttttttttttttttataaaaggggacaaaaaatttagtattggtcgaagttcaggggtaagaatactactttttaacagtaaaagaaatagaacctaactaaagggtcatgattatgtagttgttatattttaaaaagaattttaacaagctgtatattttagagggcaagattaggtaatgtcgaaaattcaggggacaaaaatattagggtgtgtttggaagtaactgtgtaattactagggtggtaattacacagtttagtaattacactatattt

SEQ ID NO: 39247 - DNA, 2750 bp, Cannabis sativa
gaagtaagatgtaataacaaagataattaagaaaaacatatgatcagaatagttgggtgaaatcttcatttgttattcaagctttccgctttcgtgctggaatgacagactacgtctctaaaccaaggcaggctagtgattagagtgaagtgatagattattggtttttttgtttcatttctttcacaccagaaaagaactatgtttcatagaaacttagacatggaaatcttattttgttatattttctttccctgtagcatcaatatagttggaactagtaactagagcgaagtgatagcagggtatagcttatgagaaagagtaagtgcttgttggtatttttgtttcatttttttacaccagaaaagaactacgtttcagagagaaacttggaaatggaaatcttctttgttatattatcttcccctaaagcatcaatatattagcgagcagaagaagatgaactatgtctctaaaccaaggcagggctagtgactagagtgaagtgatagcactagcagggtagctttttcagagagagttagtgcttgttgttattattgtttcatttcaatcacaccagaaaggtactatgtttcagagaaacttggaaatggaagtccttttttgtcatagcttcttgtttctctacagcatcagtaatttatttaacagaatttgaagtatttgcaaattttacctttgatgttttagcaggttcccaccattatttgattcatttctgcaatttatgtatctacgtttgctgataatgtataaatttgctgtctgattttatttatattcaacaggtagctgtaattgctccaaatatccctgcactttatgaagcacattttggtgtaccaatggcaggggcagttttgaatgctgtgaacatccgtttaaatgcatcaaccattggtttccttctgggtcattcattagctgcggctgtgatagtagatcaggagtttttccccttggctgaggaagctttgaaaatcttagcagaggaaagaaaaagtcattacaagcctccacttctagttgtaataggtgatgaaagctgtgatcctaagaatcttgaatatgctttgaagagaggagccattgaatatgagaaatttcttgaagggggtgaccctgaattttcttgggaaccaccagaggatgagtggcaaagcattgctttgggttacacttctggtacgacagcaagccccaagggggtggtattgagccaccgtggatcatatctgatgtctttgagtgctgctgttgtttgggggatgaatgaaggagctatatacttatggactctacccatgttccattgcaacggttggtgttacacttggggtatggctgctatgtgtggtacaaacatatgtctacgacaggtaaaagaaatgatctatacttcttacttacataatatattttagacacgaacctttcttcattttgtttttgtttcatctttgcaggttacagcaaagggtgtctattccgccatagccgagtatggtgttactcacttttgtgctgctcctgtggtactcaacaccatagtgaatgccccagcagaggatgctatccttcctctccctcatcttgtacatgtcatgaccgctggtgctgctccacctccatcagttctctttgcaatgtccgaaaaaggcttcaaggttgcccacacttatggtctctctgaaacttatggtccttccacaatatgtgcatggaagccagaatgggattcacttcctcctatcaaacaagctcgactgaatgcacgccaaggtgttcgatacattgcattggagggcctcgatgtggtcgataccaaaacaatgaagtctgtccctgctgatggaactactatgggagagattgttatgagaggaaatgctgtgatgaagggttacttaaagaatccaaaagctaacaaagaatctttcgctaatggttggtttcattcaggtgatctagctgtaaaacatccagatgggtacatagaaatcaaagacagatcaaaggacatcattatctcaggaggtgagaatataagtagcttggaggttgagaacactctgtatttgcaccctgcagtgttggaagtatctgttgtggccaggcccgatgagcgttggggagagtccccatgtgcttttgtaacattaaagcccaatatcgacaattccaacgaacaaggtttggctgaagatatcattaagttttgcaggtccaaaatgcctgcttattgggtcccaaaatcagttgtttttggaccattgccaaagacagccactggtaagatacaaaagcatgtactaaggaccaaggccaaagagatgggggcccttaagaagagtaagttataagttagatatatttattatttactatatatatatatgtatgatgctgactgatcagatcaataaagatatgcttcttcttcttattcatatacttctctatatgaagaaaaaaaaaagaagcttttagtttgagatttgggactgttctccacatctcattccaatgtttctgtctttattattattattgttatattacttggttcagacggaagtgaaagcattagtggggccatatatggtttcattatatgatgaccaatgaccatgatgattatccaatttcccagtcatatataacacattagcattaccagaaagtataataccaatcaagtattaaaatcttacatgttcaat

SEQ ID NO: 39248 - DNA, 2150 bp, Cannabis sativa
aggcccaaaacattctttaataaatatgccttattttttttttcaaataccatattttgtatttttaccattatttattgaaaaatataattattttctaaaaaaatacataatttattatttaaaatattacatttgatattttataaaaataaaaacccaattatattttcaagatattgtattttaaaattttaccactatatatacaaaaaaaaaacacaaattttttcatataaaaaaatccaaacaatttttttttgcacaaaacacttaattagcttgagacggcctagtcatactaaggtgaaacaatatttcttatttttgtctatgcaattaagtatcggatctcatatagtttaatatactaacttttatagaatattgttaatcaatcgcaaggtgacacgtctagaaagtgctaggcaccattggttcccaatagcaacgatcttaaatcaagcattaatatagagtatcattctttattttggagttgtaatttgcctccattttagagttacatgccaaaatgcatatggaaatcgaacttatttcaagagtatttttgaagtttcaaaatctaaaagttacttttaaaatctcaaaaaaccaatcaactcttttacattctcactattgaaaacacaaaaaaaaccctaaaagctcaacaacactaaataacatcacttgactggttttgagaaaaaaaaaataatataaaccaaacaagtactatgtcaaaaagcatgaagttcgatccaaaaaaacaaatgtaaatgccatccatacaaattaatctctactaaattaagtcgcatatgctcgaaattcaagaattattgttttcatatcaccgtcgaagtaactttcttgtatatatagtgtaatatatttggcaaaaaggaaaaataatgttaaaatggaagagatagagaaagagagagaaacctgcagctagggctagaagaaaaacaaagaacaaatgcttgaaaggaatggtagaatttgatttcttcatgttatcaacaatgcaacccgggcacttttcatcgtagtaacccctattttcttcttcttcttcttccttcttcactagtaacagtacttctctattactctcttcactatccattcttttttttgaaaaaattacttaattgtttattacaatatatcaccagtactactcttatatataaatagaatattcaagtgtgaaatgtaacgtatttttattttataatatataaatatatttatgttcttaatgaggacaatataaattacctgtttttggtaataaaacaaattgtaacacacgagaaccttacatataagtttttgacaactttgtttctctttgtgattttttctttacagcaaataaaaactggcattttttagaaatattaggatatttccttagtggcaatattaatcatctgttttttttggctgtaaagtttttcttttaatcattcatattagtcaagtttgaagaggtattataattaatattgtattcgttgattaattaagaatgactgagaagataaagataagaagaagagtgatgataattaacattacgttttattttcttggtttatttcatttttcaaatgttaataatatcattctttttttctattattaatttattgtttttttttttcagtttctattacaaaatggccatacttagtaattgtcaaaatatttatttattcatgtattaaataaatcaatctaattttttgtcatgataaataaatctaattgaaacctctattttgaacaagttgtattagtaattgcaagtttaaaacgaagttaacaacaattttaaaataaaatttagattggagatgataataaactccttaatttgactcttcaatgatatatcttatcaagaacttcttaggattatatgaatattaatcacctaaccatatatattggcttatttttttttatctatcacaattaattcatatcataaaactctatagtcagattaatgagtggtatcagaatagaatataaataccttaaaaaatccacagacacacgatcgattagggaatcataaggtaaacacacacaaaaggtaaagtgtgattgtccgtagtcccgtgatc

SEQ ID NO: 39249 - DNA, 2484 bp, Cannabis sativa
acttagcttgtaacgtgccctcttggaccgcacgtaacaatgggcagagttgacatagtagaggaggccataccgtccgttgatgatatcgatccagaggtcggccaggcataggtgcctgtggttgaccagggtactgaaagtattaacatcgagtccaaggtggaggaggctgcgcctgccagaagaaggacgtacaggacttgtgccatcctccaattgccctctggtctcatatgacgttgataggtagccattaaacaggcttggtcagccctcagtgataggtttggaccgtgtcttggtacagtctttagagcctcaggttcttgatgctgggtcatgaggagattgggggtctctccttcatctgttatccctaccgatgcttttgataggatactgaaaaatagaatagtgagaggcatctactgtgaggtgcccttgagggatcagagagcacaccagctggccttcaattggatggtatagttaaagtgccatatccagtaggggcagtgttgtggttacacccatattttagagatacagtcgcttacttcgggatgtgttcaacgcaaatcaccctgaaaagtattaaatacctctcaacaattttgtgctctatgcgaagctaggctgacctcatcctactctgtacgagattgggtattattttgatttaaagtctgctctaaggcagaactatatggggtacttctacttcagttaggtaggccaccaatggttgggtgacaccaacaacacgcctctgtcaaaagtaggtggatatgcccagaattacttcatagcctagaatgtctaggagattcgacatcaccgcttccagcgagtgcctatctacaagtgctctccccctaacctacagatgagggatagagaaaaccacatcctgtccttctttgtagtgaagaggaacataataaggttggccaatgtagccaaatttcagaagtacggcttgtatcctcctgttttagagttgtaggggtcgagggcccattatgtggtgtagatggagctaactactgaggaggtttgcgcaggtggtgggcatgctcctaacatggatgatggtgtgcctctatctcgaataccctagggtttggaaaagattgaaagagcccactgccagcgcttggctcgtgggggcataattagggatgctactctacagattaggcctggaggctagagctttgttaggcctactaaccccttaaatccatctagaggcaaggggaaggcagccgtcaaagattcaaatgattcctcttccaaagatgattgtatttgattgttgattgcaccatcttttatattcttggcttgcattaaatatctgtaacttgtactctaactttgttactttcttcttatatatatatcttctagatttagaggtttagctagtggaccttcagatgagcctttgggtcgctcgagggccaaggtggcctggactccctattgtggtgacaccgtggggtcatctcttcctcctcctcctcatgggcctacgctagctgggcagcccatgatagatgaccctcatgtgaggagggatcgacctttgggcaggggctcctagaaacttaatcgggaagcaggctcagccgtggggtagagatctatggaggcagttcgtagatgccttgacagagcttttcctactgtggatagtgaacataaggagcttggtgatggtgagtcggagaggctctcttctgtcgatctttgggagttggcatcggtaagttgcacatttaactttactcactttttgtgttatcgtaagctggccggccatagggattgttgtatgaagctggtcgaccattgatagtgtctttgagaggctggttggccttggttgcaccatagtggggctggcgggccagtattttcttctggcagtaatcttgtctttgttttgtttttaggcctttatgaagcttaaattttttcatggcaactccagggggtcctcgagtgctctctgagagcaagtaaagaccctggaggctgatctcttagcgaggggcaagattgtgactgatttggaggcttttggctaacaaaactaggacatgaattctggtttagaggtcatgatcggcaccaggaatcaagagaataacttgctcgctgctaacaactctaggataaggactgaactcatgaggtgtgaggagaaactgaaggctaccctcgatggccagtaggctataaaggacgagtacttcagcttgtcttcagagctcatctacgagttcaatctatgaaaccccatagctaatctttcttacatgggggatgtttctttcttggataacacattggcccaagggaaagcactgtttgaaagtaggttggagacagactagattactgtccagccagaaggatcatcctcggggcaattggatgaggagatggctggcccacctactgaggaggggg

SEQ ID NO: 39250 - DNA, 3108 bp, Cannabis sativa
tccaatagtagcaggatagcgaattctcagagctagaaagcttaaggtaagggttaatttcgttttaagtttaaaaaaatttattttgtgtagaggttttaagaactagaatagttatgaaagttctaaccttatagaaatcatctcgggcttaagtgcgaacagtagtggtgtttgccaatcaagggctcaattttagtttctattgcgtaagtatggtagtatgtatggtatatatgcatcctttcaagtttggggtgatttggacatgttccgatagcatttcgatgagtccgtaaacttggaaaatcacatttttacccctaaaaaatcggtcaaccggttctggccaaccggtttacagtttcaggtagcctctggaactcgggaattgtatttttgccataacttttcactcaagtgtcttcttttgacattttataaactgtttcaaagtttgcaacgagctctaccatgtgataaatattttagagccaaaatataagtttcattttagtgtattagaactacagtgtttggttggaaatcctaggttgtcatgttccactgttaagcactcttttgggataaacacttattgatttattattgttaagacatagggctcggaatcattaatcattctccaagcaggtcagccaacataccgaaactggaacttgaggtaagaaaattataatgtaccacagagcattacaggttctagaattatcgattgtctaattagtcaatgataatgtgatgatattatggacataatttatgggctcacctgattaggtgatccaatatacctagaaatgtaacgggcataggtacgggcgtcagtgacatatgatgagtactgagcgtaggttcgggctcacctgattaggtgatgtgatattcttagagacgtatcgggcgcaggtacgggcgttagtgatatgaaattgcctagttatggcttaaattgaaatcattgttgggtttcttcctagtgacgtatcaagcataggtacgagcgtcaatgacatatgatgagtacagagcgtaggtacgggcgtaagtgacagataatgagtatcgagcataggtacatgctcacctaattacgtgatgcaatattccttgtgacgtatcgggcataggtacgagtgtcagtgatatggaaatgcctcgttgtggcatagattgaaaccattgttgggtttcttcctggcaacatatcgggcgtaggtacaggcgttgatgacatatgagagtaccgagcgtaggtattggctaaccttacctgttgacgtactgggcataggtacaaacgtcactgacctatgatgagtaccaagagtagctacgggctcaactgattaggtgatgcaatattcctggcaacgtatcgagtataggtacaatggtctgtgatatgaaatttcctagttatggcatagactgaaaccattgttggatttcttcgtggtgacggattaggcgtaagtatgggtgttagtgacatatgataagtaccgagcataggtacgggctcgtctaatttgacaatacaatatattggtgccaacttatggcacgggctcacctatttaggtggtccaaagatactttatatgataaagcattatgacacgggcttgcttgattaggaaatgcaaatatatgagcacatctatttctatgcatatggctagttatattacctactgttaaatgatatagttttgtatcactagatatctatatactaatgcttattcatggcgaatgccagtagtgattttgattttatcttataaacaatgcgtaatggtttgattctgattgtgtataaatgacattattttaataataaactatatgattattattattattacttttcttgctgagtccttgtgactcacaagtgctatgtgatgcagagaaaggcgaagaaaagctagatcaaccatgaggttacagtcttctccagcaatgtacatattaatctcaccgacttgcgtgctgggttgcaaggagttgtttcgggttgtatctattgtgtattttcgtttatatatttttaggcatcgtcttatatagttcttttgtaaaacttttataacagggatccccaaaatacactttttatgccgttataatgtatttttattattttattttagtaaagttttaaattttgtcacaatttttaataatgaattaatctattagtattaactagtttgtaaaatcacacacgtggcgtccttatagattagggcgttaaaatttggtatcagaccaaccatagtattaaaggtgctaaagattggttgaatatgtatattttctatgaagacggtcgactaatggtatagtaaatatttatgttatttgttattgcctcacctacttatataattattgtgtatgatggagaaaatagcgtactgattatctataataacaatatgtgtatagtatatgtatattcaaattgatatatgtctaaaatttaagtgtttggaagatgtggattaaatgtgtgacaaattatacagcaagggaaattcaactgcctgattagcgagctgtttgggctcgaggcaaatgctaaggaaaagaatcctttattgttgtaatactagaaacatgtaaattctgctatgcaagatatgattagacaacaaggcaaaacagattggagatctgaaagtacaaaaggctcatcttatgtctgttcttctaatactgacacttagtgttgtactactggatgtggtgaaatatatatgaacccaacttacgtgtagatcagtagacagaaactaaatgaattaccaattatgggatagaacaaaaggttctagtgcaactaggataatggtcaaagcgagaataagaaaggtcaaccttatcctgagtgttcaagatgcaaaaaaaaaaggggccattcgggctaatgtagagccagatcttgttttatgtggggtagtgggtcatctcataagggcctgcccacagttcaaaaaggttaatgttaaaggagaagagtgtacgagtgttaggctattttaagcctatgtttcgggtcacaaatagagtcgtttt

SEQ ID NO: 39251 - DNA, 3429 bp, Cannabis sativa
acaggattagtaactagtgcactgacacttaagttgtcacaccatatcattggtgttgaaggaagattgaatttcatctcacttaacagtcactgcaaccaagatatctctgctgcaaattaaactagagctctgtattcagactctatgcttgactgagccacaatagtttgcctatttgaagacgatgagatcaaagagtctccaaagtagacacaataaccagccactgattttcaatcatctggacaacaacccatgataaacagttcctttgagatgcctgagtatcctatttattgcacaccagtgaacatcagtaggtttctttaaaaattggatgagcttattcactgcaaatgaaatatctagccttgtatgactgagatattgcagagctcaaagaatgcttatgtgcagtgttgggttttccattggttggtcgtcattgatcgacaatagtttcaaaacaatcataggtgtaacactaggcttcatatgctccatctgagctttcagtagcaactcaaatatgtagttggcttgtgatagataaattccagtggtgcctttaaatacctctactttaaggaagaagtgcaggcctcctagatcattgacagtgaatgtcttgttcaacctttcaatgaataagttcaaatccttaggactgttttctgcaacaattatgtcctccacataaacatgcaccataagtgttacttgagattctttgaatattaagaaagaggaatcagctttggaatttttaaatttccaacatatcaaagtggccttgagttgatcataccagaccctaggtgcctatttcaaacaataaatcaatttatgcaatttccatacatcatctagtttatgtgggtcttcaaatccctgaggttgagacatgtagacatcatcatcaagaataccattgagaaaagtattattgatgtctatttgtctcacctcttaatctagagaaacaattaaggtaagaacaactttgattgttgcagccttcactactagactacatgtctcaccaaagtctacactaggtctataatgaaagcccttaactaccagtcgagttttaaatctctaaaagcttccatcagtattgtttttttctctaaaattccacttataaccaactacattatcgatgttcgacttagaaacaagagaccatgtctttttttagagcatagttttcatcggacatagctggactccacccctcatgttgaagggcagcaaccactgaagctagtagatgatcaatctgtctgaaatttttgtgaccaaggtaggatttggattttaatatgtccaccttggccctggtgatcataggatgtgaaggtgctacaagagttggtggagcagaatcatgcataggactgggaacaagtaacaattgcgttgagacattgtctaaagtatcataagtagcaaaacgaatgtgagaacaagcaaaagaggaagttgaagttatagtcttatttggtgaggatggagatgatggtgttgcaagagttgatgaagaacactctgatgaacttaattagtgagttgtagtaggaagttgaagccaagagtgaggtgcagggacagtgacaaatttttcattttgatagttattaaaaaagctagaatggcaagggaatttagattcattaaaagtaacatttcttgaaataaaattcttccccgaagactaagacacttatagcctttgtgcacttaactataacctagattaagacacttgactgaatgatattagaatttatgagttttatatggtcttaagcaagggaaagatgatgctccaatcacctttagaaatttataactaggcactttgaaatatagaacttcaaaaggtgatttccctttaaaataatagtaggcaacttttttatgagatatattgagatctgaaatgcatcatactagtatttgagtggtatttgagcttgtgaaagcaatgtaagtcccatttcaacaatgtttcgatgtttttgttcagctcgtccattttgttcagaggtatgggaacatgaatgatgaaaagatattccattagcaacaactaaatcagttgaagcttaaaattctgctcctcaatcaactctttattttttaatcttcctatcgaattgattttttactaagtttttgaactaaataaatgcagctagagcatctgatttttgctttagtggaaatagccaagtaaacctactataattatctaaaaagggaaatacattctaaagtttgtgtgagatgcaactagggcagggcccccataagtcaatgtagattaaatttaaaacatgtaaagcacgactgtcagaatttttaaaagacagtgtgtgagattttctaaatcgacaatcatcacagaaagagtatttttcattaacatgatgttttatatttgaaagctataaaacttgatgtaaaacaacaatagagagatgacctaagtgtctatgctaggtatcctttaagaaaatggaaggctgagatttaaacttggtgactgaaccaaagaagaacttggttttgttttggtaagatttatctgtaacatgagagaaaaattgatatagtccatctttaagtgttcctcgcagcaccgccttccctgttgtttgatccttcaaatagtagaaatcagaaaaaaaaattcaaaatatacatcattatcataagttaaacttgaaacacttatcaagtttttagtaatggatggtacatgtagaaaatctttcaatactaagcacttaaatttggaatatttagaacaatatttctaaaatttttaatggagagtttagtaccatcaccaattgtcatatgctccttaccaccatattctttcttattttttagctgttctggatttggagttaggtggtttgtagctccactatctgcataccaactgtcatcaattagagtttagggagcaaccacaagacctgacatctaagattgtctttcctgattgagattgtaatcagatgagggaggttggcccataaaagcttcataatattgattatagtagatcgttgtagagtgccaatacttttcacagacttggcaggtttgtttggagttgtttctgccacctattcctctgcctttatatccacttcctcttattggagaagattcttgaggtgtgtagccacggccagagttattgttgttctttgtgcaagaacatcttccttgaaaacctcttttattgatagatcctaaaggttttaagccagagtagctgaaggaatgttgagaatcttattggtgggtgatagagaccggagtctctcaagtatgttgtcataactaagaaaagtactttgaagcttttgctaggatagctctgcacaagcttcaagtgga

SEQ ID NO: 39252 - DNA, 1459 bp, Cannabis sativa
  modified_base (993)..(999): a, c, t, g, unknown or other
caactagcactgtaaccactttagaattccaaaccgtaaatttaaaaaaaaaaaagttaaaaaaaataatatatgcaataattctcctattatattatatatataaaaggatgataaaaaataaagcattttaattgaagaaaccttatgcaataattcaagctgctatatatacttgagccagccttggtggaacatatacttgagttttatttgtagctctataactaagaaaatagcacataacgaattatttaactacatattcatctttttttaaaaatatataaaataagcacgacatgtcatgccaataggatgatgggcacgaaaagaagaacttctaggcactacttttgtcatgcccgtagaacctttttattgtagtgtcaaactttaactattacaatggacaacacctcataagagacatcagttggagttcacgacctaaaccaataaagcaccttatattacagtactacaaaataaggttaaataaaattcctaaactattacattcttaaaaccatcatacatattacagtataaataaggttaaatagtggtataattaaaaaaaaaaaaaattgaatttatacctggtataaattaattaatatttttatttaacaatataaatactcaatattaatattacataaatttgtatgtctaattttgtgaatacaaacttgacaatttttttcgttaattacaatatatctaaatcctcattaattttttaaaaataaataaataattcttggtcacggtatgtaatttgtatatttatatatggatcaacaatcataaaatataaatatatattcatctaaatgaaagaaaaaaaaattaaaataattaaagtttatgcattcacctatattttaaatattaattcgatgtatataactgcggatgtctcgcactagtaacatacaaaagtatgaactattctagtacctattattaaaaaaaaatatatatatnnnnnnntatatatatacatatatataaagttgtttggcacatttatttattcttttgaagaaattatttttaattatattattatcttataattaattaatggtgatcagtaggtaacatgagtgacacttaataaatttttttttttttgatttaaccgtttatatattacaacatgttttgggactcgaacccaggacctccaagacacatacccacctatggccacttgagcttaaaaataatatagtgtcacaccacaccaaccaacccgactcgaatcggacggcgcgcatgtgtggtgggtcaagtgtgtgtcctcacccatttgtacaaaactgggtaccccttggacccaacacttaataaatattttatatcctgattttagtatttttaaatgggtaaataccattttggaccttctgttttacaaaagttgccaattggaccctgtattttgtta

SEQ ID NO: 39253 - DNA, 2111 bp, Cannabis sativa
aaggtaagtgtgacttttgaccacccaaattatggatattacatatctgccacggcctagggctcgggtcgtgacatttctaaaatttagtatacttattggcatttgtaaaaacacgatttttcaagatggaacaaccttagccaaggtctattctactaactcattccacatcctaacaataagaaatcttgttatttcatctgggtttcgtggggcttcagctgatgaattgaactgaccaaatctagcaagaagttaaagatgactaaacataataaataaaaacacatttttataagtcgttcgtgttatgatatactttctccattaaagtggcagttataactaacaatatcagaacctaatagagaattagtggttcacatatatcctatatatatatatttagtcaactcgtgtcatttgttaggaaaagaaggtaggaattacgagtatcattcaatctatgacctaaaaaaaagaaggtatatatataaagtaaattataattaatatttataatttacaccccgaaaagcaaaccaggctaaaagcatgatcatgcaataatttcatctatggtatattctgccatgttttaattgaaaaaacgagaatgatagcaatattttaaattaagattgtggtcctaataaagtataaatcatgttattaattattgattattttttcatttatttcttgatgaactagacccttcagctaacattgttatttctctaataatttacacatgtccttttaatttagataaactcaaacgtgaatgaaagtgaataattaattgatgaatcatcattttaaataaatactaatatgtttcactgtctgaaatggccgttgaaaacaaattaattgaccaagagaaaactcattataacaatgaatctctttcattgactggtatcacacatagtagggtcactagagttgacaaaatttggttcatatccctaccctaatattttgatacgtatatataaatatagatttatataatgcatggtatatatatggttggattcaaatactaccaaatagctagttagtgcaggtataaccaatcgaataagagagaatgtcaaatacattggccccatcatgtgaccggcacgtgtacatcatttaaggcaggggaagacccacatataaaaaaaaatgggaaaaaaatatatatatatatatatatatgtaatttaattaattataatatgtatttgtcataaaagatgatatttatagttataatattaattttggtgcatggttatggttaaggtactatcatataggttagaggacaaggttctaatctcattaaatgtattttttttattatttgtttgccctccctcacttacaaaaaaaaaaaaaatacgcctctcctcactttgaattctaggtaagctactgatttgggaaaggtttttctattggtacgtgtgagggtacatacatatatggtatcccgcacgtgccaccaacagacagcactaaataatttttatcatacccaccggccattgattaaagtataggacatgtaacatgagaaaagaaaaaagatgctctaatatgcaactatatacataatagaaatgggcaaaaaataaaacccattgcccattaccagacaatccatgttggtcccccatttccttatattcttaccactaaatatatatacagccaagaatttgcaatacaatcccattagagaattttatcaaaaatctctaataaaatcacaactatacttagctagttttaaaaaactttaatataaaatatatatttatatatattcttcatctgtatatatctgatgttggtataagcctatctatatcaattatatattttatatatatatacataccctaccattattgaacagatgtttatcacttaatgttacaaatgtcaaataacaatgagaattaataattaggatttcaagctctgtcaagttctgttgaacatgataaccttaacagattcacatttgatccactccatttggagaatcaattaaattttatcataatcagattcaatgtgcatatttcaaggccattcaattacta

SEQ ID NO: 39254 - DNA, 2361 bp, Cannabis sativa
cataatcaatagatacaattgaaatcgaagccctaactttaatcattgttattttccttacttgctctttatttttcactgtttttactgctttctagtttaatttttgcttagatttaatatagccaaatagaagtaaagatttaattctaaagtacataactacaatccttgtgggatcgacctcactcctggtgagtttattacttgttaacaatacgtacacttatctgtgcaaattaccacaacagtttgttgctaaaaacctttgactactaacatgtccttatacttaacattacctttagcatcttctttgactatgtagaccaatttacaacttataagagttctgttagagggcaaatgaataaattttgaagttttattcttaataagagcatgaaactcattgtccatttcattgaaccatttgacatcttgcattacactcttgacagaaagaggattgagagatgccatgagagctttaggtttcctgatcttctttgctctagtctgcatatggtgagcattatccactaacttacaattatcatcactagaaataggattagatatattagttgtgttgttggaaagagtagaggtaattgtttactgaaccaatgggaagtagacccaggaggtgacgtagatgaggaagggatgtatatatttggagttgtaggagatggggaaatataagttggttcagatgtggattgactgaaatgagatttagaatgggaagtaggagcaaaagacatagcaggtgtgataggaggtaaattgatgataggctgagacacaactgtaggaagagatacaggagtggaagtatgagttgcagatgatgatgacagggatttggatgctgcaatagagaagagaaaaacatgttcatcaaacagaacatttcatgaagtgtacaacttaccatctttataggcatttgcaacccttgtgagatacgctatgcccaaggaacacacatggaatatatttgtattgaagttttattttattgtagggtcttagattaggataacagaggcatccaaagactctaagagatgtgtaatcaggtttggtgtggaataaaacttcaaaaggagacttataggcaagcttgggtgtaggcattttgtttattaagaaaacaaaaactctataagcttcatcctagtacttaagagggagagatgcttaagcaagtaaggttaggccactcttaactatgtgtttatattttcgttcagcaacaccattttgttcatgagtgtagggacaagatacttcgcgtaaaatgccacattattacagcaagctagttaaggcttgatgttcgcccccaaccagattgtatggttttaattctacatcccaacagaagttctacttgagttttaaaggtggtaaaagttggtaaggcttcacatttagttctcaacatatatgtgtgcctagcataagcatctacaaaattgatatatatataatatttataaccactgaaagaattgactggggcaggaccccatagatcagagtacaataatatgtaatggttcagtgtaaattgtatttaagttagagaaatgaatcttatgatttttgcctaagcaacaagcatcatagagattagaaaaactataattaattttattgcttattttgatattataagaatttaatgcactttaaactatcttggttgtgggatgtcctaacctgttaagccacaatgaaaactgtaaattatgaacaagtagtgtattctggaatacttgaagaatttgaactattatgtttggtagtagtgctggattgaaatggaagaggatcaaatttttataggccatggtcaagcttcccaatcagcaacatcttcttagtatcaaggtctttaacacaacaatgcagagaaaaaaattcaaaagaaacattgttgtcagtgaaaattttttatacacaaagaagatattttataattaaaggcacatgaagtaagttttggagagtaagtttttgtgaatgaaatggagatagaaaggaactttgaccaatggttttgataggaaaacttgttccaccacccatgagtatcatgttgatcaccatagtagtcagtggtgttgtttggatttcgagcatgtggtgtgaaatgatgagttgctcctgaatctggataccaactattgtcttaaaccgcttctagctagacaagcatagagggaaggcgcttctgcaacaatagcactaccagtgaattgttgaaaagattcaggcctttcaaaggttttatccaacctataaaaacattgcttcacaatgtggccaagcttgttgcaaagcaga

SEQ ID NO: 39255 - DNA, 1401 bp, Cannabis sativa
tggcagctttccattcacgaacttcattttgttttgagcaaccaatccaatcatcaccgattccctccatgtgctgtaattctcacttcctgtgagaatctttgaaactaaaatagctctaggattatcaccattgcaaaggaagtaatgatttgagaggtcgttcacatttgtcgacttcgagttctcaccaaaaacagagaattgatttgaatcaccatcatctcgagaacttcaggtttgtactcttcatcatcgcgccatgaataatcagaaaagtgaaagaaggagaagaatagcagagaataaatgatcaacaccacactttaatggtggcttaaataccatatcagcttgaacaccgttagagaaaaatagagaggaaagagagaaagaagaagagaatgaatcaatggcggatttttttttttcatttcttcaaacagcacaataagtgtggcttttatacaacaactgaagttagttacaatcctaagtaacttaactagcacaaagtgacagctcacactctaacagctaacaactcctaatcgtaaactaactaaccaattcactgccttgatacccttttactacctaatcggtagctgaagtatttttgaaggaagtggttcaactccatggtattttgaagtctatcatattcaataggggtacagtttaatgagttacttctcgtaagaactattcaagctctagggctctgcactccgccttagcaccgcttatcatccatagatggatggttaagcaaaagtggtgaaatgttgttttgaaacatatttaaggtgttacacttcaaaatagcaacgtacttgagttgatggtttgcatgggcttagtgttggcataatgctttgtttcataccgccaggaatcatacaccttttaaaatcttatatggtcgggactctctagcattggttcaatataagaaaggcacaattcaggtatcaatagttacagggatattagaggagtgagatttacaatttgatgaagttaagatgcattttctttgagcttaacaaaaaatgaaagatgctgcaaataagaaactatgagatcaaagaaaattttgacactggaaaaagatgtttgtgaagttaaaaccttatcgccagaagaccccgttgctcgaatgagtgagaagttcttcccgcacaattgtgggcctttagaggtgttttcttgtgtcaaagatttcgcttacaagttccagttactttcatatcctccattcatcttatttttctcatttcttaactttgtcaagcgcatgggagtgttcttgcatcaacaactctaccttcaaaactgagtcatgactttgaattcgtgtatgaacttgttgagttatttggtatacataaaacttac

SEQ ID NO: 39256 - DNA, 1792 bp, Cannabis sativa
aaaaatatttagttgccaaaaaactcagtaaacattttggtgctttcattaagagctgaagaaagaaagaaccatgcacggtggtcatcgacgcaagcctatagaaagaagggcccgtacaaagaaagaagaaggaaggctacctgtcttcctgtcagggtccggtcaaaaattaggatggtctcggttaggggtattgttgagattgaaggccaataccctcgatcgcccaaagaaagtgcagaagatgaacgcatacggtctaaaaacactcaccgtactcatgctcgcccttataagctcagatatggccagctaactccctaagggaacaaccagccattggcgcccccaggttcaggctcccatcgtccattaaggtataactacgcgcagacacgatatagagtgcaagagtggtgttagggctaggtagagaggataagacccaatgcgattatgatgactaactcacgaagggtcaataaatgtaatgactctatccagcttgtgactctggtgtcggtgatgacgcaaggactagatccattgccaatggctacttcccttaactttttgctacgtcactaagtcaatcgaagattgacattgtgagatcatgttgtgatagcagttgagaggagaccattagtatcagcaacgcccgttgggtttccagtcaagcctgacgtggtactgctagttgaagggcattgctagggcaaacccattttggcaaagttcgatgataggaatctctgtcattacgatgtaactacaaccctagagttacattaaagaaagtaactcttgccactaaaagcccgttctctactggaatagcattcatcctattggaggcccaagtctttgccttaaaagatgctaagtgccttgcaatccgtcggaggaatcagactacccaggaggttctggggttcatgcacgcgtcttttgagccttcttggagctcgttagatgcgtgtgtgtcgcttttcatgcctgaaagataacttggggtacgacacatcttcaaccctctttcttggaaggaaggactacttgaagtttgtcacacgcccagtgatgtttcaccctttgatcttttcaagcggagtcattacttgaatttttaggcaactctagccttccctcgcgaaaggcaaagtttgcctcacaaaaattcaacatgactctcgcatgcacgatgtttgtcgtgcatgaaagatcactgagggtacgacacgtcttcaaccctccttcccaggagggaatgactgctaaaagtctgtcacacgcccagtgatgtttcaccctttcatcttttcaagcggagtcattgcttgaatttttaggcaactctagccttcccccgcgaaagccatagtctacctcacaaaaattcaaaatgactcttgtatgcatgatgtttttcatgcgtgaaagatcaccgagggtacgacacgtcttcaaccgtctttcttaggaaggaaggacaacttgaagtttgtcacacgccctgtgatgtttcaccctttgatcttttcaagcggagtcattgcttgaatttttaggcaactctagccttccatcacgtaaggcggagtctgcctcacaaaaattcaacatgagtctcgcatgcacgatgttttttgtgtgtgaaagatcactgggggtacaacacgtcttcaaccctccttcccgaaatggaaagagtgctcgaagtctgtttcactcctaatgatgttttcaccctttgatctctctcaagcaaagtcattgtttgaatttt

SEQ ID NO: 39257 - DNA, 1573 bp, Cannabis sativa
tattaatataggtagttttgttgctattttgtaaactttgaatttttttacttaccaaaatggctacatatcaaatggtataacaaatacactatggtatgacaattaactcaataacatggttacatttatagttttcacaaaagtatatatgtcctatgaatccacgatcaataagaatatcaaaattaacgatatttgtatagcattattataaaggtaattattgaagatatatatatatattttttttatgattctttataaacttacatttttttagaagatatattttttaaaaaaacaattttttagaagatatttattgagtgtgtttaagagttattttgtttttcaaacacacactaattataaataagttttgggttgagatctactgcttaaagtgctaccaaagctaacgtacaccataggtttgaggagcattgacttttgtgagtttaattgactaaaatgtctttaggctattctcgttggaaagtgaaaaatggggtgaatttaaaggaagctaccacaagcattgtacaataacatgttgttttaatggtaattgaagtcataggtttatgtcaatgttatttaattttagaattatagtgttgggattttttgtgttagacctattaaaagattgttctagtagatttttatttgttatgtcatctaaaaaaaaattttaatttattttttttcacgatcgcgtacattgtagctatttaggattatttataaatttttaaaaaaataccaataatttacaatattaaaaataaagtttaaatagttaccatgcgtaaaaaaaaatcacacgtaatattgtgaactactcagaattttctaaaaatttacaaaacagttataaataaataagtataacatatacgatcataaaaaaaaataaattaaaattttttttggtgccaaaataaatagaagtctaccaaaatactaccttacgagtgtattgtagacttccttgtagtctattgatgtttttgttaggtacatgcatgtccacttgctgttaaggtgaggattcatgttgtatggtttggtttaagttaaatcaaagatataggagagcgcacgtgactaatgaatggtagatacttaatgggttacaagataattagtgtgaagtggagcgtagagtagtatttcagaaatggatcatagaggtaaaagttgggttgtcggtgagataaggcttctataataatttgtatttttaggcccttttataagcctttttttgggatttggtagtgtatttcgatcaaccaatcttgtccttgattttcaaattttaaattgctaatgtattatgacccaccacctcgcgaaaaaaaaaacaaaatcttactatgtttcgaaaaattttagtatgcattcactttctatttcaatgtttgagataatattttttatggttatttacattattattatttaagacatcatgtaaaatttagaaaaatttaggagaattactgtatttattatttttttaactttttttttcaaatttacggtttaagtttctaaagtggtt

SEQ ID NO: 39258 - DNA, 5024 bp, Cannabis sativa
actgagtcctaactcctaacttctaatccaatgagagagaaagagaactatgttattatatatataaagctaaatttaattgtcaaaaccaaaactaaagtcgaatctcaattcattaaaactagctacatagcccacatttttgagagtaataaattctgattctggtattgtactaaagattaacgtactgaatatatatggagaaagaaaacaaaagatttgctttgttggttggatgcaactacccgaattcccaatacgagctccatggttgcatcaacgatgtggttgccatgaaagagagcctggtgagagagttggggttcgatccaaaggacattgaggttttgactgatgaggcagggtcatcatcagtaaagcccactggtgaaaacatcaagaaggctcttggtgaattggttgataaggctgaagctggggatgtcttgtattttcattatagtggacatggaacaagaattccttcactcaaacctctccatcccattggtagtaaggatgaagctattgttccttgtgattttaacctcattactggtatctttctttctcattgttacattaccacctacctatatatactttatttttgacaagatgtttaaattctttttaatcacccaacacgtattgaacttgagtgaaatttaatatcagtcctatactcctactcttatatattttattggctcactacgatttttttctcccgaactttgacatgtaccaaattaatgctcctaaatttttaagatcgttaaacatacccatgaactattgagattgttggatttaaggtcttttgtccaattttaattaaaaaagtttaacatagatgaaagttcaggagtatgattacatatcaaagtttgatgagcatgatttggtagttatcaaagtctggaaatcatggtttagtacataaataatcactgaaatagtaaaattgaatgaaattagacaaaactccttaaatctaataatttcaataattcaggagaatttttaacggccaaaaaaattcatgtgatatcatttggtacatgttaaagttcagggccaaaaattctaattagcttattttatttaaaaattgttatgaaaaacgcaaagtaatatttcaattgtatatatataccagatgtagatttcaggcatttggtgaatagactagcaaaaggagcaagcttaacaattctctcggactcatgccacagtggaggcctcattgacaaagagaaagaacaagtcggaccaacttcattctctgactctgataatgttgatgataccaccaataacaaagctcttaagccatcttcctctaactctaagcccaagacaattccattcgattccattctcaaacacttgacctcactcacaaacatccacacctcggacctcgccacacacatgctcgagctcttcggctccaattccagcctcaagtttcgccttccacactctgaccaggcacagcttcatcgtgacttctccaacctcttgatgaggccccgggacaacggcatcctactgagcggttgccaggcggacgagacttcggctgacatgaacccggctgcagctggaggaaaagctttcggggcctttagcaatgccgttcagacagttttgaaggagaaccggggaaaggcgttgagcaataaagaggttgtgataatggccaggaaggttttgaagggtaatggcattgatcatcagcacccttgtctgtattgtagtgatgagaatgctgacctgcctttcttgatgtgccaaccaaccaaaaccacatagagatcagatcaagctaccttttcaaattcaattgattattgattgttgtgttgtgtattgattctgttttacttgtatgttggtcatttatatactatttattacctttttccgttttaaaataatgtgtgtagtcttttgtttatgattgcaatgtcattcgactaatagttagttataattaaattaaacaaattgcgcgcgtacaataaatcaaacaaattgaaactttatttattaaaactcttcatcattttgaagtgagcgtcccaaatattgctcattcccatttgcacctaatttggttggtgtgcttaaaatcaagtgtcaacaaaacgatgccgtctacccgcttcaacacaaacctctcaaccaaaacataacagctaaatttgctccactcatttccatcaaacttctctgttctcttcactttcacttgccctttaatctcatccacactgaacccaactctctcctcttcccactttattctatccattatcaatttgctcaaccccaataaccttcctgattgtacttctcctttatcaccctctgttgagcttctaaaccagataactccatcatcaacatgaccccactcgcatatagcttcttttccattaacacaagcctcttcgttgttaacaaacacatcaacactcaccattttcatgctgtttccaacgttgtcacattcgaaaaccttgtcccatctctgctcaagtgtcatctcataaaacatggaatttttcatctgctgcttgagttttaatccacctaattctttgacaaacataaaagggcaataccattttcccacaacaactgttttggacaagattttgaggtcgggaagctgagatctgagggaggaattgaggccaggggcttcgtgtagctggtaatggcggggcgtctccatgtagaggttccatttccttctcaagaatgtaggaggaaagccattttcggccacagattctgctgtgaatcttccacgaggattcttttggatgatctcaacttgttgaaggacgtctgaagggtctaagggtctggacttgacgtctttaatgtaagtgcagcaacagcatgtccccatgtcatcttctgttgaactagcgctcgcctcactgcatccaaacaaaagatgtcaattgattttgagaatcttatattgataatgtgttgaaactatatcatatatatatatatataagatacatgggctaatcctctagttttcaattaattttgagatagaacctcatacaccttagcatagactactccgttctaacaatcaggccggagcaaaggtaggacaagtagatcatagagcacaagatattattttacgaaaattaatatatttttcacttaatttttttagtcattaattgagtttagtttaataaatttttaaaaatacatatttaattttttttatatatactacacgagatgtagctatagtataacatccatattatcgttctttttggcatgtgtagacaaaacaatcaatttaaagaccatttataacaagttaagaaaaattaaaagacacgataatacttatatgttatagttcatagccaaaaattctaaatagtttaaactaaaaatctgttcaatagatgtattttggtggcctgggttaataattaaatgagaatttttcttgaaaaaaaattatgttttcatctattttttttaaaaaaataatatataatggcaaaaagactaagatggagcctcagtttgctctcacctctcctcataatgaagtaaaaataaaaaataaaaaaagagtattttgagtcacattatatattatgaattttgaatcaagattgtatcatgtaatttattggaggaaaagaaaagagatcggttaatttttttttttttgattagaggacccctggaagcgccagggggcgcgaaacaacaaaacgaggcacaaaggccacacaaactgccaggacggcaacaaccaacacaaaaccagtaacaaactaaaagaaaataaagaactagcaataaacagcagtaggctataaagcaaaataaacagatcgcagttcagctaacaattagaataaggatagggagaattcaagtcatcaagctcagagagaaccgagcgtaagggactattctcgagggacaaatcaaaacgcccaaaagagttgttgagatttgcccatttggccaccgaatcggccacaccattgaagttcctggggatccaagagacttccgagtgagtgaagctgtcctttaaacgattgaagtttagtaccagctcctgaatgttgaagttgagtaatccaatgtcctgcatcttagccttcagagccgaaattgaattgcagcaatcgctttggaagataactttccggtatccctgcttaattgcctcctccgctcccttgcagatcgccattgtctctccgagaagcggatcgcagacagtgaggcggaaggtgatgcagttaatgaaggcaccagcttcatttctgaacacaacagctccggctgcttgggagttgctaatggagacgtccgaattgcacataacccagcccggaggtggggggagccacgctttcaactccacaacctgaggccttaagtcctccgagatctcgccaattcttgtatttatatgctggaggatggaaccaatgggagtagcagagcctccatgagaaatgttattcctctcgcgccatatactctcaaagattacagcagcccctcctaggaacaggttaagttggatgtgctgtggtctatgggattccaccgagaaccaatcgagccaactttcccagcaatcaaagtggttcgtggtagttcggaactgccagcagcaaccaaaccagactgctctagcgaaattgcagctccaaaatagatgcattgaagtttccatctcgccactgcaaagggagcagctagagtcaattgaggggataaaaggactcaatctatctttggtggtgagaccattggcaagaattttccaccataacatcttcaatctctcgtggatcttagctccccaaattaatctccatttcctgtctccatgcgccatagaatccaagttcttgatcaacttataggccgatttaatggagaagcgcccattgttctccgggagccagagccatgtgtcctca

SEQ ID NO: 39259 - DNA, 1699 bp, Cannabis sativa
attggagtatgctcatgttgacttatgggggtctgacaaagttggaacacacttaggtaaacattactttctatccatcatagatgattagagtaggcatgtatgggtctactttcttaaaaccaagaatgaatgtttagaaagatttaaagaatagaaaactgaggttgaaaatcaatataacaagaaacttaaagtgcttagaacatataatggtttagaatttattaacactgaattggatttcctctgctctaaatatggaattgtgagacataaaactgttaagcacacacctcagcaaaatggtgttgttgagagaatgaataggactttattgaacaaagtgaggtgtttgttgattagttctattttggggaatttttttggggggaagctcttgttactgcatgttatttgatcaataggagtactagtagagttattggtctgaaaacaccttatgagaaattgcatggtactgctcctaaattgagtcacttaagttacactacctatgctcatcaaatgcttgataaattagaacctagggctcttaaatgtttctttcttgaataccctaaaggtgctaagggttacaggttgtgtcaaattaaaaatggaaagcctaagattgtctatatcaagagatttagttttcaatgagcatgatttcatgcacttggcaaccaagaaaggcataaattcaaatgttgaaggtactacaagagatgattggctgagcttgagatcaactttgatagaatcaaagcaccaaatgaattaccatacatatcagtagaagagacagaaatagaggtggaaacacaagctactatagaagtatataaacagggtacttctgaagtggaaactcaggaaagtagtcaagaaaaccaacgagatttaaccaattatcaactggcttaagacaaaacaagaagagagattaaacccccaaattgatatgctaaagtagacctgatagcatatgctttggcaattgtacaatctaaaaatgattcagaaccaaccactgatgaggaagcaactccaagtataaatcaaggaagaaatggctagctgcaatgggggatgaaatgcattctcggaataagaataagacttggattttggttccaaggccacaaggaaagaaggttatctcttggacatggttatttaaggaaaaaaaaaggcttgacaaaaagagaaccacctaggtataaagctaggatgctgactaaaggaatcacacaggttgagggaatagactacacagatatattctcacctattgtgaaatacaaaactatcacgatgatgtaagccattgctgcaaactatgatctagaagttgagcagttagatgtcaaaattgctttcttaaatggttttttggatgaggagatttacatagaacaaccacctagtttttaggtggaaaatgggatgactgaaatggtatgtctactgaaaaggtctatatatgggtttaagcaatcaccaagggagtggaatcataggttcaccatgtttgtccaagttattagattctcaagatcaaagtttgactcttgcctatattacaaggaattagggacacctaaggtaatgtacctaatgctttaggttgatgatatgatgatcattagcaaagacaaggcatgaataaaactcattaaggataagctcaatt

SEQ ID NO: 39260 - DNA, 1118 bp, Cannabis sativa
aaaaaaaaaaaaaatcggttaaaataaataaattcgttaaaatgagaaatttaaaagtattcatcaaactatctagaccacacaaaaatgtagctttaaattttttgtggtgctgcattgtgaatatggtttgcatatttgcaaaatcatgtggtacagtgcagttttaaatttaataattgcagttaaaattgtaccacgtatatattataaagttataatttttataatatgattttttttttatatatgaccaaataaatgtaatatattacaatatttttaaaaaataatataatataataatttaatgattagtatatataataattttattaaattaatttttaaaatttttattataatatttaataataataacaacaacgaaacaattcaaactacaccgtaataccacattttcttagtatgttttttacaattttaaaattttgcagtaaaattgcatattcataaaatttgcagggaaatttttttatgttttaatttttatacacttaatttttttacttttttgtagtaaaacctccttaaattttatttttctttgtaaatttgatacaacggttaaatataaccgttgaatatcaactagatgaacactgtatacacttgtgtatatgtaacagtaaagcctcaaagtcgatacagtagtaatttaattgaaatttaacggtaatatctaactgacaccttaaagttgcaaagaaaaataaacagtgtcttgccaccaaaaaattaaaacataagagggcttttccgcaaattcctcttctttttttttttttgacatttttgtatatttacaaaataacccctattctttcttgatgttactcattttccatatcaaactctattttctctcaccaacaacacttcttctctctagcctgaccctaacgccgccgacctcacttctcgggccgtctctcttccgtctccatcatctacgtccgtactcgctcccaatatttcatctttctctcttgctattcttcgattatcccaccatagaaccatcaagataagggtttaaaactttattgattggtttgcggactctgcatcccttccccttctttcttgtgcatcaa

SEQ ID NO: 39261 - DNA, 1672 bp, Cannabis sativa
taggttataaaatataccgcatgtgtctcttggtttttgttattcgctaaatttcacaatgtgtaatttccaagttatcccaaatatctatttagttccaaacgaggaagaccccactttacaagggttttcaaaggccaattatctgcttagaatcatttgaggtatttctagctggacacaagcaaggttggagagaccattgaataggtagaacttgctagtggatttaaacaatgttacacatagaattagatttgtttataaacatgaaagttgtggatcttattctcagctttctaaaacatcttgaatcgtttaattccgcgttatattgaaaaagttataaaagaaaaaaaaaataatacttactgacaattctttgcaaatacgaaggagatggtggtgcaagaccagcgccaccagcttcgcaagacttccaggaaggttcttgaggtcatgcgagaaggtgtctaaaggagtgaaaacatgggtactttgaggattgcaaacatggatattttttggggtactttgggggtataaacaggtgtatagacctgttaaaaataaatagataagacaccaaataaatgttcgaacaaactacctctaccatggtggcgcaatgctagtggcagcagacccctacaccaccagcctagggccacgttggtacataaatggtacatttaattacatttatcaacttccaagcgcacgaatctttattgtagtgtagagattgtgaagaacgaagtcgaacccaagagaattacgtgagatcaaagaaaatacctttttgacctcacttctagccaataacagtgagtcaaaaataaaacgattaaataatataagtaaaagaaagaaaaaaatagtaaaataaagtgaacaccagattttaaagaagtttggctccgtaagtatagcaatagcctactccccttgtatttgtattgatttgagagaagaaacaaaatgttcttcctcttgaaagctcttacaatttgatctttgagtaactttccctcttaaatcactcttttctctcttgaatgtatttctgaggcaattctctcgatccctgtcatagtgaggttatgccactatttatagggacttaatacatgagggatggttttccttttgcctataatgagtaaaataggaaactacattaattctataattacaatgtgagaaataggaaactaggatgtgttgtcgttattctctaactcaatctcgtaattacagggattgtctttgcatccggacacaatgagaccgacctttggaattgtcatctttcatgcttcgctcggcataaacatgtctgcatcttggtcagacatctcctcaatcatgcatcctgctctgatgtctaaatgttatagatgttgagtagtcatttgtgggctactagggatattcttatccgtccaagtatctaaaatatgggacacgtgtcatccattcctattgccacgtcatggtgcaaaaacaggataatatttgctccccaagtctgcgtgggaccttcctggttgcacgcggacttcacttagcctggagtcttgtccggatgggtgacgcttgttgttgatgtcggatgatgaaccgatgtgaccctgactaggggttgcttcaatttctgtccatttaatgc

SEQ ID NO: 39262 - DNA, 2804 bp, Cannabis sativa
gaggaaatatgtatcagactcgactcatgtcttgagttataaagctctagagctacgtttagacttgtcctatgaggaacaaccaattcagatcctcaataggaaggatacgactcttcaggataagaccataacattggtcaaaatactttggagaaatagcaaggtggaggaagccacctgagagttagagtctaatatgaaggcttaatatccaaaattgtttagcttagattttaaggacgaaatgcttttgataaggaaataattgtaatgaccgcatacatagaaatagtcctaccccgacgccttaattcctctttaacaaattgataaaccaaattattggagtcatcattccctaagttgatatctgatggaaggaactaaccagagatgatgtacgaaaaatggtgtaggaggatgggaacgggaggacctgaccacctccgagatctacccaaataatctccaatgtacaaaaaatacctttatttttctctatcatcctacctggaatatggcatccttaacctataaagtctcttgtcaaaacccactagcctgacacgagcatattcctaaacatagggtacataattcaatgtaacctattaaattttagtaacattcattagacacggggagcctctgggagcgcataacgattctgaaagaaatgttagaaccaaatttgaagtctatcctccaaaagaatggggacctctcggatcatatgttgtccgagaggtaccaaggtgtccgacacgcccccaagataaagcattgtagatgactgcctcaatataaagggcaaagtgaacctgccctaaaaaagaaaatattattaggatttagcccatactgacgtgataatgcattttcctatgaatgctaattaaaggttaatccttgtgttatcccatcagtcgcatagaagacatgtcttgtctcactaagttcttactttggagtttaccttatgcacacataacaaacatcaatttctacacctacagaaaagactatgtagagcctaaaggtaaagggaagatgtaccaatcacccgagaatattctatttctctgcttataaataaaggagaaatataagagaaaatgacatcgaaaaaatccaaagagaaagtaaaactttaaaactgtaagagcgaatatcctctcaagtaataataatattatatattaataaaagaggctcgtggactaaggtgatcaattaatacctgaactatgaaaaaatcctctcctctattcacaattaattttcttaaaataagattaataagttgccgaaaatctcgatcaacacatgtattagtgttgtagttaatatttatcatgactttaagagaaaaaaaaagggagagaaagattgatgaaaaaaaaaattaaacataaaaaatgagaatggtgagtggtgatgttacttttaataaaatttgtggtcatctatgtgagattgtggataatgaatgaaagagataagaggatgagttgtgagagatgaaaaaattaagatagtaacatcatgtattttaatatgaagagtcgtgtgaaaattcataaaactcaaatttcccattgacaattcctatatgagtacaaaaacggagataggtttaatattacattgcatggtgcatgccgatgcaatattccatggactccctcgtgtgcacattatgagtttttttttaatggacattatgaggttaaagaaaaggaataataaatatttgttttatagataaatttttatttaaaaaaatgtttatttctatcactaatatccatgaattatatagattttaataagttgatttttaattttttttaggaaaattaatttcttatataatatataagtattgacaagttgatctctaaattttgttctttagcaaattagcctctatagattttgttttacaagaatgtagaggtttgttaacctcattagtgtctgttgattgttgttttgttaaacggtctgttaataggcttgcgcatgctttagcgcgagtttctctttatgaggctgatcgtgtttttggtggggattctttatctgcttgttattcttccataatttggaagatttgattgaataaagctactttattttcaaaaaaaataaaataaaataaaataatagtatttttgctgacgtttattttatgtttattttatttttgttaattttagatatcttttatataaatatgtattgtcaatataaaaataatttttatttatactatttttataaaatacaccaaaataaaaaaaattgaaaaaaaaacatacattaaaaaataaatacatataaataaaagatttttttaagtaaattatatttcatggttttttttttcaaaatttgtagctttgtgcaattaggtgtgcttaatgtaaccattttaattagttaactaatgaatactataatttaagaaattacatataaatgataatttttttaagaaatgagtgcgttttgttacacttgtttaattagttttttgttattattgtttctcgttggacatgtgttaccaccacaaggaggaagtgaatgatgacgtgacatccaatagtggcgtgacataagccggaagcggatcctctgtctagagaatgtgtccaattctctgtctaacgtatagtattaggacatgtgttattataattaatgtgctataaaacattatttaatggaaataaatttaaataactttgaaaggataaaaaaaagggaaaaaaacaaaaaaatacaaaaaagga

SEQ ID NO: 39263 - DNA, 1579 bp, Cannabis sativa
  modified_base (974)..(974): a, c, t, g, unknown or other
  modified_base (1009)..(1009): a, c, t, g, unknown or other
attaattaattattggtataaaataataaagtgacacataataaaaaaaatgtctttatgtacagatattttgtgactctacctaaacattatctttaattattaataatctaacaattaattatgataaaaaaccttaaatttcagctatataaatgtagaataccaattctccaactcgcttttttatctaataatttcatcaaaagagttagtgagaagtaggacgtccgaatacatatactcattttgctcatattttattttataaatacgttttctacctacacaatttatagttatttcgtatacatataaaattattcatatgtctatagatttattaaatctaacactcatttcttcttaaaattaagagtgcaaataacatagcatagcatgtgagtgagggtagtaacactactcattttaagttttaaacttcaataaacaaaagagccaaacatcacaattgataaatgtttcaaatacacttaggattaagcaaattatattctcattgaaagattataactaaatagatttgaactatagaaaaaaaaattaaaatactaaaaaatatcaatttaattataataacaataaacaattattaatactatatcataataaaattattttagagtaaatataatacttatacatgtattacaatttgaaataaaattattaattttacgtaaataaatttacaaaataaaatatatattttattaagatatatctatttttatataaatgtatactttatgatttaaaaaatatataaataattataattttgaagttattcttattataattaacccaaattaacatttaattttttttataacaaattagagattattcttaaataaaatattcttagatgagaaatgctaattacaatctcttagtcaacctccacgtccgaaatcacatgccgaatttttttttcatagcggtattcnttatagttacagtatcatccctgtaaatttttganaaatttcgaatagtttacagtaccgaaaatagagttcctgatatactagtttaccacgcgcgttcaaaaaacttcaaacgtattttcagtactgtaaactatttaaaaatttttaaaaatttacagggatgatgttgtaagcataacgaataccctcatgaagaaaagaaaaaatagtccgacatgtattttcggacgtgaaaattgactaaaaaattataataagaaatcactcaatttttttttttttttttgatagaaattctatatatatatatttttaaaaaaacataacatattgttgtcataattatatacttggattgcccaaaaaagaaaaattgttaatggcaaggtgaaagaaagggaaaagagaatctttcatttcttgtaagtacaaatacaaatgtcagattggcagagtttaattattaggtagcattaatataagtttattattccactctaaaccatttcgtgtacgacactcaccactacaccacgagcttttccaacccacatttgcttcaaaaccatctttctttgccttccttgttttctattcatatt

SEQ ID NO: 39264 - DNA, 1571 bp, Cannabis sativa
  modified_base (363)..(389): a, c, t, g, unknown or other
  modified_base (1014)..(1017): a, c, t, g, unknown or other
agaagactaattaattatgtgttatgtactctaaaattcaaatctaagcaaagtaatataattcaatctttctttcgatttggagtagtgttttataaatatatatacacatacatatattttgattgctatatagctgttattcacatgaccaaataataaatttaatttaattttctcaaaaataaataaataaataaataaattcttcatgcattgtattttctctatactttaaaaaaaattgtatttaattttcttgtctagatttaaaggaaaaccaatgaataagctaaagaatatgtattatatgtacatggacatgagtaattaataagctagaattattattattattattannnnnnnnnnnnnnnnnnnnnnnnnnnttattattattattattattcacactcataggatattaatgaaaagaaaattatatatttgaaataacatccataatataattaaggaacacatgaaaagggacgaaactaaaattttcatgaataatacacaatttactaactatatatttatatataatttatatatatatattcatttaggtacttggaaaaacttaaatatccctaacctaatataagtcatttgaaaagtgagttgaaactatatatcatgctaaaacatttattaaattttgtggaaacaaattaatgtttattgattataatcaaccaataatttttgttactcatttttttttaaaaaaaatattaactatatttttttaatagaaatctcttgcaaataaaaggatttataaaatatataaatgaataataattgcatttattaataaaaggatctgtacccaacctcatccattttgtttatatgacataaaatagaaaataataataataattaaaaataaattagtttaagaaggaatataaaacctggctttaagggcttgctaaccccatgttatcatctatatatcatgataatatcatatttacatggataaatactattttggacccnnnnttttgcaaaagttatcaattggatcttgtattttgttaaatgataaaatggaccttgtattttctaaaatggtacaaataagaccctgaattaattttaaaagattaattataattcgatttaaaagtgctatgacaaaactgtttatattttttgtatctatttgtattaggaattatttcaagttggttgtattaaaaaaaaagttgtctaaaattaagctcaaggtcctatttttactattttagaaaatatagggtttattttgtcatttaacaaaacacagaatccaatctgtaacttttgcaaaatacatgatactatttaccctatttatattgccaaactaattcaaatgcaatcatcatatataccttccttttctgcatatataaatatataatatattctatttaatatattaatttatatataagaagaagatatatatacatatatagaggaaattacattctatattcttcttatattgtcctcttttatttttaccctttttttaaactctatcatttttacctctttttttaaatatt

SEQ ID NO: 39265 - DNA, 929 bp, Cannabis sativa
cctggtaccactcttgggttacaaattgttcatacaactcttgcttcaatgctccaatgctttgagtggaaagctactaatggggttgttgacatggatgagggacctggcttaactctccctagggctcattctctagtctctactcccaaggccaggcttagtccattacccctatgatttttgttttcatccttgttatgaatcttttattatattattgtctttagattatttatttttatttttatgtgatttgttgcttagaaaaggattgaatggtaaaatttattctgtgttacattgtaagaaattgattgagacttcaatcaagtcaaattctttataataattgaatgagttagtatgtttaataaagattctagttttatttcttatataaattagtaaaccaattgatttcttatatagccactttcaccaaacaaaaacaaaaaaacttgtatatgattaatttaggggtgtttattagactgtttttaagtttattcagatccgatccaattatatattagatgttagattttaccatttcattcgatccaattaattttagtcattcaatcgatccaacatccaatggatatatttattagtttaattttggtttattcaatattttagactagtatttttttggatcagatcggatccatttaatgttttaactccagtatacattgaattagattggatccatccaatctaagataaaaaatagtaaaatttatgttaatttttatatatacatatatattttacgtgtaacaatataaaatctaattactcatccaaactaaatgaaaatgctaattaatttgattggattttagatgtattgaattttcggacaccccatccaacatccgatccgatccaattgttatttgaaaataacatccaatccg

SEQ ID NO: 39266 - DNA, 2194 bp, Cannabis sativa
  modified_base (2051)..(2068): a, c, t, g, unknown or other
tgaagaaaataggtgacacagaagactttcagtttcatgaaagatgtgggggattaaaaataaaccacttgagcattgcggatgatgtcttgttattttgcaggggtgatttcaagagtgtctatatgatgctaaagggccttaaactgttttctatgacctcgggattgcagcctaacaagaagaaaacgacaatttattgtagtggaatgcatgagaatgagataagaaggctggtagatgcttcgggttttcagagaagtaacctacatttcaagtatcttggagtgcctatatgtgccaagagaatttcatcagctgaatgttcaattctagttgagaaaatgacttcaagaatcaaagtgttggagctcaaagaacctgtcttttgctggtagaactgtgttaatcaactcagtccttctatccatccatatgtactggagccaagtccttatccttcctaagaaagtaattaaagagatcgagagtatttgtagaagctttctttcgtcagggagaagtaatatgaatggtccaggcaatatttcttgggagcaactgtgcaagtccaaaaaagttggtgggattggcttccagaacattgctaaatggaatcaagctgcagttgcaaaacacgtgtgggcgattgctactaagaaggataatctgtgggtaaagtgggtgcataaggtatatattggagatgaagattggtgggggtatgaggctcccaagcatagcagctggtattggaagagagtagtgtgcacaaaggagttggtgaaacaagttatccctcctactcaatttacaacatcagaatttcaaatatctgctgtctataaacaaatgatgcaggaacagaggacctatcacctcagcaagcagatttggagtagaataaatataccaaaacataactttgtgttatgggttgctgtacaagaaaagctgaggactcgggatagattgcagaaatttaacatagtagctgatacaaactgcctgatgtgtgatagtgcagcagagagtatgtgtcatctattcttcgagtgtagttttgcacagcactgtctacgggaactgagaacttggctgggatggaagtcaaagaataagttactgtcgagcattctaagggggattaatagagcaaagcagagcaagttcaagaagaattgctacactgcttgtgtagctgctgcagtgtacaagatatggcatgcaaggaacaaaaaattctggtgcaaagagaataccgagttgaagatacttgtccaagaaatcaagtggttagtaaaaaatagaattacttgtgtaatgcccaaaagtgtagatcaaaaggatatagattggtttagtagattataattttttcacacaatttacatgtatatatgtctgctcattgtgagccatagtttgtaatcaaagagttaatagtgcaatgaaattcctgattcatcaaaaaaaattgtatttctcttgatattttagatttcatatattgattaattagtacatgtttatacaaatatttccaaaaattaatattgtactgtgagacttgagagtgccacgcaatatttccatcatcaattaataataatatatatgatttagaacgtaatcaaaaaatacaataataactctttataaacataattcacaatctacatttaaatgacaactgttgtatttgttgtgtccttgtaatatacagttaaagtagttaggtcataactgtcttgacatttatgacagttagtttcttgtccactttggacacctataaatacattatatagtttgtaattcaagttagtactacaaaattttttgactaattattaattatcatccctatgttgtgactaaaaggtccgtggctaaattagtcacaaaaattacaatttgttgcgactaaatgtggttttagtcacaagtacaagtgactaaaagtaaattagtgataacttgtgtctaaatactatgtttaagtcacaagtagttttttgttatgaccaaaagtcacatttagtcacaannnnnnnnnnnnnnnnnnaaaaagttgtcactaaaagtagcacttttttgtagaggttgagtagacattgtaaacttcctatcctaaagcaataaagaataaacattttgtctctctaattttagtctctctctctctctctct

SEQ ID NO: 39267 - DNA, 1591 bp, Cannabis sativa
aaaaatacagaatctaaaatggtacttaccctaaaatttattagattgatttttaaatttttattataatgatgatagtgtaaactgttcaaagtgcactgtatttttcacggtatgttttttgcagttttaaaatctcccaatacagttgtagtttgagaaattgtaaaatcactgcagtttggtttgaaaacagttacaaactgcaccactcgtaccgctaaaaaaaatattaataaaatgttaaaaatgcttaacacgtgagcaaagagtgggggttacatgtgatttgttgaaccaaacaaaagtaagactcttgagatatttacctcttttagtttttgttttgaattttacaaatacttttctttattttcatactatatatatatatagtcttttcttaaatagagaccctataatattcctcattcacagaaaacaagaagaaaatatctatttgtcttcgattccaaatatttagcatttttattttattttatttttggccattttaagtcctaatttttgtgattacaaatatgtattattaattacataattatgtcatatataacaaaaaggtcaaaatgtatactttttcataaagatatattgtggtcctatttttctatttttttttctttgcttaatatcaaaggattcagattttcgcttaatatgtatgtaaatcaattttatttttatttgtacaacctaatttaaataataattgatatttgtcaagatgtttaatttgacttttattaaactaataaataatctcattgtgaactgtttttaactacaacatagacatatatttttttagcaaatttttacatttacaccaatttttcaaaaaattaatatcaacttcaataacacgcgaaacaccgagctagggttactcggagactcgaagcgctaggaaaaattaatgtctctttaggctaatcatacttaaattaattctcaaccctctttaattcctcattgtcgcttataaatagggcatgagggattcaatcgtacgcaaagtcggcttaagtattgagtagtttgggctattacacaaaactctcaatttttaagcctaatttttttaaaggaaaatgttttttttttctttttttttttttattatctatacataaattaaaaatttataactcaaagtttaaaaacaatcttaaaaatataaataagctggtaatagaatcttgtcttaatgtacaagaattttttttttctaaatgcatggcccaattttaatttgaagaatatataattaattagagccaaagctttccccgagttgtaaccctaagatcacttgacgtccaatgcaagtttaatacattaatttgtggattaaatttcattaataacgcccgaactacataaaaattttaattttgagtatcatttctctaacaaatatctaataattttttttttattggtgataataaaacaacaacatatattatctataaaaattattacttaatataactgagatcaatttaataacaaattttaataattctttaacaaattatggcacatcaatatctaatatttttat

SEQ ID NO: 39268 - DNA, 2581 bp, Cannabis sativa
gctgggagatcaggctgattttttgggcatcgaggttaacgtaggtcaacctgggcacccagaacttggtttcttaagctttaggcatattttgagatgcttgaataatgtgatagctatccttagttcattatttgaaattggctaagttctcttttggcaattttactttgatatgcaagggtgattcccggtgattcgttagtgacgactaggtgacaattgggtgatcactagtgcacatgggtgtcgtgggcttgcgcgtgacatatgtacatgagatattcacttgtggaatcatataaatcttattttggggacaaaataagaccgatgctttgagcaaaactaatgttcaaatgactattaacctagcccaaggccaattaggcgcccagtgtgcttgcacactagtgcctggtgatgcccggggggctaactcactacttgaatgatattttctcctaattctaagtctcatatcttgttttttgataaaaataagaagaattgctaagatagaataacaattggatcgatggaaccaccagaagtgtggctacatcaacctaggcgcctaactcttcatttgggccctcgatgggttcgtttgctttgcgaaaatacttgtatctttcttgtgggaaaaaataagggaaagtcctgggaggcttctttggaatgacatcccaagattcttcgggttgaaatatgtcaacttgggcgcccaagatagtctgaaggcctccattgggcatctgggtaggggttcacaaatttgaaattagtctcgttgatgttcaatcttctttttcatgaaaattgctccacaaattttagtttcctcaaattttcacgagcagaacttggtgaaacgaaagtcctgccccggttaaaatgttaacctaggtgcccatagttgtagatgggctccttcagaatgtcattgatgaaatatcatgtcctttcattgttcctttatggattgaggaattggggtccaagtatgtccccaaacacttaaactctagccacagtgcacccaaattgactatatgtcaacttaggcgcccattagggcttccaggtgctcgggttccatttcatgtaaactcatgtccaaggtctaaaacttggttagggcatgtctctcatgtattataggataatggctaagtaaatttcccataagaatttgataggaactaaaactgatgcgagacgaggcacatgatgttaacctggatgcctagcaatggtgttggacctaggttgagccctgggatgtcaaagtgaaatcctaaacttcctagttcttagttttagagtcatggtgacctatttgttgaagtttgtcactcagaaacgacttcactaaatatttgtgcttacctaggtgcccccagtgtgcagttaacactatcatatcctgggatgtgggggggcccccaaagttgttctttcatgccacattttaaaaatagtgtccatgtgatcaagctaactttttaggtaatcatttgtcgctgaagtcagtattttatattgttacaatgctaattaacttttaagatgtgaataattccaacttcttatcgcgaaataactaggttggcattatttttatactagctccccttagcttgggctcccttgcatcttttctcaagtccatatcctcaatgtgggggtcaacatcttccccattttggatgcataacaaaatagtgataggttcgatattattcattccccaattgtagccttagaggtcttcaacatctcctcagctgtgttcacaacgaaggaggccttcttcatttcctcaactattttccagtagaagaggtcttttccttctccttgattgttgttacagtaaaggaggtcttggtcatctctttggatcttgtcagaacagaggaggtcttgtttgtatcctcaaccattttcacagggaaaagatctctctgttgaatgccaacaaagttttgtagcatttgcgagctactctttggtttatcgaagaatttttaaaaataccatttactttttcaataagggccaaaaaattatttttcctaaggcctaaatcaactcagggctgaccctactcaggaggagtttagcaaccaaaagaacaccacaactagtgaagcgtccttctcccaaagggtttcctgcaatcagggagaaaatatctgttggatgcagcgtcttgcttctagcgagtttttaatgattgatgtgtttttcgttctttattatttgtgtactccctagaggagaacttgcacaagaacttcagatttataaaattagtcactaggagagatcgaagctacaatcaatgccattttcaacaaagatagttgatagctttttaggacatggttgtcacccgttttctctccatagtttagttttttttggtcggtctagtctgggtggattattttcctatatccacagcgacctctaacaattttccaggtaaaaatataatttgcacgtgtggtgtgattaacttaatgaactcaccaacacacacacacacacacacacacacacacacacacac

SEQ ID NO: 39269 - DNA, 1515 bp, Cannabis sativa
aatggaattaatttgtacaaattagtggagggtctaaattttgatattgggggttttattaagggcaaaaaatgaaatttccctttagttattgatctcaaatttataattaaataattaatccattataaattgataattaaggattaagagattattacaacagtaaacattaatttttaccaactctctaattatgtactaataaattgaagcataaaaatgttaattatattgtatataaaataaaattgatgaatatatataagacttaattgttactattaaaacttattgactcaattgaaagaaaaaaaaaaaaaccatgagtgttaaataattgttggaaaaaccaactttctagttttcaacatagtttaggttaattatttccccagcaaaaaaaaaaaaaaaaactaggttgattatttgattaaccaacaacaacaaattaatttgatacatgataatattttattaaatttaaaacctcaagtgatcatttccctaagagcaaattttttaacaccaatcaccaaacaaaaacaaaaacccttggaaaaaaaaaaaaagatatgtgaactccaaaagtggtcaacataaattaaaggctattcaaagaagaaatggtgataatcatggcccattttcatgattctaaacttgttgagcaaataataatggctaaatatgcttctttcatctttggctatgtggaataatgttttttaaaaagtgaaaaattaagtcaaaaagcatatataagaagctagagacttcatcatgatcataaactcaagatatacataagcaaaaaatatggtactttttaattgtaattttaatgcaataatggttcttaaaaatatagaaaaatcaaagataaataaataaataaatcatttactaattctcactttaaagttagggacagacacaaagtgatggagttacagacttacattaacacctataataatatatattatatattatttcttagcctaaaaaaatgttgcagtttagacaatattcttcatcaaaagacttatttactttttacaaagaaaaaaaaagattccagaatatgggatttatgtatctttcaatatcaatcagtcaaaaacaaaatcagagtataattaatatatatatacataaaatatagtattttactttgagatttttgcagactatgtaaaaagtttcacatggacaatcttaaaaccatgaaagtataataaatgacaacagtaatatgaaacatgtctcatatatatacacattatgtactaaagaaaaatcaaaagagaaaaagatagaaatgagttgaatatttgttgaggtgaattaagtattatgagtccttttgcaaaggacataaattatgagtctacagaaatttcattaattctatatctgacgaactcagaaactgggctttgaaaattcatgccaatgtattattattatgtcgttttctctccattaatttatccagttttgtgatatata

SEQ ID NO: 39270 - DNA, 1635 bp, Cannabis sativa
aagctgaaaaatctattctttataatttttctttttgaccaaaaaaaattgaaactttgtatttaacaactctgaaattttggacattaaacactaaaattttggcttcaaaggcaaaaaacactaaaattttaatatttaacaattttaaacttttagatcttaagcatttaagatgtaacatttaacaattcaaaatagggattggaaggaattaatttaagagtgccaattcaggtggtgacaccacaacagaaattgatgtatgttaaaatagaaaaaaaaatgatataattttggtgaattattatatatgaatgatagaataaataagttgttagctttataacctcaagccaaaaatattatgtatacaattctaaaactcttaaagaggtaaatctaccaaaagattccaaatgctataattttcattttattctttaaaatatattattaaaatattattttatctattttgcttcaaatttttgcataatattatatcggtttaatatttcattgttaaaatattttacttatatagagaaaaaatctaacaataaaaaattaaagtaaataaaatgatgagtgagaaattattattaatttgtagaggaatattatttatattgtaatattctgagctagcttatttaagggtaagtccaaaccttagcaacggtactgaataagggcaacgatacctatatttaaaattaaaaattcaaatttttttactcatataactccacttttcgacaataactcttataataattagtattgaagttgctctaaaagaattaccttttaagagctttctttctattttacgtgttaagcttttttaactaattagagttaagtgataagcgatactatttctattaatacttgtgactaactaataaataattatagtaactatttaatattttcacaaaacatcttttctaaactatttttattttctaattcgaaaaaatatgaatattttttttccccaatcaatagttaaatcattttcattgttcaaaaagagaatattttattctaacaatataaaataaaagtaaataaaatgatgagtgagaaattatcataaaattgtggagagatactctttcaattgtaatatatatttttttttatctattttaactcatttaagagcaagtctaacattaacaacaatgtcaaataaatgtgcacatttgtaattgaaatttaattttttctcacataactccatttttctgacaataactcttgtaataattagtattaaagttgttctaataaaactattttgaagaattttctttatattcttattttacgtgttaagttatttaagttattagcaacactaattctattgatatttatgactcactaatgatagttttgtaatcatttcaaaaaaaaaaaatgatagttttgtaattatttcagaagttaaatttaaacaactttttttattttttatttttatttttattttgctaattaggacttttaccctcaaactttgacatgtaccaaatcatggcctttgaacatttttggtcgttaaaaattcccctgaattattgagattgttagatttaagaacttttgtctaatttcatt

SEQ ID NO: 39271 - DNA, 1467 bp, Cannabis sativa
  modified_base (566)..(571): a, c, t, g, unknown or other
gtttatttctatttgttatttctgtgctattaaggacatatttgaccttaatgtttcattattaaaaaaatgttacttaatttttaggtatcaagaggcgtaccaaataataattttcatagattaaggaaatttgagagtgaatgaccatactacaaacaactttctattaattttcatgatttatttattttgacgaactttcattgaattgaatatacatttgaatgaccaaatgtaaagtggatctagctattttacttgaatataaaaataaataaaatttccaccatctatattatagagtgcatgatgagttttagtggattgggcgggactttttaacacaacacgaaattaagacacgagtatgattagatacaaaaaatataagtttaaatatgacacaacacgatactaaaaattagaacgataaggcacgaaaaatatgtccttaagcacgacacgacacaagaagtacaaaaaacaagacacatagcctgaaagacacaatacgcgacaagttcgaaaaacacaatacgacataataataataataataatannnnnnataataataataataatatacgtatttattaattataaataaatttaaataataataaatttaacaatgatacttaatattataattttataattaaaactattaaaaataaaaaattataattatatattaatttatttatggagtatgatacaataatttgagaatttacacttatattttaataatactaataatttttttatatcattatctgtaaaatacttttacaaagttatataaatataattaaagctataaaatatacatatgttttaatagatgtgaaaaaaaaatatgaagaagtaaagtaccgatatatatgaaaatgagctggcatttttaagaaatatgaattgacatgagcaaaacactgcacgaatctaagcacagtacaaaaatatcaagcctacggatagtgtcggactaccctttaaaaatattgacaaagtacgacacacgttctatattttttcataacacaccataccacagtctttttttaaaaaaatataaataaataatagattgggccaccatgacatgcacaaaattacagcactaatgattactagtagatctacatatcctcaatcattatggatacacaattaattaaatcacttttgataggaaatgcaccaaatgaaatacggtccccatccgttgttatatatattttttcaataatattattttataatgatttttgtgtggccgaaaaagcttaatcccttgtgctttcggtggtgttgatgttactgatactgctgcaaatgtagtccacatgtttccatcattaatttgacctgcacttgaaattgtgtggcaatcatatttattatcagtcatcatatatcatctcttaatatatcacttgtgcaactttatgctca

SEQ ID NO: 39272 - DNA, 3317 bp, Cannabis sativa
actgtttttattcatcaattggtcttttttgttgttgtgcaacttacattaattaattctataagcttacaataaaaagtctgcttctagaagtcaagtggttacccctacccgacatgtcaggcagaggccatcactggagagtgatggaaaggccatcgctgcttagatctttttaaacaaactctttggaatgagttaataaaactactactaaagaatagcgttcatacaatttggtcattggtagtactttcagaggtgttccccattccaatatctttgtaggagaaccaactccatgttcttgttgtacctaccaagcttgtaggctcccttacttgttatttctataacttggtaggggacttcctagctagtctgaacactcctactgtggtatctttggtgttcaggaatactcttcagagcactaagtctcctatgaagaattttctttccttaacttgtttgttgaagtgcctgcaaccttttactggtaggcatgcagctttaggctagcttggtctcttctttcttctacttcgttaagggattttgccagcaaggtgttgtttacctcttgttcataggttatcctcctataagatggtggcatcagctctacgggcaacattgcttcatagccataagctaaagccaatggagtttgcccggtggtcgtcttctcgatggtcttgtgcgatcagaggacttttgagagcaattctagccaattgaattttgcctctttaaggtgcttattcaaagtgtcatgtagggtcttgttcacaggttctacatgcccattcttttgaggatgggccatgatagaaaagcttttgatgatgtcgtgttggttgcaaaaattagtgaacatgtcactatcaaactgctttctgttgtctgacacaagcttttgtggtagtctaaaccggcatatgatgttcttgaaaacaaagtcaaggactttcttagaagttattgtcgctaggggttcagcttctgcccacttggtaaagtagcctatagtgactacgacatactgcacccctccttttctctttggaagttgaccaatcatgtctattccccatatggaaaagggccaaggagacttcattatcgtgagctcgttgggtggagctcttaggatctttgagaatttttggcacttgattgacatagtccatcgaatcctcgatcatggttggccaaaagtacccctgtcggagtatctttttggataggctttgcccctagcatgattaccgcagaagccttcatgtacttctattaacaaatgcttagcttctgttttagtgacacaccttaggagcggcagtaagaagcctcgtttttacattactccgtctaagattagatacctagcagcttttattctcatctcttttgcctcttttttattttcaggcagggctccaatttggaggtaagttgcaataggtgtcatccaggttgggctgccgtctaacatattgacttctttaggaatggtaatgttacattctttcaagaattgtattggcaccaagtttgccttgtcagtaatggtgctacttgccagacgggcaaatgcatctgttgtggcattctgttctctggggatctgccttattgtatagcctttgagccaacttagaaagtcttggatattgctcaaataggctatcattctttcacctcgagttgtatattcacccaggacttgatttacctatatatgtttaggtggtcagtctgtactttgtgcaccagcttgagcctagcgatcaaggcttcaaatttagcctaattgttagaggctttgaagccaaacatgatttccccgtgcaactgttaaccccaggtgtaataagtgcaatgcttgcaccagaaagttggtccgtgcagcttccattcaacatgcaatttccatgttgattcttcaagttcttgctgctgctcttgctctcgcttcttctctagttctcgcttttctcctaaatcttgagagatttcaagagatattcttgtacattcagccacaaagttggtaagggcttgaccttttatggccactctcagttgatatgtgatattgaatggtccaagttcaatggcccacttgagtagtcggcctgatgctttaggttttggcaaaacctgccgcaaatggctggtcggtgtacacccttacttttttttttggtaaatcattgtaatgcattacctcaacaattctttacaacctattagcatcttcaaagagaagatctatttctatgtgtgagaagaattcaaatcacaattttacatcccaatattacatgattcccctctatttcccatttgctattgttgtacaatctctaaaaaccattgattgtcatatgtagatacatttttaggccaaacataaatgaatctactctttacttcttccttgatactcctagccacctcatttactctcggttccttggattcccaaagcagcaggttcctctattgggtaagcttggaagtacgaccttagctttcatgatgctaagagtaagctatatgtcagcttttccatgagtaggtatcgacttttagggtcgatcagtcttttgctgatgtagtatactggatgttgtacatcgtcttcttctcttattaagactgcactcacagcatgctctgtgacagccaggtacacacccagcttttcattgtccagaggttttgataggatagagggttgagccaattatttcttcagcttttggaatgatttttcacactcccctgtccactcaaattttttgtttcctatgagtatgttaaagaagggcaagcatttgtccgtggactttagacacaaatctgcttagtgcagcaatacgtcccgtcaggctttgtactttttttattattgtgggcgacttcatgtccaaaaaggcttggatcttatttgggtttgcttctattccccttgcattgactatgaagccaaggaatttgcccaagcctactccgaatgaacacttgagggggttgagttttatgttatactcttagaggatcttgaagcattcatctagatcctccacatgccacccaaactttttagacttgactagcatgtcgtccacgtacacctctattttgcggccaatgagatctttgaatattttgttcacaagcttttacaacattgtacaagagaagatattatttgatgaatgaatttcgagtaagaattaatttctatgagaaataaattcttaaggaaaaaatagtaattggtgaaattattgttttgattaatt

SEQ ID NO: 39273 - DNA, 1530 bp, Cannabis sativa
tttttttttggttaaattaaataacagctagtattctaattttactgtgtgtaaaatatttaggaccgaaaacccaattcagtttgaaaatgatatggtcatatttgggtatgggtaccaattatgatacatgcaggagagtagggagcatgaaattaaacactgaatcctcaagtgccacctaagaagtagtagtagtactagtacaattacaagtcactctcatagagtagaattattataccttataccatttcatcatatcagctaaagtgagggcttttctgaagaaataaaagaaaagagtacaaataattgaagaagagaaggtggttgaagaaaatgtttatgacccacatatccgaactcttttattttttaacatcaagaaaaaggccaaatagatagattaatggtaggtgaaatgaatgtatgaaaaagttatggtgttgtagagctgaaaacgcagccacaatcaaaagacacaaaatattggctgttttttagatttgcaacgacgattatttgtaatgtcatattcttgcaggggcaccaaaagacataaaagacacacaaaacccatatcatgtgtttcccttgttgtacaatgtattaaaaattaaataataaggttatcattaaaaaaaaattgcactattctcttctaaaatagatattgatttttatacttaagggtaagtaatttatatacgatatgatcccacattttagttagatgaatgatcaagatgtgttctattctgttacaatttttcatcaaaattgtattaatcactttggataaatgattaacaataattatattattttccctaaaattatgtacatttgagaatattattattctgctatgttattaattttaaaaaatgtctatgtcttatttttacatatcaaaagagaaaatgaaatttaggactttctccttgtaagaaaaagtgtagtactactaatttatgatcctttctaaatttatctattttaatgattaagttacatatataattacttttatgtgttactaaatgattttttttacaaataaatgaggctaaattttagatctaaaaggagttataaatttcatttgtaaaatagggttgtttagaacttatcacttgagcacttagtttatcaaaactttcatttataagtttttttctaatctaatattaaatgaaatagctaaatatcccaaatacaataaagaaaaatcatccaaccacacaaattattcatcaatttaaaaagtatatgccgctagtttactaattatctgatgaaaataaattagtgttgcatttagaaatttgaacaacaaacttgcaatataagctaacaatgtttcaaaatcattgagaaaagtatgtctcttagaaaaagtaaacattcaagttgatcagttaagccacctagtagaaattttgaaagacatgctacaatttcacttacaagttaataaaacttctggtttgataatcttctggatatgttggatgctcttgtaga

SEQ ID NO: 39274 - DNA, 2179 bp, Cannabis sativa
tcttacctaatatataaaatgtctatgtaacgttttttgttgtgtcttttaacagtttggaatctatttaacagaatatgctcaaaaataagttaactttaacagacaccttaaataatcacaaaccaagacaaccatttgcgttcgcaagacacccattcgtaaaagcaccaattcattcacaaagtcataaatcataaatgaaacaaagagaaaatcatcttctcaatagttttaaaaaaatcaatatcaaacttttaatggcacggccatcgaccaccacaaaaacaaccgcaacttatttcaatcaatctcaaattcagattcaaacacaaactaaaataaaactaaaaattaatatcagatacaaaacaagaccaaaaaaatcacaatctcaaatctcaaacaagaaatgaagaaaaatagaaaaagaagaaaaaaatcactaaatctagatctgaattgctctcctccctgtcgcttccaccaacctgtacgtcggaatttatcacaaatctctattgatatcggcagcgaaacggaggccacgaatggccaagaacacgtctcacacaatttctctctcacgcaattctctgtgttccaattttgcgtctccaaaggaagaccaacctttaagccatcattcatctctgggtttataattatccctccattatattgggctgttaaagggtttgccaaatactgaaattcataactaattaaataccaatttcacttcgttttgtaattaatggtaattggaaaaatctctgtgagaagagggaggaaagaagaagaaagagagtaccgatggaaaaattgacttttaatttagggttttattttttttaactttttattttattttataatatgtttttaaaaataataaatttagtattaaaaatgaaaatgtgaagtcaatgaagaatcttttttgaaaaaaaagtaaaaaaccatttaaagatattttttttaaaaaaaaaaatttaatatatagaaagataaaattaaacctttctaaaagtttagtttttaaattatttcataatattgcatttaatatttttaaattatattattattaaattttttttatttgtaaagattatgtataccaacggataattatctctacatcaaaaatagaagaattgataaaaaatgaagacaaaaactataaaatagtcaattttaatgatttggacccctaaatgtcttctaaagaagaaattagtaatttaatatactaataatattttccttctatgcaaagtcctaattaaatctaaaatattttaacattcgaaaagtagatatattagtggtcgcaatacaagtcaagtcaccaaaagatgtaacatatgtggaataaaaagaatttaagaaatatatctgattaataagaggtacgaaaaaacttagttaaaccgaatataatattttttatattattatagtttaagaattagaataacaaccttatgtaatattttttaataattaaacattttatctaaagaaatagaactgaaacttacttaatatgtaatataatattttatgtaagtatatacaataaaacttttaaataatatttatattattatatcaaatgttaaatagaaaaaatacatttacaattgagatgcatctatatgtagtacaagaatatatactcaaataaatgacaaaaatactaacttttgtaatttatttctcaagaaaagactaaatatattgaaagtatttctaatgaattgttaacaaagagttagataatacaaacttttgctgatcaagagaggatggagactcaaagatacaagaattttaatgtatactctattgaaaaagcaaaacaagaaaaaattgttaaattttattataaattacatataagtaataatttaaaaattatagtaaaaacacttatcctatgtatttttttaaacagataaaaaaattataaaaaaaactcaaaaaaagatagaacgtgcaatatactagatgaaagttacgtggcgagccacgtaaatattaattttatttaagttctagtagtctttgtttaaagattcggtaactaattgtaaattattgtttaaacgatttgttttataaaagtaaacttgttaagaatgccataattgtgtatataaacctatgatat

SEQ ID NO: 39275 - DNA, 1322 bp, Cannabis sativa
attaagtacgtttgtgttcaattaggattacctagggctagggacattaatatgggctcgttcagtaagtggtgttaggcgtaatgtatattatatcaaattgagttttatgttatatttttataaagtaatttgtggtataaatacttaagtttaattttaattttgattataaataaatacataagttaaatttttgacagtgataatacttaagttatatttctaaaatttcgtagattatctgtcccttaaatgtcaaggaattatccacgtgtcatttttttattaatgtattcaaacttattttttttaagaaaataaaaatttaataatttgggccaatcaagaattgtcacgtatcaatctacttaatacttaacagtcaggtacttacagaagtttcagaattaattatacttagatattattaattaccacaaaaaattaaacttagacatttatttgcaaccgagagttaaacttaactatttatgctgtaactcactctatttttataatattacattaaattttaatttataataaaatattatatatttatacacctatataacttaatatcacatataattttatataaaaatataacccaaaatataatttaatacaataatgtgccaaaccaacccttaatgttttctttatcttctcttataaatgaccaaatgaatgaaatagcactggtttatacctaaaataaagaatgttttattgggttgcttcagtaattttcatgtgggttgttatacgaattttggttgtgatttaggttggtccgttaattgctatcaaaatttttgtgtaaaatccattaaaatgcaaaaaaaaatatatatatatatacatatatattttaaagtgtaataacaatgaaaaaacctttaaattttttatttgaatatattataaaatcttttctccatatattaataaaccggtgtgtacatacatatgcatatattataaaaaaaatataatctaccagcgaattaatacatattgctagaaagaagaaaaatataaatttctttaacaaaagcttatgaaaaattttttttttagatactaagggtgcaactaaggatgcacacggggcgggaaattggcagagagtactcctctcatccccatccctattaagaattttaatttccatccccgcttattgatccccatcaaagatagggcgagaaatcccttaatggagtcggggtcgggacggaaaatcccctataataaaaaataaagcttacataaaaatttagatatatatataaatattaaactacataaaaatt

SEQ ID NO: 39276 - DNA, 2092 bp, Cannabis sativa
aaaatttgcggcaaaagtccataaaattgtcactttgatacaaattgtctccaaccttcaaaaataacggtaatagtccacaagctcaagtttttttgtaagtcagtcaatactcaatttaacacctttattaagtgctgacaaaaatatcacgtgtcaaaaatttattggtgcacatcataattttaattaaaaataaatacaaatacaaatacaaattatataaaaaattaattatttttttttcttttcttcttcttcttcattttcttgttcattttcttgttctccatgctgcccaggaaccagtgaaccaccaccacatcccacgatccaaaaaatgaaccagccacacctcaactctcacgacgaaaaattatgcttcgaccacccctcgccccaaacggaccactactccgttttccccccgagaatacgaaagcctctaatatctctctcgttctccttctctgtactgtgttgggaatgggtttgaacaacctaaagcttcgactaggagctcaaacgacgaccatagtttcatcatcaatcgattcacccaatagagagtcctctaaaaatcccaataaaaaaaatcaccaattaaaaatcttttcagaaaagaaaagaaaaaattaaagtttcattttctcaaattcattaattttttttttccctaatatgctcgttgttgaatcgtgaccaaggtcttgtttgtagattttttgggataccttgacaggtcgattgtcgaagacatggattgtttcattgcttgctttagggtcaaggacgattgccaaaaccacaatcatcatcgttggaggttatagcctcgtcttgtttctgaatcttctcatcccaaactaacggtatgtgtgtgtgcaattttgttttttgtttggtttttgagaaaactcagtgatttacaagctgattctttggaggaaaaagaaaatagtttgattttgtgaattttgttgtgaggatgatagttctgatgaatttaacgctgtttataatttttattttagttttatttggtggtcccgattgacaacaccggggctagagtgggggtggctagggatgattgggatcgactgggtacgttgggcagtcggaggaggttttgaagaagaaaaagcaaaaaataaagaaaaaataaaataaattattgattttaaaatatatttttatttattttaatttgttttaattaaaattattatttggaccaataaaaaaattaacatgtggcattcttgtcagcatttaacagagctgttaaattgagaattgacggacttacaaaaaatgcgagcttgaggattattacagctatttctagaggttggagactaatttgtatcaaagtgatctttttagagacttttaccacaaatttccctttttttaaaatacctcactaaaattttactttttctattttacctttcactacaagaatttaagcatttagagggacattttgagagacaccaaaaaaatatataagatattagaaatgttataattttaaaagtcggctcaagattctaaagctttttagagcatcttcaatggtgatgcttcgattgaatgctcggtgatgtggatgaatgtttagaaagagctaaccattgagatgtttggatgtcaaactaaaaggtaataatgatgctaaaatttggcattgatgtcatacttattttttttttgaataaagtgaaaataaataatatatttaataataatatgtagaatatggtaccaaatttgaggaatgcttaccattgaagtacttttacaagagtgacaaaaataatgttgtgtgtgggaaatttcaagggttatccctcaaaaatcaaaggatgatggtatcaatttttcttctagatatggggagattaaatcacctcaacaccattatgggcacctcactcaagctttagcacaatattcaatctatttatttaacttattacatagagatatttacactaaatattaattttcttttaaaaacaagaaaatttttacatttatacttttcccatctaattttttttttactgttttctacttatta

SEQ ID NO: 39277 - DNA, 1336 bp, Cannabis sativa
cttaattacaccaaagcagacatgtttgtttttttatccaaattttacagatgttgagttgtctcttgagcttatacattttctgtttttttgttgctcagagaacttaaaagtttggatggagtgtttctcgtctgccttgagtgttggatttgattggttttctttgttctcaactaaatgtttgtaacaatgtcggcaaccaattgactaattttgcactatttcttagtagcgaaaagaatagaaaaagtgattttactatatttttaactaagaatgggacttatcacaagattattatttttagtagggtgatagctttgaaaagacaaatttcccacaatgaaaatggctcattctttagtgagattatgtgaacaaatgtcgcaaccaaaatatgttattggtgtgggagcctatacaataacaaggggggatgtttagtaccaacatttgctttagtctctgtttgtggtgacataagtccctccctacaactcatgaattaagaattctcgcaataacaaagtctactcaacatgaattaggagttaataaaatcttatcgcaagaatctttcacaaaattatcaactaatattatcatctgatcataacgaatccacatgtgatgtgtgaacaataaaagttgtgtgccatagttagtggctagatctggataaggggcatcgaatacatatgatgagctacaacaatggttaaagtgcccaacatagctaagttaagagataattgagcatgccatgatgttgtttagggtttagggtgtagggtttaggatttcgcctattggactctcgccatctagggtgcagcaccccaccgcttcgcctagtagcacgacgcttgtattgctctcccacaatcccgtttttacagtttagactgctcccaaataagatatgtatccagtattctgatattcaaataaatattcaaattctacgttggaacagtgggactttttttcatatttcttttgactacgcgggaatcagttgatattgccgattaaatcttctttttcctagatattttttaggaataaattactattcccctccttttcaagattctctatatccactaaaatctcatttctattctatttacttcgattttattttgatttaatattgatataaaattaaaagaaaataaatagaataaatcgaagtatattatacaaattcgttgctttttatattatctctaaagaattaaaggatttacaaattttttttttttttgctaattttagcttatttagataagatagaatagattcaagattatctcgagataaaataatt

SEQ ID NO: 39278 - DNA, 2275 bp, Cannabis sativa
tttggtattccaattaagatagtaaccgacaatggtgctcaatttgatagagatttatttactgaattctgtgaaaggaataaaattattcaaagcttctcgttagagtcaaggcctcaagaaaatgggcaagtagaagcaattaataaggccttgaaagatactataaagaagaagttagacaccgccaaaggaagatgagttgatgagctaccgctagtactttgggcccatagaaccacaaagaaaacaataatgggacacacttcattttcattggcattttgctcgaaagcaatgttactgtagaggtaaatattgcaacccacaggcgtgatatctacaatcaagaacaaaaccaagaacttctaagtatgtccttggatctgcttgaagaaaaaacgcactgagacacaaataaccaatgctgcttatcaacaccgtatcgctatatactttaataaaagagttcgaaaaagactctttaaagtaggagatttggtgttaagatgtgtatttgcaaatacgtgaaatccagcagctagagtgtttaacccatactgggaaggcccgtacattatcaaagctgtagttggaaccaaagtttataaattagcttggcttaatggctcactaataaaaaacactaaaacaacgaacatttacagccatattaccagtttattatcttgtaatgttgaagttaatctttgtaattattgttctttaactttaataaagatttgaatatttcaattaatcataaagttttgtttctttaaaattacttgggggcatttacgtgtaaaataactagattctacctagaaattaatttttttcacaaataaaaggatgattgattaaaaactgtcctaggacagcataaaatcaaatatcttcaaatctttatttaagtggaaattaaaatagcagttgtaattgagatttttttctcataaaacaacataaaactaagtgcgatctgaataaataacgattcacatattatagcatgtattataaacgagatactagcgtgtcttgaaaaataatgcctaagctaaagtataaataaaggattaactactcatacaagcaatcaaaaaatattcaaaaatagttttagaaaaaactgttcaaaatatttaaaatttgctcttaatatggcagaatattatctggtcgcaaaaagcatggtagaatattacctgctcgcagaaagaatagcagaaaattaactgttcgcatgtgaaataaaaggattcatgaacaaacatgcacttaattaagtgaacatgtaaacctaaaaaatatcccaggctaaatcgagaaaagtgtgttgttgtgaataaaaacgcaataaacaaacattaataactcgagaaaatcaggataaaatggcatgaaaaaagtaaatatatataaataagctatgttgaccatccaacaaagcatttaattaatattacaaaatgccacaaggggcaaaatattgtctcgatctaaaggccattatttgtaaattaaagcaataaaaactaaatctacatggttagagatttagtgggcacttcttcttcttcttctttagctttaacctttttgacatcctcaacttcatcctttttttgtctgctcgcaaaaagtaagcatcttaacggctctatcacccaaaaagcttatatccatacctagatttgccatccaagctcgataaataaatttcttctagccttggcattagcctcggtctcttcgagtttcttattggcttcatcaagcgcttcctgggtcttttggttagtttcaatgaggtccttggcctttttttgggcagcctcgagctcagtcttgagagttttccgctatccttcaacctttttttttaatcgagaaatctctgactgagagtcattccattacttcacaacggctttgcgttgttcattagacctacgaagtttagtgcccagctggttgacactctaaaaagccctttaattgagccacatgagacaaaaagatgcctgcaaaagaacaaggtcagaagaggatatataaaaaaagaatatatgaaagaagatgtataaactctatttaaaagaaaaataggctaactaatcgaaagtaaaagatcagcactcctcgctgtcagactttggaagtcacctctattgatcagatcctaatcgtcttattgaaaagacttataatgatgctaacaggtttatagcatactacgagtaaacttgcgaaccttcaatacctgtaa

SEQ ID NO: 39279 - DNA, 2275 bp, Cannabis sativa
aaaaatacctggaacaatgagtacttaaggccctattactagtagtgaattttgtttttattctttaattatgtaaaagtaatgtattttaatgaaggcatttatttcaagtaactataaagtgtttctttaaaattacttggggaacatatcatcagtgtaaaatcaaactttgataaccatggtaaacatggacaaagaattcaaatataaattgatgaataaaagctatgaaattttgaaatttttcataaattcacaaagttcgaaaagtccaactttagatgagacgtgaggcgaatgcgagcagaaaagaaaaatgaccgcagaacatttttagcaagtactttaaatgaaatcatataaattgattctggaaaaatggtacacctaaagctatgtacgatcagaggaataattgttcgtacgtatgatctgtaacatcaaaatagccataaattggttgtataagatgttcaagctcattttattacttgaggaaataacgagtaataacaaatgagaaatttgtatgacttggaattaatgatgaatatgaaagatttgttagaagactgctagaaaaaaggatataggcacgaccaatttagtgccaacaaactcagtttttagtgccaatggatatgtaggtgcgtcaaatcgtgtcctttttgtcatgcctaaaaattggtgcctaaaaactttaacgggcaccacaaatagtgtcatgccaattgactgatcaaatggcaagagacacatgtggtgctcaattggaatcaaaaattctatcagccatatgtttaggcacgactttgttgtgcccagtggatttaatttttttttttaacaaaaataattttgtattttaagattaatttatatttatatttaaaaaatataattatccaaaaccaataaaaattaatttatataagtgtcttctaccatataaattggcaatctaaactacaataaaaccattcaaatacctaaatacaataattaaaataaatgttcaaatacacaatacttatattatcacattcatacaattacaaataataatactataattctaattgcgtggactcctcctcatcatcatcatcaccattctctccagactgtaattatagaatttgcagcatttgcgaatagtatggtcgctgcgatagttctggcatttgtgggtaatctacctgctatacgtgtggcatctactttattggtgttaaaaatatgtgcccccggttaataaatcatgtcttcttgtatttcaacatctaacacatggacataaattttttccactaaaatctctatatttcgatgcaaattcgataaaggcttcaacacttttccagtaaatatgatcacaatgacttttcattattcgaattttatcgatcgccatctacagaaaaatttaaatgaagaaagttattaaatttttttaactcatatttaaattatttaattttaaaaatcttatactcccttatgatgaattatcttttataattatgaattcattatttacttaattaattattttaattattaagcttattcattatttttcaatattatgaattagttttctacttaaattgtttttttttaaattattcaaaatgatcaaaccttttaatttgattaattaacctatcatatattttttcattttaaatagttataatgactattatgatgagtcatttaattatccatatttttagtaattataaattaattttgaattcagttatttataataattataaattaattttgaattcaattttaaattagtttgtatatttcatattttatattttttcattataaataatttatgatcgcatattatgataaattagacttttaattaattaatagctatgcaccatactaactaaaatattattaactattaattgttatttttagcataaattaattattaaataaattatattgtaaaaatactaacttaatagattttttaattatctacttaaaatttaaaattttaatgttttattaagttaaagatgaagtttaaaattaatttacaatttatttttttctaccacaatttgaacaacatatcaactatttacaaatagtaagtgatatatttacaaataaacattatgtacatatgtatatatacaaagtcattcatattcatatgtactaacatacatatatacacaatatataatcaaataaacccaattattttataactttaaataaacatcaaaca

SEQ ID NO: 39280 - DNA, 1186 bp, Cannabis sativa
ttaataatttgtatattatttaaatttaaggtgtgattacttgcttctgcccttgcatcacatttggacagattgctgagattgtgaatagaggttccacaagtaagttttcatttttgatttttttttgttcatatatatatgtgtgtatataaatatgtatgtgtttaattaagcaggttgtgtagaaaatgcgttactttatggagtagttagtatgagtggggtagggtgtttgtactcgtgcttgtatcgttcgaggttgagagttcaatatgacttggaagaggaaccttgctccgattgccttgttcacttctgctgcgagacttgtgctctttgtcaagagtatagggagctcaacaatcgtggcttcgacatgggaataggtatatcatattctgcatatgctctccaactatgtttatttataatttatatatatatatatatacatgtgtgtgtgcgtgtggaggataagattgcaattggtatacgtagctagctagcttggcagtaagggattgtgatagttacacttacattttactatgaattaattttaaaagaaaataaatgtgtcaacttgagatgatcagacgatagttgatgtgttcaacacacaaattatatccttttttttagggattttcatcaaaatcaaaccgctaaaaccgttcgcactaaaaaaaaaaaaaatggtttgaaattttttgcggtgcggtcgcgatttgaattttttttaaactgcgcggtgcggtgcgatttacggttttaaattgataatatgcagtttaaaccgcaccataccgcacattataaaaatattaatttttatatttatttaggtccaatatgtgaatgtgcaatccaaacccactaattattgtattaaaacttaagtgttgctcaagctttattatatttgtgatagtttaattatttgtgatatagtccaaattgcagaaatcttaccgtaccacaatatttttttgcggtgctatttctgtagttttttagtttcacgatacgagtacagtttgagaaattaaaataaactgcatatgcaagttggtctgacgtaaccgttgttaattcacctttgtcatttctatatatacatagcaatatatatatatatataaatttctataaatattggtgtttactttggatggttttcctt

SEQ ID NO: 39281 - DNA, 1255 bp, Cannabis sativa
tgggtctctcgaatacctagcaacttgttctcttttcattctaatatcaatatatcagttctattatctctacttttgctactgttgtaccgagatgataggaaattcctaccaaatggtatcagagcacgtcgattttttggggcaaggtgtgatggaaaatcagttggagtttcagcaagctcctaatcaattggaactgttgaaattagctctcgaggctatgattgatcccatcgtgaaacggttggacttgatgatcgagcagagacagaaatctaaagaggcacgaaacaccaacaacaccttagtggcagccaaggacgaacatctagatgatgctgctaaggttgaaacaatggtgatttcagatctaaaactggtctcaagtgcagtcccagccaaacaccacgaattggtgtgtcacgagtcgtttatggagcccaatcgtggtgcaccagagatggaggagaaggagatcgatccactacccgaagttaaggagttgttacttcttgacggcaaacatcaacgaactcttccattccaacaccaaccggaagagccaaagttacgatgtggtcgcgaagagagtgaaccttaccgagtcctcagaagtcacagggagatcgtacgacttggtggtgaaccaccgccgtcgtccatggtggtcgatccgaaaggggtggagcaacttcgacttgggtattggaatgagaatgtatcatgcggtaaccggactatacactacaacgaggggcggaaagagacgtcatcggagcctaatagacgcgcactggagtcgaagaagaaagaggttgaaccaccaccggagcttccaaagaaaatggttactccgttggataccaaagagattcgcaatttgtggccagataaacggcgatatcgactggcgcagaaggagataatcatctcgcctgagaagccgcttcagcgatccttgacgcccaaaccagagaagtggcgatgtcttctcgagcttgctaatggcgtccaatatcgttggtgtgcctcaatcattaatgaggcagctgggctcaattctttctgtctagacttaaggtccaaaccaaaacaaaatggtggcccaataaacaagcccaaaagcccatatctaaatttaggtcacaattgggtcataaatcatccaaagaataatggttcagtagccatttctctatgtcacgcattgaaaactgggaatatgaaatcttcattctcatggtatctcaag

SEQ ID NO: 39282 - DNA, 3566 bp, Cannabis sativa
  modified_base (3066)..(3070): a, c, t, g, unknown or other
ttgccatctattccttttgtcaaagataaactttgtgatgcatgccaattcggaaaattacgttgtgggcaatcttttttaaagtgtcatgtcactccacactaaaatcacgctggaccttacattcacccagatgatgcttcttacaactagggcattctgggaaagtgtaacaactctttgagccaccctaacaacaacctcggccttggttacctcggaacctcttgttttgacttgagtcaccaaacataaatggagcttaaattttttaatcagaggttaagtcactaccgccctactgaaaccaaagttaggaggaaatggccccaccaataatttgagtctcttggggctcctggctaaattccactgtgctctcagctcacagtgctttctctaccataagagcataagtaggcgtgtcatctgtagtaattaacaaatcatgcttgattttaggattcaacccatccaagttgttattatgatgtcaacattaagagatcattacaatgtaatagacaagatacaagtaaaataatacataacacaaggtgctctaacctaatcatgatattgttgagatcctccagggctactcaacattagggaaaatcaatatgaaaatcacaattggaatacatgttggagcatgtataagtaccgaaattattgaaaccgaaacaaatacaaatttttcgctaatgatcctaaaagcaaatcaaaatacccaaaattagctgatgaattaagagaagagatattttatggaggaatttcgcatttaagttcaagcttggttgtagttgagctcacttaagtacttcatcgaaaaattagaccaaaaaatacaataacttattcaaaccttgattcatgcttaaaaatacaactacatggtggagattcatgagaaattaagaatagaggtgagaatcgccgaaagtaatgagtgagatcgaaaacattgatgagcatgatagatcgatgacgacataaagcaagagagatcgacgacaacgatagcaagagagatcgatcacacgtgagaggtagagagagagagagagagaatcgtggagtgagactctatttatatttatttatatttattttttctgattttagtttttttttttttgaaaaagtttattagtctttataaatgagaaagatttaattagaagaaagaaacaaaaattagttagacttttttatttaatcataagaaacacaaagactaatcattgagaaaatatacaatattaataaaaataattttaagagcgacaaaattcgtctttaaaatttgaaacatagactctaataatagttatttctatacaatttgcttttctataattattttaaataaaaaatatattctctaatattttaaggacttttcacccctaaaaatattaaacatcacgtgtatcaaatttttatattaaaataaaaagctaagaataattattatggacgattttttgtctcccctataattgttgcccttaatattctttttttttttagtgatccaagaatacaaaataagaatatacaaatacatatgaggccacgttagagattttaatccaacaaattcttataaaataaaaatctatgacatgaagatattctagtttgaaatagaatgtgtttgttctcatactgaaatgtaattagatgaatatataggtatatgtctatatgatattgttataaaaagtacttgtaatttgacaattttccaagtactaccaccaaaaaaaagaaaaaagaaaccagaacttattttctcagttgtcactcataaagcgatgatcaaacagagtggaagaggtgccgtaatattcatactggcctacttcaggaagggtgtcaaggccgccataacagtcttcgaagtgctcatcaaagcttctccaccatggtgaaggctgacatggtgctggctgaactgcttcctctatcttcgtttgatcactagaaggcattccttcactacaacttattacgacgtcgttatagctaatggatgaagaatcattaatattaccatattcgatgtgggacaaggtggtgtctagggtgttaggttcttgctgttccttgtggttgagttgttctataagcaaggctagggacacgtcttcctcatctctagccacctcttccaatgcgtcgtagcttcctgataaaaatgagttttcgtggtctgctgatgttttgctactagcaattgctttgttgtggatgtcgtagacctcatcactgcttgtagtagtactgttgctgttgctaagattgttgtggtcgtttacagtgatcttttggttagagaggtgtcgttttggtgagcattcggttcctgctttcgttccctttttcatggagatgtactacatttcctcgcaaccaaataaacaatgattagtcatatatattgtttttcccataaatggatcatacatgggataaagttagggtttttttgccagtactatttttttctttttcttcaaatgctaattatttgaattagcttcagtgccatggcatacatgtacataataatcatcaaatctatttatatacactactccaatttcatgaacaaatatatatatatatatatatatatatactggcatgattatggaaaaacatgatccgattccgacttatactcgcatgatattataaaaaataatatatacagtgaaatatcatatagattccaacactactacactgatataccaccttactgatgttgtaaaggattaaacgttttttatattatttattaaattaaaatgtatgagtctaaatattaaattttacaaataatatgttactttttatattacttgaccctgtatttctaacaattttatgtttcaattagattattaaatgaatggttatcattaatttagaaattaaataaaaataaataataattaacttataaactaataaactaatagtcaactaataatttatttctttaaaaatttttaattaagattacttatattttaaaattaaattaannnnnattattaattaatttttcataatttattattaaaaaagaatcttttagaattttttttttgcccttcaattattaaaatttttatagataaattctttgtaatttaagattatacacataaaattttatatataattaaaattttattatacttataagtttatttttaaattattacatttaattatttagtttttatttttaaacttttaaaaagtaaaaagtaaaaagtaaaataggttggatgtattttctaaaaaaaaaaataactaaattcttctaatttttttttttttttgataaggagtcatttacttaaaaaaaaacaacaccagagtcaaaaaacaatgtgaagattccccaaaaaataaaacatcctcaaacttgaatagaaaaactcatacttagttcttgtagttataaaaaaataatttaatatcatttcaaaataattaattatttaaaaaattaatatacaaaaagagaattttaattt

SEQ ID NO: 39283 - DNA, 3429 bp, Cannabis sativa
  modified_base (495)..(496): a, c, t, g, unknown or other
gtaataggaattgaattgtattatgtcataatagatagatacaactgaaatcaataaccctaactctgatccttgtcaatttgcatttagatctatttgtttttttgtttttattgcttttagctttaattttctcttaaaaatgtgattttgcctaatagaaataaaagtttagttttaacgcacttaattataattcctttggcttcgacttcacctgtgtgagtaaatacttgcaatgaatacgtacactttcgtgttaaaatattcacaacatatcctaagtgtcaaagttgtacttaatttatatactcttgtaaacaaaagcttatagtccatgtgtaactctttctagttttacacccactaagacattctcatcttgtgaaaattcattaactttgggaaaaaaaattccaacatatatatatattagcgaacttttccatacaaatagagagttcattaaggcttgtttggtacgccgtattgtanngtattagtattatttaatacaatagtatgtttggtgtattgatctgtattaataggttgtgtaaagttatagtatatttttaataaactcgaccccgacactaacttggagtcgagtttgggtctagggtccgagtcccgggtccaggttttggtcaagtcctgggtttgggttcgggtcgctggtctaggtccgggttagggtccgggttagagttcgagtccaggtctgggtacgggtccaagttagggttagggtcacgggtccgaggtttgggtccagtcatagatctcgatccgagttcgaatccaggcctcgagtctgggtccttgtctctagattcgagtcagagatttgggttgaccctagatcctttttaaatattgtaatataaactaatacgaatcatttattatgtattaaataatacaacttaaattatattaataaaatttatcgcaataattaatataatatattattttatctaaatatagtgttatttattatttaatataatacgatctttatacggcatattaaagtgaaatttaacacttcgacactaaaatgtaggaataaaataagattttagttcaatctttcaccaccagaaaagaataaaaatacaataagtatttagaaaaaagatatttccacaagtagccaaaactatcaaaaaattataaaattacatatctataattttttcaatatttttaaggacttttttttttcatgctattttatattggtattacattattattattatatttctataatgttgctttttcttgagatttcgaaaaaatacatataatttttttaaggaaaattcgtaaacaatataatatagtccgtaaaaatatatttttggggcgtttagaatgaaatgtgtaaattgtatttagttgtgtaaggtaacagttaaaaaattcctataaaattaaaaaaaaaaaaaaaaaaaaaatagtagtttaaccgcaaattgtccaatatttttcaattaagattctaatcacgagtattgagttatattattccttctaaccataattgaggagattttattttggctggaagaatatgtttggataagattaacatatataagaccgcacgatagatatagtgtttgtttgttaacttaaagtagtgcacgttatatttctctttttattttatttttgtctttttctttttcggtgacatagaaaaataaatataaaaatggttatacgcatgcatgcattatcacactttttaattattgatcttatttaaatgatatgattttatagttttatatgtattataaaaaaaaaaaaaaaacaaacaaacaaaaatttgaatacctataatttatggtagtatgttttatttctcaaacaataaggccggcaaaacggcaatcgttaacttctttgatatatatttttttgcacttattttattaatcgtgttgattttttaataatttcagtgtaacataatttccatacaacgtttttagcggaaatagatatataaatatgaatttcttagatatattgttaaaatatttgaatattgagagtctcattctacgtacttaagccaagaacattataaactcgtagaatacataaagtttgagtttttttttttctttttcttttgaaatggaaaaaacttttcggagttgagtaaacagtcaacatatacaacaataaatattgttaacgaatagcctgtatatgaactgagtgatattaattgttttttaaaatgaattaatgtaagttgattgttttttaattcgctatgtatacatgatgttattattgtagtttttcattgtatatagtatattcataattaaataatttcattacaatatcaccaactcttatggtaggttattcaatatataattatatatatgatacacactattatttttaaaaggaataaaaaattattatatatatatactaattgaaagaaatcaaacatttaattaacttctgatgacttggggctttagattaaatacgcttaaagaaagtttgtaaacaattaatacgcttaaaggcaactagcttgtacctaactcgtctgcttaataaatttggacaagttttttagtaggtatataaatattggttgtattattcaacaaatattgcaaaaaaatacaaatagaggtgtcacttttgtttagtttttttattgtggggtattttcagtttttaaaaattatacaattttttattgacaaatgtataatatagagagcagtcatcagttttaggattttttttttttaatggttctataaataggattcgaataatttatataggcgcctattttttttttttgttaattagattttttttcttctaaatttcgatatgtaataaattatgcctccaaatttgtaggcctttaaaaatccactcttaattattgagatggttggatttaaggactgttcattcatgttcaattatataaacgcggtgattattcatatactaaatcatgtcccaaaactttaatatctaccaaattgtgccctcgaattttgacatgtacccagagctagtcctaaaatttagtgggctatagagaaaaaaatatttttagacccttatttttaaaaaaaaaaatacagtatttttaaaaaataaaaaattataactttttttttaaaaaaaaaatttgggccctaagtacaggcttagcctacgtatacctaagttggaccatcatataatatcaaatcatgttcataaactttcatcaacatatgtgtccgttaataaaaaatttcaatattaaaattcagagaaaaaaatgcataattagtttatacatggaactaactatttttaattatgtttaacacacaataaattactcaaaaatttcaaaaaaaaaaaaaa

SEQ ID NO: 39284 - DNA, 2889 bp, Cannabis sativa
ataagaactataatttcacaaatataattttggttaattaaattcctaccatctaaaaaatttgataacaaaattccaaacataactttaatgattgggaattgtgacactcaaaattgcatgaaatattacacacaataataatgtagtcccatatataaatatttatggtaaaaaaacgtgtacaaattattataaattaaatcttccatgacaaaaatacctaataaataatattttgcagtagatatattatacctatatttatttataaatgtaagaacaattaaatattgtattagctatattgaacaaaaattctttcatacctagacaaccggaacaactcctgcgattttttctgggatgttgaagaatcaccgatcgaagaagctcaagaagatgaactggctctggattaccatcaatttcgatttgtaaagatttcttgtacttttgtggtgccatgacattgtaacgaataaattccttaattgacacttttaaatcttcacatttctcttcactacaagattccatcaaaattttgagtatcgaaaatggtatttgattctccaacatgaacaaatcttgttgagcaagagctatttggtcagttttaatcttcaaaacccttaactcatcattgttgtaactatttatgagttgaagcattgaacacccatcaaaaaatagcatccaacaaagagtgtcatcatcgtaacacttgacataattttcatcgaaacatttctttagttcctcgaatttcttctcgattttgttgtacaaaacctcggtttttgaaccactgcttctgatgaatttcgcggccaatgcaagcttgtattgagtttggtgttgtagatgtggcttttggtgatgaattgggcctattgaaatccaccttggctcgaaatacttctctaaatgtttgttttttcggagaattgttggaaccctttgaatcttagggttaaccactttcgattcttgatgatcaagatgttgacacgaaataatttcatcatctttgtcttccaacttttcgagtaatttcttgtagagtggagcaatgttgtgattggacatgagattagttgcaatgaaatttggatcatcaacataatcatccattttttcattcatggaaattgaatgttcatggcttttactcatcttgatgtgtttttctctctatttttgatgattttagtttattaattaattcttagtacatggttatacatattaatattgctaaacatgaataattaaaggggaaagatgaagtttagtgaaggaagattagtatctaataattaacgtaaggaactaaagtagagacattataattattccttaattgtttcttttgactaagtagaacaaactttacaagaacggcataaatgtatgcattaattaataatttatgattggaaagaatgctttattacattaaaatttgtatgctatttgtctcaatatataaatttaatattaattaatgaattattatgcattgatgacatatttgattagatgcttaattattacatatatagacaaaattttaaattcaacaatatattttaaataaaaagaattttttagagccaaaaactttaagagcatgatttagtacatgttaaaatttagagaataaaataatataatccaatattattatatagaaacatcaatcactttgaaaagtatctcaaatataaagtggaaattataattattaataattaaagcagatcgagttgtaatcactattggagaagcaacgttcatgaacacgtcaaccataaaaaatataggccatgcatgcatatatacgtacacaaacaattataatatatatatttatagaagtaaaaaaaatatataccttgcattattatataatattcccttttctttaaaaataaaaataaaaatgaaataattaatgaaccttgattatgttctggttacgtttaagtaaaatctaataaagtaaaaatacatttgatgaaggggagactatattaaaaataaaattatattacattattaaacacttttattttttgtccttacaaaaataacaacaccaatacatgaactgatcaacaataacaggtatttcactgtgccaattgatcagattaatgaagtataatctcatggaaaataaataaataaaaaaataataaaaaaaatgccattgaagtaattaataagttattattggttgaggatgtaggctatatatatcgactgttgtggaagatgttgagaatggcttcaacagactgttcatacatacaaaagcaaccagatttgtgcttaggatcactcttaataataataaattcctatataaaattttaaaaaattaacattattaattttttacatgcaaaaaagtctccaagatttgtaataaaaatttcattttatatatgatgaaaatgaaaaaaaaaacaatatatgtatagttatatattttccaaaatagtaattatacaataacttccaaatacaatataaatattatggtacttaattttatagtaagcaattatacattataaaaaattttacttttgttgtcactaaaagtaaaaaaattgtaactaactataaattattactccttctataactaaaaagtctgtgactaaaagtattatatattcacaaaaattataaatatttgttgtgactaaatgtatttttagtcacaatacatcttgtaattaaaagtctaaaattaaattacaactttatgttttagtcacaaataactttttgttatgactaaaagtcatatttagtcgggataattacataagacactaaaaaaattacacttttacatttaaagaatttttt

SEQ ID NO: 39285 - DNA, 1319 bp, Cannabis sativa
  modified_base (27)..(31): a, c, t, g, unknown or other
aaaatagattacattgaaatggagttnnnnntagggcataaaacctaacatcaacaacaaggaagagttgagagaaaacataggcctgtaactgaaatggctttaactttgttagctcaagccaaaatgcccttaagcttttggtgggactcttgtgtttctgcagtgtaccttattaataggttgcctactgttgttaataacttcatttctccatttcaaagtttgtttggccttaaaccagattacacctttctaaagacattcgggtgtgcttgttttcccttttttaggccctacaatcaacataaatttcaatttaagacatctaaatgtgtctttcttgggtatagtccctttcataaaggctataggtgctttcacccttcgggaagaatttatattgctcgaagtgtcaacttcaatgagcatgaattcccttattctgatttgttttccaacatacctcagtccacctaccacagaaatctcatagcacctgccatcataattccacatacatcttctatggatactcactctcacattcaatttggttctctcaatcctctgtctgaaccctcacataataccccagaagtctctccctctcatgatatttcttctgccacaaacacttctgcagatgactctacatctgcttctcataaccttgatcctgcctcggttcccattgagaaaacagatctgccaacatccattatttctcccattccaccaccattaccacatggtcaccccatgcaaaccagatcaaagtctggtatatataaaccaaaaatattccttgtcactgcctcccaaaatcagatttatgatgttccaaaaactgtcaaacaagcattgagcttacctcattagaagaaagctatggatcatgaaaatttgtctcaaaaaaggaaacaaacatacatattagttcctcgaactgctgacatgaatgtgctctctaataaatggattttcagggtgaaatataataaggatggctctcttgacaagttcaaagctcgattggtagtaagaggttttcaacaaacacctagtttggattttcataacacctttagccctgttattaaagcaactactatacgaattatattctccttagctgttacatatgattgggacattcaacaaatagatgtcaacaatgcgtttctcaatggggagttaaaagaaattgtatatatgcaacagccccaaggatatgaggacataaccaaaccagattatgtttgtcaacttaccaaatccctttatggtctcaaacaagcaccaagggcttggtttga

SEQ ID NO: 39286 - DNA, 2177 bp, Cannabis sativa
aaaaaaaaaaaaagacttcactcacctgcgaaccctgagatagaaatgagcaagagaaaacaacaaataaaagataaacgctccatactctgtctctgttttctacaaagaaaccagagcaagagagtaatggaagtagaggagtaaagatgtacggacgagttaaagagcgtgagcgaaagagggtgtgataagaatgtgttaaatggtagagaagaagggtatttatggaaagagatgagtgaaaatgagtcgatcgagggacctgttgtagtgttcagtagaagtgggacccgctttgtcagctaattaccaagagtaaatggcttaaagccgctgaacggaccacgtggccccactaacctcacgcattacgatgcccccacaaactcgaccgttttttgtcacattatctcaacacggtactattctataatcgggtacaccaacttaaatgcaccttatgcctcgatttgcgccacgtgtaccataattagctggaagtcaacacagagtcttcatcgtgggctggtgagcggcccattcatgtcgacgctcgggttttgtacttgtggggtgcttgtgaacgttggatacagtaatgagtgtctcagtttgagatgcttaataaaaaagtaaaaaaaaaaatgagccgagtaatgtgatgatgtcggggaggataaataggtaatcaagtgaaaaaagaaaaacaataattatttactatatataattaagatgcgatttgtagtcttatcttatatggggtacaaagttcaacatcattgtttttggagctgatgaccgtttatatgttcttagatatacacaacacaaactcaacacacacagtttcaaaaaaaaaaaaaaaactcaacacacacatgcaaagcaatgctcataaactagatgttaaaccagaaaagaattgaacataaatttggcaaaaacaatgcagaaaaaaagagaaaaataaaggaaaatctcaatgtgagtccaattccagctcttccctaaaaaggttctccactatgaaatgtagtttacaaacatcaacattgagttcatcaattagagctacacacagagagatataacctctcaaacctccatgatcgagcaattagaacaccatgaatgccatggttcttcacttgtaagagtctccaacttttggctctctctctcaactttcttctctgatttttcactctcttatgaactctctaactcttacaaattacaattcaattggtgtttaaataggttagaaaatagctcacaaaaccgagcctctaatcacttggacaaagacaactaacataacaacttttaactaactccttaactaactttccaagagtagtaagtttaaaccaagattggttttctatgaattacaaccacaatctccaccttaattcataggaaactagtgaaacaaaagatttagggaagtgaacctgaaaactacacaggtctagtttgagcaagtccatgaaatacctgaacttgctcactggcagcaccttagttcctgcatcagtaggattctcatctgaggaaactttctccaattcaatctctctaggttctatctcgtccctgatccaaaacattctaatgtcaatatgtttggatctcgtaaacaggatttttgctcaagtgaattgctgattgactatctgaaaacactaagacttttcctttcaacatgttgatttcttgcaaaatgccattgatccatgttgcttccttgaaggcctccgtgattgccatgaactcagcttcagtagtggacaaagcaactacatgttgcatctgtgatttccagtttatgcagcatgaatttaactggaaacagtagctagtaatcgatttcctggtgtctttgttggatgcataatcagcatcaacaaagccttctaacttcagtgtgttgcccgtcttctcaaatttcaaaccatagtttgaggttgtctttagataccttaaaagccatttcaaaccagtccaatgttcttcatcaccaagattggatatacctgctcaaggtgctgacagcatatgcaatgtcacgccttatgcttatcattgcatacatgacactcccaatggctttggcataaggaatttcttccatcattttcttagatttttcatcttttggggattgc

SEQ ID NO: 39287 - DNA, 3917 bp, Cannabis sativa
  modified_base (2700)..(2722): a, c, t, g, unknown or other
ttttgttgttattttgatgttattcagatattattttcatgttacttttatgtagttttcttattgtttttgtgttgtttctatgaaaaattgtaaaaatataaaaaaaaaaatgcttcaaacataaaaatgtaattttttctaaaaaaaaaatagtgtcttatgtaattatttcaaaaataaatgtgatatttttttgacatgaatgtgatattaattaaataagaaatttttaaataatatactgtttaattttatataaaagtctacatttataagggggcacgataatttttataaatttacgttttcacattttaattaactataatacgggcaggtaagttacgttttcttatataatgtgagaatatgtgatacagagttgacccaaagtgaatagttgattgtgataagagtgtgtgattgtgagatgtcaattgtgtattaatttttttttaactaattttatatttattttggccaaacattttctcattccatactattttttttttcttcttattattatatttaatagaatctcaattaattagtacatcaatatactaattaaaatattaactttcattttaaaaaataaatcatcaaaatataaattttataagctaaaaaaataattttataggtccaattgatcatattattttttgtatttgaaatattactagggccgactctaggcataagcgggttaggctcctacttaaggcccacacttttcgtagacccaaagtaaaaaatgaaaaatttgattaaacttttatttaagtaaaattaagtgtatttgtaaacaacaaatatccatagtttatatagttagggtgtatgacacattacataatggtgtaagttcgagttttataacatttcttatatatacatatatacttaaagattttgtcctttttttgttggtttgtaagttattttaggttggcgcaaatgagattaatgtcatgtggtttttgagttgtttgttggttgtttcatattgaaatgttctaatatcagggttgatgttgtgtcgtttttatattgtttacatattttaaattttgatattggagttgttattcagttgtttgttagttgttcaactaacatatctttatgtattaaaagtgattatgtaacgtcaattcttgatttaatagatttttttatttctatttattttttaaatttatatctgttaactttgacgatactaatagaactgttaattaatattgttttattatttatattaaaatgaaattgttatggtattatttatttgttgatattaagttgtttgaccaagagaaaaataagtatatgtttagctttttatggatacataagttgacgtaagtgttgatgctcaattaattttcatgttaaaatagaattgttatcgtgttgtttattcgttgctattacgttattttggtatagtattttttgaaatttttgtcttataaatttatttttgtttgcataatatgatgaactttaatttatttatgttatagttgagttgttttctagttatttttgtgttcttatttagttattttgcgttgagaaaagaagccttgcacgttgaaacccatttcgtccgaatttaccacgtggcaaccactgttgcgttctcacgctatagcttgtgagcgtcaggcaactctgaaggctttgtccgcactcgcgtgtgagtctcactcgcctccatagccacatgtgtgtcacacttctccttgcgcatttgatggaatttttctacagtatttttataaataataaattttaaaaatagtatatttgaaattaataaacaatataaatgtttatttttgcttatagtagtataaatatttatttaatattaactcaaaataaaaaaaaaaccccatgttttattgtgcctcttgagttttttttagcttgttacaaatagttcttgaactattcacaatattgtaaattagtccttctatcttgtcagtaataaataaaatgatgacatattgtttaatcaattaccataatagtttcacatgtataatttaacattaaaagataaaaaattattaaactaaaattaattaatggttaagaaaattacgtaaaattaaattaaaaaatttatttttttaaaataaattacacatgatgtgttgacatggtactgacgtggtaactgtctaagcatctatgttatcattttgtttgttaaatgttacaaaatttgatagaatgaccaatttacaatattgtgaatagttcagggatcatttgtaacagactgaaaagttcaaggattacaataattcatagggtaaaaatcctaaataaccttaaaattaatttataaataaaaaacaaaaatataatgacgtggacaaaaatataagaaggcacaagagaagaaagaacattgagaggacgtatcatctactaagggatatagtagaaagaggttatgtgacggtcttgaatattgcatcagaacataacttggtagatccattcacaaagacgctaccaacaaaatattttatgggtcatataactaatgttaacgcagatttttgttaaccaaatttgagcctcacaatattaatttcacatagaaaaaattaaagctagcaaaatatagaatatgaagacatagtttttatgtggttttgcagttannnnnnnnnnnnnnnnnnnnnnnaatcttatttagatttctgagtatttttttcagggcctctttcatatgagttttttcgtcccctctcttgatcttgcctgccactatttataattacatagtgggcagtaatttacaaaagttgacaataatcgttacaacaattattctctcaaatcatgggatttgattacaaatcaagctaagtaaatgaggcttctatcaatcacacagctatgagtatcctgcttttattgggccgagatgaacgcgtaattaaagatatacggtaaaccttatcccataaggatgcctcgctgagaatagagccaagttaactttgatggcgagcagttgcttgtcatctgacttcccaagattaatattgtttcaactctaataactatattttctggtgtcgagatgatcttccacccatgcatgccttcttctagcgagataaacgcctcgccgtctgttatcttgactcgccaaactatttacactcagtttgtatatcgtgtcatatacgctaagtgtttttagtgttatcatttctcttccacgcagcgaggttgaggcctcgtcatgcacacttgcactcacatggtttctcgtcaatacataagttagatgtttgtacatttctgtctcgcagaaggctattcagccagccgagttgtaaacatactctgcgaattatgtttccaacgagttgttccatgccaagcgtactttcgtttgcgtgtttgagttcttcgttcttcccagcgcgacacgtgtcttgctctgatgtgcttaccgaatttcgagtataacaattgccccttaaaaagttcttttttaattaaaagagctttttaatgattacaaagggtatttccgtcatgttcctcttttttgaaaagacgcatatcttctgattttggcagttgtgcggtttcgaggtacatcagaattaaatgtccatcttttccactttcgctttaaatcatgtccataggatcaaatctttctctgatctaacgaagccactatcatgagtataaagtaagaaaaaaggtaccacctttgcaccactttctccatttcaaaaagtttgagaaaaacccttaaatttctttgccaaggatcaccattaaattcgtccgaagacttgcatgccatccttgtccttgaccttttttcctgtgagtttcctctgacttcatcctct

SEQ ID NO: 39288 - DNA, 1874 bp, Cannabis sativa
  modified_base (52)..(57): a, c, t, g, unknown or other
  modified_base (1839)..(1840): a, c, t, g, unknown or other
gtattttgtaaaattgtacaaataagaccctaaattaattttttgtcaaaannnnnnttaataataatccgatctaaagatattatgacaaatctggtcacattttttgtatttgttcgtgttagaaattgtcttaaagttagttatattgaaaaataaaattgttaaaaattgagttcagagtcttattttttactattttaaaaaatataagatctattttgctatttaacaaaaaaataaaattcaattaataatttttgtaaaagacagagaataattcgctttccattaattctcgttacttactaatgtttatagcttttgttttcccaaaattagttttttcgcaaaaagattttcattttttaaaaaaataaataaataattttttaacccaaattctcctcaaagtcattttttaatttgatttcaaaatgttagaccaactccaaacaggtgtaaaatttgtactcggccaaaaaaaaaaatgtgcacaacaaagtttgatttaattaatattttattattagtttgatcccaaaatctaataaggcctaagacgatcttttcatcagttgaaagatctttccaaaaaaaaaaaaaaatgcaaatgtaaataatatgtgttattaagagtggattgaatagcattctctcaggaagttgtgtagtcaatgaaatcatttataaaacttacctaattccaattattcccaaatttcttaggtgttgctgatcccatctaccaaaaattacttttcttcacttttgtttaatgtatattttataaattaattaatcagctatagtcttctagacgatttctagatggtaatagggtcagtttatatattttttatggtgaattgtattttttttgtgaacaatagttttggtaaattgtttaatttatcccacttttatagaaaacaatatacactatgttactttcaaaaaacaaatatataatattggatttttttttaacatattatattggattaaaatgatatattttgattttccaaagaaaaaaaaactatattttgagaaaattatgggattttccgtggaattgaagtaccatgtggaatttcaatattatgcatgaaattcaacaattttaacgtttgagacaaaaagaaaaggaaaaaagagggcgcgtgatataacgctccacctatgcaggctgagtggggagagtgcgctaagagcccgaattgacgaactcaaacacaagtcaagcttgtatctgtttttcacaatttttaatattattattattatttccccagaataatattattaaagctcctagattttcgtaaacacaacataaacactaatctgagaaagaccccatattgggttctggttttcttttcatcttctcttttactgaaccaaggaaaaaaaatataacagtaaagatagaagaagaagaagaagaagaccgataaatgtcttccaattcagttcgttatcgttctcactctctgattttcagtgtaatactgctatattttggtctctttggccattgtttttcttctggtgaacaggtttcgttcaacacctttactgtttccagcttcagttacccttcaaccactctcaggtcgtttgacttgcgttatataagaggttcggaagttattttgttacgactcttttgagaattcgattcaattaatttgatttctccattattattatttcagaggtttaaaagggtataatggttgatgggtattcgtcaaaatcattcttttctcttcatatttttgttttgaggaatcgtgtagattgttcttgtagaaactgattgtcgtttgnnaaaccttaatatatttttatcactctgtttgtgc

SEQ ID NO: 39289 - DNA, 2370 bp, Cannabis sativa
attctttaaactaaattgtatacacaaattttgttacaggtatcaactgatattgatattagtattgattcaactgagcaattttctttaacagaagaaatgaaaagaaaagctcaagaattaaggtaacatgtttcacttttttcttatagactactcctaatttttttatatgaaggtgtataacataattataaagtacaattacttataaatattattatgttgtataataatttctttgatgttattatgattagggatcaagcaagaaagaagaatgaagaagaaaaaagatttgaaagagaaagagagaaggtatatattatcaacaaacaagtttattttttctttgtaatcttttttttttttttagttttgatttgaagatttgattttttttttcttgttttttgattcagaagaggattagttatgggaaagaactcatggaagtgaaacgagttttggaagaaaacgaaagaaaacagttttgtttcaatctttcattttaattttttcatttctcttatttatgaaaatatttgttcttcatttgagtgaaataattagtaatttttttatgtcttagttacttggctttgaaacaatcagataaagaagaagaaaaaagagcaaaagagaaaattaaatggaaacttgaacaagataaggtgctaattataaaataataataataaagattctttggtttaattttttttctttatggcttttgtaattgattctatacaattttttatttatttcttttatttgataaaattatggttttagttggaaagaaggggtaaggttcaaatgccattaaagagccctgcaaaacaatctgtggtgcaacaaaaacaggtatattcattcactaatttaatcatttaatttaaaatataattacatgtaattttatttttgctttcattaaatggtttttagtttagtaattataatttttagaatatattatagttatttagtacattacaaagattcatgtacctaaaacatgaaaataaattattctaaagcctatttaatatgtacttaaaagtaattattttgaaacctattttcaccaataatttagaatgtcacaaacatttacataaagtaagacactcctattattatttgagagcattattaaaaaattgtctttaagtgaacaaaataataataaaaaaaaagtgttaaaaccaaaattgatgaaattaattatgatatattctttgagtttcagatttcacatgatcccattatgtctgtttcaaaggttgagctcatgagtgaatgtttaaggtctctcaaacgcaatcacatggtataaataaattatatttttcacaacatttttcacattgttatacaaaacacaatagtgttataattgacttttttttttgggtctataggataatgaagccaaagtaagaagagctttccaaactttgttaacatatgttggaaatgttgcaagggatcccaaccaagaaaaattcaggaaaataagaatgagtaatcctaaattccaggtaaataaatttatgaaattataataaaatatgttaattaaattattattgactatatgtattgatttatttgagcaggagagaattgggggtatgaaagaagttgttgagtttcttgagctttgtgggtttgagagaagagaagagtttttgtatcttggtagtgaaaaagtgaatatggcattgttaaactcagctggctctctattgaaatctgccattaccaatcctttctttggtgtctttacaaggccaaaagaggagatatgattaattaagtgaattgaacactcaaagattgatgtgtaaaagtagctagttgatatggattgatttgaacatgcataaggaatgtttattaatagttattataagtttatgaaattggcatttaatattaacatttgatctaaaatgactattttattatgcatagtacatatatatatactacatgtgttaatggtttaaaattaatcgcttagtaattttttttgaaatagaatcatgtatatcaaatgtcaattggattattctctatacacaaataatataatctaatttattcctaaaataaccctaaacacagcaagattaaatcagttttccaaggccaaattagacctttcaccccagtcaaacctcctatttacaagagtagagtattggaggttatatcaaaaacctatgcggctcaacagcaccagccagccttgtcttagccaggtctttcttttaccctatttccctatttatgcttcatttgatttcaggccggtgatgttatatcattcatgtattgcctacattgtttgattat

SEQ ID NO: 39290 - DNA, 3132 bp, Cannabis sativa
ttaccaaaagagttacaagacaagatagttgttggtgacgatagtgtgtgagattgttgcacgactttattgacaaaagaagattctgaatctacctcacttgaaagtgaaaaagagttagatgaaattaccttgcaatatatgcaacaaaaaattttgcaaagaagaaaaaagaggcaaaagagcttgaaaaagctaaacaagactttcaaaagcattcatcttcgcccaaccaagaatttttgctaatgacaatcaaagagacaaaagcagcagtgaaaatgaaatgacgcaagcaaaatatgatatattggctcatctaaagcgtatccctactctttaagcgtttatgatgcactgcaaatgtagaaatgcacttgttgttgcattgactagtcctaaattttatacggacaaaatagagccagtgaaacctacatcactcgagatccataccttttgtatggcatgcataacctttgatgataagaaccgtcagttggggactgccttgcataattaacctctttacgtgatgggtatggttgctcatatttgagtgcgccgcatcatgttggattgtggatcggctgtgaatgtactccccttaaagaccttgagagatgttggtttacgcccacatcaattatctctgtcatcattgacaattcaagattttaaccaagttagagaaaaagtaaagggatgtatcacactaaattgaaataggcaaattaaattctgaagccttatttcatgtcatcgattcagatacatcctacaatgtgttgttagggcagctgtggcttcatgaatatggggtcgttgcttcaacacttcaccaatgctttaagctttgtaaagaaggaaaagtcaaaagtgtcaatgcatacccaaatccattttatgggaaacaaatgaattatgctgatgctaaattttacaagtcagctaacgtcaccattctaaaagggaaatctgaggagggcaaatgtcatgaaagctcaacctcataatactctctgcaaattaagcaaatatcccttataaaatctcctcagcctaaagaggaggacttgaaggtatctaaccaaaaatgaaccttcaagtacatccctaaaagtcaacgaggagtagggcaaaaagctttgacaccgatcgaagatttgatgacaacatatataacaagctttactttaccgctaaggaaaatcgatcagtcactacccaagggtaaaatgcaaatttcaattttctttggtgtttatagtaagaaaaataaaagggttgttactcttaataaaaaaaatcttcaacttctataactctaaaagccttcaaaacagagaagaaaaagtttcatttcaagaagcagaaagaagtcataatccatcaaaatattgattgtttaaaagccttttttgaaccagatgagttaacagaagaggaataaaaaatgtttcgcaatgacattgtacccacaccttccccgcaggtgtttcacaatgacaatgtacccacaccttccctgcaggtgtcgatatttgatagacttaaagcaagcacatcaatcccatgagtgtcagcatttgaaagacttcttttccaaagtgctccacaagcaaagggaactaaaagcataagaaatgggtgccaaaacaaaagaaacccttgagagttactattctttaggggtgtgaaacacaagatgaagaaaactttgctcaagtcaattacctctcttttgaagaaagtttgaccaaagaagatgaagactcaagctcaaacacttcaaaagattacatagacattgtccaacctgcacctcaagaattcgaagaaggaggacaagcaacaatggattatttaatagggatcaaccttgggaccaaggacaatccaaagcctgtgtttgtcaatactttattaaatgaaaaagagttaccacaatataaacaagtccttcatgaaaacaacgatgtatttgcttgggggtatcaagacatgttgagattggatccaaaggttgccgtacacaggttggcagtatcgaaagatgctattgctagtttatttgggaagttaagtatcccttttggctcacaaacattgtcattgtgatgaagaaaaatgggcaactctaaatatgcatggattactgagatcttaatcgatcttgcccaaaagacaaattcccactccccatcactgagttgttggtagaagctaccactggtttcgaggccttttcattgatggatgggctttttgggtacaactaaatcaaaatggcacccgaggacgaagagctcactgctttttgaacaccaaaaggcatattttgttatacagttatgctatttggcctcaaaaatgcaggggcaacctaccaaagagcaatggctacaatttttaaagacatgatgcacaatactgtcgaatgttatgtcgacaatttagttgtcaaaataaaagaaaggataaatcatcttgatgatttcaaatgagtctttgataggctcaggcaacacaatctcaagatgaatcctttaaaatgtgcatttagggaagttccttaggtttatcatcagacatcaaagaactaaaatcgaccctacaaaaataaaagcaattttggaaatgccttccccacgtaacttacatcaactacgtggactacaaggaagacttgcatatattcgaaggttcatctcaaacctgtccgttagatgttaacctttttcaagattgatgcagaaaaatgtcccattcataatgcttttgaaagtataaagaagtatctgttacacctaccggtgttgagagctccaatcttaggaaagtcattgatattatatatcacgtcacttgattgctccttgagagccttgctagtgcagaacaatgaggatggaaaagaagttgatctttactacctaagtagaactttagtaatatggaaagaaatcatgtatagcaatttgtaacaccctattagtttaggcgtgttatcatgattttaacttaaatgtgcagctcgttgctaatcaacgagtttattgaaaattgtgaataattaaaaatttatttaattacttaaaaataccaaataattataacatatatgttggg

SEQ ID NO: 39291 - DNA, 1334 bp, Cannabis sativa
ctcaaaacgccattgtttttcctatgccgtgatattccgtatactttcttctttgccaataaaatcttgaacaaaatagtgcgtgggcctagttacttagctttcatcatccaatatagaaatcgatttcagttaaagagaataattaaaagatcgaacaaaagaatatcacatattcaagggacaaatctagaagctacttacacacatccattacagcatatacgtatgaaaataatgaatatatcaagtgagaagtgatgatgttgaagtaaagagtaatttcaggaagtagtgtacagtacttgtcatgtttttagattggattgtttctttttgcgagtgcgaggtactggaccatactttatatgctatacaaccacatatggtacattatggtcacaagaccacgaatatatagattcgagtatatatattagaggcagtattcacacttggtcgatagtatatatgaggcagttatccacttttagtgctgtacacttggctaaacttcgatctaacattatttcccgaactagtcttattacctatagagaacaatacactaaccaaaatgggatcagacaataacttgctaaaacaacatatcatcactcgattatatttataggtccaaacacgacaaaaaattttccctttctacagtatgtatatatatatatatatataatatgtgccttggcaatatacatatttaatttcttattattatcttaatttgtcatgtaaatatttgtaatggattgagaatttattaacattttaatttgatgtagaagtttgatgagttgacttctgacttatgaatacaaggcaggcttacgtgttagcttggtgtgaataattctcgacatgataccaataattgtgaaaggattagttacaagtgtttcgacataatggtagtgatttggatttcatggactttacttttgtcatttgtgtgactcatgatcattaaccacttttcacaaaaaagtattcatcacaaacgtgtttttcaaaatttatctgaaacgacattcaataggtattacaaattagagagaggaagaagatgaaactttattgatattgaattcatgtgaatggacacttatatataactaagcctaatcacccattcaagtatacccataatagaaacaatcgactaactaattatacaaaactgaacttaaattaatagccccttttgacacccatcttatatataatcagggtcagccttgaaaatatatagaacgaattaaattttggaccctaaaaaatatataaaaaaaaatagaagaaattacacttagtatggg

SEQ ID NO: 39292 - DNA, 1830 bp, Cannabis sativa
aatgctttttcacattcctctgtccactggaattttttgtttcctctaagaattttgaagaagggtacacacttgtctgtatacttggacacaaatttactttgtgcaataatgcgtcctatcaggctttgtatttccttgattgttgtgcgaaacttcatgtccaaaagggcttggatcttgtctagctttgtttctattcacctagcattgactatgaagcgaaggaatttgcctaagcctactccaaatgaacactagaggggttgagcttcatgttgtatttgtggaggactcgaatgcatttgtctaggtcttccacatgccccagcctttctggacttgaccagcatgtcatctacgtacacctccatgtttcaacccataagttctttgaacattttgttcacaagccttagatatgtggcccctgtatttttcagtccgaaaggaatgactttgtagcagtacaggcctaagtttatcatgaggcctgtatgcatcttatctagcggatgcatcttaatctagttataacctgaacactcatccatgaaacataaaatttcatggcccactctggcatccactagctggtcaaagttgatagaatgcttcttgttatgaagtcttgggctcgtagcctctcaacttcatctctaatcgtttaggtgtgttctttgtccaaaaacctcctcttatgtttcacatgtcgggagtttggatcaattttgaaggcatgggtcatcacggagggtcaattcttaccatgtctccatgttccatgcaacgaggtccaagtttacccttagaaattttattagtactgatttatttccagtgctaaacccttcctagataattttcagtcttctagctggagaagtgggatcgacctccacttcttgagctcttctataggtccaaagctgtctataggatacccaaagcgaggatcaatgtctacatccccaccttgagctggacttcattgccctttgttgggcttttctttagatctctttgtgggcatcttctctttcttaactttagacagggccaagttgtaacaatgttgggcagactgttggtctcccctcatacatcctatcccatgccttgttgggaactccagacagacgtgatagatgcatgtcaccacttccaggtcatatagggctggttgacctatcattgtgttaaaatcctagggaacgtccattacgacgaactggaccatcagagttctggtagttggattttctccaacagtgagggccaatctaatgtaccccatgggtgcaatgccttggccaaagaagccatacatcacttgggtgcacagtgccaaatcagttacttggagccccatctttttgtatgttaatttgaaaagaatgttgaaggaggctccattgtccactaagcatcttgccatagtcatattcctaatttgtgcagtaaagaccagagggtcgttgtgcgggatactgacttgagcaacatctccttctgggaaagagatagtgggctcttaaagctttggatgcttagagcccctttcttggacaaccaggatgacgtttttgggctcgtgacggagtgtgtgagcatagccctctctagctttgctggtcattcttgcaatatgggttcgtagataatgactaagtgacctgccaatgaaggtggtatatggtctccattttgggcaccttgtgcctgaatctggtcgttcttcacataacgacaaagatgggggtcgttcttccttataaggaattcaatctccctctttaatttttcttttcattcgtatattttgaaatt

SEQ ID NO: 39293 - DNA, 1757 bp, Cannabis sativa
ttaatattaaatttcacctaatttaatttaaattatctaatatttacttatattaatatcgatatactaatatgttagacattttaaaatttatctattttcatatggatgtttttggtaaattttttacactcttacatttaattatatatatatttttacggtgttaacatgaaaaatataagaaaacaacataaaaataatagaaaaaaaaacatccaaatacaatataaaataatataccaataacaaaaaaccaacaacaaaacaataacaaaatagcaagaatataacataaaaacaacatgaaaacatcaaaaaaattatatttttatgtaaataaaattttaaaatctataaaaaatatttaaaattctgtacaactgtatttttgtaacttttgtgtattttttaaataattcctattttaaataatcatagatttcctaattgattaaaagattctttttattattattattttaaaagattagctatgtggggttctaagaagtgatatttttctctaagaaaaagaactagaaagctattgcattataatatcttaaacctttttagcaacccaaaagaactttttgctaattttgtctatgtagaatttctttattcaatacacaaagctctctaaaattgacttaacaaaagatgagattggtttttaaactcaataagtaatggtgtggccaactagtgctacctatactcaaaatatcaacaatttatgctcctcactaagtcctcacatatccactatacatataaaacatatatatatatatatatagataaatgtggtgtataacatgtgtttatatagcaaagtcaaccccccaaaaacttgaatggatggtaggaaattattgaagttaagaagttcaactacaatacaaagcaaagcacttaaattctagccaattttgcatggtgaataaatgacatttatatgcattatattctacattggatcaacttgctaccatagcatatcacacacttatttcctttcaaactggtctaaattcttcattcttcatcattttgcttcttcgaataattttcattttcgctttccctttctttcgtgtacttccactttcgcgaaagtcaaaacacaaatttcccaatcacaaaaagactttgaacacttgcttagagcaaagaacaaaaaacagaacaagaagaagaagaaaacattcataacagttcataacttagtagtgtcttaaaatcagttatgaatctattcacatattcatcagtatacaaggatgtcatattcttacaaatagttctctttttttttggatttttggaatataattaattagctaattgttttatctatatgtttgtgtagagtactaaacattagttacatgagaattattctaggactcatctagttgaagaaggatcctgtctcttatttttctgaattgatgttgacatgtcgcgtagtctatctgttatgtctgtaaacgatggtcgagcttcaggatcagcagaccagcattcttccattaactttctccattctgaatcgcaacgtttaggaatagtaggccgaagtgtgttatttacaattcccccttcatggaaagttaacaagatcagcaaatgttcataccagaattttcatataaatcagagtagtatttcaaattcatgaactagatagatacttgtcattgacatagattttagataagaaaataagaaaatgagttcactaactt

SEQ ID NO: 39294 - DNA, 2431 bp, Cannabis sativa
  modified_base (1237)..(1237): a, c, t, g, unknown or other
ttaatatttttttttaaatttttaaataaaataattttttttttcttaatcaatattttaaattctaaccaatgaccttgaatccgacttctgacccggacttaaataaaattaaaaaataaattttacggaacataaattaaaaaataaaagaggttatagaaaacatttttattttttaagaactaaaaattttacttttattttataattaaaaaatttaaaaatcaaactattaccaaaaaccacttaaatgttttagaaaattaagacgaaaagaattttaccagctataaaatcatcgatatggtagtccggctcaatttttccatgagccattacaccaacctgatccaaatacatgcataattaatactatgaatcaaataacaatttctaaaaaatttacactaaagttatatatacatcataccacaaaaacgatgtctctatcactttcaaacttatggacatagtctttcatttttatcaacttttctgagctagaagagaatcctgccattcaaacacacacacacacatatattatttacatgatatattgtaaatatatattaaagaaaaacaagacttaaaaaactcaccgattttatgagaattaacaggtaaatactgagttacaggattttttattacacgcagaagtttagtgtgagttttttcatcctttatactcagcttttgtaacaattgtgctgcaaattaagtaaatgaagtaaatagtgaatacacaaaaacaaagaaattaactataaaatattataagcatgttattataagtatgatatagctagtgtgagagagtagtagttacttacacatgagaccataaaaacgtttggatgttcttggcaaatgagttttgggtttcacttcaattagaacccctttctcagttcttatgtacaatccttttaatcttcctgctttgttaagtggactatctaagatggccaaaagagcctacacattttggaaagtacaataatcaaataataatctctcaattaattagtgcaatcaagtcatcatcaactcacactattagctttcaattatgattttgtcctgttattgtacttttacggattgtaattcgtgatgtacgacagccgttagatgagggagttatttgatctgacagctaagattgatttggagtagttaaagttaaaaagtagaaatgtatcctgacactcatttaatgtaccctganacccatctaatgtaccacggaatacattccgtgaaagtacgtcacggacaaaaatatatccctatatatatatttatatgaaagaagacaaacctgatggacaatatcaggtcggtaatctccttttatttttcccattttgcttaaaaaaactgagtgatctgagtttaaaagctgataagtctgttgtgaaaagataaaaaaaatcaaaatatgttaaaaagagaatatacaacatatgctaaaaatatcatcttttacaatctctttttatggctgaggtaaaagtttgacatatatcaaggttactttttgatggtgatcaaaaaaggtgaaaaatgagagatattaagtgtttgcatgaacacaccaactgagattacacatatatagtaaaaagatctaaagtactggttataatgtatgtatatgcagtaaaatccaaataattaagtttacaatattaaggataattagggagacctttccaactttggcaacttccaaagaagctctctcaaggacaaagataacaccaggttgtgatttgaggcttgtttgttgagattgtgcaagtggaattggaattccataatcaatctcaaatgacccattctttccttcttcttcttctttgtcatgtctctcacattttttcatcttatccttgatagcgtaaggacgtaccattgtaactaataattctttctctgtttggctttgttaaacagaaaagctactaacaccataataaaaaagcaataaaatcagatcaaccatctttaccagtaatctctaatctcttcataaaaatatataatgtactcatcattaattattcaattacaataaaaatacacaaattagttttagaacaaactcctccaaattacattgacagtcatagtaattgtatccatacaagaaattcttacattcataatttcacaaattaaaatccagaaaaaatggattgaaaatacctgttcaatagctgatcgcggatcgtagagaagaggattcacacgcttgggaagagagaagattggtgtagccgacgatgacgaaattaaccgcagaaaaaagaaacatagggttttcttatttatttaatttctagtgcacggttgttataaaaatcagcaaaaagttaatattaatttatgaatttttatatgtaaaaatatgattttt

SEQ ID NO: 39295 - DNA, 1562 bp, Cannabis sativa
  modified_base (1530)..(1530): a, c, t, g, unknown or other
tattttgtcgttgatcgcattcttaggagtaagaatatttttcttgtgaatttcttcatgtaatcttgaatgattgcaattaataaaattgataaattcttcaaaaaaaaaaaataaataaataaaataatgcatcataaacgacaaatagcaaattgttaattttgtattcttaatacacttaaacaatcatttcatctgtgattgttgccacttttaataaaattattattttattcacaaaggagccactacaataagctctcaatatttgatttatttccttttaatatttgccaaaatcaataaaaaagaaagagaatattaaattttttacactaaaaaagtaattttgctttagaaaaattaaaaatttgtccatcactaatattatcattagttataatgtagtataatgattgtatgaaataaatctccgaaaaaaaattacatgaaattaactataaactttttatatgtcctaatcttcaagatttagggtgtacaactcctgcaaaagaacaaatgtatcaataataaaagtataatttaattaataaattttaaaatgaaaataattaccatattcagatttacgtcattatcttgatcatttatggtgattaatttagttgttgtgtcttaaaaaaaatgatcaaaataatagaacaaaattttgttaattaatgtatagacttacatagataaataaatatgcattgtttgtcaattgccaaccaattttgagtacatatcattatctccaaagtagtaggatggaagtctcgcttgatgtggactcaaatgtctaccaccagtgctgaatgaagtgatctcgttgtttatttctttgttttggctctaggtactgtaatgaaatcctaaaagttaacttgtcatttgaattttaaaatatttttggttagcctatctatgggtcaataattgtttacattgtcgtcctaaaaatctgtgtctatttgagcgtcaatttatatatctttccaactccaagagtgacaacccttcttcttttcaaatattttaatacctatgaggatttggagttgagacttttaactctaaagatttttcgatattatctttgttatgaattaaagcaaataatatgatttgaagtacacacacaaaaaatctagaattatatttattgtaaatttttatattattttgtttcgattaggcagaatttgtttcgatttattattcatcttggtaatattttgttattcgcttgaattgctaaagactaacaataagctagtttggagttgtgttaaatgtcaaattaattaaattttaaataatattttcatgaaactaaagttatagatttttatatatattttatttagatttaattttatctttatttataaataataattattatttatggcataatagagaaaaagaaataaaaagttaaaaaaaattgaactttttttttatttactagtgttttataaaaacacaatatttttgaaaacttttccgtgtgacagtatntttgtaaaagttaacccaaattacagtatttt

SEQ ID NO: 39296 - DNA, 2965 bp, Cannabis sativa
  modified_base (1984)..(1984): a, c, t, g, unknown or other
ctcatttgttttcagctcatctagctcattccaaagacttcttctctcttcctctttattaaaaccataaacaaaagtgacaagaaacttgtttcttttgtccatagtagtaacattcaaatgtattaattgactagaacacctcaaaatatccaccataaaactcaacgggttccaagccactgctatacgcccacccttatgccacgcattattcgccgtaaaacaccaattagaaaacattcgaacatataaagctccaaggcttggagccttcactcttgtctcgaggagaccaaccaaaccaacattattttttgcaataaattgcttaacttcatgttgcttgtgttgattgttgattccccggacattccaacttagaattttatccattgcaaagaggaggttctccccctcctcccgtgataacctcttctagcctttcttcatattcatgaacttcaaattcctggaggttttggactatatcattctgcaatacaccaaaaggatttgaggatgatggatcagcaggaattactctctctttaggcttccaaccatattcacaacctgtctatagccctcttcatcaactacattcttcatatcatcatttccttgcttttgtttgcccttaacaacccattcctgtttctttgtttccctccttctacactcctctgtggaatgccccattcctttgcaatgtttgcaaataatgggcttccattcatatttaaccatcacagatatatcttccccatattcattttcaaagtagatcaacccagggtactcttggtctagtgacacttctatgagaattcggggaaaaagaagcttatccctttcccttgtaacctcatccaccattattggctttcctaattgacctactatcttaaacaatgatttcttcccccaatacttgagctccaaatcctccaattgaatccaaatgggtattgttctaatatcttctttcttaagattaacattaggatcccaagccttcataatgacaggccttttgttaaagaagatatatccaccagctagaatctcatccctatctttaatactggtaaaacgaattagaaaaataccatatgaaatcatacctatcttgtccaccttgtccccccaaatccttcgtgcgaagccttccagaaccgacaatggtggattagccccaaggacatagcacactatagctgattgccaatacatcacctcctcttcaatatcatccatagtaatcttcaccttcttctccttcttcgactgaacaaactccttttctaaacttctcattactggttcagctctcagaatcggaggagtagtacgaactcccttcgagattgaattctggcattccctgtttgcagccaggaaataaccaaaatcagcagcaatctcatcttgtcttttaatcaatcgcaatgatgaatctggagataacggctgcaccagattcccccctgtttgatcattttcctcatccgaaaactccactggttcaactccaagaatttcttccattgatttggtcttcagaatatcagcagatgaattcggccctttctttttaggttttctattggagattttcgactttcccaccatcttggacctcgttttcgccattgcaccagttccaagagaactgcgaggaacgcagagagagagaaaatcttaattttccttctagatagttattcttttttttaaaaaaaaataagatatatgtgtatagtaaaaaaaattgaatttgaaagtattagaaaaatattgttttaaaaaataaaattcaaatacgacccatgtaacccattgataaaaggtggagggagatacgacgatgacaataatgactttgaatattataatgacaagatacggttataataataacaattttgaattaacgtagtcccaactacaacaatgatacaacaatttttttttttttttntttttttgaagaaagtaatcaaattatattaaacttcaagctctgctacgaaacaaggaagcaaatcagttgggacattccccaaactgaaattacattcaggatataaactagaagctttcgcaaaggaatcagctactaagtttgctgaacgcttaacaaaagagatagaaacatgttttaaagtgacaagcaaatttttgcaatctttaatctttgataaaaatttgaaataaattaattagtattttatctttttaaaatttatattgataaaatgtattagttggaacttggagagtaattgttgattgacatgtgtcattctaatgaataattaatagaatagtttccatgttttttttttttgaaagaagttaccaattgtttattttgcataattaggtatgtatgtcgcttttattacatttgaatatttattagcaataaattaaataaattgaatatttatgccacaatttttcttatattttagataagaaaagtaaattactcacaaaaatttaaataaataaaataaaataatattatatctaatagaatttgaaaagtaaaaaaataaataaaggatatttaggaaatgtttactaatacttttatttttaaatttttaatcacaaaaaagaaagtataatttgtatttttaaaattttgtttttttttaaaaaaatgtgttttatatccacttttattttttaattttaaaaacagaaaataaaagtgtatttaataactttcatttttatttttattttatgattttatttaagtcaggtctacgttcgggtctggggtcggggttatggtttggggccaaggccagagttcgggtctcaagatctaggttatggtcggaattcaaaatattagttaagaaaaaaaattatttattaagtgatttttttttttttttattttcaaaattttcaaaatttggattctcaattaaaaaattaaaaa

SEQ ID NO: 39297 - DNA, 2364 bp, Cannabis sativa
  modified_base (2269)..(2275): a, c, t, g, unknown or other
taagtcaaaacaagatgtgagtgacttggagtgtgttatggatcttttatttttgatattcatcatttagtgttctttacttaattgagattcttaattttgcaggtactgggtagttttaaagagcaattcaagctgctgagtgatgaggagatacaaaattgggcttcctatgaagttgagccttcccctacaaaagttggtgttagagggaaaggaaagaagttgaaggaaacagtatctagtgagcaaccaattgagaacaataaagggataggggatgttcatgtctctggtcgttgttccttagaatggttgggtagaatagtcccagttctcaacaacgcgtaaaaagaaatggtcaccaatgttggtttctctacattcttaagggaggatggcccttacatttatgcgaagatagttagttggctcatcgataacgtggatccaaccacttgtcggctggagatatttggaagaactattcaactatcggccaagctatttgaggatgtcatggcaatcagggatgggggtgaacctgtcgtaacagaaagtgactgtgacctgcatgagtttgagaaaattttgaaggacaatgactataagttttcactgactatgctggagaaggatttgaagcaaagcagggaaagggattacatgtttctgattaagtttcttctggttgtttgagaacaatcttgctgcccaagaatggtaccgaggtcaacactatctacatgcattctttaattgatacaaggtcaattaagaagaagaattgggccactgctgcctttcgatatctaatgagctctctacagcggtacaagactaaaaacacgaaaaatgtttctggttgcaccatatttttacaagtcagttttccccttattatgatggtattaattttattcgctcatgtactgtagtgcttatagatgtatgtatttttgttttgtggcagcttgtatacttgactcatgttgactggactgctagtcacgtggaccgcactgtgcctccaattgacttttggaacattaaacattgcaaattagtgtacaagtggattcgagaccacagtggtcacactagaggataggtacatttactacttcaattttctgatgcatttgaatttgaaggaggagatatgcttaataacttttttttgtgtactaagcatgtgaaattgactaacacctatgttgtagtacgaagttttgaaatctgatgtagttgggggaaaccaacaaatgaacaaatttcaaagttgtttgtgaattgaaagatgaggtcttctgcattgatgtaaaggtgaacaatgcaaaagagttgtaactgaagctagttttaggttaccttgggaagcataatataaatgaagtcgttgagatacctgagacgagcaaagttcagtgctctctttctttcaaagggagaccgaaaagaaggatgatttgggtgtggaccaaaaagatgatgatgatttgggggatgaatctaagttgtttcctctttagagagtgtatatataatttttgaattgctgctttaacatgtctttccattttaatttgtagaaagtatacaatatatatggtgtatgttcaaatttaaataaagtatataatttaattttttattacaataaaaaatttgaatattaaaataaattatctctactttttgaattttactttcaattcagatagtttgtttttttttttttttgttttttttaattaaaaaatgattttagatttagatatttgtagttttttttttaacccattccttccacattttgtctcaagatgaggtctctaattctcaatttctaatcattctcttagtattttgtaatatttaaaaaaaaattaatttggtttgcttttcttaatgctaaacaccaatgacgaaggaatttagaggagtctaactgttgaaaaaagtgtagcatggttatgtaaataacaatgattgtgtactcaaataacgaatatgtggaagaatttgaattgtttaaataacaataaggtttttcccgtatttatgtttctcttattaattatatataaattgattgtgagtatccaatttacggaaaaaaatgtcgttctaaaccacagtaaacacaatctattcataccaacactaatatattctctatgaattattagtgcaatgacatatgtataactcgacgatggtatcaagttgctagatattgtgatcactacaaaaaactgttactttnnnnnnnaactttttagtcacaacattatttttttgtgacaaaatgtgacttttagtcacaataaaattttacttgtgactaaaacattgtattta

SEQ ID NO: 39298 - DNA, 1219 bp, Cannabis sativa
  modified_base (1180)..(1193): a, c, t, g, unknown or other
gagaatagcactgtttttgttaaaaaaaaaatttaaaatctataaaaatgtaaaaaaaaaaaactatagatccattaaaatataaacttttttattctattaattatttttaggtatttatgaaataatcgtaaaataatcacctaaaaataacctatacctccataatgataaggcccaacataaaggcccaacaatagaagccagatgtgatcttttagtcactcaaaaggtgtagcccaaatataaattgtagagcaccctctggtccttcttccttctttttttccccaaaattaaattaaaagtgatattgtaaatttgtttgactttacactttgactgtacagtaatcagaataaactaataaagaaatataacggaataaataaataataattgaaatcaatatttttaatatgttgttactaaagctgattgaaaataaaatgatagtaatttatcttatttactttttaaaaaaaacgtaatcgaaatgcttaaattgactaaattaccctttggagttaaattataatatatgatagctattttataagacatattttaaaggataaaattatcattataattttaatattcaaaaataaaataaaaataaataaaagtcattactcttaatggcattccttagaaaattagtagggaaaattttccatttcttttctgccttatttaatcaagttttctcttttctaaatttaataaattaagtaaacaaatgtatgtgaatgactcccataccattcattcccattacttaatagtaaacatgttattaaggtaataaccacaaacttgtttttaagtaaaaaatatatgttatggttaattaaaatacatatatacatttcaaattttaattttcactacaaaaaaaatccatttttagtgacaacttttttgtcacaacaaaaaaaatttgtgactaaatgtgatttttagtcacaacaaaaaatgtacttgtgactaaacataatatttagttacaagttgtcattaatttagttttagttacatcaactattatgactaatttttttagtcacgaaatttttagtcacaacgtaggaatgaaattttgttgtgactaaaagtaagatttttgtagtgttttgggaactactgtccacctcgttgtgacagtcagtagtcccgnnnnnnnnnnnnnnaaataccgggtaagctgtgcaatccc

SEQ ID NO: 39299 - DNA, 2943 bp, Cannabis sativa
gtgtcaccctggggagctccagttttatttgtgaaaaggaatgatggatccatttagatgtgcattgattaatgggaattaaataagctaactgttaagaataagtatcatttgcaaaggattgatgacttattcaatcaactttaaggaaaaatagttttctccaagattgatttgcgctaagggtatcatcagctgagaatttaggaggcagacattctaaaaatttcattttggactaggtacgactattatgagttcttggtgatgtcatttaggttaacaaatgctccgccaacctttatggacattatgaatagggtattcaaggatatcctcgataactgtgttatagtatttctcaatgatatctttataaactctcaatcagaaggggagaacgagcaacatctttgaatggtttttctatgacttagagatcacaagttgtatgcaaaatttaagaaatgcgagttttgattatcaccaatgtcctttttaggacatattgtaggagaggatggaattattgttgatccagggaaaattgaatcagttgagaattggctaaggccaaagacagctactgaggtttgaagttttcttggattggcgggatattattgacgtttcgtggaaggggagggttttcttagatttctatgtcgctaacaaaattgacaaagaagaattaacgattattatggtctgataagtgcaaaactagttttgaagaattaaagcagcaattgatttcagctccagtgttagttttgccatcagatcaaaagaaatttatggagtattgtgatgcatccaaccaaggtctaggatacattttgatggaagctggcaaagtcattgcttatgcttctcgtcagttgaaggaatttgagcagtgctacccgacacatgatttagaacttgctactgttgtattccctgaagatttggcggcattacttgtacagagaatagtgtgagatttttaccaataaaaaaagtctcaagtactttttcactaaaaaagatttgaacatgagacaaaagcagtggttggaatggactatgattgcgagattttctttatcatctcgggaaagctaatgtggtggcagacgttttgagcaaaaaccacaatgatctctcctcaattagtttcaggtatggttaggactagtattaaatttgtggttggaaaactacataacctaacgcttcagtcagatttattagaaataatcaaagaggtacaattgaaagattttgagttagtatggattcgagaggagatattagctggttgggctaaggatttctccatctcaaataatgggatgttactttataaggatcgagtatgtgttccaagctatgatgagctcaggaatgaaatactgaatgaagcacattctacaccttattcattgcaccagagtactactaagatgtactaaaatctgaaacctctttattggaagaatgaaatgaagaaggatgtagtcgataatgtgtccaagtgcttgacatgtcagcaagttaaatagaacatcagaaattggcaaggttactataacctttgacactttctgagtggaagtgggaagatgttatactggactttatgattgagttacctagaatcgcgggaatgtatgatttggtagtggactcttttataaagtcaacacactttttccggtaaagacaacctatatagttgatcagtatacagagttgtaggtaaatgagataatttgtcttcatggagctctgaaatctattatttcagacagagattcgaaatttacatctaagttctgggaaagtcttcagagagctctgggtacaaaactgaagttcagtacaacttttcatccccagactgatagacagtccaagaggacaatacaaatatttgaagatttgctacgagcttgactatggactttgaaagttcatggaataaatatgtgcatttgatagaactttcttacaacaacaaccatcatagtaaaataaggatggctccctacgagatgttgtatggtaggaaatggcgttccctgattcattgggatgaaactgaagaaagaaaatatttgggtcctaaattagctcagtggacccgtgaggcaatagaaaagatcaaggctcgaatacttgtgctgcaaagcagacagaaaagttatgctaatcctaagcacagagacatagaattccaggtaagagaacatgttttcctacaagtctcgccaatgaagggtgtaaagcactttggaaagaggggcaagttaagccctaggttcataaggtcatttgagatattcaagtcatggtgatctccactaatctacgttcaaaattgtgagtgagagtttctatatatattcttcttcttctacctttcttatatatataaatagatttatatatctatatagtgtagtatatgttgttataatatttatttaatctctttgttagtcgttgtattatactgcaatagaattataatacatcttggatttttttattgtaataaaatctctaacattaattcacctttacaggtagactatttgattaatgatatcttttgacactttttttttctcttgagctttatcccactaaatttatttttgaagttttaatgaggtcattttaagaaaaaaaacaaacaaaatagataaataaatatttaaaaaaaaaaaacacaattaaagaaaagaaaaatgacccaagcaaaagaagagcataatcacctaattttgtccttatatattatttattaccttagactattcctgtgcacaatgatatcatattatggtatcctttttcacaatatatatagatactagaaaatcgatttggaaaatttgccaagggccaatgctaaaccttatgtcattttattatattttgtttttctaagta

SEQ ID NO: 39300 - DNA, 3239 bp, Cannabis sativa
  modified_base (2234)..(2235): a, c, t, g, unknown or other
  modified_base (2379)..(2389): a, c, t, g, unknown or other
  modified_base (3115)..(3123): a, c, t, g, unknown or other
tgttttactggtgttttataaaaagacagtatttttgaaaagatttccgtgtgacagtatttttgtaaaagttaaccagtatttttttaagtttcccttatttaattactaagcatgcaataaagtggtttatatggtttctaaatttttttaggattcatttagtgaacatgttttttgtttctagctctataaatatttgatttctttcattctcggtggttattaaatgtcgactcatgatctttcatttagttttcttgcgtgatattacgcctttaacctaatgcaataaagtggtgtaggtagtttttaattttgggctattagtttttttagagttgaggttgtgggcctttaatataacaatcaaatttgaggcctattattgttggatttttgtgttttatttcattgaatttcaatacttttatatgatttgtgcagtaagaatttttggtattaagtgatttttcatttggataagaatattaaaaggtcctttctttgaaatttaagtggataattttgagattatattgtgtgtgtatatagtgggttgtgatagttgtattatataatgtatgtattgtaaaattatttgggagtgacatatatgattggtattattgaaaaataactatatacttttgttgaagcaaaggacaaccaaggccttgtagttggcacattctcttatagctaaaattttcaatgtgagtacaagaaagtaatggcctttgtcaatcaagtcttataatgcaaatagaatttgactttatttattatttaaattttagcttttatcacataatttattataattaactcgtgcaatattttttattttagcacggtagaaaaatctcttatataaaggatgagaataatgaagtgctcgaagaacaaacacaatacatcattaaattgatgaagtctagataagtctataagtttagaactttaagttattctttttaatataaagatttgtggtattttattatgtgtaatattttagaaatttgtacacaatataaaatattattattgaagttactaattattactgttgtctttaaaaattatattaataatttactttttagttaactttttttatacatgttctatataattataaaaataaaaattaaattcattatttattaaaacaaacatacaataaatttttaaaaaaatctaaagcaacaaatttattataaaaataggataaaagggtaccttttataaaaagtattctttttatctcactcttatatattctgctttttattttaacaaaaatcaagataaaaggcttttgtttgtagtaatggtatggttcagctctactaatactagtaagagatgagtacttagtgcatgtggtacagaggtcgtacttctgttaagaatgttcttgatcatctgttaaaccttgtaaataggtgtatgggcgcctaaatacaaatcggtgatatattatattatatgcttttcttgctaagtctgtcgactcacagttattatttacatgtgtaggtaaaggaaatgctaaggctgagcaacagtgagtctagagctcgataataattgtacatatcaggatggttaaacctaccaagttcgatctcggaaagatttggaccttattttgtagtcgctgtacgttatgtttttaaagtatattttgaatacgtttataaattttgaaggcaggatctcggttcgtatgtttgaatatatgtgcatttacaatggtttatagtttaattaaaaagtttaaatttaacacgatttttgaaaaatcttttgattagcaaaagtgtgtacaataattaaaaaattactacagagtgcctaagtaataaggtgttacaatgacagtaaaattgacaaaaaaaaatgagtattttgtaagattacctttatgtttctttaggaatttatgggtttttataaaccaattcatttattttatatttttgtacacatttattctatgaagataaacatgtttgtgttattgttttagtaatgatttgtgtatttgggtattttatattaatgtacaatgttcattgatttatgatttgggcatttttaatgcttataaacatttttgtataattttattttttcagttttataagtttttatattttaatatattttgtttatttataaatattttgtatataatattgggaattactctatatattattttnnttaatttttttttaaaaaaattacggtttgggttgcttcggtgatttctatgtgggttgctatatggattttggttgctccgttagttgttataggtgtttctgtatgggattccatagaaatacaaaataataaaaaaaaaannnnnnnnnnnaagtgtaaaaataaaaaaactctttttgttattttgatattatttttatgaacattgtaaaatgtaaaaaaaattatacgtaaatgtgtaaaaaatttgccaaaataatagtttatgtaagtttttcttatttatatgatttgttatgtaattattagccaatctatataattattttagaaagtaattaaaattatattacgattactataaaaaaaaagttagaatattttactaatttttttatacaaagaaattagaatgttttgactattttttttttttaattaatagtaatatttatagataaattataatatatgcatagtttcattaatacaaatatgtgactattaaataatatataattacaatgattaaatataaaaagatatcacatttctcatatgtttgtcaaaataatgttatttatattaaacaacaaaagattttaatgggaaaaaaacaaaggttaaataagtaattttatccaaaaatgattgacatttttatactagttaataaatcatataatatattatatattaaattatttgggttgggatatataatttaaattcattaatagtaatataatgtttttttaaataatcttaagcaccaataattatcgtatttttgacaaaagaaattctatttgtactctataaaccataaatacacttaattattaaaaaaaaaaaaacttaaataatttttaaaaannnnnnnnnatatttttttaaaaaaatttctcacattattttatgttaatttcaatactaatttttttatttttttaaatcatgtatatataaatattttatttttttaagaaactttcatataa

SEQ ID NO: 39301 - DNA, 1736 bp, Cannabis sativa
  modified_base (100)..(106): a, c, t, g, unknown or other
  modified_base (164)..(171): a, c, t, g, unknown or other
ttttttttaatataactaacttaagacaattttgaacacgaacagatataaaaaaatataaccagttttatcataacatctttagattagattattattnnnnnnnattttgataaaaaatcagttcaggatcctatttatacaattttagaaaatacaaggtnnnnnnnntcatttaacaaaataaaaggtccaattggtaacttttacaaaatacagaatccaaattatacttacccaaattttaattgttattggtgcaattatgtatcaggtctcacatatttatgtgggacgatgcttaattataccaatcaacaagataaatgtggtagtattggacaccatgacactttgataacaaattaacaatgctataatgaaataaaggatagagatattgattcaggggggaatggttttggttacttacacgtctagtagtataataggtgagacctgggatggtgccaacatagcctaccagccccacataagggattacataagatgccaagagatagttaagtgagtttgcataaggatcaaatgaaggtttcagagtgaaaccaactgctttattgaataattttgcgaaattttgagggctgagatctattaatggccttggaaatccacctactgtgttaataatggccctgcatatatattatcagaatatattaattgaaaaaacagaactgaaagtagttttaagaagtaaaagtgaagatgggtactgtactacctgatatgaccaacttcttgataaccaaactcttcgattatcctatgagtaaggggatcaagattggctttcctggcaccaattggaggtggaccaccttctgccaaagatgaatttatggcatcaagcccctcaccaagcgctcctcgaaggaaaaactctgcctccatgaactctaagttcagagcaaactgaatcttatcattatcagtggcctctactggttcgcagcaaggactagtattggtaccccagatcagaccaggttccattgcaagaaggaaaacaaaaatatgaatagttgatgatataatggccattttttttcacagcaacagagcatagagaaaaatcgtcgagttagctgaatattaatccatgaatttgtgtagaacagcaattgtcaacctgcttaaaaggacactagatgaactgatcattattaggctcatcttattgcttattcattacgtaatttaattaactgctgttaatgattaattgaatgtttgtacgttcaagaatgatgttccaagttaactcccaaaacaatataatttcactataatgggtgtacgtacgagccataactattgtttacagcagtattgcatttccagaattagacataaaatctcaaattgttgcgtctacgtaattgactttgtaatgttctcttcttttgattttcgttaaccacttttttcattggtgaaaagatagaaagatggaaggaaatagaaacacttgatgtggatgtagtatctactaccagtgcccattgttttctacctccaatccaaaataagaaattattcaaaatcaacagactcgaagctcagctaccaatctttgttaatccatctataccagcatctatatatataatccattcttggtaatattgcaaactacaagaaaacagaaaatgatatgacgaaaaaactgacaataacgagaaaaggtatacaaattctctacttcacat

SEQ ID NO: 39302 - DNA, 2213 bp, Cannabis sativa
ccgaataaacaaggtaagaaatcggttatgaatgcacaagaatcttaccataagaggaaaaattattttgtcaactaacttaccaaaaaaggactttacactatcaatgtacaaagtcaaagtctcttattaagttattaaaccatgcatttggtgtcttgtaggggtggagacccttaagctagttatagtatatcctattcagttggttagttgacgagttgtgtttgaatgtaaaagtgtatagttgaggaagtaagaataggtgagtgtatggttcagagagttttatcgcaaaattaattagcaatgaaaggagtagctcatacattttatgtatggtatttaatcttcatatattatcaatgtgggactctaacatcttttttaagatggtagttattttcttgctcaacaagcttgcatggttcgatcacaagtgacttattttgattcacaacgactctttttgactcacaatccccgaatcacaatcgactcttttagctcatctttttaggtgcatatattgggttataatgagaaaaatagtccatacatcttataaatagtatttaattttcacacattattaacgtgagactctctaacaatccagacctaaggctataaaaatatgagaattgttaaaaggcattactggtgcctagcaccttccttggtgtcataccggtattgtgtaattatgtatcgggtcccatatataacttttagataatatcactaaccaatcatgaagaaagtgttagccagacaccactgatacacgataaaaatattcctaaatatatagatctctatcctatcatttatgatttaattgtgtgaaaacacttttaagattaataaagagataaaattcttttactttaaataatatagttttttgtttttgtttgtgagggatttgggatgtttggggtcggcttaggatggtggcaatcggagatggagacctcagctatccttgggggatggaaattggggtcactctttcttcagccgattctcagaagcaattgagatgtgttgaaagttttaggtcactatctatgtgggagaaggttaggtttttttcttaatgtcatttatcttttttatttattttggaaatgttttgatgtataactttttttttgagttagttttccttttgaatttgtgatttaatttgcatgtatatgttttcacttttgattaatctgatatctcggttttttggatcacgagtctttttctctgttgaaatggttggatgctgtttttatttgtgaatgtttgattcttttttggaacccagaatttgctttcgttttttaggtttttgaagtatgcataggttgttccaaattatggaatttaaatcccagaattttgttgctggaattcttgagttgtttttattgcatctcataatatccttattcctatcatttgttttttaccgaagtatattagtatttgatcttatggtgatatttttttccactgatgaactttttaaaggatatgtggcttcttctcttttgggtcgcggtgtttttacaaaattattgtggtatgttttgttttcttgtggtttatacttttgggtgcttcattagttacgatcagtacgattgcaattttatgtaagccagtatggtttgttttgttttttttggtaaaccaatatggtggtaaaatgtttttttgtaagactagtgaggtctttcgtttggtatgataatttcagtttgtgaaaaattttgtcttaataaaaaattgtttttttctgtaatatgaatagcaagattgaaaggtgtaatgttaattggagactcttgttttgatcgacatattatgacagtagagaaaatatggcaaggttgcatatgggacttctatcaaagattttgaaaatatgtacactgatgtgagtagggtacaattttggaaacctgttttgattttagtttaattctgtttttgttttatattctattgctagttaaaactaaaagttagatttctcttcaaataccaattatattaaaaataatagttcttattaggaaaaactaaaaattgaaaaaattggaaattcaattttgctatgtttctaatatgatggaattcttcatacatgagtaagaggttaattttgactaagtgtcttaagatttacttggatatttattgattgaatataa

SEQ ID NO: 39303 - DNA, 1581 bp, Cannabis sativa
ataaaaagtctcaatatatcttttatcccattttttatttttgttaactaaaaaagtgggataaaaggtcccctttcttgtagtggaatttgaactaccttaagttttattctatccacttcaatcaaacaacagaaaccaactccaagagctagcttctttctaagaaattacaagagataacaatttttttacaagaggctaaggagagagagaggggttagtgggaatgggttcataaaacagaaaatgaaaattatttgatttcaactcagccaaaaaaaaaaaatgattcatcttaatttttggtaatatttggtcaaatgatcattttcctcccagggttaaaattcaacttataacataatcaagggcatcccggtcaaaacatattcacataatcacacaataaaataattttagaccccgaacctcgctcgagcctaaaatatctaattatgactatatcgcgctaacttgtcaagaaccacatgcaataaaataatataaacataatatataataatatagtctattaacacaataaatatcaaaattacaaattttacccttttcatgtcaaaattacaaaaatactcctaacacgtaaatatggtcttaaatgcaataattatcaactaatgtcatataattaattatataataaatataattactcaattataattaatctattttaattagggttgttaatctatttactgatcttgagatattacagccaataatattgtgtcattttaaaaatgacactaaaaacttttaaaaaactttttcagtgtcagttataaagccaacaaaactcacaaacacccctttaggtgtcggtttagaaataacaccactttaattgtcgattgataatgacaccaaaactcaatagtgtggatttaaaatgacactaaataaaaaacacatatatatacaattcaattgtcgattttcaaacaacaccaaaagtcaatagtattagtttagaaccgacaccaaaactttaactttttgtctcagtggagtaagttagttctatgaactgacactagtataactacatcaggcttgtgatatacaataaaagggaatctatttatacataagtcaaaaattttgtatttcttactttgctaataaatcttatatctacgcgtagcccgtgaacaagtagcaatctgtaaaaattgttgataccacatataaaaactttgtatatatatatttttttgcagtactttagctctttactgctttgctggtctgtagttataaaattttaatttgtaactacataataattcttttagtatcaaatttttttgttccgtatttaattaattaatttataattataaaatacaaaatttcactcctattttaaaaaaaaataattaatgacaaatatatatatacatataaaaggagcaagaaaacatatgtaaaaaaaaaccaataaaaaactaattagttaagcataggataggaggtggattatatgactatgatcctttggaaataagcttcttataatattttggcttgatgaacatcttgtgatttttgttg

SEQ ID NO: 39304 - DNA, 1768 bp, Cannabis sativa
attgcttctcttattattttatttctttacttttaataagattttattcttcttttactattaataaatttaacttttaatccttcattcttttaaacaatttttcttatgccattgctgctcatcataataaattttctttttatttcaaaaatttcaaaaacacattaaaacttattagtttaatatttaaacaatgatttcaaataaagtaaataataatatatatttatatatttcttttcaaaaaaaaaaaaaaaaacaatggtgtgtggagtgggtatactggtataggtcagtgacttgaaattaatatttaacaaactgtacggacttattgaaactcaaagaagatacagcatgaattagtgggctccacttctcataaaccgccacgtgtacttacatctcatggtgacgtggcatatgtatataaaataaatagatatatttatattttcaaaagaagaagaagaaattgttgttatatgccatagtcattactctcaccaaaattatattatgccattaaaatcccagctaaaaatatatgttgataagatattatttatttccaattgggttttggcagatagattatttagttgttgttgttgttgtttttttttttattttattttattattttaaaaataaataaataattaatcatgtctttatattattgtgtttttgaagaaacattttaagttgtaactaaagtgattgtgtctctattttgtgcagaaaaaagtggtccttaaagttaaaccctgaaattaaggatgtttttagagagtttaggtaggcaataatattaggagacatattatctatcaagttttggaatgtatgttttcaagtctttaatgggttaggtttcattgtttatttcttgacattaattctcatcaacttcccttcttcattatacattggaaaattatccatatattattattattattattattattttaaaatttacagtttaaatttctctggcggtgtttctatattggttgatatacaaattttagttgcgatttaagttgttccgttagttgctatatgaatttctgtgtagaatttcgtaaaaatacaaaaaaaaaaaacgattttttttttacatacatgtatctttaatattaaatgtggctattaaacagaaaatattgttcttttttaaacattacaatttaaatttaaatttactgcatatatttagaaaaatatatctttatactagtatttgttttacatatttataaaaaaaataatctttttatttttttttaaattcactgcacatatttttctattagtattttttaaaaacaataaaatagagaaaatgtttatgatatgtgacttcattatttattgtatttataaaaaaaaaaaaatcaatctaatttttctaaaaataatataactaaaaatttacagaattaaatcaaaaattaaaaatacatgtacaatgtatgttactattatgtaattacatagtatatatttcttctctttgttgggttttattggaccacaccaaattttcttaatttcaactctctctctctctttctctttctcaaagcatttattgtacaattaaagaaagttttatttactttaaatgcaactccaactctttcatgagttgatatatatacatttgttaaggtctttatctagctcaagagaattttggacaccaaatccatgatggggacattccattatatataatgaatagtataagtgtata

SEQ ID NO: 39305 - DNA, 2682 bp, Cannabis sativa
aaactaaccacaatccaagtaccattatcttcaagagcagcaatttcaatatccatagcattatcccaaactagaatgcctcgaggttgatgaaaaaattctggctcaaagtgacttgaaatggctagcacagtagctcgaaaccttggggacagtctgctatagtcaataattttggagataggatgagatgtggaagactttggtacatgagattgcacactgttagtagaaagaaaacaatggtaagaaggcttgtgaatctgtctagtagatcaagtggtaacaacaggttcattcatagggatgatgtcaggttcaatgatgggatattaaggtgttgattgtggacaagtaggttctgtatgagtggaaataacaggttaaggagtggagatgggaatgacaggttgaggagaaggtgtttctgtggaaggatcagctacaggtgtagcaaaaaaagaattagtagggtgatgttgagaagcatcagcagggaaaaaatcaaacagatcaggggaaacagaaccatgttgcacaaaagggaaaatgtgctcatgaaaaataacatccctagaatagaacattttgtgtgtgttaaggtctagaagtttgtaggctttcatccccataggatagcccataaagacacaaggagtggctcttggagcaaacttagacctagcaacccctaaagtagaggcataagaaaggcatccaaatgcctttaaatgttcataactaggaagcttgcctttaagaacttcaaaaggggatttgtgcttaagataagggaaagagttctatttatgaaataggcagttgtgttgatgcaatatccccaatatggtagagggatataagattgaaacaacaaggccctaacaacatttaacaagtgctgatgctttctttccacaacagaattttgttgtgacctttgcacacatgagtggtaatgcatgatgcctaagaaagaaaacaaggcaggaaattagagttcttttgcattatcagatctaatgcctttaacttgagcattttattgtgttttaacaagttgcagaaaagatgggatggctgtttgtgcatctgatttattttttatgagatggatccatgtatacctagagcaatcatcaactatggtaatgaaatatctaaacccctcatcagtgtgaatattataaggcccccaaatatcaatatgaagtaattcaaaacaatgctgagatatgtcgtgattgctagcaaaaggtagcttcctttgtttggcaaaatgacaaataaagcaatgaaaattagagcaagaagaattttaaaattgtaaagctttattcaatgaatggttctttacataagaagcatggccaagtctatagtgccacaaatttttattacttattttcaaatcagaaatggaacaaacaacaagaggtttaggttcagacaagtagtatagattcccaactctttcacccatctcaatcacttgattcttggtgaaatcccggatcaaacacttgttaggaagaaacaagaatgaataattagctgaatcagacaaagcacaaacagatatcaagttatgttggaaatcaagtacacataagacattttcaagaatgatgctagagactttaacagttccaacaaaggaaactctagtactaacaccatttggtcagccaactcaggtaatcttattgttttcctggacagaaagaaataaagatggattggagcacacatgatgtgtggctccagtatcaattatccaattagatttaggaacaagagatgccacaccagaaatgttagacacaattggttgttttaactgttgaggctgcaccgagttttcttgcagcttctgtgctaacatagccattaatttttgacgataagcagctagatcatgctggtcagttgtgattttattgctgtcatgcctgcagtatagttggccgatgatctcccttgctggtttcctggtttaccaggtatttctctttagaaccttccatatagcttgtgtctagggggatacccatgaatcttgttgcattttgcaattatgtgtccaggaacaccacaacgggaacaaataggttgattgtcacctttattatctagtcgattgtttccacgattggcttaagcattgccagcaaattgtcctgtgttatcactggactgttggttattttcagcttgaggtataacaatacctctttgtttctcctcttgaattatgctggcataagctttgtttacattgggaagtgaatcttgaagtaagatttgagatctggcatttagataggactcattcaagccaatgagaaactcaagcacttaattatcttcatcttgatactcttgaatgatcttcattgctccataagtgcaaactggttgtggtctgtactcttgtagtagatcccataaacccttgagtttagtgtaatacgaagtcacatcactagaaccttgggtcaatatctgcatcgatctttttacttcaaaaattctgggagcattctttttatgaaacctttccatgctattacatcaaatccaggagtcataatttcttatcatcttcctcaggagctggtagtcttccatcgacgaatttatttattttcttgctgatagtgcgaccatcatcgaccttcg

SEQ ID NO: 39306 - DNA, 2989 bp, Cannabis sativa
ggcttcagtttgtcttatttgatacgcacataggttgtgcaaccaaacactctcttagatgttcaaacctaggtggctttcctatccacacctcttgaggtgtcttaaaattgtttggcaaagaaggacatttgtttattagataacatgcatcttaagaacttctccccaaaatggtctttctaaaccaacacccacaagcatgcatctaattaccctctctaactgtgtcctattcattctttctgcacctgtggtgtgttcatcattgttttgtgtttgaaaattccctcttttgcacaaaacaccttgaattctcctgagcagtactctaggccattgtctgtcctgagtattttgagcttgttacactacaagaaatgttacttttaccagtacagttcgctactgtgttggtaagagtaactttgaccagcgcattttgcaaactgcgctggcaaaaaggtcaaagttttaccagcgcacatttgcaatggctaaaaatctaacttttaccaacatatttacgcgctgagaaaagtcatttttgccagcgcttttcattttgtgctgacaaaagttctaataccaacgttgatttgccaaccccttttgccaacacatcagaaataaattttattttaccagcgcaataccaaacgtttgccagcacaaaaatgtactggcaaaagtaacatttcttatagtgttaccagtttggttttctagaagctttctacactcaatgaaagtacccagggcttgattcttattcttcaacaagtatacccacaccacaccttctttctgaaatcatctataatgctcataaaatagtgtgcacctcccatggttggaattcttgttggtctccaaagatgtgaatgtacataggcaagtttctctgtggttgtgtgttctcctttactgaataggccttcccaaacacaaattcatcacaaaattctagtctttcttacaatttctccttgaacaacccttgcctgtttaattcctctagtcccctttggttaacatgtccaagtctaagatgccaaagtctaatttagcttgttgcagggttttgtacaataggtacgtgctgcactttcaatgaatgttttgtcatccgaagagtaaagaccattgtttagttgacctttgatgagatcttgaaatccatgacaaattcccataactacattttcaatcttgactgagtaaccaaccttattaaacattctaatggacagtaagttttttttaagttcagggacatatctgatttgttatagagttttaatattttcatcataagtttcaatcattaatgttgagggaaatgatgttctttggtcacaaaatttttggcttatcaaacatattgtacaaagaatagaaaatgagattcaatttaaaattagtcttgtaatgtgaaaaaaagctacacaaagtgatagagattaatttgcttcaatttgtaaaaattaaaagatattttgtgtttttgtggtaaaagggttgttaaagggaggttgtaacaagttataattgagcaatacaaatacaatcatcttattcattgaaaaagtattaaatttgtcaaacaaaacaatgattacaagacaacaagacgagataagtctatattgtgttttctcccttaataaaatgttggggttccaactagacggcaatgtcttttaaacttttcacaatttttggggtcagtgaaattatttcaaagtgcattaaagttttgcaggttgtggagatgagtgatagtcactaggaaatagttgcattgaatgtcgaaagtgaggttggtagggtagttgaagaattaatggagggggaggaatctgttttatctactccccgtggtagtgaaaaggaggcttttacttctaactctggggcctcagaagatggaaaacagggagaatacaacggtgagaaaatacaagataagggacagggaaataatgaaggaggggatcatgatggcgagttggagaagctcaggaatacgtttattcagacaatggctttggacctagagcctgatttcgagattaatggggagctgataagaacaggggttctagcttgcttcttcgatggtaagggtctatctagaacgagattaaaagaagtactaggcaatatctggaaacaaaggataaagggcccatggaggttcaagacactcaaactaggcctgtggggaattttcttcgacttagaagaagactgtgtcgagatacttcacaaacgaccgtggatcattaatagaaagcttctgattattaaggagtggccagaggatgggagctggagcagagttgatatgaagaaaaccttattctgggtgcaggctacagggcttttatctccctatctaaacaggtaaaatattcctactatagtggcaaaggttggggtatttaaaaacagtgacacttgggatcaacgatcaatatctagacgtggatttttcaaatttcaagtggaaattgatacagatcaacagttggttccaggctcttatctggatatcatgcgaggtaggaaggaatggattcaattctaatatttcaaattgccaaaattttgtcataattgtgggagaataggacatgacaagaatgggtgttggagaccaactgcgtttgcataaccattggagggaaagctgtcatggcttttggtccttggacgaaagcagagactgcggtgattagctgtttcaacacaagaaaccaattagattggttcaataatgaagccggagtaaattgtattcctcccagaaaaccttcagagaaaccactggtgatggtggataaagggaagaaaccagtggatgaaaggaagaaaccaacagaaagcgaaagaactggtatcgatggaagagctcatcctattagaggactaagaaggaaggttatcaggaaaatactccaagggcggttaatggaaagaatct

SEQ ID NO: 39307 - DNA, 1983 bp, Cannabis sativa
atggggtatcttaattagtgtacgtaattactaaacaaattattttaaatattaatacttaaaggaaatttagagtagtacatcctaaaaagagaagttttgatatacctcttatttattttggtatccataaaaatttttaatctatttttttttttcatataattatatttatataagattacatgtaaatttttaaaaaattctataagattatataaattgcattgctgaaattaggttttaaacatttacatacaacgggtataataaaaataatctctttcctaataaaatattaaagtcatcaaactcaatttttattttttattttttggctaaaaatttctttttaattttttttttttcaatcaatgatacaatctcagcccatatgatataaaagtgagagatttttcaaattaaatagaaaaattaagcataaaaactcaatttttttttaattttacccatccattcatgggtatatatgtgtattatttgtaattaaatatataattaaaaaatttatttcaatacattcttaagagtctgttttggtatttaaaaaaactttttagccaaatatattttataattatgtatattatatttatttaggataatttgtaaatttttagaaaattatgaataatttactgttgaaaattaagtttaaacatttacttaccacgagtataagaaaaaatcgttgcgtgtacaacttaaacaatttaaaagcagttctaaataattatagcgtacacaattatgaaaaaaaaaaaattaactaaagaaaactttattatgctgaaacaaaaaaggtaattaccgtatacgttatataatgtattcatgatatttttttgggtaattaagctaattttatgatattttaaaaagaattgtgctcctagctagtaattttaaattttaaacatatattcttgtatacaatactaaactaatttaatcattaattagattaaattttacacctaaaggtagttatatattggtagataaatattgatgtattgttatagattatcacaaataataaagtaataaataaataaaaattaagtatttgaattattgggaattagaaataacaagcattagagttagtagactagacatgttataaattaacaagcaaatatagctattagaaaataatggatgaattaaaattcaaaattattattagtgaaaatatcacatgagtttaattaataattgctatattgtgtctatataagtggctgctatagagacataattaatttactagtactattaagggtaagtaattaagtttacagtacaccctttaaaattatgttttgatagatgttctatttatttttatattcggcattcttatttttttttttttatgatcgtggcgtgttatacttagtaaagacaacttatagatttaaaaaaaaatttcaaataatttacagtgacgaaaataaagtctaaatattttgtgccacgcatgattattattttatatatatatatatacttagtaagtaattatttgaatcttattttttacacggtaaactatttgattttttttaaaaaaaaaattatagatgattctaaacagctatgacataaacaattataaaaaaaaaaataatgaactacaaaatattcttaaatatcgaaatagctagtaaatgatccatgaacattcttttatagaaaaattaagaaacaaaattaagtttaagtaaaacaatttttagaaccattcacccacacgtgtggtggaccagattaaagctataaattataatctcttttgcaatgattaagtcaagtcacgtgcaataaagcaatataaagctatagcatttactatttaattagcacgtgctttaattaaacttcatatcctcaacgattgtttgttcttatgtatacttaaaggaaagaaacaaagattaaacttcaatagattaa

SEQ ID NO: 39308 - DNA, 1523 bp, Cannabis sativa
tataaagatacaagcttcttattgcctagaaagcttctcttctctttatcatccatggtggtttctgtatttccggcagattcaagcaaaaatactagctctgcagccatgaaagaacccaagaaagctttggagcctagtctcaggagggcaccatcaagtgtcccaaatccaactcagaacaaatagtttttagtgtatgagactgaaagatcttttctcataaataatttttagagttttatatttataatatagcttatatgtaaccaaactaatatgtacaaaaagatttattattttgtgtttttaggggttttctattatccccaaccaaacgtaccctaagctctttgagaagttgtattgagattggttaaatagtgattgatcaaggtttagttcctctactcaacataattatgtataactaatcgccacatcttatgtaaattaataaacatttaattgaaataattgcattttcctttgaccctttttactcaaaacagaatagatttactaattaagttgttttagaggacatgacgaggtattatgaaaatggcattaaataaaatatataaattattaagcaattaagtatgtctcagtctcacatataccttttatatattgtaccaaccaataattagaataaatgtaattaaactgcaatattaatactaatatgtgatcattaacttattcatcatgatccataatatatgtactattgattcaaaggggttagtacttaagattcagtgcatatagttttcttggcaaccaaacaggggaagctaggtagtgattatgttgtgatacatagcacaaggacaaaagcaatgatggtgttggtgcccatgcttagtatcctctcattttgacataatagacagatgtaaagtgaggactgcacgtttcattgtcatctagtatggtgtaggtttatgtaacccatgcgcattttatgtatcatacaaggttgtctttacagtttacatgcaccccaacaagtatttatgtatagtactatacatgtttatttcttttagacataatattttgtctataaatctcactcagcatatgtagttttaatttcatatttaactcacaggtggatattactttaagttaaaatacagatcaaatagttctatacgaaacaatattgtactagtttgagtatactgaatttcataattaagtttgtttggtgcatacagtttcagcagataattgaatatgaagacacgcgttaatttttatcatcggaccggacatatataagatacaaaactggaacagaagatttgagtccctttgatcttgaagtggtaaatatacacttatttgttgtggtttatgttttgtggccattatgtttactaatttgatttgagtctttgatgttcatttgattgttgattaggctcttcttgttctaattcaattattttcttgttgattgaaatacctgcgcgcatcattagaaacactacctattacgaaagaga

SEQ ID NO: 39309 - DNA, 1199 bp, Cannabis sativa
gagggattggattcttggaatgaagcaaaattcttggaggcatccatgatatgttggtcaatttagaagcatatgaatgaactagtttggaactctaaatagcctaaggttattgaggtgttgacattagcaaaactaaactttattaactagtgtgatgctcaaaaaataacattgctactgctagtgataatggttcaaatgttgcaaatttagagcactagatccccctgaaattcctacaatcaaagttaatgttgatggtgcacttttctctaatgagaggcagtttggagttgggttggtggctcggacagcagctggtttggtgttgcaagctaaaactttaaacaaggtaggagctttgcagccgcatgtagttgaagttattggcatcaaagaaactttaagttggattaaagctaacgggtggacaagtgttattgtagagtcggattgcttaaaagtcattagtgatttacaaaggtctaaatatgggcttctccttatgggccatattctctctgattgtaaggctttgctttctgattttgatgctatttcttttaattttgttaaacaatctgctaataagattgtgcatgctttggcgcggtcttctctagatgaggctcattgtacttttagtggggtttctttacctactgtaattgtatccttagttttggatgatttgaattaatgacgtttcattatttttcaaaaaaaaaaataaagaatttttttaaagttattatataggagttgaagggcttatttggtacgttgtataagagttgtgttgtattaaataataaataatactacatttggataaaataatgtattgtattaattattataaccaaaacttttaaacaatgtaagttgtattatttaatatataacaaatggtccgtattagcttgtattataatatttataaaaaatctgaggtcaaccctaatttacgacccgaacttgggactagacctgatttaggacccggagctcaggactcggacccggactcgggatgcggacacaaactcgtgacccaaacacggacctaggacttggacctagacccggacccgaactaaaactcgatcccagaatcgaacttgaacccaaacccaaactcgaacccaggcttgggattcgaacccagacccgaactcgggattcgaaaccagacc

SEQ ID NO: 39310 - DNA, 2700 bp, Cannabis sativa
gatactttcaaaggtagatgagaatatctacataacattataactactaacaatgtacaaggggtctcggggagtcaccccgagatgacgattattaccctcctcaagttgggtctcggggggtcaccccgcgatgacgattatcaccctcctcaagttgggtctcggggggtcaccccgcgatgacgattgtcactctcctcaagttgggtttcgagagtgtcgccctcaagtatggacttcatcctcgaaggtggtcaacgaccgtgtcacacccttaggagatcctcatcgtcaatgactatttcaaatgtttaaatctcatgaaaggctcaaagacagttgtcaacccacgaaaatagctggatattatcataaaaatcagacttcaactacatccgaaaatcaaagagagggttgaggaagctccgcgttggtcgcatctcctgaagcgagaagcactgactatttcccctatataaggggtcatccatgacttgagaaggggatccacaaatttgagcacttagaaaaaataaacactttttcattctttgcaatcaagagcctgttcttgacttttgcaactcagattaataaaacacaaggggagtacgctattaccgacatctaaggccgaacctctttgaattctggtgtcttttctatacatttattgcaaatttcggagtcattaattacatttattcttacgattttggtttaaatctcatttattacgactccacgtcagtagctaaaaatccaatcaacaaataccttcatattatattttattaaaatatgcccacttttataagtgagttgtccaatatactcttactctctacttaaatataccatataatttacattaacgtaagagatctaatagagacatcatctataaaagagggtatattttaaagaatataaaaatgaatgtaaaaattaaaataagtaaagtaaagtgggcatacaatgtaattttttctattttaagagtagaaaagtagtctcgtacctaggacccctaccttacgggcccgagaaaaataatattctatttataaatttaatgtaataattaattatttatttctactattataaacacaaagttattctagcatagcatctgagtctcttataagaacttcgcttttcgaatttcactcctaaacagtagaactacttaccattagatcaaattaatttaatgttataaaaatacattaatatatagaagagtgttaaggaaattctctatcccactctctttttaatgtgataataaatgttatattttcagcgagagttatttttacttaataattagttatgatattctaatgttatttcaattgtaccattactacttctaatataattattctactaattttttgtttataaaagaatttgattacattttattcttattttcattcttaatcatctttttagcacgaatattcctaataatttttttaacaggaaaatgcaataccacgtcattttaagaatattgccacgtcattttagcgggacccactgtaatttccagtaagagaagagagaggtactagttttgttcatccaaccttctaattcttcttattcagaccacaactttctcatattcccaaatctaacccctaaacttcccattaatttcataacagtccctctcgtctctcttcttcttcttccatttccaatttccagagcaaaacccaaactcaacacagtcttcttcctctgactctctctctctctctcctcaatcagggcttacaaagtcttcgttttctcagggagaggaacagggttctgcgtttgagatccgagatcttaaagcagtgcctgcctcttcatttgatctcgtttcacattcatgtgttgagagttctctaatcttttacaacttcaaaaatgggtttattgttcagtcggatgttctcttcggtttttggcaataaagaagctcggatcctcgtccttggtctcgacaatgccgggaaaaccaccattctttgtgagtattttgaattgtttattaacagtcttctagtggtttaatttcggtgaattgtagtcttgatgttgaatttatttttcagatcggctacagatgggggaagttgtctccaccattccaagttagtattctttccctgtgtttggatttgtttatgtgtaaattttgtggtaaagaacaattagatatgaattggagaaagaacatttatctcatttatgtatgatagtgttaattatcctttgttgcagcaattggatttaatgttgagacagttcagtataacaacatcaaattccaagtctgggatctgggtatgccattatattccctgcattagttatttcaaatgccaattcatgattttttgttttccttatgatatgaaattgctcaggacacgcttattataagaactgaatttcaactaatggtattattttcatggttaagtatatatatatttcataggtccacattgttatcctttgtagctaatgttattcgcactatgtatgaaaaaatgagttggttgtctgatttgggttgttcacatattagtttcggttgcgatcgtcactttttatatagctcaacaggtgcactaggttgtaagttcttgtaactataggattaaagctatacacaaaacggtatat

SEQ ID NO: 39311 - DNA, 1015 bp, Cannabis sativa
gaccatggagcttaataagcgtgggtagtccactccctgattgaaatcgtagccttcaatcttagagcattttccttccagactttctgattctttgaaggctgctgtgtgagcggcttccaacagatggtggttttccatgctcttccaaaatgttaggaatgctaagtagaatacaaatctatcagtttcaaccaaatgagaaacctctttcaattaagaaagttgaagctattagggatgctgagaagtatattgtggatattgttccacattgaataactagtagagtattgagccatatataagaacataggctactctacttatcaatcccatgattctcaacatggtatcagagttatatcccttacgggcatgtaattattgagcaaaaaatagccaccatcttgagagataatattgtggatattatctcacatgaaataaatagtagagtattgaactatatataagagcatgagctactccatttatcaccaattggttttaaaatggaaccatatgattctcaacaaagtaagatacaattctacataagaactccattgatgagcagttctgagccatctttagttaaactaaaagcattattcacatttaataatgctatgtttcttaataaattggtctcttaaatctctctctctctctctctcacacacacaaaatttgcttattcttaatccaatcattgttttgaatatgatttcaatgataaaaatagcattaacatttgaagcttagtctagaacactcaaataaaataacaaacataaaatagtaacaaataccctttgtcttatggtggtgtcgtcactgtcgtgggtggaggaagacttggtggcggtgccgcctacgtgaacgaaggactggtagctggtgccttgtctggtgccgtcagggtaaaggatggactgggttcgcggcttggtggtggtggagagtgaaacttgagagttgagggtgatgagtggatgcgtgtggatttagg

SEQ ID NO: 39312 - DNA, 2253 bp, Cannabis sativa
cctcggctttggccttgtcatatgtaatttattttctctagtttgagattttattagctctgcctgatttggggtgccttaggtcctgttttgttgaaagttacatcattttgttatcatttttttagaataatgataatgctacaattgatactagttaaacggattcaatgtttgacacacaaaagtccccataaacattctgttaccattaattttggatattattgtatcattactcattacttattttatttagatggaaaatggaaaaaggaaaacatacttgtattcaaaatgagttatattcaaattgagagtgactgtaaagtagtatggcatattatgtttgtaaattcataccacaactcaatttaaatttcattaatgtgcctagagacttttttggagactaactttttctttgtaaaagccatattttttatagcttatagctttggctcttgaattttctccaagtttgtttttttgtcatgaatgttctagataagaacttgtaaagtcatagcagtataggcataggaactacataaagaatagttttattggttttttttatgtactttttttattcatgtcctttttctttagttagaggagctttgaggcttatggaaacttcttgtagttacacaagttattaactaatttttaaaatgaacgttcttttacttgttgatgaaattttgttgctacaacaagtaatttagttgagagttgttgtgtgcacatcattttactgtacaatatgtttggtaggagggggagatgggtggatggagaggagtggagggagagtgatcgaaggagagactaaatcacttgtttgggagaaggagagaaggagggagaggagaaatggagggagacattctcccctccaaattcggaaggattttagaaaaagacaaaatacattttgcaaaatacaataactacccttaaaaaatcataaaataatatttgtaaaaagataattttgtaatgttactaatcaattttttctccatccttcccacctcacacctaataccaaacaatacaaaggagattaacaatcctctctatccctcttactccccatcctctctaacctcttcatccatcctactctccctccctcccaccaaacatagccttaattagatggagaatgaaaaaaaaattgtactaagagtgacgtaccacgaggtaaaacaacatggaattctgagagtgaatttttttttcagaattctgtatgaaagaggttgatgatgggcattgccctactacttatttagataaaattgaatatctaaacttaattacaaatatttacaaagcagctggaagagattacactaggggccagcttgaaaaataagtgggatgaattgaaaaataactggaactttggaagcaactcaagggaaaaaaaatcagtttaggatggagtatacaaaagaatacaatttatgcaactgaagaataatggaatagtaaattacgggtacattataataatgttaaatattcatatgaaactaaatgattctgtttgtgaatgttacatttaattaacaaaattcctttggtaagtcatcttgatgcttcaaagtttcgcattcggagaattgacccagaggtagaggaacaattagataggattgtcatgaacactgtttctacaggggagtatgcttggataccttcttctggaataatgccatctgagtctgaaaagccttttaacgatactgaaaccttacatacacaacttgagagtagtgatgatgatctagagacgcctaatattgatggatttcctagagagaaaaataataaaagatcaaccgagccacttgagaaacaaaataaaaaagtaaaaaatggaaaaaggaaaatgaagaagacggggcctatagtaatatttgaacaaattggtcatcttgctgatgtcgtagagacaagaagtagaaatattgaaacaactagaaaggagaatagtattgccgaagttataaaaatattaaattctttgcctagaattgagaaagggagcgacttgtatttatttgcaactcgcttgtttatcatgaaagagaagagagagatatttgcttcattggaagaaccagagttgatgcttacttggctcaagaataagcatactctggatcatgatagtagtatttattttctaaactttgtgttatgactttaataaatgtttgttatgttatttcttta

SEQ ID NO: 39313 - DNA, 2253 bp, Cannabis sativa
  modified_base (1020)..(1034): a, c, t, g, unknown or other
tttagcggtaataatacctaaattataatattagaatttcggtaggtacgtatttggtgaagtaaattgtcacgtggtaatcactaattggtccaagttattaaatttttattatttaaaaataattagttcaaatataccaataaaaaaatgacacgtgaaatatttaatggctttacggttaggtacctacagaattccagaaatataataatttaagtattattactgtcaaaaattaaacttaagtatttatttacaactgtaagttaaacttataaggtatttataccgcaaattactcttaataaaaatataaaaaataaaaactaattaaatatttatagattaggtcgtttaataattcattatattattttggcatgctatgctagactaggcatgttaatttgttgagatacgtggctagctatatatatagttagttggctgactcatatagaaagcgaggtgggacagtcgcttttttacaaaaaagtagattaagcaaaaaatgtatatgcattttagtaattagttataacatgtatttataataaaaaataatatttatatgcataatattaattttggtgtaatgattaaactagataacatataagataaatattaagggttcaatttttttttgtttttgagtttacttttattcatgtgccttaccaaataaaaattatatttttttctttttaaatttacttttattaacctgcttactaaataaaaattgcgtcccctccttcactttaaatcttgtgtctgcattaatttaatactaattattagttactattagaataatatatatactaattaattatatatttttttaaaaagatatctttaaatattttcaacaaactttgataattattttcttatatataaatcttaatttaaatttgaattaaatcttaatttaatcaattaatcatattttataacaaacttataattagttatttcgttagaataataattttttttatataaatcttnnnnnnnnnnnnnnntagacgttaatttaattaattaattatattttataacaaaattatcagttatatatattttgtttaaaatatctgaacttatttttacttatttattgtttagtaaaattagttaaatatattttcttataaataaatttaaaattaaatttataaaatttaagaaatataattgaattgtattagttttaattattattattattattattattatgtaaattaattaatagttaaataataataataattttaatacaactctaaattagaaacagatataataacatgttattaattaatagtatatataatgtataatatatccatataataacatgttattaattaatagtatatataatgtataatatgatatccatatatatatatatatatgatatgagataatttcgcctctatccacgggactgagtgagtatcccatccattacattacatgcatttgcagttacatattaattattgtatatatacgcatgtaaaaattacaaaatttatatatataattttgtttaatttgcttcattatttgactaattaatatacacggccacttttaattccaagtggaaaatttcatttgctacttaatcaggtgacgtttacatttaatggcacacaaattaatgcctccaaattcttggtaaacttaattattaattaatttaaaacataaatatatataagattaaataaattatatatttagagatgacacttgtatatttcataaaatttaataggatattaagtagatctagtgtttttatagcctttctcaaatttttaacatgtccagctagctagattagatatgttaattccatgcatgcgatgatcgttgaacaaattaattatatcatgggcctgcatgcatgcatgcatcatcatgaatcaatatctcctcttaaaaatatgtgtatcatattgtgttaaataaatttaaaattaacatattaattaatttttcatttattaaaaaattaatcatctatgtacagtttttttttttcttataatgctcaaattaattgatgtgttacaataataatagtttagtacattataaaacacaatattttagaagatcatcttgattccatgatcatgatataatattgtatatatatatatatatttttttttgacaaagtgatctaaattactcatgaatttacgacgcccacgttcgcca

SEQ ID NO: 39314 - DNA, 1356 bp, Cannabis sativa
tggttgaaatgaacaagagaacgaaaacccaaaccaccacagaattttaatttacatagaaacttccaagatttccaatgaattttcctagactctccagtagaaccccacgagaatctggccatcgcagcttcaattccccttacaaagcttaaccggaagcctaaaacaagccatcgcataagctttcaaaagaacctccttactagctctagagaaacatttggaggaccaggttctaagaacagaagcaactttatccctaagaaaagaaaaggaatgatatttagaccgagaaagacattgaggaagacctaaatacttagaaacaaaaggtctatcttccaaatgaaaagtgtcaaaaaaacatattacgaatctcctgaacagtatttggagaaaaagggattgaagatttagagaaattaatagcttgacccgaagccctagaatagatatgaaacacttcttgaagagctaaacaagaatttctatcagtagagcaaaaaaggagactatcatctgcaaaaaacaaatgagaaattgatggggcatgcctagaaacagagattcctttaaggagttgagcatgttaccgaactcgaagaaaggaagacaagcccttggcacagagtaaaaagataaggggataaaggatccccttgcctgagacctctagaaggcttaagagaacctttaacttctccattaacaagaaaagaaagagtagtagtagttaaaatggtacatgacactctccaaaaaatgccattccacacgatcaaaagctttagccatatcgagctttagagtaacaaaactaacagggaagttaaaatggtacatgacactctccaaaaaatgccattccacatgatcaaaagttttagccatatcgagctttaaagcaacccagcccctcttgccagattttcgagaattgatagcatgaacaagctcttgggcaataaggatattatcaaaaatgactcgcccagagacaaaagcactttggaatggggagataattttatccaggactactttaagtcgattagcaataaccttagaaataattttatatattgtggagcacaaactaataggcttgaagtccttcatagtattagcatgttgttttttagggattaaaacaatcaatgtattattgatagtagagaaattaacctgatcatttaaacactctaaaaccgcatgaaccaagtcatgacaaaaagtatcccaattcttctggtagaaaaaagcattaagaccatcaaggccaggagctttatcaccagaaaggctaaaaacagccttcttcacttcctgagcagtaaatggctgagccaaaaa

SEQ ID NO: 39315 - DNA, 3955 bp, Cannabis sativa
  modified_base (57)..(57): a, c, t, g, unknown or other
agaaagttatctttcatgccaaaacaaggtacacttataatatatatatatatatanatatatatatatgtatgtatgctacataaaatatttattaatttattatataataccattattatatagatatatcaattgaattagcgtcgatttcataaaccaacattattgatttcaactttagtttaaaatcaaggctattatttattgatgtgccactattaataatgttgttagatgattgaggtatctaataccacttcaatgtagttgcatattatgtttctattaatagtgtaaaaacaattgaaaataacaaagaccatatactgcaaaacactcaccatattcatatgtaggtgtacacaaatttagaaggaggtaaaccacacttggtaaacactgcatgggccatgttggctctcatcgaagctggacaggtatgtacaatataaaccgacacaaatgtatatatttatgtatgtcatacacctctaatatatgttatatgtttatgaccatatacgtttgaatatataggccgagagagatcgcacacccttgcatcgagcagcaaaattgttgataaattcacaaatggaaaatggagacttcccacaacaggtatacattttataccttttttgtatatatatactactaattaagttgttttcaaatatatatattgatatataaataatagtattaattaaattattttcaaatacatatttatatatatatatatgtatatttgcatgtgtgtgtgttaacttgtcaactattaataataggaaattatgggagtgttcaatagaaattgtatgatcagctattctgcctatagaaacatattccccatatgggccttgggagagtacttcactcgggttttgttgccatcttttgagaataatttattgtaaaagttagtgtgtattgatagtctttcttattaagatgaaatgtatcaatatttcaattaaactaaaactcatcaatctgtatgtaatatgagtatatatggtgtatctatatcttgataaatcaattggtgacacattgttgtttatatacattatagatattcaccaataattaatttttttttaaattttcatattacataacaaatacaaaatagtattatatataaagacaattatgttatgtacattatcatctagttaaatttaggtaaatttaggtgttgttctaggaggaaggaaaacataaaaataagaatgaaaatgagaatatgaatatgaatgcgatagaataaaatttaaaatgcataaaagaaaattatggatttttttatcatatattagaatggtctatccttttattttaaaatgtaatagtcattagaaaggtcattctattggaatgacattctaatactttaatatgcaactaaataaagacatagaatgaagattgcttcattttatttctattctatttcattacctcaaaccaaatgccaccttaactcataactatctggtctccaaccctaataattattggttatcggctaatggaattttgatctcctcacgagataattttggttcatcctaaaattgttagtttttcggtactaaatcagatatgttgcagaaacattttatgagattatcgcactaatcctaaggatctcccatatagtagtgcatatattaaatccaaaagcaataatggtaaaggaaaaataccttttgatgcttatcaagtgtccttgcgttctttttgtatctatttcgatcatcctatatagcagggtaaaaaatgtcaatcattagtgtggattaataagattcgcaaaatatttttttgttgttttgtcaaaactcataagcaagaaaagtaataggcaaggagagacaaattatatgattaattaaccattttaggtctcttaatatattgtatatattgattttggattattatacccgttatgtttatccaaaaaatgaccgtgatgatgtgaatatcaatgttcaatgtgtgacaagaaagaaacaattcatggagttaagtgccccgagtcatagtagtcaactcttggaggggtccctagctctatgcataggctgactctgggagctctgaaatgggtatttctatcctgcaaattattttttcacaataacatccttcagtattctgaaccaacaagtcaggaagactattgtctgatgtctaagaactaaaaatattcaattggcatcctgaaagcaaacccaagcgcctagggtgtcaaccagtgcccaggttgacattctaggctaggttttagttttcaagtctgtcttagtgaaaattgcctaaaccttgaacttagacatgtataagacctatcacaaggatgctaaaggcatgatacttagaaacgaaacaatttgtcatttgaggcacctagacaccaagtcacctagcgcccaagttaatgtatgttatcaacttgaaatgtttccaacaactttctacagatgtttcttgggcattttctttttcttcatcaaaaatttggaaacaagtacatttaggaaagaaatagatcaaccttgaggccaaacaagtgacctaattcccacatcgacactgaacctggtcatcagcgcccagtttgacatattatcatcttgggccattcccaatgatgatttttacgaagtcttcgtggcatattctttattttcttaaaaaattaagatattggcttttgagaaacaaacagagccatcagatagatagaatggggagccagcgcccaggttaacctgatgctaggtctcagtgcccaagttgacatgtttcaagcatgtttcttgggaattattcaaggcattttatgtgttttcatcaataatgaaggtataagggttctcaagaagcaaatgagaccattcgagggccaaaatacggacccaacacccaggttgacattggtcttggaccatgtgcctaggttgacactgaacctgattcacatgtttttgttactaaaaaaaagttctacccctggaatttttcttatcttggtctaaaatagggtaggagacctcgttcacaatgtataaaccataaaagtaccaaaatgagtcccaagaagcacccagctcccacattgacacgtggcctggtgtgcaaggtatcgcttatctaattcaagttctgtctcgggcatctaactatttttttttatagtaaatgatagctacgacttctgaaaagtcaaatttgtacttcgatatttcaccacttttacaaagtggaatatcaataaaccagtcacaaataaataaattttaagtctaccaaattaaatgaaaatgtaacatctctgagaactagtgaaccacttcactagaactaaaaaattgactaagtgatgatagaatataacttagacatcaaaaaatacatgtccaatgcattttcccactcatacaacgtctaggttgacgttagaatatcaacttgggcattggttactgaacaaccttcagtaaaatggttataaatcactcattatttctctgattgatgcaattctagttgtgtttgaaagttcttttcaagatctttgtacacatatctcacactcatatctccattttgaagacatcaagtcaaaagctcatccccaattcaagtgtaatctttctctacaaaattcctgaaaacgatcccacggatgtaattcgagctccgaaattgatgatcatcatttagagtcatttttggcaattagatcatcatcaatgaccaagataaagcaagaaatattttctatatcttttgtattattttattaatattttaatggacctcattgccaataaaatgagagctccattcgctcatattttacattcaaaaaagtctccgtaaagtcaaatcatctctttgagtcattcaaatcctttttctttttcga

SEQ ID NO: 39316 - DNA, 3449 bp, Cannabis sativa
  modified_base (27)..(57): a, c, t, g, unknown or other
  modified_base (99)..(113): a, c, t, g, unknown or other
  modified_base (1462)..(1473): a, c, t, g, unknown or other
atacattatatatatataatcatgaannnnnnnnnnnnnnnnnnnnnnnnnnnnnnnttatttctgatctttaataataagtaaatctaattatattgnnnnnnnnnnnnnnnagggcacaaaacccaacaatggactcatggcttcctagacacacagacttcactccttactgtttcataggacctgatccttctatccaagttgctgatctcattgatcaacatagaaattgggatctagtggctatttccactaactttggaaaggaagatattgatcgaatactctccattcctctcagcatttttcctactgatgatgtactcatttggaatggtaccattacagaaaattatacagtgaagtcaggataccaatttgctggatcagtggttgaccttcaagacacaaacagtagctataaccttcaaaaataatggacaaaattttggaaattgaagataccttcgaagcttcgcatctttgtgtggaaagttttccataatgccttacctgtcgctgctgaactaaaccgtaaacacattgcagacactcctttttgtccattatgcaaagcaaacaaagaaaccataaaccatgcactttttttctacactagagccaaagaagtgtggcgcctctctcacctaacttttgatctcaaaatggctgctacatctacaccagatgaatttttgctttatgtcttagctaacacatcatcttttgagtttgaaagttttttagttcgttgttggagtatctggttcaaacgcaatgctgaatatcatgagaaattagccaaactggctgctgctattttggcttttgcaacagattaccttgccaaataccaggctattcatgcaccatcaatgaactccacttctcttgctgctccttctatcactccagctgctgcctcaactaatattccaccagttacaccatggaccgctcctcctgtgggcaaacttaaattaaatactgatgcagcctacaacaaagctcttggaataattggaattgatgctgttttgagagtggattaattcatcattgttgcgttatcaaaatcaatgaaggggtgcctcaaacctgaagaaatggaggcattggctcttgctcaaactctgaaatggcttatcagccttggcctatctgctgaactcattgaaacagactctttgatggtagttcagggtttaaaaacagctcttacttgtaattctgcttttcacactattttgaaagatgttaactatttagtagcattaattcccacaagcacaggtcgctcatgttaaatgatctgctaatacttatgtccatgttttggctaagtttgtttttacggtggatgctgattgttcttggttggaggattttcctcctccacttatgactgttatgtaatttcttaaattaatataatggtctttttctcaaaaaaaaaaannnnnnnnnnnnatatatatatatatatgactatgaccacgtgtgtacacacggacatgcatattagcatatatataaatattcttatgcatcatctacaatcaaaagtcataatccactttagcaaaaaataaaaataataataataataataaataaaaaggaaaaatcatcccctatcaattaattataaatttataaacgtatattttttatcaagtgtataaaactatgaatacaaatacagtatgcttctttaaaaataagaataaaaaaataaaatgaataaagtaatactgaaaaactattccaacacatttaaaacaagtgatgaaatacaaagggctgcaactgccaacagccacgcccacctgcaccacggccccagaagcttcaaagaaacgacaaaattataatttaatataaacataaaatacttcaaacgacacacatcttaacctcccatctatgactatgacttatattatgtcacatgatcacatctcatatatatataaatagatctgaccagttaagaaacatgtatccaatcaaagccattgtattcactcaataatccaataaacatgtcgagaaacctaatcatgacagacactgatttggcactattggattcaataagccaatatcttctacaagatgatttcaatttgtctaacgtgagctgtagtttcaatgtcggtagtagtatatctagtcctccaccacctcccatcaccgacggggcatcaactgatcatggctgctctctagaggtggcgcgtgagaggaagattccggtaatgcattttcggggtgtgaggcgccggccatgggggaagtacgcagctgagattagagatcccaagaagaatggagccagggtgtggcttgggacctacgagacggctgagcatgcggctttggcttacgaccgagccgctttccgcatacgtggctccaaggctaagcttaatttccctcatcttatcggctccgatgagctggagctggcgcgagtaactaccaagcgtcgatcgccggagttgtctgcgtctacgtgtgatgaggggtcttctaagcccaaacgaacgaggagtatggagttgggtaacgttaaggtcaaagcagagttagatgaatctgattggtttaatttatgtcaggtggaaacatctgattgttggtagccttttcttagtccttcgattcatgtatataccaaagacaaatgattctcgttcattcattcattcatttaaatttttcttcaaaataaaagctgtaaagaaatatatataaatgagttgattttatcgtttgctgcctgagttccttttttctttgaaattacatcctaaatttacactaccttacttaacttctggtattaaattagattgagatttatcgtatgagaggcaaatacaaattattaatgacaaaattgtcttttacgtgattcatctactcgcttgcaagttccaactacattcaatcatcttacaatactagattataactatatgtagaccaaaatagtattaataataacaataaacaaattttaatactatatcatcaaaaattatttgaaatttttacaccaaaaatacaaaatgctaactttattacatatataccaccacacacttagttcaacatttgtacatttttctttaagtttattatatttttatcacatgcacacacaattcaacatttttgacacgttaatgatacatcaatcactctatacatcatttttctcctttttcttttctttttccttttattttccatttcttttcagttttttttaaaaaaaatagtaacctccatagctgaatacttccctctccacaatcccaactctattttccctcttccttttgctcttcaaattttttttcaactcccattaactgaattccataaccgttttccctctttttatttttctcttaatctatatataaatatggttg

SEQ ID NO: 39317 - DNA, 2281 bp, Cannabis sativa
ttttttttttagatatttcttcgagcctgttctcaaaaaataaaaaagatatttcttcgagccatgttcaaaatattcctactcaaatcagtaattatgttttaaaatataatttctaattaataattagtattagtagcattatttttctgataataataataagagtaaatattattttagactctctattttataaaatttattaattagattttttattttgttatatgatatattaaatcttgtattttttaaatggtataaaatagtttctgaactcttttttgttaaaataaaattaaatagtaactcaatttaaaattattaaaataaaatcaggtacattttttatatttgctaaaaattatttttaaattagttatattaaaaaaattattaaaaattgagataatattttgtactatttgaataatagaggattcaatttaatattttataaaatagagaatgtaatggttaatttttataaaatataaaatttaaattagtattaactctaataataatattgaaagaaaattagtatgtctactgatccaataatactttttgaaactgtataatttatcttaatcagatgtgttaagtgtaatatttttgtgaaatttttttcatttacgagtgcttaaaaaagcttatagttagggatgtttaagtccaataaaatttgccacgtcatcatttgaaatgagttcttgttgagatggggtgggatagactttttctaacttgcctttaaatttttaatccaaattttcttaaaagaaaatcatatcccaagaactgccgaacctatatgctcgtatattttatatcttaaatagtaataatgaccagctctagttcatgaatattgaatttttcttgtcaaactttcaatattattttcccttaaaataagggaaaattaatctgtcaaattaagaataaaataaactgaaaggctctaatacaaaataatccctcccctctcataatatactcatattaacactaatttgatgatgtgccaacaacccaatgctaacaaaatggacaatattttttacatcatcattagagaaggaggattgttaaaagtattactagtacctaacgcaatattcgtgttatattattattagtattgagttttatataactttaaaacaaataatttttagagaatatcgctcactaattgtagaacgtcacctattaaatatgttaagtattactagtgcctaataacaatattcttaaataagtgttctaattatatataaactataaagtgtgtctagcattatttagaggatgtagaagtgacaacttataattagttagcaataaagcataatacttattatattaaattatttgtaacccaatatcattattattttctatcgacattttaatttaaagaatagacttaattggtttcatattgattcactcaatctattttttttttttttgacgcggtgatcaaaattacacaagattaacaaagcagcaatttacaatcggtggcgaaatctcctcgaaccaagatagctcattgtctaactgaagggcatgctttgtcaaaccatgcgctccataatttatcccgagccacatgggacaaaactgcccccgaaaatttagacaataaagctatgacatcctcaaacaacacatccaactcattaaaaaatacaattcctttgttaatagttgtgaccactgaccagagacaacgaatctgaataatcctctttaattggaattccgcacgaatgaatccaattaaatctaaccaaaaatgctaaggtcttggcttgtaaaactaaaatactacctaaaaacaaaccaaaccaaaaaaacatcacaaagacaagatataagtgttcacactcgtatgctaaaaactaaaaactggactcaggtaaaataaaaccaaactaaagacgtaaataaaataaaatagagaaaactagccgaaagggttaccctttgattagtgacgaaaccataaaattcaaaactaaatatttttctcaaaaaaacaaaaataatgtaaagaataacacatcaaaacctaatacaaagatgttcgctcaagacctgtatcatcaatggctaaataatttttctaaaaaaaaaaacacctatccacactatgtaaatcaagacctaatacagttcaaacttaaagctagcaaaaattttatatacatcttaaaaaaatgaatacactattgctgtatttgaatgatttttttgatttaaa

SEQ ID NO: 39318 - DNA, 2668 bp, Cannabis sativa
ggaataggaatcctgggaatatcttggattgaatggaactctgcaccttgaatttgaagaaaccgttaacagcaatatgattaacttccggttcttggacatctattacttccctaccatgccaactaatcgagccatgtttgtctttgtgattgccttcacagggatattataaattctcccagaaatggtaaaagatcgtaattctttatcccattctgttggaatacctttcattcgatccaaaatgagaaatcctgcattcaaaacccatggagatctgcccagaatccgctccagtgcagtgttctctttgaaagaaagaatcaagaagatggcgttgtcggtgttcttctttattttcaaatcccaatcgttttcccccatattccagagtcgacacaagatgctcttcagtagagatcgagtgaaagttttcatggtgcacagccgaccaattaggcaagattcgcctatatccttctcccctgcctcgtttatctcccatccatcttcatccgttacagttaacttgctggtgcgatccagcagttcctccatttgagacaagcttgatgagcacatcttaggattaggctcttccgaagagagcatagaagaaatcgcagagagagagagtctagagagagagagttagaaaattctttttattaacatacaaaatttttaaaagaaatacacaaataagacacaaaatagtatttacattagtagtaaaactaaaatggctcaaaactaaaaatattaaattaaaaaaattacaacaatcaaggactttcctttaattttaaaattcaaataatttttatttatattcaaaatatatactatttttattttaaataatacctatgtattaaataaaaatattagggttcgtttggaatgtcgtattgtattatattgaatttgattatttatcatgtttttatacaatactatgttaaactttaatttatactaaaatattatatatttaggtgtctataaaaattaataccatatatagttttacataaaaatattacataaaatacaatttaatataatactatacaatacaatacagcgtaatatgacgtaccaaacgaacctttagtgatacaatgcaattcaaaatcatacatattattcgatttcgtgaaaaaagtttcaatggttagattcattgtagttgttagatcattattaaacggttataattaatttaaaagttaaataaaaataattaacaaattatctgtaactaaatactaacataattctattattttcttataaattaaaaataaaaaatatttacaaatattaattgtgaaaatatcttattaaatattttaattagaaaattaatttattttaagtatataattaattataactatttcgagtctaaaagtagacattttacctattattaacttgttatacgaggtcatatgaaaatgtaaccatcatagttatatttttaatgtaatcattgaatattcacccttgtaccctaaattcaatttttttgataaaatgttgtcaatacaatcaaacaatttaaaattttatgatttttgaattcaaatttaattatttgcttacatataagtgagaattgttttgttaaattgataaaattatattgattaaattttactttagtaaatatgtacaatttaaaaatttgaggtactaattagctattattgagaacatagggtgccaaatatgttttttatgaaaacacaaagtattaaatgagtatattcccacttaattatataataaatataaaattgtcaaatatacaaatcgctataaataaacaaataagtctatgaaaattaaatttaccaattaaatatttaataataataattaaaaatatttataaataaaaattacataaaaaaactctatataaataaacaaaattttttattaataaataaaaaaatctttataagaaaataataagaaaaataaaaaaccttttattaagaaaaaaattattcaaaagaaagaaaaaaacctctttacaaataaaaaagaaaaaattcaaataaacattgtgcatttcttttttcatgaataaatatagatcaatttttaaatatttctttgtaattttttcatataagagtgaatctaattgaacatttatgtttttttaatacattttagctatcaaattgataagtgagtgactaaaaaaatacttattcctaagaagattctaaaaacaagttctttaattttagatataatatattattaaataaaatttaaaatatatcaaattaaatattaaaacatatcaatattgtattgaatgaaagtaatattttgtgtcttattattgtaaatcttatatataaaaaaaaatgttcaataatgtaatgaattaaaatcatctaattgcgtataaatattaatttattcgcaaatgttatgatattcaattatatataataatatttttatatataagcccaactagagaagacaaataattaaaattgattaggccatcacaactattttggggtacattgggcaaaaaaaattataaatagtagtgattttttattttaaagaaaaatattgtattccttagtatataataataaaattataaaatatgaaatttaaaaaa

SEQ ID NO: 39319 - DNA, 1709 bp, Cannabis sativa
  modified_base (699)..(701): a, c, t, g, unknown or other
ttttttttttttttgaattcctcggtttcaaagtctcatgatattatggccaatttttgcttcttcttttttagaactttcaaagattaattgttgaagttgaagcataagaatctgttttgccttgtatcttaacaagtacctagagagaagtgttcaccttatgcattttgtagtattggccaaattaattgcatcatcaatcagaaacaaatcctagaagttgaaaaatcactatatgagttagacatgctaatggttacctttataattttaaagtcaaataaataaacataattagagattatatcaatttatatatttttgtccatatctgtgtttcctcatgtttcataccacaaaccatttagacaagcaaaactgaatcctatttatttagtcataatatgaacattttcttggattgattcgaaaagcttctaaacagttcctcttagttgaaacttattaaaatatgaaatatgaaaactaaaatattgttaagacttccttttcgtctgaatcataaaagttggtagcatatatatattataccatttaaatataactgtcttctgtcacataaagacaaagcatgattttgatcattcaaccgctcttaataaatgtagtacacattttctttaatgtttacataaatttcaatccttgctggatatatgtatttatatatatatnnntatatatatatatatttgaaaaatagagtaactatgtctcataaatgtgaagaaaaaaattgtggagttcatggtttacatgacaaaattaggtgatttaagaaagagaggggattcattcctatagcaatgattaagatataattttatttatttggacgactactgtaaattacagatgtgtagtgactgatgagtaaatattatacttatagaaaaattatacaagtaacgtttttatttttactacttagacaattataattaattttttatatatatatatatattgtagttatagtagatatttcacttgtttttagaataatttataatattaaacacatggttcaaattgttatccctattctcgaatgaattgtacatgacaatcacggaaggatgtcaagtcagattatatattgttattttacaccctttacttatcgtggttacgaaaggagctgtagtacccggaggctcttcccgccagcaaaggcagaaagaactctgaaattctcatcagcgatgctgctgcgggaagagaactgaagtcatagacgctccaggatggtagcaaattagttggtccaagaaagccttacccaaactttcctggaactccctaatgcctaacccggagctaaacccgacggttgcatatcttctgacaccaaatcaaatcttgtctcctgcgtcagaccttagcaatgctcatacatgctctatagctgctttttgtccaacagtttgtctatttattgttttgtattttccttaaggtctaaataatttgtttttgaaatctcgataaacattttggtactttcattgagagttgaggaaagtttgctagttggtgcatcacttcgaccatggtaaatacccgaaagaatataagcaagaaaaccccattggacactgttatggaggaagtaggctcacttgcctctaggccccagacgggcaatgttagagaagaaggcacggcccacaccgagaaccaca

SEQ ID NO: 39320 - DNA, 1805 bp, Cannabis sativa
  modified_base (1611)..(1611): a, c, t, g, unknown or other
tcaatcatttgtatttattaattagatatatataatatttacctatttttaaggatattagacatgtatgctctaccatataaagagcattagcctatctttaaaaccctaagtcattaagcctccaaactccctaagctctcaactctaagtctgaaaaccctaattctctcttctcctctctgctacacgccccaagggctctcttcctctctctcacatgcctccaaggctctatctctctctcatgacacttgcctacttattcatatattctaatcttaagagagctacttcagatcctatcactatagtgatctgagtagtattatctctcggtatcaatacaaccaaaaggggacttggtctttacttgctaactaaagaggcccaacctatataaaatccagtatcttatttactttattattcttattatgtaacacgttgtaagcatcagcattaaataagactctgttgttagttcgctaaattttgaggtcaacgcatatgtcattttgaaaagaatgttggaggaaacctcattatgatcattgccaagctactgtcttattggaaattttcacttcgacgatcagaggacttgtgtggggatagattacatgattggcatcttcctcattgaatgagaagaagacttcctctctgcacggtttctttggctttctctcttccatgaccaatacttcttcatccttttgttcatactggagtgtctgagcatacctttctttgtctttatttgaatctccagcaaagtgtgggcccccaataatcatttgcaagtgcctatccactagtgggggcatcaagtattttttattattatctacttgggtggccctttgttcttggtagacctctatctacaaaggcatgtgcggattatttctcctgatgatgaatttgatttcttccttcaagttattacactcgttggtgtcatggtcatagtcttggtggaatcgacaatacttggtggtatccctcttcctcatttctttcttgatcgaaaggacatgtatggtacaactgacttggttgccatagagatggtttctcgagctgcggtgagaatagtgaaggcaatgaactttaaagacttctctcaaggatgttgctgataggagttatttatttttcctttctttctgttccctcgattattcccattattgggccttataccacgatttttgttgttactgatctgaggttggaaggcctggataggctagacgaatgtactggctatagccgaggagggagtgtgactaaggtcgatttcaccctagccaaccatgtctactcgtctggctgcttctttcagctttataaactcatctactcggtctaaaaattctcccattgaaccaactgtgagtctcttgatgtctttctacaactcacctttaggctcgatacctcctagcactatagctaaccttccttctttagtaagccccttcactttttttttgcctcagtcatgaaatgacttttgtagtccttcagaggctctcctggtatttgtttcacttctagtaggtcctctagatgagctgggagttgccacaaagagaagaattntgcataaaattctaaagcaaaggtgttcaacgagtcaaacgtcctaggtgtcaactttatgtaacactgctaggtggcctctactaatgttgtcaggaagatttgatacctgacgtcaccttttactccttgcaagtttttttgtatcgcaaagtacttaatgtaagacaatggatgttctctccctgtgtaca

SEQ ID NO: 39321 - DNA, 3204 bp, Cannabis sativa
cagaagtgaacatgacaactattgcaactaaattctttttcactgcccatatttcctttttcaagaatttattagtttctaaatatcatgtttggtaaagcatttcaagtactaaacatgatgtaacaagcagtttacttgaaatatctattgttaacgctttaccaaatcagggaagtactcgatttcatgatttccaatgttccaaatccagggttgatatgcagtgcttcgttcaataaaccgaccccatgtatcccaacgtaagccaatatcattaaactgatatctatcagcatatgaaagatctcccagaaataagactgccttggctccactctgcttgtaatgctccagagtggaaagggaattatatgtttgccccaaatctcctgcaatacttaacattttgtacatattatgcagaatcctcttgtaagtgtacttttcgataagagaggtatcaagcatgaatgacttacgaaaagtaccataggatgtatttaaaatagcttctcaaagtatatcaaaatggagaaattagtctaaatatgtagccagaatagtaaggaaaccagacgactcaccaataataccgaatttgtaaggtgtatctggattgatcggcggaggtgtttcgaaccaaaattctctggctgtatcaccactcccaattttgtagtggtatttggtgttatactgaacttgcacaagtcattacatatatgttaaaatgaactatattagtgtgtggtgctcaacagcattgatatgttaaaatgagctgtattattacctcaaggttgtcaacaaggcagtgatggatataacctgacttatatttgtagaaagtgtagttactgactgtcccctctgctgtgaactcatatttattctcagattttccatattgtactttacttgatcctggttcattgggtgaaacccatgagattattacagctctaccatcataatcaccttgagtgatgtgaacctacaacccagaaatatgaggttcatgaaatatatgaggttcatgaaatacaaatagatatgggaaagaaatgaaatgaaacatatgatagaatagataatacaattatgatcaactaaagtactctcaagaaaattattacttgttgtggtgcattataaccatttggaactgcaaatgcttcatcatcaagagggatatcagctgccggccacactgaccgtacgaatgtgcttgttatccccgcattcgccttgtccagaatgcttgtgaagagaaaaaatttgactatgatttgaaacaacagggattgcctcgttgcaacctcggccatggttagggatggagcctgtgaatcacaatggactgactacctacatctcaaaaatacaaaagtaatttttacttaccatgaaaaatcaaccagagaaacatgaacactgaaatgcacctacaaagttacaacccattactacaatatttcaaaatatcaaatgatttagtttgagaaacctcaggataaacacttgttggaggtacatgtagcgtcataaaaagtgttagagagtcccacattgataatatgtgaaaattaaataccacaagatgcatgggctacttgttggggtatcaacccaagtctcacatttgaagaatagacaagagttgtcttggatataagtgttccaccttctccattagtataaggtttttcgggaaggtgcccaaaaacaaaaccgtgagggcttaggctcgaagcggacaatatcatactaatatgacagtcaaggtgagatagcggcccaacaagtggtatcagagccaaagatttcagagcgctgggatagtgggctgcatttgtgatgtgtggaagaaaccctcaataacctcgcgattgaagatctatatggtgtcaggtggcgtgtcccgttgatgattacggcagtacaagatggagatcggtgttaggacctgtatcgaaagtcttcttagaaaaagtgatggtcaggcggcgagttcccttagtaatagcagcgacataaggtggtttcgctggaggggaggccacaagtatgtggtcctttgtttgaggggggaggattgttggggtatcaacccaagtctcacattgaaagaatagacaagagttgtcttagatataagtaaacaccttctccattagtatgaggctttttggaaaggtgcctaaaaataaaaccgtgagggtttaggctcgaagcagacaatatcatactaatgtgagagtcaaggtgaggtagcggcccaacactactcatctcattaccaattagttttgagatggaactccatgcaccttataccatacactcacctattaatacttcctcctcattctaacaaaaagatagtaacactacaaaatataaattctaaaggccacaatcgagcctaattacccatgcaaatctgcttcttattctttatttctgggaataaaaatcatacatttattttcttgtttctaaaacagctacagctaaggttgacacacaactgcactctgcagtttaaaataaatgacatgaaaatgagtggccaaataatataattgtctagatagaacaataaaaatcacctgaatcctccaaaactaactttgatttgaatcacatgactcctatttatcaaacctcttcttgtattattaattatatatattatatacccaagtgcccggattccaacctcacatctaagttgacacctcaatattcaactcaaaacaaatcatttccagaaacgagctacagaatcgaaacatgcccattaaactataactggtatccatttcaaaaaaaaaaaaaaactataaactacaaactggtaattttaatttgtaagcatcaaaatgaacatagacgtacctttggagcgaatcaaccaatacccaattcgcttaagctgaatctaaatcaaattcaataactataatgaacattcagcatacttcaaaatatgaaaatttctactcaaaaaaggtaaaaagtgtttaaaaagtgctacgaaaaaacaaatttgaaactttttgtaggcagcaaagcaaagcagcgtggaacagtactacgcaaaggggttgatgtatggatataaaaggaatcgaatataatacgtgttagtttccattaatatagttatttttaatataaaccccaacactatctttc

SEQ ID NO: 39322 - DNA, 4290 bp, Cannabis sativa
  modified_base (2880)..(2889): a, c, t, g, unknown or other
atctttatatttatcttattatcataaaaattaaaatataacaattgaatgtgaaaaagaaaataaatattagtgctcggtttagacgggttaacccgactaaatcaaccaattcattgggtgggttgaaatttttattttaattaggcgggctgcacttagattttgtaatccggtctatacattgggttaaataaaatgtaacgtaaatcgaccaacgtacacccctaatttctctgttgaggtatctatctatctctctctccgtgcatgtgttctgattctcaagtgtgcattgtactgtattgtttaatttttgattaccaacagtgaagaacaaatttgtcattttgtattttgatttatgtattttcggggtaataaaatacttgtgttgtttaatttgattgaagaaatctctatttgttgatttggttgaaattttatttttaggggattggaataatgaagtcagttcgccgaaatcgaaggtttccatactcatcaaggtcccactctaactttggcttggcgagctcagacgtcatgtcagacaatgtctcattgctcacttgacctttgagggaagtgtaatggcattggactgatgttaacccgaacatgttgttaattgcttcagctgagaatgacatcggtacttcacgcacaataacttcagtcggccattcttgggacaaaaaattcgcgtaaaattctttgacaacttccattactgcatgttctggctgcttgacaaaaaatctccaatttctcttctgaatcatttcactcacccatttaggtaactagtcaatgtcctctacatttgccactaattctcgctccatatagaattccctattgtccaccttggtgtaatacttaatctcggctgtcttacaataaaatttaggaatttcatgaagtgacttgtgtttttatctgcgggcaaccttcttaacattcgacattctcacttctttttcaattgcacactaaacaaccacaacaaatttcctctattcttttctcttctttactatatgtccaacactattataaaagtcctttcaatacactactatgttcacaattaaccacacttcctaagttacaccaaattaacttcaattcattcatacaaaccattcacacatcaatcggccatggtgcattccccttgtcaagaaggttgcccgcagaacaaaacagaagtcactttatgaaattcttaaattttattgcaagacagctaagactaagtattacaccaaggtggacaataggaaattctatatgcagcgaggattagtggcaaatgtagaggacattgacgagttacttgaatgggtgagtgaaatggttcagaagagaaattggggatttttcgtcaagcagcgagaacaggtagtaatggaagttttctaagagttctacgcgaattttttgtcccaagaatggccagctgaagttattgtgcgtgaagtactggtgtcattctcagctgaaacaattaacaacatgttcgggttaacatcagtcgaatgccattacacttccctcataggttaagtgagcgatgagacattgtctgacacgtggtctgagctcgccaagctagagtgggacctcgatgagtatggaaaccttcagtttcggcgaactgagctggagtacgatttgaaatgtctctacacattcgtgcaaacctccttgtcccccacctcacatgattccactgtcagctgagatcgcacgtggatgttgtactgtattaagatggggtgggacgtcgatgtaagggctgtcctagcccaagagattgccgattgtgcgcatcgggggaaaggaaaattatttctgccagccactatcaacgctccctgtcgagaggcgggtgtcccgatgtggaacgaggagggagcattgaacccccaggggcttataagttttggtccaccacgagctccgaaaataactcctatttccgcttcgacttcagccatgaagcctccagtagatcgctttgctcactttgagcaagtgcaacaacagatgtatcaacgtcaagaagacatgtgtggccgtttgcacgctatgtgggaatataagcagaagcgcgatgtagttatggagcgtgcatttaggagggtgacgccatgatttgagcccaagttcccacagtttcttcagcaagttctcgacccctgggctgggccatcagcatcgaatccggaggagccccacgaggactctgagtagagggagtctcataatatgtaagctattttatattttttgttgtgtatcgtttttagtttgtattgtgctatttgtgtgttatctttggtgttttaagacttttgtgccatgtcatttatgtgtttgttaatgtgatattgggagatttgagaatttttctgtggcctagtgttctgctcgatgatgatgttttcctgctcattccatttatgttgctgcctaattttatatgttgcctttgcacgttgaattgttggatattatggatgtttctccttagcttctcctcaatggttaatacttttattttccgactacactttgcatttttcgaacgattgcttcatatgtacttttagcatctagaattggttagtgcattttcttgaagtgaaatcctagctagacttgtcctttagaaatgatttaggccatctttggacgtttgatcccttctaactttccctataaaacaaatttttccttagtcacccaagtttgaaccgtttagcctaattttgttgtgcaactcaatcatacatattacatccatcctaacatgcacttccacacatgtcctaacttaattactcacttgtcaagagccaagtttcacannnnnnnnnnggtgagtgtagcttgtggcgagctaatttaagattataattttagctacattggggacaatgttgggttgtaagtttggggtggagaataagctcacaaagtacaccattatgtactattaatcaatattctcttgctatctgtaaaataagtatactatagtaataattttcttatctagtatatatatatgtaaaaaaaaaatagcaacaaaagagaaaaaaaaaacgtgagacctttgggcctctggaggtcagccttgaatgccacagtgaaagacactgtgtttgggccttcaaagaaaaggccggttaaggaatgcaactcttttggtgataattgttattcgtccttcttattacattgcttcattaatttgcatgctattatattttactaattgtttttgtgtgtttttacagatatgggcagcttgttaagataaatgacttaccaggaaaacgggggttctccttcgaacacctctcctatggcccctcctaacaaagttagaaaaacaagttctcgttcgactattgacatacatacccctggtgttggctcacctaactcgtctcgatcgcatccatcaaacccgacatctagggccgccaccgataccatccttattggctcgacgtccatgggggcagactcacttgtagtgctgcctttggagggccattgtctggccttgtctgcgggcttgtcggtgacgcgtaactatactgaaggccttttggatagtatggacaagactatgtcaagacttgagtgtctcactccctgctcagattattgcccttgggtgtcgagaaatgataagggtaagttttttatacttgtaattttttttttctttagccatcatctaacatagatgacatgacgtgtgacagtccgtgacaattacttcctatggtcaatccagagttctcgctttacaggaggagcatgacaagcagggagcatcttcactctagcttgagcttaaaccctccgtcgagagagctgatcgacggtacccccataaaaggtacacaccttgacccccaaagggggtatctcaaggttcataccccgacccctaatgggggtacctcggggtattaaggccgtatggggatgcgtgttcggggtacacaccctgacccttaatagggtgcctcgaggtggtggtcactaatggaggcgagctccatacctccttccaaacacaaagctgttggattatgttttactaggattctagatttactacaatgtatgttatttaacatcttaaatatgacgttctaaaataatgtaatttgactgaaggcaagtgtattcatcatctttcaatttaaggctattactatctatttataggaatccaactaggtttaggtttgaattatt

SEQ ID NO: 39323 - DNA, 1494 bp, Cannabis sativa
ttaagcgaaatatgtgttagtatttatgttgttagtattgaatctttatttcgtttttctatttttcttcgtaaacaatgataatgatatcgaactttgtttaaatggtctcaagcaagtaatatgctctatattttatgaaaaatgtcgagtatattacttcgtctcacacataagatgactcataaataaaattgtcattttattgtgtcatcttatgtcttataattgtactagtaaaagaatatgtgacttaaaatatgaagagaaaaatgataggaagataatatacttcctcatgtagtatgttgaattgaaagttcatagtgaaaggtgggacccacttaagtagctgtgtccacttaggtaatgccctagcacatgataatatgtgacagttaacatagttaattaatatatatttattaatatatgagatcaaagtatagttcttctgaaatttatgaaaaaaaataaaataaaaatagaattgtatatgaaagcgaaagctgaaaaaaagaaaagcaaagatgaggatgaggtccctttataagagcattattattattattataaagttcaaaattctatggtaatgcttataagttggttggttgaatatctatgtactttttcatttatgcaacttttataattagtgcgtatttgaatttatgaccaaaaagttttcttatatactactgttgtatatgcccaataacattattataatatatattaatatatattattaggtaagtttatagtatactcctttaaatttttttaaagaagtatttcggtagatttttttatttgttttggcacttatgagaattttttagtcttacaggtatcgttaattattcgaaattttctaaaaatttacaaatagtcttaaataactacaacataaacgattatacaaaataaaactaagaaaattgtagatgacaaaataaataaaaaaaatctattaaaacaactctttagggtctacaaaaatgtccaatattctttttctttgatcattttcccttcaaatacactttctcaaactaccaccgacactataattttataattgttatgtgatggaaatcctccattacatattttaagaaagaagagaagaaaatattaataaataaaagattagacatgtgaaattatgggactatattatacacacaaaactaaatagttatatttaataatcttataagggcacatgtatatgttcctacttttgttaagtcttaatgtcacattatttataattaagatgattgaaaataaaattaaggaaaattatatatagggatttttttttttaaaaaaagtttactatgtgtgcacctcgcacttattttatacatgtgtaaatagtctgatctaatcttattttcagtattataaattgtttaaaaaaattctatccaacaaaaaaattgtttaaaaaattaggctaattaggattttgccccctgaact

SEQ ID NO: 39324 - DNA, 3699 bp, Cannabis sativa
cctagtaaaatatttccaacatcatcatgcggttaaactgggataagtggtcactggggtctgagtctcctacgtacaatgtcatttcaggcattttgaaattctttgggagctccgtttcaaggatgtttctagcacatggttctcgatcctcacaattagactctgaatcatctcccctttgtctttaggagactttggttatatctttcttaaggatggcaagttcgacgaagatccccttattcagggcactttccaagactggtattgcttgtttctttcgctccaagtgatttttaagatcatcatgtttggcattgagtttacgtctcaaattgataggaggatctttgtcgttttcccccttctctcccacgtctcctggtgcacggatacactttttcgatctccccaatcctgaggtccaacatttctctttggaaacctgcccctttgcgaactttttcctctagggagatcgaagcaaactttttgcaaatcttgagccttcttgttcttttcaggaatggtcgttggttttgcctttggggagccttctgaagggtaccgtatagggcttatctcttgatttttatgcctcagattatctggcagtagaaattcctctcttattttgtcttgcccagtgggtcctgcacttggatgcacacggatgcatgcactttccatcactttttgcatggggatcattatttcttgcatcctcctgttctgctccttttgctctgccaactcggtttcatggtcagcgacattctgtcttaatgccataagtttggtgtaactaacatcaccatacactccttactcctcttggtttttatcgtattctagatcattggtctcatcttattcttttacttttgcgtctactcaggaagccacttcctcttcatccgcctccctagggccttgaggtggaggtggttggcgtgcatggtttttagtttccaccattgtaccgagaatttacttttgatattcttcttacgtaaagctttctcagctgtcaatgaaagtaccaaaattttgaccgagattttcggcaactaattaatgagagttgtttaaatgattagaagatatttaatgcaaatatcttttacgtggttggagcattaatgagccttagtgcacgagtcactgctatttaatatagtagttgttcttacagaggatgttttacactattttttctaactcctttctcagaatatagttggggtatttatagcttcataaaaagagcaaaaaggtcactgttgttgcaagtgttgaagcatggcttgcagaagttcctaggttcgaatagtagggtatgtatgtctgtatggtaggttgcataggttttagctaggtgttaagtgagataagccctaaccttccttaattgatgtgatagtttgttatgtagccgtcacaaagctcatagattagagtgtaatcaccgaagaatgggtttaatgcctctgacatgtcttttcggatccattcaaagttgcttcctccatgccgcatttaattcccctatataattcacgtccggtaggggtgttcataaaaactgaaaaaccgaaaccgaccagaccgtaaccgaatttttggttcaacgtcatcactgaatttggcaatcggtttcggttacagtttttttgacatggcagttgattttagtttttgaaataaaaaaaaatagttaaactaaaaaactgccaaaaattaccaaaaatcgtccaaaattgccaaaaactgtccaaaactgccaaaaaccgtccaaaactaccaaaaactgtccaaaaccgccaaaccaaaaaaccactaaaaattgccaaaaaccgtacggtcggttttatacggttataatttttaaacggtcagttacgattttgtaaaataaaaatcgtaaccgaccggtcagttataaaattataaaaactcaccataaccgaccgattttgacccctaacatctgagacctaatgactgaccctggggcccctaccttgttcctggagatgaacaaaataccttggtgttaggatgcaattgaaactcccgaagggacctcccggacatgactattaaatctagataaattctcttaaggtttatcttgagtatttcttgatctttagacccacttgccacctggccaattttgggactgtcacatattttgggataaaagaggggcaacaagaaccataacatcaataacaaagtcttaacatctagcattataataacaaacaataaaaataaaaataacattcaatgggctatagaaatcagtcctaaatcaccaaacccttgttcttcccttgaacattcttcgtagacttcttaggcttctcatcctcactataaatattttcattaattttccttttaccatatgcgagcaaaagcacaacaagcctcgtgcgataagcttcgatatcaaaatctagtagaacatcttttccatgtataaagaactcaacaaaacaaatgcaacaacaaaagcaccacaatcattgtgtaataaaatagtaatcaaatagttaaaataactatactaaaacacatcaacaactgaaatgcaacaacacaaataaaattgttttcctgaccaatcaaactagcaatctctactactcttagtggagctttaacatcaaaaacaactaaaaaatgtcaaaaaaaccagaatacatagtacattgcaaaaatctataaatatcatcacgagtatcaaccaaaacaataatgaatcagaaatgaaacctaaaaaaattataaaaaaaaataacaaaaacaacaaatcacactacaataagcatttgacatagataaattcaaaaccataaaaataataaaaacaacaagtaccataacccattaaaaagagaaacatggttctaaagttaataaacggaaatgaaacttaaattcaactaatatgaaatataaatgaaaatgacctaagcaacataatagacctaaaacaactaagaattaatatttttcaaaataatggaaccatacctaagagcaataaaatctaaaatacgccaaaactaaaaaaacacaatacaaacctcaatcaaacgaggaacataattcttccccttttaatcaacatcaataggattctcctagatccctctcctttaacgattttaatttttttcttagcaggagccttcatctgtttgggtatgagctcaacaaaatcattataaaaaaatcatcatctaactttttttccctttgttttttcagagacagatttcaaccccatttttgaagctttagggcctataattagaacttttttcatagagggggatggagaagatgaagaatgagttatagccatttatatagacaattataaaaaaaacgtgggttgattcttcaatagcagttggagatcgtgatgtttcaattttttttttggagatactactttaaattatgtagggaagtttagatgtgtagctaaaaattaaaaaaaaaaaacagagaagaaattgaaataatatgcagagataatttgattgagtgtgatggaagaacaatgatattagtatcaaaagaattatgtgtgcaagtgatattttggtaaataaaataaaagaatgagtataaaaattatcatactcatataaaagtaaaaatataataaatatt

SEQ ID NO: 39325 - DNA, 1481 bp, Cannabis sativa
ggatattcttcaatcaacttttcctccttcgaattcggtttttcgatcggatatttctgaatctgtaatcttacccatgcttcaatttcttaacaaaaccaaatcttttttcttcattgatgtttacccttacttcccttggtcttcaaatccaacaaatatcaacctagatttcgctttacttaatcaaaaccctaattcccattactcagatccaggaacagggttgatctacaccaatctccttgatcaaatgctcgattcgttgcatttcgcaatggccaagctagggttttcaaaaatcccccttttgatttccgaaacagggtggcctaccgccggcgattttgaacaggtgggagcgaatgtatacaatgccgcaacttataatcggaatctgattcacagattgaccgcgaaaccaccgatcggaacaccggctcgtccaggggtaaagattccgactttcttgtttgctctattcgatgagaacttgaagactggaccgggaattgaacgtcactggggcttgctccgtcctgatggaacaccaatctacgagatcgatctggccgggaaaatgccggcggcgaaggtgtagaatccatttaccgacaccggaatagaaacggtgggtgtattcaaatttcttcattatatattgagccaattataggccgtgttggcacgtgtggattgtacacgtgcgagagtttatctgagcgtgtggaaatgaaatagtatgtcaacacgtgtggatttttttataagagaaaccgatacaagtgaaaattatcaaaggtaacaaagttacgagttgagttcaaaaaaacaaaaaaaaaaaaaaaaaagttacgagttgaggattttcttacatttatggaattagataataaaactttaaaattgatagatgtgacttccgatcactaatagaatatctataaaataaaaaaatttaaaatgtaacaaatatttaataaaatatgaaatttcataaaaaaaaaaaaaaactattatcaatagaattaatttatattatttttttaaaaaaaatcttattattttgtgttaaatttattatctattttaattatattaaaaatatttgcttacctatatttttttagctttttttttaagaataaaatttttcggtgggccattataactcataataaaaaaaaatgtattgtatctaaaaaaagtattattgaaagatcaataacataattaatatatattattgatcgaggttttcgacaattattaattattggaagttatagaagagaatttttacgtagttgggacattaatgaactttaatccataagtcattgttataagtaaatgttttctaacaagaaatctcccaatagttccttcttccatgcattattggtgtatttataggctcataatgataataaaaatatcactattgtcatgtttgtatttcctaaatttgaacataggac

SEQ ID NO: 39326 - DNA, 1688 bp, Cannabis sativa
atatatataaaaaaaaaaaaagtcaaatgatctagcagtactgcacatctttgttaaaaaaaattgatatatcacgtttagtgcactatctttttatgaaaggtgtgtgtaaataactactatgtatttacactgcatactgcatatatatagtaattatttggatatatcaaataataattatatgaaaatttctattctgatatttgacaaaaaaaattggtaatacacagtaaattaatattgtgttacattcaatataattattatcattttataacatttatttataataaatttatctaataataaaatttacaataaataaaaatttcttcataaaataaactcaatttttataacaattttataaataatatttaaaataatttttttcaattaagattacctaattaattttatgtttcatatattttgagttatttcatttgattttctagtcttagaattttgagtattcaatctcttgttcgtgcgggagttcgttggagtgttgggaatgattcttctattaacgtgttgaatgaaccatggctgtctgaccatcaccaactgctagtgatttcttctcatctagcccttcaacatgctaaagtgtgcaatttaatgtccattgacatgtcctcttaggatgatgatatcctaaaagatttgtttgaggagcgtgatcagagattgataaagcaaattcccttatgcacaaaccaagtttcagatgttctttgctggtttaatgagtctaatggcatgtattcggtcataagtgcttacactttacaacaaaaactgaaaggacttggtactgagatagttgcctccgagttttggaaggcgttatggtcattgaagctgccaccaaagataaagaacctgatgtggagagccggttctaattgccttccagccctcactctcagcttgcttctaagcgtgttcctgtcaacactcgatgtcctttgtgtgaggagatggacgagacaatcacacacattttactaacttgtagagtggttaaaaaggtgtgggagagagtaggcatcggcactaccgtgactacagcagggagtgttttcctggagtggtgcgtgaatgttttcacgcctttgacagcagaaaaacaaggcctggctgctgctctttgttgggcagtctggggagcgagaaatgatgatgtatggcaagggaaatcgtttaatatttcagatatagtcgcctctgctaaaagctatcttgatcaatggaaacgcgctcaaaaaactgaaactgagtcattatggtctgatcttcaagaccatgatgggatggagcgttggttcaaaccacaggttaatagtatcaagatcaatgtggatgcagctatttttgaaggatagaattgatttggaagtgctttggtggtgcgtgaccacaatggtttgctcaccgaaggctgtactaagttacataatggtaatattgctccgtccattgctgaagcactgagctttcgggaagctttaagctggatcaaagaccaaacatacagttcagtttgggttgagacggattgcttattggtcgtacaagctttgaggaactcggctattctgacttctcattttggttgtgtgattcaggagtgcaaagccatgttggctagtttaaataatgtctatttttgttttgtt

SEQ ID NO: 39327 - DNA, 3278 bp, Cannabis sativa
gtaaaataatttccaacaataggtactattcaaggatttcttcaatataagtgttattatatttatcgatggtatccttgtgtactctcaatcagaagcagagcaagaggagtatctacgaacggttctacaacgactacgagaacataaaatttatgacaagtttaagaagtgtgatttttggttatcccgagtgtcgttcctagggcacattattagtaaagaggggatcatggttgatccgagaaagattgaattcgttagggattagcgatggccgaagacagtcactgaagtcaaaagtattctattgtagaagggcttttcaaaattttgatgcctttaacaaagtcaaccaagaagaatgagcggtttatatggacagactagtctaaaataagtttccaagagttaaagcaataattgatcacaaatcctctgttagctctaccatccaatcaagaaaattttttagtttattgtgatgcatccagcaagggtctagcaagcattctgatgctctgatgcaagttaataggattgttgcttatgattctcatcaaatgaaggagtatgagcgacgatatcccaactcaagacttagaactttccatagttggttttgctttgaagaattggcgacactatctctatagagaaaagcttgaaatctacaccgatcgcaagagcctcaaatatttctttactcatcaatatttaaatatgagacagaggtggtggttggaattagttaaagactatgaatgtgaaattttttatcatcctcgaaaggccaacatagtggcagatgcattaagcaagaaaggtcacgggtaggttctcagaacaactataatttctcctcaattggcagctgatatggtcaaatcaggtattgagtttgtggttggcatatttaacaatttggctcttcaatcagacttgttaggaagaattagaaatgctcagttggtggatccagaattggtgaagattcgagaagaagtcatagctggccgagctaaagattttttattaccagctaacaagatattactttttcaatctgagtttgcatttcgagcagtggcgaatttagaaaggaaattcttgatgaagctcatacaattccctattcattaaatcttagtacaacaaaaaatgtaccaatttttaaaccctattactagtagtgcggtatgaagaaggatgtggttgaatatgtatctagatgcttaacttatcaacaaattggtattttttagcttcggtcatactctgaagcataaagtctctgcttatttttttgcctcggccaaccattttggtgagatgcattgatcgacgctaatgagcccttttgaagtagtgtctaacgaccatccatcgcattttttggtcatccccgagcaaaaattataaaaattacacaattcatatttagcttacataatactcttagagtttaataatatctccaaaattgagaaattataactccaattcccatttctaaaaatggagcccacaacaaaataaaatcatatataattagaaagcgctaataattaatgcttattatttttactaatctataatttagcatgcggtcattacagttaacatattagaaagaggggaaatttgtgtacatagagctgcactaaatatcgatgaatatatgttaggccaattttaaagccattagtttagcatatcagtaagatttgtatcgatgtacatagagatgcactggatactgaagcatatagagttgtgattagctgtatgggtgcttggttacaatctgattatatgtttttgtttatacttttcttactgagtctgtcaacccacaattattatttatatgtgtacgtaaaggtaaagtataggctgagcaatagtgagctcgggctagatgaaggttatacatatcgaggcagttagacttagagtgttcagatctttaggacaatagggcttcatgttaatagtcgttaggcaacaaattttgtatacaagtactttggaaaatagttgtaacttttaaatgggatctcaaatcatgtatttatatatatttaatttaattaaagttaattaacaaaaactttaattatctaaattttttaattaaccctttgattagcaaatttgtgcacaataattaaaaaatacgatagcatgcctaatttagtaggacattacactaactctttttgtaatttgtatattcttgttggagttgattatgtttcaaaataggttgaagctatcacatgtcacacaaacgaccacaaagtggtggttcgtttcttgatagaaaataatttttcccatttcggaacactacgaactatcattagtgatggaggtacacatttttgtaataatccttttgaaaaattcgtgaaagtttatgtcattacacacactacaacaattattaccaatagtttcgaaattattagtggcgggcaaaatctgatgctaataatagtagtattagcggcggagtctagactccaccgcaaataatatgtattttttttttaatttttaaagtattagtggcggagcccgccgctattgctcgcatctaatactattagcggggaactccatcgctaatactgtcgctaataattaggcagtaaaaatcttgcccttccagttcaaaagtattagcagcgggacattagcagcggggtccgaccactaatacttattaaatataaaaaaataaataaaatattatttttgttattagcagggaggcaatagcggtaggctccagcactaataatagtctatatataccaccccaaacactcttcttaacttttgtttcccccctcttctcaaatttgtaactcccccgaaaccccaccttcttcaaccattcgtaccaccaccaccaccaccaccaaattctccaccttctgctagtaagtattttatttttttttaaaaaaaaatttcagatatgtagtttcttttttttttttttaagaattttagatatatatatagttcttatgttttaaatctatttatatatatgttaattttgtgtatatatttgttagtttgtgtatatgggtatatttaaatttatttctttggtatatatattttattattcattatttgtttctttttgttttaattttatattttttttagggttattaataatttttgagatatagtttgtgtatatgagaatatttaaatttatttctgtggtatatatattttattattcattattt

SEQ ID NO: 39328 - DNA, 1515 bp, Cannabis sativa
aatttatttaattttgtgggagtttttctactattttagtctataattattaaatttaaaaaaaattacatttaattttttaaaagacaatatttttgttagcccccatatcaacattactaggtccgtccctggcggcataaatacctaagtataactctcggttgtaaataaatatcaagtttaatttttggctataataatatttaagttatatttttaaaactctgtagataactaacagttaaatgttaaatcattatttacgtgttgttttttattggtacatttaaactaattttttaaaaataataaaaatttaataacttagattaattaaaaattattacgtagtaatttatttaatacttaatagttaaatatttatttataattaaaaattaaatttaaatatttataacgtaaattactattataataaacccaattttttgttggacatactgcataccatagattgtcttttcttgataatattattaaaagaatgtagtgtttttagtggcatcttattgttgagctatgtaatagataagagtgaatacttgtgaagggtgtgtgtgttttttaaatatatattaattaaaaattgaacattgtcaataataattgtgatataaattaaactttaattgggataagagtgatccttgcaattatatcatcaatccccaaaagagtgagaatcccattccatttctttactttatctttcactgtttttggtgaagagtacaaacaaactacaaagctcaatatgaccaaattaagattattactaagttccaccattctgcccactcattcactacctgccactttcaataattcacattcatatcaaattattatcaatactatcattaattatgatactatcccttttttagtttagagtttctcatgctaataataatcctcaataggactcccaacagcttctttaatttatttttagagtacattactaaaattttattttattgtctacttttatattacactatacatcaatttttataaaatacattattaaaactttcttttttaaaaatttttaatatattttatttattttaacatattataataatatatacatgtatccctctataaaaataattagtataacccaaacaattaataaaatatatttagagcaattaatagtattctataaatatagagcataaataataaattttaaagaaattttataataaaaaacgagtttagaacatcttctatagcatatttttagtatggttctttaaactttttaaatttctctattttaatgaatttgttgtaaatattctctctatgaaagagaaaataatttgagcctccctaacattaaattacaaaagtatccactctttattattatgtagaaatagttaattgatttttctcatatatatatatatatatatgtaagggaaaatacaattgtgacagtcagtagtcccgtgatccgtaaggagaaatacc

SEQ ID NO: 39329 - DNA, 1963 bp, Cannabis sativa
tctcaacaataaatcacccattgatactctatttcacattgaacccgagtacacaagcctcaaaacctttggttgttcttgctatctcaatataaggccctataacaagcacaaaatgcaatttagatctaccccgtgcacctttattggatatagcatcattcataaaggatataaatgtcttgatacctctggtcgtgtctacatctcaagagatgtaatctttcatgagtctcaatttccttatgcatcacatcagcatgaaccaattacaacagaaacaattgcctcattttatccatctgctgtaactccaaccattccaacttttgcatctgttacagcacaccatactgcatctaatttgcctcatacaaatgctatctctagtctttctaattctttgcaggcaccacaatcaataccaacaacctgtgacacatctgctactcctttgccatctactgctactgctgctcagtctcctcaaattcaaatacctgaagcaccaaatgttgccactgctcctatatcatctccttccaatttaaggactaatgaaattgtcaatcctcccagtattacagctgacagtaatgacaacaggggtctcaccacagaagctgtcatacctactgctccaaataccactgtcccagctgctacaaactctcacaacatgcagaaccgttctaagtctggaatcagaaagcccaaagcttatttggctctaaaagaacccactagtgtaaagcaagcaatgcaaagtccacaatggaatggagctatgtccactgaaatgtgtgctctgaagaagaacaagacttggacttatgtggttctaccccctgggagagaggctattgggtgtaaatgggtgtatagaattaaagagaatccagatggtagtgtatccacactaaaagcaagacttgtggcaaaagggtttcattaacaaccggggttcgacttcactgaaacattcagcccagtggtcaaaccagttactattcgtgttgttctatcttcggctctctcaaatggttgggatatcaaacaactagatgttaataatgcatttcttaatggtgatttgcaaggggaagtatacatgacacaaccccctggttttgtcttgcccgatgcccctcatttggtgtgcaaactcaacaaagccttgtatggcctcaaacaagctcctagagcttggtttgagaaattgaacactaccctcactgatcttggtttttcatcctccaaataagaccagtctctgttcattcagcacacaaaatcatccacaacaattatattagtctatgttgatgacattgtcatcacgggtgacaactcccaagtcattaccaatattatcagcttgctgaattccaagttctctcttaaagatcttggaaatctacactatttccttggtattcaagttcagaacacaccagtgggtcttcacttgtcccaagctaagtatatcaaggatttattgtccaaggccaaaatgaatgaagctaaacctcttcccacacctatggttgcaggtttaaaactgtctgcttatggtcatgaaccatttgatgatccacagctatataggtcaattgttggcgctttacaatatctcttaattactcgacctgagctggcctttagtatcaacaaagtttgccaatttatgaagaatccgcttcagtcacattggcaagtcgtcaagcgcattctcaggtatctaagtggcactattgatcacgggctgcatctccttcgaactaatacaactgatcttattgcattctgtgatgctgattgggcatctgatccagatgaccgacgctctacctccggttttgccatatttcttggtggaaatttaatcacatggcagtgcaaaaagcaacaaaccatttcccgatctagcacagaagcagaataccgtagtctagcaaatgtt

SEQ ID NO: 39330 - DNA, 2396 bp, Cannabis sativa
aaatttaaaatatctatatgtaattaaagttaaatttaaatatttatgccacaaatataatttttatttatacttataaattcttaaaaaattaaaaataacttattcttaactttttaatttttaagcatgcgcaatccaaaaatattataattctaaaaactaaaatgcgatttaaattaacttaaattatattatgataaatattattccattcaaatggatctaataataacatagatactatacaaatagaagttagaattattctaattaatatatatataaatatgtatatttaagaaagaaataagaaggatagctagattttgtctctcaacacgtgagataattaaattaatagaatatataatattttatatattagagaaaaatgttttgttataattatgtaattaatataataatttacgctatatatttcaggaaaacaatgtggatgtttacatgaacgggcatgaccattgcttacaacatattactagcatggagaggtatatatatagtaattaataattattaaatgattaatagtactatatattaattaattaatattatttatataataatgcagtccaatacaatttttcacgagtggaggagggtcaaaggcatggagaggagaaataagttggtggaatccaaatgagatgaagttttattacgatggacaaggcttcatgtctgcacatttcacttcaacccatgcacactttcaattttatgatatttttggcaatgttttgcataaatccaccacttacaaaccactattttactctgctacagctaccaccatctgatcatatctcatcatcatcaaccttaattattattctaagttgtatttataactcttgttattactattataatgcctaaattatattatataaaggcataaattaataattaatttgatgatccacttatatgatgaaaatggatggaagaggtacttgaattattaatcccatggtttttttaaggaaaatgttgtgatatattgaactaaatcaagagcacttaaaaatctagaacaagtatcaatctaaacacaaactcttatcaaactagtaccggacttaactaatgaatgggtcacaccatttgcaacacgcggaatagcacaacaaatcactaccaactgccaaagtaatctcatcaataaggtttgaacataatattagaatcaatataattaacattacaaacaagagcatctatctcctctctccactttaaatcccaaattagaagcccaaagctcaaacttaagcgccaaaagctccgccaccaccacatgaaactcgccaaaatagcccaagctcccataaatctccctcggcatcacatatcacacccccaaaaccagcaaaacctctccaccaccacatgagctttattttagaattttatctttctttatttttttcttttttacgtggtatatagatgtgcaaatgataattaattattatgatcaactattaattcattaataagtatttttagtacgtatcaaactctttcttatatcatatatcatatacatatataaatttaagtatatcctgaaatttaaattttaaaaataaacaatatttgttggattttatacattgctgaattgaaacacaattatcatttgaatcaatatatacatatataaattaattaataaagaaatagtatctcaagctcatacggtttgctttcatatatatatccactaattaatatatttggttatctaccaacattattgcttcatctatctaatccgtacatgccacctggagaccttttttcttacaaatttaaccacataatataaataattttcaattttcttcatgaaaaaaaaaaaaatagaaaaagaaaaacagctttttgaaaagtataatttaccatgtataattaaggtctatctctctatatatatatttgagaataaatgtttattgatgaattcaacgaataattttcaacccacaattaattaatacctcggagttaagcctctcacatatacaatattaagcaagcattaattattccttgcacttttttttttctttataattattaattaattttccaaaatactagtttcttctcttaattaaaaataataatattattgtaattgtaggttgcaagtaatgtaattatacataaaaatttgaaggcaattaataattatttggtagactaaagaatatcccattttatatacttgctcatgatcgacatacttaatggtgcatcacatgtacacgttatatatataaatatatatatatatacatacatatatgttccattcaaaactctcttattaggctctctaagcttgcctttatattctt

SEQ ID NO: 39331 - DNA, 3770 bp, Cannabis sativa
ataattaaaaacttactaaattaattaaaaacttaaaaactaaactaattttagttaaaaaaatgtgaaaaataactctaatttttagagttatcagttccatcacctgtttatggagtatactccacagattctatccttgttgctgtatagagctaattgtggtacctctaggggcatgcaagttgttcagtcttcaatggaaagtgcttctgtttcagcctttaaggttgtttcatgtgattctaatattcctgctagtaatgcttatcacaatggtggtcagcctaatcccactgtgcgagggaagggtcttgcctctgcttcattagtaaagcgggcttcttttcaattgcaacagattcttgttggtggttctcttcgggaaacccttaagagagccaaggccaatgatagtgagtgatgatgctactactcttgctgctttatctttggaacaagcgggtgatgttgagcacacccgcccagaaaaatgacgattatcagttggaatgcacgaggattggggagtactcatgcattccgaaggctctccctgatggtgaaggatcataagccttctgttctttttttgatggagaccaaactttcccctggagctatggagaggctcaagctttctctagcgtttgactagagttttaaagttcctaagaaatattttggagggggacttatgcttttgtggaaaactgatgtttttgttaatattttaacttattcctgtaaccatattgactgtaatattactttaaatgataagcctatgtttcattttactggtttttatggttctccagtttctagtcaacgctcttttacttggaatcttttgcataaagttttttataatgctcctaatcttttatggtttgttattggtgattttaattcttaccttttatatagtgataaaattggtagtaattatcattctactgtggatatggaagcttttgctcattttcttgaaaagtttaatctttctcctatgtcttttattggtaataaatatacttggaaacatgggtccacttatgaaaggttggattgggttgtttactctgattcttggtttgatcttttccctgatgctattgtaaatcatttagctttttttggtttggatcatagagtcttaaaggttgtcactagcttagataatgtttctgctcctgtaatatctaagaaacggtttcaatttgagaatatctggttagaaaatcaggagttctttcaaactattcagaattcttagtttaattcttttactcatatggctctgctttctctagtttccttgccaaataatagtcctgtatatcttctcttaagtcttggaatgtttctacccgtaacttgtttaagaataaaattgcagcccttaataaaattattgctgatcttcagagtacccttcctttagaagaaagtaatgtgtctaaaattaaagtcttacaatctcagttggatgctttcttatataaggaggaagtgtattggagacagcgagctcgtgttagttggcttaatgccggtgaaaaaaacactaagtttttcaccggtttgcttctcataggaaaaagactaacactatttgttttcttaaaactgaggatggtgaggttgtcaatagtttggagggtatttgcaatattgtctcttcttactttgccaacctttttcaatcgtagagttgtgattttgtttctgtagatcaaattctttctgttttaggtccccctctgaatgatcttgagtttgagtgtttaggggaaccctttagggctgctgaggttaaaaaggccctttttcaactatcaggggataaggctccaggtctggatggccttaatactttcttttatcaaaaaaattgatccactatcagtaaggatcttgttgaggctgtgctggattgtcttaataataatggtcaagatttttcttccattaataatactttgattgctcttattcccaagaagcagcatgctcattctattcaggattttaggcccattagtttgtgtaatgcccttcataaagtcatttctaaggtcttagctaatcacttaaaaattgttttagacaaggttgtttccccttctcaaagtgcttttgtttctgggagagtaatttttgataatattcttcttgcacaagaggttgtccatgctattaatactaggaagcatggcaagatggggtgggctgcgcttaaacttgatatggctaaggcttttgacagggttgagtggcattttttgaggagcattatgtctcattttaattttcctcaaaattttgtctcttattatgaagtgtatctctactacagaaatttcttttttgatcaatgatactgtccatggtagtatcaagcctactaggagtcttcgtcaaggggaccctctttctccttatttatttattttatgtgctgaagggttatcttctttacttagagcttatcaggatagcaataggttaaaaggtatatctatctctcatagagctccttctttaacacatttattgttcgcggatgatagtctcatcttttgtgctgctagtagagactcttgtgttgctcttagggatatctttgctatatatactaaagttttaggacaagctattaatttccataaatcttctattttgttctctcctaatgtctctgttcagattaaggatctttttcttactaatctaaatcttcaagatagaccttttattataagtatttaggtttgcctcaattcctatctaggtcaaagcatcactctttctcttttcttaaggatagagtttactctattcttcattcatggcattctaaatgtttttctaaggctgggaaggaaatccttcttaaagttgttattcaagctattcctgcttatgggatggcttgcttttggctgcctgtcaagctttgtaaagaaattgagggtgtgatggctagattttggtggggctcttcaggggattttaggaaaatacattggaaaaattggcaatctctttgtcgttcaaaatttgttgggggtttgggttttaggtctcttatccattttaaccaagctatgcttgctaagcaggcttggcgtattttcactcaacttgattctttgttgagtcttactcttaaagctaggtactttcctcactcctctatcttagctgctaaggttggtcataatccttctttttcttggcgtagtatcctttgggggagggatttattagtgtctggtcttgtgtggaaagtgggtgatggagagactattaatacccctacggatcattggatccctgcttctttatttaagcagcccctttgtgatttggactaccgcaattgaagctctcttattttattgaccagtcaggttcttggaaccttgataggcttaattcatgttttgatgcttctactgtcaatgatattttgaaagttcctttctctggacttgatggtaaagatgagcaaatttgggggagggataattttgggctttttactgtaaaatttgcatatcatttagctcttgaaactcgagacatcccttccacctcttcttttcaagatttgaaatctttctaggctaaaatttggcatgcaaatgttcctcctaaagttaaacattttgtgtggagaattgtttcaaattctatacctatggctatcttacttttccaaaggcatattattccttctcacttatgccccttgtgtaaga

SEQ ID NO: 39332 - DNA, 2653 bp, Cannabis sativa
aaaaaaaaaaaagaagaaaaaggacctgctcacagttcagaagctcttgaatgcatttagacgacttctataaatcaagctccaagatagagttatttggagattttagtgagaaaagggatttttgtgctctggttttctttgaaaataaaaatggctaaaagagtttaaaataatttttaaacccttatataggtggttacaagggcagtttggtaattttaaattttaattttaggtttccccaaaaaaaattgatcatcatatattggggagtacatacgtcaggcatacaatattcaataactgtcattgtgccaatcaagatctgcttttcaagacaaggcattaaatgcccaaatactgaagagacaatcacatctcccccttcttctatcaaatcttattggatcaaggaatggtacgaagaccgaacatgtgtcgcccatccgaccagcttggtggccaaataagtcaatgtgcgagcaagaggtttccacgcggacttggggcaaatgttatcccaatttctccgcaagatgactgtgacacttatttagatgacatgtggagaaaattttataatctagacgggaggtacgcttcatgatgtgtcatccaagtcgatttattattcaaaaataactcgtttgaagaataagctagattattcgagcagggtatattacaccttctgaccagcatcaactttgcagctagctcgcctacactggctagtgaaaatgtgattggaatatccttagagctactttcaataaatattcaagcatttaaatcttgatcacatgcctgatcttgtatctcttatagagaggccaaatggtaggcaagatatacagtacgaaccatgaaatattacaactactcatatacaatgtataatgtattaaacaactataagtggtcttcaaaaagttcaagtactgaaaacaacttatgactttaaatgcaactaaaattgagaaccagagcatatcaaatctttatgaaaattattaaaaattagagcttaaaatcattgggacatcagaaatagaaacaagctaaatatttaaatgtataaacaagaattcgagcttagaaaagattttgtgcacaaagaaagaaggaagagaatagttgaaaacttgtaatttccagtgacgatacaaccgcaagattgtctgtagacttcgttttcacatctcttaagtcttaaatatattccattattgtatttaaactttattatgtaaaaagaatccatatatggtattattcctaggccaattcttttgatttatacattaatatattaagtgttgttagtgtttcagttttagatgattgacgatcaaaaccttagtttcattgccaattttttggacatcttcattttttctctagtaattatatatcattatattgcagctgacccaaagtatgaaaccaactaagtcttatcggctatgctatattttttttcttgtgtagactctgagctctgctcttttctatgattactatggattgagattttgatttttattcttttactttaatattttgtatatattatttattgatcagtattttatatactgcaatacataatacataagagagtaaaaaatttttacatcaaaaaaatgttagtttttaattggaaaataaaatgttagcataattatttcataactctttgattttttgtaagagagattttttttgagattatcacaatagaggtagtatcaagtgaggcacacccttttatttattaggtgactctgtgggtagtactcatattttatacaatggcacataatttttacttgaaagtttacacaagattaaaaatttatgctcccatttgtgttttctaacttctttctcgatattcttagcttctttagccaaactatggatgcaaaagccaagaccaatgaaactaagataaatttgtctatttactttttctgtaccttctctactatatatcttgtcaacaacttcctccaaatgttgaatgaggattttcttcgcatttagattgtcccatctcaatgtggattggtaacttttgtcttgtttgcaacttctttttcaacttgtggtgggtattaatgatagttaaagttatttcttctaggttgttcagaggcaatactgttattgaaaagctctagatcattgttagcttttcttcagggtgtcttctaaatcacctccaagtcttagtgatgtttctgagatgaactctatcttatatcttatagatcacgaactgtaaaatattcaccaatgttgaaaatgaccctaagagcttatgataggtagccccattaaagggcacaaaccgaaaattgggcaccatcttaggttctacaatgaacttctccagtttttctacatggcatttcaactgatgctgcctttctttcagcactcttgaagaagccaatgtgtttttccattgaagaaaattagctattctttcaatgtagcttccaaatagttgaatgatcttcagtatttcaagctttgcaagagtttctgctcttgaaggactgaagagaagctcaactataatgagacaaattatttgaatagtcgcctctgtgacccttgcaatttcaaacataactggggg

SEQ ID NO: 39333 - DNA, 2674 bp, Cannabis sativa
  modified_base (180)..(180): a, c, t, g, unknown or other
tttctttttgttttttaattttaactgttttgagttgttctgtgttatttatttttattcattatcttatagaactgattatattttaattataattgatttgagttatttagtgtcatttgttttcattcattataactagtttgagttattttatgttatttgtttttattcattatnttatagaaccagttctatttttaattataaatggtttaaattattgtgtgttaattatttgtattccttatgttatagaactgattatattttaattataactagtttaagttattctatgttatttgtattcattatgttatagattaagttctactttaattataatatgttttcagttattttgtgttatttatttttattcattatgttatagaactggttctattttaatttatatatgagatttctacttctagtgacctttctagtgatggtgacttttcaggagattttttcggtgaatttttcggggacgataactaatctgacgacttttttggtgatttttccgacgaatttatcttttccgacgactttttcggtaccagtgactttcccgatgacttttttgataccggtgattttcttgcgatacttattattataagttttatcaaatttatttattgtattttttgagtagataccattttggaccttgtgttttgtaaaagttatcaattggactctctgttttgttaaataacaaaataaatcctatatttttcaaaatagtaaaaatataaccatgagctcaatttttaacaattttattttttaatataactaaatttaagacaatttctaacacaaacagacacaaaaaatgtaaccagttttgccataacatctctagatcagattattattaagttttatgttgacaaaaaatcaattcagggtcttatatgtacaattttagaaaatacgaggtctattttgtcatttaacaaaacagagggtccaattggtaacttttgcaaaacataggatccaaaatgacatttaccctattttgtttaattttccatattttaaactttaattatttttttttatctcgtatctttttgcattatttatttatgtcatataaaagtaaactttattaaattttctcatatttatgaaaaaccacatattaaaattaggtgtgtaattggatattcaattaaaaaactaatccaatctaattagtagttggattttcttggattagattttgaggtcaaattaaattggattagatgatgatttttaaatccatttactaattgaattggacacgtaagaaatttagctctatgtaggaattaacctctataatttcagcttcaagatcacacttaaacaaacaaatattaaatccaaacaaacaaatcaagaataaaaccagcaagcgcatatcaaaccagagacataaacacagagataaatctagatagcttttagacacaataacacacgagatttatactggttcagatcctaagttcaatgtgaacttggtcctactctagtttgaaatcactgccaccaatctttattaaatgagattaagagacatcaatctcaagagctacagggaaataatcatagtaaatcttccatatatactcattaatcactaacccaagccaacataatcatcaatgttgttcaataaatttctcaatcccagctctctcactctcggatatctcttttgctttctcactttaacttctctctctgcaatgttgtgtctttctccttttttttggttgagtcttctttttgttattatgaaatgagatgagtagttctctttataaaggtcaatagacctaatatgattgctttcacattttaattaatgaccaattaactaattaaccaagttttagttgagtttttaaggaataataccataggattaaatttctctagtattagtagaacttgtaatttttccgctcataatgtggttaagtgggcgtttacccataagaggtttagttttatcctgctatcttctattccggacaacctgtattgtaatgatcataaggtctaaccttttctatttatataagcacaaattttcataaaatattaaattggataggaggagtaggagatgctcttacaatgttttgaaaaccaaaccaaacactaaaccaaaggtttccaaaatatctattgttttagaaaagatcagagtgtgaatgccaaaaatcttaattcactagacaacaaaatacatgagatgatgggttttggaagatttgctttcacaattttgatcaacctttttaatctcttcgtgcaaaattttagaaaaatgggaaacgttaattttatatgtagctactaaaatgtgattattgggtttatgttcatacattatgacataacatcccggcaaggatgccttctatcatatactagtttgtttttcttccctatttagaaattaaatctgcatttgttgcaagaaaaaagagaaaaaaattaaattttacaagtaggggtgtttattggatcacattcaatggatttggatcgatccgacccaatccaattatttattggatattaaattttgtcatctgatccaatctaattgaattgagtcatccgatctgacccaatagatgtattggattgg

SEQ ID NO: 39334 - DNA, 3160 bp, Cannabis sativa
  modified_base (2591)..(2604): a, c, t, g, unknown or other
ctgcagtataaaatttataaaaaaccacagtaaaaaagtaaaaaataccgtctgatagtatttttgtaaaataaaatagtaaaaattagtataccatgtaaaatatgatttataaatataaatatttatgatttgtttaatcaaagtatcaaattagttgtagtgacattactactattaatcaccggtgattttagtcactttgtcaaaaaaaaaaaaaatatcaaattagttgtagtgacattactactattaatctattaatttattagtgatatgatcgtaatcaattactactttttttaaaaaaaaaaataactaattcgaaattggtaaccagttattttaaaaagtaatgtggcagtaaccaattactcttatcaattcattaaaaataatatacaaatgtaaaacaaaaatagaaaatgcacaaatcgacagatcccattgtgttttatccaattactaacttggaactctatatttttataaatgctcatatgattttctgtatttttttttctcgtgaaaacatcttcttaaacatgtatggaaactactaaactacaaataacaaataacaatcacaacaaaataataaccaaaaaaaaatgtcacaactcaaaaaaataaaagaatagtgcatatactcctgatgcaatcaatgaaggtcattccatatgatcttcaagcatcatgagctcaagcgactcgggacggtgcatagcttcaagttttcttatgcttttgcaccgtcctttttaattctaaaagctcatttagctgtagctgtgagatgcaaagtttgtctttcttgagatttatgaattttcatactcaaaatatatgttatttattattatgtaaattacttggaaacataaaatctggatagttacaaccatcatttaattatgaaactttagctaaataatgagcaacacgattaacaaaatttcttgataaaaataaaaaatatattattcaaactagaaagaattcgtctacactctgaaatgtagaacccaaaaatagaagtcgtgtttaacgaacttcaaatagcttggatcgtgaccaaactatttgactcgaccaccacatcatgctaccttgtttctttcaaccaactcaacacctccttaacccccgatagcttcagcaagaacatatcctgcttactatccgagccataataatctgaccataagagttctgcaccacctaaccatactcatacttattatgattgctaaagatagctacatcaacattgattttaatcatattaccaaccggtgcaatccagtgctcgtgcccttcggcgtcttgtaaagaaaacaaagaggaataatttttttttttatttggagcacaactcctatgatcaaaactatccttagccaacgaaatcacctatttaatagtctcatttttaccatttcacactttatcattgtgcacagaccacaacactcaaggaaacataacaactctatgttccatctccgaatccaacactgaaatctattacgaagtcatcccccaaaagagttgtcaccaatctctaacattgaaatgcccccatccgctagcaagcaataacaaacgaacatcccacgagacaatgagaaataacctctccaactcagacgttgaggggaataaaggaatgttcaaaataagctttacgtacatctctacaaaaatatctttaagaaactcttcatcccaagatgactttccaatcttcatgaggctagagaccttttgatttgccaaactaaggtgattcaaaatcacaaatggattctttttatccggaagccaagggtccttaaggatatcaatactcatttcatatccagtaaccatacgcctctcttttcgaataaccaattgagcttcataaatacattttcatataaaacttggattgcttcccaacttcggtcccaagtaggacccacatggataataacgagttttgaacacacggttaactaaaaaatcttaatgagaatgaagacgtcaacattgtttcccaagcaacgcaatattaaatttaggagattttcgaaactcaaatcctccataaatttttgagacacacatttaatctcagcacttccagtgaatattaaaatatatgttatttaatgttatttatagtgttaatagatgaatcacattaggtgtttttgcaagtgaggctacttatttaatttgccttaatcatctctacattgttacaagaaaatgattaaaaagggcatgaattaggttaaaacaaaccaccactttcccattacccttacttttaacggtaaatttaaacatgattaatgatgtgaatatcttatcttattatttttttttttttacttttttaaaaaataattgattgtgaatgttgtgttctcttaatattaaagtgaaccataaacaaaattatcactaccctaccacatccaccacagcaacaagtgtgtcctcttacccatcatttctctgccctcatcactcggttattatcacatcattataatatcttcacacaaacataattttgttatttattattattattattnnnnnnnnnnnnnntattattattattatttaagaaaacccaaatttggacccaaaagtaaacaaatattagttatatataattttttttaaaaaaacaagtatggcatgtggcaccatccctcaccaaacttcctttttctcttatgttgtacataatagtctactattatgattggttaggtttggcacttaagctaagcaaaactactatacttattattacctcactcattgccatttcaagcatcaaatcccaactctctctccctctctctctctcttcaatattatatagtatttgtgtatgtgacaaatcatagatagagtattatacacacacattgaattgtaataagtaatttttcttttgtattttccttacctatactaaatctagattatacatcattacttttttcttttctttttggtatgggcacaacatttcatttttaattattagtattctatatattgtgtgatgtttatttatgagagttcattaggtaatagacattattatcctttcaattatgcttgctaatatctttctgcgatgtgagtagaa

SEQ ID NO: 39335 - DNA, 3176 bp, Cannabis sativa
gagagagagagagaaagtgagagttagagggagagtggaagtttgaaatggggagggtaatgttggcattaaagttaatttgagggtattttttttacttttttttacctagtatattaaaacaatatatgctattttttagcatatattgtcaaatttccctaatcttattggtttggtatttctattggagcataataattcccaacaattattagagttagtcttacattactaatatgtgaaaataaattgtcatgtaaaataaaatgaaggattacccttcttattgtcaattattttgagataaaatctcatgcatcttaaatcacttcttatcccaaattctaacagtgatcatgcaattatcctcgatcgagtatcaagctcatcttcaacatcatataataaaaaaaatatcatatatatcgaggctattgagtttctaccaaacctataaagcattaacaagtagtaaacaccctaataatatatattaatattgctatttatattattataaggaaaaataaacatttatactatataatggttacaaagataccattttaaaagatttttgtttaaaaaaatactttgtaattacaaaattaattgaatctagaattaagcaagcgctggcacgtgaaactcttacacatgcaagtgagaacaataatgagataatctctctcacacaagtttatagtgtggaaaatttaagtttataactacaaagaagtcgcgtcaaaaatttacttacttattcatgttacctatcatcactttatttaattttttttattttttttattttaataatatatatcattaaaaaaatatgaaaagacattgttttaattttttcctatcacacaactttatattcacatttaggttatcacttgtaaaattgggaggacaaatattaattttggtaaataattcatattaaatattgtttggtctatagctattgctttatgtatcttattattactttaattttttttattatttttgataatatatatttatagggtatatatacaattcatatagtttgaaaagtaattgaaaattatctataattcaactaatttataactaacaatatagtaattaataaagataaaataaacatcaacttacaaaattaaagttgcatacactcatttatatataaattttttaacaactaaataactaaaaaaaactatcaacactatacaaatcatctagacactaacatattgtattgacaacttgaagtacacaagtatatatatatataaatatatatatatatatattaggaaacgaaatcgatcttcgaacagttttgagcatatatgtagaaaaatttagtagtgccacaatgttatctaatctttcgccaccttctgaaagttggtctcacaagccaatctcagtatgtccctcctctcaacagggagggacaagatgtagttagctctgtccctcacccgaagagtaaggatagagcgtgagtatgttggcaccctttagaagcgatggtggacctgcgagatatcccagattatgaaataagtcctggcgatcctcccacttttgataaagttgtgttgttggtgttgcctagccactaatagcccaactgattaaagtagaagtatccagaccgaatttgctttgacatagattttagctcaaagaagtatccaatctcataagggtaaggttgaggccagcccaactctgcatacagaacgaatatcgccaaaagatactttatacctttcggggtcatttgagctggacacaccctgaagtacatggctatatctctaaaattagggtgcatgtgtctgctctatgtggcgctctgaccaggccatccatttgtatgtcaaccgatgagctcactggtctctcataggcctatcacactggacatctcctaccatccctcctgccttgatcttgtcaagcttctgggaggaaatagaggacgagggagatatttaccagttttgttggtccccatgctcgaggactcgaggctctgcagactcctccataacgtggtatatcctgaccttgaaaagacgaccaaagttgttcaaaggttgcttgacctcatcatacgaacccaagggattattgaggaaaataacacaagtcttgtattgcctcctggcagacacagcctcctcaacctcaaacgcattgttcgtctcggatgaggtctcctcatctcggccagccacaagctgcccgaccaaaagtgcctcagcctggctggccctagctctccatcatattgaggttgtgcagcctcctcaacaaggccaactctccttctagttgttagcatagtgatgtgagggtcatagggtggttccctacaacacgtttgcttggtccttgtcgtaatggaccctgagtgcttggcaataataaatgtggtctttgcggcagaaagatcctacaatgaagaaattgccctaccaacgggcaaagtattgggcacaccgtcctagacaatataagtccaagaactaggaaaaaattgcctctaccctaagttcagatgaactgactgtaagactcaccacctattcactctgaatagcagtgatgttggacctcaacttctagaaaacaacaactgacctcgagatcacttgagggacagctggaagaatcaattggacactgatattcaaacaaaagaccgagtaaatcttcgttgatacagttgtcacctccccataagtcactcaggatcatctgcacataaaagacaagggaaggtgagcaaccaaacaaagagataagattttggttaaccatacccaagggtattacttgccagataatttcaatgtacaaggatgggtatcagcgaagtacagtttcaagtgtaacaacttggacaagtgttgagtcttaagttgattatttactacaataaactcaccacaaagtctcatacaaagtttctaaggaaaccacgtatgagacaaaggttttacaggtgcacaaggccatgacaaggttcttgtcgaggtcaaaagatgacaaaaaattggccagcctaaatctacatgcctatatgacacaaccctacatgttacagtcacatgcctaattatgtttatgtaacatatacctacgtgttgcgctcacac

SEQ ID NO: 39336 - DNA, 2263 bp, Cannabis sativa
atgtagatgacatagtaattgcaaataccaatgctgctgaggcaacatcttttaaagcttttctcaactcaaaattcaagctcaaagaccttggcaacttgaggtttttccttggtctcgagattgcaagatccaaggtaggaatgtctgcttctcagagacattttacaatacaaattctaaatgaaacttgtctccttggctcaaaggctatctccactcctatggatgccaacctttctctcagcaaagatgttggtcctcctgtcaatgatgccacctcttattgcagcctcattggcaagctcttattcttcactatcacacagcctaatgttgcctgtgccgtgaatagactcagccaatacaatagtgatcctcgacaaccacatctcaagaccgcttaccgaattatccaatacctcaaaggcacccctggccaaggactcatgttatattcaaacaacatctcccagcttcctgtagatagactctttcaactccaagctttctctgatgcagattggggcacctgcctggatacacgacttcccatcactggtttttgtatttttttcaggcagtctctcatctcctggaaatcaaagaagcaatctaatctctccaagtcatctgccgaagctaagtaccggtctcttgccaatataacctgtgagatcatatggctacacaacatcttgactgatttcagcatctcctcatctcaaccaacaaccattcattgtgacaatcaagctgccatccatatatctaagaatgcggtcttccacgagggtactaagcatgttgatatcgactgccatatagttcgagaacaggtcaacaaaaatcacatcaagctctcctatgtcccttctcggcataatattacagatatgatgaccaaagctctcttccctactcaattcaaaaccttattgtccaagatgagtgtctctaatctctacactccatcttgaggggaagttttagacactgttagtcatcatgatgtcatgttagctacagttagttatattcataaccaactctgttttttagttggttgctgatgtcctcatctcactctgtataaataccctttgttcattaataaagacaattcagttttactttcactaatacttttctatatctttctttcctctgtttcttacatgataatgtaactttcatgcagacaacaaaaaaaaaaaaacaacacatgatagtttttttttatgattaagaacttaaaccttaagtttaatctaaacattttgaaactgatcataacataatttttttttattatttccgcaattgtttgtaaggtctgaaactctaaaatttagtcaattttgctagatagtagttttgaccaaaaatgggaagccactttgatcaaaatttcagtcaaagaatttttttgagtggggttctttcctcccatttcttaatacatgctccttctacgtgaggctttttccttttattgcattacgttctttgtatgtatgactgcatcgtccatttttaatttgtgcgaatgatacgcgtcttgtatttctttttgacgtctttggtcgacacgcgtcatttctagctattttcattatttttgaagattattgttttctttcctttaaatcttgtttatttcctcttaagcctcgttttgccttattcgacgttgttttcctagtttattcctaatatacgtggcaactgctgtatgtgacatgtggtcgacataggcaaatcatccggagatgagttgggagttggactaaagaagcaacaagtatggctcatgatgctagctctcggacatgaataaaagatctatcttctcctccgagagtcaagacacagatgggcgtctcagggccagaaaggcttgagttgaacagtcactttgcttttaatgcagcatggagaaaacgtttgggaacgcccataagaagacgtgtcaaacatcataaaactgctttaggacgattacacgataattgaaggagctagtgacggctccatcatgaagaatcacatcaatcaagaagggatgatggctaatctcacctaacacctatgctacctactacataggtcatgccctattttgtaccttctgggaacttgtgcacgcccatagttaggtcttaaagacaagtttctccttttcttcttcccacaaatctctataaataccactgacaaaaattgagagggggatcgaaaaaaagaccaccaaaaaacattc

SEQ ID NO: 39337 - DNA, 2176 bp, Cannabis sativa
aaagtagctagtatgggttttaatttgctgtataggcattgtaaaagtttagttcttcaataaatgcccatatataatagcatagtagggtatatgaaattaaattagttgaaatttaatgaacccatttgttgcacggaaaatacttaagagggaccttaagtgtgaaacaccataaaaaataacatatcattattggtgcgctcctgtattgtttcattagtcattgtcatatcatctctgttttgtacatgggttttaatgaagcttgttcctttgatttgatggatgtagatgatgagaaatccttggcggatgatgtggcagtggatgcagaggggaatgcatacgttacagattgtgtaggcaataaaatttggaaagttggggtggacggaaagttcatttccatcataagaaaccctctcttcactaccacacagtggtacaagaacttggttgggctgaacggaatcgtttaccaccaagatgggtttttgattgccgttcataccttcagcggaaacttgttaaagattgacttgacaaaaggagaggaagtgaagttgatcaaggtagctggaggtccactcacttttggagatggccttgagctgctttctccaactaagcttgttgttgctgggcgaccttctgctagactagttgagagctcagatggatgggaaactgcctcagttgttgctaccttttctggcccaaagcgcagaatggcatcggctgcaactgttaaggacgggaaagtgtacctgaaccacctttttggtctggggttccctaagcctaagcatgctattattgaagcagttttctaaacttaggtgggagtaacagaggaaaacagcaatatgtgaattatgatgtgttcaaattcagatgtaactttgatggtgtattgattacagaattttttatatttatggctattatatcagctataataacattgttatttcattgatcagattattttcttttgctgcaatggccttctcaaattatatttacttggtgcttgaatttaacttgttaatcattgatgcagatttgcttgatttctacaacccttccacatgaaatccttaagattagccagcttgattcatatagtctgtctttcctcttgcttgactccatagtaatagttgattcatattcttagttatataaccagttgtctttttttgggggggaaattttataaatgatgcttagaattttacctgatatcaaattttagactcccaataattatataccaatatatgcctaattttattttcttctaccccttcaattaaaaatcataactctccatctccctcccttttctctctctctttctctctgtctgctcgaagccactactgaaaaccttgctcccttcaatctcagtggcgacgaaaccttagaagccccaaaaacctagacgaaacctatgtgccctgaactcagacccttatagcactcaagcatccacaaaacccaaagactccaaacctctgtctgtgagagtggcgaagaaacccagagaccccaaatccttcatttgcgagctttgccaccaccgaaaggtatcatttgttttttcaatttttttttttttaaagaacattgaacaactttcttttggacgtggatttgtgattgttttagtgagattttaattttaaatttttttttatttttttaggattttgtatttgtttgagatcttagatggtggtggttatggtgtttttcgaccaaatttatcaataggttatcgatatgttttttatggatctatttgtgtaacatagttttgtcaatttggtgtttatcgataggttatcgacacaatatttctggtttatcgatgtttcttgtttgtctcaattattttatcaattttgtatttatcgatagtttatcgatgatttctatttgtttaccactattttgtaaatttagtagttatcgataggttctcgatactttgccaatatattatcgatggtttctaatttgttacatttttttgtcaatttatcgacacaatatttatgttttatcgacggtttctagtttgtctcaattactttgtcaatttagtatttatcaataagctatcaatagtttagcgatgatttatgtttctgtaagattgttctgt

SEQ ID NO: 39338 - DNA, 3473 bp, Cannabis sativa
  modified_base (3187)..(3189): a, c, t, g, unknown or other
aaaaactgtgaaaatatgtccattcctatctaatttgtctctaaacaatctgcccatgaagaattgttgtggtaattgtctgtttcttccatatgaatagagctctatcggtcgattatacatttattgaaatgccttctttcttgggaggaaaaacaatgtgcttgtttcccgggaaggcggtgcgagagatgtcgaccagtgacttaaagctgtatggttcgtgcatagacaactcggacagaactttcctgttcagctgaatgttttctttcataagaccatgcatgaagtttccataattaacctgaaacaaaacaatcaagattttgtgatgtcttgctaagaagtgaaaggcgattaacaacaagaatcagagaagagagtagagtgaagctgttatttccggtcttaaatatgtattaacagccagtttcagcaattattcagaaccaaagtaaacaagaactgcagagaaaaatggcaggtccttatgctttccaactaaattttgcgaagcaaacacaagttttggagaaacatttaactaataagaatgacttatgtcagaagttcaagagaataatttagaaatcttttggggaaggaagcctctcaatagttgtaatgagttttggtctataccatcatcagcaatcccttagaagaatatgtatagacaaggaataaaatataaaaatctaactcaaaattactacaaataggtgaaacaaagtaagtaacagagagtgtatgtaccccatgttggcgagtgccagcgtttatccgttggatccaaagggaacgcatgtctcgcttcttgtttcgacgatctctgtaggaatactgcaacgccttttccaccctttctcttgctattcttatgcaattcttggcccttccacggaacccctttgctagcttaaaaatcttacccttattcatcgttgaaagtgaaacttccttttactgcagaatcaacacacaatcacttacttcactaaaaattaaaatcagtcaaaaaaaaatgtttcacaatagactgccaaaccaaaatattagcttgcagattatttcctgaacttaactctaataatctagactaaactatagtattaaggtccacaagactaaaggttttgagagactattataataagaaccaaatgtttagatatttaatatctagactttgagtttggggcttagttgagcttgagatttgcaagtgtttttgtttcagtgattttgttccattactgtgagctctttactataatggaagctaattacaagaattcaatagtgtttacatttcttcttcaaagtctagacattcaaacatgttaagatgatcagttcattaattagctctaagaataaaactctttacaagatcagtcattttatgaatcagtctgatattctaacattctttctgtttcatgtatgaactagaaccctaaatatcaaagataatactatctacaaaatgatttatagacatttacatacaatataatcttgaataaaagtaatacaaacaaactcttaattgtcatgatgagaaaataaagttatagccaaacatttagacacaatacaatacagctcaaaattagggaaaatcaatctcaaaatcaaaattgaataactttgttggagcttggaggagtacccaaattgctgaaacagaagcaaagaccaaatttttgctaatgatcctaagagcaaatcaaaagtaccctaaattaactcaatcccaactcttcaaaatttaaataggcagatcaagactcaaactttctcaacaaattacagcaataaacacaaaacttaaacaacatacataaatattgattcaagcttaaaaattaaacatttaaaatacctggtggagattcgtgagaggtaggccggagttgggtggtgccgactgccgagagaaacgaagaaacagagagcgagcgagcgagagcgagagagagagagagagggagaacgatgagaaagtaggtttgaaatgatattctatttggactaaattgtaaaagattatttaagattggggtccaaaacacaattgctaaaattcatttattattattattttgaataaattatgaaattttattaaataatagtcttcaatttaattgggacatatacgaacaggattacaattaaaaaagcgaatcaaataatcaatcacagttaatcttaaaaatatttatattttatttcatttaccgctcagaaggcacaatagtagaaactgttgcagcaagtttaacctcgtagcttcagtactaaactattgtatgaggtacgtaactgcactactaacaactctttaattacaagttgtttgaaattcattacctatgctttcttcttaagattgtcgtaaactttctacatatttagacaatatttctttgttgtttattaaagatctgctagcatagttgctcatagttttgttagaattttttattctttttcagactgagtgttcaataagggtgatgttcctgttgagatacagtcttgtcttttggctaatttggcaaattaataaaagttgtatttgtgctttcaaaaaacaacctcttaagttgcagaaaatttgttattcccaacactaacagtgatttaatgatgagccattaaagaacaaagaaaaaccaataatgaaacaaaataaaatcatgtcatagtcatatagacaagactatacactcaaaacatgtcacaaagataagactaaaacactcaaaatatgtcacacagataagactaaaacactcaaaatcatgtcacaaagatagaactaaaatactcaaaaacatctcacaaaacaaaactaatcgcagtagcaaaaattgaatgacaatagcaaaacataactccgactaagttgcacctaagttcaatgaaaatcaacgggtctagccttccggtagttataaatttaagaacgagaagctctaattttatcttttaaaatagaggaaaaaaaatcctagataactttaaaattctttattataggataaatgttattttggatcttgtgttttgcaaacattatagattagaccatttattgtgttaaatgataaaatagaccttgtattttccaaaatggtacaaataggaccgtgaactgattttttgtcaaaannnaacttaataataatctgacctagatgtgttataaaactagttaaattttctacatttgttcgtgttagtaattgtctttaagttggttatattaaaaaaattgtctaaaattaaactcagagtgctatttaaatattttaaaaaaatacaagatttattttatcatttaacaaaataaaattacaaaaaatagaatccaaaataatattaccactttaaattatatttttttgttggtaaggaggtaaataatataattgaaataaaagaaagaaaaaagaaaa

SEQ ID NO: 39339 - DNA, 1668 bp, Cannabis sativa
aaaatatcttcatgttcctatccatgacatcaaccaggagacgttgcaccatcagatgatgcatgtaatcaatgaggtaaacgccacaaccaccactgcattaaaaaaatatgagtaatcagtacagaattatagagatttttattaagatatttaagatatttacctaattttttccttcaggacaatgtcatgacaagtttgggtgtaatgcattattagaatctagtggcagtcattcatatctactaccaatgtttggttgttaattgagaactcgccagatgcattcagtaaagaaggaagcaaatccttccatggtttcatgatggcatccagctcacttttagcacaaatgggggaatcacagtcatacactgttattttctacaaatttatgtcgatttgaaccgctatccaattctggtgttctcaaagattcaaaacaatttataggaagtcattctccccccatcttagatagaactcagtttgttcaaataaaacatgaacaaaaacatttgataaatgatcgacaaaatcataagttaccaaaagagaatcttaatcttagatatttaaaaaaaaaaattgtacctgtacacctttataatacatggatatcatcaccccaactaaaatcagccctcgaacccttatttacattccaacaatgtgcgtaatattggccacatatgtggaccgaatgctacgtctttgggagaatgtgttcgaaaagaagtggtgtcgcgtcctaagcatatgggtgctcacatctacatgctacaaataatgataaaagaaatatgttaggaaattaaattaaattaagaaaaatatgtagctgtaataaaattatataagttaacttacgcaatcttgaattcattcttgtagtgacaaaaacctcattcaccaagtaggaccttaatcattagttttcacctataaaaaatatgattgttggggatggccccaaacaacaacccacaaaagctatccaacaacctctcattcgataaactgacggtatcgaacggtgcaaaagaaggattaagttttttcttcatctcagtatagtccttgtgactaactgtcacctatggcaataatggtggcatccacgagaatacaaagtgcctcattaacataagaatcataactgtcagggtacacgtcatcatcttttttcatggaaggttctggtgttggatctattgttagtttactctacagtatagtcaagttatatctcatctactccatgagaaggttatgaccacccttcggttctaggtggctactatgtcaccttcaacttaatctaggaagcattaagaaccttttcctcatcctctatcttattaaccgtctcaaccaaatctctgttgttagcaccatggacacctgaagacgatatgtaggttgaggctctggcttgagaatagtagtagattcgatgtgttttacttctctttttacttagcttgctaaagaagaagggtcctcattgttatcgttaggttgcatctcataaacacccatctgtacttgaatctcaacatcattgtaagagatggtcctggtataggcctcttcatctgggtgagaatatagctccttcatgactacaaatttttgtgtaagatgaaaattaaaataactttt

SEQ ID NO: 39340 - DNA, 3695 bp, Cannabis sativa
  modified_base (2471)..(2478): a, c, t, g, unknown or other
aaatttttaagagaagttatttatctatttattttttgaaaaggaataagtagttattcttatttgttttgttttccctcatttttagacatttcattatggtgatggcaattttatgtgtgattttttttttttttttcaaagcaatgaataaatttgttgaaaatataataatgttatacaagctagtttatgatcatgtttatcaaataaatactatacatatcatgattatcacgatatttttatacatctaccaaaaacttggatcatcatatctagccaaacaagttattcattcatccgaggagcatgcacaactaatccatgagcaacacagattagggacactcttgaaaatctggatgacaaacttgtaaaaatttctaacaatgatcttaaattcattagagtagggaaacttcattgaaagataaatcacataagtaataaaatcttggtaacaagatgcaatccaatgtcatcagcgtctcgccatttgttttaaaaacttgttatcctttctttaaaagcttgaagggacaatagtaatttatgtgtgattattgaattaaacattaagggtcagttataagattggacgggtctaaaaaaaaagataattgggtcctatattaaaaaaagtggtatttttaaaactactaaataatatgtatattttcaaaaatatatatttttttagcctcaacgttgggtgggccctttgcaatgactaggcccaccttagctcaagcttaactctaaaaatattcctttacaaattaatttttcattcatgcatggttaaaattattgttttgtgtgtagactcaattaatggatcttacttttaatctcaatgagctaaatgagcttttctttgtaaataaagtagttagaatcaaatagagggctataaagtagtgtattgttatattttaatttttaaaaaatgaaacttcaatggtggtgtaaaaggtgtatcaaattcgacacatgctaaaaattaggctaaattcaacacaaaatataattcgggccaaatttacaccacaattaatattacattttttatttactcatttgccactaattaatgaattttactaattaaaatatttttatattgatttaaataatttttttatatatagtttcaataaaaaaaataatgactatgttgactttaaaataagttaatttaaatcttgtgcattaaagcataattccaaaatttgagctaaatatagtgatatttaataataaatatagaaagcttctcatcatgatttcatgagtgagtgaagagaaaaggagaaagaaagagtgggaaattataattaggtctgtaattaatcaagcacaaattataatttgtgataattcatgttttgttatttcccatacatatcatgcatgaaagatatgaatgttcatgaaaataagagttacaaccaattggctaaatagctatagctagctagccattatttaaaatagtttgttatttattgcacttattgctttcataatatttatggcacttcttttaaatggaaatgctgtatgggacacccttgtttgtgataccttcctctgaaaatggcttaagaaactcataaggcaaaatcccagctccatgtctattcttaagattctcatcatcattcctctcatcaataatatcttcaatttgcttgatcctttgttggaatttcttaaatgagtctaagatcttagaatcttccttccaagcagactcaacatgatgccctaaatattcctcatcgctcgcatgagtagacaacaagtctaatgcagccatattctttgctgcttgaagctgtgaagggaagcacttaagaattgtgtcttctggattcgccttaaaggctttccaaacctcgggttttgattctttttcttctgaaggcatgttggttcttgtgagcgaaggtcggtttgggaaataggctgaaaaagcatattgtccaaagttgacagcagcatggtgaccagatgcgatccatgctatgtttgtcacaatatctatgaggtcttcacgtgtctttaggtcaggccaaccctccttcttatcagcatgaccgattgttcggatctccttccaccattcttgcagctcctcatcactctcaacctcgcttgagttggcatagtaatgtttaacatactcagtaacccattctttaatggcgtcccatattaggagaccatcgttggcgtaagggtagtcatcgattgttagtcttagaccatgctcacatgtctcatcctcaactgccatacctctacacattttgtaataatcattaatattagttaaacgatgtataataaatctcaaccctataattgcacatatatataaaaaataattttagtcacaacatagattttttgtgactgaatcgtgatttttagtcacaataaaaagttacttgtgactaaannnnnnnntttagatacaaattgtcatcaattcagttttagtcagaataaattgtaatttttgtgactaatacttttagtcacaacacaagaatgataatttacgattagtcacaattttttcactttcaatcacaagtttgttataattaaaagtaaaatttttgtagtaatacctgtggactaggtcagcaggtaagccttgtagatcgaatctccattgcttatcatagataacagaactaagctcaagacaatattttccaggtgcaaaagtactttcaataacaccgcctgcgttaatcaaagtatttcgagcaagagcattaatctccatcgtatacctcaaatgcggttgcaacaatctattgatcgggtgcatcgcactaagttgtctatttgttgcaatcacataaggttcaacacaacaatgtgtccttagcctgcatgcaccatcaaattatcatctcattagcaaaataacatcggctaagttcacaacggtgtaatataaaacctaaccctaatcgaaatattgtatattttaccaatgactaacgagttggtgaacaccggcatcatgagcaaggacatgagcttttgcaagtttccaaagccaaatatcagtagaatgccaattactatttggggtatagacttccttccattgtggcttaccatccatgggtggcctagttaactcaatagccacaggcattaatgtcccatatggagttaagaaaaataaggttcttgatccatagagtgttcttttttccaatttccttactttgctcacataaggtagtaacacatcatggtaatctaataagtacaacttcttctctcttctagcctgcaattatacatacataataattaaattattaattaattaatttaatcacaattttaatattatgcttaaaaaaatcaattacatcgtgcaatgtatagtcataagctttaagttgttgttcaacgatttctgtagtgatttttgattcttggggaccataaatagaagggtcgagttcactctttagtggccattcctacaaagtcaaatagtaacaaattatattaatttggtaacaaattttttaatattgtaaaattaagttcaattattaacataattaataagaacataccgtcactaattgaagacaacaagggttgagaccagcaatagtttgtctagcaaattcttcatctctaaacca

SEQ ID NO: 39341 - DNA, 847 bp, Cannabis sativa
tttcaccaaatacactcccttcggttcaagctcaatttcatcaaattctttaaatgccaatccaaccttgtcatgaacgttatttggggctcccttcctactctggtagagataaaaaattattgtttggtgacattaaagagaaactttggaagcatttgtcagcctggcaagaacaattgttctcaatcggtggaaaggaggttttattgaaagctgtagctcaatcgattccaacttatgctatgagttgttttcgtctctctctccaaatcgctcattcaccaaatttaagtcatgatgaataaattctggtgggggttctaactcttctaaatctggtattaattggaagaattggtctgttctttgccagccttagtcagaaggtggtatgggtttcaagagtttcattcactttaaccaggcaatgttagctaaacaggcttggcgggtcttctccaatccaacttctctgcttagtcgtattctgaaagcaagatactattccatttcttcgttcttagactcacgtaaaggttcttacccttctcttacttggcaagggattgtctggggtaaggaactcctcttaaagggattacgttggaaagttggagatggacatagcatcttatgtgtatcggacccctggattcctggcataacaaacttcaagccactgcaatcggctgggactaccataaaccagcaagtgtcttcccttatcacaccagaaagacaatggaatttagagttattgcatgcaacttttcttaactctgatgtagataaaattcttcaaattcctttgactattttcccagctggtgaccaactcatttgg

SEQ ID NO: 39342 - DNA, 2860 bp, Cannabis sativa
ttttgctaaaaaatgactttacaaactcccccattggaactttaggtaatcaaaatatttttaaataatatatacctacaaaataaagttagcaaaatcatatattaaactccccatgagaaacacatcattacaccaacctcaactccccttgaaaaaagagtccagagttgagtatacaacacaagaaattaaaaccattacccccttttttgtttatctataaggaccaaagacaaaaagaaaataaaacaagtccaacaaaaaatcacgaaacaagttaaaggaaagaaagagaacacaaaacttaagccccataaagcttgatcaaaggacaattgtttggacatttcttattgaacctcctccatgttagccaagcaatttttcatcaaggtcacttcctgcttgacttcttgcacatcaatagaagcaaaactggaacctgtagcagtagtagatggagttccaccaacagaagccttagggtgcttgaggaaagctccatcaaaatactccgagagttgaaaaattgttccagtgaaggaaggctcaagtgtctcattcaaaaagaccacatgcttctgagataaaagaaccttatagattagattaggaaaaataagcttgtggtttcgttttttacctcgacggaaggatataatttgctccatgatgagagaagccaagtcaatagttgtccctgtagtgattcgaaaaagaaagagccaaatcttgagacaccatcatcttgttagagtttgggaaccaattactaagagcaaaccgcattagtaaggcatggccataagtaagatgagtaatgcagactttgaccggcaagccattcaacttgttcaccaatgatttcagtgagaatgcaatcatgatccatggacatatcgccactctttacacctttaggcaatttcaagactttagcaatatcttcagtgaaagaaaatcaatgcccgcaaacatagactttgctaaagaactcatattttttatcaagcaactcatcagtcaaattagcataaaattccttaactatgccattaatataaccttcaaattcagttaatgtgtccttccaattttgatattgaacacactttataatgtcataaactcgataagcatttaaatcaaaatttctttcatttttaaatttacgggtagcatataactttcaatcacgttgattgtcattataaaaaaaatcttgaattaatagcttcagaggaaaaaaggttgctagagaaaaagccttcatagtttgttttccttttgctgttgctaaagctttaactgtagaagcagatcgaggagttgttgctgcagatttaggcaatggcggttcaagatctagatcaacaagttcttcctcactttcaaaagagacaacatcatcttctacagaaattattttttcaaatgaaaaagtctcggttctggatcaaattcctcaaaagacacttccatgggatcttcttcttcatcatcactcgaggaggccgaaagagtattgagcttgagatttttagcaacaggaataggcctatcatgattccttttggtttgtgctttcttttcaagagaggcttgctgggcacgggtctgagatgaagtaccttttggggttgatgctgcagaagccacaccactagcaacaggtggtgattgagaaccacgagaaagagagccctcaacaaaatgagaagaagactttgaaccagacctataactcttgggaaattcggtgtccgtcatagatttttgagctagggttttgggtgttctcttgctggaagaaggagttgaggatgaagctttctttgattcacgctgaggaggcgatgaattaactagaatcgaggcagttgcagtagcaggaggtgattgtgatggctcaggcgattcattcaatggggcagtctctgattcatctatcttccttggacgccctgaattctttatttaagccatggaattctgaaagtaagaatgaaaacaaagagagaaaaaaaataaagaagagagagatcgggtagatagagagaatttgtgagatttaaatgaaatacaaattggtatatataaggataaaaaagaagaataaaagagaaaccaatttgaaaaataaaaaaggaaacaaaaactaccttacccttttacaaagaaaaactgccccttccttctttttttattattataagaacacacaagaaaagaaaaaaaaaaatagaaaagaaaacaacaattgccttacccttttacccccaaaaaaaaaaaatgtccctttcgcatttttttttaaacaaatcaattaaaatttaaaaaatcaatcaagatcaacaattaaataaaatacaatatataagaaatcaaattttaataggaaactcatcaaaaaaatttaattggagcacatgttgatacttatcacaagaaaacaaatgaccaaattttcttagcccacaagtcaagccacacgaatttttttttatatattcgaaaaaaaaatacaaaatattgaaatgataactagtctttatttatttatttttcaaagtcttagagcatctccaatatgggcaatttttaaaattgtcataaaatttcacagcatctcaaaatataatattttattttatctctcattcacattatttttgactactttactactaaaaatgctctaatattatttaatattaacttatatttttattattagtttgtttcaaatattatatttttcattttttttttgaaaaaacacataaatcgttgctcctgtgcaaccaccccagttgccataaaatttatctctaatgcataagctactttagagagt

SEQ ID NO: 39343 - DNA, 1964 bp, Cannabis sativa
atgacgataatcaatgaacccactcaaccaaaacgacaacaaaaacgacaaaacgacaatcccaacacttcttgttcttcctttttccaatgcgctgaactactccttccatggctaaccccaacagaactcgccaacgtttcactcacttccaaaaccctaaaccgcattgccaaatccatcacccttcgccgcatctccgacgtttccaggaacctcgagaatcttccaatcccatgttcgaattcagcggacgaagaattatacccatacttcttctacacctcatctcaaatcgcatcctcccaattccacaatcgccaatcttggggatccgcttcggctgcgaaacccgacccgaatggtcgggtcggagaggaatgggtcgggctgggggacgggtgtgagtgcgagaggtgtgaagatggtgagtactgcccttgtttgaggtttgatgggttggagggtttggtgagtgagtgtggaccgagttgtgggtgtgagttagagtgtgggaatcggttgagtcagagaggggtttctgtgatgttgaaggttgtgaaagatgagaggaaagggtggtgtttgtactctgctcagttcatttctaaagaccaattcatttgtgaatatgcatatatatatatatataatctcattttcttccacttataaagcttaaagttgggatttttaggagaattgtgtgaggaaataactgtatttgatttctctgtaattatgtgctggatgaaaatcaattgtgagaagaattgtgaagtgtgattctctgtgctgctatgaatgaacatttggttgagtttggaatttggtttttcattgtctttgtagctaacaacaatttgaaaagtttgaaatctccaaataaccaatgcatgagttattttgagagttttcaggatcatttaagggttctttcttaccataattgttggtgttaggggtaatttaagggtatgttttagtcaaataggttgtgtagaattaagtttgttttcttattgtttcaagttttaatgataaagtatggattttggagttgtaagatacaatgggtggaaaattctaaagtttggaatgctcagtttgtttaaagatttatctgtttatgtgctgtgttggttgagaatcaattgtgagaagattagtttagtaatgttctgagatatgattcagattcacagtgctgaaattatggttgggtttggaatttggtttcataaaggcattgtctttgtagctaacaacaatttgaaaagttttaaatttgcaaaataacttcttttttactttacattcagtcaatcaatgtaaatttaaggtcacttgatcaactcttggagttgtttgaggctcacttaatgtaatttgtgatttgcttgaactaccatgaatgttatattgcaaatcaattgtgtgtttgttgagaatcaatggtgaaaacttgtcctcaactctgtatgcttagaggaatatacaaaaattatgaaaattgcttgaacttgaattcgcttttggaaggtgagctcttgacaaccaaggaagcaagaaagcggcatcaagactatgataaactcacattgagcggtgggttttcctctgcactattggttattagggagcatcttccatctggaaaagcatgcttaagactcaatattgatgccacaagaataggaaacgttgcaaggttcataaaccattcttgtgatggtggtaatctctcaacatcactggttagaagctcaggctcattgcttcctcgacttgccttttttgcttccaaaaacattaaaggagatgaagagcttacttttagctatggcggggtcaggctaaggtctaacggttctccctgcttttgcggcagctcctcttgtttcggttggttaccttctgaggagacttagtgaactgctcctttctaaggtatgtttaacaga

SEQ ID NO: 39344 - DNA, 2252 bp, Cannabis sativa
ttacttttattgatcatctttaagtgtaattttaaaaataaaactttttcttaacagggtatgactccagcaatgattgctagtgttgagacaatgttagagaaatggaattgtgatgaaggcaaagagattgaagtgtatgaagaatttagattgttgactgcagaggttatttctaggacagcatttgggagcagttataaggaaggcagtgccatttttgaaatgttggctaagttgtccttgttagcatccagaaacatgttaacagtaagactttcggggatcaggtaaatttcttttagtttcgagacaagtcttaggtcctggttggctaggttttcaaatgctgttttcgggctttaaaagctctaaaacaattctgttgttggtttggtaaccaacaagtttcaattttaagttctaaaaagttttaccaagctaaaataagaagcagaagctcacccaaatagggtcttagttactttgtgtactagttgttacactacgaaaatagtgtaaggactaattagcaaattattagtatttgtaattggtgtatagagtctataatatgtaattgaatagaggttaatagatatggactgagaaaataaaatttttgttcaactgggagattgatactgtctcgaagagtgcgacccgatactttgtatcattagtgagtcagtatcaaatttcaaatgcactctttgagaccgtgttaatctcctaatagaaatactcctaattgtaattcattttcattgatgcctccatttataaaatgaatttacatatttatactagctaggccttggttggttagacttttaaaaattgtttaagtttttgaagttccaaaaatatttttgctactacttgggtaactagggaattagattttaactctaaacaaaagtcaattttagtagttttctcagaaagaacttcctgagaagttaaaaagtcaaaattagaagtttagccaaccaggacataataaacataccatggtttgtttttttaatgtagtaaaatttttaagaccaaagatgagagagaagcagagaagcttgagaaaacaattcaccaatcaattgtagagttgattaagaaaagagaagacaaagtaatgaacaaagatgcagacaattatgggaatgattttcttggattactagtaaaggcaaaccatgatgacaacataagccaaagaatttcaatagatgatgttgttgatgaatgcaagacattctattttgctggacaagaaaccactaatagttggcttgcttggactatgctcctcctatctatccatactaattggcaagaagaagcaaggaaagaggtcttcactatatttggaaaacaaaatccaaacttagatgggatacccaaacttaaaattgtaagaaaaactttaaccattagtattattattattagagtaatttgcgatgaaactctataatgttttaatttttatacacttaactcattaatttttttcacttggctattgaaattgtcactgtgtacacctgtgtatacaagatattttttcattggcttcaaagttttagtgccagatatacacaaatgtacacagtaacagttccatttgacatttattagtaatgttttagacgccttaaatttgcaaaaagaagtaaaggtaatagagtattgtaaccgaaaaaacaaaattaggggttaagtgtataaaaataaaatataaaagagttttgtcaccgattatgcttattatattatattcatttaataattctaatatatctatataattattttatttttgatgtagttgaaccagattatccacgagtcgttaagattatatcctcccttaacttcattggcaagaaaaactagaaaggaagtaagattaggacatctcaatcttccagccaatgcaattatactcctatcaactctatcacttcatcatgaccctgaaatatggggacatgattctcatcttttcaagccagagagattttctcaaggggttgctaaagctactaaggacaacatggctgcttttcttccctttggaattggacctcgatcttgtgtcgggattaactttgccatcaacaaagcaaaaattgttctgacaatgattctgcaacgatacagcttcaccttgtccccaacatatgtccattcaccacttagcattatcacaaataggccacaatatggagttcaagtaatgctacaat

SEQ ID NO: 39345 - DNA, 1202 bp, Cannabis sativa
ccaagatgctcacttgttgagcatggccgagacgcatgcttgtagggcttggccaatatggtcatggagaccttttggccgaaatgctctaggtcttgagcatgtggtcgagatggttgaggccttgagaatcaagtcgtgtgtgacttcaaaaaaaaaaaacttgtattatttaagcaagccccttgcaattgggatctaaataaacacttcaaactaaaagattttggaccactcgaatttttccttggtcttgaaattgcatgttctaacaaagggatctctgttcgcaatggcctttggctttacacattttgtctaagacaggattcctaggtcgtaagcctatttcctctcccatggagcaaaacttaaagcttagtaaggacatcagtgatcttcttctgaatcccataacctacaggagcaccataggcaagctcacctacctaccattacaagacctggtctttcctttgatgtaaagaaactcaaccagttcatgtcatcaccaagaacacctcatttacaagctacccatcgaatgttccaatacatcaaaactaggaatgtcaatcgagccgggcccgggctgacctgtcatagacccggcccgacccgatatcgctttggcccaacctgacctggcccgacctgactactttcttcatcttaatgggtcaggcccgacccaaaataatcggacccgatcgggcccgacccgtattttaaaaaaaaatagtttatttatttatttatttttaaagaaaaataattgaatagtcagtgagacatgtagagatgatcatttgcattgggcaggagaacatggctacacaacaactcttactctagcaaagtatccagctccacaccaatccaccccattcccaaaacaaatgtttcaacgaataattggtgcctactccttaactaattgaaatacataatttacatgaaaatcacaatataaagaagttttctaatcacacaaaggatgtgagttcttcaacttgggaactttgaatgtggctgagaacagttttggagtcactgacgtgggcacaacatcgtcatttgccttcctcttcgatcttttgataccctaatcgcaagaaaatatcaataacaaaaatacatatgttttaactcaaattttaaaaagaattatacagaacagtttaatttcataattttttgaa

SEQ ID NO: 39346 - DNA, 1558 bp, Cannabis sativa
attaaagtttataatatccaatattatggatacttaaaatttgaatgtgtttcatatttctacaatgatcatattggtctcaacaacataatttttcatgggcattcatttccattacatgtgaaattaatatatatgttgttgaggtctattattattattattagctagctagattcttctcctatataatctgaaaataagaaagtaggacttcattcttgaatttagttaattagagtgattcaacattattaatttctcctatatatatatgtcattcttcattcaatccaatccatagcaaagacacactatataaataatcaaattatttgattacaatgtatgcatatactttttgcatgattggtttggtactttcaaattatttatgtatagttttgaaattataatctaatattagaattattgtatctagaagattattattacaataatatatcatgaaaatgaaaatgaaattggtgcaagtgataattatagtgaagactatatatggggatggtgacactgataataccatttatattgtgggcggtggagaaagattctttgcatatatacatatttgtcatgttatgatatgatcatatacatttaataataacattaattatattaatttgtaataaaataaaaaggtaattaagaatagttcaattaattaatgtgatatgatcatattatgacttagctcccaccacttaaacttatatggtgtgggggtcccataattgtgaatattttataatagatatatatgatcaattgagtcattgtatataataataagtccaccaattattttgacaatactccaaaaatatttgttgttttatatgattattgacaaaataccaaaacccacaatttatatttcaatagagactagagtacaagtagatattgatgaactcgaggaaggtttatatggtatgacatgttattgaattttattgtagtttatggaaatgttatttgagaaaaaatggctattaaatatttgagtttttgataataatttgttggaaatattttttttttaagaattatttggcaaaatgaccttttttaagttattttatactttgatttagttttgataattctttacaaaataatttccaacacttttagataattcgtgaaaaaattttaataagcggtcaaaatatttagaaaactagtagagactctagtgtttaaaattgatttaacaaaaaattatcaaaactatgccaaagtatttgatagcactactacaaaattaggcatttttgtcggtcctcaaaatattttttaaaattagatgagtattttaaaccgtcggaaaaaatttagtatccccaacgatttagaacattcgtaagagcaagaggcgatagtttcacaagtttagaacacattatttattttggggtatacgcgatagtttataagtatcaggtatactattggttaatgagctttaacacacactttacacattaggtgaaatctgtaaagagaatattgagaagccagctgcagtctc

SEQ ID NO: 39347 - DNA, 2340 bp, Cannabis sativa
ataaccgaaagttagttaagttagttggttcaaatgagttggataataagttggtttagaggatcaatttccacaaaaatcttttgaaaccttatcttattgtctcaatgataggaattcaagagtataaaatagtaccatacaaattgagaaccattacttcttaataattgacgaaaaataactaatttttatttattattttcaatttgagcccttatcaaatcaagaattatctttatggtatatccatatattaaaattatgatgacaatcgtaccttaaattataaactttattttaaaatagactatataaatttaattcatttatataatgaaccaattaacacacatttatgattctaaataaattcactacaagcatatggtatgataacaatttaatggaattccaccaaataattaatccaatgttatatatataataatatctttttagttccattattaaagttataataactttgtgtatgagaatataatacgtgtactcaatagtatatatagttatgtccacttttcaagtggcttaatcatcattgatcatactctaaaaacacctttttttttcaatttaaaatattattgttaattaattttcaaagtaatatatatttatttacaagattccaaatctccaatacgagtggctattaattgttgtaattatagaatatagaaaagataatttacaaaaagaataaaacaaacgattagttgattcccattattttaattattatattattatgctttccatttttattaatatattattagcaattaaaataaaaaaatcaaaaatattaatttattacagaggttaatttaaactataaataaattaatacatatgattttttactattaaattaataataaattggtgtatcattaaaaaataataatatatttgtgtatatatgattatgaaacttattaatatatttttattacgttataattatttaaaatattttgtaaaattttaataaatttagaataatttataatatagaaaataatatttaaaaaatctatttaacacttaaataaaataaaaatattcatgagtgcaacagattgtttaaattttatttttcggtttttttaaaaaaaaattatttctagtgtgttaaattttttaaattttgtagaaatttttaaataactacaatatacatgactatgagaaaaaattaaattaattttttatttttcgaatatcgaaataaataaaagtgtatcgataaataattttcctataattttagatattgattataatatatatgattggatggcacgtaggacatgagttcctattcttttgtcaaatgtatatgacgtggctccaactcagctttacaaatttgattagaccaataaaaacaacctaaaaactaagattgaagagtttcataaacataagtaatataataaaattaataattgaagtcaataattgcattgcatggcttttatgtttctttctccacctcacgtctacgtgttcttcttataatattaatacttctttacacatttcatccaatcaattatcgacacgtagacagtatcacgtgatcttgtgttcatattacttgtcctttttttgtcagatctcacttgtcttcttgccacgtaagtctagcataaggtagactagatggagtgaacttttaatcccaaaatcacatacataaatattatttctcagatatttattataattacaatttttttcttttataaatttttaaaaaactgaataatttattgtagactcgtgatatttaactctactactactacaaaataaatctttagagatatttttttattgagtttagtaataaataaccgacggcataagattcgatgtggagattataattagcagacctctattattaattaatttactattaaataagaaaataaatattgagaagtgctattatcaatctttattataattttttagttaacttttgcactcgaaaatacatgtcagaatattttttttcaattttttttcatagcagtattcgttatgcttacaacatcatctctataaatttttaaaaagaatttgataatttatagtgccaaaaatacatttaaatttttttaacccacatgataaattggaatatcaaaagttttgtattcggcattgtaaactattcgatttttttttaaaaatttacaaaaacgatgttgtaaatatgacgaataccgctataatttttttttttttaaaaaaattcgaccatatagtttcaaacaaaagttctaattaggacccttgata

SEQ ID NO: 39348 - DNA, 1920 bp, Cannabis sativa
  modified_base (1409)..(1411): a, c, t, g, unknown or other
  modified_base (1861)..(1864): a, c, t, g, unknown or other
atcaagacttttcaagctcaacattgatgcagcctctatgtagtcaactgatttagcaggttttggtggtgtaattggtaatagtatggtaaagtggttgttgctatcgcctccccttataaaggtggaggggatgccacaactctcgaagcacattccatccttaaggcgctcctctggtgtattgaagaatccttcctcattcatctgattgagacaaattgcaaaagaatcacagatgccttagctcccaacaaagaggaaatctccctattcagagacattatcaaacaaattcagacaactttatcttatctccccaatgccactatccatcatgttaatcgcttagcaaacacgtttgctcacaaactggaaaagttagcactggggttagaaaaagctgctaattggattgtgatgacccatgcaatcttgaatctttccttttctcttaagggcatcccttccataaaaaaaataaatttatagaaaagtactcatcatgcgatctcaaaattgttgtcatcgtcgtcttgtagtcgccattaaattaattcaaaaattattatcattaacataactcacttgtagtcgttaacatatttaaagttatccaaaaattcttatctaataaaaaagcagtccacatgctgttgactttttcatccattgatccttcaagcgaagtctaagcttgaatttttatacaactacagccttcattcccggaagctaaagcttgttacataaattcaacataactcttgcatgtacgttatttttcatgcaagaaagattactgggggtacggtacgtcttcaaccctccttccttgattggaaggactacttgaagtctatcctaccctccgtgatgctttccttttgatcctttcaagcgaagtttaagcttgaatttttatacaacttcagccttccttcctggaagtcaaagcttgttacataaaaattcaacatgactcccgcatgcacgttatttttcgtgcaagaaagatcacaaggggtgcggtacatcttcaacccttcttccctggattggaaggattgcttgaagtctatcctacctccgtgatgctttccctttgatctcttcaagcaaagtctaagcttgaatttttatacaacttcagccttccttcccggaagctgaagcttgttacataaaaattcaatatgactctcgcatgcacattgtttttcgtgtaagaaagatcactgggggtacggtacgtcttcaaccctccttcctagattggaaggactgcttgaagactatcctatccttcgtgatgctttccctttgatcctttcaagcaaagtttaagcttgaatttttatacaacttcagcctttattctcgaaagctgaagcttgttacataaaaannnaacatgactctcgcatgcatgttattttttgtgcaaaaagatcattgtgggtacggtacgtctttaaccctccttcctggattggaaggagtgcttgaagtttatcttaccctctgtgatgctttccctttgatccttaaagtgaagtctaagcttgaattttttttacaacttcaacatttcttctcagaaaccgaagcttgttacataaaaattcaacatgactcgtgcatgcacgttatttttcgtgcacgaaagatcattaggggtacggtacgtcttcaaccctccttcctagattggaaggactgcttgaagtctatcctacgctccatgatgctttccatttgatcctttcaagtaaagtctaaacttgaaattttattcaacttcacccttccttctgttgggaatatttcaccaggatgttgaattaacatcctaaatatnnnntctctaaaacaataaaaataaacacataagagattaagaaaaccttacattgattg

SEQ ID NO: 39349 - DNA, 3768 bp, Cannabis sativa
agaatacctaataaatgcataataaacataattcatcaaatagcaacaccaaaaacctactaaaattaaaactaccattgttgagctaagtttgagttcaaaaactgaaacttagctccaaacacactacaactgcaacaagcttctcaaaaccaccacaaacaaacacaattttctcccaaaaactaaacatctcaaaccctagcataacttgttatcttgaatcttgttcaagtgatgtggcatgttcttatttgagtgacacgtatcatgttatcaagacctgggcggaacaaatgttcttccaagtgcccacccaggattagcaacttcctagatgcaacaataaaagaataaggtaaagcattctgtacagagtaagcagagttaatctagatggcaagaagcaattagcgctttatgtagtccgactaggacaaaacacgtgaagaaaactcattaatgtcagttttccattgtacatgtaattaaatccctattttagaggatttccatatgtaattatcatagtttaggaaagttattagtttcctatttcacggcttgacgtcttttaggaaactattttctattgtaattatcccctataaatagtagagtcattccattattcagggagtcgaaatcatacttccaagagagcaattacgctgcttaaatatctgtaaaagctttcgagtgagatcaagttgttcttacttctcttcttacaagtaaaatacaactaaaaaggggaataggctattaccagataaatggggttgaacctctatagaatctcgtgttcttagtttatgctttattttagacatattctcattggagctaattaattctagatcacgttcaagacttagtgtcattggccaaaaataaggtcaacattttggtactttcattgagagctaaactcaagaatgctattggattgatctcgctcaattaaaatcataaatggctgtaacaattcgaaggaatcagactactgattctacggatcttatggtgactaatccaaatattcaaactcttgcaaatccaagaaatcctcgtgcgaatgattcaaacaacatctttcatagaactggcgttactctgggcactcaaaatactagaactactagtacccatggtgctggagagactagcccaggtgttagggggccactagttggcaaacctcaggtgactattgattatgatatcgagttgtgtaatttaagagaagaagtgtctcaaattcagaattatacttacacccttcatcatgatcaagcagatacccgagcagccatgaatgaaacattcgcacatcaaaagaggctttccaggaatggatggatagataggttgaaattctaagggctcaataggaggcaattggcaatcagtcacgcaaaaccatggagttgataagatagtttaatcaacgaactggaaaacgactacaagaaagtattcccaccattagggatactaacagaggaaaagagacatatatcccacctggaaatcagcacgggcctgaagttcttccaacgacttacacctaaaatctcctacaagtcggaccgtcaatcttaggccacaaaatacaaatgtggatcccacggtagatggccaggtattgtcagggcatcaccttgggcaaaatagtcaaaacttttgctctcttgtggaaacacccaaccagcttaatgaaaggtttcgagagcctatagttgtttatgatcagaatgggcaagttcagtatttccagtatgtctcgtacgcagtccaaaatcaagatcaaactacaactgctcgcagtcaatcattctcaagtgacaatgaatatggggcaaatagtgcaattcatgctcaacgtacccaaagggaaattccactgaccaatactgatgctacaagaaaaccctagctcagtcagtctttgagagaattggaacacaaccaggtgatctcaaaaacactttgaaccaacaaagagggcaaagagatagagtaataactcctcacgtgcagccaattaatttggataattatgtgccagttgaaattcaaaggggacaacaggtgacacagaccaggccacaggcaggtcaagttaatctaggggtacaagcccaaatagatcatcttaagagcatagtacaaagcctgaccagtccaaaactcactaacctagaacttgactgagcacgaggctcaccattcactactcgaataaatgcacttcccctaccgcccaagttcaaaatgccaacctagaaggtgcatactagtaaagaagaccctttatcccacttaaagaactttgaaatgcaaatgggcctataggcggtgcacggagacgtgtgttgtagaatttttcagctactttggcagaagccgcccaacaatggtattttaagcgatcaacaggaaagttcgattcatgggataccttcatattagaattccatgcataatttttgtcttccagccaactccctgtgatcacttggaagacttggtcggatttaaataactatcagataaaaccctcaagattattggtttatgactgaggcaacaagggtaaaggggttgatcgacgaaggaaggctagcaggcatacttggggtaactttaccattgggggatttatgaaaagatatcaagaggctgataatggggtccatagcagagtttttagactgggtgcacaaattcataaagctataagaggcagatcaaacatatgctcgaagtgtagacgtcgtcggccaaaaacaaattggccaaacctaatatggccactggtacgtccatgtggccaaaaaagatctttataggtgaaggcttccatgactaatgactcattaggttgaggaatggaaactttttgatgctgaatttcgtcaaatctaggtgatttaactgtgaaaatgttgcagcaataaatgttgacaaactttaaatgcttgctttctcatccttttcttcactactttggattgaagtgagctcttctaattgctcaaaactttccccaaacatctccaactcatcaccacttctcaaaatggcattttcactttctgcttcctcctttttcatatcactacccaaagtttcataggatttatcacacaactcattgaccaaaagctcaaattcgttctctaattttctcaagaatgaagcttggctttgaattaagacatcatttttagccataaactccatcatcaacatctcaagagagcttggttgagccatttgatgacactcttattctatgttgaactcttgaaaattttccaaaatctcatcattcggtccttgagtgtaagtgtcaaaatttgactccaaattgttgcatttgtcttgacaaacatggtcattatttggacaattacaatatcattcgttgtacgttaccttgtcttctaacattcaataggcttcctccaatgatagttggtagaaattagtattaccatctcatctttctatctattcccttgttgtagaattcaacccattgaggaagacctctaattgacactctttggacaaaaccatgatatgaaaacctcattggaaatgccttgtatctccaccatgttttgtacaagggctacaagtcatattaaataaaattcataaggacttgtcgatgagatacatctcaagtacattgcaagagaaaccaaaacaagacaaacaaagcgtaaaatagaacaagaaaataaaactaaacaa

SEQ ID NO: 39350 - DNA, 1722 bp, Cannabis sativa
catcacttccgagaattctcggtccatctcaaatgtgtatttctttccaagattatgaccacctggccatctacaggtggtggaacagtccaggaggatatagggctccaggtttaagagcatgcagcattgctccttcgtgattcgatgaagtaaaggatgcagggagatgtgttccgagagctcgagaatgacctactcttgatggggtttttacggtatcctaatttcctaaaataaatatctctttgggagcgaccccctatctagggtataaaataggaacgcgagcccgttatcctaaatatcctactctgaccgacgtcttggcctcactcttcaaaatttccacacttttgaggaacatcccacttcttgtggtattcttgttgtttctctaagtcaatttcgccatgtgggcatcttcagttcatatacttttttggacctttcggaaacctttttttgtctttggcctgcctcttcccctatgtcccaagagttttacaagccctgttctagaacctcagcttcgactcatccaaaaggcacctttcgcctggactgtgccgcactgtacccaagaaaataggttcgcataggtgcaaacactgatacggaacatccccaaatagccagaatgcacagggttctgggagcaagatctgaagaggaaaatttaggagcaaaaatagggctagctcacgacaacagggttcgagactgtctatgtttaccttctcttttttttcgccaagctcacgacaacagccatggtgtgagtctagatctttcctcggctctcaaaatgtttaccgaaatttttggaaactgattaattagagcgtaagcaagatataaattagtaaataataggcatacaatttttacgtagttcagacattaattatccttagtccatgagtctattttattggtcttatatgcgagtactgaatattacaagtgtttacattctggacttgacccctacatattccccttgttcttcttgaaaaagatgaagcttatgggaattttacagaggttctctaggttgaaaattgtgtccccttgttcataaaatatagggatatttataggtgacttcttaatccacatgatttcaaggccaactttactataatagatcggaccgttgatttggtaggtggctactccatcatacagtttccagagatgacgacttgtaccgttcgaacattccatacgtgtcactcaaaggcctttcctttttgaatcgccttgtgaatggtcgttggaccatgggcaggaacgatggtgcgcatgccttgtactatggcctaacatgggagacaaaaattgatattgtaccaaaaaataaatattgttgtcacttttgtactttgacaggtacgggcagagatcttccgcgacatcatatggggataaaacccatcctaagtctttctgcaactcacataggcttatccgaggaagtcctcagcttccgtagtgtgcttttctttcactcccgggaataagagatgtcatgcacactaacgctccacgtgtccctgccttgcgatggatgtatcttttgcagaagtcccttgcaaaagctagggccaaaggtactaattagctgaagattatcttagcgtgtcacgcttacaaaaatctggacaataaccaagatatgatgtaacaagaaaaagagtttttctttctttctttttt

SEQ ID NO: 39351 - DNA, 1118 bp, Cannabis sativa
aaaggctttatagatttatgatttagggttttttatattaaagcaatttatgaatatgtttagatctgtgatttatatatttcttaagtatttaataagccctaacagttctatgatttacttagtgttggaaagaacttgccatgtttgattagtggtgtactcttttaatatgtttatttgttcgtttattttgtgtactcttttatatttgattgttttttgtttcattacaccatattaatatttgtttctactatttgacaaagaaactaaaatatgataagtctataagaatttctgtaaacaccattgattacttttcacttctcagatttttaaattatataatgaatttgttgcaaatgataaataagatgaataagttatatatatattgaatgacaaacaaattaacgattgaattaattaattaactgatgtggtaattagtacttagtcccgtactgaactgggtagattaggaattatcaccattcaaaggttattcaagttgagtcaaagtcaacctacttagaaatctttccccctccgacaacttttggaatagttctttgtttcttctggtaattatgatggtggccaacgagattatactattttgttttctttaaaaaaacaaaaaaaaaaaatcaaataaacaaaaaatactgcaattgcatgcatgagttgtttgtttacaataacataaattattttaatattttgtgtaactaaataatgagacaatctgatctaatttaaaaacgtaagtagtacacagtcaacaacgacgttagtaataataaataaataattaagatcaagcaaagcacgtacgaattaattctccaactataaataaagggtctcttccactctcattttccactctccaaaactctcattaaacattctctctgtctctccaaatttaatttcattattaaaacaaataaagctgtttctctctcctcttggttcgtacggatccacatggcagccatgaataaccatgcttctcaactccaatacatagaacaaattcttcttggtgatctctctcctattacaaacatcaaccaacaaaacaaatggcctgtaatttctgttgattc

SEQ ID NO: 39352 - DNA, 1631 bp, Cannabis sativa
  modified_base (1325)..(1327): a, c, t, g, unknown or other
gaacctctgtctccgtctccgtcttcatcttcatctttgtgtttatttgttttttattggatttgtttttgtttcagaccttagatggttatggttatggttttttatggcgaaaacatggttatcgataggttgttgataatttatcgatgatttatttttatgtaacacagttttgttaattttacatttatcaataggttatcgatagtaaatcaatggcatttattgataggttatcgataagtatatcgatgacacaaaaaaagcaatgcgcagacaaaatcatcgataaattatcaataaagtatcgataacccatcgataatcacattttggccagaaaatcataccctccaccaccatctaatgtctcaaacaaatacaaattcaatgaacttttggttgggggagggttaggtgggcagtggcgaatgaccatagtggttgagagaagccgaggaggaggaagagagagagatttgggtagctgagatttgggggttgttggattaagttttgggtagatgaggaggttcagtggtggaggagaagagcttcagtggtggtgattgatggtctcactgcctgggtttgaatgtctcggtggtgcgagaaagaggaagagaaagagacaaagagagaaggaaaatgaaagggagggtattttgggtagaaattgaaaataatagcatttaattgtataaattaattagaagtctaaattttgttagagggtatttttttaagcattaaaaataaaaattcccttttctaaaaaagagacattaacttaccttataataccttattggtcgtccaacatatctttatatattgggattttttttataaatacccaaaaagttaaatttttacaaaaatatgaacttattattttttttaatattttaatgaatttaaatttttttaaataaacgtatagacgattgtttttacattattttaattgcaatattatgttgctttcaagttatttttatgttactttatatttataggtctttacatattatttttatgagatttggtgaaaatacataattaaattttttttgtaaaatataataaaaatatatagtaaaaaatataaattaaagttcgtaaaaaatgtaaaaatagaaaagtaaagaaagaacacaattttaggcactttaaaatttttacatttctgcacacacccaaatatgtaccatatgagctgtgatgtaaaatagccttaaatttaaaaattaagttagtaaatatctctttttttttttaagaaaagttaagaaaatggtcaaatataataaattagctannnaaaattataaaaatacatttattacatattattttttaaatatatatataataattaaattaagttatataattttttagtattacatattattatactgtaacaaaagtaaataaatatattagatcattaaatatatacaatagtatttgatatatcgtatcactgaaaattaatgtactgtagtaataaaattatataccacaaaaaatttaacaatactaaattaatactacaaaaaataggggaattaccccttatactattttttttaacttttcttttcaaatttacggtttgggtt

SEQ ID NO: 39353 - DNA, 2153 bp, Cannabis sativa
tggaggcttgaagcggggacgttacattttgtaaattgcagcatagttattcctagcttctagttttctcaagtgatacttaggattaagaggttgttgttggaggtttgtttgacattcttctaggtggattcgagcttccacttagttgccatggatatcagaataggattgggcatttaactccctaaaagccatcttcatattcttcagcttggtgataatacgatacattttggttccttgaacctgttccttccacagactactcttttatgaatagaaaggacatcatgagaatgatcaaatctccttcattcatgaacactacttcagcagtaggaaaacatgccatccattcttgattagcaaggacacgatctattttagaatagatcctatctacaccatattgtttattgcaccatgtataataatttccactgaatttaacatcatccaattgaaatttagcaatacaattaataaatttagtggaagaattataccttactggcttgccaataggttcatcctttgcgaaaatgtcattaaagtctcccataacaatccatgcttccacagtagctagttcttggagatcttgccataatttcttccttccttcctcaatattgaattcataaacaaaggtgactttaaatctgctcttattgtccaatgtttctacttcgaggtggattaattgactagaacattttaaaatattcacattgaaacaagaaggtctcctacttactattattcttcctcctaaataccatgcattattagaggtaaagcaccatccatttaacatattatagtataaggcaccaagtttgggagccttaactcttgtctcgaggagccccaccaaactaacattttgagttgcaagaaattgtttgaccagttgttgtttgtgttggttgttgactcctccgacattccaacttgcaattttatccattaggaagaggaggtactccccctcttcctgtattcccaatgttttctatttcatcactctgctcttgtgccttcaattgattggcttcatcataaactgttggctcttgaagagaggagaaggaatttgcaacaactatatcagtagcagctgttatttctttattcacacctttcttcaccttttagactttttttatggtttaaatccatcagcctctaccacttttgcatcctgatcttttgctttggcttttttaatgatccattcagcctttttcccttcatttctttggcagtcactggtatcgtggcctacacctttgcaatgtgcacaagtggtgggcttccactcataagtagcaaatactgtcgtggctacaccattctcatcttcaaaccaatttttctttgggaattcctacttcagtgatacttcaatgagaatgcgcagatagtttagcttctctctgtttttgtaaatgaatcaaccatagcaggctcacccccttaactaatgatcttgaataacacctgttcaccctagtattttagttcaaggttctccaggggaacccaaattggcaccatatggatatcttctttcttgaagttaacattagggtcccaagcattcattattattgggcgtttgttgaaaaagatatatcctccatagaggaccttatctctatctattatggtttgaaaacacaccaaaaaaattccataagacaacataccaactttgtcgatttcatctctccaaacacgtcgaacaaatccatccaaaatcgacattgggggatttgccccaagaacgtagcagacaatggagggggtccaaaagtctacttcttcctgaatatcctcctttgtgattttgattctctgtttggaagtagaaccagcaaacttggtttctagatttcgaattatgttcctagatcttaggataggaggaatagcttccttacctcgtgcgactgcagttgctgtctggctttgagcttccccgaactgtttagcctgcatgaaatgtgcgaattccattcgtatttcgtccctctgtacgttttcattcataggcaatccaggagaaagttcaatcttagggatgtaaacagggcgggacgggtgcggggattgctcctccacccccatacccgcttcttaaattc

SEQ ID NO: 39354 - DNA, 1490 bp, Cannabis sativa
ccctcggtattaatacaactaaaagaagagcgggtcattacccgctatcataagggggtcgaacctctataacaaatttatgtgtctatttcttttaattcttatttgtggaaacacgtggcaagtatcagatctatacgaccccattgtcggttaatcactttttgaggtcaaactggctttcattgagagcgtggatattgtaatctaatcaaacgccatggttaacacaagaagaacaccggtcgcaccatctgcatctttgggtctcccttaggatccacagactaccgatccaggtactcagatcacagtcatgattggaatccccatgaacactacagatgtggtgaatccagtcaccacaacaggcgccacaagtctggccactacagttgcgaattgggagctgatattccaggaagctgcgagttgcctactccctgaggaggatttatgactccctgttgtccaggaacgaaaagctctccatgtgcaatttcttgtcccgaataaatgactagagttcttacccaattggtcaagtctctgttccgtaccaacccctctatttcatcgtttaagtagtcacactcattagtagtgtgaccaatatcaacatggtactcacaccttttgtttggatctcgcctatgttttctgcccttatacattggtggaggcttcctataatgcaccatgttacaggttgccttatacacattttctcgagtatcaatgagactcgtgtactcagtgtatcttgattctcgagtcttacccttctttgcggactcactacaatttggtccattcaaacttcttttacttctcgaatgggtcacattggactctggagcttctgctttttggttcatttgtccgggagcagcactgtatccggtttgtataggtccaaacctagagaaactagcttgtacaattggctgtacggaagtacttgatccatatactgtgggagtagtaaaagcagttggtggaggatcaatggagggagtttccatttgtgaaggttgggcattagttgcttcggtggaaggtgcaggaagtactttatatgcttgagcataagcgtcttctaggtttatgaatccctgagctcgtaccaagaattcacttagagtgtccgccctcttacgctgaagatctccccacagtagggatccagttgtaagtcctgatgttagagccaccattttcatatcatcagtgacttttattttggcagccacatcaatcatacgctggatgtatttcttcaaactctctccttgttgctgcttaacgcttgtcaaggagctagcttccaaatcataagctttgactgctataaactatttctggaacatcacctgcaaatctttcaagttgtggatcgatcccgaaataacctcttccaccagtcctctgcgaacttgctcaatgaaaacacaaacatttaacaccatcacttgccttggcaacttgca

SEQ ID NO: 39355 - DNA, 2359 bp, Cannabis sativa
ctcacctcatgaacactaaaccaagattattattgtctcctcttgatatccattaaagctcaatcatcaatcgattttccatagccgctgaaatttagagaaacatttatgactctttggactaccaattaggatagttatatcattacagtggaacatgaatggaattcgtaaaattattttgtggtggtctgagctacttgttgtagttgcatctagctagttagctgttacaactctgggaatctcatgttaattgtctattagctttagtttgttacattaaataacaaatgcatttctcatttcagaccaatcccttagttataatatctctatcttttctttgatgttccaagaaaccttataaatattcttgctattagtttacacagtttatacttcgttcaatcaataaaaagtgtattagttttcaatgtttctgctaaattttagtattctatataaggggttcaagaacaacaatgaagggaatcaaagatcaagatcaaaatccaaaggtgcaactggaaagaagtgttacttttgcaagaaagaagaatatttcagatataaatgtcaagcttaaaaagcctagttaaagcaagggaagaacaacgcgaaagaagaagcctaagtcgtcttagatagagatgaatatgcaaatgttctagttgcatcaagtaagtattggattttggattccgattgttcgatttagatgtgtccatataaagatttgttttgcaatcttgaaaaaaggacaggagagggttcgtgcttcttggagataacaaagcatgtgttatccaaggaattggttcagtagttttgaagctacatgatggagttgaaataattgttctaaatgtgagatttgtgtcagatctcaagagaaatctattctcaattggacaacctgcagaaaaaagatgcaccatcaacattaatgagaattcgttgaaggttgtaaaggattctttagtggtgaagagaggagaatttcgaaatggctcagtttgttggtgtagttaacattgtttcaactagtgaaacacatatgagactagactatgacatttaagacttgtcatgttagtgaaaggggacttagaaggaagaggaaaactaaatggaaagttcggattatgtgaagagtgataagagttgcaaacttaagtttagaactagagtacgcactagtgatcaaaagccacttggctatatttatttagatttacggagaccttaagatgccaacaccaagaggtggaagttactttcttagtatcattgacgattactcaagaaaggtttgaattttcttgctcaagataaaagataaatctttcaatacttttgtcaagaagaatcttgttgaaaaccgaatggggaaaatgattaagaagctaatgaaatataatggcctcaaattttgctaaaattaattgaagaaactctagaagcaaaagggcattgaaaacatctcacagtactagaagacctaacaaaatgaccaaactgagagggtgaattaaacgattctagagaggggaagatgtatgcttaatggggctatttggaaagcaagttttggggtgaagcagtcaatacaacatgctatctaatcatggtttgatgagttcatacattttttacagaaatttcaaaaatggtttgatgagtttgtacataaatccttatatgacaatgataggctcctagacaatggaacctaaatttttgacgagttcatgcaaataattggttttacgaagagagcaaatcatgatccatgtgtttactttaacaattatagaaaatggtaaatgaaatgtatattattcaatagaataataaatatttatatacaaaactagagagactaaaaaggaaaccaagaaagaaataaggaactaagtaattgtaattattcgtaatttctacaactaatatagaagtaatatatacattctccctcaagctgaagcatacatgttaattgggtctagcttgttacaaagataatcaacccacaccctattcaaagcctttgtgaaaataacccctaattttgttccagccttcgcatattttgtgaagatcaagccttgatgaattttctcacgaacaaaatgaaaatcaatctcaatatgcttagttcactcatggaacacgggatttgaggcaatatgaagggcaacttgaatatcacaccacaattttggtggaagtcttaagctcgactttagtcaaaagctgataaattcacactatctcacacatagactgtgctagggctgcacacgggtcgggttttcgggtggtcgggtggtcgggtgtttgaaatgtgtaaccg

SEQ ID NO: 39356 - DNA, 2612 bp, Cannabis sativa
cgaagttcaccaaataaatttggctacgtctccgttgagctgctcctcagattgagagctcgattccactatgaaaatgatgtccagaattacaaggatgagattccaagtcacaggtatgatattcgactggtaatctcttattttagtacataataagtgtttaatccctttctctctcactatactaactcccttttgttttcttgtgcatgtgagagctttcaactcctccttcttcaagcttttcacctctggatcttgaagaaattctctccaccgccctggttgtgattgcttgcaggtatatatagatctaggtttttcctttttacttgtaatgttagttacataagttagttaggtgtggattataacctaatccattctaactaacttctgttagggtttttagaggttgaaggccaaaatagggatttgcatgcagttactgttctatccttgtattaagtccattatcagtgtaagtagaggtttactccaacacatcatttattctcccttaactttgcaatctacactcaatgagaaggaagagatataagggtcacaactcttattgactctctaatatcttagccacgcacatttcaccccttacagtcactaataaaagagcacaacccttttatgaggaactatgagccaattgggtctagatgactaatgtgagagaattaattgttttgatctgaagggttgaccaaagacattttagagtgtgtctataagccccgagcatgttagtatgttatgtccatcccctattcaccttgaatcttcattttgcttcatttttttgcattctattcgcctcttacctgtaatttaagataaatttatttttaactaaatgcacaaaaaaaaaaaatagttaatagaaatttaattttacaatttcaagttgtatttgttgttttaggtctttccagtaggcgatgacctctactcacaccttttgtgtcaccccctttagggtctcttattcgcctttgcctctcttaggttgacaatattcttcttccatgctttttttcgagttcgatctctaattgtatattctttttgacatcgctaacaaaccgtaatttacgaatttagaataattaagtgggaactcaaatttagtttgaaaaaaatataatcattaaagtcatatacatatgtatttgtacaatagttttttttttttaagtattacaataacaattaaatgttaccgctggtctatcccagatagtttgaatatctgctttgtaaacgctcttccaagtgaacttattcatgagaatggtgttgcgaataaagagttcgaccatgttgttaaatttgttcccatagtcgtctatgggggccccactttagatgccatcgaaattttaacttctgccccggaggctacttgactagttcatcttttacatttttttccttgcacgttcctttaactccattttttttactgctgtccacacctgcactagacattctatacgtacaagctatatttattaatgataaaataagtaattgtaatcataatcaatttattaactaaagaaacatgtatttaatataattaatggtgggttaaaatattacaatattttaaagtttataagccattacaatcatcaccatcaccattaagggttacattattttcatcataaccatcactagtgtcttcatcatcactatgaacaatgaaatcatctaaatcttgatagtcaggatgcacatggtccatgttggtcaccttagttgggtcaatatcatcacagacatagtcgacatcgtctagttgtagaagttgtacaactaactagattctcaaatagtttctttcttgtatagtcgcgatgtcttcatcatcctcatctgagaaattccacacattacacggggtgtaaatattgacaagtttctaattatctctattctttaggtcgggaatgtaatatatcaaatttatatacgatgcaagtatgaatagtttattttggtaccattcacggatgacagaagctagtgaaaaaactatcactttctatactgttaccgtttgtgtcccaccacttgcacttaaaaacgataccactacaatccttcaagtaagttaattcatagaattgttggaggatgccataaaaattttgaccacaccttcaccagtaccaaaatactactgttttgggtgttacgattgtcatctattattcatcatatatgaatttaacacaattaacaataaacaacgagattagagggatttgtgatggcacacaattcatctgatacttcctagggttgtttgttttgagatgattaatctatatttaaattaaaatataaacaatattaacataaatcgtatttaataacaaaattagtagaaaacaatactcactcgatacttcgggaaactcatcctcttgaatcgtgtcaagatcattttcgtgcacttccaagagtgtaagttatatgggactaagattaacgacttcatgttgtacaagttgcttatgttgtcaaatagattgaactcatcagtggctaaacccaatctcacatttttaagttcaagtgcg

SEQ ID NO: 39357 - DNA, 1596 bp, Cannabis sativa
  modified_base (1020)..(1027): a, c, t, g, unknown or other
  modified_base (1114)..(1125): a, c, t, g, unknown or other
aataatgatgtcactcttctactttaacactgcctatttatttccttctttttttctttccattttattttttttcagttttcatttcattttttcatacacgattttgatttttagtttttatccaccattaataaaaaaaccaaaatcttatttttcttccaaaaatttgatctcctcctccttctctacgttcttttttgcaactgctcacaattttccctttcttttttttcttttataaacttctatatataatggcagtcactcggtgctcctctttactttcgctattgttgaagaaatctcaaacaatgggtgttaaagctcgggccaacaaatgtaaaggtaaacgccctattgatgacggtgatgattttggttttcccctgctaagaaacttgttcgtcgtcctcctcagaagaaatcaaacaacattgaggctgagaagactccttttccagaggctaaaaaggggaacaatcaacttgatcatattatcaaggttattttttcatttctttttcgtttttccataatttttaaatatttcatctgttatgggccattgttccgaatccgggacttgatgttaaagctccacttagagtagtggagattgatagccttctcggccaggagaataagtgagtttttttttgtgttattgtattttagttgttaatgtgttgcattatagttgttttaactgttaagttttttgttttgccacacaatgattgtgtgatgcatttgtttcaacttttgttgaatttttcattcatcgtaaagatgttccaatagattttaacattgaagtttacacctactacaaaataaccttttagaggttgtttttccacaagttttataaaaaagaaaaactaaagggtttaaaaatacccggctattgaaaattgacatttagaagcagttattttataaaaaaccgtagttatatatagaattagtttacacccatttagagtcagttgcgataggccctatcatgttactagnnnnnnnnagatgaaagaaattgcaaaattttcctgttacaaattatttatatgatctattgacaattgaagtatgattaaaatcagatcattgnnnnnnnnnnnnagttaatcataacaatttagattaaataaataacagttttgtaaaaaaaaaaactgaataaataaataaataaataatcaaacattacaaacaaacatgtaatagataactggaaagtaggttaagatatttctattttaaaattttaaaaaaaattaaaatttaaaatatttaaatattagaaaatataaattaattactagaaatcaccatctagtaagtgattacttaatatttttcttgggttttctcttcctttctctgcttcctccttcgctttcttggcttcttgcgtgaggcggataatctcttattgggcgttgtctcgttgctcacacacaaccttgcattgggatactaatttgtgagttttgccctccaaatactcgagttgctccgagagtagtcgattggaagcaaaagaagcaaaagaagcttggagaattacaaacagatgaatataaaagaggt

SEQ ID NO: 39358 - DNA, 2666 bp, Cannabis sativa
  modified_base (1318)..(1320): a, c, t, g, unknown or other
aatttctccatatttatcaaacttgaggaaaaaaatccatattctacataatttcctcttttcaaattataaagaaaagtttgtattcctcaatcatactcttgagtaatttatttttgtatttttttcagcataaacttactaattcttccacacttatattgttacaaatattcatttatttttttttattattatttttaacatatatgaaatacttacaactcacaaatatttattctaagggaattattttttcaaatttgttttcttaactcatacataaccatatttttttcaacaaaagtctcacactattacaaacacataaatcattcatatactatggtgtaaaaaaatgataaataaggaaaaaaaattaggctaaaaggttattgaatagggtcaaaaaggaaacgagattttaacatttaggttcaaattgggtcaaagtagagaattcacaaatagggtagacttgaaaagctcaatcgatccaaaaattgcctatatcatatctcaaaatcatatgtaatttatcaattttatctcaaatgattatcaaacaagttctagagcgattggaattttaatcaaaagtcaaacatgcattcatctttccaaatattagcaaatatgataattcaactgatgtgtaaaagttttttaaaaaaatcaagcttgagcagtaattaatcataagttaaacacacaaattatgagaatctatcatttttcgcataattataactatcacacaatcaagaattttatcatcaacaaaatcattttacacaagaccatgcataagacatcaaagtaaaatcacacatcaaacaagagcaatcattgttaacaaaatttcaccaaacccatgctcactaaaattaaaaaaaaaaataatataaactataaaaaacgattaaaaagaatatataactaaaaaattaagaaaaaaaattggatagacacgacagttaatcttcccccacacataatataagcattgtttttaaggttcaattaaataaaatcaatgcaaaataaaaagaaaagggtaagaaaaactcctgtaaaattgctttgtttaacgttgttagctagactgaatgttgtcttcatttggtcttcatgttaggtcttttaacaaagactcattccttatgtacctatcaatgaaatctaacacaatgaatttaattacttcaccatcaaattctattgtaagtatccatattttcatatccaacttcttagtagtgagtaagaagggcctcccaaataaagttgatgtaggattgggatcaccctcatcttnnntctcaattatgtaagaatcacttggagtgacaagtacattagactgcacaaaaatatcttcaactatccctaaagggtaagaagtattatgattagtcaattgaatcaaaacatgagtttctcttaacgaactaagatttaaagaagtaaaattggaatgagacataatattaataattgctcctaaatctatcatgcaatgatcaaacctagttttactaattatgcattgaattgtacttgtcttaggcaacaactttctttggagaattacaaaaacattctcccccacacttattttctcattacccctcaacttacgcttattgatgcaaagctccttcagaaacttggcatatcgtggtacttgtttaatggcatcaagaagaggaatgttcacttccaccttgcagaatatctcaagaatttccttgtcaacttcttcctttttagtcttcttcaatctgcttgggaaaggtggtggtgtgacaaaggtaggctttggtgggacatgattgtttggcttgggtgcctctatttcatcatctgagctatcatcttgtggtttgggtggcactggttttggctttgggatgataggtgggtcatattgtttaccacttctcaaggtcactacactagcattctccttaggattcttcttaggttgggagggcagttgagtgtaaaactgagcttgcaatcgattataagattctgagagttggcccacttgattctctaaagttttaaatgcgactttagttgtttgctagatacttaaagaactagcaaccatggtattaataagttcttcagtggtagggttgggagttgttggtggggcagcttgtggtgcttgattctgccttgcaggtggccactattgataattgaaactaggttttgtaggtgcaggttgctagaaattttgttgatttttgtagcgaagattcgaatgattctgccaattagctctataagtttgtgagtgtgggtcataaagctggcttaattaaccaggaaaattacctacatcgttcatatctccagtctcctctttaaacagtgtaggacaggtattagtagcatgtcccacagtttgacaaattcgacatggcctcacctgctggcctaaagcaagttattgtacaactgaggttaactgaactatttgctaactaagttggtttttaatgggtttgctcactttattaacctgtcgtgatgttgagggaggcactcgaagaatgccaaactgctgtgaattggcaaccatgtttgagattagatttctagcttctgtaggggtcttatctaccaatactcctccactggctgcatct

SEQ ID NO: 39359 - DNA, 3504 bp, Cannabis sativa
  modified_base (27)..(33): a, c, t, g, unknown or other
aaccaagaattgccgttagataggcannnnnnntatataaagatatatatatatttgaataaagagagatatttaattatgtgggcgtatatagaagagataactttgaatttctttgtcttaataactttttgtgttggtcgacatattacaattctattattaatttatatggatatttattattattattatttattaatttgttagatatatattctaaaatttaaaaaaatatagtaaatataaatatattagtaattgggttgatatttctatatctcaaggaatcttcttctatattaatctcatgggccggcggattaattagtacaattaataaaccatttaattagagataatgaaataaaaatctctacactctaattgttaattaactaattaagtaaacactttcacttgttcttatccacaaaacaaaaaatatacatcaaataattattgtaataattaattaattgttcccttaaacaccttcttttctgtttttggttttgttttttttaattttatttttccttaatacaagttggccctatggtaatcaatgatgtcaatttttctttgtcttttcctctacttgactttaaaaatatataaatatataagataagtctacagtgtactttttgaacagaattttttagtcttatttttgtatgatcgtgtatattatagttatttaaaattttctgtaaaattttaaatttcgagtagtttacagtactgaaaataaaatttacatattttgctatatacatgattatttttcttatactacacactgtttaaatcctatttttgacactgttattcgatatttttcgaagtttacaagtgattttaaatatctacgaatatgaataaataaagaatataccataataccctttagagatctacaacaaaaatttctaaataaatatatattaatggacagaagaaacatcttcatttacgtgtaagtaacgcgtataagtttctacccaaaaaaaaaaattaacgcgtattctcaatatgaactttataattggtttaaaaaatatatatgaacttataattaataattattttatgccattcttaatattaaggtcataattatttcattgaaatcatgtaaaaaaaaattattttaattttaagttgataatattagttattattattattttcaatatacataggtgcatgcatgggtgggatataatatgaatcacaaattaatagctgcaactttttttggagtcaaagactgcaacttgtttcttcaattcaatctaaagttgaaaagagatggagtcaaatgaaaatggtgtgctaattgggcttcctaggcccatttcaaaatgttgggccaaggaagtccactatcgatgacactactatcattgtgagaattttatacaccaacttattttgaaagaaatttacattttcttatatacacataaataaaataaataaataaataaacatctttctacgatcattaatacgtatgtgtattaccttatcttaatttataataacatagtatttcttctaaaagaaaatacgtatgtgtatttggaaaaataaaaatcaaaatggtataaacaaaacttaatattattttagaaaaaaaaatatatttatttatttttttgctaaagaaaaagtatctatattgaaacctatgagatccaatatgttaattaattaacttctactaagtaaagccaagtccatcacacaaataattctttacttactaattataatttaatttaattaacacaaatcacttatgtctagttacacatatccattaacaaaagttattttgaataataccttttatctacataatttgttaattaaaggatatagagaaacttattttttttttttttattatagaaacttaactttctcccttcttttctttaaatattgaaaatacacaaatcaaggttacgcaataatcaaacgaattaacattaacattatctaattaggtaataattttacaaaatcgtcatcgaggcactaaataaaatggattgatgtgtactaccttttttattgtcaagtcttctaattttgaaagattccaaattggagattttcttgggttatttttcatctttttaaattattagttgttataaaattatatgataatttatggctttatttagtgttaggaagatagtatctcgtgttactattccgtcgattattagtttattttattacttttttgtttaaaaaaatcctaagtgcaattttatataagtgtaaattataatataactaactcaaaaaccaaaaatttccaaaaattattaaatggtaattaaactaattaattaattaataataataacaacaacaataaattgaattgtacaataaatccaaatgaataaatgaattttcaattagaaactaccaaaaaaaaaaaattagaaaataaaattagaattaagaggagccatattcccaaacaagatcttcaaatcattctccaatggagtcaaattcaaatccaataagcaagaatcagctttaattctaatactattagatctcttcaacaccattaatggtggtgttgaattttttttttcttcttcttcttgttcttttgcagtagctgctttaatgagtaatgaagaaaacccatctgacccattatcattaatggaagctctatgtcttctcatatggccacccaaagcttgtcccatactaaaaacaactccgcatattgagcactcatgttttctcgcaatagttttttgttgatcgtattggttttcttcttcgaatacttcattagtaacgagtttcggctttttgtgactcgctctgtgtccacctagtgcttgaaacgacgagaatcgcttgttacatgtcttgcattcgaaaacatggccaccagagaagccagtttggttaatcgggttggtcgggttagtcagattgatgggtttggtcatcatgaattggttgtgtgattgtaataacatcaaacatttggtgatactattgttttgttgttgttgttgttgttcttcatgttcttctctaattctcttcttcatcatcatcaacataatttcttagtagtctttggttgttttgttatgttgtgttgtgttgtgttttgaggttgggtatggagattgagtatttataatgagaaatgttatgtgttgtttgttagtttcaaaggtttgactttgcttttttatttttcttttactttttcatgtgttggctgatatatttgacttggtgaccaacatgatatgaccaagttgtcctttaaaagtgcaggtttatttgtagtaagagtattacaactagggaaatgttaaatgggtaagttaactaccacaagtggtataatgtcattaacacattttatatggagtctcacactagccaattataaattttcatattagtatttaaaatactaaataacaatac

SEQ ID NO: 39360 - DNA, 3557 bp, Cannabis sativa
ctattttcaatattataaattattgtgtgacgccacggtgcataggttgtaaattgtaatgaatgagcagttctcttcctctttttagcaaatacaccacaattgcgccgcgcgctaacttatcgaaattgtcgccaagtgcttcttctttcttaccctcctcagtcctctccctcccaacgacaccagtttcctttcatcgccatctcaacagccaaaccctaacaatggcgtctttctctgttcttccaaatccaccaaaatcagaacccctctagcacagtcccaacccctgaacacacctaagtattcatatttgggaacaatgtcatttacttctcggcatcttctcaccaattcgcctccacgtttgaccatttacttcaacgcgatttctcctaagaaacctactctcgtctccctaccaatcgcctcctgtcaccttaccgacgcctcgtatttccgtatctccaagaagctttcgaaccattgctgtcttaattctgtaaggactcagcgatttcgactcaaatcatttgaatccgatgaagatttacggagccatggcgttgatgacggtatcgatttcgactacttgctcggcgtcgttgaaaccctgtgtattttctcatccgcaattatttcgattgcattcggggtcaatttcgctgtttcgagctcgaaaaaggcagtaatggatgtaatggggagaagactctgtgcttcgggaattgtggttttggtggccgcggttgggattggggcttggattcgaaggcgccagtggcggaggttttgcgccggttcggtaaaaggtaccctggatgtgaattttctggagagaattgagaaattggaggaggatttgaggaactccgcgactatgattcgggttatgtctaggcagctggaaaagttgggtattcggtttcgagttacacgcaagactctgaaagaacccattgctgaggtattaatatatttcaagttgatgatgagtttagtgtctataatcatagttcatgcaagtgtattttaaggaatttggactatggaaaattccatcatatttttttattaaaaaaaaaacattaagggagtaacctaaaatgagcaagttaaataaggataggatagctgccgttaatcatttttccgatagttgcattctatgatggacatttgtttttgcatataatttagttaatgacaatattaagccaaattatgattttaatgcctattcagatgttctttgttttgcatgtatgttaaggttctttgagttgtccttctaaagcctttctttttcctcatcctttttaggagtgagttttaattctgtgtttgtgttcaatgattaaggcacggaaccgtacatgccatgacaggattagaatgtagttttgcctagaaaatgttttaagattgagaagagtagactttagtgttcacacataagttttgatagaggattttgaagcaggatatgctttaaccttcttttaggaactttattgtgatattttcatctgataaagttttatgtttgtgtctgaaggctgcagctttggcccataaaaattcagaagctactcgagcattagcaatccaagacgataatctggagaaggagcttggtgagatgcaaaaggctttgctggctatgcaggtgagactacgcaatctcctatgccaataaacataactactaggcctttttaacaattgggttttaagatataatatctttggaaacacacaccagtgggttgtgtgattctgacttcagttttggtctacatatatactgttgtcatatatttttccatagatttaacctatgattgtgtttctagctaatattttctagttctagtttgtttgtagcttcattgtatcttgttgtgtgatttgaatttgttgcactgactgaaatatgcaggagcagcagcgaaaacaacttgagctaattctagcaattgcgaagagtggaaaattatgggaaaccaaacaagatcgtagtaaagaaaaagagagaattgaaataaaggattcacccgcagatggtttaaaacagaaggaagcccaccaagtataggctttggatgagtactatatataatgaacaatgcagttagtggatgcagctttcactgaggcaattacacttcttgtggctatgttttggcggccttgtactttcattcaaatgggaaaaaattagttagatttgtaatgtgtatatgtcattggctggttaaaagggaggacaaagaaatgagaataagttttcctggttgaacataacattgtatttgtaccatttaatgtacaaatggttcttttcttttcccttgtaatctcggccatgctgtgatcttgtacatcatttttcttttccatcgctctaaattctaaagtgaatgaccactgcacaggcttattattttctctttcgtaagaaatagagaaaatagtaaggagaaatgtaatgaaacttaaatgtatgtaggtaactaataaccattatccggacttttgttgtagagaaaagttttaagcaaaaaattagtagatcatgaaaatgggttaaaaaagaaataatccactttctatgtttcctctcaatggtttctttactagtgattattttcacaatgtaaagtggtggtgccaccttcatcgaagaaaagggaaaagctatcaaagcaagtcattacatttataactctttgtatatgtgttttaagaggagtaatgttataaacaaataattgaaaattttctaacacgctaaataatagattgtatataagaaataataattaatcacaaagtgtaaataagaaaatgtgatatatttgatataatacaatatcttgtactaatcaaatttgctactacttttttgtaaaaaaaattgcgactagtttaacacggcattagttttttctttttgtttttttttaaaaatatatgctaatataataggaaaattatatctcatattaaaattattaatttatttacttttataatgttacaggatataattaacttttgtgttgtatatgtattatatatttttactatatttattttaaaactttaatttttcactctcttgagttgtcacattagtgatattgagtcttttttttttcttctatactaaattcccgttaccccatactaaacccatttatcttctttatatgaaaactaataacgaaagtgataagttgtcttgtctcttgtgacaatttttttttttattaaaactaatgataaaagtgatgagttgtcttgtcacttgtgacaattttttttattaaaactaatgatgaaattcttataaaatcttctcctacacgtttttcccaaataaaagcttctcttctctcaatacccctctccttttgtagtaggtataaaaaaaaagaatatgaatgatgatgaagaagaagaattgagaaagataagagttttgttctctctccaatttaccctctaaaattcaacaattctatctctatctactattctctctcaat

SEQ ID NO: 39361 - DNA, 1930 bp, Cannabis sativa
tgacaattagagtcctgtgatttgtaaggataaatggattgatgagtactacatatatcaataagatccatattcgcttaagaactctaaaattaagcgtgcttgatgacttagagcaatcttaagatgagtgatctcttagaaagttttttcaaggtgcgtgcgagtgagtgcaaagcacgttaaaaatatttgcgttggtttgtagggtaagttgttatttttgtaagtaattgaccaaagttacgtacttgtgtatactgtgtaggtatgtgactacacttatgaagcaagtccattacatataattataaggtaggtaattttgttcaagtgtaatacattttgtgtactgtatttaaataatattgtaggagagagaaaaagaagcttgtgtgaatttaaatttggagttgctctttaggagagaggttttctctactctcgaataccactaattaactagggtagttgtgttattttattggctttctacataggaatgtttaatatgaagattgattatttttctaattaataatttcgttgagaaataattcttaagggtaagatagtaattttacataaattattattttgaatataattgtataattacgaattaaataattaactggattaaattattttattcaaatttgtttaaaactatgaattagttaaataaaatattatttaattagttaaataatgtaatgagagatataaaagatattatttattagaaaataatatttatataattcagaatcaaattagagaaatattagaattatcaattattatttattagagaattaatcaattaaccccacccaccctgtgccggcatcctagtcccacacacctaccttgtcttactaaccacactgcccacatcgtcactggtagtcccccatcgcactgtccaccatcttttatatatatatatatatatttacattggtggtagcagaatattatttcgttaagatcgttaactcttgttcctttctgtcgtagagtattaacaagatctgaacctggatcttctctgttgatggaattcttcataatctttcacactatgattaagtactaactatatatgaatgggcaaggtactcttcactacagaaacttcgaaaatagaagggagaagagagagaaagaattcgaaaatatgggaggctctttattttcatttgtttgacagaattgtctgaggagcttgtgaaaattagagtctatcattatgtatttataggattccttctagggttagagtttaaattatatggaattaaaaaagataaaataatagctaaaaatcacttaagtgcccgaccatacaagtagaccccacaaattttaattttgccatttatttaagaacttatctttttctttcacaaatgtccttttttaatttaaaacatttaattgtcaaatatatttatttaaaaattataattaattgtcaaattaaagtgtcatttaacttatttattacatagactttacaaagtctcttaattaataaatataccctaaaatcacttttcttctcaattaaacccttacttagtaaaaattcatatataagatatagtctaatttagaattctaattcgttaattaaaaccgattaactaagtctacaagctaatattatctcaactagtgcggggaccatgggcctatataatcaagcttctgataagtagttctagaatttaccgagtaaattctctatcttattaatttctcctgactccactatagatttgaaattacacttttaattatatagaatgttctatatgttctaaatatatgatattaattatccattgttataatctaaataatcaaagagcctctatagatgatttacatcgagtaggaaaaaatttaccgttctaccctt

SEQ ID NO: 39362 - DNA, 1960 bp, Cannabis sativa
attagagcataaaacccaacactcttgtataatcgatcattgtataaggtgaacctagaggctttggtcctcaacttttttgattcatacttatctgtaggtagggtgccatagagtaggtattctttgattggtgtgatttttgactctgttcattgaatatccatgttgcctccatatggctttccattgcatgtacactattgagattgttaccccattcttagtttgaatttttgagcccaagtttgtgagcgcatctgcatggttattatctagtctaggaacttggataattgaaaattgagtgaagtattttaccttttctttgactatctctaggtatgtcatcatcttggactcttttacttagtatgctccattgaattggttgactaccagttgggagtctgaggtgacttcaatactctttacattgagatccttagctatatcaagtctagctatcaaagcctcttactctacttcattatttgtacctttgaagtcacaattgattgatcgttgaataatgtctccagttggggttgtgaatactatctcgagtccacatcctttgctattactcaatctatagattgacaatgtccattttgaattcaattgttgttctagacaaagcaattccttctctgcttgcacctgtatctcactttttttttttttgaaaaatgcgtttataaataaaactgaagttagacctcatggtcattacaaaagatattaacaggtataatagatatctctaccatgcccgtaatattgttggaaaacactcatttggccacattatgggccgcgtagttacagtttttaaaaatacaagaaaaattacaattagtcataaaagtagagaggagcttgcaatgtcgcacatagttctcaatcccccaaatagagtcttcccctttaaggttcttgataacaatctctgaatcactctccaccaaaacaaaaggatgatgcaatgagatcgtcgtctccatggctaaaagacaggtcgcaacttctccagtgagtgtgtcagtgaagtgtagcctttttgccgccacccacaaaactaattcgttatggtcccgcgcaatcgccacagcacacatagtttcacctctgactttgacatcacagttgattttaacccaatcttccggcggtggagaccaagcctgagtcccaacagactgtggaggggaaagaaggcaggagccataatctgtgtaacaagaagaaatagaatctatatagtgtttaatgttacccattgatttattatgtacctgtatatcactagagaagtttgcaataaagtcaggcaatatttgtgattttattgtggtccttagttggaatgtgacattgtatttactgagttctacaacccactttgttaatcttcaggatagctctagtttatgttgtatggaatggagtggatactgggcgagtaccactatagagtggcattggaagtacggtctgagctttcttcctactgtaacgagtgctaaggcaagcttctctagttggttttacctagtttatgcatccaaaacagttttagatgcataatagacttgttgttacttacaattttcttctcttatgagaacgacgctaacgactgttgctgccactacaaggtagatgtaaatcgtctctccatatttaggcttcaccattagtaatggagatgaaagatacgccttgacctcgttgagtgctttttgacattatttggtccatataaagtcttttgtcttctagagttttgagaagaagatactactacgttctgatgactttgatatgaatcggcttagtgcggctatccatccatttaggcattgtatgtctttgatgtgctttggttgttgaatattttgaattgatcttattttctcaaggttcgcttctattccatgcttagtgaccatgtagc

SEQ ID NO: 39363 - DNA, 2491 bp, Cannabis sativa
gtgttagtgttagtgtgttttgttgcagctttgatttttcctgctgcagtttgccttgtacgtctttttttattttaatgaatcagagtgtcttaatttatagtcaccctccttttcaacaattttgttattattattataatgtgattttttaacctctttcttattatttttacttctatgattttttttgtataaacttataatggttgtttcaaaataagtgaacttttccaatctctaattactaaattaataaacgtttatcaatcaattttcttctatatttttttgatttaagcatttatatattacaatatgttttatctgggactcgaactcaggatctccaacactcacacacccacctatggtcacttgagctagccctaagtggttaattttcttctatatatactttaatctcgtagcttcttaagaaaatgtagaataattttagtttgtcatctttttaagcgtgatttcgaagtaaatattttttaatttggtttcgcaacattacatgttttgtcaagtcagcaaattatattagctgtaatttagaattataaaattattattatttgttattttattaacaataaatcgaataaaaagagaaaatgtcatgttctaattcttgtatctctaatataataataaagttatgcatataacttgtaaaacgtccaaaatgagacatagttttcaagagcccaatgagcgtttgctcatcaggtgtttgggactatcccggtgtcctccttacctgacaatatattatgtaacgaccgagaggtctaacgtttgaatttatttatgatatgaacgctttttctcaaaaaaaaatataagtaaaacgtccattttataagtttgtttttactaatatctttataataataaaattcatattttgtaattcttgtatatgatacaaacgaaagattttgtttggatatattttttgaattcttaaaatttatattgaagtagaatttttttttttttttagaagaacaaaagttcattgaataggaaaatagatggggatcaccctccccttgatacactacgactaattggctagcaactctagcctctttagccaagccatccgctgcagcaattaaactacgactaacgtggtaaaacttacacaaattaaacttactactacaatctaatatagccaaagatgtactaagagtcttccaatctcaaggacatcgattcttgttcagagcttggattgcttgtaggcagtccgagagaacatgaatctcattccagccttcttcgagagcccagtttaacgccaaaagaattgttttaagttcagcttccaaggccgaaaccgctctatctctagctaatttgtaactccagcctaccgtgtcttccttcagcattactactgctgaaccagcatcccctttaacccaagaagcatcagtgcatagtgccctctcttcattcaatctcctaatgctcctctgggtcagatggggtgtgacttgagtcctcaatccaaccacttcttcctcactggtataactaaaattaacaaacccttcataagcctcttcaattctctttcgagcctgatccatgatgattggcttgcccgctagtgaacactcattgctagttttccagatttgaccaaccatgcaacccaaaaaagtaaggacttcttttcttccaaaacccgaattttttgtagtagctacaagattttccacgaaactaatcatggtttgaccagagattttatcaatccttagtgggaacacactagaaaaccacaaaagtttggcaacacaacagtctttgaaaagatgcagacaattttccactgcagcctcacagaaatgacaatctttctctcttaagaatggaagcttctctttaactggtagagcattgttgagcaatctccgaagtatcatagagattctcggatgtaactgagaataccacagccaattccaaacagtgttagtatcatcaaatctatgaccttgatccaccacataagcactcttgaccgaaaattctccatcttgtttctgtttccatactagcttatctttatgagtcaaaggaagtcttggaatgtcaagaatcccatctcccatctcttccccaaacatctacacaactacttccttgttccaagaattgtcagttgataaatctgctaatgttctagcagtataaccccggggtctgatgctctccatgagtcttccaaattcgtcaaaatccatccaaggaatccatggttgattccacatgtcgattgcatctccgctttctgccatcgctatagaccccttgagcaaaatatttcgagcatcaagaatgcttttccaaagatatgagtcacttcctttcttattgactctccaaaagctttcatgagagcagtatttgatccacggtttatcttggccctgttctatactccaagccaattttgcaatta

SEQ ID NO: 39364 - DNA, 1750 bp, Cannabis sativa
  modified_base (1288)..(1298): a, c, t, g, unknown or other
  modified_base (1706)..(1708): a, c, t, g, unknown or other
aaaaatatatattaatttaaaacaattatttaggaattatctaatagagtttaatttttttttcaaaaataaataaagtaataaattcattattttatctttctatttttaatttcaaatattttatttgtgagattaaattaacttctcatattttgttatcattcaaaaagttttgtttcttcaacactattttcacatttgtttttttaattagtagcaatttgaaataattgttgatacgatgtgtaatctctgtttttttatgtttgtttttattctttgttagctttctatttaaatataatttctacgtctgtttaaatatatcgataacagtatttaattaattatttaataattataaattctatcactctttaataatattaggaaactcgcgcatgcaagtatatcttgtttaatgatatattaaattttaaaatttgatacttttttaataaaaaggagtaattattttactatttttctattcaaaaatgtaaaaaaaaaaaaaattatcatagaattctttatttaataaataaaaaaaataaagatatatcctcaaacattatagtgaataagaaaatttgaagaacttttacacaaaattaaggcataaaaaaagataattaataaatctataaaatattattgtcttcatcgtatctcactccaccattcataaacgagctacatgggtcgtatttggattttattttttgacacaatatgtttctaatactttcaaatacggtctttttttacaatacatttatttatttttaataataacaaaaaaaatatattttttttgattgctacctatcttattttctttattagattggagaatttatttgttctttttaataaatatttttttgattgttattaatattaataataataatgtttttttagttgctaccgattgttattttagatagctagaattttttttgaattgtatataaatatttttttagttaattaatcaattaatatttataaatagaattaaaaataaaaaaaatagataaaactattttaagtgattttaaagtgttattttattaaacatcccacgctttgcagcggatatataaaatattttagagcatcatgtcaccgtcctcatacttctcctttatatatatactagtaaacatcacgcgcttttacagcggatatataaaatatatattttaaattatatataaaaaataagttgtatattttaattaaaaataattacttaataaaattatattgaaattttaannnnnnnnnnnaaaaatttgtgacataaatacttaaaatattaaatttgttactaataaatactgaaattcaaaaagtagtaacataaatcctcatttatggtttaatttttattctaatgtgtgtgttaagttttgggttcgaattttattgtgtattttcaatgtttgagttttagtgttttactggaattctaatgtttgagttttagtgttttactggaattctaatgtttgagtttgtgtttatgagatctatttttatttatttatttattttagattttgagaacttgaaatttgatgttgtttccattgattattgagattgaaagttttatttttcatacgggaattaaagtgtgccttttcgtttcattgattaaaaaatattagtagaaagtttatggaatgagaatnnngaatatatgaaaatagaattgaaccatataatcttttcaacc

SEQ ID NO: 39365 - DNA, 1860 bp, Cannabis sativa
  modified_base (43)..(51): a, c, t, g, unknown or other
ttatacgtggtatcagtgttctcacgaacactcctagtccacnnnnnnnnncccagagaatgaaatcaattaataaatgtcctttttttgtattattctgggatgtgttttactgcttaaatgtggtataaattttaattaattatgtcatgtttcttgatttgtatatatttttttggtattttaattatattgatttatattaactattgatatataattaattaattatatgatgaagtatattattattaaaatataattaattaaattatttaataaatttcataatatataatcctaaatttaaaaaaattaaaatttattttttttaaaaaaaaaaaaaatagatatagtgacactcttaaagagtagctgattctgataaagtcgggcactaaacacctatagtgacgcacagagagtaactgtaaaagtgttcagtgacacatgtgaagtgtcactaaaaactgtctttccaatcaccctcattagtgatgcgcggtgaagtgtcactaaataggtttagagttacacaatgtgggtctctaaaacctatttttctagtagtgccaatgaaacacaatcttgacataagcttttgtcaacttttctatctatacccttgaaaatgaaaaacaccccaaaagaccttgtgtttccaataaatttttaaacaatgcagctgatagtgtttgtggttttttaaaaaaccctaaagtacgattttaaataaatgaccagtacttgtctagttttttcataaaaataatcattttaataatattttcccatcaatcaatataaggtcaaatcagtaggttgtactatctacttgcataacctaaaaaaatactatatcaaatattaacacaacaacataaacaaaaacatgtccgaaaatgaattgtaaattgaaaatattttcccatattttctcgtaatacccaaatatgcctaaacaggtcacacaatattgaaatgtagaagtgacgtactctatacagaccttcaagtacgtatttttaaaactttgaacttattgaaatacgttgggaaactagtgaagacttacctagaaatatgttattacaataaagaaaccttcattatttgttaattaatttctaggaatcattttttaaaatgataaaggtataatttttgtctactcaagggtacaaagttaggtgatgtttgctttgaggtatttaattacgatgctttatttaacactgtaaatatagattgtaatggataaagtaacttgtatgtatactataatatcctcactgttattacaattaatatttcaaatttaaataaaagtaacaagatagggcaaaatagtgatttcttaacaatgtagtcaacattacaatttttttaaaaataaaagcaatcaaacaactaacattacaaaattgcaactaggcaccattaagtggaactcaactctgatgatttcctcccgcggcttgattttgttggagtatctggcgcacccgtggtcggtacctcaaatatcagaacactcatcccacaatggccttgtggaccgcgagaggtggagcctcagttgggtggcaaatttgactgtgttggaagtagttccatccagcctagtccacccattcgaagccactaacaaaattttttgaatttaaatatagtacatacataaaaatttttagaaacaaatactaataatagatcgttgaaataagaagatataaagagttgagttattacccgaaatttttatgaaatgatttattggatagttgaaattcctttgatgcacctacaacacacggatgttgtaacaccctaactaacataagcgtattacgtgatttt

SEQ ID NO: 39366 - DNA, 2018 bp, Cannabis sativa
  modified_base (1931)..(1977): a, c, t, g, unknown or other
aatttccaacataaaatgcccaagataatttttcaatattgtgattggaggtgctctggtttacaatatgtcaacctgggtgctgggtgcactggtgccctaggcacttggtaccttagatgctcaaaaataaaagtgttttgattttgattctgatgtctcaaatatgtttgtgactagtcttattcatgtcaaagtaaaaaatttgagccatttgtgctagcacagactttaaaattagagccatagtcgggatgtcaatctaggtgctgggtgaaaacgctaggcccctaggttaatttctgggatgttatttcatctcttttcaatttcgaggctttagacttgattcttattctcttcttgattatgaatactgtaagatggtgagttggaaataacttggcgagattcaaacacccattctagagttcccaaagtcaacctgggcacagagatagggacccctccctagttgacggctataactcgagactacttaactctaggatattttctttcttgccaaacattgatgtccaaatcaccaaggttacttttcaatgtaaacatttgcccccaagttagctttgcacttgtgcaaggctcacttcatgacgtaggaaaagcccgttccatgtgaaactatcaggtggacatcaattttgacaatcttagaaattgttttctgattttcgtgagcaattttctttgatttgggagactctgaaatgtgttaacaataaattgtcaacactaactttgatcttcagctattttcttagcattggctatcttttcatactttgtgtttgagtagatataggtgtagatgtagtcttttttctctcatgagttgcaaacttggaagtcttaaatgttccctcagttgtgttcacagtggaggcactcttatttatctcctcagctttaccacagatgaggcattcttcatctccttggcttttccgcggtggatgtctttgtcatctcctcagtttcataacagaagaggccttcatcatctctttggctttgtaatggaagaggccttcatcatctcttcaactttacagtagaagcaaccttcattatctcctcgactttatagtggaggaggcctttgtcatctccttcactttacaacgaagaaggtcttcatcatcccctcgtctttatagtggacaaggtcttcttgatgactgtcaacgaagtcgtaggtcattttttgattaattgaggatgtgaccaactcctaaattaatatattcaagatgagggtgatgtgttcccatcttgggtggaccttgaagtgatcataggtgttgtctccatttcttcattagtcatagccatagaggtcttcatcgtcccttcaactatattcacagtagaagatgccttctttgtctcctcatatgtcttgacaatggaggaggtcttccttatccccccagttgctagcacaacggaggaggtcttcttcatctccttgactattttcacaataggggaggtcttcttagcaaatgtcaacaatgtgttgcaacattcgcttgctactctttggtcaccaaggggattatcgataccagctactgttgcaaacttgatagacatgtagtagatagatgaggctcaaaggtcatagagtgttaaccttctaaggagacttggtgtcgatcctatgaaggtagtcatagtggtgttcttgctcggggtagttctgactgacattggtaatttgattttaccatagaaagcgatgttggctttaattaaaccatacatgacctgcttgcatggcttcaattctttgaaggaaaaccccattatctctagggtttgttcaattaaaatatttgatgaggtttcgttgttaatcatcacacttgccaccatcatgatggtgattttgttggaaattattnnnnnnnnnnnnnnnnnnnnnnnnnnnnnnnnnnnnnnnnnnnnnnnaatatgaactttctaaatcgatgaaataaacacatataaag

SEQ ID NO: 39367 - DNA, 2248 bp, Cannabis sativa
ttgggaagagaatgaagaagtaatgagattgatgtgagagctaccatggctggttaattcagagataaattataacataatattacagaacttgatgaacatttttatagtatagttgagttaattattagaaatggtaataatgatacaaacaatatttgtcacgttccttttttatttttgaaaaaaaatattctttattaaaatgatgacaacaccaccaatctatgtcctaagacataaggcagtggtaagtaagtggtagtctgttttgcataattcaccaaaagaaacaatgtgatttttgcatagtagtgatgtcttgtcaatttcattttatcatttaaggtaatcaatttaatttcttttttcttcttgatggaacctactcaatctaatcggtttcaaaagttaattatatgaaaaattttggtttcttcaactagtactatactttacacatatagtataaaaaattaaattaaaataattataatttaaatatttgttagtatataaatatgtatttttattatgattattattatcaaatcatataagaatttttaatgtttacattaggctactaatctattcgtgttcacgtgtcgtacttttgaacttcttgtgttgtgttgtgctttaattttttatttttttttcgtgttgtctggtgtcaatttctaacatcatgttgtgtcatgattgaaaccatatttttttgtacttgcttcgtgccatatcaaaaaacctgatccctacttacagcactacatacaagtagttcttccacattagtaattaaccatagagatgagagatcaatcatcttctatgagtaagcctaattgcaaaagtgaaaataaaacatatacttcttatactaattgcaacaacatattataattttttagtcaatttttatgtccaaaattatatctcaaaatattttttatagcgatgttcgttatagatataactgtaaatttttttaaaaatttcgagtagtttataatactgaaaatatactttttaatattctagtctacaacacgtgttcaaaaaacttcaaatttattttcgacattgtaaactattcgaatttttttaaacatttacaaggatggtgttgtaactatgacaaacaccctcatgaaaaaaaattgaaaatatgtattccagcatgtgttttcaagtacaaaggccgactaagaggttttaataaaaaattgacaataatacatttcattgattaatatattagtactctcgactttatatatagggcttaattagttggaacattagtattaagtacttgtggtgtctagtaccacttaaaagtgtcacaataaaatgacaaattgaattatgtattttttaaaatagtataaaatagtaccctaaataaatttttgttaaaataaaacttaacaataacttgattaaaaagtattataacaagattgattacattttttgcatctttgcatgttaggaattaccttcaagttaattatattaaaaagaattatcgaaaattaaattcatcgtctcattttgtattattttagaaaatatatagtttattttgttattttataaaataacagaatataattagtaacttttgcaaaataaatagttcaaaataatagtattaatcctaaattatataaaatctaatttttaattacatcaataataatattatattttaaaaaaaaaagtattagacaccaaaaacacattttaccatatctagtcaatgttggtctagaagctctttttatatatatttacccaaccatttagctttcattgcacaacattaaagaaagagctttttactaaaaagctatgccaaccacaaccacatagttatgcttatataagtactattttcattggaaagcatgatcatagtcatgatgatgaaagagcttgtggataagatgtgaaagccactttgaagctgcaaaggcaagtattgctatagaaaccatgacactctttaatacttggccttgtttggtagcaacagcagcatacccaattagagctatgctcatcacttgtagcactacttctaacactttcaaacccttgtgtgcaccactacaacttggacaattcaccacatggctccaatacctaatcaaaaacaaatcaagtacatataatgatataaattgcactaatgactatacatcatataatgttatattatgtacactaacatgtgatt

SEQ ID NO: 39368 - DNA, 3858 bp, Cannabis sativa
  modified_base (40)..(52): a, c, t, g, unknown or other
ttgtcatttaacaaaacacagggtccaattagtaactttnnnnnnnnnnnnngtccaaaatggtatttacccttatgaaaataaagatatcattaaaacaaatattttttaatataatatatcaaataagaaatatacttttaattgatataaactcaaaaaaaatacttataatttataaacttaagaccaattattttatcatgattttataaacaataaaaattatttaacttttaaatataaagatattgaattaaagattatttaggatttttttaaaaaataacgactttatagatcatacttcggaagcaataagcttagacttcttaccactctatgctagaatctcatatcttagtagaatccttacttgaatttaattggttaaaaaataatgctacatcagtacatattgctctttatatttattaataatagccaataaattgttaatgatgtgtatatgaattttgatacaaataattcaaaggtgttgtcctgtgtattattagagacaaggtgaggttgtgaatgagtagatttctggttaaaatgctttcatatttggggctgattacaactccacttagcaaagtggcacagatttttgataagcatgatgaagtgtttgtgtagcacaagtgagatcccactcaccgaatgaaaagacttaaaacagagatagagagggtatataatcaacttcctataagcccaaatgggcagaaataccattccctttttcccaaatggttccaacacaacaagggaacatatcttcccagccccatatcatcatcatcatcatctgaataacctgaaatgttctctgcatgtgaatatccactttttcaaagttccctctaccaaatgaccaattctattcgatgatgatacatataataatttatctcaatcatgattgttgataggcagcttttcattatttgttagtggtcatgttttagttccaagaaagtttataagttgtaacacacttatttgttagtcattctgttttaattagttccttagttcttaatttgaaagaaagtttataagttgtaacacacattcacaaagttggctaaatttcaaaggctataaaataaattctttttataatagttaaaaactaaaaaagaaagagctaaaaaacataacttattacagacagtcatctaacctttcaaattactataaagaatcttgaaaagatatctagaattatggaccctttttccaaaaacactaggcctcaattctagctctaaactacctaattttcctaaacaagaattgaaagaaagaatcacgggccgcgaggagtgccaaaatagaaacaaccgggagcttggtcttcaggtatcatgccaccacctttgcttgtatcaattgcttctagtagcttaactacatcagccatgttaggacgtttctctggatttgcatcccaacattttttcatgatccttgcataagatttcggacagcatcttgggattttaggtcgctgattctgccattttgcaataaatgtttttgagtcattagtacataaaaagattaaaaaaaaaaaaaaactaatgagttagagagtgtgtagcataagaacaaacctgtaaaactattgcagatgacatctcagcaaaattcatattaggataagccatatcacaacagtagatttcccataagcatataccaaaactataaacatcacactttctgttgtatggtttgccaccaataacctacacaagttttctttttagacttaactttgttcatgaaaaagaacaaacaaacaaacaaacaaagggaaaaaaaaacaaaaaataaactaaataaaatttcaattagtacctctggtgccatgtagccaagtgtaccagtttctccagtcatatcattaagattctgagcttcaactcgagcaacaccaaaatcagcaattttaagaattctatgagtgtctaacaacatattttcagcttttaaatcgcggtgtatgatactttttgaatgaaggtaactcagactgcaaacataagaagcataaaaaaatactaatgttaagaaccaaacagaactgaagaagtaagaagtgatcataactaaaactaaccctctagccatatccaaagcaagttgaatgacgatcttaaaggcgagttttgttctcctattcttgaataaatagttttttagtgtaccaccaggaaggtactcagcaagaacacaacaagcattggaaatatatgaaacttgacagccattgagggagttggtagaaggaacttcgagcttcgaaattcccattgaagctcctatgaactgaaagctaacaacttatattaaagcaaatgtatatatattgaaacaataagagggaaagaaagtacatcaacccctcactccctcaaggcaaaagaaaaaagaacaaaagtcaaaaagaaaatagcaatactaagctttgcatcagataaatgatttaaagataataattacacacaagacatcatattctatgagaaagtgatcaatttttcatttttattttcacctttgtaacgttaggatggtcaagcttatgccaaacagacacctcttgttgaaaagaggccctaagagaagcagttctggaggtcatacctccttccccccaatccagtatcttcactgtaataagaaaataaataataaataaagaaagaaagaaataaaagtaaaatggcattaatatagtgtcactagtacactccatgaatttcataatttctttttctttttaaatattaaagaaccaagcgtcaatttcacgaacacattgtgtttagtatttcatatagataaaagaactattagcctaaaaatcaacaatgcaaactagttgatggaataacaatcctaaaatataaatcagattttaaaaaatgtagacattattagatatatagcaggaagatatcaatatttagatacctgcaacatcttggccatcgtagacacctttgtaaacaatgccataagtccctttagcaatctcacgtattaatttcaattttaacaattcgatcccccactcttctttcttgtgaaatttaagttccttcgaccaagatacattgtagttcatcttctctaactccacaccaaaagttctaagattaattgtatcggctcgaacaaacttattattatcatccctaaaactttcctccacccttgtgactaaagccaaagatatagattggctatcagtaaacttgcttgaatccatattcaaaacagagtgaaaaatcttcctttcaagaatccaatcgaataataatataaaaataatagctcagttgttatagaataaaatatgacgagagtaaaaatggaaaaaaaataaatgaaataggattggaggagattaaatagagaaaaaattattcttgaatgactctttcaaatccactaacttactaacgtgttgattattggatatggtgtattattcgtatctcgtaaatcacttaactgttttatagtgaaatacttgttacctattcctaagctaactattctctgtgattctttacctattttaatgacaattacactctaatattttatcaatattaaataataataataataaaatcaatggcatttatcatctatatcacgtggttatataataaaagtgttgtttttttataaaaagatattacaatttaaatttaaacgatcattacctcgttttgtttttgttttgttttttcttttaaaatattataatttaaatttaaattctttacatatattaattacattctgttttaaaataaaagacgtgtttga

SEQ ID NO: 39369 - DNA, 2077 bp, Cannabis sativa
caatttcgtgaaggacatgagtatggacaagaaatttccttgtaaggaaaagtgtttggttgactcttgcgtacatgaatctgatgctgacagacaaagcaaaccagttgaacaaacaatggaaccgctttcatcattcattttgaaagcatcaaaacctactgaccaagaaaaggatcatggtgatgatggaacaaagcagcttggttttacaaacttggtgacagaagatttagattctagtgcaagtgatgggatctcatttcgtaaagcaacgaaggaaattattcctgaatcgcaacttgtggttcaaaaggtgagacgttacttacttttattttgtttcagtatctaaacgttacaaaaaaggaaaaagaattatgattctatgattctaaaactgggaagagcttcttgaataacataagatcaattaaatttaagtgatgggttatgaaaagttatccaaaaaaattagctagctgtgttacttttgaagaaataacttgcatttgagccaaatgcaaagtccaaacatgtagtactatgtcatctggttttgcattttcttgtttggtctagtttataatgcatttaaaatcatgataccgtctcattatgcgagcgtgcataggttcaaaagtcagctttgacaattgacaacaacaaaaacaaggacactagccaaacaagcagtgtcaccatccttaaagaggtgaagagtggaaagagctcttgtggtagtgatttagccacaaccagtggaacagaggagccaccacttggtgcagtttgtcatcagcagcttgctgaaacaggacacaccaccagatgccatgaaaatgaaatctcacaaagcttcactgaacaaggtcaatctcaccaaaagtactgcaatgaagagccaactcatccttcaggcctcatgtcgcaccaagtttctgcatcaccaagcttccgaagcacttctcatcgctcaaacagcagcactactagttcacgctctttcgctttccctatgtaattaaactctcattcaactctagttcttacaaattttataatatatttaatttttacttcatcaatttgcatcggtgggaattgttgacttagtaaagcacatttttggtttatgacataagcagattggcagcagaatggcatggaagcccagaacaaatggttaaacctgaaaagagaccattgaaaaagcgccaagggaagtgttgcagcattctctgctgtaaattctgaaattgtttgtgtatatacttattttttggacttgctagtagtttctttattcgtatataattgattattttgtttcttttggtcacatttgtcctggttaaggccttttaatgaataaatgttctgatgcaaatcatgtcattattggtagcatttgtagccaatccaaattaaacattcgtaacaccagtctttgtttattaatatatatacttttaaggagattgtatacatgcattccaaaaagaaaaaaaaacagagagattgtatacatacaaaaaataaaatataaaatagagtaattataaatagaaagaacttttaggttgtgatcatttataatttttttttaagcgtcgtaataaaatataaatctatagaaaaataaatgtaaatatgcatctacatattcatcatatccttatatggtatgaaataattgtttacaatataaaaatgtttatccaaaaaattggctagatgacgtggacactatttttaacacgtggcaagaaaaaaataatactagggccccgcatcccaagataggatagtattacatactatcaggacacccaaataagtaccaagatttatctttcaataaacaagttgccatgatcctaaaacgatgaaccatgaaactgaggatgccatgtggacatcctgttagagattttatatatcaatagaagataaccaaggtatattacaacataattgtaaaataatacaaagactaaaagattgattatgtaaatgttacaacacatacactatatatatggatcatttcttaatgggcattatccatgaatgg

SEQ ID NO: 39370 - DNA, 1849 bp, Cannabis sativa
cagcatttgaatctactggtgggaccaattgggttgtatgctcgtcaaataatcgatcaattatactcggttaatggagtgggaatcgagatgtgtaaacacaagtcgagttatctaattaccaagatgatacaaatcagactaagcatacaagtccagttatcttatttcttccccaaatttaagattatttgaaacaacgtaacataagagactaaactatttattcctcaaaacattcagcgactaaaacacattcatttctaagacaaattaacaaggaactccactaaatggacttaaggacttagtttactcaatcaagaagtgtccagaaaaagaatgaatctaattaaattgtaaaactcaaatgaacgttgttgttttttacaaattttctcaggaaccaaacaaaaaacaaagcacctgattgagattgttgtggcgaaggtgagccacgatgagagaattaagctgtctgtatagcttcccatcttgaagaatgttctccaagctgctatccatatctctcaaaaataaaaataaaaaatccctaaaccccaaaacccttgaatgttgcctttttattctttcacggtgctatccatttctctaattctaaaaaaaacaaaaaaaaacaaaaaaccttgatttttattctaaacttttgtttggttgtattttaggtgggtgtggttacaaaataaaaatgaaatgggattgggaattaatacctgaataagaattattatggttggtattgtatgtgttattcatgattccgaaaagagaacacgtggcatttccaatcccagtctaatggatcaaggtcggctcgtaagccctacgagatgatgggccaatgtcacaagaagagatgggcctcaagcccatccgagatacaagatatctacacccagatttggttgtctacaaatccgaaggggcacctcgccctcaactgaaaagaagcaaaccttccaaatgagtatttaggtgttggaaaatgttgtaccaagatcttagttactactcatgtatgttggattaattatattctaacatcctaatatggaatttcctaaaacaataaataaacacataaagggattactagatcattacactgggtgcagcgaaataaactgtcttcttccgttcaaatctctaacccttaatcttttctgtcatggacttgtagcaccaaaagggactggtacaaaagtaccaaggcccaagggaaggaaaaatcacactagtgattcaataaacgaaaacggagggacagggggacagtacttcgacgatagttggttcacagtggatctcaaaaggcgtttgatgccaagtacgagaaagcaaaaagtgagaaggtgaggttgcatggtaataacctcaagaaccacttgaacgacaaggtcagtggaagagatctcccagatagctagtaacacaaataggctagaagaacaaattgttgcattgacgaaactggtccagaagcaaagtggggccctcgccgactccgaagataaggactcaaagccatgcgtaaggaggatcggggaagctccactcctggagaacttttaaatgccccaaattgagctgtatgatgggctcacttaagacttatttagccaagtacaataagatgatgcaagtagcaaatgttagtgaggacgccaagtatttgtgcttttccctaacccttccaaatctactaaggattggtggaagagattggctcccggatcgatccactcctagaaagaattatagtctgccttccgaaaacattttattgttgcccgcgactatgatttagaaatgggccccatcaccaaca

SEQ ID NO: 39371 - DNA, 3120 bp, Cannabis sativa
tgaatgttaatttttagtttccattatatcaaattgcttctattcttctatgttcaatgtcatgattattgttttaatcttgtttagatgattgctaaattaagctttactttaatctattatcatcttaggattattattcacctaatagtcaaggattctaagttgttgtgataaattgcaatttctaatattttcaattgtgatgaagaatgaaacctaggttaaatgaattctatacttcattaatttattgcctggattaatctatttccacaaattttaaagctttatctaagttaaataaatttcatgattcgtggatttactgtttagataaaagagttaattattgagcgttttgtcttaattacatgtaataaagagattgggataatttgactatttcattcagctttatctgtgggattaatagtttgattggaaaacttaaattacattcattaataaaagttaagaatgattgttgagggtggagaataacttttaactatttatctcatatcgtagtatcacatttaatttatttttgtttttatttatgttattttattctcataatcaaaacctttttttttttttaattcttgtcactagtttttgaataattgaataaacataatcctcgtgggattgacccttacttacatttataataaaataattagaaatattggaatcaaaataatagtaaatttgatacggcatacgacacacattaaatttttagcaccgttgtcagggactattattttattttattattcatatttaatttttgtcttactaacttgtttttacttgggcaaatcaggtgtacatgtctagtgcagacaatactcaaagagactatcaagagtaaaacaatattttgagtcatcgtctaattctcgatcatcgaagaatatcactaacaacccactttttcagcctcttggtcctgtcaaagagccactatcaaactaattctgagtttgattccgacgactcggttaattctcacaagaccaaaataggatgttgaaagagttggtcacgccggatcttgaccaacaaccattgtgcatccattatccatctttggatgttaattttgaactaaaattgggcctcatccacttgctgccaacttttcataggttgcctggtgaagaccctaacaagcatttaaaggagtttcatattgcctgctctagtatgaaaccttcttcggtgactaagaacaaatcaagttgcgggcttttcctttcacatttgttcccacaagataagatcagaacttgtcaaaagtaaacaccacagccagtagctccttctctgtagtagtgtagttcaattgggtgtcggctaatgtcttgcttgcataataaatgccaagaacaaaacctacaacaaaatcattggcatcacacattaactcaaaaggaagtgaccaatcgggggctacaataataggggcagatacaaaagccttttttaaagttacaaaagcttcatggcactccttggtgaactcaaaggatttgttctgctcaagtaaagagcaaagaggcttggaaaaaattgagaagtctttaataaacctcctataaaacttgcatgccccaaaaagcttcaaattcctttgacaatagtaggggtggcattttctccatagtctcaactttcactctatcccctttaataccctttttagaaactttatgacccaaaacaattccttattgcactataaaattgcatttctcccaattgagaaccaactttgtttcctcacatcttactaaaacttgctccaagttagctaaataagtgtcaaaagacttcccaaataccgagaagtcatctatgaagatctcaagaatgttctctgccaaatctaaaaaaatatccatcatacatctttggaaagtggcaggagcattacaaatccaaatgacatcctcctaaaggaaaatgtgccataaggacaagtgaatgttgttttctcttggtcttccgaagcaatggcaatttgattatagctagaatacccatcaaggaaataatagaattcctttccctccaaacgatcaagcatttgattaatgaatggcagcgggaaattgtctttttgtgtggtcttcttcaactttcgataatccattcaaatacgccaacctgtcactgttcttatggggatcaattcgttgttttcattagctaccactgtgactccacatttttttaggaatatattaaactaggctgacccaagaactgtccgaaatggggtagataatgccaaaatccagccacttgattacctcatttttaaccacttccttcatgatggggtttagtcatcgttgttgctctacagaattgtcgcaacaatcttccagcagaatcttatgcatgcacattgaaggacttatacccttgatgtcggccatggtccaaccaatgactcttttgtatttattcaaaacatcaatcaacaagagttcttttttagcacccaacgtagtagaaataattattggcaaagtctctccatctcttaaataagcatacttcaaatgactagtctatggcttcaactccaactcgggtggttcttgaatggacggcttaggaggtttgaaattgtgctttgataactccaaagattcaaaaggcctcctaaacttagtgaaaagttgctttgactttacccaaataactttggtttcttcatcttcactcaaagcttcacactcttcaagagaacttatcaacttttcatctttccaagcttccttgtgaaatctttcaaccacaatagaatcaatcacacttaaacgagagcattcctcaatctaatccgaaaagctcatggcattgaacacattaaaagtcactttttgatcattcaccctcatagtgagctcctctttttgcacatcaatcaaggttctctcggtggctaggaatggtctccccaaaataatgagaacttctttatcagccttataatcaaggataatgaaatcagccgaaaaaatgaacttatcaacttgtaccaaaacatctttaatttttccatccagatgggccatggaacgatctgctaattgc

SEQ ID NO: 39372 - DNA, 1280 bp, Cannabis sativa
acataaaagcgatttctgatttttattaatttaaattttaatatattgaaatgggttttatttagggcacaaaacccaacaatctgtgcctttagtctacctccggtcgtatttttgtcactcgtcatgttatctttaatgaatctacttttcctttcgcctactctttcctcatctccctgcatcttacaaaacaatacataatacttactgccttacctttctcggcctcctcctccatacctactcctttacttgttcatcaaccacaatcaccaccctcatctcttactccagtgtctcctcaacctgttttatcccccccttccccatcactatcatctcccattattcccacaccacctactcctgccacgacctcctctactttagccccatcctcttcttctcaccacattgctcgtttgatgcatggtaaacttgcataatcctcacgagactactcttgcctccacttatttgcatcccatgattactagagctaaatcgggcattagaaagccccatgtgttttatggtgctgttttaggtactcccgatgaaccctcaagttttaaggaagctagtactgatccttgttggaactctgctatggatattgagatcgttggtttgaaatctcaatgtacatgggttcttgtacaaccacctcttggttaccgaataattggtttgcaagtgggtttatcgtatcaagctcattgcggatggtttcgtcaaacgttacaaggcccgccttgttgccaaaggcttccatcaaactctgggtcttgatcatcatgaaacatttagtcctttcatcaagcacacctttattcggtttgttctatccttggcggtttcctccaattggtttcttatgtaaattgacattcaaaatgcttttcttcatggtaatctcactgagatagtatatatgactcatcctaaaggctttgtcgatgagtctcacccacactacgtctgcaagctcacgaaatctcattatggtttaaagtagtcacctcgtgcatggttccttaagttgagtacaactcttctggcctggggttttgctgcttcatagtccgacaattcactcttcatctatcgatctcaaactgtcgtcgtggtatttctcatctatgtcaatgacatcattatcacagggtcttcctcttcaaccattgatgctcttttactttatctaaactctcactttactgtcaaggatttgggtcctcttcatttctttttgggcatacaggtacatcgttctc

SEQ ID NO: 39373 - DNA, 2885 bp, Cannabis sativa
tatatatataaaaaaattaaaatttttgataaatttaatcatactcatagcatttattacattaccaatctctattataaagttaaggcttaattgctatgagtataataaaattaaaaacttaaaataattaaatatcattttgttataatataccacacaactttttttctaatatatatatatatatatatatactaaataattacaaacttaagttatataaatactcataacacaaaagtttacaataaaaataaaattaataatacatcataaccagtaaactaattattaacctaaaattattctacctatatatgattattaacgataatattttatattaccatacatatagttcattaacaatatttttaatttatccacttaccataaaaaatattattaattaaaccatattttcagtggatagttagataattatagtttttataattaattataaattaaaaattatataacgtagaataaaatcaagaaaagaaaaagataataaataaatactttaaggatatttaaagatattttttgctattttttataatagatatttagattaaataatttaattaaaaaattataataaaagaaagtgaaaaaaaaagtgtgaggaatggtttagaaaaaaataagtagctaattatgaaaactagaaaacatatcgcgcttcgcgtgcggttgtttataaaattttaaattatacataaaaagtttattattttatttgataagaattgtgtaatatattttatgaaattataatttaataatttgtataaacatattttgttaataaataagtaattattctactaaattaatgcttatttttttattaacttaataacttattaaaattttgtattttttttctttcacacaattacaatagacttaatatcatccatatataatatcttgtatgcatctcttggaagacatatatcataattagagccatatatcatatttttttttttcaaatttatattataaaattataaatttaaattatataaaaatacttaccacaacaattcttttaaaagcataataataataaattaatataaattaagaattttaaataattatactcaaccgattttataaacatgtcattaaccacaatgactttcctaattctgaaaccgtttcttttttctttttcttttactaacacccattttctaatttgagcttaggtttttgtgagctctaactcaataattttaacttatttatgaattgaacatttaaggtttgtttcaattatatattttttgaacaaaaaaaagaataaataataaaattaattaaaaaatagatatatatatttttttgaattaataaatagatatattgaattgatacatgagtaacaaaattagctgtatattttacttattttaaatagatcaaacttaatttttttttttttgatatttttaaaaatacaataaaaataaaaaataattatctatcattcaaagtagcttaatataatagcttttttttagagaaaagaatgaatcaaatttattttattatttaattatgaaattttttataaataaatatcgttgataagatattttcatatgttattaaaaggttgtttagcataacttttaaaataaaattaaatgaaaattttcttcaaaaaaaattaaatgaaaattaagaaaccaaataaaataatattatttttgaattatgagtttctatacgaaataaaaaaaatgagaaaatagatgaataaatgtaaattctttgaattatgagttttttatacaagaatattttttttctgaaatatatatatttaccatattattatagatatttaattaaaatacattataatcaaattttaattatatattagttaattaataaaaaaacgttaaaaaatcaaattgtaattaaaattacatacatatatgttttaaagatattttttgggatccgttataatatttttttcaaaaaaaaaaaaaaattacttattatattttatgtttatatatattgacaaaaaataaaatcataaaacaaactaaatcgtaatcaaaattaaaattacatgtcagaatatatttttataaattaattaatccaacaaactattatattaaataaagtttcttaacaacaaatagttcatattaattatttctaaattctaattcaaaactattataaattaaatatagtgatgaacccataaaagaagatatgagatctttcaaaatagaataaaaaaaaattgaaacaaatagaataaaaaacttgaaaaaaaaaatagaataaaaaattttaaaataaagacttaaggagccaatgtgtatacatatttgaagcaatcctatttgtaaaggagagattctgcaaatttttaaaaataccataatacatcaagcaaataatatcgattaaaaaaatattaaactaaaaaaatacgtatatttattctaataaaataattaagaaaagtccaattcacacacatataaatacatataattatatgaaaaaaaactcaataatcattagatcattattgtattaattttgaaattaattaataaaaaaaaaaagagaaaggtaacacctcaataaaaaaagtttaattagttaaatgactcttgataacatgtatacaaaatatggtattattagaaagaatatttctatagactatatctatatgttattaattatacttggcaaaagagtagaaacttgcttgtggtgcaccataaaagacaactctaagtaataaataattaaaccaggaaaaaaagaaaaaatggtaaagtaaaatacctgtaaagctttaataaaaaaaaaaaaaaaaa

SEQ ID NO: 39374 - DNA, 3540 bp, Cannabis sativa
  modified_base (28)..(36): a, c, t, g, unknown or other
attgcataaaatacaattcaatataatnnnnnnnnntacaatacgacctaatacggcgtaccaaacgagccattaaagtattgaatttttccacagggacataggtattaaagtaatcgatacctggttgttgtatgtaccctttggtaactaatcaggctttgtaccattcaatggagccatctgggttgtattttattttataaacctatttgttaccaataacatgttggttggatgggagagaaatgacaacccaggtatcaatattggcttccaatgcctctatttatgtatccatggcttaaagtcgttttcacttgtttagagaaacatttaatgtcaaaacaaaaatggtgggtttccatgctatcaataatccaagaaatagtaggaaaaatattgatattactagaaaaattggtgacagcatgtgtatcagttggaggggaggtggtgggttgaatttgttgattcagcatgtgcatgtcatagcggctgctccattttgatgttggggaaatggcatttgttccacctcattttgatccaaaataatctctcatttctctagtcgctcatgaaaaatcttccttagcgtgtaacacctcattgttggatgattaattttctgatggaaatcatgttgcttttcttcttgagttggtaatttcgtgacaaatggcagtactgcttctccatccctaatccatacttttaacaaactacaaactttttctccatcacaaggaaattcggctagtttatcacttcgtttcccttttttatgggctttaaaattttgtctgccttgagctagcgctatgtcaacaccacgttttgaaaatttccatggtcaatgtgtttggtcgttttggttggacggcttggtcaaacggaaaacagtggcttcagtatttcttgatttagctatgagctccgcagaattgtatatggcatgatttttaatgtataagtgatattcatccaacatgcctttgatacacattttgaccagatcgtatttagccatggtcccagcacaatcaagagctttttttcctaaacttttgaacgtaattaacgagtctttctctaaagttttatctttttcctgataagttagctatgctccatttatcttcaatcataaagaactttgcacaaaattgagagaccatgtcatcgcaactctttatactccctgatggaaaactcgcataccaggagtatgctcgatcagcgagagactttgaaaattttctaattcttaattcaaaatcatgcgcataaatacctaaatcatctataaattgaatgatatgttccttgacattgtcgaaatttccattgtatttttgaaatactggactcacgtaacctcgagggtaaggtttgactgcaactttcacatggtagggtggatgaaagtcgatggaagttaatgatgatgatgatttaccccttttcgactttaaggagaccaatcaatttgtcttttgtgacgaactcagaggaagaccgagcctcttcaccaatcctttcaacaatctcaaaagttctaattcttcgaacattattatgtatcgtttgagttcgtagttcaagagtatgtacttaccttatcaatgattactttatcgcacgttcttcaggtaaactgctcctttcaatagatgattcttggtgtgtctttggtagaagcgaactcagtagttgcatcatgctgtcttgggccttttggagcttttccaatctggctaacacaacctcatctgtgttcttcgaattagtattattgttattgttattgttgttatcattttgcaaggtctctgttcggatctgactgtcttgctcttgagtatcagagatagacatttggatttagatgagaaaacagaatctttttttttttcaagtgaacaaattgagtgttttccttagtatatattaaagtatatttattgataaatatatatatatatttatataagtatatatgaactttttaaaggaaacacttccccagcagaattgccaaaatatttagaggttctaattaagcatttaattatatatataattaaaataaataagagtttataatataacacgtagtaaataattatgagcgtaatataaattatatgaataaacgtaattatagtataatatatatggattataagcaaaaattatatgtatatattattagatacacatataagtataaatatatagagaatgtgtaacacacgaatttaagtagttcgggagaatatcatttgtctacatctatggtagcatttaagctatgattagattttaataataaaatggaggctacagattttaagaagtttattcttaacaatggtctcaactgtatgtaaatgggtattttagtgaatagaagcgatattaacgtaaactttgcttgtgtagagagaaacaagatgaagaagaaaggaaaatataaaataaacaaagagtgtgcatataaaaacattggtttgaagtttatctttctgaaggatttgaggtggaggattcaatggagtcagatgaggttggaagcttgtatacaagcatgttgttatgttttgaagcttacaagcagcctgtgtagaggaaaagaaagaaatgatagtttgtttgaagattgataagacaagcttaatgggactagacgcttttttttttctcttcccttatctatgtcagtccctagctaatagcttgggtgagtgtatttatagggatagcttatcttgcctccttgaggtgaaccttatcttcgtaaaagaatcaagtgatagctgcttttatgtttatgcattcacacctaaactcaggtatatattatattcatctcaggttttgtgcggctactattcgtgttttacacagttacttactattttgcttgttttactgttattattttattttattacacacaatcttttttttttttcactttttactcatcaacattagcccccttgtctgtatttaagaaaaaaaaaatgctcaatattttttcttcacagatacaatttttttttactgttcaaagttgattactcacctctttatttttttactacgtagagggtcagtgttcctcctgtctatagatcatcatgctcttcttttacttccatatgcatcacaccaatctttttattgctcaaagatgattactcattagtctttttacttccatacatcgtactaatctttttattgttcaaatatgattactcatctcttcaattttttactacgtggaggtctggaaagaaaactcttctgcctataagttaccacacttttctttcatttctatttccatgcatctctttcattcttcccatgcaatctcaacttagtaaagaataaagatatattgttgttattattttatatatatcatcattcatagagctcaagacttagtaaagatatccattattaacgttacaaagaaatgtcaaattaaaaaaaaaaaaatcatatcttttgaaaggattg

SEQ ID NO: 39375 - DNA, 1166 bp, Cannabis sativa
aagattagcaccaaaatatgattattatttttttctgttgtttgcttacatttttaagttttttttttctaaccagatactagtatcaaattaattattttaaaaattcatgttgtagaaatggttaccagaattaatttttgcattactagtaataagataccataacatgagatgcttattaaagaaattatcttttccactcatcctcaacaggacttgaaatctttactaaagtacgattgattatcatatttgcaaataaacagattactaagcgagctctccttgccttgaaagaagctagctgatagaagaggccatccatgatcaagagaagaaggaacaagtgcatctcttcttgttcatccaagaaagaaagattatatattattcatcaaagaattcaatagtgccacatgaatttattttgtgttcaagtggtatggagatgaagaaatgaggcacatttcagatgggtagccattgctaacacgaaaagcatcattgttaattaaaggccaaatggaagtacttagcaaaatcatttcttgaaatgttgagtactatttggagataggagggattgagcactacacctcgagtcatgcgcttgtgacactctcgaccctaatgctcgccggtagcatgagcgcttgatgagacttatctgcgagtgcacttccattgcattcgcgagcacatcaagctagctaatggcaagcacctgcttgaaattttccccttgcgagaacaccttgaaggatccttgcaagtgcatcattgcaacattttgggagcataatgtaatacatgtcgtccccgagcagatgagacacaacccacgaccgctctcatgatgagcataagctcacagggttgagctgatcctagacattagcggactagatttgtgcttaggacctacactttttggggcccaaaataaaaaaataaaaaagtctcattaaatttttatttaagtaaaattaagtatactgtaaacaataaatatttacagcttagttagttgagatgtacggtacattacacaatagtgagagttcgagtcctataaataaccttaggcccatatatttttaggatcggccctaactgagcatactgaacacttgtgttcagttataccttgaaccttgcttttt

SEQ ID NO: 39376 - DNA, 2526 bp, Cannabis sativa
tatgtttgtgtgcccatatatatatatatatagagagagagagagagagggggacccatatatttttttatcccatttgaacaaatcattattattgatatgtactagactaatttatttatttttttcttcaccatttttttttataactacctacaaacacttaaatcattacattataatgtatagtgtttactatattatatatgctacaaattaaatcaaccccaatatatttggattgaatatataatataatatatatataaatttgatgatcatgttctaaagcgtgcaataatattgcaagcaacgagtgtatatacaatatctcatatatatagatgatgatgtcaattaaaacgttcactctctatagtcatgagtctagtctgacgtggcccttcatatgatatatatacatatatatatatagagagagagagaataattttctgttagaaagagtgatatatcttctgtcctctgtgtgagtcgatcaccaaatcacctctctctctctctctctgtacggaatcggagagaggcgcactctccacttctaccaataacactattacacgtgtctacctacctacaacaatatatacataataattagacttattaatttataattaattcaaacatatattgtttttggttgaatggaaaaagataagaatttataaaaattgaaaaatagaaaaatgaatgaataaaataattaagggtaagggtgaggtgtccgacataagaataacagtactgaagaatgggaggtaagtagtagtgttaccacttcttcatcactgtcctttctctacctattacgttaacgttaccttccctttttttttttaatttcctattctacccctactctctcaaacccttattattattttatttatttatttatttatgagataggagggtgtgttttcttctgatgatttcaccagttcttgttggtggttatttggacaacaacgatacccctttcttcttctctctattaattaatatatatatacattattgttagccgtacacgtgtctaatcagatctcataccatcccatgcctcccattcccttctcacctttacattcatgtctcttctcgatcgtttctatatattgtaattaaaaaatattgaaataatgcattttatatattatgtaacaaatggttatatataaaacaaaacattaattggattgaacctaaataaacaactgatcctgtatcaccaaagctgtaataataataaaaatatattttgttgaaactttattattattgtcttattttatatcaaaatactatagaatataaaattagtattatattgcctatgcatatcatcatgtgatctcttctcaaagattttcagtgaacaaaaaattaataaaagtgaagtttagaaagtccatcactccatgattgtactagtactaataatctccttccctagctatataatatatataggattttgtaaataattgaagcaatatcaaactagatatttaaaattaataaaacataaaaaggaaattcctcttccactttaatgtcaatatgattcgaaaatactaaaagttagtttaattgctaagaattacttagggtaactccaataataaatatcaaatttgatattaaatcaacacaataataataaaatttttaactaaatttttttttctattctaatcacaacattaaaaattacactaaaattataatttttattattatattattttattaaattaaaaataaacacaaataatatatatacaaaaaatttacttataaatatattatttaaatattaaaaactaataaaaatatatttggtgtagtctatagtgtacactaataaaatttacttataaatataaaaggctaattaggatttttttttcccttaattaaactttaacatgtactaaatcacgctctctaaacttttctggccgttaaaattcctcctaaactattgaaaaattgttaaatttaattaataacttttatctaacttcatctaattttacaattttagtgattgtttatatactaaatcatactctccagactttgatatctaccaagtcatgtcactcgaactttgtcatgtataaaatcatgccccctgaactttcatccatgttagattttttttactaaaattggacaaaaatacttaaattcaataatttgatcaatagttcaaagggtatttttaacgaccttaaaagtttaggcgggacatgatttggtacgtagcaaagttcgggaggaatgatttgatgtactaatattagtggaacattatagagaatgttatatatatatatagaataaattttaaagtgtgcgtggttggaatgaatttatctggcgtttggttggaggtaatgaaatagaatggaatagaaaggaaacaattttcattccattcctttgtttagttgtattttaaagtattggagggaataatgagatcactgtttt

SEQ ID NO: 39377 - DNA, 2048 bp, Cannabis sativa
atgaatcttatgtattattttaaaaaattaaaataaaaatattttttttattatatctgtttaatgttaattccacataaaaaaaaattattcattaaagcaatatatttattaattagtaaatattaaattttattgtatttattattaattaaaatgaatatttctatataatttattactatattatttttttattcgctatgtcatttatgtataccatctatataaaatttagtataatgcatatatatatatatattattgctaataacataaaaataacttagttaaaaatataaaatcgatcttacagactaaatatatatcgtcatattttttttataataaattaaaatattaatggtatttaaatttatttattaattcaaattaatataatggaatggaataatcctatcttaccctttttaaggtatcaatattactttttttaagggtaattatattactaaagaaaaaatattataatattaaatcctcaaaacaaacaagtaatgattcacattactcttcccttactagtattaaattgttatttttttttgggggggggatactggcaattaatgataataatgtggaacaagctgaatatgaagaaacataggggaagaaattataaattgaaagatgtggaatgatgataatattcttagcatattcaaaggtgacgtggttgagatgtgtctatcttttccaattgcaatagtttttaaatctaaatctcttctacttataaggttgtgaaagtgacatgtcatttatccacatcactactccaagttttataaataagaattttgatcttaccaaatcacataaacttgcacctagaaaattaaggagaagaaagaatattaaaattattacactataaattcaatttacaaatagagaaatattgacctttcatttgtattagagaattgttaaaaaatattattggtgcctaattttttttttattgtatcgttattggtataattaagtatttagtttcatataacttaaaataataacttttagagaatattactaactaactataaagtaccactaatacttagggttgagcatcggtcgatttggtagatttttttttatataaaaatacaaatttcgattttcagtctggattggtgcaatccgaaaaccgaccaaccaatctaaaaacctatttaaaactgaccaatctaaaccgcggtggtcggttcaaaccgccaaaaatcgaatctattttttttttttttttttttgtaaaatataatctaatatattgtgtaagcatatttataagtaaaaccatacaaattagaatatatgattaaaagtctaaagtctaaaacacaacataatacaacacaaataaaataaataacaatagtacatattaaatgattctcccacaaccacacaaaccaaatacattaaaaatgtagagagaaaatagaaaaaatttctgcaaaactcaattttgtctcttgaatctgctctagtttaagttctgtaaaaataaaaaaaaaataaaaatgagtgcgagatgagtttgacattaagagaaaaatgagtaagtaaatgtataaagaaagatgatgaaaattgagagaaaaatacttaccattattgaatctggagagagtacctgaaatttttgaagaagataaaggggatattattttaatttatttttgtgagttgtgtgagttgtgactttatgagattaagataaagaaagaaaaaaaaaatagacgaataaggatgggaaaaaagaaactctagtagatttaaggccttttattttttttttttatggaaaatatagaaagagaagaagactcattagagagtcagacttagataatagataagataggagaataggagatgagagagggtagaaaaaggtctaaaagttttgatttattttttgattggttggaagtcggacgaaagatgagagagagtagaatattttatttattattattaatttattttatttcttaaatattaatattattaaa

SEQ ID NO: 39378 - DNA, 3340 bp, Cannabis sativa
  modified_base (3313)..(3314): a, c, t, g, unknown or other
ctgagtatgatcctgtggtagttcatgtcacaagtcttgtggataacctttctttagagtctattcaatctcttctactaacccatgaaatcaggcttgaaagacattgctccattaatgactctacttctaatctttctgcccacctgagcattcacaacaatcgatccaccaacagaaacaactttcgcccaaatttcagccagaaccgtggttatccacctatgaatcgtcctcaagatcgtgcatacaacagaaacaacccatccattccccggttactctgtcaagtttgccacaaagcgggacacacggcgccatctgtcactacagattcgacaaggcttttgtcaccccaaaaataaatgaatccaaagtgtttcttgctgaaattgatgaccaagaagatcctcaagcctactccagttctgcattacccaagtttacagaagactatgactggtatgccgacactggtgcaaccaatcacattgctcagggcatggaacacttagaatctgaaatcccctactcaggttctgatactcttgctcttggaaatggaaaaagacttgccataagtcatattggtaactcctctcacccttcatctcactcctccttacatttaaaaaatgttcttaaaatccctaccattactaaaaatctcattagtgtctctaagttaactgctgacaataatgctttcttagaatttcactctaaatgttgttttgttaaggacaaaatcacagggagggtgctccttaaggggaggcttaaaaatggtctctacatgctggctcacagctcctttccttccaaagttcagctttaatgtcagcttgttaccaagaaatcccaacccgagtcaccaagttctagttcatctgcaaccattcaagattgtgtacccatttcacattcatgtttttcctcatgtaataagagtactgctacatcagtaactcatccatgtaatgactcttcaaataataacaatgattttttacctccaactaatgaatctttgtcttgtcttgctcaaaaatctgatgtcaacatatggcattcgaaacttggtcatcctacaccagaaatattaggtaaaatcctctcaggattacacattcccaccagccttaaaaatttaaaatttcgtgatgcttgcaaaagaggtaaaagtcataaacaatttcaccctatatctgagtctagagcatctcaaccattacaattggttcacacggacttgtggggaccatcccatgttgaatccaaagaagggcataggtactatattcactttctagatgattttagccgttacacatggatctttcctttgtccacaaagtctcaagcctatagtacttttttacaatttaagacatttgtcgaaaaatttgatctccccatcaaggctgtccaatccgactggggaggtgagtataggtccctagcatcattcctcactcatcatggagtccatttccaacatccatgccccatgaccatgctcaaaatggtcgagctgagcgcaagcaccgtcacattacggaaaccggccttaccttacttgcacatgctggtctatctcttgattattggtggttagcatttaaacatgttgtatacctcataaatataatgccaactcgagttcttggggacatgtctccatatgaaagcctgtttcacaaggtgcctgattacaatatgctgaaaccttttgggtgtgcctgttacccacatttaagaccctataacagtcacaagatgtctctcagatctgaaaaatgtatcctagttggctactacatgaatcacaaagggtacttgtgtgaaaacaaagatggcaaaatttacatatcaagaaatgtagtctttaataaagaagaattcccagccctcaaacaagataaatccagcaaggtatcttcttcttctcaaactttttttccttctacttcatttcttacacctcctatcataactaatacaactatccctgctatgccatctgttacaaatgcccctgctgatatgaggcctgctgcaccagcaccagtagccactgctgctgcatcagcttttcctcccagcaaggatcatgatgtccaggatactattgttcactcacctaatcccgtaccagatacaatcagtacaacaatgaatccccaccagcaaccctctaatgaaccacaaaaaatcaaccaaccttcccacaataataccctcaacacacatcaaatgcaaacaaggtccaaatcgggtatacacaaaccaaaagcctaccatgcttctatccatcccttacccgaatccaccttacctaaagtaccaacaactctaaaacaaacccttaacaacccaatttggcttgcatctatgtagaaagaggacaatgctctcaagaaaaataacacctggacacttgttccctattcaccagatatgaaccttgtgggaaataaatgggtacaccgtatcaaacttaatgctgatggctccgttgacaagttcaaatcaaggttagtggccaaaggatactcccaaacaccgggaatagattataccgagacctttagcccgattgtcaagccattcacagtaagaaccttcctcacattggcagttttaaacagttgggatgttactcaattagatgtttcaaatgcaattcttaatggcacactcaaagaatcggtctatatgactcaactacctggattcatagatcccatccatcctactcatgtatgcaagctacacaaggcaatctatggtcttaagcaagcttcaagagcttggaatgaaaaactaaaaatgacactctgcagcaagggattttcatgctccaagtctgataattctctttatttttctggtacgggtgacacaaaaattcttctacttgtgtatgttgacgatatattgattaccggtccgagcaagcaactaatctccagcctcattcaagatctcaacaaggaatttgatgttaaagatctaggccctcttcattactttcttggagttgaagtgcaaagaacttcaactggaatgcatctctctcaatcgaagtatatagctaaaattctcagcaaagtcaaaatggaaggagcaaagccaagctccagccccaccagttcagcaataaagctctcttttccattggagaacctttttcaaatccaacattgcacataagtacattaggcgccctccaatatcttactcttactcgacccgacatagcgttcattgtcaacaagctaagtcaatttatgttgggttttatgccctnnataaaactctttacaatctgattagt

SEQ ID NO: 39379 - DNA, 1477 bp, Cannabis sativa
  modified_base (63)..(68): a, c, t, g, unknown or other
tgtggactgtataaatgtttaatgggccagcccatagtatttttgtaatttttttttcctttnnnnnntttttctgtttttttccctttttattatagtatataatttattataaatatatatttattttaacaactatttaatgaaaataataaacaataatgaattaataatttatgtatgtattcaattaaaattaaaacaaagacaaaggtacaaataattttaatagttataaacatattttatatttataattaatttatatttttcttttactaacatatatctttattatttataatatcacatgtctattaaaaaaataaaatgaacaatttctcaaaataattaaatattttttacaaaactaaacaaaatatgtttttttattatgaaaataatatcataaaagcttaatataatacattagtggtcaaaaattgatatttaatacgatgactaaaattaatccattaataacataataaaatcgtgatacaattataataagattaactaattaataacaaggctactaaattaaattagtatatataaatttataccatatatatagtttattcataaaaatgagaatatgtttctcatagttacagaaatgtttcaaaaaaaaaaaaaaaagaaaatctacgaattttcctaaaagggtgcacctatacattcttatcagttttagcatttgaaaaaattttaggcttttttatatatatactaaaatggaaaaaatattacacaaatacattggcaagtcctataaatatttatacaccccaatagcaaaattacctcttgctttaaccattcagacgtacaaaccactttcttttacaacgacagcttccagcaaccaaactagcaggccaaccaaaaagaaaccaagccagaaagagaattaccgtaaatttcggcgagaccgtaagaaatccaaacacatataattttagatttatgcaaaatcaggtagaaaaactggttcaaaactaaaattcaaccctaaattacgattaaaatcacagaaaattaatcctcttaatatcaatatttagattcataaaatgtagatttgtctgaaatggatatggagttcttgatcaatccaaatcaggtataaaccgaaaaaaagtatcaatacaatagctaatgtttctctcgttgcattaacgttattttttaaattttcaatggtgaatttatttatatcaaatcacgaataacaaagaaaattcaaattcatctagagtcacgtacataaaaatattgttctagtttttaagtttttgcaaagttaaattgtatttgcattaatattttactaacgctctgaaactaggagggaaggcatggttttggtggggttgttcgggatcaccagggtcggttcgtggttggaattttgggactgctgattgggcaagtttttcccgagattgttgaagttgtggctctcaaggaa

SEQ ID NO: 39380 - DNA, 2190 bp, Cannabis sativa
  modified_base (1145)..(1158): a, c, t, g, unknown or other
atatctagcaactttgttgctttttctttatataattattaacaccctcttttaatagtgttatatattaattaatcaaagatgtacatggtttattaattaataatttcaccatttctaatgtactagtatataaaataaaataaaaaagctgttccttgtttaactcttttttcccataaagaaagaaaaaaaaaaatggaaaaattatgtccattatccagaacttgataaatagttaattaaatattttttacagcatatttatttaaatagtatatatcttttttcaagggatttatttaaattatattgtttatacaacatgagtgatgatttatcaaattttaaatagactagatattctattcattcaattatattaacatttaaacatatttttaacataaattttttttcatataaaataacaataaagaaagaaattaaatatttatatacaattttgggaagagtgatcattaaaaattgctttgaccaccaatccataaacataggctcgacatcattatagctagaagatacacataatctacaataccaaatattttagtgtaacttgtcagtgtcttgattaaagaatgtaatgtataatacatcaattaaaatataattaatattagaagaaaaaaaaacattgcaatattatttataggtgatactttaattagtaatatttttttaaaaaaattattgtcttttaagttatatgaatttaatttttaattatactaatagttgtatgatcctaaacaaaatgctagactattgatatggatgagaaaaatagaagggtatttgctgcataaagtttataaagtttacatttattggcttattttattgtagaattttgcactttgatttttttttttttacttttttttttttttggcaaaaatttactatgaattataaaaaattattgcaaatattttttaggttctaattatattatggttatttatttaaataattaattgatatagtactaacatgcactacaaaaaatcttacttttagtcctaacaaaacttgtgactaaaagtgaaaaaattatgactaattataaattagtattttttatgttgtgactaaaaggttcgtggctaaaagtattagtnnnnnnnnnnnnnntttgttgtgactaaatgtatttttcgtcacattacttattgtgactaaaactaaattagtgacaacttgtaattaaatactatgttttagtcacaaataatattttgatgtgactaaaagtcacatttaatcacaaaaaaaatatgttgtgattaaaaaattatcactaaaagtaacaattttttatagtgatgacgctaatctaacctactttaaaaatctaaataaaaaataaatctatattatatatatagtagtctaataataaattatgagaatatgtattttagagttaatatttatgtgtttaatcttaatacactagattttgggtaagttaaaattgttaaatagactctcgtgttgcatctatacctatatatcgtgaccacataagctaattgttttaaaaatgagcaaaatgtaactgaatggagatatttgtaataatttgtatagtttgatacaatatttgctatgatgtaaattttgcatcaccataaataaactttttttgttactcttatgtcatttttattaatatatttggctagagcattaaataatggactatttctactcttttattattattattatttattttacttattattttatatgataaaataataataaataaagttattattattttatattttgagagagataaattctattttttttatgtgcaatataaaataatttttttaatttttataaaaattattttcattttaaagttatgttgtttttatttcgaggttataatgtttttattttgaagttatgttttttctatttaaaaatggtgttatttcatttttctaaatgaataaaaaattaattataaaagtataaataaaaaggcatcttttttatgttaaatatagtagaattttttagtgtcattattagatatcacccgtttctaataaaagagcctctttttacttttttagtaaaatggaaagaaatcttgtccaagaaaaagaaaagcatatgaacaaatcagtataaatttttata

SEQ ID NO: 39381 - DNA, 3606 bp, Cannabis sativa
  modified_base (73)..(104): a, c, t, g, unknown or other
  modified_base (1019)..(1031): a, c, t, g, unknown or other
aacataatcatgaaataaagtcatgagaaccatgaaaaccattaaaatgcgatttctaatcttttattaattnnnnnnnnnnnnnnnnnnnnnnnnnnnnnnnnttagggcacaaaactcaacagatcgtaccagagaaacaaatgaaaccagcgatgataagagttcagctatgatgaaacaactccgaccaccaagacaccaataattctagcgaccaagacaccattaattctggtgaatcgcaacctgaaaaaaatagaatctcaaatgaaaaagcaacccaaatcgattgattaaatttttttcagaaaatgggtttgaaatgtaaactcaatcttgaaaattaattcaaattccaaaaatttaattattgtaaattaaatttataaattcttaagatgtagacagataagaagtagatcttaagtttttcaattgatataaattaggtatcatccatataatacttatcacttcaatagctaaattataattgttgcatcaatgttattttttggaacttcaatctcaagattattcaattccaatcacgacaataaactagatttacgttcatctcgcgtcatgaaattggcaacctaattttgatatttgcattgcatatcattgtcatatagtttcccaatagttttactgatgctcaaagaattgatgtaacaatacttatacattgatcatgctacactatttttagtgttatttacgtgtattttacatagacaatccaacacatgctctaataataacaattctagggccagtttggtacaactgtgttgtggaaaaaaccagctgtagctgtgctgtgagaaaaagtagctgcaacagaactgtaaaaaaaactgagctcaatgtttggtaaattataaatttcaaagtatgtgagttattaagatatattataatgataatgataatgttataatctagtttattataatcacaaatatgtaaaaacttattttatgtaatattttttttttcaaatataaatnnnnnnnnnnnnnataaaaataatttatagtatttttgtattatgttttatcaaatgtaaaaaacaaattagaaaatcaagtatataagaaaatttttaagttgatgttgtttgttaatattaaaataaaatataatttattttttcaaaaaaaaaaaaagaaatttaatcattatttattttaaatatttttattttttttcatatatatacaataagtcaatatgatttttgtacaaaaaaatttattatactcttttaatcaaaatagttttttctaaaaattggattcgagcagttttagcttttagttgtagcttctccaaaaattcttcaaaaagctattttttgattgcttaccaaacatatttttatcacagctttttcagaaagtaacttttagctttttcaaaagctgtaccaaacgagcccctaatatggtaagtttgttcatattttaatggtgactgagttaaggttgatttttagtgtttttacaattgattcttcacaaaataaccttaactacaagttgttgttcatcagttcaataatagttggttaaatttttcttattaatattcaaatatatggttcattcatagttgtgaatacgttgtttatgcgttgtcccatattcgtcttagaaatatcttataataaaaaattcagggattaaaattggtgatgcaagactcatataaagaaaaatttattattgtaagtttgtttatattaataaaaagattttttttttgttgtttttaagttatttaatagtcgcctaacaaaacatattatagaaatatctactgatgtaccatgtattatcaacctctgctgcgtttcagttgccttacaatttttttaataactgattgtccatacttgtattttcaaaatttcaagaaatgacaccaattccatttctgatacagttcaatgacaatttatgcgctagtcataacctttgattttctttttttgtcagataggttataaataaaaaattacaattgtttgatccctttctcgtcagaaaggtttgatcaaggcgttataacgattcgacccctttttcgtcaaaaaggtttggtcagggagttataacagttcgaccccttttccatcaaaaaagtttggtcgaggcccttaaaagttttcaaaaaattttattttttgaaatgatgggtttgcatttgtactatgtatttccagataattccggttaatcatacatatatgcccctcaagtaatttcaaagggtttatgctttataattacttatttgaaagaaatgattattttattcacaactgaagttcaaaatatttcatcagcaatgtgatttacaatcattaatctcatgagaacttccctagttaaatcgattattttatcaatcttccaggagcacctggttttgataaaactagttttgatgtccagggtcaatctctcacatactccctcaattgtttcaatatctagggtcaatccctgatatatcccggggttccaggtgaagtaatcctggttttgtctttggctgctactggttgacaaccaactttcctcatgacagcttgatatggaaaccacagcgggttgatatctactcacgacacaaagtttttctttagaaaatttgctttaccgtagtagcttccccttatattcttgtgagttgctccctctcgggataaccgagatgtcccttcctcttacagaggagggttataatcccgggtcgctcgagttattgggcagatcgagctgatcatggacatcgccctgcccctttatctatcgttggaagtgtccttgcaatatgagaccttctatctcatctttcagctgacgacattcttctttggtatgaccaacatccccatgatattcacaccgcttatttggatccctcttgcgcctcgcatgtttcataggtcttggctcgctaaaaatgacttcatgtacatgcgcgaggtagatattttcgcgagtttcattgagctcggtatattcaacataaagagggatatattttttggttttcttatccttgggtggccttttagaatcgtcttttctccttgatcctgaggcttccgaatcaagttctccaacagtaccatgcatcggttgtcttttgagtttcatgacttgatgccctctgaacttattctccaactcgttcattcgcaaatcaggtgagcccgtgccacaacttgacactaatatatcgcatcatctaatcagacgatctcgtacctacgcttggtactcatcatatgccactgacgcccgtacctttgcttagtatgtagccagatttattgcatcacctaatcaggtgagcccatatatcgtgtccatagtatcattacattatcattgcctaatcagacaatcgataatttcagaacctgtcatgccatgtggtacattatacttttcttacctcaagtttcagatcaggtatgttggctgacttgcttgaagaacgatcaataatctcgaggccctatgtcataacaataataaatcaataagtgtttatcccaaaacaccacttaacactcgcgta

SEQ ID NO: 39382 - DNA, 1039 bp, Cannabis sativa
aaaattatatgaccataaggaggggtcatatttttattactttgtaaatctaaaacaactctaagacaatcagacttcacaattacactagaccattcgttatctttaatcaaactcaaagcctattttattccaatagcttcaacttcataaagttgtaaagcacgaggcttcttcaaaatttttgcttggatgaccgtaccagtctcactttgagccatgaagccaataccaaagatcctctcattccaataccactacctgtataaattttgtttttaaattaagtataccagcaaaattatattaagtagcttattagttttacatttcgtggttttataagtatgaattaattttatattttgagtaaagaatgaaagaatagtttaataatattgtagttgggatttcaagatcatttttgagtatgtttcaatcaaaaatatgttataaagatcacgccatgcacgtgtatcacatgatcacatcgactgtctaaattaaatgttagggagaccaattttcacaaatgtagagaagattatgggaaaatagatgtaatgactaattgagtatggaaaaaggttaaatggtaccagtggttcttagtagcttcttatgtgtcagtattgcgattggtttaactaaatatagggtcccacatagtttaatataatagtttttaagttatattactagtcaatcgctacgtaacatatcgaaaaaatactagacattattggtgcctaatagttatccttatgcaaataaaagtaattaaagatatacctcaatactttgtatagctaataatctagtaccgcatgacatattctttataactatttttactctttgcccaccacccacatgactccgtgtacctttttgtccttgcccatagagataaggtttgggctgtctcaataatgtgttacccgccgtacggctttcaaataagaacaaaacaaaataaaaaaattatgttcaaaaataattttttaagtaaaataaaatagttataatgttaaatatt

SEQ ID NO: 39383 - DNA, 1992 bp, Cannabis sativa
tttatgatttatgatgatgatgatgatatgttgctatggtttgatcaaagaattagcattaggatgtggagagagcatgctatgctactgttccatttaacgtatttaccgatcgagctccattatctatatatggaacactattatttttaatgttcactagatagcttcaagacattaatttttaattggtattatcgatattcactccatttcttctttttctatttatatatatatatatatatataactataaataaatagatatataaattcttaatctttttctcacttattaaaatatttcttcataattatttggagatatataaactttttttggatgtcgacaactttactattgtcgatgacttcaaattattcatgatttgctcattaacatgaattatttgatatagaaaaaattattttttttaatgatagactcttaagattcatgaaaagtaatgaaatgactattgtaattttttcttctttattctcacctgatattttctattttttattgtatttctattgctctctatatagttatttttaataaatttttttttttcaaaaagatacacatagcacacatctttaatttttattatgggagattttaatatacatgacttgcgataatgtatatttattatatatttattttaaattttcattgtataaagtttgaatcatgtggtcaatccattctatctgatactttctttggtgatctcaaactccttgaaaaccattacaacaccgaacatactcttggtaagaggttttttttttatcatattaagtaaactctttataaatttttttatttgtaatttatttttttactttgtgacaaataatttaactttttttgttcaaaaaaataataatgaataacttttactgtgccaaaatgaatttaatattttatttttttcctcaaatattaaaattaatttattaattatttactatttcttctctatttttttttataaatcataaattttattgctacaaatttcatttaagaactagatagtaccaacaaagaaagatggcttgggttgtttagctactactataatggacatgacatatatcttctacaatttgcatatccatgctaaattctgttgttttacttttttttggaaaatgaaagatactctacaatatatatatatgttaagtttaatttaaatgtatcattttgaaaattatacgagttcaacgctattttaatttattgttttgaaatattttttaacaatatttttttattttataatattcactttctcttttaatttatcgtttgatttttgtttattttttatcaaaaatcataaacaaatattaatttataaatctatatataaatatagattattatttattctgattttctattaagtttttaacattgctatctaatatctcataatacatattgttacgacaaatgacaatgaaaatttttgtattttatttacataattttttagacttaaaatttaaaaaaatttaactaaaaatagcttcaataccttcatctattctcttctttattctatcattttttttttcacttttttattacttttaaaaaaaaaaaaaaacctaaaattattaagctaataataataataataacaaaaacaaaaatatctaactaaaagaaactatattatcatatgacacaatattttttctctttcaaatctatatagatatatatcttctaaattttacttttttaaaatatatatgtatatataataccttaataataaataatataagaaaaataaataatttttttattcaaaattaataattaaaaaatatctaatcatacataataactaacaaagcaaagtcaaagtatctatttattatttttaaatttatgataattaattaaaaatttaaaaaaaaaatctaaatatttattctctctttcattctcttatttttt

SEQ ID NO: 39384 - DNA, 2548 bp, Cannabis sativa
aaaaatagaagtatcccgacctgccttgcttgggagtagactccaagtgaaaaaactagctaacctcgtgtggggatggcataccccacttctgggtggcgtagaggacgaacagggcaggcatatatttcatgcccttgggagtaaattgggtcagacatagacagaagaagtctgccaccttcctaaagtacgggtgcaaaggcagtaatgccccttgtttggaataagcacccgaccaggcacacatccccttcttttggtttgtggctcaattgtttgaggtaggaacataacattccagctcgcccaagtggccggactggtccagatcccttagacgtgccttagttaccttggacgaagggctcacccacctggcacccaatgtaccttgcctcctatgaggaactgcagtagtttgctccttagtaacataatccactctttcaaccaggacatcgctgtacgcatctactggccccccaactttgttgtatcctccaaaatttggaggtgcagcctcctcctcttcctccgcctctgaaggactgctagaacgtacatcgccctgttgttctatctcctggactttggtgtccccttcatgatccccctcctcctggacgggtggatcctgtttgagactgggtaaagtggcgtgctgggccacgtaagggtcggatgcattgaccctacgcattgtctgttttgttcgagccatcatcctatggctggactggaagattgagttggaatgtttgtcgcttgaaaatggcggactagaacagagacgagggttgtgctcgaaaaacagttgaagcgaatcctggtcaattcggtgttcgctcccccaaaactctacagggttcatctacaaaagacaacacgtgagctgagtgtttggtcgggatattgaacaataaacaagcaaatatgttgaccaggagtactcaacagataaaagaatagaaatattccacgataagtcgaaactcagaagtttgaaacttttgagatttagagcaaaaacttcacgaagctttgaataaccaaggtgaaagacagacattgtgcagtaaaagaagcaagcatcatgaaccgtgaagtcgcaaagaccattgtaaagacaaatcgtaaagtttctaaacctggggtcttctgcctatcttctacagcaaggttaagatcgcattcaaaaactaaatatgcaaagtaaaaggagaaggaatctagaacttactcactgatcgaagtctgtattcagtctaagcgatggtgacacatggaatctaatctatgtctctactcctaagaaatatgccggacagaacaccacaaacattccctcggatgaggtcctcttactcgagcagtcatcaaagaaatccctataactttgggatcagattacagagatatgacaagctgtctgaatcccacaattagtgtattctgtatccctataacttatatcgattgtaattagaagggaaatacttccctcccaagcttagccctataaatagtgattcatattcactggcaaagggtcaaaatatttgtctaagaactcatattcagagatactattgtaagagctctaagaaaaggaaccgttctccttgttcttaagtcaatacaaataacgaggattaggctattaccaaactacttggggcttaacctctataaaattattgcgtctttatttgttttactatgttacactcgtattaaactacttctcgacttctcgcttactcgcttacaaattagaaaattagactcgactcgttgttcgttgtcgttggctaaaagtgaggtcaacattacacaataagaacaagaaggtaatagaatacaggattttatagaggttcggttttttagttagcgggtaatgacatactatccttttagttgtattgatcccgagagataataccactgatattactataggtgagatctgaagtagctctcttaaggtcacaatataggaatcgaagatggcaaatcttaagttaagagagaagcaatcgtgggtgtgtgtgtgagagagagattcagacttagagcttagggcttgccacttatgacttcgaattcagcttaggttcacttcacttagaattttagggtttagttaaggctctttatctaggagagcttaaactcttttattcggtaaaataagcagagatttacatattaaattagtaaaatacaaatgactaaaatgtctcttaaaaatagatattttctctctattttcttgggcttttaagcccaatttacagtttagcttgttgaccacacatgaatgtttggttgcccatgcatctgcaacatgtaggtttcctagccttattcaatctagaagttcatcgattgatgctggccatagggccagccatgggtggctggccattctccttggttgaagcattgagtagatgacttggctttcttgttcgtcaactatactgccacatggcgctaatattggctacgtagacatgccactgttgggttttatgcccta

SEQ ID NO: 39385 - DNA, 1860 bp, Cannabis sativa
  modified_base (365)..(366): a, c, t, g, unknown or other
  modified_base (1760)..(1775): a, c, t, g, unknown or other
tcaacttaagactcaacatttttccaagttgttacacttgagacccttgggtacggttgaccaaaggtttgtttaaatcttgtcgctttgtcaggttgctcaacttcaccattaaagacccaagtttgagctcaaagctcaaaccctactataaacaaaaaaaaaaccaacatattgcttgttaaaacttaactttcactagaaaaataaagagaaattgagagagtagcttacctagagctagaactctcttaatttatagattctctagctgaaagtctttgatttaggtatgaatttgaggagaaaattctagtctggcttgggtttgcttggggtcgaaataagagagagagagagagagnnagagagagagagagagagggttggaaattttctttttcttcttggttttctaattaaatgaatagttatctaataaaacttgaattaatcataggattatccaatccccattaaaaacaaaaatctctaactttaggcaaaatggtaattttgccctttcttcactatggagcaatttaaaatgcttagggataaaatagtctaaaactacaatctcgagtagtcgcaatattccaaatgtctaaatatcttacccctttaattctaagatactccactgtatctaagtgactctaacggccaaatcgttgcattccactgttaacagacataaaatatgaaaaacataaaatttcatatataatatacataatacacatggaattcaaatatgtctctataactgagaaaataataatctaaagtccatttctaacaataaatcctaattatctactaagaggtatatcatgataaaagattaagtaaatccttaattatctgctaattctcataataaagttaaatatggtcattacaaatacataatcgagagatttcctttctggattgtggacaattgacacttgatttgaagcaagtgtgcctaggattgagataaaaacctctattctaaggctctccacgcagaatgagaggtgccatgttatgcaagagatccaagaattatttcaaacatcaaagaacatccatgtttttgaataacttgggatttccaagccaagtagttggatatatcaagcttgactgcaagtgatgagttgatagaatttaggaaagggctctatgtgtgttgaggtgaattgttttgtggcggttgccattgattttgggcaaaggagcaaggtgggttttcaatgaaggtacaatctatagaagactttcgtcattggcttcctgataccatgtaaaatcttatcaatacaagtagaatttgaataatcactaagcttgcaaaagatgcagaacttagtgtagatacctttatatatagagggagaattacaatacagttcaacaataatagaaaagaaaagttactgaactaactacttaactgaaagttagttacaacaggtctaacttattatcactagaaagactagctttatgagtcagcaactcctcataaaaggagacacttagagcgatggagagaaagagaaacaaaattaaaaaaaattaggaccaatgcagaggggaaaataataaaatataatattcaaattaataataacaaaattatgacattataaataccataagataaaagaaataccaaaacgattacactttcatatttttcaaagaaagttttaaaatacttatacataaggtgattcttaagtgagattattgttgggttttatgcnnnnnnnnnnnnnnnnttcaatataatcagatttacttcttaataaagatcagaaataacattttatgttgcatggctcacatgatttatttcatgaatat

SEQ ID NO: 39386 - DNA, 1465 bp, Cannabis sativa
tacccggtgtttccccttacggatcacgggactactgattgtcacaagtagttcgggaaaaaaatttaacaacctaaaaaattcaaggagaacaatttgatatttgtcaaaattcagggataaaaatcatattttaactttctgaatcttaattttgataaatgtgataaatttaataaactattttgttattgggtataatatttaggtccacatctcattactcactaaaactatctctcaaactattttgtcgtgttaatggatgtgacttttttgaagtaacttttatctaaggttatgaattttgaattcttctaatagcttctatttagttgagaaaattacatagaactatttttttaaaaaaagaattactaaaattaagatacatattattatttatattatacattgagaataacagtaagaaattgctaattaatagtatcattcatttatttattaaaaaaaaaaacctccaaaaatagagaagagattgcaaagcaaaacattttatataatttcaacatcagagcaactgttattgtgttcttttcattgtgaacatggtgattgtacatggcatgtagatataaaatggaagattctttactgtgtttgtgtataactttttattttcttctcattcttctaatggaaaaaacacaaggttgagaatttctaccataaaaataaaatatatattatttatgcttgataactaaataaaggaaggttctttgaagtttcatacaaataggaataatttgataatatataaatttatataaatactttagttggtagaataaagggattatttcataaatacataaaataataaaaaaattacaaaaatataattttacaaaatttttaatatctttttcgatctttatgaatttatttacagaaaatacagtattttcgtgttttaattttattaatttgttgttgactttttgttataagtatgtttttttttttttttgtaatgttgtttgaaagttattttacaaaattatccataaaacatatttttctactagataaagaacctaattgctacattagaagactagtacttttcaaaagcagggtgatcattcttcttcttatattctcaatatatttctaatatttgagttggctctttcaactcatatggatgggtatataggattattcgccgtattttaattttttctatttcaaaccaaaccaatattacagtttttgaaaaattcaaaaccaaactacagttattctaaatttgtctaagtaattattcaattttttactattttttttttctattttttaaagtttataatacgtacataataaaaaaaaattaaaacaatattaaggaaacatcaaaattctacttaacattattctcagatatcatcatttcattacaaaaaaacacatgaaatatatataaaagaattagatgatt

SEQ ID NO: 39387 - DNA, 2172 bp, Cannabis sativa
atgtttggatataattgtataattactatgatattaatttcataattaaacggtttaataattatattatattttaaataaatagtgtatttatatgtaaaaatgataattagatatgaatttttattgtattgtttagtaaaataattagtaattatattatataatacttaatatttaatagaatctctcaaaaaaaaaaatatttaacacaaaaagtttttaatagttataataaattttataaataattttcaatatattgtacattagtaattaattagtcaaaactctttttccttccaaaaatattcatgcaagtgttagaggtatattatattttctttttctttttctagataaaaggattttttttttttaatttttgtaaggagagatcaaaaagatcattttgtgtagccatatatggtagaaattacaaaataataatttccataaaagaaaaaaattctattggatatggaatacaaaagtactatatagtgacctgttttctatttactaaattacaatatctgaaaaaaaaaagaatcacaataaaagtatctttaaagtttttttttaataaattaataatatcatcaagatacataaaatatttgttgtaaaattgaggggggccataaccacccgaacccaaagaatacctccgcccttgcatcacgcctcactttatttataataattaaccatatatctttttattatttcaaaaatatttttcatatagaaatatgtatttcgagtcacgtatcactaggtgagtaattgagacctgcaaaaatctattactgattaaaagctttttttgcaagttttaattactcacgtcgtaacacgtagctcaagatacatacttcatggaaattattaatattttttttctttataataatttaattttaactgcttatatatatttttcttcaataaatattttatacataattaaattaagatttaacaatataatagttgattagcgctagtgaaatttgtttaatggggcttaattgttataaaaatatttatatttactttaaataaaaattataattattttgtggggcttttttttattatttttgtaacaagagcatttccagcgtattttgtcctcactcgcacgcttattctgaaattactctaagtcaagcacgtttaactttagagttcttaaattatggactatcagaaaacaagatgcattttattgatatatgtaataccaatcaatccacttaagttatcttcaactacatagtctcataacctacacagtttaagaatcatcacacttgacattctcatgtaatgtgagattgcacaacttaccccaatatttttctttacagatcacaaaactactaactgtcacaattttgttatataattatttaattaaaagaaaaatatttaattttttaaatataatttttttaatagaattacagccattaatgatttaaattgtaactcgtcctcaaattacaatactttaattttgttaaaagtattaaatctatattcctaccaaacttttttttttaactattattattaattctatattcctatcaaactttttttttgaactattatctctctcaaattctcaatctttcttcacatgcaattttcattaaagttgataatgaaatgaaaggtagttgcactactagagtggacttcctcataacaataatattatagtcaacttattttatttattttctaataattaatgaaaataaatctagtagctcttttgtagataacctaattcacttgattaagtaatgcatcacaaattaattaacctaatgcatcaacactacaaatctatatagcataactactacattttctaaaggcacaacataatttgtgtgatttttttttttttttgaaaaaaaatggtgattagattatcatatttacacctaaacaatttgtgactaagtaataataatcatgataaaaggtatagtttatggtgactaactaaatatgtttgggaattttgactttttatgcatacaaatacctaatagttttctcctaaatacataatatgtaatatttgtagaatatgacacatttataatatccctaaaatacctccatttacattatcccctatcccctctc

SEQ ID NO: 39388 - DNA, 3588 bp, Cannabis sativa
agtaataagaatgagaggtgttaacctttttatcatcctggcgtcgagttccaccactgtttgtggtgtcttccttcataccaaggttcatccttaactaagcattggttcgcggtcccacattccgaattcttgagttctttaaggctgccatatttggtatcacgtttcaacacaattgtttgtgtggtccgtatcatagagtgattccactccctcggttgaaccaatgcctgttgatacaatcgagaaatctacaactaatttttctattcagaaggtaacgactcctcgtcgtagttgggaggggttttacaaaaccaacacattatggcttggatggtgaaatcaatatggtcattgctgacggtattgatgacgatccattaacctataaataggaaattactttattttactattttattattttttttattccatataatttaaatcctaaccctaggtgaaatagtataaaaggaatatgatactctcattattctcatccaacaattaacccttataacctagtgaaagactacatgccaacccatagcaactcaagtactcaatcatagtgtgtaagactgtgaaaaatccaacacttgaagaagaatcgggctaagatcttcataatactcttgatagaaagaaacaagagttggagatctgagtgggaggagacatatcattttggtgccatcaatgttaggtttcttaaacttcatatctgtttaattacattgttttagagaattcatatttcgggtgttaatcaacatacttcttagtaaatctagatccttgtaaaatatattccaacacttggagggcaaatgttatgttaatttttgcccacctgatgtggcatgtccacagggacgatatcagcgtcacataacattacatctcacaaacaaggaggtcagtcagggctctagccaacgaggggtcccgacactcaaacgggacgacgagctacaaaccagcaaccttgagggggctcgccagccacccctagccggccctatggtcggccagcttcaagacagcacaaggtcagccagcctacatcctgcaggtgcatggccgacaagaattggatcgggtaggactttagttcatagccttacacgtggactgcaagctggacagcgaatttggccgtaacaactagcccacgaaagtagatacaaaatacctatttttaaagggtattttagtcttttgtattgactaatttaatatgtaaatatctcttattttctctgctaataaggatttaagctctcctatataaagagccttaactcaatcctaaaatcctaagcctcacttaagcctaaagctctaagtctgataagtcacttcaactctctctctctctctctctctctctctcacgcccactatagcttctctcaacacttgagattttccatctttgattcctacattgtaaccttaaaagagctatattagatcccacctatcaagacaattaaaaaggaaatagttcattacctactaactaaggaagccaaacctctataaaaaattcttatgttcttttactttataattttaattgtgtactacgtagcgtagcaagcatcaacttaatacgactctgctatcaattggtcaatttctaaaatcaacgactacttatatggctaaaaataaatattaattataccacttataaacttaaacttaatatacacatactactatttactgttattttaattccatcatcattccatgggttgttcctacgaacaaaagcagccaagttaacatacaaatttttaaaatatatacttatacaatgtcttgatttcttaatattattattaaataataaacaagtaatgaaataatatttcggtcatctttttttcttttcttcttaaaatcataatcaaatcttaaaccgcagtaacccatatcggccttcattatttgttcatcatcaacctcaaaactacgattgctctaaattagatatgtgatgtggaacgcatccaattaggtctttagaacagctgcacatttatataaatatatataaatatatatgtttatatattcgtagtgatccatgacgcatgaaaaagggtcactagctcacacacacagtagtgcttaattacaactgaaacatgtaaagagattgcccaaactccaagcagcaccactataataatgtttaacagacatatactcaggggtatagggcccatctctcaaagatgtctcccatttttgcatcattccctcttctcaatgtctatatatattcttcaattttgattatactccagatcatcattgcaaagtaatttttctttatttttcttcatcatttattttgccattgaacaaaatatatatagaataattaataatgatcaacttgcaaaatttaatatatatatatatataatatacaaatatatattctttgtgcaatgtattaatttagtatttttgatcaattattacatatagttggagcttttcagaattttaactctagtcctttcccagcttgttcctaaagctgatcatgttatttttactacaaaggggaaaataaaatgctccaatcgtatgttctcatggtttatctaaattataggtgaagttacacagaaccttttaaaccaggggccagttttaatatccagttttgacctaataaaattagaaattgccctgcttgattattatgtagtacagcggcaattaccgtggcatcccaacgtgcatatatactcactacatatatatattatatatatatatacacaataaaagaaacgttattaagaggtaccttaagctgtgaagcaacataaaaagcatgcaatacacttttattagtgtaaataaatataagatgccacatcttttaatttaataaataatataaaaaattattaaacactcctaatgtctcccatgagtatggtgttagacacaggcagtctaatagcattggtcatataataatgaatatgtttggtcacttcatgcacgtagatgccctcaaaaatctgacatagaaagcttaatttttgaagacattattttaagggcatctctataatttagtactgcttatatacacattcaagtaaatctgtaaaaaagtcattctaataatgattcggactactgtacaatattcggtcagtgtgttcgtatttatatgtctgaatcagaattcatatgtataagtactgtgtgcaattttatttatatgcggttagattaattattttgaggtctattgacagtgataaaataattacgatttcaactttgaggttaatacatataaataagtatatagtttatttatcgtataaatatgtgttaacatttggaatgagaggtgctaacacgaacgaagtttcattttaaaattaatttgtaatgaaaaaagtagcctgaagtgttattttaaaattaatttgcaatgaaaagaggagtccattcatcctatatatggtattttatttttataaattagtaatgtgagactaatttaaagtataggtataacgaacaact

SEQ ID NO: 39389 - DNA, 1978 bp, Cannabis sativa
aagatccaagggtgaggcacttggaaatatgctcgctcagatttccagaagatgtttatgagagaatcaagctactcgtacatcaaatggctaatgagagattaaagattgaagtttttctaatttctaagaatgaaggttctagtgtaagtttgaaaatagaggaattttaaaagctcaaaaatgacaaaagaagaacaagggggattctgcacttatttatagtgaagaagatagctcgtgaaaattaaaattaaaggcctacatcaagttagcccaaaagcacaaaatgatccaatgactggggagtttaaaggactacatttaattctctttaaaaaaatcaaggcatctaatcatcatcattcgccttggactccatgtgcgttaaagagttgtcatgtcatcactctacaaccagttgggtttccctacaacaaacgcatttccacaggtgcatctcaccccatgattttgcagggtacatgacacatgtgcaccattaattgtttcacacaaagtgcttgagacctctaaactgccaggttccaaagagaggcttccacatcctcagaacttacccaagtgtccaagagtatgccctaacaatgcgaaaggagactgcaagcttccaccactcaagagtcccagaagcttgggggtaaatgttattcgtgtttctaaattaaggacatgtggcaaaaagaaaagaaggcaacaatctagattattaccaattaagcttccttcatcacggaaggtcatggaaagattatgctggcctgagaagggtctaatatgggagaggcacagagatttgccacaaaataaataaccatctatgacccaaaagccttaccatccctctaggacctagggaagacaagctaacttaagcatgcagacatatgtcaaagagccatgcaaagattctaagatatgatgtttgcctcctaaaaactcaccagacttcatctacaaaagggaagaaacaagatgagagtttggtcggggtaacaaatgaaaacaagatgattatatcgaccaggtcagattgaaggatcaaaaatggaaatttcgcataataatggagtttataatccaaaagttcaaaattttgaattaaggcttgattctcactaaaccctgagtgggtaagtgaaaatgagtatcgtggggttaaaattaaaacgcagttacgatcaagcactatgattaagcataatcaaggtctctaagtcttaaacgtagaatttctatagatatcctagaataggttcaagaacaatcaagattcacaagcagaaacccaaaaaattaaacatgcaaatgtatacaaaggaggaaatgaagaacttactcactggttcgaagcttttgttctgctcaaacaacactggtcggtgttttcttagaattctttaaaggaattgagagaaaaaagatctttgctcagattcttcaaaagtaaaaatggctaaaagtgattaattaggatttgaaccctatttataagcagatcaaagaagaggagtaatcatttcaaattttaaatgtctaaaattctccccaaaagtgtacattatgaacttgattacttgcagaataactatcatcacgtgcgaattttgaggcgtggttcgaggtaaaactatcaatcaacattaataagtggaaactgaagagactcttggtcagagtcacatcagatcatcaatcgacaccacagacacgcatcaccagttcagacaagactctagatcaagtgaagtccacgtgtgaccaagaaggtcccaggcagacttaggggaaaaatgttatctagactttttcactttgacatggaagaagggatcgaaagaatcgctttagagagagtgagagacatctaagagaattactcagagattcattgtaagaactttaagagaggaaaatactttgttctttatctcaagttaatacaatccaaggggag

SEQ ID NO: 39390 - DNA, 1439 bp, Cannabis sativa
caaatatacatatcatcttatccggctgacagtaccaagtagttagggcttcggtttaaggaaactatgaaaagaataattattttgttgtaaaactgttagcgacatcttatgtaaagtgttgaaaaggggatccccaaccttaaatgatttataatgtcaaaataaactttatatttcaataatgaattgaatttttaattaaaatcacaattttcttttaaatggttagtttattattataaattcatttatgaaactacacacatggcgtccctatgaattagggtgttacaaaaaactcaaataataagtcagctttgtgtacacaaaaaaaagtgacttaggagaaaatactatccctaaaaaatttatcattacacgtaaatttttatgcaataaatgagctagatatgcgaaaaatatctcatagttttaacttattttccataattcaaatcattggttttcaaattaaaatatttaagttttaaatttgaatatttatcttgtaaataagtgaagagaagatggtgttattttttcacttatcttttatagtttggagcctataaatagaggactcgtgacttcataattttctaacttcacttgaatgctcataaaccacggtaatgagtttagatataatgttagggccttcccaagcacattcattgtgtaggagtgaattctgcttccaaatggatgaaagggtatacaattatggggtattgttactcctgagaggttgacattaacactcagtatcttaagtctggcctaagttaaaattggaaaggtaaaagtacacgagatttattatatagtctccacttataaattatgatgattaatactaaactattgtgaatgtctattcactacttgttgatgggtacggtaattggaaagggagcagtgttcctataaaaaaggatatatgttgtcacttgctggtcaataataggaaaaaaaattaaaatggtaatcaagattaaaattttactttttttattgaattggattggttggatacaaaaagttagatggatatgatccgatccaaagaaaaatactaggtctaaaatattaaataaatctgaatcaatgcatctactgaaatacatccaatgaatagaattgatacaatctaatagatgttagaccaatcagataattggaattaattcgaacggatcagatggtaaattctaacatttaatatataattagattggatctagatagacctaaaacattagatgtgatccaataaacatccctacacgaagctttgtttaaaatattaaaaaaaaaattatcattttttgagttgttaccgtccatattttacaagtcttcttgtatgtaggtaattgcgactagagtaggttaaagtaaaataatgttaatattgttagaaactagttgctgca

SEQ ID NO: 39391 - DNA, 4783 bp, Cannabis sativa
ttactcaatatacactactctatacgtatattagttttccataagcatccaccatgtctggcaatatttactttgtagttttcaaaggtgaaggagctagtgtgtacaaatcataccatagagcagccctggagttaaccaaggttttgtgataacataatcatatgatatcattgtagagctctagcctccatgcctaatccgaagagtagcgttcccaactgtgcccccgtgagccaagagctggcggagggccctctctctcttctccaaaccccaggctatccaaaacaaaggcacatcgtcatccaagtgaggaacatgtccaccactaggacagacctcctcatcagttgaggctccatccacaccatctgatgggcccctggcccccacatctccaaaagtagtaggatataggccgtacttcttaaagttggctacactggccaacctaattacgttcctctttgccacggggagagacagtatgtgattcgccctatccctcatctgtagagtagggatggagcgcttgtatattggcactcgttggaagcagcgatgtcgaatctcatggatatcccaagcaatgaagtagttccaggcatatccaccaacttttgatgtaggcgtgttgttggtgtcacccagccactgatggccaacctaacagaagtagaagtaccccgtccaattctactttggagcaaatttcaaatttaagtagtatccaatctcatacagagtagactaaggccagcctagcttcacatatagaacatacatcactgagaggtattttatacttttcagggtgatttttgttggacacatcttgaagtaagcagtaatatctcggaagtatgagtgtaacagaaacaccgccccttgttgaatatggtgctttgaccatgccatccatttgaaggcaagccggtgtgctctctaatccctcgtgggtatctcacactcgacacctctcactagtccacttgctagtatcctattaaaagtcttggttggaataacagatgcaggagagacccacctatctccctgtgacccagcatcaagaacctgaggctctgaagactgcatcaagacatggtccatacctatcactaaaggttggcctagcctattcaatggctgcccatcgatgtcatatgcacccagagggcagtaaggaaggacatcataagttccttaagtcctcctcctaataggcgcaacctcctccacctcaaactcagttttagaactctcagccccctagtcaacatcaggcacctctccctggccgaccttcgaatctacatcatcacgggattgtgtggcctcctctacaactctaactctgcccattgttgccaccttggcaacatgagggtcatatggtggtgcactatgacaagatcatttcattctggccataatatatgactatcagtccaaaatcactcaaagggagcaaggggacagactgaatgctatctctcaaaagtaaagctaacgtgacttatgacaaagcggttgtcacctccctagatcaacactcaaaatcacctacgtagaagagacaaggggaggtgagcaacttcctaaagctacatacaaagttatggtcaattgtacccaagggtactttccaggtaaatcacattgtacaaggctgggtagcaacgaagtattgtctcaagtacatttacttagacaaatagtgagtcctaagttgtgcacttgactataatggactcactaccaagtcttatacaaagttcccaagggaaccacgcataagattatagttgtatatgcctaaaaggctgtcataagactctacttgaggttaaaagaggacgaaagactggtcgccctcttggaaccatggccttggctggccagggttcttaagccttagagggctggtcaggtcccatgacccagcctaggactggccaggaatcttatttccaagcataggccagcccgctcttagggtaccccacaatggccggccagatcccatggtgaacatccatggccagctaggtcttgacaagactccatgcctaactagggtatatgaaagatccaaacatgtgtttttcaagaacttgaacatgttcttcgtgttctttgtgactcaaagaaacaagaatcacaatgaaggtcaaaactagatattttttgtctagatgcacacattatacatcctaagactaccatgcagatcaaaatatcaaaaattacaatctaacacgagaataaaaaatattcaaagcgaagaaaagattcacgcaatcatgacaaagtcaactaaataaagtatacaacaagaataaaaatcttacccactatgagaaacctttgacaagagaatgggaagcttcgatcttcgaaatggcgcaagaatcctgagagatggagcaatgtgggcttcaacctctaaagagaaggaggaacttttcaaaattactttttctagtgagagaatgaaaattgaaaagtgaaaggagtttccctccataaggcttatatagcttttgtgaccacttcttcacttgtcacgcagtgttcaactaaaaaacatgtagaattacaatgcagttaacttactacaacaaatgagattagatagtcaagagaagttattttaaagactaaaaaatgcagcaatatttactcagttaaggctattagtcccaactaagctggaaagtacatatcctcacagacatccgcacagggacttcgggggaaaatattatcccaatttatgcccacctgatgtggcatgtctacatggctgatatcagcaccacgtggcagtacaactcactgacaagaaggctaagtcatctactcaacacttcaactaacgagaagtcctgacactcaaatgggatgacagatgacggacaagccacctcaagaaggctgaccgcccacccccggccagtcttatggccaacataggctggccagcttctggacaatacaaggtcaaccaatctgtatcttgcagatgcatggtcaaccagacattggcctcgtaggactttggtgcacaacttcatgcgtggtcagcaagctagactgtgaattggaccttagcaggccacgaaagtaaagggaaaatatgtattttagtcattcgtaaaatattttactaatttactatgtaaatatctgcttattttactggataaaaggggttttaagctctcgtatataaagggccttaacaaaaccctaaaacttgaagtcataagctgaactctaagtctgaactctctttctctctcacacacccatcattacttctctcttaacttgagatttgacatctttgattcctgcattgtaaccttaagagatctatctcagatcctacctatagtgatctaaatagtattatctctaagtactaatacaactaaaatgggagtaggtcattacctgctaactaagggggctaaacccctataaaatctcgtgttcttttaatttgttgttcttattgtgtaacacgtggcaaacatcaacattaatatgactccgctatcggttggccaaatctgaggtcgacaaatatcatagtatatcgtcatagatatcgttaaacgtcgctagtcagtacataaaaacaaatacaaaaaaccaattcctaggtgtcgtaacatgtcgcaaacatatcgccatatattgctaacaatatcacaaaagatttctatttagttataacaacaaagcaacaatgccagtgtcgtcacatgtcgcaataaatatcgctatatctcactagtcattaatatgtacaaccattgtggatgatatcgttatataccactaacaatgtcgctaaacgttgataaatgcatgaagactagggaaaatgaacaaacatcatcaattgtttacccaaacacaaaaaatcaacttaaaatcgaacaaattttcctaacctcaaccataatcaacaaaaccaaccaaaaatttcatttcaaaacttaatcaatgaaaaaaatcactcaataataataataaaacttaccaaaatttgtgagaattgtgggtgggtggctcgggtgttgttatccacgtcaatgacggtggagatgtaagttgtgggttgttgattttgggcctgagtattgattttggggctttggggacttatcctagattgtcgcgagatgtcatggggaagtgagtggagtttaatgagagattgagaaagacgatggtgggtgtgggtgtgttcgttggagtgagatattttttttttttgagaaaagatcctgattcattaaagaagaagaaatacaaaagtcaagatatccaggatggcaaagaaccattccaaataacttcattgtctaatcctaatcccattctagcacatgcgtgagcaattttgtttttctccctaggaataaacatgatagaaagactaggactgaacgacaacaaagcacaaatgctggagatgatatcacctaaaaccgaacaattacaacaattactaaagatcttatccaccacatttttacaatctgtctgaagtatacaaacaggaagctttattgcttgggtccattgcaagggtaaaaggatagctttggcctcgacaacttcaggtggaaccgtgccatcaaatggtgcaattactcctgcaatggaaattctgtttgcgtcttgaactataactcccaggctgtgcttcttcttatttctgtcaattgttgcatccgtattaatctgaaacatacccgac

SEQ ID NO: 39392 - DNA, 2030 bp, Cannabis sativa
aagaaagctacgatcttcattcgacttgtttcagctgctggaactgggtttttctatgtgaagaagaagccatcgagaatggtggaaaagcttgagtttaggaaatttgaccctcgagtgaatcgtcatgtcctattcactgaggccaaaatgaaatgaagtgaaaatagaccaaaaattgggtccataggtttgttattgttaagctttatttcttctttattttgttcaatactcagattttttttatgtgtcttttttagacaatcttgttctatgatatgaaatagaatcgggttctaattattaattgattctgctggtgggtttattctctcaagctatattgaatgagagaattgattcatatctgatatttattaaaaaataaagtaaaataaagattatgtatgtatatattttgtttcttcacaatttttccatgaattctcacaatgaattttgaatgaactatattgtgtgtgtgtgtgtgttgttgtaattattattatgtgaaatggtcttgtgtgctattgggttgatactttgtgatgattaatgttatagctataaaaacttgagaacctgaattgagttattgaatgaactatttctcttgtgttattgagttgtttgtggaatggtcttattattattatttttgcttattgtaaagtcaagactgttgctgaaggttaggttaggcagatattctaatttgtttagtgtataagtactaattagaggttctaattttcttttaatcccttaattataattgtatcatctatagtttgtgatcaaataattatactatattttgttggataggatatgataaagtaggatttacataagatttttgttctgagattagtgtggatagtgaaacaattaatccaaccccaacatgagataagtggtatgatttgatcaaatcataaattgttttcttataatttattattggaaagttagtcaattcattcattggtgacttataaattattgtaatgtatgattttgattcattcagttcatcaatatgaattctgtttgctctgataattaatcaacttcatattcatattccaactattacaattaaaacaaagagaaaaggacttaggaattttaatgcaaattgtatcattgactcactacttgtatttagacaacgcattaaacctaattgattttacataaatatcaatatgtatagatatgttttaaagaaacctaattgatattgaaaattggtgatagtgtgtttgtttgttcccattaggttgtgagtgggattatagtgaaggcctttgagaatatttttttttttcactaacattccaaagtaacaaacaatatttctagaaggtctttagcctaaacacaaggccatttggttgaaaaaaagggcaagaatttataatttataaatgcatccgaattttcaaaaatttgacttaaattgatttttagtactttttttaattgttcatttactttcttttgtgataattttaattattttattttattttgtttttgtataaatatattttatttttactctaataaaactttatatattttcttggtttttttttttgttgatatttaaaaaatattttattttatatacttatttttatagaatgtgggaaggatgaggaaaattagatatagtgcattcatacctttaggggctgtgggaactttgatgaatattttaacaaaatacggaagtgttctagtgtgtgtaaagtggaaagagtctcacatgaaatatgagtccttgtgcaactttgacacttgggttaagactccaaggggtacccatttttgtacaaatgggtgaggactcacacacttaacccaccatacacgtgcgcgcgagccatctgagtcaagctgggttggttggtgttgttgggttttatgccctaaataaaactctttacaatatgattagttatcaatataagaaatttgaagtgattgatgtttgcgtgaattttacatgctaatgg

SEQ ID NO: 39393 - DNA, 4268 bp, Cannabis sativa
  modified_base (4217)..(4219): a, c, t, g, unknown or other
aaatcataagggttgtgtgatcgatgggtcaattcgaaattccaagacttgatggcatgtcgagccacttttatcatgctcattggaatattatggagaatcaggttgtgggtaccgttactcagttcttcacaaatgggaaatttgttagttctctcaatcaaacatttaccgtccttattcttaaaagcattgtgcgtcaaagtttaatgattacaagcctatctctttgtgtaattttgcctataaagtgatttataaaattattgctaaccgtctttacgagtgatagcctagttttaagttcattttttgaagtattttaaaggtgtgtttcaactaatcatcctatatttggcataatttgtggttggctaggaatagagctttccatgataattaggtgatggagccaagggctctttttcgaaaggtcagtcttggactttcgcaatgctcactccttgacacctatatcccaagcggatgatggtgttttgaggtggttaaaagagcttaggccttgtgattataatgtgttttgtggatgctgcgattcggggtgtaaggactttccttgctatccttgttttggatagccacgttaagtttgtagaagcgttgactacgaaattttttgtattttctctcttggaggtggagactcttgctctttgtcatgctatcgcactatgctctagtcaggggtggaaatcctctaatttactctaattgcaagtaacttgtgatggccattgtgactagtgcctgcccatattagcgccttactaatgtctttctctatttgttttctcttttgggtgattgcttttgtaataagtttttttggatttttagaacctctaatgtcactactcatgatgttgcggtttggacggcttcttgtaatttctcctattttttctcttctaggaaggttgcaccctttgttgcttccagaaactagctctgtgtgtattttttttttccttagttttcatgttttcgttcaatgaagattttacttataaaaaaaaaagataaaataaaaaaatagcttgtaaaattatacttttttagggtttttttttttcctgttcgcaaggtgacttcaaacttttgcttactcacctttgtgtttaaaattattaatactttattatcatttctttatatgaggaaccattagatggtgaagggtttgtttttatttcacaaagattgataaaggagatgacaacatgagaaaggaattaattaatttattaagcatggtgatatcgtagttatttactccttggagaaaggtaatgataaagtttatcctataaaggacccaacattccatctattatttttgttttttaagacatattatataacgttgatgtgctatttttgacaaggctgataaaagtcagggattgtatattttattcttgcctataagtttggtgatgttcttgtcactaaatatcttgtttttctcttcaagttattagattattgtattaaacaagtgaagggattcctatttacttcacaaatcactatgcaatatttggaattggtttccatttttttttacatgtatagaggtaccaagagtgataatagtaagtaacctaataagtaaagacttattatcactctaaaaaaaagtgataacaaaagtaaagtctaggagcatttgtttgaagagagttttagacatagtgacctaaaaggctaaaattgaatttattttttgtgaacttataatcattatttggtggatataatctcgtaatattgaagtagattaaattacaaatagataatgtttacccaaattttcacgacgataacgtgtcaaaagtaacaacacgtggcataaaaataccgggattaaattaatgaagaatatgtaaagttatgactgttgagatgaccgttaaccatgaagggttagtctaggggtatactcctatcccttacaccctcatggtacaagtcatgtattctaccatagacacaatgacattctcaaaggtatatggggacatccacattacaccataactactgacaatagacaaggggtcttggggggtcaccccgagatggcaattgtcatccccttaagttgggtcccgggggatcacccaacgatgacggttgtcacccccctcaagttgggtctcaggggtcaccaaacgatgatagttttcaccccctcaagttggatctcaagggtcacccaacgatgacggttgtcaccccctcaacttgggtcttgggagagtacccaacgatgacggttgttaccctcctcaagttgggtcccaaggggtcacccaacgatgacggttgtcacccccctcaagttgggtcttgggggtgttgcttccgagtatgggcttcatccccgaaggtagttgacgaccatgtcacacctataagagaccctcgtcatcagtaactctttcaaatattcaaatcccatgaaaggctcaaagacagttgtcaactcacaaaatagaaagatattatcatgaaaatcagacttcaactacctcagaaatcaaagacggttaaggtagctccacgttggtgcgtctcctgaagcgagaagcaccgacccttttccctatataaggggtcatccatgactgggagggggattcgcattcttgaaacttagaaaaaaataaacacttttcattccttgcaatcaagagaatgttcttgacttttgtaactcaaattaataaaacacaaggggagtagactattaccgacatccggggccgaacttctttaaatttcggtgttttacttacatttattgtaaatttcagtgttcttaactgcatttattattacgattttggtttaaatttcatttattatgactctgcgttggttgattaaaaatccaataaacaaataataagtgtataatttgagttgattcattagacaacgaataatttaatataagaaaaaaaagtatacacaaattttagaagagtataaaatttacagtgatttgggtcaataaatgatttatggccacttgtctattgtatagttttgaactcaaaattccaagatcaaataaacttaaattacctaaatttttttgaactattgaggttttaatagagttgagtaaatgctctttaggacactagattctctaacctttctttgttcttatttcccatctttatagggggaaaatgaatgaaaatagttgtacaaattaaactttgctgtttactgaattagttaaatgctgagattattaaattttgaagacttttaccgttgctaataatatttaatttttttattcaaaaaaataatattcaattttttcaacatttattctttgcataacatatttttttgaggtcattaatttataaaaaaaaaataaaagtattgattgataatacttttattttataattttttaaattataaaaataaaagtaagaatttttatttcaaaaaataaagggataagttgaggaatctttttatattcattaatcaaaatcactctcatattacttttaccctccacttttagcatataatttacattaacttaagtaatataataaagacatcatctataaaactgagtatatattaaagaataaaaataaaattaaaataaataaataaaatagttatacaatgtaattttctcaaaaataattgtattttttataactatttttattttttaatttttaaaacaaaaccaaaattcgggtttggagccgaggctaaggctaggttctcggttggaatccaagtctaaatctaggtccaggctcaaatctgagtcgagggtcttagtttaggctcaagtccgagttgagagtttgggtttgagatttagtgttcgagtctgaagtttgatatctactgttcgagtctgaatttaaaatattaataaaaaaatataaataaattataaattgtggaagtaattttttatttaaaattttatacttattttaaaagttaaaaagtaaaaaatagtttaataaaatatattttttgaaacaattaattaaaatatattttaattaaaaagttaaaaattaattaaaaaagtattaactaacttattagattaaatataaaattataattttcatcttttttaatgttatagagtagaacctctattcaagaatactctattcaagaataannnctaatttgttataaaaaaatgaagtcccaatttgggccagttataaata

SEQ ID NO: 39394 - DNA, 1319 bp, Cannabis sativa
taatgaacaattttggatactacagcgaacccctacaaaataaatgtaataatatactttctttatgtttttgatgtccatagatagttttaatgttaatatttttgtatgacattgtacatagtacatcctatacaatttaaaacttcttgatattttacgatacaaaaagtaaagttagaacaatttatttcgtatacatataaaataaaagatgtgataaaaaaaaatagagtgtttgaatattatttttgacatataaattattttgaatttttaaaaaatttgtaaaatattttaaataactatgatttacactgtacataaaagattaacaataaaactattttgatatctaaagtaccaaaaatagtttattggtacacccatttttttgaagggtgcaccataaatttttccaataattttatatatagataccgacaaaaagaatatattttttatgaaattatttgtatttttgtttaatttataattggtgggccatccatctccactcttagtatgatattgtccgtttaaggactaagtccatacggttttgtttttgggtacctccccaaaaagtctcatatcagtggagatagtgttcatccttatatactcataatctttccatcacacccaataataatattttgtaaaatattctataacactttaaatatctatattataaaaaattgacgaagtctatagtacaatatttagtaaaatgccttttttttttcttttctaaatgtacattgttgttgacgtttaaaactcctcaacaaatataaggccagaaaatcaaaattaaaaagcaagacttaggatgaagatgaaagtttaaaaattcaaaaacttaaagaaatgtataaagcaataattgtggaagaggaatacttgtatttcttggagtcaagtgttacaataattttccaaccccctctctcatttgagaatggggtatttataggctcaaatggcctgagatacacttgaggtcctcaagggataagtttgccttatgtggctgcgagttgcaagtgcaggaggtggtcttgcgctttgtactattgttgggtgtcaggtggtcctgagttacgctagtagtggttgcaaagtacctgttgtcaggaagtcaggggttacagacaatacgtctccattacttgtaccatctcaccaccaggccatgttgaggacgtggtcgtactcaatcttgtacctttccatgtgtaagcattgtcatttgattccttcattaacgacctcctcttcaacacgtatccaaattctcccttcacttcaca

SEQ ID NO: 39395 - DNA, 2638 bp, Cannabis sativa
tgtaaatatttgtatgtgggctgtataaatattgaatgggccggcctatagtaattttgtaattttttttccctttttgtattttcatattttttttcctaatattaatctatttttttaagtgaaaaaatagtgatataattattgatattattaaaagaaattatattaaaaatattaaattttgaaatttaatatattattatgacttaatgattactaaacaaaataaaattacatgcaaaacacaatttgtttgttagtaagtttatatattggtcgtgttccttaagaattaacaactactacattcttattttctccaccaaattattggaagatcatcattacccataaattatctctgccaaatggatgaagattatcactaacgataaataaattagatacatttctcctattcatgatttttttttttttttgagtcaaaattttagcacaatctttatgaaacgtgattcattcatataagtattattatttgagacatgtaataatatttgtattatttggatttgaatctgattttattcataattatacacgtacaatcgattttttttgttttccacgatattattgcccgactttgccatgacccaaatagtagtggtcggttctattattttgccctcctcacatgaaaataataactgtcattaaataggttggagtatttgacattatttctaacacactataatttggctaactagctcttatacaaattcaacagctacttagcttagctaataatgtttttattaggtctcactctaggaacatcgccggccaactcacatttttgtttgccttatgatatcaatatcacgtgtgtgacatttttatatatatgaccacgtagtttctttattattcgtttgtatgattctaatagaattacaaaattaataaccttttcaatctaaataaatattgaacattcagcttcgttttaatttcaaaaaaagtttattatataatttcctaaatagctattaaaggaagcacttgaaattgtgaaatttatgtaattaaatatcgaatcttacattatttaatttaagaaattttaagaaatattattaagtaacaacaagacactgtatataaataagaaaaattatttcatatactattttttaactttttttttttttttttctaaatttacaattttgattgctatactgattttaaatgaaaaaatacctaataaagggaaattgcttcggtagtttctatgtgggttgctatacggattttaattacgctttaaattactctgttagttgctataggagtgtctgtgtgaaattctacaagaatataaaaataattttttttttgaagttttaaaataaaaaagattcttacaaggctaatagtcatagctatctttacaaaaagaaaatgttattattaattttttattttcaagaatgacatagagtttaaatggatattgaattgctataagatatttgggctttatggggtccaatcaccacatgatgagtggggtacaaacctaagaagatgtctccactccaaccaactgggccttagagtttgagcccaaagttggtgagttaagatagtgacaacaattaaaggtgggaggcacacatgacacaacaaaacagaagagacccattgaaacaccaccaaagactagagttgcaaataaatatattttgatcagatatttacttctctctcgctctcaactatagtattgtacaatggacccccaagaatagcttaatttgcttacaatcccaaataaaggactactacttatgtatgatatctatatgcaacacacatatatagctatttcaaatgctaaacagatggagatgtggacaaataccagaagacctaataatatacatgctagagacccaccaccgtcccatgtgcatgtgaagttgtttcaattaatttaccaattcactcaactcaagaaatcaaaatcaatggctatgttttcacttaattctgagtaccttacagttttaacactattctactctatcattgtagtaacccccaaacagaatccatctctcattatataataataattattattattattatatattgaggttatctattattttttaatatgcacaagtaccttggtgtatagtctaggcatattataattccgtgatagtactacaaccttcatgtcttttgtgggattgcatcgtttttatgacccacttttggataaagactgctctataactggttagtagtagtagtaattactagttggacaattttgtattgtaaccgtatgaaaaggattctataaatgatttcttttctttgtttattaaaagaaaaagaaaaacactaaaatatctaagttgagatggcataatcggactttcataacaatttgagcatggaaacagcgaatagacggccgatgaaatgactgcagtgagcgtgaatattcaggagggatccacttatccgatttttggtgtcccaaaggatgaaatggacggttgatttgggtcgttcatgggattgtacgatagttaattaaatgggtaaataacggcataagcattcaaagttttacgtttgtaagcgg

SEQ ID NO: 39396 - DNA, 1776 bp, Cannabis sativa
attttattaagatataattattcttatatagaggtatactttgttaatacaggacttagaaaatgtataactaattacaatttagatgttattcttatctataacttaaattaggacttaatttttttttaaacaaattaaaggttattcttaaataaaggttatactgtatttaaaaaacaatccgctaaaatcttttaattaggaaaaatttcttttacacataaatagtaagatgtataatagtagttcattttaaggataaaacttaacctttcattttatattattttgtactaaaatttatcccaaaaaaaaaaaaaatcaaacttgaactgcaaacaaagatctcatacgagacccagaccccattaaattaaggtaattttatgtttatagtaatatatatatatatatatataaattagtaaataatctacgctttgcgtgcaattatatataaaaattaagtcataaagttgtgttaaatataaaatttaatattttgtaaataaatttttttaaataaaataataagataaattattttaccaaatttatattcttacttgagtattagaacttaccacctgatataatagtcgaaattttagtagataactattatactcaatttttgtaagaaaataaaatggctactcttgcacaagggcccacatgccaagggtgccttgaagatactaaagtaaatcttgcgactttgaccaagacttataaatgtcaaatgagttaagacatctttcttgagggccccatggcacttttagaggactcgagaacattaaccaaccatttaatgtcgggactcatacccaagtgtgcccaaactagagttcatgggtcagcgcgagtattgtcacccaagagacctcaatccgctaaggaaaccaaaaataacttactcatttaagcataaaatggcttagatttgtaaataaagtcaaaatagcataaaaccccatggaataaagcctatgtgcccactgtcatatggaaatggcagtgctctctaattttgggagagcactgctacaaggagatggcagtggtcaccacttacaaagcaccaagaatgtattccctcaacaccaatgagttcaaaataagtgaaagaaacaatttcctaccaaggaacaagcctagtcgaccattgccatctttgtggcacaatgagtggcagtggtcgaccatgaagaaggggaatgagatttcttgccaaaaatatttcctcaccaataatatgtcaaaaccaagtgaaagaagccaccaagtgatgtggaaaccacttggtcgactactgccacacttttgggacaattagtggaaatggtcggccaccacataaggggatgagttgtttcattggccaagttgtatttcgaccatcattcatgtatcaaatacaagtgagaaaagtcacccaaggcttcatgagccccttatgcgaccactcccacttattttggcaaaaatggtggtagtgctctcctaagcaattggccaagaaccaatgtcactaaagtagttttctaagatccacatgactaaaataatcaagaaacaccatccatggcatcccataagccatgatcgaacactgccacttttcagctccaactagtggtagtggtctcccgttagggtttcggacatcaaaatgaggtttcgggatcctgggtgttgggctttgagccctaaataaaatttatttcaatgtaatcttttacattcatttatcaataaagaaacagattt

SEQ ID NO: 39397 - DNA, 1643 bp, Cannabis sativa
taaatatatagattttttatgaaatgaaaattagtatctcattatatttttgtggttaaatatttttattattatattttttcaaatctcaaatatatgttgaaagtagttatagtcatgtggtataattgtattcaaatcttaacacaacacacaaagtttgtaataacaacaatgatgagttgattaaaggtttggccctcttaagatcaacttgatgtggattgtgtcatctgagattctcgaggtcactactaatgttctaattaagatgatctgaggtataagattatgataacttataaaattattaaaattactaaagaggtaagaaagttggataaaaattgaaataattgtatgacatatggacctgtattttcaaatattagaaattttaagtagcaatttagccacctaattgtgattagggttggactcacataaaagtgggaataaatgccctcctgaaaaaaaaaaaattgaaaaaaatgtatttatctttaagttaattaaactaatttatatataatagaagttaagagttaaaattttttataggaacattttttattttttaatattacagtttacattttgaacaacctttttaatattaattaatttgaagaacatgtgattccacatgcatctatattatccttaacacatctcttgggtttttctgtttttttgtttgtttttttttttgtggccatgcatatatatatatatatataatattgtataataaggacaaaacaaatattaatatatatgatgaaactatatattttgaagtaaatttcatcaccacatacgtagcttatctattttgtgaggtcatcaaattatgtgcaagtcttttaaatcaaattctccacttgagatctaattttatgattgatattcctgcaaaaaaatatattttattgtcaataaaaacaaaaaaaaaaaacaaaaacatatctcactatcaacttcttacttaaagtcaatattttaatactaatttttgtttttatatatagatttattatttagtaattactaagtacaattcaaaataataatatataccagatacacagcaaggagagcaatcaataaacggctttctttttttttttaaaaaaaaaaatataaattaataacaaaaatttgaaagagaaaaataagttgactattgctataaagtgaagccttagaataatatgtagtcattttttttataaaaatattattaaaatatatgagacgtaatattaaatttctctaataataatacatttacgtaaaaaaaataatattcatggtattactcttgcatttagcatttaaataaatattttcgaaacttaatttaaataaagtgagaaacaaaacatgaatccatataaagagtaaaaaaaccaaaattataattagaggtaaaaaaaataaataaaataactttgaaaatttttatggtgttttcatacttgaataataacttatttttttttatgtgccaatatacattgtatatatttatttataatattctttaaacttttaaaaatttaaaataatttacaatactaaaactaatatttttataaaactaaaaatactatttaaatagtctaattaaatcatatttt

SEQ ID NO: 39398 - DNA, 1306 bp, Cannabis sativa
atactgaagtaaacaacagtttttcctcatggctgcagtcggccttcagcaattcctccagtgcagaatgccaactgatatctacgctggtgtgggctatttggaagagtcgaaatgaaccggtgtgggacaataaataccgtactgtaggtgatgttgtagtgttggtaagaactgtccttgatcaatggaaaagcgctcaagagaaaacttttgaagtttcatcagagttgcaaacatctgatgtcggctatgagcgttggcgaactcctattgatgacattcaaggttaacaccgatgctgcaatttttgcccatacaaactgctacaacttttctttcgtggctcgtgatcatacaggttccttagtgaaagctaagtcaaagtgcattcaagggaaagtccagccatcaatccatgaagttataggcattagagaggccctaagttggataaaaaaccagagtggaagcaattttgttatcgaaactgattgtcttaccgtcgtccaagctattagaagctcttccacagttttaacttactttggaaggattattgatgaatgtaagaggttgttatctagttttcagcataagaatgtttctttaaattttattaaacggtctgcaaacacagtagctcacttcttagcaaggtctactagtgttatttcttatcgtgattattgtgggagcgatgttccacaagagttcattactgtaatgatgaacgatttgttgatttaatgaagttttatcttctttgtcaaaaaaaaaaaaaaaaaaaaaacagtagactttttaattaatcatttttgcttgtagtgtccccaaaaattcttgaatttcttgcaatatgagattaaatgccataactcatatttgtaatttactttttattggcactgttgagaaatctgcatagataggattgcatacttagtcacccgatattatggagggtattgatctaaaaccatatataaaatgttataacaattatcatctaatctgtataagtacagtttttaaatttttcaatctaattcatttcgcacaagtatgaatattcacactttaccgattaaattaaatttgattgaatcgtgcgaattgaattaaattagattatgcggattggattagattaagtattttatgaacaccctaaactatcaagccttaacccatgttatgttatggttgataattagatatatatatatatatatatgttttgtgtgaaaatttaagaatttttttatttttatactttaaaatatgtatatttttttttatattt

SEQ ID NO: 39399 - DNA, 3749 bp, Cannabis sativa
  modified_base (241)..(262): a, c, t, g, unknown or other
  modified_base (411)..(412): a, c, t, g, unknown or other
  modified_base (2350)..(2351): a, c, t, g, unknown or other
  modified_base (2451)..(2468): a, c, t, g, unknown or other
atagaggatatttgattatttggattgaaaaaattgataattcatagtgtatctatatttggaacatgtagagtgttctatgtaatgagaagtacaatttcgaatctatagtggagtcaggaggaattaataagatagaaaatttacttgataagttttggatctacttattgggagcttggctacatagtctcatggtccccacattgtttggaataatattatcttgtagactcaattnnnnnnnnnnnnnnnnnnnnnnagaattctaaataagactatgtcttgtttgtgaatttttccaaagcaatggcttaatttgagaagaaagagaggatttaggtttttatttattaattgactttctaaagtctaatcaataaataaattaaatgataattttatttgatnnttaattataattattaaatagatataattgatatttatagagttagaattaaaatatggtgtttgtaaaaagaaagatgagtttaaataaaatagcaaaattaaaatcctataagcctattaagggttcggcctaggatgattaataaagttattttttatctttttcaattctatttaaattctaaacctaaccctaaaagctatcctataaatagaataagatgacttttattttcagatgatgatcagactccttttatcagacaattagaaaataaagagatctattattttcaaaattctctcttcttcttcctcaaaatttttgaagcctatagtgtttgagagtatgcctacacatgtcaaagaaatacctagcatagtgaggaagactatgtcaaaccaaatcgaagaagagaagattaaggttcatatcttgacaatgctctgctacagataggaatcaagggctagagatctaaatggaaagagttattatatttccctgccattaatgtaaggatttcttaaactcttatgtgtttattttattattttaggaaattcatatttaggatgttagattgtagttttataatcaacttacatgttagtaaatctagatcctgataaaataagtaccaaaaattagtatcagagccatggtaatgatttattttcatgaaatatggatttaaaacaatattttgttgatttggatgtgttcaagttggttaatatattaattgatgattgaatgtgaattacaaaattttctatgaaaaataattttattttcgttctaaaaatattttattcggaaagttggtgaaaaattaagcaatttaagattttacatatctcagttcagattaaaattgagaagaatattaattttttgaatttggaggatggctgtcgcacacgaattaggcttttggccgagaaaaccctcatccgcgcgtggatcaaacaaattttttctaaaattctcggccaaggctcgtgcgaggatgttacatatattgtttgtttatttaaagtatctattcaaacttttttaacaaatctattatttatttgatttaaatttctatgattaacttgttgatagatccaataatctaaattaatcatagtccaattgtcaatagatcaaataagtaatttgtaacaggtaatttgtaatttctttcatctgtgataaatgtagtaacatgatagggtccatcgaaattatttgtttgtatgagcctatatgtttgcttttgggcttagatacatatagaaagcccatttattttggatatttatatggactaggttgctcaaaataaaatatcacctggatagttttatttaggactaattagtattgggcttattcaattaataataattatttatttaaaggttaaattcctctcatttgtgcattgtgtgagagttagggggccaatagtaatgggtacgacatacctgaacccagtcttccctcacatagaaaggcgcatttatcttatttaaataattgtattaggccaattatattaatttaacctaattaaaattgattagtatcataaataattttaaaataaatgaaaattaatttttcattagattatttaaaattaatttagaaaaatacacttagtttaatgaaataaattctaaatactaatttctagtaactaatttatattttctaatatttaataattaaaaaatatatttaagttgatatttaagttgaaaattatttttagaccaacttaaattagaatatttttcttggatattaactagaagtaataataagttaattttattcaagatacttaattatttgtttttattttaatacatttaattagataaaaaattatatttaagttagaaatttttaatttcagatcaacttgaattagaatanntttcaaatatattttattttattttaatttttcgaaatgcatttattttaaatgttaaaatttcaaaatttattatgaaaattagattaaagttgaaaannnnnnnnnnnnnnnnnnaaatcaagtaattttcattaatgattaattaaataaatagactaaaatatattttaattagaaaatcaataattaatttatgaactaaactattttgtattattttttccaaatgtatttaattaaatagaaaattaatatttaagttgatttgattcaagacacttaaatattagatatttttcaaaaaaatttaattaaataggaaaattatacttatgttgaaaattaatttattaattaatttttagaataattttttcaacatttaatttatgtcattatatatatattcgaaaatatactttcattaaatacgttaaatttcaaatttacttatatttatatttacagaaaattaaatttgagttaaaaattaattttaattaattttggaccaacttacattatgtaattttcataatatttattgaaaattaatactaagggtggaaaataaattttatttattattagatctacctaaggtaaaattttataaaaagtaaattaaaatttgtatttatatttatctaaattagtaattttaattaagtaaatatataaatattgaaataaatagatttaaatggatatcaaaatgaaaatacaatttcttttaaaataatgagctttaaatttaagatattcgatctccattgttggtcttatataattattgttttaatgggacctcgagacgcttgatttcttcccccttatggatggttatccattgaacatttaacattgtaagatctcgaaagataagtactttgtaaattttcttttctattaggctcatccctacagtgactacttacacataaatttataaagtataaaacaatggtaaaaagctcataaaataagaatagcattgactcttgtctactgggacaacgttagattcttattttgatcgaataaaaggttgttaaaatggtgtctattttagatgagctgactactctattcaactgatgatatcttttactcttgcctaccgggacactgtatattatctagttgaaaatcttagaaattttttagatgtgtttatttttgtattttcacatgtcttcattacttgctaaatatttatgaattttcaaatatgtgtgtgaatttatattgaacctgcattgtgttttctattactaattatgtagtatcaatttcgaaacttcattgttggtgtaacttggtttcttgtttttaataggacaatccccaatagattatcatccgttacacaacatatgtaacaccctaactaac

SEQ ID NO: 39400 - DNA, 1763 bp, Cannabis sativa
atatcattatattatatattcaaatataaattaatctaaaagaatattctacttttattttttttaaaaaaaaaatactataaatacaaggaattttaaattattttaaaataataattaagttataaactctcatcaacatatcgatgtattaattaagaatacgttttctcattttgttaatccaacattagatgctccttaaacttaggtatctgttaaaccaacgtccaaaaaatgcttttattaattaattaattaattatttttatttttgacttggttttttgtttttaatcttttttttggtaagtgtaagattaatttaagatagttttcttcccacttgattatagcttgactcaaaacataatgtaaaattaacataatgagttttgacacatacatacataggattataggataggcctatgtacctaaatttatcaactaagattgataatgatgacattataatgttttcttcatttagagatattgtttggataaatgttttgtaaggaaattattatgtgggtgagtgtcaaaaaagttttcacgtagggttgttttctatttatggtatttagagaattttggttttaagaaattatgaataatttatggtgatgaaaataagatttaaatagtccattgtatatgtctatcttttttctttttcatgtgacattggctttcactctaccaaccaaatcctcacttatcttatttgttgaaactactagttatcgatctctaaggtcctcgtagcaagaataagaatcagataataaatattttttacaaatttgttctcaatctactaaaaagagtctcgattcaacatacataacaacaaaaatagtacatatcaactattatgattttcgattgagtcacaacttccaaagataatttctattctattttttctaaaaacaaaatgttattagaaaattttagaatgcaaccataaaagcattggtgcaactttcttattttttttggacttattgacaagtgaaatcttgttttttatataaggaaaatattatgtccattataattatttataatattttgtaaatttttaagagaatttaaataatttatagtgcttagaacatgattcaaatgatatgtttcacatacattcaacaagatatatatggctcgtttggtacgtcttgttgtattgtatggtgttgtattgtataatattgtgttagattgtgtattgtactaatagtatttaatacaaattatgtctagtattgatttgtatgaataacttgcgtaaaattgtattaatagtatcataaactcaatcccaacttcaacctcgtacgagtttggggttcgaggtgaggttgaggtcgggttcgagttcgaagtagggccaggtttagggttcatgtttgggatcagagtctgaggtctggggccgggcgggagccagggttggggtctgggtttgaatctagggtctggggccgaaatgacgtttggggtcgaggctgggtcgaggtttgggttcaggtttggcttccaagttatgtctggggttcggggctgggtttctagtccgaggctagggccagggtccccaaccttagagtctttggagctaatacagatcattaatacaatattttatccaaatataatgttaattgttattgaatataatacgactcttatacaacctaccaaacaaactcttaaatcatatttaaaatactctaaattattttaaaatttta

SEQ ID NO: 39401 - DNA, 1521 bp, Cannabis sativa
gctctttttaataatgactatagtctaaaagatttcattttgataaatttgcaattattataacataaatataactaattttgtttcattctttattaacaaacactatcttatgacatgtcacattacaagttcctaaattaatgtttattttgactataactaggaatgttttggcaagctttggtggttagttgagtcttttgcttgaagtgcatatgagacatattttgatttagattatgatgttccaccaatttaatattaagtaatatcttattaaaaccctaagtaccaaacaagtgcttttgccataagtttccatgtgatctctaattttgggtgatcaaataaaacactatgcagctcaacaacaacaacaacaacaaagctttgaatacaagcaaatcagaggataggaccactaaaatgcacaacaaggattgtcaactaatgggcctaacatggctccttgccaaaaatcggacggcttatatgcgcacggtttcagccgtcttaagggcaatcatgctgagctcggacgaagactcagatcaacttcgtagatgtccattaacaagcgatgggatgcctctagccgttgattcttccgagttatcggatcaatcctcttccactataattggagaaaaaacattattcaccatttctctcttcattgcatttacttctttcttgtattgtatcctcttcattgcataatcattctagtttagttaccaactagagaaagagtgtattcatggtgttaatttgacactttgtatctgttttgtgtattatgaaaaatgccaatttcccccatttgcccatttgcattggtactttgagattttgtttgtttgttgtgagtggggggcctaagagaacatgtgcaagagtgagtaatggttagttttttgagggacaaaagcttttagaatatggtgacttgtttagtgttttttttttctttggggggacagttgtgttcttcacaagaaattaatgaaatgtcaacatctttctctctccataacaagccagctttatctttttctttgtgtggcttgtatcaagaagagtagagagaaaaatgccaaaggccaagccttggaatcataataatatacattactcttttttatactagtttcagatcttagataataatgctcactattggtgtttagttactgttttatttactgtaattgttaggaaaagtaataaaaataaaaggtatcattatccggtctcatataattaatattgttgggtatccaatcaaagtctcatattgactaaaaatgagaaagattttaggtatataaggatggatactatctccattggaacgaggccttttggaaaagtgcccaaaaataaatctgtgagggcttaggctcaaaccgaacaatatcataccaatagagaaatagatagtgttcgacggtccttacaagtggtatatgagccaaattccaaaattagctatgtgaatgtatcatcagattgcca

SEQ ID NO: 39402 - DNA, 2873 bp, Cannabis sativa
tgttcctgtgttgtggcaattggagactagttccccttttagatagtaaagacctcattccttgtagcccttcattatgctcatagagcccttccttagtgtcattgtacatatttcaatctttctcacaacaccaaggtgctcttaaacacttatatatatatattaagtttctggctaagttaagtacaagtcttacccctattaaaaaccttgccacaccatcaaacactctaaagtgtacaatacctgaaccctcaatgtaacatgtttgattattgcctggaaaggcctttccactcatagattcctcgaaattagtaagtaagaatttatcattattcatgtgaaaagtacaatctaaatcaagaatccattcatttttaaacttaaaggcatcaatataaacttttccacttttataaccatcacttagattggattcttggtgtttttcttttattgacgataaaaagtgcccaacaccaactcgttagattggtgagatgaataataagctttaagtaactaatttagagacacaaaaattatagtagttcactccccatgtcgtgatggtaatggaggtacgtctacttcgagcttttatttctcacgagatggtaataacagaaaaaggctaagtgtttaagctctggcttctagagaaagaaactagaaagagatgccttgacattgtgggtagttttctaaatatgaaaaatgagctaagggagctctccttttataggtgaaggaggtccacaaaaagaagaaaaataaaaattatatatttttgaccgtagatgatgatctaacagtgaaaattagcttctaatggtaatagtgattttttggagctcggtgagactcgctagaggtaacccggagcttattttataactcccttgggggtgaaatttggtaccgatagattcaaaattgtgattgacatgttagacatggcttgatagatcattaaaataaatttgaaactcagttgaatcgtgtcaattggatcaatattgagtgagttatgaccgttttactgaaggcagtacatgacccatcccctaggttgatatccagcgcccaggttacatatgacatcaacctggacattgggtaagtggaaaaacgtccaagggatgtactttaagatgcctaagtgataatttggcatcacttagtctaattttttgttctggcgaagctggtcaccagttctcaaagatgcttttattttgcgaaagtgagagactcgaaactcttcattttcaagtgagtttcccatattggaaatgagaaatgagaagtcatgaaaatttcacttttctaacttcatggatcttagttattgttaaaaattagacggatggtcacaacgaaatcaaaatcggataagcatagcccaacgcactaggccatttgtcaatctgggcgctgggtacttcattttcgagctctcgggatgttatttcggtacttccaaggttcttgaacttgaggatgaggtcttctaccttatttttcacaattttgaattcaatggttgaattagatttgacatttgagcaatcgaaagcagcgcaccaggttgattgttaacttgggcgctaggccctatttttaggacctcaggtttgtggttttcaccccgagttttcttgaatcttcattattttttatgacagaaaaaatgcccaaaatacttttttgataacttgattggaaatagcccaagttgatacttgggcactaggtccaatttctggccctttaaaagttccatttgatccccaaaatagtttaatcttaatctttcctaaaaatggagaagatgctcataagaattctgaataaacaccatcaaaattggcccaagtttacaaaatatcaatctaggcgttgggccaaccccaagtgtcaacctaggtgctgggccttgcttttggcacccaggaagtgttttttcttcatcgaaagtacttatttccccgttttcaatgaagacaaagatgatgaaaaagttggatcatcgatctgatacttggagggtacctagattgacaaattcccaacttgggcactaggtgcccgagcaccaggtgctcaaaaatgaacttactctgaatctaattctgatgcctcaaatatgtctacggatctctagttgatgctccaatgaaaattttgacccattttcgctaaggtggtcttggaaactgaaaccctagctgaggatgtcaacttgggcactggtgaaaccataggttcccatgttgacttcaggggtgtaggttcatttatttttagattccaaggcttagatttggtttcttaatgtcttcatggtacagaatagtgaaagatagtgagttggaaacaacttattgggatccaaacacccatcctgaagttttcgatgttaatctgggcgtagggctagggaccccacccaagtcaacttgttatgattcggtactactcaactccgaaatattttctttcttgtcacgtgtcgaacattgatgtccacgtcattagagctactttatgtgttattaccttttgttttgagaagtaattctctccttggtttgtatcattatcttgaccatcaagtttgttcttgtcgtttctcttctgacagtagcaatcccttctgaagtgtcctggctttccacagtggtagcagccatttcaattcttgggacccctggatggtgacctgcctctgccttgttttcttcctttattagggcctctactatgacttcttcctatattgctccatggcttcttttgatgaggtctttctctactcaaatttagttctccattaaaactaccaaacttattattatttaaag

SEQ ID NO: 39403 - DNA, 2505 bp, Cannabis sativa
ttggtcccctcccccaaaggattggatcaagctgaattgtgatgttaaagtgggttttgacaatatgtgtgttgcagtcgtcgccaggaaccatcttggagaagtggttcgtattcagacagcgatggtggatttttctgatgtgatttgcggagaagctgaggcgtgctgcttagcgatttcgattgccttggagatgggacacaagtttattatagttgagaatgattcgagggtggtaatcaacgctatcaatgggatggaatctcgttgggcgcttgagaactacgtctcattttgtaccaagtcttctcactcgtttattggttgtaatttttctttcattagtcgaacttgtaattttgccgctcacaatgtggctagatgggcctttgctcatcatatgtttggatctatcccggtttcagtgttaccggagaacctattatgtaatgaccatgaggtctagttttcttttttaatgacatcacgcttatttcaaaaaaaaaaaaaacgttgagttcactagaaccgtctcccattaaattctcaatgttttacgttttctaagaaaatggctctcatatacaattactaactttattaaatgtgaatcataaatttgtaactttttttatattacaaaattataataatttatcatatactcacttattaatatgttacacatatttaatcaatatattatatttattaaaattagtctcacatccaccccatgtacctttatcctcaattcaaaaaaaaaaaaaaaagaaaagaaaattcttttgattagtaagcttatacaatgcaatatttggtttgttaactttttctttttgaaaaggtttgaatctggtatgtgaactttaataacatttcaatcaataatcaatatttaaatgttaagtactaacttgtgaatcttatttagtatcaataattattattatttattatttaggcaccatgaatttatatgtaaatttagcatgaattttacttttgactatgtagcatataattcacatgtgaaagaatagaaaaagtataggcttaaaaaaagtgatcaagaatatttaaatgcaaagtaaaattaatagtactttccactttctcacatcaattttttaatcaaaaaaaaaaaactttatgaacaattaaataattattattcaagatttttcttaatttctaaataattaaatggaggccgcgttttgtttgtcttacaatttatttattcaataataaatgaaaattattatcaaatactgtttagccacaaaatgttaataatatcattttgcttggctgaaaattagctcaatgtgttcattgtttattttattttatggacccaaaaatagaaaaattaatattattattttctttcaaagaagcttaaaaaataaaaataaaaaaattaagtccactgaatgatgaaaggcaggaaaggaaagaagattaggttagttggtgctgtgatacaaaatacaatattaaatgaatatatgaaagtgaccataataaataaaaatgagtcatctcttttattttgagaagaaaaatgagtcatgtgtttgtttgttgagagtatatcccataccaaatctctgattcactacgtggcaataattgctttgtgatatttttacatattattaattaattaattaatcttcacttctttttcttctcatccactccacacatgaattatatgatttataacgacagcaactgcacactattaaacgaccattatcatcaatacgttcggtgctacttatactttgtggtatgttattatttgaacacgataacacgactcgaaatttttttatattaaaataaaagaagaatcggtataataacccgcttaatattagcttaatgtatttgatttctttcttattataaataaaaaaaattaaaatattttgtaaactaagttccgacaaaactccttaaactgacactatatttgcaactaattttcaaaattaattttttgacggtaaaatcttctaaactcatattatgttagtaatttaccaccttcatcaaattttggttgataactgccacgttgaaattgtctatatgtatataatatacgtgtggcataattttcttgatccacataattagattattttaaaaaatatataaataatattttaaaatgaaaaaaaaaataaaaataaatcatattaaaattaaaaaaaattaatcttttcatttttcctttttctccttttcttcttttttttcttccaccagatcccatctatgtctttcctcctcatgaccatctctctttcccacgaagatcatgttctaactttccatactccaaaaatacaacgaattttggcctcttccagctactatctccacctttgtgagtggaagcagatttagcaatggaaggagttgggtcataaaagtttatattaggtttatttttatgcatttttagagtctattttagtatgt

SEQ ID NO: 39404 - DNA, 1363 bp, Cannabis sativa
gttatatgagaaaaagtagttgaaaagaatggtagctcctgacctattgtctatgcattcaaaatcatcatatgaccataaataaaacaaaacaaaaattagaacatagatacggagggaaggaattagtggtataatgtattcacaatgaatcatcaatttgataattgcgaacttttctcagattcacacaagccaaacgccaagaatatcaatgaataaaatataaatacaaatgcctcatagagaagattagttaatctacatagtaatttcagacatatacttatctaaatgaattttttaatcattggccccaaacaaaagcaaaaaacgaaagcagcaaaagaagtgggggttgggaacggaatattgaaaatacatcataagaacgagtacaaacaaagaagatacatcataatattatgcatcaatcaaaacaatcacaaatatgaaatggcgatatataactcaacattctcaatcacagtatgtgtgaaaatgagcatgaattgctcagttgagttccttctagacaataggtcaggggcggcgttaagagaggcacatgggggagctaggttagaaaatataagatggatactcatgtactcacaatagattacagataaaattgtacagaggcacaaatgttcttaaatgtttctctattttagttttcaaaacttgttcacataaatattttaacttatgaattgataacagcaagaagaaatatatattgatgcaaaatagcatgtttggtaccattttgaagcaacattgccgataagaactcaaaaaggagcaggggagaaaggaggagcttcgacttggcttcccatcatgggcttcaacttggggaatcgtcgggcagagtacgtcgggagctgagaagaaaggagatgccgtcgggagagtatcctcatctgaaatttagggttattgttgagagagagagagagagagagaagatttagggttattggtttgaaattttcagccttgggtccaatattcgaaccagcgcctgtcccaaattttcattttcagtcaagaatattgattaggtataaaatgcatcttttcccaacagttattcactgttgggaatactaagtattccccacaattataaatcgttgggtatacttagtattcccaacagttaaaaaccgttggaataaattattttttttaaaaaaaaattatttagtattgccaacggttattcaccgttagaaataactatcccaacagttattttgcttcggtgctaaaccgatgggaaaaacttccacttactttttccaacggtttctatagttgaccctctttaaaaccgttgggaatagcccatttt

SEQ ID NO: 39405 - DNA, 972 bp, Cannabis sativa
ttttttttttacatttttacataattccacctaaaaataaatccctataataattaaaagagcaacctaaatcgcaaccaaaattcgtataacaatccatataaaaatcactgagaaatccaaactctaaatttaaaaataaaaataaaaaatagtataggtagataatttccttagaatttttagtaagtggacatccattaatccttttggactggattgttactgtcagttattaggttatttaaaccctttaattgctggactagattttttaatattggaattggatagctatatttatttatttcttttgtaccattattcttcaatcgattgcacagtaaaagtaggggaggattattattagcaatatatttacatatttattcaggtgagcttccaatacttgataaattgatgaaaacaaaatcagctacagaaaactattatcttagattttaatttctttctttcttttgttcctgtgaaaataaaacgttcatttattcatcaacatcaaaaatctcatagaactatatatatatatatatatatatatatataaatcattgttcaaaaatcatatattccttggatttggagtacaacagaaaaaagtgtttcatgaataattgtgaactcatctctgggagaaaatacaattctaaaaaatgttaaattagagcttatgatcaataatcctgcaaatcttatttggactgaaattttttcagtatgggggttgttggaggctgtcctattgttcatgtccaatacttgaggagcctaaaagcttgaaaccacagttaacaaactacactactgaagttctaataaggttatatctccattccgtatgtgatgaaacttgttagaaagaatcataaaagtagtagtagtagttttgtattattgtcccacactggaaagaacataaaacattcctctaaaacagcaactatatagtag

SEQ ID NO: 39406 - DNA, 999 bp, Cannabis sativa
ttttttttcttattttcactgtttagtgtaaaaaatttgagaaaatcaaccactccaaacatgcatgcaaacttcttaaagcaggttaagccagggttgatcaacacgaaagtctaatgttcagttctgtacaaagggcactcaatatcataccacagtcgagcctccacaacttgtaactttcctattacaattctattctactgattgtagctctttacttatgaaatcacctttaaactatctatatataaaaattaaccaaacatcatttaccaggtaaaacctataccaattttataaaagattattttcaaagttaacacaccaacatagaaagaaaagatatggagaggggatcaatcacaacttccaatctatgagctgtctcaacaactttcaatgagtatccaaactgaaaggttgataccgatgtacaatcacatattcacattggcacaaacatattcatttcccccccaaaataaaataaaaaacatttctgttcactaaaaagttcacttcctaccaccaaccataccttggctagaagttccagctaaactagacgacgtgccactgcttggcatcttattatgccttccatctgcaccgccaaaaacatttagatcttcaaacaatctgtatgaaggaataaagggcttctgtcctgttgctgatggggcaggattccgagcagcagttattgctgatgactctccaacattaactgatccattttcccttgccgagaaagaattatactgctgcaacggtcgagcactttgtactggcgtgtaagatgccgatgtctgggcttgtactggagcataggatgtggtgttggtgcgagtagcatatgcattattatttgtataataaccaggagtagcagcccatggtggaggaatataaccagatgagtaagtaggaggctgaggttgtacgtgttgatgggtttgagcaggttgcaaaggttgtggctgggctgcagcttgt

SEQ ID NO: 39407 - DNA, 2856 bp, Cannabis sativa
aaagttctcctttaaaagaaatatctcaaccaagccatttggacaataagcactatagaggcacgtacgctcacaactatggtctggcacaggggacaagatctgacttggtgtcaggcgaggtgtaatcattgagtgtatctccaagttaggtcacaggaggcttcctggaagtacaactcgggaggttgcaacttctcagaacttgaaagtactgggagcttacaacctctccctgaaggttcgtttcgtatctttaactcacgtattggtcatcaagagactgaagggatgcattccgtgatgggcattcttggagacgtttctgaggactcaccgaagtataatgcttatttagcgaagttgtgaggctcacgctcttcactttaggcacgtctctcgagaggatgaatgacggctggttttgaaaagacagttatcctcaggtgcatttgggatgctattccaaaatgatgaataataaatactttattctctttttttagatatattaaatatcaacctttcgtacccccaaccgttgaataatctagatttcaatccatttgatcagggccgtgcatttcgaactccttccagccattgccacccatataaatggggcttttgacgattgaagtcatttttttcacttcaaccatttttgaaacagagagaatcctttcctttcttgctcagacttcttgttgagaaaacctcaatcctttcatacatctttgccctaaaatcaaccttctttctccaattccttgccaatgtatcccattgacaaccactgttacctcgggctgccctgcagtcagagttaggaggagtaccatcgttgtcgtgcaaccagtagaatcgcaatgcatcaccacccgttaatagttattattcttatctcgcatgtgcttaagtggcaatgactttgaatatttctatcaaccataattcctgaaacgagtcatttaagtctcatttaataatgctatttaaggatataattattgagctaatttatattcctcctggagtacacatgttagcttctggttgatagctgatttttgggtataacatatgtaaattttaaaatttacatatacatgtattaatgatattttattttctaaaaactccttttaagataaaatatcaaaatatatatctaaaaaatagatatcttatatttttttaatcttaaaaaaattttaataaaatattgttatttttaaaaatataaactttaattagcaatatcgtgtttcttaaaatacatattaacatttaatgatgaaatatcatatttttagaaaaacatatattcagtattttctaaatcttacaattttaaataagatattaagatttatagttacttattttattttaaaatatctaggtttaaattattgattttattccttttgatataaatatctaataagataattttaaatataattataaagtttaaaaagaaatttcacactttaaaatatcaaatatttaaaatatatgatcttatcatttgatattaaaagttaaatcaaattcaaccatatttaaaatatctcatttaattcctaagtcaaaaagcattctaaaaccaaaatttatcttttattaattaaaaattcaataaaaataaatttattttgattttagtaattttgccttcaaaaatggaaagtacttaaaaaattaatgaatttaggcttttgaattactcaatttgcactttccaatcaaaagatatggcaaaaataaaattaaaaactaagaaaaaggggaaaccaaagatttaaatgcaagatagaataactcgttaacaaagatttaatagaaaatattcatgacttgctggctatataatcttaggcgagataaggataaaaggctattaaaacttatatcgacgagacacacacctgtctcggaatacatagtcaaaggagatattcatttattaaaagtagaataaatacaatcacacatggtaacctcgggttatgaatagcgagacattcacctcgcgattctaattaaagaaacttgatgaggagaactatctgctaacacttagtattttttccacatcaagatgaacaaggagaataactcgggttaagcgagatacaattgtccaagttagcattaaccatcgaaaaggatacgaacaaaaaagcaattaagcagttatcaaatattatcttacatgtaattaaatgcaacgtgggaattgtccacgtttcatgaagtattatatttaaattgatcccaagtaaataactgtcaacctatattcctataaataggggtagattccatagaaaaagggatagaattttgagagaagaaagattatcaattaagtattgtatcctgtattcagaaaagatcataaacaagatagactcgtggagtatgcagatttaactgtaaaaccacgtaaaaatatctagagttatttaatcatttattattatttttgtgatatatttatcacataaaggctcattatttttagttaacaaaaatctatgtttacaactgtcattttgtcgtatactccgtgtatcccgagatagaccttctacgttgattattcatctcattggtcttacaaaatagtagttgttattcacgactcgctcttatctttaaaaggatgagtttaaatatttctactaattgtattttttgaggcaagatatttgaacgtattcatttcttcataaccagttggtttattttccaacttcttcatacgtgtcacaaccatattgcttgcttgaaatatgggtataacaataatttttatatattctcaataaaatattaaatgactat

SEQ ID NO: 39408 - DNA, 1943 bp, Cannabis sativa
ctttaaccaagcgcttttggcaaagcaaggatggaaaatagtgaccaatcccgattgtcttttggctagggtcatgaaagctctttacttccccaacaacaatttttttgaggctaaggtgggtcacttcggttctaatatttggaggggattgttatggggaagagatttgttacttaaaggctatcgttgggttgttggaaatggcaaatcagttagaataaatgagaacccttggatccctcgaggagctccatttacacttcgtacaaagattcaagtgcctgctgaagtcaaaattcagacacttataactgaggaaggggactggaaaactgacgaaattgctagctggtttcataaggatgacattccttgggtgttggggattaatccctcacgggagagagaagatgtaattggttggagtcttactccgagtggtcactatactgttgctagtggctacaagctgagatttagagaccctgacatagcagaatgttctaataattctaaaataaaagcttggtggaagggagtttggggatcacggctcactcctaaaatgaagaacttcacttggcgtgtgtttcacaattggattccagtcaaaaccgaattaaataagcgaggtatgtccatggatgatacttgtaatcgatgtaaaagtcataaagaagatgtttgtcatgctttatggacttgccccactttacataaggtttggaaacatttcggctatcttcacctatttccttcctctttgtggaaagccccagattttttaatgaccatgaaggataagctcacaaaggatgagtttcttttctttattggtttaacttggctaatttggtatcgtaggaataaatgtatttttcagaacaaggatgttgcagataatatatggattccttgggccatagagatgttggaattacatcttgcaactgatagaataagtccaaaccagaagcaactcaaagctccggctaactggtcccctcccctcccaggttcttttcttattaactcagatgcatctctcattgatgggcaaccggggtgtgggttaggggtaataatcagagatcatttgggcaccttagttgctgctgagacagtatttgttcctggctgtctctcggttcttttggctgaaacaatggccattcgtttggctttgaagattgctgaaaaatggtcgctgcaaaaagtttgtatatcttcggacaaccaagttgtgattcaagccttgactggaaatgctcgttcaaacacagattggggtcacttggttgttgattgcctccttgctcgtaaaagttttcagaatttgtcttttattttctctcctagaaactgtaataaagtagctcattgtttagctaagtggggcagattatgccaagtttctgaggtgtggactaaggtccttcctgattgtgctgctgcttgtttgaaagcagatatgccttttggtgctagtttgtaattcattttttgtttgaaaaaaaaaaataaaaattccttataatttatttggttaaaaataacatatttactgtaaactttttattttttttccaataattttacaaatagttaaaaaaaaataataataaaaataaaataaaaaggtccacttattttggtcaaaagtttggtatgagtacaaaaatggcgaagttaccaagaaggtgaagaaattaaaaaaataatgaaaaaggaaagaaagatgaagaggaaaaggttagtagaatatgagaaatggctgagaaatttcctcatcttttcttctctgttatatacccaaagcaaaacgacttgattcacatacgaagaagaagaaaaccgaaatgtctggcatgatacctggagtaggagtccctcaccggaggagaccaaatcaccaccaccacagccacagccacagccac

SEQ ID NO: 39409 - DNA, 1062 bp, Cannabis sativa
aattattatattaaattatgtgactcgatacttaattacattaataatgatataacacattgaatagtgttaaatattacttgtgcctgttattatttttcggtgttgaaattagggtaagttattagtattaattaagaatgttgtaacttcaaactctatcatctttatacaattgaaaaagttataaaagaaattatatttttcaaaagtagatgcctttttgtgtagtagaataaatgatattattttttttttaaaaataggacgtttttaattgagggtcggagacacaagtctaatttatttgtgtccagttctactttgaatgaagtaaatcttttgtagcgacgacaatcttatgtgtgctgaagttggagttttgaattttctctattaatttaaaatcttgttatacctttaaacttgacccaactacgtaataataacattgtcatcgttgatgaagataaataaaaatagatagaaaataaagatgaagagaaaatggagaaagtaattttattgttttttaatattaaaaataatttaaaaatattgcattttactttatatttcaaaaactatttaataattttaaattgtttatattttagagggtatttgttaatggacaaatgttatgactaaaatcatgctcaatctattaagttgatctaatttacaaaatacaaaatttaagttgtcattttaaatttttttagcattatactacataattgataaataaaaaaaaaaaaaaaaacaagagttgactataaacaatgagtataatacaatatttacaatatacaaagatataaatgactatataagtaaaataaaaaggatcaattggtataaatcattaacttttcttagaatgatttgattcaagcttcatttgcataatggatattgacaaataaaccttttatttttattttttaaggcaaacaaaattagaaagtatactgatgacagtaatatttttcaaattttgaccaaacttattgacaaagaggtgttgaattgaaccaatacaaaatttgtcctaatgaa

SEQ ID NO: 39410 - DNA, 1330 bp, Cannabis sativa
aataaaatgaaagttagggtgtaaatttccctttatttgattgtgttgtgaattttttgatagtattgacatataattaccaaatatgttttttattttgttcccattttttttattattattctattgaacttgaagtttagctttttttttcaacacttcatgcaacaatagtggaatcacgaattttaatcaaacatataaacggctgccaagagacagactaattctacctatagttgcccaaccaaaataacttttgccattttgatccaataaataagaagcattacatattttcaggcatagtacaaggcaatagggcataatgcatgattggtccctacctagccaagtagccagccagggagaggagtcattaaaaagtataagactttcacgtaattaagaaagactaaaatagtaactcaccattgaccaatgccaataaaaaccacttaagaaattaattaattctcactgctgtcacacattatttagctaaccaaaccaaaaaaagttttttgtactttgcagcctggcttccatcatatgatgtttccccatcctctaaccaaattaaactgacatttttcttcatcatttcattctttcattcaactaagaactttgcatatataaaaaaggtcgtaacaaagagttgaaatggtcaaagatatggttggttaatttgcatcattccaatatattcctatacacgtggcaatgaggaagaaatctaattcattccttcattcgtaatcctcgtgtaatgtaaagttgtagaattaaaagctaacttgataagtcgggatgttcggtttaactaaacatcgtagtttggagcaataataataacacacgaaagactttggaaagtcaattaagaagagtgagtgagaaatataaaaagaaaagaagagtggcgtctaaggaaaaatggcttctgggaattttgtctagtcattaatatttaatatgaaatctcttgtcttggttcaaccaaaatcagtactaaacacttcatttggatttggaccgatcttaagttgatgaatagtataccattttgttcgactaggcacatgtagagtgaatactaatattatttattttgtgattaacacgcaaaataaaacctgcatgttacgttatgtcattagtagattggaggtaacaaaacaagataccttagctccatattatattgaattcaaactcatcaaatttgcccttttcttcttttttgctctttctttccattataagttataaccttttatttttttgaggaaaaattaccgagtagttaaggaccaagtcatggggg

SEQ ID NO: 39411 - DNA, 2086 bp, Cannabis sativa
aggatgtggttaatttactccaaaaaatttttaagcttattttttaatatataatatttattttatttatttaaaaaatagtttttaatttttgaaaataatattatatttactataaaaaaatcaaatatgttttatttacttaatttatgtattcttatttttattacacattatttaattaaaatagtatttttatttaaaaaaaaaattattaaaagcttattcaaaaatattttatactttatttagtcttgttaaaccaaacacaacatagtactaatatatccagtctaatcctaatttttagcccagtccaatccaatccaattcaactccccatcccaaataagaccttaaaggtatagagctcagaactcaataattctgaaatagaacattcactgtgactagtacatttactatgattaacccaaggaagggtgctcttttattctatgaaatggcctaagagatatttgtgttatttcctcataaacaaataatggaataacaacaagcaattaatacaacaacatttagctaatagttcctaagctggagggtcagataccaaatcatgtggatttctccaagtacatgcctaacatagccagtcggtttccatcctagcgcagaagtacttaccagttaggcaaatgtttggttgagttatctgaaatagaacaaagtagttgctaattcaagaaaacctacctgactcagcagatgaatcacaagtcatagaataataaaaaaacccattaagagatgattttccaagactcagtttcccaagtgatttccattgtcaatagtgatttcttcagtggttcttgtgttaatgagatgaagaaggatcttttcaagctcctctccattgctccattcatgaatttcggccttgataagtgtttggttgctgcaaatgcgcttccacagtggatagttctttcttggcatgacatgatctccttttgaaagccttagagttgggcagtaatctccacttccatctccaaggtaaataaatcttcttctcccactttcagctgcaaaagctcggatttggtcaatgaccaggccctaaaaattaatgtaatggttagaatacttctgtttacaatgaagaaaggtactgcaactgcagtttgggaaagaaaatgaagatgttagccacttttgcattttgcaggattaaatagaaacatatgcctttgtcacacaaggataacataattattgaagataaataagccaatgtattttatcaaattccaagtacaccatgcacatattaaatgagtaattttctgagaatttacctggatgcaaatgcaagtaacttataacttatataatggctccggtatatcataacaataaacaaggactaacatatacagaatggatcattgtatgagcattttcaatatcacctatgatctcaataacagcccctgtatttggtacattttgttagcgatgtttttttctggaaagtttttatgtaacttggatagcaaaaataaattactacttgttgcggcaaggagaaatccacacctgtatcaatttactttgcttacttcttatactattccggttcaaaagaagatgggagtggaactgaaccatcaaaaataagtctaccatgaattgccctctacatgactagtcttatctaataagaagttcaaatcaccccaaaggaagccatcaagcaatcaagacaatgaaaagtataatgagtgagaatgttatcataccaattctatttagttaagccacatatatgatataatgttatacgcaataacttaacactaataatgcactctaagcagacattagatagtcacatttatgtgttaactaataccttgcacatatttgatgggcacagattgcaatcatggggtgagctcaagtcatgataagggaaaattctaagtcttttctcttcatctataactgtccggtttgtgtcgatttgtgaaaagcatcccaataaatcatgatgttccaatatcttctcaataaagaactgatttgcatcactgattatcctcaggtcacatctgaa

SEQ ID NO: 39412 - DNA, 927 bp, Cannabis sativa
tcacataagctaattattgtaaaaaatcagtagaatgtaactagatggaatatttttaacaatttgcatagtttggaagaatttttgcaataggaaaaaatttgaaggaaaactttacaaaaatcataattcagagacattactagtgtaattaaaaattaaatctcacataatatttaatacttattatgaaaaattgataattaaatgcaaaatataatgtcaacatataaaataatatttgagaccaataatgtcgaattgtaatgttcttatctccttaatagtaatgtttttatctcatctcacttattaatttgaaaatagtacatgtataaactcttctcatgaattttctatggcaaacttcatatgttgggcctttaaaaaattacaatgatggtgtgactgtacaaagagaagaaaaaacaattaaatactacaagtcttttttttaaaaaacaaaaaataataattaaaaaaaaaaagagctgcccctttcaataaaaagaaaaagaaaaaaggaaaattaaataaagaaagaaagaaagaaaaagctgcaattggcaagagattgaaacgtaccaagcaaaagaagaaaatgcatttattgcaccatttgatgaatgaaatgactttctttttgactgaaggaaaacaaaaaactttactactgtctactgagtctacatggatttgttttatacacagtgtaaaattatattatataatattgtgttgtgttaggtatatgttatattatttataaataatataatatatagattaaatatgtgtaataaattaatatgaaacaataatatatattagttgttattattttgtaatgtttgggagagttgtttattactatgagtaacctccatcattgttaccagtattataagagtgtaaaaagatgttaca

SEQ ID NO: 39413 - DNA, 3177 bp, Cannabis sativa
  modified_base (888)..(895): a, c, t, g, unknown or other
tatcacacttaattatttgtaacttaattatttaatctaaacattttattatataaaataatatatataacatttgtagaaaataattttataacacaatattttatttaatcaattaaatattatattacaaagtaatataatattctcccacttgattaaataactccactctaatagaaatcattgaatttgtgcatagtgtaaaatatctttcaacttaatttttatttgagtgtaattaccacaacgtttgtcaaaatttttgttgccataacattcaaccactattctttgataattaactggtaataacacacataccttccactcaagaaccttataaatttcttttgcactgtcaatggtcatgtgcacaaatccaatttatggagtttctatagagaataactctcaattctcataagagacgtcaacaaccctactccatatagttagaattttagtgtctcacaactctttagatactttcttaatcttaagtgagttttcttaagttgtagctccattaaaaaactatttggttttaaccctccaattttcactacatgtgctcacctataaatagaacaattgaggaccacattcactctatggacttgtgattacctattaaacttaagacttgatttttacaagtgttaagataggttaccatcaatgagtaaaatactaagagagtttaggtcccatccctcgaaattcatgttttaatcttgtgcgaaaaataagcaatttgttaacctcacattttttattccaaacgaatcatgctagcaaaatctagtgtccacatttaaggtgaccactattctccttcattacttaagctttgaaaatttaatcataaaagattaatttttacannnnnnnnattctcaataattttgataccaagcatataaaaattaaacacttatttagacaccaaacatgtctaaattacacacttaaccttagacaccaaacatgtcaaattcacactttatctaagacaccaatcatgtctcagatatacgttagttttagacaccagacatgtctaaactgtcatattggagtatacacccgcacactttcatattttattgacaatataatatttgcatcttgattctaaaaatatataagacgctttgtctctatagttattattttagatttaatttccttcttgaaattattaccaccaaatgtgtcaaaatttcacatatgcacatagcaaaataagcctttgaaattaattctaccattaaagggaaaaatttgagctcaaaagctcaaaccttgcttaagcttcacaacaagccacaatttcatgttaaaatcactcaaactagcatacaaatacttcagaaaacatattaaaacctaaaaactcgcacaacaatcctaactcaaaaaaaagcctaggaacctaacctcaaaacttgaaattcaaaggaaaagataagggggaaacttacccaactgaatacttgtgctacaacagctcaaatcttcaagaattggtctaaaatgctgaagaacttgctagttttctagtttctagggtgaggcctaataagagaggagagaggaagagataatgggttattatttctaacttttccaattgattaaatgagtcattataaattactctttctacaatcaaccaaaagtaataaggataagcttaaaaaattaaataaatcaattcaattcccacttaataaaataatactaattttagggtaaaagacttaattaccctttcttacacatgtaaccaatacacacaaagaggtaaaatggtcttaaactataaccatattaactcttgacattctaaatgtctaactaactcaccctgttatttctaaagtacagaacaaaaataaaatgactctataggccatacattgcatttcatcactgttaccagcataaaatatgaaaatcataatatttcacatataacaatattagctcacctagaactcaaatatatctccacaattacataaataatattcaaaagtctaattctaaatttaagccctaattatctattaattctcataataaaagtaagtggtcattatagttgcagcactacaacctggttagggactgagtcaagagagtgttaaaacctccaagcatatttggtggtgttggtattgttcattctactttgaatgttgtagaaatgagtgataatgaaccaaagatcatatagggaggctatgaactcaactcacagtaggaaatggggagcaacaatggacaatgaaatggactcactagtgaagaatataacctggattcagtgagaaaataatcttgtagtgcaagatcatacagggaggctatgaactcaactgacagtaggaaatggggaacaacaatggacaatgaaatggactcactaaggaagaatataacctggattcagtgagaaaataaaaagataagagaatcattagcaacaagtggatttataaacttaacgacacaattctagggtgtgagttagctagatttaaggctagactagtggcaagggactttacacagaaagaaggtatagattatatagagatatagcagtaaaacaaacctcaattcaaatgttgctagctttgacaggtatggatgacttagaattggatcaaatggatgtgaaagcaacatttttgtatgtggaattagatgaagaaatccacatgaagcagcctcaaggataagaggtaaagggaaaggaagactatgtgtgcttgctcaagagatcactttatggtcttaagcaggcccctaggcgatggtacaaaagatttgatgagtaaatcaccaattagaattcaagaagagtgtctatgactgttgtgtttatgttaaaagtgccaatgtcaaatttgtggtatatctactactttatgtagattatatgctaatttcaagaaaaagaaatcaagaaatcaagaaggtaaaacaactattaagctttgagtttaaaatgaaagaccttggtgaagctaagaaaatacttaagattgaaatactaagagacaggaaaaataagagcctaatactatctcaaagtgcgtacatcacaaaagtgctgcaaaggtttggttttccagatgtaaaaccagttagtgcacctttagc

SEQ ID NO: 39414 - DNA, 1304 bp, Cannabis sativa
caaacctaatcgttaaatttaacagaatattcttaagtatattctgttaaagatagacacttttaatatataaagatatatatataaacgcatcatcatattatattgtatattagaatacaatatgttatattttatttaggctacttgtgcaagttttttcaatcatagatcgatttcacatcatgttgcattatttttaggatttttgaacttcccaatgaaacactttattatattgtgtcgtgtacacttatcactagatagattatcaaagaacaaatataatgatcagatctagtattgtattgtatatatgttctttatatattattgaagtatctccttgtatttaattatatatctgtaaaaatgccaagatttcatgaaattagtattttacgtattgtatactcgtataaataaaagttataggagtaaaatagtatgcattttgtacatgtgtgtatgtagtttaattagtgggtttgtcattattttggtctacacataaactatatattgaacaaaaatgaagtatgaacctaggataaagatcacatatatatatgaacctttatccagaaaggtcaactcttacatctcaagattaaattgctactaataattagaactgataaaatcttgtgatgagctagattagatagcttgataagctaagtaaaactcaaacgaccagtctttatatattataagtacaagcaaatattaaattaatatacctattaataaaagttattggcgttatattttttattatagattttctcttcttatctctagcactacttgagtgtattgtaaaggcaaaacaccttttatgaacaactttgagttataaatgtatgaaatgactagattctctaaaaaaataaaaataaaactatgttgaaaatgcttatatgagttcaggaatcacacactttttttcttttatgaaactttttctctttgctaaccagataatgttattataacttcaggacacacatttctttacatctcatatatatccattaccatatttataataatatatatgaatgtacatgcaattaaagtacagtacaaaagttcaaagatctagtttattagtgcattaaatatttgaaatgaaagggacatagaaaaaagggggtaaagtatttaaagaattaagggtgcgttctgtatggtttttttaatccattttttttattttttaattagaaaagtaaaaatattaaaaaaaaaataatatgttctataaaattattttcaatttttaattttaaaataagaac

SEQ ID NO: 39415 - DNA, 1938 bp, Cannabis sativa
ttggctattttacatcaaaatccaagtctcagcaaaatgttgtgatggaaagtaagcatagcaccttccaacattttgagcccacatgagctaggattgtgtgtttctaactggtactgttaaagctacttgcactaaaaaaaccagttatctagggtgcaaaccaggtgtaacacatatgaatcattgcactaaataaaacaattttgatggtgaagctctctctgatagaaatgaataatagcacaactcttgaggagcatttcatttaagtttcttttgtttcattttagttctctctatatttctaatatttatgcaagaggaaaacagattaagaaatatattaaaaatatacaaataacctcacatactctaaccaatgtgagagataaattctagcagtttatgaagaactacaccaaaacatataagacgctttgatgggtcaagaagattacttactttgtctataatcaaaatggatctattgtgcaaatttctgtggagattgcttttgccaacttccatggctaagtatttttcccaaccactggtgatttgaagtggattaaacatatcacaggtaacttttgttactccttttcattaacaagaacacaataatgagatatttgagttaaaaaaagaatatttaagtcaatttcataatagtattcttataaacacagattttgactaagaaagttacatctaacatattgtataaacttaccttcaaatgggagaaggtttagtcccattttttcattcatgtgccttcctttgtccattaagctaatcctattaccaaagtagctccaatttattggtatataaagttagaacacaataaacacacacatatatatatatatatattaagtttaagaagaaaaatagaaagttgagaagaaaaagaaataccttctgctactaagaagagagaaaagagaagggttttctttgtatagctcagttcaaaatgagaaatgcaaaaaggacatatcaaataacaacaagggtcatttcaataatacacataagggtcatatttttttttgtaacaatacattatttttataaaaacaaaccatattccatgttgtcatttataataagtactattgttatatactataagcgcatgtttccttgtaaaaaggaattgatttaaaaccattttcataagaattggtttagaaccatgttcatatataagaattgattcaaaaccatgttcatagatgaaataaccatcaactagtgaatataaaagaaccatcaactaatgtgattattgactgatacaccacaaggtcaacataaagacctagtgctgcttcctacttggttcaaaaacacattacacaatttgtagtagtatgcagtattgaattattttttaggctttctattgttattattaaataaatttatttacataataatgtaaaaatttacatgtatatattgatatagaaattaagaaaagaataagcagcttagatccaccggcatgatgaggcccaccaacatcattacacaacacacacacggcccaacatttgaatttaaatgacccaatacctcgggcccaccaatccaagccagctttattcaaatgcatatcttctaaaacaaggaggaaagctaactttccatgttcaggaccttaattatatgtatattacgattaaaaagagggaggaagaggaaagaggaagaaatagcagaggcagaggcagacattgtcttgatgtatcaagcaaaatagcagaggcaactgctaggcctcaacactgtgtgtgcagtgaagagtggcaaaccacattgttagaagacatgtcctcctctgtccaacttcacgtacgactggtttctccttcatcaaaaaaaaaaaaaaaagaggacatgtttctttatatacaatcttgt

SEQ ID NO: 39416 - DNA, 1277 bp, Cannabis sativa
ggtcttctgcagaagcagaatacagagcaatggttaacaccacctgtgaagtggtttggcttctctctgttttgaaggaattgaaggttgaacatgaagggcctacactgttatattgtgataacaaatcttcccaacacataactgccaatctagtattccatgagagaaccaaatacatagaaatagactgtcatttagtaagagaaaaggtacaacaaggcatcatcaagacagttcatgtttctacaaaggattaaattgctgacatcctaactaagccactctttcctaatcaattcaatactttcaaggacaagatgggattgaaagacatttacagtccatctccatcttaagggggagtattaagcttgtttagcgtattgattagttagttaagaggttagtaatgtcacggttatttgcagtggtaatgtgtttctatgctttgtaatctcagctactataagtagctaatcatctttttataacaatcatgattgatgcaatacaattcagttcattcctttctctccttctctctttctctcttactctgtttcagctctctcgagctaataatcacatatattcaaaatttcatctagaatgggtcaatgaggctcgagagaccttgcaggatattatgaaaagttttttccaagattgtgttttcatgtcaacgatcagaagattaagataagtatacataatcattactggaaaaagtgaaaatgaaataaaatgccacaaaatggagaatattgaccatctttttacatttcttttgacacatatcaaagagttctgagattgcatgcataagctacctaacataattatttattttgattttaaaagggaaactccatagattttactattttagtagtgtgtattgtaaaaagaatcgttatatattttttttaaaaaaataaaaaagtaaatatatttttaaaaaatattatatataattgttttcactttttaatttaaaaagtaagaattaaaatttagaaatttttaaacaaaaaaaaaaaactttcaaaaaaatgttacatatatatttttttttcttaattatagtttatttgtattttctttcattaatattttagacccgaaccctaactaagacccagaccccaaccaagctccaaaccccaaacttagaccccggcctcggccacaaactcgaaccctggatcgagactgggactcaaacccgaccccagggccggccctaggcacaggcctgccctgggcataggcgg

SEQ ID NO: 39417 - DNA, 2727 bp, Cannabis sativa
tttttttttttattttattcttatagaatatttaaaaaaaaaatactttgagcataattaaaagatagcagtttattatgaggagagagacagagagctgactttccacaatttgaacattagagacagatagttgcgaagtgagagatgggtgtagaaaagaccaaatattttgatattagctagattgggcttgggtttggatttggatttgggttggtgggtgggcttttaaatggacgtggcgatggggttagttgatgggaagagaagagcagtagattattagagtagaatcaagaattgcacgtcaaagaggtaagaattgaaccctaaaaagacgctgacgatgagcagcaataagggcacacacacacaacgtacaataactagcttggtagctataatagcttctagcagtggcagtggatattatataatgtcagtattttaaatacattcgcagaccatcaatttaatactatatcactactacatgtttatcacaaaaaaaaaatatataaatatatatatcactactagtacgacctactcattcagtagtcatcatcatcaattcaataacatttttattatttgttttctcaccaaaatatcattggctataagtcaagtaaaatgacttttctatttatttattgtaacgccaacctgttacgatgtaagtgcgcgtgtggttggttcacggagttccttaaaattggcgcatatcactttttctcttgtgtgtgagagagagactagttatgatcatcacccactcaccttacactattgtcggtcgggatggcttcagctcttattacttttcttttccattttctggaaaataaaacactaaattataaaacgacaagtgaatattaaaaaagtgagatattgtagggcatgaacgatgctctcccttatcgttctcacatattttatcttttgtaaaattcataagtcataaatactctattttttatttattagtggcaatatttaaaaatttgaagtgatgtaattttccttgaaatttacacggtacttctgtttttttcttacaaaaatactgctcggcgatatgtttggaagaattttcagtttgtcaacaagaggtccatggtgttagaaacataagaaaggcccaataaatgagtacaggtaaagcctacaaaaaactgggaaagataaaaagtttaaaggggttttttcaatattatacctaaaattagttttatttataaaaatacctttaagaaattatttgtagaaataccgttataccacgtcagcatataccaaaattcaaaataattatcgaaaatagaaaaaactaaaaaaaatatcgtttccagaaatttttgctttttgaaagttttttaaaaagcaactatttagttacttttgatataaataagatatcaatgaattactttctattaaaaaatttattatagaattttacacatatataaaatataaaataactattttaatatgtgagaaatatatatttttttttgccttttttttacagaaaatgacgactattattaaagaaacttttttatttcttctttatatttttaggttacatattatgttattttattgtttaagatactttgatgttacttttttttcagtgtaacttatatgatgtttcagatactattcaatttatttacaaattatttataaaactatcaaaatagttttataaaaataaatttatttttatttaattttgtaagatgtaaatataaaaaataataaaaaaaaatattttttagtaacttattaagttgtttgatatattaaattttatttaaattttaaatattatttatttatttattaataaaatatataaaaaaaacttaaaatatttaataaaaaagacaaagaagaaagaaaatatttgataagtttattatcattattaaaaaaaaaaaattactgtacatgttatgagtcaagaaaaaaaaaaaaaagtaatcaacaaaaaaaaaatgtaaacattgaggcctagaagagaaccactaaatatattgatatatgtatcagcctattttaaaaaaattaccaattttcaaaacaaactatgatatgtgggtgtaaaattattacatattaattgatattttaataactaataataattttttaaataatttgatatttatgtgttgggatgtaattaattcttttagtgtaacatttaagaaactaaatagattagcgagaaactagtaggttacctatttattatagatatcatcttttataacaaaagtaaaaaaaaacatatttaaaaatagtagaatgcaataatttttaagcataaattataattagtctagcatagataaaaattaataaacaaaaaagagaaactctcttaaacaaaaaaaacaaaatgaaaaactaaaagtgtcccacgaaaaataacataaaagaataaattaaaggagaaaaaaatttcctcttacagaaaaaaaaaatatattaacagtatacacgctgaaagtaatataccgcactttcagtaataaattgtctcaccacatttctacaaataatttgagatttgtgtttgtaggcgtaaatagttcaagtttaaattaggagccgagatacaggaataaaactaagagggtaacctcattggacaagtcgaagttatacctaagtcgaatcgatctaagataattctcatct

SEQ ID NO: 39418 - DNA, 2967 bp, Cannabis sativa
attaaataatataacaaaatcaacggtggagatgaatccaccaataatggtggacgattcacttatagaagataagtggggtctcaccacacacaacacaacacaagacaggtttagttctagtgaagagggaccaaagttgacttgacttgacttggcctatattaaaccaaaaaaaggggttgggcgtattctagtagttctagtaactagtaactagtaaccaaacccaacccaaattacctccaacaacaaaagaaaaagtacttataaaactctattcaaacaaagtggtttgttatgataaatatttatttcataacctatattttattaaaataaagacttgtttattggaatatctgaaactgatatggagtcaactgaatcaacagcaattacttaatgcttttttgtcacgtgttagttttattttctgttattccattcttgtaattttgttacagttagttgtcaatcccaactaacttctttgtaattactcagcttatgttaatataaaaagggatcttactgactcaattactcagattgatcagtatcattttccctctcatttcattcagttcctttcccctgttttctctctttctctgttctctttcaattgttcttcatggtatcagagctccatggccaacaatggcgatcaagatccatcacctcggccagctcctgctgtaactcctgtccaagaacctgcactgccaaacaacaatcttttgcctctcaatctcagactcgatcgatcgaactatacattgtggagatcactggttcttgctgcaacccatgcatacaatctcgatggccatatcttgggaacaaatcctcaaccacctcgtgaaattgcaggtaacacctctaaccctgccttcttttcttggcaaagacttgatcaatttctaatgcattggttaatgaactcaatgaccgaggctatgctgagtcatgtaatcaatgctcaaacctctgctgaaatctggaccacatttgagcaattatttgccacaagatcaagagccaggatactacaaatcagagggttactccaatcgaccaagaaaggctccttatctgttgatgattacattctaaaaatgaaacaatacagtgattctcttgctgcagctggacaatctttgacagatgaggatcttatactttacattcttggaggattaggtggtgaatatgaagcagtggttgtaaatctcacatcaagatcggaaaaactcactctccaagaagtccatttcatgctacaaaaccaagaaatgaggataaatcaacacaccacagattctcttacaaatgttcaagcaaatattgcaaatttctcctacaacaacagtaatagaaacactcaaagttacagtggtcgtggctataggggttcaaatcgaggaggaagaaccaacaataacaactatggtggcagaggtagaggcacaaacagacccacatgtcaactttgtgggagaattggtcacactgtcatcaagtgttatcacagattcgatataaaatttacaggcccttctcaagaacaaggtgcttcaacctccaccaccccacctgaacaaccacaagccaatctttctcaggccatcaccaccacaccagatatgtcctcagcttggtacatcgacagtggggcaactcaccacatgaccaacaattcagacaatctcaacacatccaccgattacaagggcaaggctaaagtcatagttggtaatggttccactatccctatcttaaaaatcggttccaattctattcatacacagtcacataatcctttaatcttgcaagatattctacatgtcccaaatgtttctaaaaatcttttgagtatttcccaatttactaaagataacaatgttactcttgaatttgatgatgtgtgttgtcttattaaggacaagaccaccaagcaagttcttcttcggggtaatgtccatcaaggtctttatcaactcaaagttctcacaaataagccacccctacactcatctgtcattactgaagtctcctcttccaatcctagtgcattcaacttcaccaccacaagcaatcctgtgtatgacaaaacaaaagtctctgatgtttggcattgtaggctaggacatccttcctttaatgttctagctaaagttcttgccacggtttcacctcaaatcaaatgtaataaaaatactttttgtgatgcttgtcaaattggcaaacaacaccatttcagctttaaaagcactcctaataaaataaagacttgttaattaccttctagttttaataatgctcatctaggtgagcattgtaattaatatgttaaggtgacgtttgagtgtggctttaacttttcttgatcaaaattaggtttatggtactaaatttatctgatttcaaattagaagaatattattgaaacacactatttcttcttctttttttccttttttttttgtttttctttttttaataacaattaagaaaaaatttgaatttaagacctcttctttgtgaagagaactataaaaccactagattaaacttataaccacaaaaaacagtactaataaatgagtgtgactgtgaaaaacactatttcaataaaacagtgtactaagtgaaagtgattatctaccttaatattatgagcaaaacttttcacattgttgaaattgattgacaagtagttgttcatgaaattggtcatacacaacaaatattttttttttctttctttaaacatatgcttgtttcgttaaataatatttctattgtctttattaaacgagctatagacaaagcaatcaattatttgacccgttttacttcttatttttcaagtcatcaatttagtgagactttgtcatgcttttcaaactattttgttagctaacttgcttaattaatgatacaataaaattttattttttt

SEQ ID NO: 39419 - DNA, 5981 bp, Cannabis sativa
acggacaaataaaaaacatgaccttgaggactattgccgctatttttggaggttggggacttagctgtatcaaactgaactttttggagacttttgcagcaaatttccttttatataatatgagaagatcacaagttaaatctttgtggcttggctaagatgaacgagacaagtaaacagcaaggaagaatgagttaagtggaaatgatagataatgtgttcattaaggaatttttttttaaacccacatactcgtgagtatgttaaaaaactaaaggaaataagcataatacaaattattttaaaaaagactaagtctaagggttgccctaaaaaggctatagcaaggataaatccttaaacaagcatctcgcaatgtacaatcagctatccttgagcacagtcgagtaatgtgagccataactgagaacatgtccactcagtaaaggctaatagtttgcagataagaacaaaaggattgttactagcagttatttgattttatctccatattgtaaatgtgaaacaaacggttacttagataaaataaaaaaaaaaaataactatcattcctagaatccttaaaaataggaatagaacctaagagaaagggatgaaatattttttagaaggagaaaccttgtgagatagagtgtatattcatatttatttctttgtaatttaagtacatttttagaattatttagaaataaaaatgactcatggagtatgtagagataacttaaaaccacataaaatctattgcattcaatatctatatatttattaaagtataagcattggcttcatatattgttaacaaaaatttgggtttaatttggtgctttcattaaagcctttgtaaaaaacagaacctgaaacacatatctcttttgtttcatcacatcatggaaaacactcagtatgatgagcgtgttgtggaagaagaaacaacgcgacgaccaagaaaagagccctaggaggcacatattcaaaccaaccaaggaaggggtcctgctaaacaaaactctgagaaaagtgaccctgaggaagaaattcctgagagaagggagtcaaatacatatgatcccacaagatatgttcccattattgaactagaatattgacaactccatcaaaggcttagagagtttaattgaaggaatgaagagttggaaaaggccatggctgctgctagagctactcaaaaagatacaccacctgtataggaagagcagaccgcgcgatgattgcgagggaggccccgttgtttgcgaaccagaaatgacaaaaatttaaacaaacaaccatctaactagcctttgcatttccctccactgtggcggacggtcgttcaggcatatcaggttccctaatccttatggcatgctccacatgttcttggtcactaggagagccttcttcttcttcttcttgctcagcttctccttcttgatcaccttaacctggctaggctttgccttcttctcctccttcacaggctttggcacaaagtcctctgggaagagcttgtactaaacataaatggcctcagtggccagtagggtgatgtttcgagcagcatctggcagctgaagaattctttgtgccctctccctgagcctcaatatgtgaagggaggggggaagtataaaggaatttgctagaaccgagtgtggacggtatccatgccctggatgaagtagtactcgtccataaaatatcctatatgcccgtcagccacttctccttgagctgagaataatagaaataccccgacttgctatgcttgggagttgactttaaatcaaagagccagttgatgtcttgcggggatggctcgccccatccttgtgaggcataaagaatgaataggacaaatagatatttgatgcccttccgagtgaactgggttgggcaaagatggtagtaatctgcaattctcctaagtacggaagcaagggcagcattgcaccctgcttagtatgagcctgaccaggcacagtacccctcctttagattggttgtctagtggtttggagagggaatgaagcatttgacatttctcaagtagctttgattctccaaattcttcatttttgcctgggttaatatagatgcagcagaaacccactgagatcctactgcactttatcttttctaaggaatagcctcagtgtattcttcaataacatagtcctcaccggcctcacggatttcatcagcctcagacacaggttctacatctttgttgaacccaccaaagggaagcctccgagctgctccctcctccttggcttcaggtggagtatcagaatgaacctcgccctaatcttccacctcttagactttagcgtccccctcaaggtcttcctcctcagtagcaggttgagcttgctctgcactcagcattgtggcaagacgagctacgtgagggtaagttagagaagatggtcgcactatttgtttggtgcgtgcaatcatcctaatactcctggacggagcttgattggtatgtgtggaaataattatagaaaatgtagctatgggaaatattgcttccaccccttctttagctcctaaataaaacaatcgtagccttcaccttcgatccaactggtgtaaaaatggtgatgcacctctagttctggaaaaggtgtatgttcgctgcttatctcccaatcttcgaagcttaaattagaaagactgtcacttgatgaggacagactagcacagagacgagggtgatcctcgtacagatgttgaagaagatcctggtcgatatgatgtttgcttcccaaaaaactcactagggttcatatacaaaaggtaggacacaagatgagtatttggccgggataaagaacgtaaataaatttgttatactgaccaggtcctatccaaggatcaaaaataggattcttgcctgatattaaggttcacaatctaaaatttcaaaatttcgactgaagggttaattttcactaagcccggaatgggcaagtgaaaccaaatatcctggaatcaaaatcaaagcgtagttataatcaaacaacatggttaagcagagtcaagatttcatattcctaaacctatgttttctatggttttcatagaactagaacaagaactttcaagtttttttatagtaaaaacccagaaaataaaatattcaagcataaaataggaaagagatgaagaacttactcactgttcaaagatttagagttgctcagatgatactgatttgcatttcctggggattctttgaaggatttacaggaagagatttctcgctctaaattcttcaagaacgaaaaatgctaaaagtggttgattagggacttctgccctattaataaactaattagtgaggtaaagtagtcatttcaaaatttgaataccttgatctcaccccaaaactatacgttaaagcactcaattacctgaatggtaaccgtcaaaagtgctactttttgggcgtggttcgatgtgtatgtcagtcagcattaatgagcctaatattgaagagacccttggtcaaagtcaagtcagattgccaatagatgtttcgaacacatgccaccggtttaggtaaggatccagaccgagtgaagtccacgtgcgacctcagaggtcctgcgtagacttgggggcaaatattatcacattctttgcactatgacgtggcaacacatacgagtgacacttgtccaacattccttgcacctaagcggtgactaatatctgaatagacttcaagtagcccatctgcacgcacaatgtctacttactcgagcggggtaaagggcagactacccgagcagaaagcaagtttggtttccgaactatttaccaggacttgactactttaaaatgatattgtggagtccaagtatgaagacaatccctacaatcatcggattgaattagagggatacggcaggctatctcaatcccttattttgtgtattctatttatgtaatgaatgttcattcctattatagatattgtaagcaaaagggaaaccttccctcatgcattaaggccctataaatagtgaactagcttcactgtaaaagggatcaaaagaattactttagggagatatctaagagaatcacttagagattttattgtaagagctttgagagagaaaacactgtgttctttgttctcaagttaatacaatctaagggtagtaggctattaccatactaaaggggtcgaacctcttcaaatttgatattctttattgcttaattttttttttgctttatttttattacatttttaatctcttcataattgactcattgtcgttgactaaaagtgaggtcaacaaaagaaaaatttgaagcgtcttctgggaacgtggtgcctcacctctctggtctcgtggtgccaaatatgtctttcaggctcggtctcctgaaggcggaagactttgctagagtgaaactacaaaatgttccgagaaggtaacatctagatgggcttggcccgttttatcttcagtaagggtccaactgataagtcttgaatgtttgtctggagttcacgtgtccaataccaaaaatacggataacatgattaatctaagtgaagctcaaacatatactcttatattatttttctgcttattacctttattatattatgatatatatattcatcagcaatagatatgatttcattttataggtctttgggtacatatattgggatgctcttttttggtgagcatggcttcccttaattcccaaattttcttgccaagtagtgtttcataagtgatttatttgtgaaattagaaaaattagtttctcttttctacttgaataatcaaaaattataattcttttgttcttgcaattcaagagaaatcatccaagacaattgtttattcattggctttatttggcattaaattctcaaggcttaatgatccactccctcttgccagctagaagggattcttagaatttgttggcacaagaggttgctttcgatttggatcaaatacaagatgctgagttaatccctactttgttatcacctttaaataatctttctttgtgtcccattgctcatagaagagtattggaatttcaaagccatggaaatatattttggtcgattggtgatgagagttcaacacagtggattaggatttttgttgattggtggtaacttccttttcaattaaatcaccgccaagtttatttcgattgcttcagaacagtttgctgcttggatgcaattttgctaatttaatgctcttttaccattaatttttgatgatgggagttttattgtgagctagacttggaagattgtctcctttttttgtaatttggtaatattgacttgggcttacattgctaaatgaggagcttactgtcttgccaatgttaggagaaagatttggactaatgcaatttgacttgcttccttatgatgtttctttaatcttacatgtatattatgttgccacttataatgtgaagtggtttaaaaatatggtattatttgaagaatggcagcagtttactaaggttttattcctatttcttggagtcagtataaattttcgtaccagatatgcatgttatatatatatgtttgctatcctattctgcttaatttttgttgaaaattttagcctgtttatcttctttgtcatgtctgacactatcataaaaattcaaagagtttgaaacttgaaggaatgccattttttttttcttgcttaataaaagaatgggaatttgatatctatttcatgctttatataggcctaatgcatataattaaataaaggtgtattgcacgtaatattaagttagtatttatataaaaattataaaaattgaataacgctgggcaaagtataatttaatttcttaatatttatatatattaaaaactaaacatattattccatttttttttgtcgttcctaacatggtttctaaca

SEQ ID NO: 39420 - DNA, 2078 bp, Cannabis sativa
  modified_base (809)..(811): a, c, t, g, unknown or other
aaccgcgcggtgcagtgcagtttgaagttttgaatttaataattgtcggttcaaattgtactgcattatatgttacaaaaatattaatttttacaatatgattttttttttcatatatgaacaactcatatgttttacaaagctcaagttatacaattaaatttaaggaaacatccatataaattattctcattcattttttattcttatttctcgtattgtttacatatgtatatgttatgacgtcaaaagtttaataagatttttttatatatatattattggaacttttttgaaattaattataagcttttattataatatttgataatgacgatagtgtaaactacctaaattgcattgtaatgcactatatttttgtggtgtgtttttttgtgattttaagattttgcgttgcgattggggtttgaaaaattataaaaactgtatatgctgtttgatttgaaaaagtggccaaaatccaactacccgcactgaaaacacccctacttttcatacaagttatgtaatactcattacaatggaatggcattttttttttgaatgaaaaatgcatctttattaaccattaaaatccgctaccaaagacggtagcaagtcgaatggaacagtctctatatcgaaagtacaaccagggaaaaatatagaagctcttgcacaattatgagctaccatatttgttgatcgcttaacaaataaaatagaaataatttttaaatcggagaacaactttttacaatcatgaataacttggccaaataacgaaatcatgtcaaccgagcttcttnnngcttgaaccaccgtaagacaatcggtttcaagtataacattctgccacccatgtgtttttatccaactcaaagcttttagtacaccaatagattctactaattctggtgagaccatacccgagaagagaagtgttttgccttcaattagaatgccatgatgatctctagccacaaagccacaaccatacttgttaccgccatcaaagaaagcagcgtcgacattgaccttgactctattttcacttggtaccgcccattgctcagctctgtcgcttgtcataagacccgaccatgatgtctctacaagagaattttgagtattactccactgatcaaggaaacccgttgccaacactacaattgttgatgcagtagcatttttttttctgccaaatgaagtcattacaggtgttccaaatcgcccaacaaagcaccagcagcagtttccttttttctgcatcagccgcaacgaaggacttgctgcaccagtcaagaaaactgcttacaccagcagctgcagtttgtgacccaatgcctaccctttcccaaacatgttttgcccttgtacacatgattaaggcatgttcaattgacttatcagcagcctgacagatcgggcaaagtgtttgaacatccacgctcttcaatctcggatgttgcaaagtgggcaaacactccctaccagcgcgccaaaccaaattttttaccttgggagggactttaattttccaaaattttgtccaaaactttgtttgctcatcctcttcttggtgccacctgcaatttaatttttggagtagcttgtaggcacttttaacagagtataatcctgaagtttcatagatccagttcaacttatccctgccgtggctaatattcaacggaatgaccattataagcttcttgtcacgatcttcaaacaaatcatttaaaatttcaacatcccaacttccacctccaatttccaacagattactcacctttgttccaaccaaactaggatgagttgaggtgatgaaaggatgttcttcattcggcagccaaggctcgtaaaggacatctatatcttccccattagcaatacaccatcgagtttcttttctaactagatcttgcacttcaaaaaggctacaccacacaaaactcgggttattccctaactcagccgtgaggtatgtaccattagaaaagtatctagctttaaggatttttgcaaccaaagagttgggccgaatgaggagtctccacccttattttccaagcata

SEQ ID NO: 39421 - DNA, 2871 bp, Cannabis sativa
  modified_base (2826)..(2834): a, c, t, g, unknown or other
agtagttttcttttagttaaggattgtttcaaaacccgaaacatgaattcttaattttattattgaatattaatttttaatttccattatgtcaataactattcttctatgttcaatgttatgattcttgttttaatcttgtttagaccgccgttaaattagattttactttaatctaccatcatcttaggattactattcacctaatagtctaggattctaagtgtttgtgacaaattgcaaatttaattgtgatgaagaatagaacttaggttaaatgagttatatgcttcattgatttgcctagattagtctatctccataaatctcaaagctttatctaagttaaataaattgcattgctttcgttatacaggtaaaagagttaattattgagcctttcgccttgattacatacaatagggagattgagataattgactgctttagcgttatttgcgggattaatagtttgattggaaactgaaaatatattacattatttaataggaattatgaatgactgttgagggtggagaataacctttaactagtttctcatatcgtagtctcactttaaatttgttcttttcttaaatttttgtttttgctattttaatttcaatcttaaaacccttattttctaacttttgacactaatttctaaataattaaataaacatagtcctcgtggaatcaaaccttacttacgattatactaaaataattggaagtattggaattaaaaaaatagtaaatttgttgtggcttacgacacgcatcacgagtatatatcttgaactcacactataattttataagttccttggaactttttggtccatcgtgttgttttatcacatgtgttcctttagtgaacaggtgtccaacatctttctcataccacacttattgaagtacctaatcaatggtacatttaatcatcacttttaaacaaacacttcgtcaatggaagaaagtattctaagataatctaacctttatcaaatatggctcacaacatgtttttaattattccattgatcctcccagattagccacctttcaagcataaaatattgtactatttttactttaatccccatagttctcgataatcttcattaattctaaatatcatagacaatgatatcaactttgaaattttacaagattagataattccttcgtatgaattccatatcctcatttattgtacagattgtctgcactgatagacaacatattaactcagcatgcccaatcgttactactcgatcaaaaccataagatcccacaatacataattcataattgtgtctttctgttcctcctatgggacctcttaaacaaatctactgaattaacttattaacaagctaagtatttatttctgatagatattcaattagagaacttcttatttctactcattaacatatgcttatctcgataccttgtaaatctttacttatttaatcttatttatctcccctcattttaacatacatccatttcctgagttcttagctaataataattgatcaaagatcattccttgattttaaagttccgtatctgtgttaggtagaaatcttaaaattccctttttaacacatccagaaatatgcatatatcaagtatattatctgttttattggcaatcccttggtgtgaactatcactccaacttgtagtgagtctcccatcgatggtattgattcactaacatttaagactctcatattcctttcccattattaccactaaggtttcactccatgattcatacgttattatttcttccttgcaatcatcactatctccatacttgattaatcattctaaaaattagtttaccctcaattatgtagtccattttttttataaacaacctactttgtgattcaacattcaccaatcactcgaatacatatccataaatcgcatctcaatttataagcttttttcttattctaggtgagtacgcatttccatcattacttaacaaagtaatctttttccaaaatttcaataatctccttatataccatattgactatccagtcagctataaaagtactttccattattaccgtttcaccataagcaatccaggtaatcttctttactttagtgataccactactctccctaacgttattttatacgttaccctggcaacgtccccgcttcaagtctacattggaccccttacacccatggaataatggctcttatacaagagtgcatcactttagctacttcctagattgacgactggccctacagaccgatccaagtattttcaacgtgctttattctaactcgcacacttcacggggaaacttcctaaatgtaatcaccctaagtcaaggacacttaactgtggagttccttcatgatgggttaccgaaataggatacttcttgctaatataggtagtcacaaacaattcattcaagtcctcgacaccatgtagtcccatgcatatataatctcaaaatcactccataaaacctttccctaggcaatgtggattatatagctcctcgtctttccttcgcagatcacggggctctaattgtcacaacttgactcatgccccttagtagtgaatatattcacccacacaatcgtcgcccttaattcaccaaaggttttagacaatactcataaattgtcccacttatactaacactagatcactttatattaaaagattttgttctccaaatcaataagatggatacccccattaacaactcatacatataggcatggctaaaggatccattcattcggatcggatcaatgatccgatcnnnnnnnnnattactaatccgaaacattcggatagttattggatct

SEQ ID NO: 39422 - DNA, 2453 bp, Cannabis sativa
tcaagtgtgtcgatcaacttgaatagaaattcacgcgctgaacggaagccatatatcacaattatgtaattaggtaaacaacttggtaaaaccttctcgagaacctaaactcaaaactaaaaatttttctagcatgaaaatgccctaaatatagaggaatcacaaaaaaacgagactttagaaaaactgtaggaaaaacagactatttttctaggcaatctaccagtctaaacggtagatcgttttctcaaaaacgacctgccgtattttgctgcagaaaaataataagtttcaaaataaccccaaatctcgtaaatcttaagacactctccagaacatctaattagggcctaataagcacaattcaagcattaaacacaagtatataactcaaaattcccaaaattactattgttgagtcaagtttgagttcttgaactcaaacttgctcagctcaacaatcaaaccttaaaaacacatcaaaccaactctaaacaactcaacaaagcttaagaaccaatcaccaaaccacttaggtttggacaaaaccaaattgcaaaattgcatgaacaaactaacaacctttcttcgaaaaaaaaaaaacacaaggaacaaaattttagtgtttacctttgctaattcttccaatcactactgatttcttttgatttttcccagttaagatgactgaaaatcaaagggaaaacccttggttcctttgggttcaagaagggccaagagagaaactaagagagagagagagcgtttaacctttttttttgttaattctagcttatccataaataattaaattacatataatatttagatcaacacaacataaggaatgcactataatttcactaaaggacaaagcctaatcttaggcaaaacttccaataatgcctctacgcttaaagcttaaataagctaattgtttaggagtaaaattgtccaataccataaccctatcaaatctcaatgttctaattattacttataatttttccactaaataaaaagttttaaactaactcatctgactctaacggtcaattcgttacattttcattattactgagcaaaaatcataacaataatattttttacatatgacatatataatacacttaggtggcgttttgattgggtggaatgaaaatataaaaataggaatgggaaaatgaataggaatagaaatggaatgaataaaatttaaaatgtataaaaaaaattgataaaatgatcattaaattttttctcatgttacattggaatgatctttccttttattttaaaatggaatagtcattccaccaaaatggtgaaaagggcattccattggaatgacattctaatactttaaaatgcaaccaaataaagaaatgaaataaaaattgtttcctttccatattccattttatttttttacctccaaccaaacgccactttaaagtttaataaaatctccaaaattgaaaaattataatcataatgcttatttattgataatagggcccaaatataataatttagattttttaagtaaacttaatactttttaatttattcatatttttatcaagtttttaaataatatttattaattttttagaattaatagaatattataatttttaaaattaaggttattgggtgaaattttgcatttgtcaaaatttatattagggggtaaaaatactaatttttaacggtaaaaagaaaatctaacagaagagacataattatataactgttatattttagataaatttttaactaggtgtatattttagagggtagggtcagataatgtcaaaaatttaggggacaaaaatattaattattctaaaaaaaataagatttttgtgatatattttagagggtggagtagagaagagtactcataatgtgcatcaagacttattttttcaatacaaattgtattattaaataataaaacatgtaataaataatacaatataaattcttgttttttttttactcaatataagaccatctctaatgattagagagatataaaaattaggatttttttttttatttttacacttcaaaacaattttttttcttcgtatttttacagaattctacatagaaactcatattgcaactaacgctgcaatttaaatcgcaacaaaaaatcgtatagcaacccacatagaaaccacctaagaaaccattttagagtaaaaaaaaaaaaagttaaaaaaacagtatacggggtaattttcctataaataatataatatttgacataaagctattatttgttatgtttttaataaaaatatttaattaaacattaaattttatattacttatttacatcttcgttagagatactatagttataacaatattttacatttttttacttgttataacgaatatgttatattctttgcgaaattttaatattttttactata

SEQ ID NO: 39423 - DNA, 2567 bp, Cannabis sativa
tcacccatatttaaggcgaggtcatcattctcagtttcattggtggtacgcgaggtatatgcaaaaatttcttacacttatcacacttcttgacaagttcatgggtgtccttgtttatgattagccaataatatccttgtctgataatattttttgacaagcttttccaacctacatggtccccacaaaagccttcatggatttcattgatgatctctcttgcttctgcacgaagaacacaccgtaggaggggcatcgaatagccccttctatacaatttgccttctactatcgtgtagcgaggcactgaatataggagttttcgtgcctcgtttttgtcagttcgaagttgttcgctgagaagatagttgattatgggtgtcatccatgtgggcgagctatctatcatctcgacatcttccttttcgcatatacttggctcgtttaacatctccactagaaccaagttcaattcatccaattcactatgtgtggccaattttgctaaggcattggcattatagttttgttctcttggtattttctcgattttgaaataatcaaacttttccaagttcttccaaactttcttaagtactttgccatttttaagcccttagcctggtattccccgagaacttgatttacaatcagctgtgaatcactatgacataggagatttttaactttcaacacttcagctatcctcaaaccagcaatcaaggcttcattctcagcctcgttgtttgacgtgtcgaattgaaatctcaaggcatagtgaaacttaaagccttctggtgaaattaatatcacctctgcacctgagccatgctcattggatgcaccatccacgtataatttccaagtatccgcttctcgttgcacaagcggattttcctctggagttattccttctattaagaaatctaccaaggcttggcccttgatggacgttcgtgggtgataagttatgtcaaattgtcccagttcaattgaccattttatcaatcttccagaagcatctggttttgataaaacttgtctcaggggttgattagttaacaccttgatcggatgttcctgaaagtaaggtcgtaacttgtgagatgtgtggattaggcataaggcaagttttttaagagggggatacctcggttctacccccagtaacctcttactaacatagtaaacatgttgttggtgctttccctcttctcgcgtacgtccagtcggatagaagatagtgtctccaccccttcttgatttcccaaataaagcgaccatatctttgaccttggatctagtcgggataaaaatggtgttgcacctcgggtcttggggaaggcgtgtactcactacttgtctcccaatcttcaaagctagaattagaaaggtgatcaatggacgaggacggactggtacggagacaaggatgatcctcgtacaacagttgaagcagatcctggtcgatatggtgtttgcctccccaaaactcaccagggttcatctaaaaaatgtacgagactagaagatgagaaacgaataaaaaacaagttgaatataccgactagttcgattgaggaataaaaaatagaattttcacttagaaacagaattttcaacccagaagttcaaaattttgaattgaagtctgattcttactaaacctcaaatggataagtgaaaattaatattgtggagttaaaatcaaagcgcatatataatcacacattgtggttaagcataatcgaggtttctaagtcttaaacctagaatttctatggttatcctagaacaggttcaagaacaatcgagattcgcagaacagaaatccagaaaattaagcatgaaaatgtataaaagaaagaaattaagaacttactcactgatttgaagcttttgatcttctcagatggtgctggcaagagtttccaagaaattcttcgaagaatttgagagagaaaaacttcttcgctccagtttttcaagaatcaaaatgactaaaatgaataattagggtttttaatcctatctatggacagctcgaaaggaagaagtaatcatttcaaattttaaatgactcgaattcccccaaaattgtacgttatgtactcattgttggcagaataatcgtcttcacgtgtggacattaagacgcaattcgagccaaaactgtcaattagcattaatgagctgaaattgaagagacccatggtcagagtcacgtcaattcgtcaatcgacccctaggacacgtgtcacccatccggacaagattccagatcgagtgaagtccacgtgcgaccaggaaggtcccgctcagacttggggggaaaatgttatccaattttttacacattgacgtggtaagatgaccgagcgacacgtgtctcacattttttatacatgggtggaggtaaatgtccttagcaacttgcacataagtcgtcagcatctatgattatcgatttcctgagcagaggtgtaaagaagacattcgaccaagtagaatttcaatataatcagatttactaattaataaatatcagaaatcattttatgttgcat

SEQ ID NO: 39424 - DNA, 1964 bp, Cannabis sativa
caaccggtcgaccagttctggcatacccaaaaattcgagttttcttcccaaaattcaaaccaaaccccctccaaacctgtccaacagctccagaatagatgaataacatatacacaatatttacaaagcaccatatcacttcagttcatcaaattaaagatcaatagcataattacatagaaattgcctcatatcaaaccttcaattctctaacctaacaccagcagtcctatttctacccaaaactaacttaaacaagctttaatctgaacctaaaaacaaatgttaatctcaattattctttaattgtaaaagtcttgaaaccctaacctaaaacctaatctaagtctaagaaatccaaaggaaaagcaccaagaacttacctcttgtgtaaacactcttactcttgataaattccagctgaaaatggaagaaaaactccttggttgtggctgccccttaaggtttcgaatggtagaagagggaggggaagaattttctatgtttcggctttatcccttaattacataagataattgataacctaaatttttatatattaatattaacttaataatcagcctatttactagaagggtacatagaaataaaatagggtaaaatgactattttacccttccccataaaaatgaagctatagaataacctaggggcattttggtaattctaactaatccgcaaaaccgacaacccaacactttaaactagtccagaataaaaatctaatttatattttattatcgtgacatatttgactactccgtcaaattcccacgatcgccgccttgaaaacatttattctagaaatggtatccacgatacccatatatttcaattgttatagatcaagacctaccggtacagtgtggagtaaatgttacacgcttatcctaattagggggtatttcagaacgattgtagagtctgatcaggtagcaagaactagctactcagtggattgctcaaataactgtaattctctatgatgatatgctttaaaacttactcgatctttatagatcaagacctaccgacacaatgtggagtaaatcttacatgcttatcctaagtagggggtatttcatccacgttagactttgtttagtaaaattagacaaaaatttttaactctaataatctcgttagttctgagcatgatttggtacgtaattcagtggtcaaaaatctaaattagcctattgaatatttatgaggaattatatgaaaaaaacattaaaataattaaaaagtatagacatttatacaatttaataaacataaacatgacaagcttatattatttttaataaataaaaatgaaaaaaaatcatattttccatcattattctctaaaatatatatacaagtgaaattaacctatcataaaaatcttatttaatatgatgcaactattgatgtgctaaaaaataatttttatatggtaaagataatttaagccgctaactctttgaatttagtcacttaattttgttaaaaaataaataaaaaaaaaagttaacagttaaaatattactttagtaatttattaattagttaaatttcttttgccaggtgaaaactcaaaagttcaaacacttatttatagcctagtgtaatgggagttacaaaacttcatatatttattatttattttttaaataataataataataatgaccattggatgattattaatcatttaatccaatagtcaagaaatatataattattatttttttcaattttatttaattttattttttgctatataatttctcataactatcatttctgtttctctctttctttctctctttaaatttgtatacactcttttctctcaaaaatatttttcaagttttaaactttaacacataaaaagaaagagtaatttgcggtataaatacctaggtttaactcccagttgtaaataaatacataag

SEQ ID NO: 39425 - DNA, 1267 bp, Cannabis sativa
  modified_base (26)..(27): a, c, t, g, unknown or other
cacaaattttttaaaactatttttannttttttcttactaaaaaaattaatattttaacaccatacacatgaactcatccaggttcaggtttgggtatgattccggatctaggatccaagtatgcgagcaaaaatataaaatataatatgttagacaaaaaaaaattatttttgaaaattgaaacaacattttctgttttttagttttaaaaaattttgccaaacgacctctattagtttttaaaaactgttttcagttttaaaaaataaaaaacaattttttaaattatgaagccaaacaacctcttattatttactggttatgtgggcatatctaaaaaaaattaatggaattatgatgtgaataagctgaaaataagatttgattaacagttgggattatctaataattgtgctacctaacttgttggaaatgttgaggctcaaattttgctttatctgatcaacttgacttttatgtctggtgtcattgttttagtgttgtgacagggttagtgtttggtaaaattactcgaaggcaagtaaatctcaagtttgggagaatttgataaacgagatttatactcgtttattaagatagtttagaacatcttttagagtattttatgtcaatttggttcagttttatgtttgttttcttttgtttcaagaaaatattataaaaatataaaaaatgaagattcaagttaaatttgtggaaaagcaaacttaaatggaattacttttggtttggtggtatttgggagcaagaatggagcaaggtgcgaaaatttgggaaactagccagttagagccatggctctaaaagagacaaatgagcaggataagcccatgggatgcggctccaccatagggggttgcagaagcaaaaatttgaaaaaaaaaaatagataaaaagattgcgaaaaaatatgactttctcaagtagagttgtgatttcggtaccctgagttgcagttcctgagcacatttttatcttttcaagtttaaattctaaatctttttagtatcttctagagaactttgttagcctgtataaattctaagagtgtgtttggaagtaactgtataattactaggtaaggtaattactagggtggtaaatacacagtttagtaattacactatattttaaaatgcaaggtgtgtttagatatgatatggtaattacatataaattcctaatatcttgtttggcaaaataattagtaattacatgggaaaataatattttttagtagctaat

SEQ ID NO: 39426 - DNA, 3240 bp, Cannabis sativa
  modified_base (31)..(40): a, c, t, g, unknown or other
aactagcaatacgtggctcggcacgtacatnnnnnnnnnntatatatatatatatgaaaaaaatgtttccttttctatacggatataaatcgtccaagccaatgatccactaatatatatatgtataactgtagacacacattacatacctcattatattctaattttgtctcattcttattcttattcaaagtgagtccgtatctcttcttaacgttatttttcatattgaatttggtttcttattttcttcattctaatttacatattgtgctagactacttattctttgtatcttgatctgtgaagaaatggctcgtaccaagcaaactgcccgcaaatctactggtggaaaggctcccaggaaaaatcttgctaagtacattgtgtgtatactctgggagactttctttctacgtatagaggattattattcaccattgttagcaagtttgtaatttctgatcaatcatttttaaaacttgtaggctgtaaggaaatcaactcccactactggtggagtcaagaagcctcatcgttatcgtccaggaacagttgcactccggtaattttctttcgaaacttactctgcgaattgcttgtctattttagttattatacttctgttaaaccctaattcatgtgtgttttaatgtctccaattggctttagcagtttaatggatttttcgcatattataattgcggaggttcaaatggtgaatatttgaattgaatgaacttccattataatttcttggagtttaaatcatcagatctgtgccttccttttatcatttcagttctatagttttgactttggccgaatttataagtaagggtaggtataccataattgttcatgtacaattgacgagtctttatgtttgctgaatgaattgattgttttctgggaatgttgatacattataaattgtgtaggaagattttacagttatctcagtctggcattgtgctgacaacttgtactctgatacagttctatctctttttccccttttcccaattgtagataatttcgtttctggttattgtgtgtctgattaaaaacggttcttggttaatagttaaattaggaagtaccagaagagcactgagctcttgatccggaaattgccattccagcgccttatttatcagttcagtttgaagttgttattgggtggtgttgtttcaggcttaaactaatattgtatttgttgtagactgatttgaggtttcagagccacgctgttcttgtcctacaagaggctgcagaagcttttttggtgggtctgtttgaggacaccaatctgtgtgccattcatgccaagagagtgacgatcatgcccaaggacattcaattggctcgccgtatccgctgtgagcgtgcgtagagtctagatcggagttatctaacgtattcctgtttgggatacagattaaataattttaatgtgcgataagcatttggatcattttgctgttttactttttggaaccattaatggtgcaattatctgaaattgtgatacgtaaataaatactctgttaaattttcagagttagatgtcattctcttctcctttaatggacttatattactgttagattaactttgccatattcaattgttggaactagctcgacgttgcagtccaccccactcatgtttggttaatttcctatatatatgttaattggaaagtcagtttatataatatatgctaaaaaaagtaataacagtattataaatttataaccttttattaatatactctgaccctcacagttttacctgacatgtgtaatcttgaaataacatacaatattgccaaagtgtcatctgatttattcaaaatttaaacatgcacccatattatacaccataccaacttataaaaattaaaagataaaaaatcaactgtactctgctagcttgaattcatttaggtgcacttaatattggtaagaagagcatgcataatgtcaagaaagagcgaaccaagtgcatcacaaattgtccacaaactcattgagaaagatgccatagataggactgtcttcttcaaataatatatataataattatggaagaataattacttaaaatttgatcatgtaagtatgtacgcaactattcaaataatacggtgttccacaaaataaagggggagaaacatagaaaaaaaaactacgtatgtggtgagatgttatgatgaaattggacaattattaatccaattccacttcgctataatgcggaatagaaagaaaaatgtgtattgatcttgaaagtgaattgattgttacaaaggaaaacagaggacatatatatacaaaccagaatattcaactgtgactaaactaccaccgacttaacctataactaactactgatacatagcaaacaatattactgaccaaattattgaatttgataaatctgaaatttggaaaagacttcacgtgaacacgaaaggcgaagtggagggcctaactgtagaaattgttaaacggattgtaagttccaagtttaatttcatttaattgttatgcttcataatttatttttaactctatttgttttgtttataagacaaattacgtaagcaagtggaagagggtgttgtacaagtgaaaggtaaaagggacgtgctgatcatggcgctcgggacagatgagcatggtggccgggttcgagccatgggtttcagcgtcacccaaaccaaatatttcaacacaccacgccctaaaagaaaaaaatgtcgatgggtcgaaccagacatcatctgatttggagagaggcgtgcgtgagacagaggaaagtaacagaaagttgcagaataaagtggatgagctcattcgtcttataattagttcccagccatagcagcgttgcatctagttctggtggtggaggagcatcaaatgagcaaccccatattgaccttgcctccgatccagtagcacaactaccgcgtcctgccaatgtctactctgcaccagatcccatagcacaaccgtcgggtgctgccaatgtctaccctccaccagatcccgtagcacaaccgtcgggtggtgccaatgtctctactccatcaccactgcgttttagagaggagattgctccagtactagcagcaccgccatctactggtggtagttcagaagaggtaatcttaatattattttacgaattaatctaatgcaaaaattataaatatggtcaacttacaaa

SEQ ID NO: 39427 - DNA, 2276 bp, Cannabis sativa
ccaaggcgagggggaggaggaagaaggtatatccggggggggagtggaagcaaggctgagatggtaaccagatttagccgaatagacccctgattgggagtgttcccatatgaactcgtcggggtgggggttaaaccaaactacattgtagcctagtttaatattgttttaaattctatatttgtaaaaattatcaatgttatctattttgttaaatgatcatagaataaattttatattttgaaaatagtacaaataaattttaaattcaatttttgataattttgtttttaaatataactaatttgaaaataatttataccacgaacaaatggaagaaacgtcaataattttgtcataacatttttatattgagttattattcaattttatttttttaaaaaaattaaatttagagtcctatttagtattattattttagaaaatacaaggttaattttattattttggtattttttttttttataaaacgcaagtctaaaatagtattaatctttgtacaattagtataggacaaatcgaatttagtgagctaattaagcatggcttactctactaaaaaaactaaagaaacaatttggtgcacacaaaaataatataaaacccaaatagaatgtgatagtgtacactcattaagttataatgagaattaatgtagttacatttaattaatcttaagatttaataaaagaatagtatttcttatttctttctttcaattatatcaatatccgatttatatgatttttactcatgaaaaacctttgttgttgcagcactcatctaagtgaaaaataaattttatactatttatttgtatttgttctaactaatgttagtatattaaacaccattatacttaatttttaattattgtattgtaattatatatgtgactcatgcccgtatcgacaaattatttaaaaaatgagcgaaatgtaattgagtgacatatttattataattactatataattcatgagagattttttataagatcaaaaaaacaaaaaaaaaaaaagagtgaaaattctatttgtaaaataataataaaaaaaaattaaaactcaacaacaagtttccatgttataatatttatgagtagagaaggattgaataaaataaataaataaataaatggacccattaatagttgtaaaagcaatgaatatatatctgccatattattttattttatggattattaggttattggtcccctataggtattgatattgagaaccaaaaccccccaaaaaaatatataaataaaaaataaagaaaaataatgaaaacgtaaagccatttttaatggcttgtggtaaagacctgcccaagtccaggctaatacaacctctttttatagtattccatacgtttcacttacatttattaaaaacacacttgaaataaataataaaataagagacactacaactatcgagaaaaattgacaaaaaaataaaaaaaaaaacaaaataaaataagtggttttcatagaattttacatattttaatctagtatcgagttatattgttatatagaaatttttgattgagtctcatagattttgattacataaaaagaaataataaagtattaaacactataaaaatgacatatcattattggcctaataagccatttagttccacagccacatattttgattaaataaataatataagaaactcctaatgcttacaatagctaatatgcatatagtaacatttttttttttgagagaaaacagaaataaccattaatatataggcaaatcatataaagtctatattacatgaagatatagctaaaagagcaaaattatcgagagtagacttatcaagccatttacagcaaaacggaagaaaactttaatatcaacctcaactaagaattcaataagccacaagcagtcaaacatcgaaaaaagtataaagtaaactggttttcgaaccaaatgaatatctaatatagtccacctaccaatgactataagctaatgtcttccaataaaaattgggacataataaccctaattaaatcacaaataagagaaataaaatcaccaaccaatgcttattcaaaaaagattcgagcacataataaagggtcaataaaaatctaaaaatctcctaaatctaacaccttagagcatcaccaaggaggcatcaaatttggtgatgcagtagaattaatcctccaacgtagctgcaaatattacactaaattgctgtgtgtgctacagtgcacg

SEQ ID NO: 39428 - DNA, 4213 bp, Cannabis sativa
atatatatagttcatgaaagtttggaatgagattactctagctagtttggattatggtataaaaagtgtaaaaagaaagacaaatgaatttaactcgaatgaattatctatatatgtatgtagtgccttatttatttgattcatttttactatcaaaaataaagcatataatatatcatcaattaatattaagttgttccaaataaaaaaaaaaaaaaaattaatattaagttgttttattattcttctatgacatgatcgaaattaaaatgatcatgagatatgtgtcatttctcaagaccgttatagtaaaaataaaaagtaatttctgcaatttttaactgctgatagataaggtaatttatttttgttttgttttttttttcttttcaatgtcaaatggtacatttatatttgtaagagaaactaaaaataagtacatttagtttcataaaagtttggaatgagatgatcactattcactagtgtatataatatatataatatataccatcccatgctagtaataaaagtatcaaaaaggacaaatgaatttaactttagtaaatagagtatatttttcggtatggactagtggaagtattttgatttttgatctcattttttatttctgttttttcaccataatattaattatttttatagtagtaaatcttttacaagttttcaaagagaagaaaattaaaacaatttacaatatcaaaaaacagagttaaattgaataaaagcactacttacgtattatggggctggtagttaagttagggcattcaaatatggctgacatatttaaatttagttttttcagtattataaacattaaaataataatataagatgtttttacaatgtatgcaccctttatttattttgacatcgagaataattttttagtctaattttttttttatatccttgtacgttataattatttatgatatcctacaaaattttaagaaattcaaaataatttataatatagaaaacaatgttaaaacaacttattttacacggtgtataaaataaaataatcaagcgtgcaacacactttttgaatcatattttcgatgtgttaatttttttttttttaaatttcttaaattttacagaatgtcttaaataattataacgtacacatgactatgagaaaaaacttgactaaaaacttattttgaataccaaattagatagaaatatatcggtgcatatcttttgaaggggatgcattataaaattttccaataatatatatagaaagagagaaaagtagactactatatattctatatgtatacgtatatagatatataagtttatatatagttttatttagcaaccaaggaaggaagaggcatctatgcatgacaaaaacaaactcacatcgttttcaagtaatagagaccggacggactgtgttcgtaatctattaatctcagagatgagacgtgatcaccaatattatcattaattcctaaaataacctttctgtctcttttgcaattacaaaacttgccattttcacgagctttgtcactgtccatatcataatgttgctcgtgtttaatcattctaataataataatgcaaaatgttggaaagagagaggtcactaaaagattctaatcaaattaacacacaaatttcaaaaactaaaacgcgttaattaattaatgactattgttattaggcacccgtaacaaattatataagtggtattttatgattagttatcgatattctctaaaagttatttttttttttaaattatatggtacccgatacttaattatactaatagcgacatgacgctaaggagagtgttagacaccagtggtgctttttaacaattctcattaatggattggttatggaagtaccaagcactactataaggtggcgttctgtgatattctataatttttattaaagtagaataagtgagactcaatattaaattacaccaataacgaaattatatttcataaaatatgaataccctttagcatttcttttaattaatattcatacttgtttttgttattaatttaccgtcacctcatgtccatccaattaaatggtgacatgtgtccccaaacaagtttatataatacataatagaaatattaaaaggtaccagtattgcttgttatattataatattagtataattaaatatcagatcttatataatttaacgtaataatttatataaaatatcgctataactgatcacaagatgccacttttaactagtgctaggcacatgtgtataaatcatattttcagcgcgttaaattttttataatttctcaaatatttacataatagatgtcttaaataattatattgtatattattatatatatatatatatataaaattacaattaaaactattttggaaaccactagtggaatatagtaatttctacttatttgtagtgagaggaaaaacttaatcctttaataaaatgccaaaggctgcaaagtgagctctgactcgcttgtggaaaagagttttggaaaatgaaaaatgattttgtttgtacactttattataattctactacaatttcattattatatataaagaaattagtgaccaaaataaagaggattaaattatttattttataattaagatttttattttttataagtggggtcaattttgtttctttggtttctattgtatttttcagtgttagaggaagtcctttagtgattctttttggaagagaccatgaattttgacgtttgtttgtgtgtggtgtgccaagacaaatttttcgaatgtttatgtgtgactaatactattgccttggggttttcgtagctaggacccatactacaataacaattgcatggtcattatatgctaattaaacttggtattgattacagctggagttatcattattaatttattattacttgtataccattcgtgtttaatactttagtgtaatatcgagttctatgtaataatttttaaaaatacaactaatcaattcttatgagccactgagttggataaagagacaccaatggggtcgggttgaagttgagacggattctttggttgttgttcaagcaatctgaggttcggttaacattccatctctatttggtcaacatgtgtctgcttgtcgtacattgttggctttcttatctttagtcacgattaattttgttaaacgttctgtaaacaaagctgcacactgtcttgctcgtagcccttgtttgtattcagatcgtattttcagtgagagtaatactcctgctaatcttttatctattgtaatggttgaaagttcattctatgtaataatttttaaaaatacaactaatcaattcttatgagccacttctaaaaggtataatatataatgtaataattctcgttttcattttctttgacttcatgtgtataattagttggattaattggtctaaaagaatttgcattgaatgattcaaattgtgaatttatagatatgcatattttactattcatctttaatatttctactgtgaatgtcgagtaataacgattaaataagaattacttaaatgataataattattaatgtacttaattttgttaaagaatgagaataaattatttattagactcccactaaatttggagttatagggttggcaatttaggtgtggtcggggattattattattattattattattattattagataaataatcacttccaacaaaatatgtattccttttggaaaagaaaaacataatatttatcctattattaaaattttaaaacttaatagttgttaaatgtaatgtaaacatagtgtattaaattcttcttttttaaaataatgcaatgactcatttggcattattttcttttcttttctttttttttttctcctaaaacatttgtcactaatttcaacgataaaataattttttgatcaattattcaaaaaatatatatgtatatttaaatatatttttgtaattccaatttatttattctgatttgaaagcaaaacaaatatataggtaagaatattgttaatctgatttattcaaagagggaataccatgtctgggataagatagaaataaaagctctttttcatgctttcatttaggttattttaattacaaatatcaattattcaattattctaaatctatagatttatttt

SEQ ID NO: 39429 - DNA, 1782 bp, Cannabis sativa
  modified_base (557)..(558): a, c, t, g, unknown or other
ttgttatagggtgtcgcggcccagtcccaagaccatttttatttacaattaatttattattttttagaataattatataatatgttatttttgtaatgtttttacatttttatgttaattttttttttttttacatttttatggttttttataaaaataacatcaaaacaataaaataaattacataaacataataggaaaataatatcaaagcaacaataaaaaaataacatacaaataataaaaaatcaactaacaagagtgtaatattaaaatacatcaaaaaatcgtatttttctgtaaatgaaatcgtaaaaatatttaaaattccacacaactttattttttataatttttttattgtttttgtatatttgtgaaataattcctattttttcagcctacattgttattgatttaaataaacataaataggatcctgagttcaattttctacaattttttttaatgtaaccgaattcctaacacgaacaaatgtaaaaaattaaactagttttatcataacaactctaagtcggattattattaagttttannttgacaaaaaatcagttcagagtcctatttgtaccattttaaaaaatacaggatacattttgttatttaataaaataaatgaccaaatttgtaacttttgtagaacacaatgtccgaaatgatatttattcttgttttataacatactgtaaaattgtaattgaaaaataaaaaattgtaaattctaaaaagaagttgtaaaattgtaaatatatttatgactgtaaaagtgttagaattttgcaaaaaataataatttgtgtaaatttctttttaaatttatcattcattacaaacttttatttttttacaaaattaatattaaaaaaatatgtgaagtaacatttttttctaatatttttgttccctctattttttttttttgggatataattaagcttaaaattatggttcattgaaagagacttttcaacactaatatctttttattttattttattaatttttttttgtcaaaaggttcctcaaggattatatcaagaatatatttgggtgaagaaacaacatcgcctctaataccagaactagaatccgttccatatttttgttagaacactcaacttcttaaggccttaaaaaacaaaggaggtgtaaaattaaaattttattttatttaagaaaaaaatgtaaaattatattcaatttccaaatccagtgaaggccttttacaagatacttagttagttggaaactcattaaaactaggaattatttcacaaatatacaacaacaatcaaaaatttacaaaatacagttttacggaatattaattatttttacgattttttaattttatttacagaaaatattgtatttttatgttgtaatcttattaatttattgttatttatatattattttttgttgttgttttgatgttatttttacgtaatttttttattattttcgtgttgtttttatgaaaaagtaaaaaaaaaaatttaaaacgtaaaaatataattttttttaaaaataatggtgtcttttataattatcccttaaaactaattcactattacaacctactcatcaaaactaattacatagaaataacatttgtttacttcttcttaagttatattttaatgtaaaatcatacccaaaaaaaaataaataaatatagcatacttcgaattagtttatactttgataaaaataatccattgtaataatattttgagtgaagaaaaaagggtcatattt

SEQ ID NO: 39430 - DNA, 2184 bp, Cannabis sativa
  modified_base (1921)..(1965): a, c, t, g, unknown or other
  modified_base (2010)..(2021): a, c, t, g, unknown or other
  modified_base (2098)..(2099): a, c, t, g, unknown or other
catttctctgagcttcaccaatctaagaatatcttggagaatttacttgcacaagaagaagaatattggcaacagagaatccgcattgattggttacaagctggtgactccaacactaaatactttcatcaacgtgccaatacacggaagaacaataataaaatcacaagtttgactgatgctactggtatgatacattcttctaaggctaaaatttcaagaataatccagcaacattatcttgatatttacacaacggaaggagcggatccgaatgccattgcacatgttcttcatacagtacctactgtcaacacagacaaaaataaccaagctcttaccagaactttcactgctgcagaagtatatgggactcttcaatcaatgaagaccaacagtagcccaggaattgatggattttatgtcatgttttattactaatattggcacattgttagagaaatggtcaccaactcagtccttaatgttctgaaccatggagctgacccaacatcacttaacaaaactttgatcacactcattccaaaagtcaaaaagctaactctgatctcaaaatatagactaatcagcctctgtacagtcctatacaaattaatataaaaaacatttgctctacggctgaaactagtactttcctgtgtcatatcaaacactcagagtgcttttcttccacagagacttataactgataatgttttggttgcatttgagcttctacactccttaaaaaatcaaagacgaggccgagtgggttatgcagtaatgaaacttgacatgacaaaagcatttgatcgtgtggaatgaatttttcttgaaaaaatgatgcttgctatggtttctcccccattattgtggatctgattgtaagatgcatcaactctgtatcttattcttttttggttaatggtgaaattcaaggaaaccttattccagagagaggaattcgataaggtgacccgttattgtcttacctctttatcatttgtttagaggccttatcttgggtgctacaatatgaagaaattcttagtaattttcaaggactttgaatcacaaggaatgcaccatccatcacacacctgttctttgcggatgacagcctcattctttgcaaagctaatagcgctcctctggtatttcactaaaacgttctctggacttctattgcaaagcttctggacagctcatcaatcaatcaaaattaagtctatctttctctccaaataccaacagagatgacaaatcaagattccaccagatattttaaatgccaattcaacctctacatgagaaatacttgggcttaccatcatattctggaaaagacaagaagatattgttccaaaacatcacagacagaatctggaaacttcttaattcatggcaagagaagctatttttcggttaggggacagaaattctcctgaaagcagtaatgcaatcaatttctacctatgctatgagttgtttccaactatcaaaaaacttaattgatcaaattgaaaaaaaaaaaagatgaatagattttggtgggtttcgaatgccacaggaacaggtatccattggaaaaattggatactttatgtcatgcaaaatgtgaaggaggcttgggttttcatgactttgttcatttcaaccaatctttattagcgaaataagcatggaggattttttccaatccaaactcattacttagtactctgtctaagcaccaacatttctctaatacgagtttcttggaagctaaggttggaacttatccctctatgacatggagaggtatagtttgggaaaaagaattgcttaaaaatggtcttagatggaaggttggaactggggaaaatatttctgctgcattagatggctggctgcttaaaacaactgttggaaatattttacnnnnnnnnnnnnnnnnnnnnnnnnnnnnnnnnnnnnnnnnnnnnnatgaatttctaaaataatgaaatacacatataaagtttaggaaannnnnnnnnnnntgcagcggaatataatgactcattccgttcagatctctagcctttgattcctttttgtagcagagcattatcaaganntgaacctggatctctttttctccttcctttagcctaattttccttcttgttgattggattcttcacaatcttccacactatgatt

SEQ ID NO: 39431 - DNA, 2994 bp, Cannabis sativa
tataaatttttaagaagacaagaagtttgatgatatcaaaatttagtaattttgtcttaactagagccgacaattattattccatgtgttttattataagaatcatttaatacatatgcactctaattgagaaaaataatagtggtctattgtgtaattatttgtaatttaatttattttttatcccaaaataatttgtaactttcatcacacttttcaaccaatttaccaatggtgaagactgaagacatattctcccattctttatacaaccatgactaaataatttatccaaaaaaaacaaaaaggaatttattcttactcatgatgtgggctggttcaaattgttaattttactttttttaaaaatggagtaaatattattttagactttgtattttacaaaaattattaattagactctctgtttttgttaaatgataaaataaaccatatattttctatgtacaaataggattcaaaattaattttttattaaaataaaacttaataataatctaatctagagatgttataacaaaactggttatattttttatatatgttcgtgttaaatatttttttaaagtaagttatattaaaaaaataaaatttttaaaaattaaactacttttataattttaaaaaatataagatttattttatcatttaacaaaacaaataatccaattaataatttttgtaatataaaataaaatttacccttcaaaatataataaagaaattattggtgtgtgcttaaatgggacaacaagtgaagaagtaataatttagttgattattattattattattattttgatttgtttttggtataaatgagatccaacacttttttgaaacttcagtcaatcacgtcctaatctcatgggaaaatacatacataaagaaagagagagagttgagccaatttagtggtcctataactattacccaattctcttcttcacctccttcttctcttttagcagcctttttttttattattattttataatttttcctatttatattatttaaaattattcttacctttcttcatgtctatttccaacattttctatttctctctttttgaaatcttttgtctaattatactaaccccacgaatatctcaaaccctcaatctttccccttttattttattttttttctttgtctaacttatgtacataaatcttatttaggataattaattacattcaacaaaaattgtagggacaaaataggaattacatatatcttttcgtgtaaacctttggtggtcgaagccaaaaactagggactcaagattttggacactttcagattcagtggctcgacacttcttctaagccaatcaaaatttgaaacgtgttcgccaagactaaactactgcattccgttctctttgaaagagcgtgaaccacgcgctgcttttgtccgtacaaaaacttcccccaagttccaatagattttaaatttgtagatttggaggaattagaatattcttttttttttttttttttagtaatttaaaagtatgttcaaagaaaacaatagaataataaaattcgaatattttattaaaagggaagaaagacagatttttctctttttagggtcaaaaagataaatatttactgagttatctttctaactttaaaacgagcattattgtgtctttcacaaaaaaaaaaaaaaacaagaaatgctgtgtgtaaaaatatcttctccctcaaattttatcaagaactttttatttatctatgtacatggtaattctttattttattatctatattctttcaccaaatattacatagatttgcaaaataataataataataataataaaaaactacaggaagtggaaaaaatgggtcaagtaaattctaaatattcttttaataacaaataaatgtaaattaatttaatattgtttacaaaatttaaaatatatctatatttaataaatgtagcttttttaaaatattacaactcaaatttaaattcactatacattatacatatttatcttatcttctatttattatattaaatgtgatcatataacataaattatttttttaatattataatccaaatttaaatttattgcacgtatttattattgtttaattttcaaacaataaaataaaaaatacatttatatttcttaaagaatcagttaccaaaataatatttttctattattatttttattaaaaaatagaaaaagtatataatatttaaaaaaaaaaaaagaaatattataaaattaaaagtattacggttaaactttgtaattgtcaataatgtttgaatatttgatgtttctaaaaaaaaattaaaagtattataaacttaaatgtattacggttaaattttataattaataataatttttgaatattattatattttttttataaataataattaaaaatataattaaatataagtaaattgtaaataatgttagttaacctgtaaaaaaaaatgcacaacaaacattattataaaattttacaaataaatcagttgaaaaaaaaaaaggaataaacagggtaagtgggtttggcacgtggtaacgtggcgcgtgagttggtgtggcattaaattccgttaaagagccaaacaaagggtagtaaagaaactatgattatatatggagagagagagagaaagagagaggggttgataatatggaggtgttggtaactccgacaaatgaatggtggagatgtgttgaagaagaatggacggttgagattaaattagtgtcagcatcggggcagtgtcaaaactcggagactcgtagtgagtcgacggtgagaagagggagtaggtaaggtgtgttataaatgcataataataataataataatgttctctaaacgttaaaaatacttcataaactattgagattgttagatttaagaattttttttttaattttagtaaaaaaaatctaatatggatgaaagttca

SEQ ID NO: 39432 - DNA, 889 bp, Cannabis sativa
catgcaaactcctttgctttcctacaagactgcagttaagagaatattaaggtacattgctggtactcttgagtatggcctccacattaaacctgctcaagactttgccttggatgtgttttgtgatgctgattgggcatcagacttggatgataggaaatcaactacaggctactgtgtgtactttagaggtaatctcattgcctggaaattccaaaaacaggttaccatctctcgatcatcaacagaggatgagtttcgaagcctttccagtgatgttactgaggttgtgtggattcaatcactgttgcaagaacttcaaattcgaatccctgcctctccatctgtgtggtgacacaaccaaagcacatgtttgctggctgataaccctattttgcatgctcgaacaaagcatattgaaattgatctatactttgttcgtgacaaagttcttcaatggcaaatccagcttaaacatgtccctacatctgctcaacttgttgattattttttcaccaagtctatcagcagcagcaagttcagtgatttcatgtccaaactcagtgttatttctcttgccacactgagtttgaaggggctgtcaagggagcttagttagttaattctgttaatattgttgagttgtgtttgtcttgacagttaggttgttagttaggagttagttgttggttagttgttattcattgtatatatataaccccttgtaattcctaactaattcaatcaataacaaaattactctttctctcttcaaagctttcttctctttctctctcgtttgaatctcacactaaagatcaaatcaaagaaggaaaagaaaaattttgtataggagacgtatttttgatgtaaaagttttagtatatat

SEQ ID NO: 39433 - DNA, 1224 bp, Cannabis sativa
tttttttttttttgagtaaaagaactctaggcttttacattcatatgtcagattcaagagctatgtctttccctcgtttattaatatcaagattactatatcatctgacaaagttacgcatgagtggtgaaacatgaaattagtactcttgtgttcgttcaaaccccattatgttgattctctttatactactttatagcaatttttattaggaaattaacaatgaagtgaaagatagacttgtatcgtattgaaaattgcttaatttccactataaatggcgcatgattcgttattttatgttaattattaatggtctggaccacgcattcatgtccttgtcttgcatgcatatgtcgtcttctccatctagtatatactagctagggttagctctattgatttgaatatgatgttaatggaaaacgatcgaagagtctgcttttcgaaattatatatttatccatacatataactgtgtataaagataaaatgtgtacttaagcatatacatatatatgactattgtttaccattaaaagaaaaaataaatcctttcatttttttcctcaaattgtcttttaatttacatatatatatacatatatatttatattaataataataaattcaaaatctctgttcgtaaaatatatattttaagtttattaattagtgcattatgaactgattagtactttaaagaactagttctagtatgaacagggaacaaatatatacaaagaaaggacggataatatatatatgctcattgatctgtgaaacacatttaattaatatataatatgcgcatgcacatgtttgcctgcatataagtgcaatctccttttgcttcgacgatatcactacctagtcatcccttataagtcattcataaatataaattatgtatatatatatatatatattatgggataggttctttacatatttttctttttttaaaccattcagattatcttaattgattaatacagttgcgtatatataataatttaaagaaaagttaatttcaatttctaatgaagcatctaagaatatcttgtacatgttattacaaaatgtattattgtcttgtctcccactttcaatcatctgttgaaagacaacgtctcttgtcgttgtggtcgccgcactgagtcaacattcaaacgctattttggctggctgcttctgaattacaagcttaagtggtgacagctg

SEQ ID NO: 39434 - DNA, 2486 bp, Cannabis sativa
agatgacagggagcgcctaccgtctgagaccaatccaataccacatgtgccctacgagaatcctaaagaatcaggggggtttttcccctgtgtcagattttgggaaggcacacaacaaaatcccttacggatgcccaacacatttttacccaacacccacaactctgatatcgactcctcacaagcgacaatgcacgcccaactgtcactatcaaacagtaccatcccctacggacaatagttacacacaaaatttggtctcacctactcaacccagtagtcaatattaaaatgtatttaccccatcactgggcttactttctcataaaaaatctctagttggctcaaattagcctgggaactcgatatatggcctatatatacgacattttcccttcatgcaaagggttagaaagtttggcaaggcttgtaagaaaaatactctaactttagagctaataatattcactcacatactaaggttcgttaatacctaaaccacgtaaaaactcttgtcccatttatttattaataactttttctgtagcccaatcttttcttaatttggtttctaaaaaacttggtaaacattttagtgctttcattgacagctgaagaaagtttccaccatttttgtcatctacaaagatggtacctactagaatggtgattgagaaaccatgcaacccactcgctcgcaacaacatagaagcccccgtggttgatggcataaactgacctcctccagcgaatgctcaagaaaccactgtaggagacgataaatcatcagttgcaagaggtcaaaatccttgaaataattatcaacatgaagaatgccatgatgaatatcctctcacagagtatggcaaagaggatgataaagaagaatacggcaaagactatgaggatgatcatgaggttgtacaactaagacatatagttttagaccaagaagaaaagaaggtggagcaagaaaaggataccttttaaatacaagagaccctcttgtatatgcaagacatgatagtagaaaaggccttacccgaagattcctcgtagcaaccaaggttatggttttggggtttaaatgaatgatgacatgccagctactgtaggaaggttcatccaacgtggagctagaccttcacaactaggaaacgacaggaaagtcgtagttgacgacacctagaagaaaaatctcctaccaaggcatgtgcacgataatgtaaacctccaaaaaggaagagcttactaaaccctagggcaaggtcacccaaaaaatccaccaaggagggctttgcaaggcaataagacccatgctctggtactaggatttaatgcccacggaaggaaggaacacgctagtgcatccgtgaatcaaggagatagtattgaggacctagatcctgaagtgtttattcctcagttaaccttagtgacaacctaaatccacaaagagaaaaaagtgcaaggataaaggatcaggcctcccagaggtgacttaagaaacaatatcaatgattatagatggggacgggatctcccagatgatcatactaaaaagttagaagacaaaattgtgaccttaaggatcctgataagtctaatggaaaataattacgatttatatttatattatgggttaatcagataataagtgggattacgatcctactaatctatttcagcatacattttcaatttgctataagtgagtaaataagcgtaatttataaattacgaagatttatatagcatgtgtgaatgtaatatgggatatatgtggaataaaaatattttcaaattcgtagatcttaaagacctgataaataagcgtaatttatttattacgaagatttatttgaaatacgtggatatagtatgagttatttgtgaaataaaaatattttcaagttcggcgaccttggagacccaattggaggccaaaaatgttacaacagttttagttagaaatattgatgggattattgggataagttgggttgaaaaatactgaagtattttgagttactcgaagttggccaaataccctaaaagtagagatatcttagtggctgaaaaataataaaataactattaatcataaagtttttattaatattattagtaatattatattattattataaaatgtctgatacgtttatagatatatatgttttatgtttatatcagaagagtagtacgaaccaaaacccttgctctctcccttcgaaaaacctttctccttatatatcatttttctttaattttcaaattgaaacctagcgatctaagcttcggaagcagcaggataggaaatcctcaaggagggaaagcttaatgtatggtttaattacgttttaagctaaaaatgattagttttatatagtggcttctgatttagagtggttatgaagattctgacttcgttgaatttttctttggtagctatgggactagttttgatgtttacttgttgaatt

SEQ ID NO: 39435 - DNA, 1421 bp, Cannabis sativa
tatatatatatattcctattaattaatgtagagttttgtaactttataagttggaggacactttcatgtcatctttctctgtctgctgtgtgccttgttcagttgttgtaaggcaagcatcaataattatgaacttaaaagggtataaaaacacaagcggtatatgtgggagggagagagaaaggggagggggggaccggtttcttgcatggctctatgttgtttgataaggttcacacaaaatgaaaaagaaaaaaaagaagaagaagaaaaaaagaatatatagagagctttcatcaacctatcaaaataataataacaggcaagttcatgcactttcgttgtttcatgatgcatgtttataatgtatttattatattctgttgaataattagcatatatgatggtaacatttcgttttttggggaaacaaagttacttcggccatttcccatttgtatttgtaattattagagcttttgcttggcccacagttgcaccactagaactagctacttcattagatgcaattatatcatatcgagaaattaatattaatttgtggaaatgatccactactccttctctacttttgtatgtaattcagggtatgatgtgtactgagattcaatttaataagtttcttttccattgaagtataacacgtactcattattagtaatagtatagtcttgttttgcttatatatatacaatattaatcagatcataagtacactaactgtggtcccatattccggtttttgttttgttttttgtttcttcttttctttttgggaaaatggcatcctaagaagaactagatgaaccagcaagcagaacatcacatgcatttatatatgtagttttttttttacatctaatatatggactgtattttcattgaaaaaggtaagaaaaaaaacaaaccattagttttggcaacatttgtaagaaacatttagagctgaaagcattattaactcagttattaaagtattattatataatagagatatgacttgtataccacttaaagtccaacctaccttttagcactacttaacatacatacatatattttaaaaagaaaaattagtgtactagttaatgtttttaaaataacccaagcatcattgcaatgctactgtgatatatgttgtaatcatttaggaaacatgacaataaagtattaattccacatgttttgtttaattaacaatttaaaatattatgactacttttatatcattttaaaatatatagcatgatcaactttatcttttgggtcattatttataagttgtatagaagcaaaacattttttttccttttcttgaaacttttgggaatttttacaaactacaagaagtgataagtgtgtgccatggtgcaaagtgtcccaataaagacattattcct

SEQ ID NO: 39436 - DNA, 1462 bp, Cannabis sativa
taaaaaattagaaaacaaaaatgttaccaaacagcacctaaataagcattaattatttccaatatatctcatcttttactttttttttagttgaaaaaagaactcgcatctataatacaattaaaaaagataattttccatgaaaaaataatccgaaaattaatagcagtaaaaataatcttcctcttgcagcccctttgttgaacaatgatttttttaacattaaaaattggaaattaagccaactaaaatcaatacaataaaattcaaaacttacgtgagtatttcatcaagatattttttatacataggagaataaaatctttagtctttaatcactattatatacatattgtgagaaagtaagaatttcattcatagccatctaaaagaaaaagcaagttagtttcattttgttagtacaatatacatgctttgaaaaagtataaataaatttgaaaaagaagtcaaataaattgtcccaattttacagcaagaaaccacttacaaatgcctctgtagatatataactgcaaatacagttccaaaactagaaaataaattataaacccaccctttattaaacttaccaataataatgaatctaatttaaaaaaaaaaaaaactctatgatttgtactaacatagatagaccaatttgatatattacatctttataagatagtctcaagacccaattggatatatgtgtaaagcattccaattgaacaaaattacaaatgagggtcttcatataacttccttaaaagttgtaagtgccaacacttagcaaagctaattttttcttatcagagaagatttagtatattcaccaacaaaaacccaaagacaaaacagactatataatcgttttttaattcattgaccccttgattacaaaaaaagaaaataacaaaaaaaaaaaaggcaaaccttgagaaaaaagacaatcaaatttctatttttctagatcaattatgggcttcccactcaatcgacatttcagcttctctaaatacctaattaaatcaataaaacaatcataaacatgagattctaaaataaaccacaaatcttgacaaacaaaaccctaataactttaattgtattgaaaaattcaaatattaaaaaaattattcatttgattacaagaacaaaataataataattagaatgatgaaatacctgtttgacgaactttgctatcgtagggccaataacgtcactaggaataatgtgttcatgattggagagacccaaatcttatcaaataacgtgaaaaaaaatatttgtcacgaaaatcttataataaacacttgaaatcatacctaaacaacgtagtttttcttttattgccgctgcctcttgtcgtcgccgcccctttttgtaataggaattgtgtgtgtgagagagagagagatcacaaatgtggtgctgctaagagaaatagtgcgagagagac

SEQ ID NO: 39437 - DNA, 1742 bp, Cannabis sativa
ttttttttttttactttctttttaaagtccatcatttttacttcttttttttaatactatactaattttgctgtgtcacttcaagatactctctacgtaacttttttatatcaagataaatttagttaattgatagataaaagagatattttttaccttactcccaactataagtgttgactgcttgaccccacatacaactttttttattaatttttaaaataaagtaactaatcaaataaaaaggaattaattaaaaatatatatatatataaatttaaggttaataaaagatttttgtactccaacttttgacctatatcgaatcatgcccttaacttttcaaactattacaaaagacttctagtgttaattgtcttcatatataatttgatatgtttcacatgtaaaccacttctaatgtctgaaattcttaaaataacctcacatgatatatcaaacacattccttcctttttggaaggtaatgtatgctttttttattactcatctagaaagaacataaatataaaagatatagtcaaaaataatctaatttaattttttcctataatattgggtcttgtatatatgtgtctcttttatcattggcagccttaaaatccaaaggtccaactttacctcaccattttccaaccttccctcaccactaaaccaaactactacaaaaaaaaaataaataaataaaagaaacaaatataaaggaaagaagctgtacacattgaaattgttgtaattataccaagtaacaatagttgtacaaaaatgatgagataactaactagaaaaccacaaaagacatctctctctctctctttctttctctctatctattatgctcttatctaaacactacataatacatatttggcctttaatttcccatggccacaagattacatggttacaacaccctcactcaactaactactgattgccctgtacatgtataatataaggctacaattctggcattccaaacaatataaattaagcgcagtgctctcgccgatcacattaaataaaagaccagcgaggacaaatacgcaatcagaaagaatgggaatgggaatataatgaacgtgcaattttttttatttaagttacaaaattggaactaccatggcgtgcagcagcatgacagcaacaaagattgccggtagcatcttggagagcatttcactcaatgagctgctcgtgctgctgagctgccccgcgttaatgtattcatccttgctagtggttacagaaacatttacggacgttgagcctggaaagtagaagatcaacataattgacatcagtacaaacttttacgagaaagaaaggaaagataaactatgtcgatagatgattccgacttacaatcgtagttagcccatccaatcctttgatgagctaaatcatacacaaatatcttatctttcagaactagatctgcaaaagaagaaaccgacaagaaaagaaaatcataaaacttgaaggtatgaagtaaaggagagaagtgatataatgccttttactatcatctacagaatgaagttaaaaactgtaagatgggttcataatgttacttattttttccttaattgtgttatgcctgagaagtttcggaacaggcattgggaatctatttgatttcttacctcctaaaattgttatgccaccactctgaactttctggaaaccaacacaccacaatgcagcagcaccctgtaataa

SEQ ID NO: 39438 - DNA, 2163 bp, Cannabis sativa
accgactcagatttctaggcttgtgtcgatgacagaaagtctacatctgggattttaggagtggagtagtagtgatttggagaagcattaagcagtttgcaatctcgattactcaaatggaagttttatatgcattacaagtaggacaatctttataaccttgaccactccatccaaacaagctactatgagcaggaaaatcattcactgtctaaaaaagcgatgcacgcattgtaaacatcgtattggtcgaactatctctggtgggtagtccattattaatccacaaatcctttagcacgtccactaacggtcttaaatatatattcatgtcttacctggagattttgcaccaggagtaaggacggttagcataaaataatttcctttcatacataatcaaggtcgtaggttataattagccaacaccaccgcccacatactgtatgcaagagtcatgttgccaaatggattaaatccatcagcagctaaccccaatcaaatatttcttggatcgcttgcaaactcatgattctttgcatcgaactcgctccaagcaagaccatcaactgagtatcgcgtcaccccatcatcttttgttttaccagtatgatgccatatcatgctctccgttgtaattctcgaactatgtaatcttttgagtctaggtgtccatgaaaagtagcgcatcactttgcaaggaacttttttccctcaactgttcacagaagtaacccaacgactagttccgcaaactggacaagcctccttgatgcactctcattgtaaaataagtaataattgtatcgacagacatagatagactcgtaagtacccaaccctaatttctttaacttcttcttcacctcatagtacgttgattgaattttattttcctttttggaaatacaatctttaacaacttcaacaattcatcttgttgttaaggatttttcctctaacttttagattgacatccaataactgatccaatccaattagaatccaacttttatcatccaatccaatccaattgtaatcagatttcttattttttgtaattgaattggattagatcggtttggttcaattaaattgtattagatgttgcccacccctacttaaaatcgttgcagattgccctcatgagtgttctaaactatcgagaatatctaattttttcctgatggtttaaaacaatcatttaattttattagcgacggtcctcgaaaaaaagcattttgaggactggcgggaatgtcctgttttgtagtagtgtggagactttaaatctatttaccgaatacttcaaggtctcaagctattttctcaaatattgggcctacaacaaaatgaatccaaatataaactttattgttgcaacatgactgaaagtgaagttcaaagagtggtggatgccttaggcttcgaaagaagccaattgtcgtttcattatttgggcataccgatttgtgccaagaaattacctatatattgttgaatgtgacatcttgattgagaagatggtgcaaagaatcaaagtgtggagttttaagaacttgtcttatgcgagttgggcaacattagtaaattctattcttattgctattcatttttattggtcgcaactaatggttctccctttgaaagttctacaaaatgttaatgccatttgtagaagtggtttgggtttggtggcatgggaggattgtataagattaaaaaagaacgtggattgagatttagaaaaccaaagaatggaatgaagcggcgataggcaaatatgtttggtcaattgcgtctaaacaggacacactatgggtgaaatgagtgaatgtaatgtatataatagaaaagaggattggagggcctatgaggcgcctcccaccaacaactggtattaaacgcagatcgtaagagtaaagaacgaattgatggattgaatgtttccccaatgttgcaacatgtatatacttgatcaaaaaaatgatatgctatcatttgtcctgaatttccaactggaagaaaaagtgtggaatagattgtctataccaaagcatcaatttatcttgtggcttgtggcattagataggttgagattcaagtcaagattgtttaaatacaatctatgtccagatgaagtgttgaatggaattaaacaat

SEQ ID NO: 39439 - DNA, 2536 bp, Cannabis sativa
ttttttttttttgtgtttaaaaaatttaataacaaaatttttacagaaatttaaagcgtcctataattttcctgaaacgtgtttgactagtgattattcctctgtccaattagtatccgtttttgttcatcattactgttttgaaaataataataatttggaagtgagttcattaaaaatgtcaacttaagagtattaatgtcaattatatatctttagttttaggaaaatgagaatgataatgaaaacgaatggtgatgcaacttttcgtctatgaagagttgaagacagtgtgattttggaacagaatcataattctcttcttttgaatcatctttctatatcatgttcttatttaatttaagagacacatcacactatagattagaatgagttattacaatattcagtaaaaacaagtttatttaacaataatgatctcttatataaacactaaatttgtcattaaggtcggtaaagtttcgtattgatcagcagagcatatttcaagaaccccaacctccaagacttgccttaaaaaattcatctctgaacaacattcttcataatgatcaacctcaaggtcaacttggaattgatcaatataatacttccacaaatttatcttatctgtaattacaccttccaatttgtccttgaaaacattagatcgaatatgagttgccattgagtaaaacacatcatttaaaagcatcataggaaagaattcaggactacatatgcacacctctaaacgaagaacttccataacgatatgatgaactacgtcgtcttcaatttcctcatccaaatcaaacaacattctcttcttttcgcaaccattattgctccatgatggacctgcaagctcaagtgcatccatgaagaaacacattacaaagccaaatgtggttattacagtagactcatgaccattgtttttctcttccacacgtaagcattccactatgcttttaacatcatcaacactttgtgacattggcaccattttattattattattagtagtattagcaatattattgaaatcagctacgaccgtgcccaagaccaagatcattatgtactcaatcaagagtttagagatttcattggcaatttcttcaagagtatacctgagacaattgaaagcacattgggcaagagcatcatttgaggtgtctatcttcatcatcaactcacgcaaactcaaataccctttctctcttttcttcttggattctattctccaagtgttttccatgaactcttgtaatctttccaagtaaggctgtagcggttgtttctggccgttttgataacgttttgggatattgtacttgcggaacctctcttccgatatgtccaaaatctcaagtctgttccttagaccaatctttaaagattcatgaatatccacagcactactactcgtcacttcttttacactcttcttcttcctctttagcttaatcgatttaggttttcgataaacatcgctttccaaaatttctataaattcttgaaattcttcaatctcaccttttcttactgaaccactgtgtttgaactgactaagttcctgcaatctggtaatgagtgtcgtccttaaattttcgagctcggaatccattgcgaaaagtagtatatatgtactataactaataacaaacgctcaattaagtttcttcggtgaagaagatacagagttctctgtctttttcttgagagagagagagaatgagaattcttgaaaaagcgttatatatagtgaatataattggtgaaatgatacatgctagacgaattataaccgttatagtacaattcattatatataactaaaactctcactagaaattttgttatatagttttatgctctgttttcaattgtcttttatataatttctgtacgcaggtcgtattttggtatttttggactaaactcagtaattattttgaaatattttgtaagacttaatatagatgttctattctgatatttcttttttttttttttactgatttatagtgtctttattaaaatatacattttttagaacatgtaaataactttttaatcaaaattgagtatagacctgtgccaaccaatccaactgttgcacatggctcgggagtgcttttaatcccacaaatagcagctcttttctgaaagagcattcttattgaatagcatggtgttttttttatagttggtgttttataattgattagcataaaaattatttttataagttatacgatatttaatatttacttaacactactaacatataatactgaaaaaaatgctaacaattctctttctaaagcctcaaaataatatccctctattatttattatataaatagttacctatcttctataatataagtcacatttgcttagttgataattaattctaaaatatcttttgattttgagtgttaaagtaatatattgacaatttttcaatttcgtgtttggaattaacattgtaattatcttttactattatttttcttggagccac

SEQ ID NO: 39440 - DNA, 1332 bp, Cannabis sativa
caaatctgataaatggtcctcctaccaatattattgaccctctcttttgtttcaacctctaactctttgagcttttggtcatgatcaacctattttttagaaagattagcttggagagacttaagagaatcctcgagttccttgattttctattggtcagcttgatgctgctttcttgcttcctcttttgtgtgagagacctcagcttcagaatcactccacttcttggccacgacatccgtatgttccctaattttacaaagctcagtctcaagcatttcgactcgctgagacaaccggtgatgtgtggcatggacgagaaagaagcctgtgaggaaagggaaaataaggaacagtaagaaggagaaggttagaagattgacttaatgtagaagctcataacttcttttggccaggtcctcaatactgcctttaatagcgagatcctagtcgctagatccaagtgtcaagaggttgtgcccattgttagtggcatgctgcgagctcagttgtgaccctttggtcccaacctcgaggggtaggggacatgaaggctcgaggagaaccatctctggacgagaaatagagaactttacttgttgcagcgacctagtaggttgttcctcgacattccctgcagcagacctcaatccctgcagcagagacctcaatccctacagtagagacctcattccttacctcgggagacttagcagcctcaatggtaagctggctcgaggatttcttcttgttggccttggacttggtccttttggattctttggtggaatctgaggcctcatcagcttgggctatcctcttcttggatctcttgtcgactgggggaggacttttgaacatgctctccaagtctacatccatatctatgaggtaagaagaattcattaacacttagccaaaatgaataaaaatattgaagaactcccacttaagagggttaccatattcttcagaggacgtcgatgaaggattataatattcactaaacttcgtagatcctatgatcataaatatgtcataaagatttagtggatctaagtcccaacttgaatttatgtgccctggtctatccaacatggcaccatactgttcgacaatcccatacaatgagctattacaactaatttgaacatgaaacctggggtaccaaccatcaaacctatgggagatgcgatctatgaggagagggttccaattaaaaaattataccgactatctcgaaaagagactaacttattacgtttggccctaagcactgtgggtgaccacccatattgattacctcgagatcttccatctacccgaggaggg

SEQ ID NO: 39441 - DNA, 1843 bp, Cannabis sativa
ttcatgtaattttcacttaaattaaattatcattattacacatattttaaggaggcctaaaactccattttctcaaagatttttaagaggaccgtgtttaagtaattaatgttaataaaaagaaagcatgttcatatttttcgcttagtttatgcgagttaaaagtttttttttttaaggcaatgaatatcattattgatcaaataattaatgtcaaataacttaaaagtgaaactagaataacaaagcgttttaaatacaaaataaaaaattcaaaaaaattattcatccatccgaagtgcatgcatagttaatacatgtacaatcatattagtcatctaacgaacatgaattaggaaagcatttgaaaatctggataacaaacttttgcaagaacaattaataatgatctttgcacattgaaaaatttatgtctactagaaaaaacagacccaactattcaacaatttatttcaaccacatgttcagaaagtctttaaaagagaatccaatctaaccttattattagtgccacatagaatgacaataaatctacctacaaagagtaatatcaagaaaacatatcaacattagtaaaagactaataaactaaacacatagttatatttatataaaaattacaagcaacttatctgttaagaatgtctaatttccaaatatatatgtatttttacactctaatttccctttttaaatttttactttatagagaccaatcaattaataatattggatatttaaccttctgttttattgctcttagaaacagaattactagtggaagtgactgtaacttattaattgacactaattcgactttggatgacttccacatcatttttgtttatttattcttgatattttttcccacacaaatagttatgtggtcatgccatgtaagttaccttttcttatcaataaaagaaggtgggcactaaaattgtaataatgtatatacttttcttgaatttcattatctaagggttgttaaattggtcacatcaggaccagttaactacgaaatttaatgtttttatattttttatatattatataatatataatatataatatagtattattcttttttactaaaagaaatttaaaaaaaaaatgagagctttttgtattaaaaacatcagaaaaagagtacttttctaaaatttgggtcctttccacttcataggttaggattcgacgcaatcaagacttgaaagtttatttatttatttatttatttggtaaggtttggtaaggaatcaagacttgttgaaatcagatgaaaaagaaataaaaagaagaagacttgaaagttgaaagtgtgtaatgaacaggttcatgagtaatatacaagcttaatgattcataaaaaaaaatagcaatatcagtcatgacacgataacactatttgaaaatagtatggaattagcggatttatatttaggtggcgtttagttaagagtaatgaaaatataggaatataaatagaaataggaattaaaatagaaatggaatggaataaaatttaaaatgcacaaaaaaattattaaattttttcaaatcttgcattggaatagtctttcttcctattttaaaatagaatagtcattctattaaaataataaaaaggttatttcattagaatgatattgcaatactttaaaatgcaaccaaacaaaggaatgaaataaaaattgtttccattcaattctatttcatttcattacctccaagctaacgccaccttaacataaataggtacgtgtcaaaatagattaagcacaatatgttaacctattataaacctaaaattgatacgtct

SEQ ID NO: 39442 - DNA, 1322 bp, Cannabis sativa
tatttattattaatttttttatttatacatattttattttataaatatttatatatatataacatagaattttaaaatattttggaggggccatggccactcttcttttggctgtggctctgaacctgctccaaattgtatccacaataatcgaagcatataaaaaaacatcctcaacttggactcctctgtgctttagattctaaatgaatttgacccaatcccaaactcggatgcctgtatcacaaacgggatatatatcccaagaagaagatcgccataagtgaaaagccacatcacaggaaaggaacaagtgctccatggattcttccctcgtaccacatagagagcaacttgtgtcctcaatatggaatttttttctaatcacagatcttagagagggtacaccaccataagttggggtcaggattaatgtccaagttggggtatgaatctaggtcaaggtctggagttaagattggagtccgagtctcaagataggctttgagattaggattcaagatcttacctcatgtcggggttaggatctaacttaaggtctaggttgaaatttgaagtcatgtcgaggtctcattaaatctgagtcggtgtatgtatccatggtgtgtgtgaggaactgaattattgaagattaacaaaaaaaaaaaatctacaaactatttttcaaaaatattaactaaataaataggtctttttttttaaaaaaaaaaaagaaatctaaaattgttttttggacaaaaaaaaaataaatgaaaataatgtctcatgctccaagagtcttgtagcaacacatccatctcatttaatagtcatatattggacacaactacagctcacaaaaataagattaatccaaagtattattttttaggatatatttgatagattataatctttcttaattttattattagcaactagctagacaaagaagcttagacagatctaccatctagttcccactcccagccacaaaggttgaaattattaaaaataaaattataattaacctcaaacttcaaaaattaataattttgcaattcaattcttgtaactattactttatttgtacttaactttataaattgaaaaattcaaagtgttatttatttttcacaatttaattgttagattatttatgtgtacattttatttttcacaaatgatattttaaatttattattactaattcagcaatttgaagaattttgccgttaaaatttaaatttaaataattaaaaccataattaaaagtgtttaaccccgaaaagctcttaaaaataagaaagcctcttttaaat

SEQ ID NO: 39443 - DNA, 2696 bp, Cannabis sativa
aatgatcgaagatattgtttatccgttaactttgctgtcccatactctgctaccacatctttctcacaactcaaatttgtaactttcaatccgcctctcaagttgttcaacctcatcaattcctttagctcaccaccatgtcttgggatagactttttgctcttcatcaacacataatttgataacttctggagattagttagctggcctagtccacatggcatatactccaatttatcacaaccagaaatgtcaagatgcctaaggttgatgagtttccaaagatccctaggaagctcttggagtttcgagcaatgacgtagtttcagtgtgtgcaaattcaacaaatcactagttgaatctggcagtgataatagaccatcattcaaagaaagatccaagtatctcaattgtgttaactgtcctagtccacttggcaaagaattcaatttatcgcaagaagaaagttcgagatgcctaaggttgatgagtttctcaaaatctctaggtagttcttgaagatttgagcatgaattgagtttcaatgttcgcaaattcaacaaatcattagttgaatctggtaacgataatagaccacaactccaagaaaggtccaaatatctcaaattttccaactgacctactccacttggcaaagaattcaatttgtcacaaaaagaaagttcaagatgcctaaggttgatgagtttctcaaaatctgtaggtagttcttgaagatttgagcaggaattgagtttcaatgtttgcaaattcaccaaattagtaactgaattgggaagtgacttgagatgagaattatctgagaggtctaaatatctcatgtgtttcaacttgccaatagaatttgatactagtttcatacttgaacatttcaaatccaaacaacgtataaacttacaatttgatattatggcatcgaaaaatttctcttcttcgaacttggaaagtttgagaaatgttcgaaactttttggcatgaatcaaaagaactgaaagttcacttccagagtaagtatcacctaccaaagacacatgatgagtagtttccttgatatttccttggccatttgaaatttcaaatgtagtacattcctctcctattactcgaacggcaagatcatgcatcaaatcatgcattttgcatgttgtaataatgccaaattcatctacttcaacatcttgaaagaatgatccttccaacaatgtcataaaccattcatagcccacctcttctaaacattgatcttgactttcatctaataacttaagaaacccttgtgccatccaaaggttaattaaatttatcacctcaatttcttcatctttaggaaataaactacagtaggcaaagcaaagtttcaaattggaggcaagatgatcatagctcaatttgagggtgggtaagatatcatcttcatgttgatatggtatttttgaaaattccttatctaaggaagaccactctgattctaaacttttcccatgtaataaatttcctattgttttgatggccaagggaattcctttacaccttttcacaacctcctttccaatcttcacaatgctagagttttctcgctctcgtgagccatcttcaaatgccacccttgtaaacaaagaccaagattgattttcatcaagaacacctagttgatatggttgttgtttgctcgttaaaaacttagcaatgtgtgcactccgggtagttactacaactctactcccagcattttcatcccttattattagattttttaactctgacaacttgttatgattctcctcccatatatcatctagtacaagaaaataacgctttccaccaagtatttcttgaaacttctttagcaacgactccattctaaggtctccaaaactgctatcacctttcgcggactcaacaatctttctaacaattaatttcaagtcaaaatcatcagacacacacacccaaatctttagctcaaaatgtttttggactttctcatcattaaaaacacttttagcaagagtggtttttcctaagcctccaattcctacaatggcgatcattggaaccctctcttcacaactctccaacaaaagcttatttataataacagatctatccacatctctcccaataacatcttcatggcgtacataggagtaagtatctctcactctgctactagcagtcagagtctcttgacctcctttctctagaagaaagtttctatcattggaaatggaagccagttttttcttgatgacttctattttacgactcatcttgaaccgaaatgcaagttggttggagctggaaaagaaagtgcacacctgtagagtggcatggtttatatttaataaaaatcttatgagaatgaatgatatatattgtgcagttagttgctcctaactaacttataactgtttcctgttttttaacttactttcttggttagttggaagcctatatatagttttattgttttacttgatggaagagagtgtttatgtgtttattgttgttcattgagttctatttagattatattggtaatatgtaccttgttggccattggattttgaggcatgatgagttggcgtctcaaagcttgagtgttgaactcgtccatcaagtcatctgctttaaaaaccacagtgctgagtctttggagccagttcttgacttgg

SEQ ID NO: 39444 - DNA, 3201 bp, Cannabis sativa
  modified_base (2105)..(2109): a, c, t, g, unknown or other
ccaaaaaaaaattaaaaaataaatcaatttttaatagtatttgttaggggaatttttatatagtaagtaattactataagtttttttgtacgtattcataactctaatttagtggatttaaaaaaataataataataaaaagaaaaaactcaaaaaattacccatgtttaattttcttcaatgaaatttagtattatttgatgatggcggtttttttttattaaatgatcattttagatgattggaaaataaaaatcctgttaaagaagaagggttttttccatttaagaaacttcattatctatacatgtcaagttaatctgtgagctcataaaattaccactaacataaaaaagatattctagaaaagctaaataataaagttttaatgttaataacaagacactaattagtaatttataaagagaatcttaaaataagtaatttagaatttatgtcatatataatttcatgagagtaatttttacaaatgaagtataataaaacttatttattgaaatttcttagatctttaaataattgagtgattaataaataaaaaattacattggcctataacaaatatacaaaattcaattaacgttacactttacttaatgataatattcattaaagtatgaatttaaaattttaatgctagaaaagcattctaaattataattgctatgaatcaaacacttattttaaaagtctatccagctaatagtttcactgctaccttacattatattaattttaagacaatgaatagtaatataacttcttcccttcaaatccttggatccttggaagatagtgaaaaaattatacctaaaagatatacatgtaaaatttagttaacacaccacataattatagtatcaaattgaagtatgaattttaatttcattgttgaaaacttatctttgatatttttggagtattattgctaccttatactatttttaaacatctttaatggagtgtcaaaaaagtagtgtattgatatattttaacacctgaagaaaaattactactgtaatggtgctctaaaaaatgtgctaaattaaatacatactaaaaattatatcaaatttaacacaagacttagtatttattaaatttaacccacaataagcctattattattgacatccttgttatcttcatgactacatgcaatttactttctctaaaaataaaataaaataatataataaaaactcaaaaaatcactcgagatataattatgaaaattattgtgctttttttaatctcactttcataataagtaattattagaattttatactctaataatttggagacactcaaaatacataattaatcttatatatattattagctatatcccaaatatgaaaaatcacttctctataattaatgtgtcacatttgtataatgcgttgcattactaaaattaacacaagattctaaatttctagcattataattacgaaacatcatacttcggaatcaataaaatcttcatatagtgatacaaaaaacgaattgaattatctttctatatatgacatgactgtgttgaagccatacaaaatatttaagtcatatagaatagtgtttaacaaaatgaaaatgaatggagaaaatctaaaaccaaacaaaaaattaggagtgtttctcaaaatatatatctatatattactaattaggagtggctacaacatcggtagatgacagattggccttcaagctcactatgccgagttatcttgacaacttgtccacgccttaacccatagtatcttgcaattggatcagtagttcttatccatggaagctgagatcatcatcaccaattcattttaattaccccggccgcccactatacatatatgactaattaagtaataaactatatatgtacctgtgaatctgaaatgttgtaaaactccaacaaagccttcttctcctcctctgttagaacctcatgcttaggaacaagagcatgctctgttacattaactaacaattcttcttcctgtgtaatgagaaaccgagtgtaatattgagaataaaaaacaaggggtactgtgttacatatatatataaatatatannnnnatatatatatatatataagattttacctggaaaatttcagcgccacactgtctacgtaatttattaatattaggcagtttttctttaaaaactacgattgctttcatagatggcctaagcatattgtccacgccactactatccttttcagcggagaaaaaaacacaaatcttcttgtaccaaaaaaaaaaaaagaaaaacaggtaagtaatttcatagaaagagattgaagaggtaaatccctctattatatgtgtacctgatcagagtcatcattcctttttgctgcagtgaagtataaggtggtaggatatttcctcattttttgggcatgattggcgtcgatgaattgttgtttagtcatgttgatttcacaatcttcaactaaatagtttcgatccctaagcatttgcatcagtgttcttcttatacagaatagccatgttatctcttcatcatctatacccatattcttcgatggatcgatttctaatcatcatataataatacaccaaattttgttaattaataattactactattcactaacttactctacaagaataaccaatatatagtaattaattaaagtagttattttacttaattagcacccaaactagaatggattattattattgttgttgttgttgttgttgttattattattatggattaaaggaattaaagaaccaaagttgttagaatatacatagtacgaaagaaagaataaagaaaaaataccaaaatatgataggcatcgtaatgaagaagagtacaaaatagtatatacattaaaaaaagagtgtaaatttttaaataggaaagaggaattaaagtattttaattatttactgattaacttgctgagttgacgagcctgatttacttgctcccttcttgattcttaatcgaaaaagagtgaagaattttaagacgaggaatcaagaggatgaagatacgaatgaagatttattttatagaaagagagagcaaaagaggaaacttcccaaatgccgtccatccaaaagtttcttgtagccgaagaatacccatttactctattgggccatcaaaaaccttcttttctta

SEQ ID NO: 39445 - DNA, 2637 bp, Cannabis sativa
ttgtagatccaagcactcaggttctagtcacaactaaaatccccatgaacactgcagatgtggtgaatcctgtcaccacaatagatactacaagtctggctactaatctagctaaactaatacgagcaccacggtggatccaagtggcaggcacatgcctccaagagtagacccaccattggcgcctccccttgaaagaaagacccaggggtgacaaccccctagaacaacacctagatctcgactccggttctatgctagagagacagaccctagagttggggagccccatctagacctaggggaagactttgagttggccagactcagagaagctgtaggtcatgcaggcctaactaaagaaccacgcgctgctgattgtgatgtcttcgctcagtggagattaaaattcttaggagagatggatgaccaagagtacatccgttgatctatccaagcagagttagatcatcgcaatcgagaggccagctatttgataagacagttcaactagagaaccgatagaagaggccaggatgtccttcaagatccacttcaaggaagacttccactaagttcctcaagaactaggatagatattcccctgccagagggaggaatgaactttccttaaaggttagacgacaaaaatagccagatctaggcaaccaacgacacgggggaagacagctagggatctctggctcagcaacacccccattgtgcaaccattggtcggccagccaacagcaagagtacctatggctggccagagtacaacacttcctcccctaggggagcaaggtgctcacaggttaatctttaacggacaaggactgagagtgggtggaaacacccaaaatggcagttcaagaagtgaaactgatcacatcaggtatctagatccactaaactccagcaattggtgtgatttacccctgtcaacacacaaccaacatcaattgatcgtggagttacgggaggctaggccctaccttttgtagatctagccagccatagaggcatcacgggaggtagaccctgcccattgtaggtctggtggccatggaggagtagtggttggccaaaaccttcccaacataggtctggctagccaaacatagtagccaggtgtagtcttggccggcgtaggcttgatcctgtacctgggaatggctggccagggtctacagttcaacacgggtctagctgatcttcactatacactctctcagggtatgaccagccatcccctatatctttagaatctacaggctccctaaggagggccaattaattaagtccccacaacaacatatccttttgtgtaagcacagttggaccaacttagggacatgatccagggcatagctggcccaaagccttcagacattgaacttgatcaatcaaggaaaccaccattctcaacatacataaatgccttgcccttgccaaagttcaaaatgttgacatggaagatgtataccggatgagaagacccactggctcacatcaaatactttgagatgcaactcgatctctagaaggttactggtgatgtacactgtcgcatattcctagcccaatagtggtactttaaactcaccgcgggaagattcaactcttaggccaagttctcatcctcaagacttgtaccatcacagttagaagaccttgtcgaagtcaaacaacgacaagggaaacctttgaaagattacatccagaggtttatggccgaggctaccaaagtcaaaggccttacaaaagaaggttgttatacggccataatgtggggcatactcccactgagtgatttctagaaagatctacagagaatctccaccaacaacatgaagtagttccttgatagagctggcgtctttatcaaacctaaagaagacatacaacaggcccaggggggcatgttaacaataggcagtcacaaggcacccagtagcctcatgacccaccaagcgcataggcagacaacagcaattcttcctagacttctagtggtaaaaatactagaaacaagtgcgacacaaacaactgtggaaggaactatggaaaaaaggggaagtttaacacttctcccatgccatagaagaataagaaggagaagtacacctacttcaccctcttaacagagaagcctaaggccatcttcatggccattcagggaacaatcccgtaccaaaagccctttcctattagaagggagatgagcaagagggacttgtgtcaatgttttgtagatatcacaacgacctcagccacgacaccaatgagtgtcaaaatttgaaaagggggattgagtacctattaaggcataacaatcctcacctgcattgttttgtgcaagatgattgaactcaggcacaaggtgcccagaataaagatctaaagccaccacctgtgacaggacacctaggggtcatcattggtggaccccatattgtaggtgaaaccagcaaagctagggagcactatgctcagacactttgtcatgagcccaaaggtaatatcatagttgtgaaagataggagctctatgcagaaaaatcccatagagcccacgatctccttcagcgaagaagatgaagctcctgtcagcttcctgcacaatgatcccctggtc

SEQ ID NO: 39446 - DNA, 1141 bp, Cannabis sativa
taaaaaagtgcattgtagaatcacactatatttatatggggttaatactattttgaaccctgtattttacaaaagttaccgactgaaccatctggtttgttgaataacaaaatatgaaccctatattatccaaaacagtacaaataggatccatagctcaattatcgacaattttttttaatataaccagcttggagataattcataatacgaacagatgtaaaaattataaccagttttttcatatcatctttaaatcgggttattattattattttttttttttgacaagaaacagtttaaattactattattaattagtattattttaaaaaatacagagttcaatgcaaattgtaatttaataaaatagaagattctaatcaataatttttagaaaacataaatttaaaataatattatagatatttgttcaagtaattcaaaacaaaacccaaatggtcaaaaacacacataaatcccttttctttgttcatttacaatattacaaattgcattttaaaagcttgcaaaccaagcaaaaacttaaatcaaattatgcttctctctaacaccaaccggactttattcaaatcaccctattttttttatttatttgttaatgtatttaaatatatttattaagagccttacaataaaatatataattatatatttatagaaaattctacaatacatcatttaaaataggtgtatcgatgcactcttatctatttcgatatataaaaaaaatacttggtctaattttttttatggtcgtatacattataattatttaagacatttagcaaaattttaaaaaattcaaaaaaatttaacacgtcaaaaatagtgttcaaaaagtttattacatatgcaacttttttattttatacgcgtgtgaaatagacggtttaaacattgatttttatattgtaaattatttcgaagctctcaaaattttgcagatgtcttaaataactataacctacacggctatgaaaaaattaaactaaaaaattcttataaatactgaaataattaagagttgcatcagtacacttattttaataacgtgtattgtaaaattaccttatatttatttagtaaaattgcaatgtaaaagtggcacattatagca

SEQ ID NO: 39447 - DNA, 1983 bp, Cannabis sativa
tttttaaaataattctttttttttttttttttttttaagttttgccatccaattccaagtgcaggataatattatttaattactttaattatttaacaagagtagagggggtctaagaaggtgttgtgtgtgagtgagtatatggttgtaccttttcattcaactcaattggagtatatctaacaacatgtgtatgcatgtttgtttgttaaatttgtattaaagttgatattatttaattattaatttaattaataaaaataaaataaaatttaatttaattttaaatttatttattaaaaaatatatttaaccaattttattaaataataaaataagcaattattttataaataaataaataagtttagatattttaattaagaatgagtgtttgagagtatttaggggcggcctagtggaagaagtggtcctgctatctctcacttgtttgctaatgatagtttcttctttttgtatgtatctcctgacagttgtgccatattttgagtaatattggtatggaatgagtgtgcgttaggttagcttgttaatttgacaaagtcctccatgtgtttttctcctggtatttctaaaggagcggatgatgcttttacaaatgtttaaggaccagttcgaagaatttcatgtcatgagaagtatatgggtctcctctcctgtgtttttctagtcgttgtaaatcttgtttgtttcaatctatcaaagatcgggtttagaacaaattttttggttagaagttaaatggggctgaaacgtataaagggtcttatatatatttggaaaattattttttggggtaggaaactttttcagagggtggtcgatggcttatcggagaaggacattcatgaactttcactctcaggtatggattcctaaacaatctgcttctctctcgtactccttctagagctatcctagtgtgtctataattagtgatctaaagtttcccattgatgatcggaatattactcttattgataaactgattttgtcttatgaggctagatagattttggctatccccaaatctttacaacctttggatagactaatttggcattacaatgctttcggtgggtacacaatcaaaagcgggtgttgaaatgctattcgattattaggaagaggtcaagttgattcttcttcaggcctttctttttggtggaactatttatggagtctttctatccctcttaagattaaagtatttatttgggaaggttgtcttaattggttaatttcttttcctacctctcacaatttgaaaatgcttaaggttccaacaaattctttgagttctatgtgtggggttgaaaaaaccttttattatattgtatattttagaaaatatccttgtacacaaaatagctatacatatataaatctaggtcataattaattctataaactataatagtgacacacttggtaaaagagatttccacgcgagaatgagattgcagcctagtttttatatttctgggaaatactataatcaagcaacgtacatttttattatctatatattatatatataccttattcgacgtgcataaacgtaacgctttgtttaaaccaaataaaataaactagttgacaaaacgattgttggtttggtcgtattaaacatattaacaatttttttaaggaattcagaacaagatatcaaaacacacaattcataaacaagtttttatgtataaaagcttgttccaggaaacatgcacaaatggttggactagctagacaattagacatctatgctcttcaataaataagaaagaagtacctaattaatcctaatataaaacaacacgtttaaccaactactaataacagattcacaagacgttatagtagctacaacatacgaatcaccaaatcacaatcattacttcttagtgtcttgatccattttcaaaataaacatattattccaggtacagcacagccatatta

SEQ ID NO: 39448 - DNA, 2910 bp, Cannabis sativa
  modified_base (1925)..(1926): a, c, t, g, unknown or other
acaaatccaattacattgtggttttctaaacgcaccctaacttattgacaaaatatgatatggaatagaatagtgacacgatttagttaaaggatactccttaccttatttttttttgttgttgtaaatgaattacataatctataataacaatgattatttttttcaaaaaataaaataaagataattggaacaaaacaatattaagaacttaattacaaatagtcataaatatagtctatagtgtctgtttgaatttgtcttctttaataacaaaaacttaattacaaacttattttttttttaatttgattaatgtgtaaacgtgaaaagatttggaaaaagcaaatccgatagttgagatttaggtgaacttggggacatataatctgagagaatttttattttctcattttaaataatgtgtagtaattgtgcacaacatgaaaattgaggatggaagtgatattaatgtaacaatataaatgaatgcaatccccaagtattgtgatggtggaaattgacctgtgcatttgggtttagcttttcggcacgaatttagaaagtatgagctattagaatatttttatatattaagtataaaatcataaattgatttttggactattagcatgaaatattcatattccatatcaattatttgataaacataaatatgttatatatagttattcactaattaatttattttttgaaaaattatcaaaatattctaataattaatgtgacgcaaagtattatggacttcgaacccgtgacattgtataatatgttatacaccttaactaactagcctatcaatatttgttatttttaatacacttaattttacttaaataaaagtctaataattttttttattttttattttgggcccccgaaaagtgtgagccctaggcacgggcttagcccgcctatgcctagggtcgactctggcgcagatactgatagagtatctctatatttataccagtctttgagctcctcattcattttgtataaagagcaaattatcatctagaagagtatagagagcttggaaacttgattaccccatactaactcattttcttttcttttgtaaatctgaagcttatgtggattgaagcttaaagaataaatagcttaaggtatttcgatctctttcgtggtttgcatatatgttcgatatgtttatattattctacatttcatatcgattgtatatgctttattattttcatataatagtgtctaatagttggtattaaagtcatttttatctctgtcttgattattttgagttgttcgtgcgtgtgtatatatatttgttagggtttatgtcttgaaaagcttgtaaaaatatttttgatttgtaaataaaagttgaacattttgatatatgcatgaatgctaaattattaatatttaatattgaataattattttgattctgtgatcacctgctccagatggctagttacttccaggaagctgagaatcatggagctattatagatcaagaaactcaagtgaatttgatcttaaatagtttggctgcagcttttctgccatttacttcaaattatgtcatgagaacaagttacttttttttgacacttcccaagttaatcaacaaccttcagatttgaaaatttgattggaggaccgcaaaaggagaaaacaaagctcctagttctagtactgctacaaatggtacgaccaagcctgaggtaaatattgcctctacttcgaaacccgaaaagaagaggaaatgaaagaattgcaagaagcctcttaaagttgttatgttaatacaactaataaggataagaaggttgataatccaaaatcaaaggaaaaagaaaagtgcttctattgcaacaaaaagggccactgaaaaccccagtgtcctaagtttttgnnaaagaaacaaggtatttctatctttgttataaactcacgtgttttagagaaatattatccccttgatttattatttctggatctactagccatatttattttcttcttatttcagctccagctacttaaacttggatcgctatcctagcgagttgagtcggatggttgaacagaagggtggagattgtccaagttgaagataaagcttgttatcttctttaaatttttgaattaattattttagttattgaacaatttaactttaattattagtatgggattttatcccctatttcatattattgcaaacaattcattatgatatttttgagactattaataaaattttctctttaagagattttcattatgaattatttttataaaattgagcttcgtattttttaacttgtacgttaataccatattatatttatatgttatcatgttttatgtgttttgtgttttattattgatacaaaatctatggtatttttaatatttgaaaagagataatactacataaacacttagaatttaaaattcaatgtgttatgaataattgttatttcttaagcaattattaagatttgtttaataaaaatatcttttgatctgataggggtggaagaagttaagaagtaatatatgcagttcaaagatcttttatgtctatttaactctaaattataatcgaaactccaccaaatttctataacacttagggattgaagaagttattgattatgtagtttaaaaacttttaactttaaactctagactatactcaatacaccacaatatctctatggcacacttattttgattagacatagataaaatataataaacgaactagcaaattaactattagaacttattcttgattagagatgaaaatttataccgcggggatgggtaactgcggggatccgcccctaatggggtggggattccccatcttgatggttaatggggcggtgg

SEQ ID NO: 39449 - DNA, 2572 bp, Cannabis sativa
aacgatgtaagagaattgtaacattaggtatttttgccaccaaaaataaacattagatatttaagtgtataaaatcgaaaacaatttacccaaaaaattaaaagtaaaagtgttaccaaacatcattataataactgtatttttttatgcatatcttgaaaaaacattgatcttttaagtcataattaccaattaagtcaaccaaaatagtaattatgatcagaaatcaaaattgcttgaatattcaaaagaaactacattaagctaaagtgaaacacaacaaatttttaagccataaaaaacaccaacatactttgtcaactccttttcatagccaaacacaagtcaatctcaccttctgaactcttccaaaaaaaaatctcaccttctgaaaagttctccatgtcagcaaactatctgaaccattgttactgtagttgacttcaataccaaggaagtaggaaagacgtcctaaatccttaagagaaaattgtttgttaaggtctgaaattaatgttgtcacagcagtagggtcacttcttgttattaagatgccatcaacatacataagtaccggtgttgttgagtggctagagtgattaataaacaaggaatgatcagacttcgaaaaaatgaagccaagagacagtaggctatgtcgaagcttgtcaaaccaggccctatgggcttgtttaaggccatataaggtcttgttcaatttacacattagatgttcttgacgagaaacttcaaagcaaagtaatagagtcataaacacctcttcttgcaattctcaattgagaaaggcattattcacatcaagttgccttacactccatccttttgacaaagctagagttaggaccacccttttgttactcattttactacaggattgaatgtctttatgaagtcaaaattttacttcaggaggaagtaatcacacatcaatagttgaggtgtgtttcggagatcaaattagcaatgtggattataaaaggttgcggtaaattactagagggtgtctaaatttatttaagtctattgtttttgtaaactttgatactttactaattgattttattatctgggtgtggccttgtggactaatagtatttgaaagaacactgataccacgtacaattctcttgtgtcaagtttttacattctccactatttgtttttggtttgtttctgtaaatttgtgttctgcagtaacagagttatattctgctgctgtagactgttacaacagtgtttagactaaaatttagtataattattggcatttgtaaaaactcgatttttcagttccattaaagaaaaaaaactagaagccattttgtttttttagttttcatagtgctaaataattactaatatgccaataaaactaacaaagaatgcaagaatagcatgtgcccaaaaagtcaaaaaaaaaaaaaaaaacatttagtatgaaaaaaagataagagtaatttacaacatagatagtaagttaaattcccaatttcagataaatacttaaagtttgattttaatggtaataatacataagttatatttttggaacttttgtaggtatttgattgttaagtgtcaagtcaatagccacgtgacagtctctggttggtttaggtcattaaatttttatttttatttaaaatataatttaaatataccaataaaaaacaatacgtggataatgacttaacacttaacaagcaggtacctacgaaaattttagaaatataatatttatgatgtaaattattcaaatgtttaaacccaaaatagtgtgtaaatgagacatggggatagttgaacatctttcattgttggttgagtcttttttggtccgctagtgtaataagaagaatcagaaaataaaaaataagaagaatcgaataagaagatgaagaaaaaggagaggaaaaggtcaacttcattaattttgggcaagtcttagttcatgatttcataagctcatgccagtttgtccagattgattttgacattttatatttcataatgtgtttataaaaattaattttaagacaaatctaagtttgttagaattagctttatacttttatatatatttgggtaggttcaagagaaaaaaagaaaagtgattttaattttgaaatgtaatattgacatttgagttttaactttttatttagttttaattttttttccataaatttttaatttgattttgaactgttgttgaaataaattcctacatacactgttcagattagcataaacatagttacaagactataaaacctacaagtggtcttcaacctctaacaacctactgagaaaccaaagttagtttcaaaatttgttaaaattattgtaactaactctcagctctcttatctacttttaagctataaatacaagctcaaataactggtttttaacaaatcagaacaaaattgagagaaaaagaggagatttatagagataagtcttggagcctttgggttagggctcgaagatcaaactcaaagggagtatcataaacaaaggaggagtgagtaagagagagagagagaga

SEQ ID NO: 39450 - DNA, 1760 bp, Cannabis sativa
atttatatcttttaaaaataatgttgcccccttgatcctactgttttcttttttatcaacgctgatggctgctggaataaagatagattatctacctactttgatgaggaggtgattcaggccattctagctgtgcctattagcgatgtttctgtggagaatactctcatttgggagcatcactcctctggttttctcactatgagttcagcttatcatctagccaactctattaattccttaccaacatctactagtaatgctacccttattaaatggtggaagaccctttggaacttaaaactgcccccaaaaataaaacattttatctagagaacctttcatcatagtcttcctacaaccttaaatcttttccacaaaaaaattgtgtcaagacctttgtgttcttgttgctctaggtgtcctgaatctgttacccatgctctaatagagtgttttaagagcttcaagatagtggaaggtttctagatttaaaaaattttatttacttaataggagtggtaatatttgtgagttccttttgaggggttttcaagatttatccaaggaagaactttgtctcttttttggaattacatgggaaatttggaaccatcgtaatatcagtttgtttaataaaagcaagtattctttatcttctgctgattttcaggtttcaggtttgctgcaagactttgatgatgcccagaattttcatgctcacactggtcctcaagttttctcttgttgtagcattggtaattctacaccgattatgcctaagcctggtttctataaatcaaatgtagatgttgccttgagtgatcaaaagcacaaagttggaattggagcagcagttactaacagcaagggagatattgtggctgctatgtcctctttttttatggcaatctgtcccccttattggcggaagcaaaagccttgctttgggctgtacattggtgcatgtcaataaggtttcctctagattgcattgcaagtgattgtttacttctggtgcgaagagtgaagcatcgttggaaggataactctattttctcagatttagttgatcaaatattatcctgtctctctttttttccttttgcagcggttattcacgagtcaagggatcataatgttatatctcacaatttggcaaaagctgccttaaggctttagagagaggttttttggaatggcaaagttccagagttatgacattattgtaatctgtattctactttgtattttttctttgtggttgcaatatatgttttttcaaaaaaaaaaaaaaattataatacatactaataattgatcttgacacatttattattattgttgtaaaaataaatataattaatcttaattatacaaataaaaataaaaataatgtagtctttatttaaaattatttatgactaaaataaaatacatatcatcgagtaaaaatagtgtaatttgaattcagttacatatatattagagcatccctaaaaaaaaaggtaaaataatttcttagctaaaattttaaaaaattgtgtgaaattgtacctcaataaatgatgagttaaaatagcttatagctatttttttttagttttatgtaactagtgaacaaaatatttaatcattatattttattacgttagtttaaatattttgatatggaatagaaaattaaaaaagatatatttatttatttatttaatcttgatagaaataagtagagtattagtaaattaaaattccacata

SEQ ID NO: 39451 - DNA, 2111 bp, Cannabis sativa
ttttttaatttgaacaaactaggtggaatttatggtctatttccttcaaataaaaagatctctaaaagttattctagttatagaaagttagatgtcttctagaagggcattctgagaagtttaactcttccatttaaatgaagtctcgtgcaatgacaggtgtccttcagaagggtattcccagattcctatcatgtccactcaggaggagtcttcaggaaagcaagtcttcctctgacaaggagtttcagatggcatgttgttccctcctggaagagagtccctgattgtcgactccagctatgtctgtcctatttgggaagtctattcagcgtacactttggtccatcttctaggaagcgtacatctcatccagaagtactttaacttaagctggcgtggagatacgtgtacgagataattttttatgtttgttaagccataactaacacaacaacttataaagcacttgcagccaccaactttagttactatatcatgaatctataaataccaccaacacttagcatttcagaagaaggaagaagatcagatgagttttgagaggtgatcttaagagagaaagattgagaggtagagagagaggtatagagaaaagagagagattgggtttggattttgtatgaagaattttttgtagatgaagaagaatcttgggtaagagtgtgagagataaacacttagagagaatctaacaaagaatcgatctcaattgtattgtaccttgttctatctcaattaataaagaagattttggtagttttttagaactgaagtagagttagagatcagattgatctataaccagtatatcttggtattgattttattatcttattgctttaattgtttctaggtttaatactctattgatccctattttatctctgattgttgtgtgttatttgttaatcatgtcattgttaattgtttgttgattaagttttagtggatttgattttgcacaccagttctaattattttacaaatgagagcttggtaattaattaagaacgcagaatcaggattctttccgttgtaatttttcaagaaataatcactgtcatcaatggctagattcgaggattggagaaatttgatggaacaggagacttcgtgctatggagagaaagattgaaagggatcctagtgcaccagaaagtcttcaaagttctttgagatgaaagttactggctcagaagaaactgagagagaaagctgaaatagaggagatggcgggttacacaatcatcatgtatctttgacaaagtgtttgaagaaaactcatcacatagaagatagcaaaaggagtctggaacaagttggaagaattatacttaaaaccatcaattgctagcaatataaatgtgctagaaaggttatactgttttagaaaaatttcttctatttctttagatgataatattgacaggattaatgagattattatacggttggctaatataaatcacaaggagatgaagaaagccaagccatcatttttttggcgaccgctcccaatttcataccaaaaagtcaaggctattatcaagtattgtagagacgtgattgtattggaggatgttgttgtctcacttaagttaaaggattttgaattacaattggagaaggaatcaaagaaagaagaagtgtatttggcaagagtgagatcaaccaagaaagtaagttcaaagagtaaacaacatcactctcaataaggattgaagttcaaagagaaggaaactcgaaagtgttactcttgtggaaggtttggacacttgcaaagatattgtaagaagtacaagaagcagcaagactttaataaatctcatagtagagataggaaggacaacctacatcatcaccacaggaaggactctactgtaatcgcagaggatagtgatcactcctcaatagatgtagaattattctccatatcagaatcttcaatgaacagggagttgattctagaccccggatgcaattatcgcatgtgtctaagtcaagaataattttctgattatagatcattttgtgcaggtaaagttctaatgggaaataatcaatcatgcagggtcattggaaccaga

SEQ ID NO: 39452 - DNA, 1395 bp, Cannabis sativa
ttttttttttttttttttttttttttttttacaaaaaaaagtttgaagaagatgaaaatcggggtatctacctaataaatagtctcaacttccattttgagtgtcagtataattttgttttaattttttaaaagaggtgtcacaactttgaaagctaagatttaattttatacataaactatatattaaataagacgtatattcaaaagtcatataaatcataattaaaaaatatctctataatatgataacaaagctaatgttactaccatacaatgattctctatatatcaaccatatattagtaatcatgtaaacttgacaaaaaaaacttgtagattataatttattctatttagttttcattgaatggaaataaaatcaaatctatatttttaaaaatttgttcataccctatattcttctcattaatgtattctgtaaagtctttttttaataaattaggtgtcaaaatattttttatttaatatattttttcttgtgcaattaaactgattttattacagtgaattcatgcctttaattactcttttttttctaaggaaagatttatttttagctggacttattttgtttaggaaacttcttgtacgagaatgaattctcttatggaaagttatttagttttaggaaactttgaattttccttcttctttaatgatttcagttttgtcttgataagatcaaatcatataaactgtatttggtaggtttgaagtctaaattcatgatcttgttcaaatttggaaagcttccttactcgtcctgatgatttgctgctacaaagttgaattctaatgctgcaaattagaattttttttaaggaagttttgtacaactgtgaaattatttttgtggctgcttatagagtttctatattctataaactgtatttggcaggtttgaagtctaaattcatgatcttggtcaaacttggaaagtttccttactggtcctgatgatctgctgctacaaagtccaattctaatgctccaaattagaaaaatttttaagaaagttttgtacaactgtgaaattatttttgtggttgtctctagcgtttctatgttctataaatagaacctagagagcagctaaacgatttacctcttgtagtttttattttttcatattttcttattagtgaggagaaagttctttttgtgagaacctagttgttcaactaggttttagtgttcatgttattattcttatactacccttaggattggttgaacaacttgattaaataagagaaaggtcttcgagggaagactagttcaagccttacttcgggaggaagtaagtactcacacatcaaagatgaaaggagttcgttatttggtggtatttcaaaatcagattcatgaagtg

SEQ ID NO: 39453 - DNA, 2090 bp, Cannabis sativa
aagctttccgaagctcttttgagggaggagattcattggaaacaaaagtcccgagtccaatggctacaggaaggggatagttgctccaaattctttatggcctccaccatcgttcgcagacgaaggaactacatccaatgtattaaagattccctgggtagtgaatggatcatggaccaaacgctgattggccaatgcttcatcagaaaattcaaagagctcttcaagaaagataactctagccttactccccttaaggcgggcacaatggtgaatctaatttccaatcatgataatgtcatcttgaacgctatcccgaatgccgaagaagtcaaagaggccgtttggaacatgggaagggacaaggcccctggtccggatggactcccaccgagtttctattttcaccactggggaacggttcatgaggatcttgtagacatggtaattcatttcttcacgaatttggagttaccaagctacataaacgacacttcaattgtattgatccccaagaaagagtctccctcattggtaaccgactaccgccctattgcgctgtgtaatgttgcttacaaagtaatctccaagatcattgcctcaagactccggccattgcttcataatatcatatccccgaatcaggcagcgttcatcaaaggaagacacatagcggagaacactatgattgctagagagatcgtacattcaatgagcaaaaggagaggcaagaggggtgctatgttgatcaagctagacctcgaaaaggcttacgacaaacttgattggggttttgtgcattcggttttactgcaatatgggttcaccagcccattcactgagtggattgatgcgtgtattaaggttcaagaaatcaagttacttctcaatggttcaattgtggggaagttcaggccggaaaggggattgaggcaaggtgaccctttatcgcctaccctctatataatggcagccgaagtcttatctcggattattaatgaaaaagagcggcaggggtgcattaaaggtttcaaactggttcgtaatgggacaccgataactcacttaatgttcgccgatgatgtcatcctgtttggtcaagccacaatccgagaggcaagagggtttatggagtgtctcaactactactgcaattgttcgggacaatctattaatcttcaaaaatcgtcggtcttcttctccaaaggagtgccaagtcggaaagcccaatcgattgtaaacatactcggtatgcagagaatgaataataaggcaacttacctgggtctaccgttgtttcgatctatcaaaagaacggaagataccaagtacctagtggagcgggtcctaaaaagaatacagggatggaaaatgaagcttctttctagcgcggggaagacttgtttgatcaaggttgtgggatcaagcttatccaactatgttgcctcctcagatgttattccgatagcaacagccaataagatcgacaaactgcttcgcaatttctggtggggagatactgaagaaaaaaagagaatgcatacaatagcttgggaacgactgtgcagacctaaagtggggggaggtcttggatttagagcaacagaaaccatgaacaaggcgttccttatgaagtgggcgtggaaagtcttaacggaggagaggggtttatggtgccaacttatgagggaaaaatacactaagaaccaaaacttcctcgacttggaggcaaaaccaactgatataattctgtggaaggctattctccgagcccgtgaggagctgaggaaaaacctttgtcgcaaaattggaaatggccagtccacatccatctggtttgatcaatgggtgtcggggaacaacagacagcccattcctcgggtccttgctgcggacaaagttagcttggttagtaatttcattcaagataacgaatgggatactgatatggtcaaaaggtggttccatcgagaggatgcaagaagaattctcaacatctctctccctaacacgccagcagctgactcttggctttggctaccagaggcaaactgtcaattcacagtaaaatcggcttataggactctaaa

SEQ ID NO: 39454 - DNA, 2067 bp, Cannabis sativa
  modified_base (2013)..(2013): a, c, t, g, unknown or other
tgtataagaaccatcattctgtgggtgtaaggatccaatgaaagcttgaagcggggacgttacaatgataaacaactaaaattaatcaaaagcagcaaaactaaacaaaagaaataaacaaacaagttctaagtgaaaactcttaactgtacatcttttgtggaattttctaacatgtaaacaatacacaactaatacctatcaccacaataccaccccctgcatgttgaatttttttgaaacaaaggattattccatttttcattctattttacttcacaaaatctacatggccctcctttggagtcaaattaatcatttaccatctccgagagatttcattaatcaataatcacgttaaattatatagaataattggtaattttattttctgaactttcaataatactaattttgtctcttaaaatatatagtttgtaaattaacaactttcctctttaaactttaaaaactatcaaatgatacctctaaataaaaataagaaagactcaatatttttttttagtaattttaaaaaattaatttagatcttaaaaaaaaattattttgaataattaagaaatttaaaaaggaaattaaaattttaaaactaacaaagcgagttaaaaaattatttattttttattaaaaaatctatttagatataaaaaaaatatattaaaaatttaatttttataaatactaaattttaggggaatgagtatatttttttcctccaaaaatttagatttatataagaacataacattttttttttagtttaattcctatttttttttcaaaataactttataattttattgaatttttaattattttttaagatatgagttcataaatataaataagtttaattttttcgacaaaaaacttagtttatttaaattatttacttgatttttaataattttagtttgatttttaagataatatttataactaaaataaagtttgaaatatttttttaggaataattacggtttttttaagtaaacttaatatttttatcaggtgttttaataacttttatgattttttttttagaatcattataatttatataattacattttttaataaaaggtggtaaaattttgtattagtcaaagtttagacggtaaaaatactaatttttaataattgaagaaataaaatttaataaaaaatgtataattatgtaactgttatattttaaagagaatttttaactgttgtatattttagagaatagaatcaaatagtgtaaaaagtaaaaatagtaattattcaattatatattatgtatttgtttatgttattttatttataggcatataatataccatttcgtgtggccacttgacagcttttctttctttttcttttttgtttttttttttttttgtaaattgaatatgagtttgaactttttaaattacaaagttaaaccgcccaatttccccaggattataaatatatcatacaatattattaatattttcctttcatctagatgattaataagtgtccctaatttcattgcaaaagaaagaagtgtccctaattttttttggcaataagtctgactataattaaaacataaaacttcaaaaactaaaataaaatagtggtattactttaatggtacggacacgtaacctaacacgttgacgctagggcaagggcagcttgctttccagttgcatcaattttcctttacttcttaattaattattcacttctctcttctaacgtggggatttgtagactaattcaattcaatataatatatatttttttggtattataatggaccctattaaaataaatatagtaatgcaatttttataatgaatattatttttccattataaattattttaaatttattaaaattttatataaaaacaattagattattttttttttctaaatataaataccaaaacagataatgagtatattatagaatttcatatataaatttttgagaaaaaaacagaaaaatacaanaaaggaaaaaaaattacaaaaatactttgggccggcccattaaacatttataca

SEQ ID NO: 39455 - DNA, 1341 bp, Cannabis sativa
atattatacttttgtgggaagactaagaagatcgaagtatatatatatgtattgaggcccatatatcatgtgggagtgtatgggggtccatgtacatctagctaatatagttatcttctaggacatgatttcatatatataaatataaatattctattttataatatgtgtgttccttcaaaaaaataaaatatataaataaatatgtgtgtgatgataggtaacacctattatgttatgtctccatcaaacattttggaatcatttcaggactttcttctgtatttttcttaaaatatttgctgatagctctgcgaagtagtgtttgggcatggaaaagaaaagttttcttttgaagatctcaagtgaaattttttcccttttaattggttttacatgtagtacgtaaatgcctgtacattattaatttattcagaaaatgatcataataaatcatgatcaaatgataggtaacatgcattttcatccatcaatatagttttcaccttatgatatatataaaatttacttcaatataactagaagtagcttcttttgctgtgtaaagaacaagtatatatatatatcttctagataacaacatcaattgatttaatcaataaaacatatatatatatatgtgtgttatttaatgggacataattaaaaacgtacgtcaatcactagctatatatatatatttcaatatttgtcactttccttataaaagagatgtccttagcttttttgtacataatggacaaattgtcaaattatatatcgtacactactcaaaactattaaaatcctagctgtatagctatagcccacccctccacttcttcaaaattacgaaacaaaaatatcatgaaaaaggagaagaagaaaaaaattgcaacttgatgattcacacttaatgaaaccatcgttttttttttttctctttcttttcaatggaatgaaatgatcactttttattatagtttttatattattactttttttttttttccttttcttttttgcatgcatgcatatggatgagacggtataataaaggatagctgggtcactactattctttccttagaatacatgctcagagagattgtaaactgcaactaaaatccaaaagaaaaaagaacattaataataataggagggagggagaacaaaaagtgataaataacaataccaaaattgggttgcttttgttatgtgtgtacatatgtatatatattatatgtattattatataattaatgtatatgtgtatcaagtgtagtttaaacatagcattttcttgcgagaacaaagtggagcatgccaccctatgtgtaa

SEQ ID NO: 39456 - DNA, 1622 bp, Cannabis sativa
actcattagcccaaccccacaaaacccttctcatcttagaaggatcaaaaaatgtttttgaagcataataatttccataatcatatctcaaaccagcccaaccatcaatggaagtattatcaggtacatacctatctttattaggtaaataagtaccaatagtatagtactcatacctagtaatatcaagactagctttgaaaacatgtttgatattttttccaagtgaagaagtgtccaaaccatttttggtaccagaaattgaaacagggtaaaaatcaggacactcccacatcccagtgtgtggcactgagtgtaaagggtgtttggctttgatccaagtcttgaaatctttgcttctatacaaatgtgccatgcctcggcggtttcttttgcctccaaccaccattctccagtgaccatcttcgcctttccatgcagtcgttgggtcgcgaaatgcgctggcgttttcgcttttgtctggtattgctattggattgttctttggtttgatccattctcttaggtatggatcagatgcattttttggtatggcatagttttggatttgtctaatgcttttatcaatacctgcaataacaaagttataatatgtaattaaggaattgcatatttgatgatttatgaccaatttattttagaaataattacatgacacactaattttcttaaatgaattatatttttacttttatttttttttatatatttttacggtattttataaaaatataaaataaataacaagaaactacatgaaactaacaaaaaaaaaaaaaataacaacaaaacaatataaaaaatcatatttaaaacaaaaaatcaataacgaagtaacaagaatataacataaaaatacaccaaaagatcatattttatgtaaataaaatctaaaaaatcgtaaaaatattaaaaatttcggacaaacctttttttttatatatatatattttttgttatttttaaatttttttgaaattatctattctattaatatgcaatataagtaggtagcgatgcacatttacccatagggggactgttcataataataagttgtgtttattaattaataactaatgtgtaacattataatttttgtatagtttaatctttaatgtttttatacattgaatttttattataaattttattttttattaggagatttcccgaatgattaaaatctttaatggaatggaaatgggggagcactctccactaatttctcatcttggagctattcatagcaactttttttaaaaggcattctacaaagaaagatactaattgttgtgtaaaagtataaatttttctaatattttagagggatcaatgtaaatattttaaagggctacactatgtgtaaacttttattcttttttcatgcttactaatctatgatcatatcaacattaaaaaaaattagggtgttatggccatgatgaattaatacctgtatacataatcacaggcttgttaccaggaagaaccgtagcagatcccgaccagcaaccgtttatgtcgtaatcttcggaagggaatatggctgggtcaagagattcccagttaaccatgtcttctgagactgaatgtgccca

SEQ ID NO: 39457 - DNA, 2095 bp, Cannabis sativa
  modified_base (1007)..(1007): a, c, t, g, unknown or other
taggtgtgatatttgatttcaaagtttagattacttttttcccatagtggttcgcggtccatcgaggttcgtggctgtttggggttgacgattagtggttactttttgatggcgattagtggtcgacgtgcttcttggactcgtggttgccattgaagaggctgaaaaatatttgggattaattttcttttttatttttgttgttttggtcatgctcatgtgtttgtagtcttttttcttggctattttgttcatgcttatctttgaatttgtagtcatttctgttaagattttatgtttttattttattttgaaatgcttgtgttgtgtggtataagattattatttctatactgagtccactttttctcatgactacaattcctgcacaatatgagaaagttaatgctgatcttgttcaatatcttttcaaatattttagttaattttttgttttgtgtgttcattttagttcattctcaatatatattaatgcataagattatataaatagaataatgacctactattaccccaaagcattacgtatttgtgcagattcttcgtcttagaaaaatattaattacaatttcatcttagaaaaacatacaattacggtcaaaacataataattgtttcaacaatagaatatgacaaagaacctgagttttaagccagcacaacagaagaggaaacagaaggaaatacatgagataatttaacagacaaagataaaaaaaatgataatgattaattatttttataaataccatccagatgacttaattttttatcatatagtggtcttgaagtcaccgagaaatatgagagtttgtggtatgctaatattatagcccacatagagattttaacgagaggaaattacattgtatacccactttactttatttgttttgatttttactgttattttcatttttttttaagatatacccacttttatagatgatatctccattagacctcttaggttaatgtaaattatntgctagacttaagtagagagtaaaggtatattggacaacccactcaagaaagtgggtatattttaataaaatataatatggggtatttttaattaataaatacaaaaaagaggtatttttcagcttatcccttttagtgccatataaaaaagatgcttctttatctaatacatttttataagaaaaaaatttaaatatagactaaattttagatacatacacttaacacatagtgacacatcatcatttaagaacagaatggaattcatatcaaatttttaaaattggtaacaatctgccccataaattacacacgagtggttaccattcaatttcatcgtcgacactgcacgatgccttgacaaaaaaaaaccgtcattatcaacattgtaaaagattcaataaaatccaccgccaaggaaattgcaatcgaaaaaaaaaaaaaccattatcactacaatagaccctcaaaaaaagtttctaccacctataatattagtcaacatagattccagcgatcatagtaaatttctaccaggaacttaatccagaaaactaaagtctaaagcaaggttgataatacgatcaacaaccaataaaataaacattaaaataatgctgaaaggtcatcaaattgaataaaacaaaaacataaaaagaaaaaaaaaaactaactaacaagagctcacatataaatagcaactctaacacagtaaagaaaaaaatcaaacactagcacaaagagtaaattatacatataaacatgttccaattacaccaattatcttgattaattttttaatttgaagttatctcttatgcgaagcaaataagaaactcataagtatttttttcattttaaaatgaactcttatacgaagcaaataagaaactcattagtaactttcaatttaagaaaatagcatttaaataagaaactaaatagtaacttttcatttaaaatttaactcacatacgatttaatccattagataagaaaagtaataaaagtactaaagtggagtactgatgaaatgacatcactattttagtataccaaattcaaaacttcatgtattattaaatct

SEQ ID NO: 39458 - DNA, 1901 bp, Cannabis sativa
caatgaaccaagtcagtacactcatagagaacttcctggcaatcaaaagatccagtctctgaaagatgcagatcagagaacccaagagagaggggatgcaaataccaccaataactcagtacaaggtactatcaataaaatatctttcattaataattatgaacatgaagttctacatgttaataataccaatctaactgcttcttttaatcgatctcctacaatactgaatgctatgaatgaggcaacaagacccaatattcagatggagcaatcgggtaatggaattcgaaaaagaatgggggaagatctcaacaatgggaagactaataatcagttgggggaaaggacatgtaaaacaagaaccatggctactgaatttcttgacaaggacatggaatccaatcttgttgaggttccaataagtttcgaaactggcagtaccactcagcaaaaaggcacacgagaaaggagaagaaagtttgtcacaaagaaaggaagtagacaaaaaatgaaccaaggcagtgttgaagaagggaaaagcatatcaagtggtaacaaggcaccgggactttacactgaaacactaacaggggaagtttcgttgatcaatgattcaacctctggtcagacccaagaatcggcgaactctgctggggagggtcgccgagaacaatgaattccctattttggaatgtccaggggtttggcaacccttggaccaccacaactttggccattcttgtgaaagatcatcaacctggtttagtgtttctctctgaaacccgttcaaaaagcaccttccttgaatcaattcgcattcgtttgggttatgagggttgcttctatgtggatgctaaaggtaaaagtgggggcttggctctcttgtggaaggcgccgtttactgttcaatttaattcttttaatgatttccatattgatgcttggatcaatatggaagaggaccttgcttggagatttactgggttttacggggacctcgatccttctcaaagaaaacactcttggcagctccttaagagattagcaaggaaccacaccggtccttgtctttgtgggggagattttaatgagattagaggggttcataagaagcttggcggaagcgggaaaccggggcatctcatgaaaaactttaatcatgctattgatacttgtgcgttgcgggaaatagagtatgagggcagccaatttacttggtgcaatggaagggctgctaacatgatttatgaaaggttggaccgtgtgatggtgaataataattggtggaagatctacacaatagccaaagttaaacaccttagcagatggtgttcggatcacagccccttattactaactttcaatacaataccttgtggagatcaaaataaacaatggtggggatatcgatttcattatgaaaaggcttgggcggataaggaggagtgccatcaaataattcaagacacatggaaggatggcaatcaaattaattcggcttctgaccttgaagaaatggttcacagctgtggtactatgctagatcaatggaatacaatccaaaggaagaccaaccttgctaaaataaaagaactcaaaaaagaagtggagaagtattctaaggatcattcaactcatggcttcgccaagctcaaaattctagaaaaagacctcaacgatcagcttgccaaggaagaactgttttggaaacaaaggagcagagccatttggctagcacatggagatcgcaacacaagatatttccaccaaaaagcaacatctcggcgtaagaagaaccgaattaattgtctctttgataaaaacctaatctggaggagttctaaggaggacatagaaagcaccatttgtgaccatttccaagatcttttctcagcaac

SEQ ID NO: 39459 - DNA, 1563 bp, Cannabis sativa
tcacagccctgtggttttaacaattagaattagatatatatacacatatatatatagccaccccaaaagggtcaaaagtatatatataaatttaccgaaacaaagcaatcgtggaagaagagacgaagagtagcgggaatggtaacaaaggtctgttgaaacttctggcgcacaacgtttcggacaatgttttcgacattaggacatgttttggagtaaaagttttgcttaagctgggccgatgtgggactaggtaagaggcataaactgaggcagagtgccaataccagtacaattttgaattgggccatgttatttaaagctcgtaataaaagcttttccaagaatataatggccaggcacggagaaggagaaaaggaaaaaagagaaagaaagaaagagaggacaaaatgaatactagctacttggaatattggagttggaaagctgatttgaacttggtttcatgaaatatttatattaaaaaatatatggagggtcacatgccagttggtaaaattagaatcttttctttacgatttataagaagatttctgatgagtaacagaatatataagagagtttcaactttcacaagtgtgtaatttttaaatggtttcttaatttttggcactgtcagataactaattaaaagccgcccttatgaccattgcttttagtcaccatcatttactgtcaatacgaggctttaaaattagtaagtgattttttatattatttattaaattaaattttgtaatatctaatattaatttacactaataaataacgatataacggtatggaacttttgtggtgctcggcactcgcccttaacatttcactatatgtatagactcgttgtccaatcaaatatttgagtatacatatctaccttcattttgaagcccccaaataagaaaaaagaaaaaagaaaagtaaatatccttaaaacgtggtccaaagtaaagggacacgaagagaacgggaaaaagaaaaggaaagacagaaaaaaaaaaagacagaagttagaattgggcataattagtaagtagcatgcacgtcaaggctgcttcgttagggcttccccagtccgaacccaaaagagatgactattagctaatacatagttgggtagatcatgttacgaattaagttgggaaaaaaaaacaaattgttccatcattatttgaattaattcagcttaattatttggttatgtatttactttgagcaacttgacttaattactaatatatatatatttatatacttgcaaggcacttgcaattcttatatatatacttgcaagacaatcggttgagatatatatatatatatgttataatatggtcccttagaagcgattggaccaaacatgcatatgctcaatgctcatgatgaaattagctagacacgtcacaaattcacaatcgtgtctaatccatctaatgtgtttttgcaagaataaaatatgaagactgattgtgtgttgccctttgtatctacagccataatggtctatataattatgagctatatagatatgttcgccactatatg

SEQ ID NO: 39460 - DNA, 2737 bp, Cannabis sativa
  modified_base (688)..(694): a, c, t, g, unknown or other
  modified_base (1012)..(1023): a, c, t, g, unknown or other
  modified_base (2700)..(2700): a, c, t, g, unknown or other
atactgttattgtttcaatacattaaatcacatatttttcttatttaaataactattataagaaaattgttaagaaaaaaaaaatattataagaaaagtagctttttatagtgaacttacaatattcaatactggtgaaacaaattcaatcacaaagatttttttagtataaaatgtgacattattttaaataacaaataatatttaaaaataattaaataatatattatattaattattacgactataaaatttattattatatgaatcgtactatttaacataataaatgaccgaaattgatttatattatgatatttacaaaaggcttgggatttaggaacctagccctagaccttggctaaagacctgaagctgactctagatccaggctctagaccttaccctcgattccgaaccaagactgggatcgggactaagcccattctcagacttagaccaggatcgatctgaacacaaactcgaattcagaccgagatcgaaccctgacctcgaaccttagatccggtcctaaacccagactggaccgagaccaggacctaaacttggaccaaaatccaaacctcgaatcttgaacccctagtttaggccaagatcgagtttatagtaaaaataatataattacataacctattaatacaagccaataccaaacatagtattgtannnnnnnataaataacactatgtttggataaagcaaatattgtattaattattacgacaaaaaatttcaatactatgtaagctatattatttgatacataacaaataattcgtattagtttgtattataaaatttacaaaggatttggagtcaatccaaatctttgatttggatctcgcacctgaattttggactcagaccggaccctggacccataccgaacccggagtcggtattggggtcgagtttattaaaaatatattataactttacacaacctatcaatacaagtcaataccaaacatattattgtattaaataatannnnnnnnnnnnaatacaatacaatataatacgacataccaaacaagccgatataatataatacaatccaacataatatttcacaacatacccaacaaaacacactaaaggaaaagataatgcacacaacaatatccaaattatcaaagccaaataacaatactacatcataaagtgtagaaaccatacatgttttcactttcttggattgacagcaaaccaagcttgaacagcagctaaagaaagcactatcacagcagccataagacctatgatagcccatgggttactaaaatatttctgatagacttgagtcatccaaatcgcgtactttctctcgcagtgatgttgtatcttaatcttcacatccctataaaagtcatcttggggatcactgcattcagagcctaatttattaaacagataggccacatctgcatcactgctgagtctgttttgaagtactcggaatgctcttaactccttaacatcttgttctcggtcgatgagaatatccataaattttacataagaaataagcatatagtgctttttaaggaacttctcataaagaagaagattatgtagctttctctctgtccattcatccacaattaatggaggcagtttaagatggcctttgaggttaaaacatttgccactgaatgatatagttgccaggccagaactactaggctctaactctatacctgttgatgtaagttcctcaacatttcgaaaaaaccctttggggtcgttgcaattcagtttttgcctgcaaaaacaagagcagagtatagtactacagtcttcatgatttcttttattgttgttggtagagacaatattgccatcactagatgtgattaacaagtagagaaggtgaagtaggtgaacatctttattatttttgacaagaagaatgtcattccactgatttaggaggcatttgttggagcttggaattggcaaatcctttgtgatcatattgttaatgtaaatgaattcgacaatatctttctttagttggtttgggtcattgctcaaattcaccaacaactcaaccactccaaaagggatttgattatcaaacctaaacaagtattcttggatccttcttgcttcaccattaccaattccaaataatatttctaatgaattaccagtatagcatcttatgaacattaaaattgtgcacccactcaaaaaaagatgcctggttaaatcctccttgtcatatggacgcccatgatatgtgaagtactctagtaggtcttggctttgtctagtgaagtcttcgaataaactctctcctgtgtcgtcatagctcaagtctttgatgaaccatgcagtcaatctatatggcaagtcaagacgaccttcaattttcaattgacacctataaatgtaatcacttttctttaatgggttatctcttttgtatcggtgaataagatctttcaaccatttagtattattagattcattagaaggagtgacttcatcgctttcttgatcagtggttatttcagcttggatctcattatccacgttcacacaatattcttcacgcatcctccaaatctatatatagcaactttatatatcaatttaaaaaaattatattgtaacgcccccgcttcaagcctccattgggcccttacgcccacggaatgaatggctcttatncacgagtacgtcactctggctgtttcatggactgatg

SEQ ID NO: 39461 - DNA, 931 bp, Cannabis sativa
tatatatttttttttaagaaaaatctcaaaaaccaccttccaagcagagagcttaaagaaaaagtggaggggagactgattgtattaattctactgatgtaaaatgagctcgttgataaaagaagtataacaaagtcaccgaattttgctaataacttcccacaaggcatatttagccaaggaatgtgcaacaatattaatagttttagagcagaaaaaaagactggcaaagtaaaaaaaaaaaaaatgtctaaaatctactaagactaaactcaaaaaacaggccaaagaaacctgattattaaacttccaaactgcactcaaacaatcaaattcaaaaaccacatattaaaatcccaataagcggcattggatggttgcatgttggctaaagcttccgccattttaggagagaaagtatccagaatgtgccaaacaatggtggttagctggttgttacaattcagttagccttttctgttgtattatcgagctatatatagctctatccttatattttctttctcaatcaataatagattcacttgtttttccaagcttatcttcttcttccctgtttctctattgtttttctttccgcactaataaattatgattattaaatttattaaaacaaagttagagtgacaataaaattcatatattagggagacaaagccatcaaagtaaatgagtcactattcaccaattgcggtacaggtaagataagctagtaaaccttcttaatatgatagtgtttaattaaataattgatctatatatttagtacattatcaattgaggaatgccatgtttaatgtgctgtcctagcaaaatggaatttattaaagcctatgaatttagtgttctttagtactcaaggtttagtagcctagtcttctcagagttacattgtcctactctatatact

SEQ ID NO: 39462 - DNA, 1679 bp, Cannabis sativa
tttattaataagtaaatcagattatatgaaatgagttttatttagggataaaacccaacagttggccccaggtccatgatatttgccatgacctgccttctgttctgcatattagaccccaaaagctcgatgtaatataccagaaatgcatcacctatcttactagggtcatttacccttatgccatcagcttgttccatagataaaaccatgttctgtcttcttctccctttaatactggcatgaaaaattgcaaaattatcatctccatgcttgatccaagtgaccttggacttctgctggagcatagactgatagtctttttgtttctggagcaatagcttccttgcttcatgcttttccttgtgcaattgtgtgttcaaaggatcttgtcttagtgagttttggcattgttccaaagcttccttggctcgaatcgtatctgaaagcagattagagtagccttcattgtcttagtgagttgggattgcataacttacccaatatttccccttacagatcacgggtctactgactgtcacagtcttggcatcaattttctgtttggacttctatttatgaggtagcaagtagtgtgcaatgcctctccctagtatttcttactcattccagcttctagcagcaagcatctcaccttgtttaacaaggttctgttcattctctcagcaatggcattttgttgagggttctttacaacagttttgtgtctttctatttcatacttcaaacaaagctcattaaattcatcatttataaattcaagaccattatcaattctcaacactttaattttggaatttgtttgagtttccacaagagttttccaattttaaaaagcttttaaacagtcatttttgtgtttcaaaagaaatacccatacctttctgctataatcatcaacaatggacagaaaatattggttacctcctattgtcttgatctgtcttgctccccatagatcatagtggatgtattcaagcacactcttggctctgtaactgttgttagagaatttaattcagtgttgctttccctgcacagaaatttcacataatggtaagtttgcataagtgtaattttttatcagaccctattttgacagttcaactaaaccttgttcaccaatatgccccattctagcatgccacaagttagtttcagacacacatttatccacagatgctgcataagcaggcatgattgtttggccatttagaaagtacaagccatgcctcttggtgccttccaataccagcatagatcctctgatgattctcattactccattacttgtcttgtaatcacatctctcatcatcaagagtgcctagagagattaagtttctttttaaatttggtatgtatctgaccttggtgagagtttttacaattccatcaaagcttctaattacaatagatctaatgcctgtcacttgacacttgtgatcatttcccatgaccacatttcctccatcgatctcttcatagttagtgaaccattccctgttaggattcatatggtaaatgctaggattgtacatcggtcggtttagtcggtttatactacatattttctaacccaacgtcaagattggcttagaaaattctacatgcaacctgcccaatttaaaaaaaaaaatcttaacccgaccgacggtt

SEQ ID NO: 39463 - DNA, 1921 bp, Cannabis sativa
gaatagtgtaattaatgtgcataaatattatatatgaaataatagatcttacttgcattgagttgaggaggtactactttatccaaagataatggtggagtagtgagtttgtatttgagttgttgaggtagcaaacaacctagtatgttgtcataataatgatatagtgatgatgatagtgacctttttgtcttttgtggatgagttggttgaagaagtaacaaacgtagaaaatcaagaagatggacaggcatctcatttggaagaaccatcataccctttctatacttttcaggtgtcaacacactataagtaagaaacatcaatatggaattttgcaatttgttgacaaaaccaccacttttgctacaattctccatcaacaattttagcacaagatatggtatttgattctctagcaagaaaaaatcatgaaacacaaaagcaacttggtcatttttaatgtcaaataaatcgcttaactcgttttgaacagtgctgtaaatgaattggagtgtgaaacatccatccaagaacaacatccaccccaacgattcgtcgtcatgatcatcttgtttgttgaaatagttttcgagcacttcttcgtcgaaacactccttcaacacttcaattttttccattattgttttgtaaagttgctcgtgggattgttgaccgctgttttcgacaaatttagctgcgaatttgaacttgaatttttgctcggcgagcttgaatttagggttgccatgatggattggaccgattgatatccactttgggtcgtagtacttctccaaacccttgtattcatctctaagcacttgaggaactttttgtatcttcgtctgttggcctctctcacggtctgatctcctccttattatcggtttgggctgttcattcgtcttgtttttcatcagctcgtcgtgtagtttagaacttgctgaggctactttctcattgccaatagctactatttcatggtgagtactagtcattctcaatatgtaaattttgtgtgaaataataatgatatgagtagtttaatagtaagaaatgttatacacacatatatataagtgataacatgtgttgagtacaaagaaaaatatttaattaatttggtccccgtgttaagggaaattacgcgacaatgtctatgtattttgttaaataacaattcaaatgttttgactcgtaaaaataaattgaattaatacttgtaaacttaatttcggttaaataatatttttaacaaagtgatacccttaacttaatttttcatcagtaatttttaatattctaagccgaatattaatattttttaatttgattatattaaaaatatatttagttgaaattaagtgtgcaaaatatcatttaataaaatatatgggccaattgtataatatgctaaatatatataggagccaaattttatttatgttcattagtttattattcttggattaaagaatgaagattggtatataaaaaagaaaaaaaaaaaagaaaaaattgaaaaggcacacgtaattaaaattattattgaagatagatggaatatttttacctctttgcaagtttgggatttgtactattattgagtgaacactctttggttaagaattttaattatttatacatggacatgtaattaaccctagattataaattactcatgatgaaacatatgaaattaattattaattatatgtaagcttatatgtccatatttaatttcctaattttattatccattgtcatatatgtgtactttgagtattactcataagagaaatgcttaaaggtaccaatggtgtcaagcaccctcctacgtgtcaatatcactattggtctaatttagtatcggatctcatataatttaatatactagcttttaaggagtatcgctagc

SEQ ID NO: 39464 - DNA, 1255 bp, Cannabis sativa
atgatagattttaaaaaagaaggtaaaaataaaagaggacaacataaaaagagtatagagtgtaatttcctctattaagttatggagttattcagaaaaatattgtgataaaatctcatataagaaaataaaaataaattctatttagttttttgtgggaattaaaactctatttattgattttacgtgattgggaacaaatctcgagtttctcttccacccaataacatttcccaaattccaattttttttagtaactactcaaatttgttatggtaagtaaataataaatcactcattttctttaaaataaaatacaataagctattagcatatctcggtagaagtaacaccgagtacacaaaaaacccagagacgtacaaaaccgaattataaatggcggcgaattctaggttgcttgccacgttacttttatttttatagctgtaattgtaaaaaaaaaaagattaaaataaaaacaaaaacaaaatatcaaacttgaaaaatctcagatgaatgaaagagataataaagtaataaataactataatgccaacaaagacagcacagaatgaattgttacacactcggtgtatgtatggtaatttagcaatgaaaagacgaaaatgccctcatagtgataagattattacttttggttttgtagtctaattagtgggcgaattaagggaacaaagcagagcaattaactctcccttgacacatttttaattcgaacggtcaaataatttgaccgactaaattaacagcatagccgggtatcttggccctcacgtgacacccaacacagatttcaagataaaaaaatttaaatgctgactcagtacattatgatgttctctaattgggccaaagccatagtggaccccacatattccacgtggcgagatcttaaagcataaagtcttcgtggaccttaaattgtccacgtggcgagatcgtaaaagcattcatcctggtgcggtgttctctaattgggccaaagttatcgtggaccccagaagtccacgtgtcgagatcttaaagcatcatcgggatgcggcggaacgtattttaattgccacggttgtgaccgggatcttcggaccgacgccgaccggccctttgatatgaccgctctattaattttgtttccttttttgattaaaatgggaaataggaaatgggtattaattaattaattaattgataacaatattaataaatactttactttatatttatttatttattt

SEQ ID NO: 39465 - DNA, 2762 bp, Cannabis sativa
ttacgtctactcatgcttaacgaggttgatgcctcgccttgcgcatcctttgacatatggtttctccctaatgtatgaggcaacagtttgtatatctttatctcgcgtaagaccttatagtcagcaagttgtaaatatactctgtcacttctgcatttagtgagttattctattttcaaatatccgtttcatgcattgatccctactctttccaatttgacacgtgttttccgttgaaatggtagccgagtttcgaatataacagctaatattatggtcaataatattattgtatgaacgttctagacttggtactgcataggatgtggtgatagggtcatgattgggtttataggcgcctaattataactcgagttatatttatgattatgattatacttttcttactgagtttgtcgactcacagttactattttcatgtgtaggtaagggcaaagctatggttgaacagcagtgagtgcgagcagatgaagaatgtacatgtcggggcgcttagacctggagcatactatctttgggacagcatgttgtatttatataatcgctagacaacaacttttgtatcaaatatttcgtaactcagttgtaaatattttaaatacgggatccctgttatatataagttatttacttttattttaagggtaattcagtaatgtttttattaatcacgtttttcaataaactcgttgattaggaacggatcgcccaattagtaaaaaatcatgatagcacgcctaaactaatagggtgttacaagtgtaaattcaagttcgatttgaatactccaactacttgaaaaccataaaaacttcacgaaagtacacttgaaaaataaccgctctatagattcctccgtctgatgacataagcagcactctttgtctatatttagtatgaaaaataatctatctttggaagggaggcagctagaacaaattttcaaaagaagtatgtgtataggctaagcgccaaatatttttgaaagccttcaattttacctaaaattggtattgttggtcaacttaataagcacttttgatagagaaactcccgctcttattggcctgctaaaaaatttgtttctttctgaaacggacaagatgcgagtgttgagtacatgtttagccattggatcattgaaagtagtagtgatcatgtttacaacctagctttaggtatcaaacaaaaataagtttgagaccttgacatgccgaccactattcctggagatgaaagcttgttgtatataagtcagtcttgtccatgacacacaaggtttggaccaaatatcttaattcgccaatgagaactcatgcccctccaaatgatatctcacacatttaaaataccatgtcaaatgatagaatcaattaacttctgattaacaatctagaattcatctctacaatagtattttacaatcaaattcttaacccaatggacatcctaccctgtacaaacataccaagctaattctttcagcaaggctctgctcatgttttcaaatcttctaagccctgtaaaattatgaaatgtgatttaggattaactctattgtgtgaaacttatgacttgtgactaacacttggtcagaattacttgtggattagaatttctcctcatacattagaaatcaagtaagacaatgaagaaagtacatagcgtatagcacaatgcaacaattatatgttatttgattgctattgagaaatcatgaattatggttattatcctaagtatataaattatgaactagggttattaccctaaatatgtttaatgtgatcaaggattattatcttaggaatatatattatggaattgagtcattaccctaaatgataaaggttatgcggttaaggcatgacttgtgaataaatgataaaagttatattatatggatagttagggttaataccctaaaagttatatatgagcatgcactgaatgaattaacaaaaaaataatgcaaaggaagtttgggtcaaatattagtaagtgatttgtccttgtgttctggcgttaattgtttttggttttgaaaatactatttttaattctcttcatttatttaattggttcagcaaagccaattttaaacggtatactacaacacatgcagagaagtcaaaataagatgagagtgatttcgagtgtgcgttatgattcttttcttttttttatggatcattgaggattctctgtggatatatgtcaagaattatgtatataagacacaattggattaggtctgataaatatcattaggacaaacccttgtgagagcataatatatgaattatgcatatataataagagttgtgtcatcaagacataactaggttagactcagtaaataaaatcgagataaactctattaaggtcttatatgtaaaaaaacgtgtgagtgtaacacgcgggtctgtgctatatagacattagatgcagtggcatcattatatatgaaataatgtgataaacagtgcggtatcatagttgtatacgcagaggcttaatgtaagaaatataattgttataattattcatattctattattattctgttgtgttgggccttggctcatgacgagtgctctaatgtgcatgcaataacaaagcagtgttgattcaaccatggatttgagggttttgaagataaacttttcatgttccatccaagctagaccacgaggcttgggtccaatagagattcatgtagaaattctaattttgacgct

SEQ ID NO: 39466 - DNA, 3010 bp, Cannabis sativa
tgatcagaatagatgagaggcaagagcaagacctcgtgaacaagaaaaagaccaaaaaccagaaagttttcattattttggccaagaaaacaataccaaattaacttttaattaattaactaattaaattgaggtgaaaaaaaaaagtggtttgttaggtttggtatttttgatgacctatatcccaagctttatgtatttcttgcaactttgacattcttcgtaagatctgttttcaaatataactattattcatatttatttatacatatatattttaaagactatattaaaagagtcaaataattaatgtgaaattgatcaccaataataaaataatagagaactaatccatcattatctgataaatatattaatatgcaggtggtgattacttaccaacattagttagaatacagctcatctaacttattatattataagaataataataataatcatcagaacgtacgtaatagcagaaattgatgaatttttctttgcggattatccatccatatatatatataaattaattattatatattgttgattaacctaacggcaacgatattttatccttaaaagattggtccaccatggccccagttaggttctaattcttaatcgtccctgtaatccgtacaaattgtattttaatttttttattttctttactttggctcgatgaggcctctaactaaatccaagcaagacacccgataattaatttggttcattatataaataaataaataaataaataaattagcaatgctaataattagttttagttatttaaaaatcaactaataatttttcatttcatcaatcaaagccctgctgctttatttatatattggatatatatatatatatatatatattatatcacgggggtttgtgcttcgaaagggacactaaaatcatggttaggttgtttcaattagttctctaatatcagacaaagacagagactgtgatatatatatatatatatataaatataataatatacaaattaatgaaggattctgtacatatatataaatatatatttagaagaaaagaaagctttttgaatccaacctctgctaattaatctgatcacccttcaaattgtacaaacttaattgtttgattaatcatcaaaaaatggcctcagtgaaaattatatatactaatctagacttagtgatgagtgtaataatgaaatattttaattaatgtattattcatctgattaaagagaaaaacatataagcatgtgccgaatgcttcctagtttctccaccaaatgcaattagactttttattacttcattatactaattaataccaatcatgtagatgtcctatataatataaatatatgtttatttaattattatagcactcctgtaccaaatgaaacaaaactgagtacagacacatttttaactcaataagtaactaatttatataagtatcttttcttaatcagaatcatcagatattaaagattataaaatatatgtcacaaaatatgaataaaatatatatatttttttaaacagaaatatatttcaaacagtacaaaccttacacatatttctattaggtattttggttctacctaatcttcaaaatgtaaagcttatataaattgatgcaatcataaaatgattttattcattgtgcgctgatcaatgtaatgtttttcatttcttcaaaaataatacactacaaaaattttaacttttagtcataataaaatttattattaaaaataaaaaaagtttataactaataataaatcagcagtcctgtatgttatgactaaaaggtctgtaactaaagatattagtcacaaaagttataattcattgtgattaaatgtgtttttagtcaccatacttgttgtgaagacatatttaattacaaaaaatttatgttgtgattaaaaaattatcactaaaggtagttttttttagtgataaaatgtaaagttttttattttataactttgggatgatattatatctcaattaactcatgatattattgtttgtatataactggttcatatcttttgtctcggctagttttgtcttttcttttatttttagattggattaatctttttttttttttacaacatatccctatatatatataattaaggattattataaataatatagaataatatgaaatagaattgaagaaaataagaagaagatagagagagaaaaaaaaattgaatgagaatttttcagtactttattttaatagagtgatcccctatttatacaaatatgtaagctatagattaggaaactaagaagatgaataaaaattataatcaatggtaattaatagaaaaagattcgataatttggacatctatataaataatattttataactcccctttgtatgtccataataattacctcattaaaatttttatcataaaacctaatgtgacaaaaacttggtcaaggaaaaaagagtgcagtgtgaaataagtctccctcatttaagccttcttggaggtcttctaatcaataaattcggatcttgtgaaccatcttctcaaatattgatgttggtaataactttgtgaattatgcatgattgacacttaattgaatatgttggacacaaatatgcattctcttgaaatgtattagaagaatttagtgaagtgtgttttaattctatctccttcaatgtatgctccttttagttgacacatacatataatattatcttcatagagaattgttggtgttgatacttttttattgagtgtaatctatatatttcttaaatatgttatgtcataatctcactcccacaaattctctactcgttacataaagtgcaagttgctagcatgatttaaagttgtcttattaaaaaccttgttatggaaactcacaaaatttgagctaaaaaaaaaaaggagtgcaatatgatccgtgattattttggtgataatctatctcataagattattgttatc

SEQ ID NO: 39467 - DNA, 2480 bp, Cannabis sativa
  modified_base (1656)..(1665): a, c, t, g, unknown or other
agtgttaccaaacggtacctaagtccttcatttttttgggccctgtgcagcacatcttgcaccccataagggctgcctatgggtgtgagttacttaacataaaaatatcaaatcatgaactttcattctcgtatactttcatagggaacaagcaggccaactcactaccatgtactgtatgatgagaacaaattcaatgctgatgacttacaaagtctcacaaacaatctctgctacatgtatacaatatacatctttttatgaaccacttttgttgttatactcttgttctagttcttgacctgaatttatttatttttcttttttctttttcctttttcaggtatgcaaggtgcgacagatcagtgtcttatcttatatatttttgaatagatctttgttcattttttgtattagttgcaaaaccagtatgtgttttttcttcatgtgatgaagctcctccggcttactatgctcatttggctgcatttcgcacccaacactgcattgatagggatggcagccttccgacgatccatgataatgtgaagaatttgatgttctatgtgtaagaatcaaatctgttttacttgtattgggattgtttttgttttagacttttgctatgaactttacttgaaaattggttcgttattataggtaggtagtaaattggttcctctagcattgttggtgtcgccgccgatgtcatccataccaacaatagatcttgctatcaacgctgaagacgaaacagaaacccatctcacataactcagaaagtctcgtgcccaacatcacagaatgaaaaggatgaatggtttagtttatttgttctggtttgatctgggctatagaagaagaaaagaagaacaaggaagaaaaagaggggtgggttggtgaatttgggttagcgatagggtttggtcatttaggtttagtttcatttacttttcaaattttgatttagtttttaatcttttattttattaattaatgtttttttatctctttaaaaattttgtttttattaatttcaaattcttagtattttttttaataattttatatgaaattttaaaaaataataaaaattaatgatgtggactaataagatactgccatgtgtataatgatttgtcacttaacatcgaggtacctacggaagttctaaaatcctaacggaaggtatttttactgtcaaattttttacttaggtattaaattgcagctgcaagataaacttaggtatttatatcgcaaattattcttaactgaaattccaaaaacctactttatttttcttttttttttataaaatatagggtgaaaaagctaagggtgtgtttggtaacaattttttaatcagttttctatttttttaattagaaaagtaaaaatattttttaaaaatatgttttattaaattgtttgcactttttaattttttaattgagaattaaaattttaaaaattttgaaaataaaaaaaaaatcactttcaaattttttttaaacatttttttttcttaatcaatattttggacttcgaccccaacctaaattttgggactcgaattccagccccgaccccattctcgggctcagaccacagtcccacctccaaatctaaacttggacccgacttaaataaaannnnnnnnnnaaaataaaaataaaaattatagaatattcttttgttttctgtttttaaaactaaaaaataaaagtagttatagaacacatttttgatttttaaaaataaaattttgaaaacacaaatttaatttttatttttgtgattaaaaaaataaaaaaaagaaaagtattaccgaacgccccttaattttttaaacacgggatccaaataggaagagagatacaaacactacatactctctgcaaatctatgttttaatattgaggaaattacacttactatgagattttaaaagttcttatgataaatatgacacatttaagtttgatcaatttatatatatatttttatttttaggtctttttatggtatttgatatgccatatatatgtaaattaggttttcaaatcctatatttaatatttttatttgattaggtagttttatttgtcactgataccgaaaagttaccggagtttgctgtcggtgctagaaaaatcaccggagtagctgtcgatgtcagaaaagtcgtcggagttgctgccgacgccgaaaaatttgccagaattggtattatcgccagaaaaatcactgaaaaaatcactaagaaactagtttcttcttcaagagaccagtttcttcccgatttcttgagaaatcggtttcttgataaagaaaccgacttcttgataaagaaaccactttcttggtgattttttcggtgatttttctaacgacaatgccaattccaatgccattggtagctactccgaggacttttccggcaccgacaacaaacttcgaaaaagtcatcagaattg

SEQ ID NO: 39468 - DNA, 4596 bp, Cannabis sativa
ccgatacccgacgtacccgagcacccaaaaatcgggttcggttacacatttccaaaactcgaggcccgataacccgaacctgaccatccgaaaatccgaaaacccgacccgtgtgcaaccctggtatgcatcgtaatactttttaattagttttttgttttcaaaattaaaatgtgaatattttttaaaatcatgttctataaaactgtttttattttttttttttaattttttaattgagaaaaaacaaaacaaatcaaaattttgtaaatagttttctttttaatcaatattttaaactttcaccccaacttaaactttgtatctcatacttggacccttgccctctcggacttaaacctgacccctaatttcggctttggatctgaacccaacgtaaataaaattaataaataaaactaaaaataaaatttattgaacacatttttattttttattttcaaaataaaaaaaaaaatgaaagttatactaaagtcgaaccttcattatttacttactctctacacatatttcctctaaaataaggccacgcgaagaacacaaggggtatctacgtgttcggtccaaggaccgcagtttccaacatttctcaaaactcaccttcttcttcttcttcacaatctgatttggcgactgcatcaaatcatctctgccaagatttctcactatggtacgcaatcaatttcattacaagctgtaattcgttttctttttcttcttttaatttgtattgttggtttgcattcgatttgttctccattatcatttgctattccccaatgcgattgtcaagtgtttgattgtatatttttcatttaattttagagttggtatttaggttataagctcaactgtgataaagatttgatttttggttacgaatgcttttaagaacccttgagctgaaatgctcttctttctcatatccaaatgttgtattgggtttcagtggttctttgtttaagattcagacccacacgaaagaatttattccctttagttttcagtttttttttgcgttttaatactacggatcatgtaaccttgaaagacaattttgaaagattgttagtacggaatgagtttaaggattaacaagaaattatgttgtggatgtgatttttttcttctcaaattaatgtgtgttcattgatatttcttctcaatcatggctgtttaaaatgatatatcatttgaactctgaaatctgaatgaagcatgtttttagctacatgtaacttttaggcagttcaacttattttatgcaacatgattattgcataggcacccatcaggggcattatgtctttgcgaagagcagtgttggctcggggccacagtgagaagtgggcaacgtgctttagatcgttcagcgctcaaggtggtggtactcagggtgcggcaactggtagcacaccgcaaccgcccccacctcctccaccacctgagaaaacccattttggtggcttgaaagatgaagaccgaattttcactaacctttatggtttgcatgacccttttctgaaaggagcgatgaagagaggtgattggcatagaaccaaagatttagttattaagggtgctgattggattgttaatgaaatgaagaagtctggccttcgtggtcgtggtggtgctggttttccttctggacttaaatggtcttttatgcctaaagtttcagatggccgtccttcctatcttgttgtcaatgctgatgagagtgaacctggaacatgtaaagatcgggaaattatgaggcatgatccacacaaacttttagagggttgcttaattgctggtgtgggtatgagggcaactgctgcctacatttacatcagaggtgaatatgtgaacgagcgcctaaaccttgaaaaagccagaaaagaagcatatgcagctggattgttgggaaagaatgcttgtggatcgggttacgattttgatgtgcatatccattatggggctggtgcttatatttgtggtgaagaaacagctcttttggagagccttgaagggaagcaagggaagccaagattgaagcctcctttcccagctaatgcgggtttatatggctgccccaccactgttacaaatgttgaaactgtagctgtttctccaaccattttaaggcgtggaccagagtggtttgccagctttgggaggaagaataactcagggacaaaattgttttgtgtgtctgggcatgtaaataagccttgcactgtggaagaggaaatgagtatacctttgaaagagttgattgagaggcactgtgggggagttagaggtggatgggacaatttacttgctattatcccgggtggttcatctgtcccactgcttcctaagaacatttgtgatgatgtgcttatggattatgatgcactcaaggctgttcaatcaggattggggactgctgccgttattgtaatggataagtccactgatgttgtggatgcaattgcaagactctcttacttttacaaacacgagagttgtggacagtgcacaccatgcagggagggaacaggatggctctggatgatcatggaaagaatgaaagttggaaatgcaaagttggaagaaatcgacatgcttcaggagctgaccaagcagattgaagggcacacaatctgtgctttgggtgatgctgctgcttggcctgtgcaaggtcttattaggcattttaggccggagctcgagagaaggatcagacagcgtgcagagagggaattgctggaggctgctgcttagatggctttcaggtaccagttcttcctttatctgtattcatttcctgcaaaggtttaaattaaattgatagcaatttggattctcttagttgtcatgaaagacacaatctgtttggtattttcttgttaaagatggtgataaaaagtcgtagtttggatgaattagaatgctgaatcagaagactgtttctaacttgtggttgatgttgtgtttacaagcaaaatcatttgttaaaagttcttgaattcacatgaattgatatggacatgatccttagttcattataatgttattcaactaattttaggcattttgtttgtgccggaatctttttcttatttgttgtataatgccttcaacttagaaagaagaaaagctctgttgtttgtgtgttggatgtgataatggttcgagtttctgaatttcaaccattaagtcgtgtttggaatgttggattggattgaataatttcaattcagtggtaaaactcattcattcttctatgtttgtttttttctcatctaacaattatttaaaacatagcctcattatattgtaggtcatatcattagaagtagaacaacaatcttgaggctaagaaaattagttgttgaaacgtgaaaccacatcaatttaattgcttatggagtaatactgacatgattttgtgtctatatagatgtatatgtattatttttaaagatattctgaaaacatgttcttccatctaaagctttatccaaaataagtaattgtaaaagtagcattactggccatgccaatgccatattccttgtcaacattttggtgcttctataacatagtgatgatgacatttttgagtttattcaaatttaatattctgtggattgttcagaaaaatatcttaaggaaaaggaggaagcaatgcgctccgggtcgggaatagagtggtcggagcatggtggtggtgttagtaattttacttgttttaaagcttttatatcaaattaataacatagagatctttcattaatgcctcgaggaaactataataatctaaatcgagggagttttttgaatgtttctttgtataaaattggatgaattttgttaatatctttttatttcttcacatcattaataaatacgaaactctaccctccaatccaatcatggtttcttggtggagcattatctttatgagtgttgtgtttatggtattaagaaatgcttaaataatagattaaggttgctcaatagtatgtttttattctctaaaagttccttctatttgtagtccgtattaaatggtatattaaattgtgttttatatcatattgtcatataataatatatgaaattttgatatatattaatgaactgcaagtcaatatcacatatagtactttatataaatataatagggcttttttgaattttaacaaaaaaaaataatattacaaaattttttcgagctggctaaatatagaaatatacaatctagataaaaaaaattatataaatactacttacacacacctttaactcaagatccatattttttgggcaactatcgcgcaattattgcgaaatcacacagcaacccaacgcaatcgaaacaaaaattcaactagaaagagaaccaccattaatttcgacgactttacctgagaagaccagaatcaatcaaaacaggagctattttgaattcataaaaaaagtgtagaaaactactatgaaactaatattcaactggaaatctagtctaatttgcataaaactaatgtcttgatttcaatttttagatccatgaaaaggcagatctcaaaaagttga

SEQ ID NO: 39469 - DNA, 1413 bp, Cannabis sativa
  modified_base (770)..(779): a, c, t, g, unknown or other
aacaattttactatttctaaccaaaagcaagaatatctacgatctagatttagaaatagacattagtgcaagaagagaaagaaaagaaagaaaaagacaaaaatgtatataataataacaatattttaaatatataaataaaaaaccctagaatctgtatgtatcctatattcttctctagggttacaacaaatacaaactatttgactacaaacttataaaaatagaagattaggtaatattactcatcatctagaactattaatggtggctgatgaatgtgtatatagatataatatataatataatatatatatatatataaatcttcacttgctcaaagcaaactacaataaggacagccgcaaaatactttagttatacacattattcacttatataaatatatatactaaattaatactaagaaagatgacaaagaaatttaggaggaaaaacattattataattaaagaataataataataataataataataataattctctctaatgtcatgaagaggaaaagtttaggattgacagcttgccaaaattttcatcagccaactgctattctgtcttttctgtaaattaattaataataatataattaaaaatgaaaccatttcatttggaaagttgattataatttatatatatatatatatatatttatattatataggtgtaatggtggctagaatggctatatataggtatgatttacttgaatctaagcaacaaaagtaataataataataataatnnnnnnnnnnataataataataataatgttatgatcataattaatgattttactatatatagtaatatttgatcaagtaataaggatacatatgatataaaatattaaaaaaaaagttacttttattatttgtcttttagtaaatttaatatattgaaagtgaaaaactttaaactagctagctggtaataattaatatggacacatggattggaataaaatccaatatcgatcaatgtaataatccccatgatcttgaattaagaataatttagtaaaaagtagagatttatatgtatatatatttaatatatatctttttcttcttcatcacaaagtagattttcagctacagtatcaatttttttttgtataaagtatgatcgaatgtacatcttagaaatgttaattattactttatatacatataaaagaaaaaacatactatattaaaaaagaaaaattggccaaacacactcattttgatcaagagctaaacaaattaaattaaccatagtatatatagcttaatttaagtttatcatgtaattcgatctaacaattagatcgtcaacaatgaatatatatatataatatctatatatgacttttggtaagctttatttaaatcaattcaaaagaga

SEQ ID NO: 39470 - DNA, 4085 bp, Cannabis sativa
tttaaagagcattctttttgggtagaggtggtggtgcttatacaagaaatgtcacttttaccagtataatttactattatacaagtgaaagtaacttttacttgtgtatttgcaaactgtgctgtcaaaaaggtcaaaattttactagcacacgtttatagtgcctaaaatctaatttttaccatcgcatttcagcactgaaaaaagtcatttttgccagcgctttccattttgtgctcgcaaaagttgtaataccaacgttgatttgccaactccttttaccaacacatcagaaataaattttattttatcagagcaataccaaactttgccagcacaaaaaagtactggcaaaagtgacatttcttatagcatctctagacatgttgtcttgcaattaactaggatattacttaaaagttattacattaaactatataggatccgacacttaattcaacaataacaataaaaacacgtacaaaaatagtaggcaccactattgctctttaatatttctcttatttaaatatgcccaattgagctaacaaggaagcatgctgcttgccatgcatctgatcaaaacacgttattaattctatataatatatatattattgggaaacacgtaccgattattttgtactgtatgaaattctaccttattcgttggtctcggtacgaatatatatatatatatatatatgattatctttaaaatgcaaggattacaatgtttagagtttttacctaatctcgtacgaatatatatgtgaatctgtccttccagaaaaccatgatgaaacgtataattaataataatatataaatttcaaaattatatgaataataataataatacccgtatatgactttgaagctttgcactcatatttgtcccgcctgcttatttcttaatatttgtaaagtgtaaccgtaaaagtaaactaattaacacaaacgtctgtataaatatatttttacagacgagttgaatatgatgtgactgcaaaaaatattaattgttgtagtagtatatgagtgcactcttaatgggtataacccataaatgagtaaattttagtttttgagcttaatttctctctctaattatagtttaatctctcatttttacattatatgacttgaggttgtttatcaagacaagaatagttgagttagttaggagtgtgtgttgtccatgttagttagttagaagtgttttatattttcagttggttacttcatcttatcagttctgctgatataaataagtgtattcccttcatttgacaattaattagaaaaacacttttcttctcctattttatttctctctctctctctctctctctctgtttttaatatggtatcagagccacaatttttgtgtgctgctcttctttgttgattgcttgtgtccatggcgaggaatggtactcgtagtcaagttgctcgagacagttccagtgataatgcaaatcctttctttgtgcttgatacagatcctgcacctccgcattttgatcagagtagagatccatactacattgcaaatagagattatgcagcaagtctggtttttaagattttgactggcagtgacaacaacaatgcatggagaatatcgatggtggttgctatgtcagctcgaaataaaattaagtttgtcaatggaaagctgcaacaactagatgaagatcatgatatttggaatcgatgcaatgatatggtaatttcttggcttttacattctgtttctggtgatattgctaatagttttctgtacaaagagaatgcagcagagatttgggatgatctgcaaaaaaggttccatcaaaataatgctccaagagttttttgaagaaaaaagatcgatgatgatgcttaaccaaggatctcttgatgttactgcttattttactcgaagaaatgctcattgggatttaatacaatagtatcgtcctctacctatttgtaattttggagcaatgaaaatcattcaggattattaagaggaggataaagtaatggagttcttaatcagattgaatgaatcctatggagttgtacaatctcagattcttatgcaagatcctttaccagctgttaataaagcttatgtatcgatcattcaagaggaaagacaaagaagcatcactgcaattccaaatgctactgtagaaacttataaaactacaccagattcttctggatctgctacagatcagtttgctggaaattctagtttcaatcgacctggagtcacttgtcatcactgtggcattcctggacacattatggctaaatgctacaagctccatggatatccactcgggcacaagttttatggaaaaattcctaataagagcagcaataatcaacctggaaagccttctgtaaatttttctagtttacaggaaggacagttttcaggacaagctagtcaaagttgacaatgtaatgtgccaaatcaagatcttattcaaagcatcaccagtcagtaccaacagctgatgaatcttttgtctcggaagactcaagaaactccaaaagctccttctaattctgatcagtacatggtatccgatttttctgataagaactttcctatttcgcataacagatggataatagatacatgtgctacacatcatgtgtgccctgatctatctttgtttgccactgttcagaaaagtacttccttttccactattaacttgcctaataatgcttaagtcaatgttaactgtgttggaactatccaacattcttctgacattattcttaagaatgttcttcatgttcctgattttatgacaacttgtgtctgctcgtccactaatcaaatctattggttgtcatttcaatttttctcttaatcattgtactattcaagacaatatgaagactaaaacaattgggatgggtgatcgaaatggagacttgtatgtactatctaaatttgtcacataattcaattcctcctgctatattttctgtcattagtgactctactgttgttgataatacagtatggcattatcgtttaggccatccttcatgtatcaaacaacatcctctcaataaaatttacaattttgacactatcctagtcgcaactttcattattcagtgtgtcactatgctaaacaaagaaagttacctttcattactatttataatattactgtcaattgtttgatctattacattttgatatatgggggccatacaataccataaccactgaaggctacaaatattttatcaccattgtgaatgattgctcaatttgggtaaaattcattaagcaaaaatcggatgcacaatctgttattcctcagtttttacaaatggttaaaactcaatttaacatgactgtcaaagttattcaatctgataatgcaaaggagcttcagtttccccttttattcgaagaacttggcattatgcattatcattattgtgttcaaagaccacaacagaattctattgtggaaagaaaacaccaacatttgcttaatattgctagggccttacttcttcagtcctttgttcctttgtattattaaaatgattgtgtagctactgctactgatctcattaataggacaccctcacccaatctccaacataaaactccttatgaaatattaaatggtaaaccctccaattatgaacacttaaaagcttttggttgtttagtatatatgtctacccttagctcatctagaaaaaaaatttctccaagggttgttccttgcctttttcttggctatcctcctgggatgaaagcatacaagtttttggatcttaacactaattgtgttttctgtagcagagatgcaatttttcatgaacatcccttcccttttgttcaatctactacattccttgattctcatcatcattttttaattctgaatctatacctactgctatgccatctgatgttacacataccagtagtacgtatcctacttctagccactcaactcatgatcctcctgcatctaatccttcttccagaagtagacctaccagaactcatcataagccttcataccttactgattatcatt

SEQ ID NO: 39471 - DNA, 2433 bp, Cannabis sativa
atgctgagaacgaggaaataggaaagattctgagagactccgagattaaggaagtggtctttaaactacaccctctcaaagctcctgggcccgacggataccctggaatattttttcaaaaatactggcacatagtgggcaaagaagtgtgtgaaatggtaaggaaattcttctttacaggagagattgacagtcagctcaaccactcgtttatatgattgatacctaaggtcagtattgcagacagatttgaaaaattcaggcctataagtctttgtaatttttggtacaaggtcattgcgaggctgcttacggatcagctaaaaggagttatggataggcttgtgtctccatatcaatcggccttcatccctggaaggtggattgctgaatgtactatcatggctcaagaagttcttcatttaatgaaaaacaagaaaggcaagaaaggggttatggcgattaaaactgacatgaataaggcttacgatcagatggagtggggcttcataagccgagtcctaaaagctaatggattcaacaaccacgtctgcaagctgattatgcaatgtataagtactgtcagttattctatcctcctaaacggcgcaccagttgctcccttcaatcctaagagaggtctttgtgttcatattatgcagtgaagttttgtcaaaactaattttccaggaggaaaagaatggtgggatcacgggaattcgggtggctaggaatgcaatgccaatttctcacttattctatgtagacgatgctatgttcttttcccaagcttcggctagtaatgctacgagacttctccattattttcgtaaatatgaagagtgatctggatagaaaataagcaaagagaaaagcggagtggtattctccccgaatacaaataaggggtgcaaagaagagataaagaagaccattgggatgcaaaatatcaaacagtgtgaaaaatatctagaaaatcctttctttttttttttttcagcaagcaaaagaaaagattactactttataaaggagaagattcaagggaggttggaaggatggaaggccaaacacttatcccaggtaggtagaactactctaattgggtgagttctacagagtattctgaattacttcatgtctaccgtgcaagtacctcagaccctttgtgatgaactttacagaattcttgcaagattctggtggattggtaacaaagaaaggaaacattatcaggcgtacaagagctggaatgagatttgccaacccaagggatgtggtggtttaggcctaagaagacttaatgatatgaatgaggccttattggctaaactgttttggatggttatgagcgaggagaacaaggtgtgggttaagagttttatggctaaatattgtatcaaaattgacccgtgggaggttgacaaaggagggaacgattctaggagttggaagagtatactaaacgtgagaaaagtgtgcctggagggggctggaatcctgattgcggatggtgattgtgagctatggaatagaccttggattcctgggaaaaattctgatgatattcgggacagtttccacttcattccaaatcaggctttttggaaagttaaggatctgcttctggagggcactagatcgtggaatgaatacttgatcaaagcgtgttttgagcctcagatggcagaggaaattctaaggatcaaaccgttagctgagggtcgagatatactattttggaaggcgtcaaaatcgggcaaattctctgtcaagagtgcctactgggtcagccaaaaatatcgtttgaaggatcctcaatcccattggaaaagactttggaaagctacactgcaccctcgtttaaaactcttcagttggaagctcttttcaaatattctccctactaaaacacggattggattccttccaacggaccaacaacactgtgttttttgtgactgagaacccgaatctaccttccatttcttttgccagtgctcttttacaagggctatttagttcaaaaagggtatccgcattgacaggtttaagtggagagacattgaagaggttgggaattggtggtgcgatttggatgacacagagcttcaaaccctctttgtatgtatcggggaaactatttggaaatggaggaacgagaaagtgttcagagatagagatatagagatgagattagtcttctaggattgtatgagaagaactgaagattttctgaccaacagaatgtggtgcgaggaagatttggagttcccgagtccagataatagtgcaaatataagccccttggaggggtcttgggaatgcagcgttgatgcttcagtggtgggaaacattgcaggttatgcggttgtgcacaagcaagatcatacaacaggggattattggactgctatggatgtgtcaaaggtt

SEQ ID NO: 39472 - DNA, 1845 bp, Cannabis sativa
  modified_base (1803)..(1804): a, c, t, g, unknown or other
ttacctttttattgtaatctgtttttagaacaacatgtaatgtaggttatatatggtaagaatgatatattatatttatatatatataataaatataatgtcttttattgcttgaactctcaatattttgaacagttttgttttaacaaacaagcctggtggagatggtaagagattccttcgcacccttggcaaggtaactttcctattcttcaagactgtaataaaatgtacaataatatgccatatcatttttataacgtgagtttataataataataatgttaaattatttacatatatatatattaatgtctcaggagaggcatgagctcgctgaaagggtgatggtcacaaggcttcatctctatggaagatggatcaaggtatgaatacttgattgaaagcttttctatatgtatttattgatcaacaattttggctaattagttaaattaaactacaatattttgtttgtttgattgtgatatgtagaaatgtgatcatgctgaaatatacaaagagatatctgaccaaaacttggagttgatgcgtgaacgtcttattgagactgtgatatggccctcagacgataccaacacagaaaagattggataaaagaggaagaagaaaaaaaaaaggcttatcaacttcaacgtattttaaacctttcttttctttaattgttccttaattagttttaggtaatttttgcttcaagagtttggccctccatgtatccacattgtctatcaattaatacaaaagtgttcctacttttaatgttattattgtactaattcgtaacttgtatatatgcatatgatgttaatatgtgtttacaatcattttaaagctgtgcatatttaattaacttgcgagtttgaccacactaattaattatgatgttaatagataatgggaagtttaaaatatggtcaaaattgatcaagagcttttgcttttggtgcaatggttgattattttacttttttgcatgatgattaaaatttgtaaagaaaacaaacaggtgtgaagtcagagtatttgatttgaatagtattgaacatgcattcaacgtaataataatttgatgtagaaaagttgctaaaagatgttcctttgtgatgtttatattacatttaacaactatcaagctatcaaggcttgatagaattttagtaactagaatgccacgtttagagtaattttatcaaaaaaaataaataaataacttgtgtgtttgatgtgatttttttttttttttttcagatatatatatttatatatatactctaagtgagactagcacatatattgcacgtgcctaactcttcttctaccattttatttatatttttgtttgcttaattttcattttgtatataattacagctaaatttatattatttcatttttacatcttaattgtaacaaaaaaaatgacaaaaataagttcattttagtaaaaatatttttttcgttaaaataataaacaacttttttttttgtagttgttatgagtttgtatttttctttgtttttagtttatttatagctgatttataattgtcgcgagattgatttctcgttaaatttttagttgttttcttacttttgctaaacaaattttatttttgtaattttaaaactttacaagtgtattttcgcaaataaaaattttaggccgtaaaattgtaaataaaacgtaaaaaaatcatattcttaaaaattacccttatgataatctcgacaatttgatcattttgccaaataaataaagggaaattatagtaaatgacnncaaatcatagcactatataagttagtttatgtcctcatttc

SEQ ID NO: 39473 - DNA, 3166 bp, Cannabis sativa
ctagccagccaatgaagcctaagtgtcggtcaggccctaagaatagggcaggttagctagcatgcacaaaagagcctgaacaattggaaaagtctgcatcaaacttcttggacggtcaacaacttgattttagctacgggacaactccaacaacccaagaagatagggattctccatcaaatgatctacttattttttaagaatattagttatccttttttatgatttaaaatagaagataatagagttgttttccctatttttgagagatattaacttatttgaatagtgatattttataagccttaaactatataaagggtcttaaacacttagaaaagggacaggaatttcaagtctctcaagctctattgctctctcgctcactctcacatgccacttccctttcattagacacttagtttatttctctcaattgttctaaatttgtaacacttggttctcaccattgtaatattcaagaaagccatggccagaaattacaaggtctaagtttgtaatctgcatagtattatctctgaaattaaatacaacaaaaagggaagtaggtcattacccgccaaacaagggggtcgaacctctataaatcaatgtgtcactttattatttgctattacaatttacacgtggtgattatcagtaataaataaggctctactgtcaattggcccaaattcaaggtcaacattttggtgcttgcattgagagcattgtttgtcatcttaatcaatcatcatggttgtaactaggagaaccactacatgtacttcctagggtctccctcaagatcctatgacggttgatcctgatgtttgagttcctcccaccatggaaggtcccactaatctgactaacaccgtcaatcctacaaaccctacaaaaaccctgcaaattcatccaataccactaatcatgttgatcctactaactcaacgaatctaaatgatcagaccttgctgcccagaatagatccatcaacaacacctcgaacagaaggtcctgtcaacatggaatagccttcatggagcataactaggactattccacagtattatgcaggagaaacaggactaggaattggcaaactagctattggcgagcctcatgtagacctaggagatgatattgagctggccaggtgcagagaagttgtaggctaggtcagccgaacagaagaaccacgcgttgtgtagttgtgatgcttttgtccaatagatatacaaatttctaaggtggatggatgaccaagaggtcatcctctaagcccatcaggcggagctgaactgccgtaataaggaggccaatgacctgataaggcaattcaatgagagaaccatgggaagagttcaggatctggtaagagatcctttgtaaggaaggttaatcgacagtttaggcagggcctaaaggcatgttgatagttgatagactatccaaccagtcccttgagcacgaggatagaccttcctctgcctaaagatagacaaatcttgccagatagaccgtatggcaagaacagccaattcctagaattagtaggccttggagaaaggacaagcaactccgaaaaggagacattactaatcggccagaccctggccgaccagcacagtaatgctctcccccagaatattaagaacaagttgttctaagacctatttttgataggctaggtcctaggataagtaataatgcacaggacaataataactcgaggaacaagaacttaagtgacttcgttccacctctgaaaaataattctagataggtggacccaccaaacccaagcaattggtacaaccaacctcctattaacttacagactgacctggccagcaaagggattctggccagtttggtcagctaaaggagggtaaccggcctaggattgtccaatctagggctggccggtcaaagccaattgcccaatctatggctggtcagccaagggcatcatcccgaccaagaaaggttgtttggccaagagcccaccggagcagatccatttgtgcaagcacagttggatcaaatcaaagacatgataaaaggcctatctagttcaaagctgtcagatttggaactggacaggttaagggggtcaacattctcagcagacattaatgcactgcccctacataagttcaagatgttagtatggaagatgtgcactgaaaaagaagatcccttagcacacataaagtactttgagatgcaaacatatatccaaaaagtaactagagatgtgtgatatcagatcttcccgacaaccttgtctgagatagcccagcaatggtatttcaagctagctccgggaggttcaactcttagaatgaattctctcgagaattctgtccaattctcatccttgagacaaatatcatcatagcttgaagacctggttgagataaaacaaagacaaggtgaacctttgaaagactgcattcaaaggttcacggtcgaggccagtaaggtcaaaggcctaacagaagaaggtcgttacacgaccatacttggaggtatcttaccattaagtgaattttggaaagatatcaggaggtgaattttggatagatatcatgaggatgtcaaaaaacaatatgaaagagttcctcgagggagctgatggcttcataaagttggaagaagctgaccggcaagcccaaacagggaggcaaatcactagtggacaggctcagggtttcattcaaccccaagccctagccaacatgtaggccagcacgatcaataccgaccaaacctctagcagtaagaataatggagacaaacttcaacataattctagccaagattgtggccaaaaaaggaagttcaacacttcccctgcaccacaataccaaagggagaatgaggagaaatacacatgcttcaccctcctaaccaaaaaatcctaagacaatttacatggctacttaaacagttgtcacgtacaagaagcctcctcccatcaagaaagacattagaaagaggaacacctccaagttctgccgattatacaatgacttcgaccattacacaaacgagtgtctgcatttgaaaagggagattgaattcatgataaggaaaaataatccccacctacgtcattatgtgcaaaatgaccaagctcatgttgggttttatgccc

SEQ ID NO: 39474 - DNA, 4674 bp, Cannabis sativa
ttgtgggcttttggtgctgacttggaatccacatgtcccttgccaaaaatacggataacatttacccccaagctttcagaatgctacgtatggtggaagcttgcccaattctatcaatatggacatgtggaggtttaaaagtaatcttgcatttctttttaggtgttaatcgatcatggaaggtgaatttccatcctcagtcgtagtaggttaacgtggtagtcatctggtgatagaggagcacgtttattgaggagttgctttctgggcacacttttattttgataggtgttcactttttcgtgcgagaactaataaatagcatcttcatcattgatttgtaccttgattctagagcgtattaattgtttgacacgcttgactgctagactccccaaccgtcggatgtatttgttcttttatagatatgatcgtggatcattcattcctcttcacacggatagccaccttaggtattagtacccttataagactctatttatcactttttccccaattttaaattttcaacctttaaaagtgatcccaccaagtctattgtctaaacagcaaaaggccaaggactgttcatgagggttacctttattggtggagctcttggaaccttggaataacgctggcattgtccacatttaaggatatactcagtgcaatccttcttcatggttagccaaaaataaccttggcaaatgattttcttggaaagactgggttcgaatgtgtgatctttgcaaaatccttcttgtatctcatgcatgacaatgcttatctcagttccagctatgcaccttaagtatggcatcataattctctttcgtatagcttttcatccataatcacatatatgggggcttgatattgtatcttctgcgaagcgactctatcttctaaaagtgtgccaaattccatatattttaggattggagccatacaagaagttgagtgatcaataactgacacccccagtgtttctgtgcttggagtgagtagatgggcgatggggactagtcagtatttatctacttctagatatgttgctaatttagctagcatgtctacgaatgcatttttatccctagggattttttttcgcaaaatagtgcttaagatattgcaatagctcttggtctttactatgcaactagccatcttttccctttttgtctggtattctccagacacgtggttgacaaccaacttcgaattattgtatagttcaatgttcttggcgccaacttctttagctaactacaagccaacaatcattgcttcatgctcagctttgttgttggaagcttcgaattcaaattagagtgcaatttgaagctgaaattgttaaggagaaattagaatgattctcgctctagaaacctttctcatttgatgctctgtctacatatatcttccagacttctagctctaggatggacatttcaggatcgttgtttgtgcccgtgcattccacaatgaaatttgctaaggcttgacctttaattgaaattcttggttgatattggatatcaaactgacttagctccattgcccattttaagagtcttcttgatgactctagcttctgcaatacttaacggagagggtggttggtcagtaccctgatggcatgagcttgaaagtatggtcttaacttccgtgaagcaattagcaagcaaaaggaaaacttttcaatcatgggatatctggactccgtgcccaacaatctttcgctcacataatataaaggaagttgtacttttccttcttcttgcactaaggcggcacttatagtgtgatctgacactgccaagtacaggaataatggttctccctcaattagtttggacaatattggagcctttcttagatgttctttaagttgctgaaggcatcttcgcactcaattgtccaatcaaagttgttgttccctcgaagcacattgaagaaaggtatgcacttatctattgatttagaaacgaatcggttaagtgttgcaatccttccagtaagcttttggacatccttatgttttttgggtgaaggcatatttagaagagctttaatcttcttcaggtttgcctcaataccgcgagaactaaatatgaaacccaagaatttccctaaggaaactataaaaatgcatttctttgggtttaatttcattccatattctcggataatggaaaaagcttcttcttaatcttcatgatggctcatggaagtctttgactttaccaacatgtcattgacatacacttccatgttcttccccaatacatttttaaacatattattaaccattcgctggtaggtagctctgacattttttaatccaaagggcatgaccttgtagcaatagatgcctttctcagtttgaaagcttgtatgctcttggtcagccacgtgtatttttatttgattgtaactggagtatgcacccatgtagcttaagagttcataccctgaggatgcatcgaccatctgatcaattcacggaagtggaaaacaatattttagaaaagctttgtttatatttgtaaaatctgtatacatcctccatgtcccattaggctttagaagcaaaaccggattggctagctatatgggatatagagcttccctaagcaagtcgatgttggtcaacttatctacttctattttaactgcttctgccctcactggatctatgggccttcgattctgtcaaactagatttgccttagggtttatgttcagttcatgacaaatcacacgataactaattccagtcatatctgaatgactccaggccaatacatcactgtttgatttgactctggagataatcttttctttaacaacttgaggtagattctttcccactttgataactttagtggtatcctcatcatcaatgcatcttcttctacctcttccatcagctcaattactcgttccacaccaacccatggatctagttcatcctcttcacggaccaccctcagtgctgagtaagaagatgttatggcttctgctatatttccttcccagaccataagaatcgttttggttgaaaccttatagcagcttcttgccaatactttcgactttcggtatcacctaggaattttaggcatagatggccgatgattgttactgccccaaaataaaccaaaaatggtcatcccaaaatgacgttgtaagctattggacagtcaactaccacaaaggtactatacttgaaagaggatattacactgcttctagagacttcttcatttatcgtcattgaacgttgtatttttctgattggaatcaatgtgtctctattttgcagttgaattggacaaggtaataaatttgcttccataagaccgacggctttgaaggcatctttaaaaatgatgttaaaggggcttccgttatctatgagaattttagaaactcttttattcgcaatctgagcttctatcaccaaaggtcattgtaaaaaatgtacatgcttggcgtcatcttttgtgaaagtcattggcaaattcatcatccgaggatgctaagcagatgattgtaccaagttgcaagttttttcttgatctaactcattcaagtatttttttttgtgcatttcgagtgctttcggaaatgtgtggtccaccagaggttgcaacgtggccatctagtgctggctgggctgctccagaaggatatggatttctaggactgggagctatagcaggtcttgctgctatagcctgttgcaccccgtgaagggcttgtgcattgtgagcttgaattccaagagcttgtgggtggcctactccctaaggattaatagctccatgttgtccaggaataaaagttggccatgtgcaacccctgtccagcataaataattggtatcattacccaattagatagatgaccatttcagaccaatccttcaatttcatccctcatagtcacactcgttggtggtgtgtcctatatcatcgtaatatttgcacctcttgtttggatctcgttttttttttcttcctgccttgtacattggcagatatttcttgtaatggaccatgttacaagttgccttatagatattttctcgagtatcgacaaggcttgtgtacttggagtatcttgactcttgagttttccctttgtttgcagaatcattctgacttggacccttggaactccttttactccgtgatcagcttacattggactctggagcttccactttttggttcatttatccaggagcagcactgtatctagtttatacagctctaaatccgaataaactagcttgtgtagctggctacacggaagcactaggtccgtaaattgtaggagttgtaaaggtagttgcaggaggataaattgatggagttgtcatctgtgaagtttgggtagtcactgtgttggtggaaggtgctggagtactctgtaagcttggtcgtaagcatcttctaagttaatgaatccttgggctcttgttaagaaattagtcaaagtctctgctcttttgcattggagatctccccatagcaagaatccagtagttaatcttgatgtcaaagccaccattttcatatcatctgaaactttttttttgctgcaacgtccatcatacgttgaatatacatgttcaggctttctcctggttgctgtttaaca

SEQ ID NO: 39475 - DNA, 4191 bp, Cannabis sativa
atataattcctcaattattcataattatctaattagggttttgctaatctatttcataaatccagggtattatagtatctcttatagagaattttttttgtggtcttttttccgatccccttcttaatttttattaagggtatttatagagatgggtgggaataagaaaatgagtaacttgtctttaagagctaactatgggcaagcataagttcccaaaagatacaaaatagggcatgcattacctacgtagtaggcagcgtagatgttaggtgagattagccttcgttctttcttaattgatgtgattcttcatgatggagccgtcagtagctcctttgattattgtgtaatcgccttaaataaggtttatgatgtctaacacatcatcttacaggcgttctcagacattttttccatgttacattaaatgcaaagtaactgttcaactcaagcctttctggcccggagacgcctacccatgtcttgacttcctgaagggaagataggtattttgttcatgttcgggagctagcgtcatgagccatgcttgttgcttctttagtccaacttctaactcatttccggtgacgtgcctatgttgaccacatgtcacacacaatagctgccacgtatattggtaataaaccggggcaacagtttccttttttattgctttatttgtgtaaggaaagtacttaagtttcctattttaattcttattagttttagaaaacctaattgatgtaattattacctataaatagtgaagtcattttactattctgggatccaaaatcagttttttcagagcactactgaagttgcaaaaattattgtaaaagctttcgagagagattaacaacttcttggttcttttctcacaatttatgtattttatttgtttaattattattatcattacttattatttctaatcactttaattgactcattgtcattgtttaaaagcgaggttaacacttgtgtttctctttctatcttattcttctattacattttatgtttaatgatttatccattaaacttttttttttaattaattagtatctttttgtttcatattgaattaattaatcttttaaatgggtaggtaatgctacttaaattttaattattgtttagtcaaagttgatttgaaggtcatcaaatggatagttaattccgtactttcattaatgtttacaatatttttttttacaattttattgaagttcgtaattatattaattctaacaacagaataattcttaaagcttcatcatcttcctcatttgacatatacatatttgtgctgtttatattgacaaagcttcatcatcgtccaagattctcccgcgtatattgtcatatacgacggaaaatcttggacggacaggaccttcgtgcggatgggtccttagttcttcgctcgagtggccggagtggggttggacgatggtcgttctttgctcaggtgagcagagtagggtcggacatggtcgttctttgctcgagtgggcgaagggggctagaaggtatgcgggacccgtagaatttttttttttaaaaaaataataaggatattttggataaagtgggaagttaataggataaaattgtagaaaatatttaagagaatatttttttaaattaatttttttttaagtatattaaataaaatttcccgataaaaatggccaaacattgactatccataaaacttttaaaatgattcacatagtgagaaacaacatgttgcgtaataatgtagtaatataaatgtgcagttgtatacaatggacaaataataataactattattattgtggcaaatttaatagtcacacttatcactttcttttcatcaaaattattattattatttctctcaaaaaaaaaattattattattattctttattgtatagtgcgggcaaaaatcatatttcgtgtgaattttcattttctttttcacggatgctttaaatgcgaaatcaattcgcatgtagacagaggtcattttagattttctatacccaatttaatttttttcctaacactacactaaatatttacaccgacaaagtatatcatgtcattaaaagaggaaaatttactttaggtaaattttttatattttacgtttaatttttttttatatttttatattattcataaaaataacaaaaaaaatatataaaaataataagaaagtagcatctaaataatattaaaataatataaaaaataatacaaataacaaaaaattaacaacaaaatatcacaagagaacaatataaaaatacatcaaaagactatattttatgtaaataaaatcttaaaaaccgtaaaatatttaatattctatataactctatttttgtattttttttgaaataatctctatgaaaatgtaatgctattatgtaaaaattaataactcactgataatatgatttattatagtaatatgatatccttattattaatattgagtatttcagcgttagtcaaatttatatataaaaactaagagaacagcatggccagatcgaaacttgggaatctgtgcagtgcagcaagtaagttagaacaagtgacaagaaagcacggttgttgaacaaccttacccatcaaacttagttatatttatatatgggaaatgctaaaaaatactattagtgaactttttgtatcgtgttatattacaattggtataattaagtattgaatcgtaaattacttttaagtaatatcactaacaaattatcaagcgttatttgtagaagatgctaagcaccacttgtgttcaataacaatactaatcttatatatatatatatatattttattttttctattctacaaaataattttaattatcaataatttaaattattaatataattttgggtgtaaaatatatgtagttaaattaattatgttatttaattattaagcaattattagatcagagatgtaaataaatgatagaaaatgaaaatatagctcattttataataattgtgttttgatagtgtatgtgttaaaaagtgatgtaaatttaacacaaaatttaatataatgtcaaatttacatggcctaaaatgcattattttttatttacttttatgttatattattttattaatatatttaattatagtctattttttaaaaagtatttaattatacttttaaactatgaacttatttataatatttgttactcatttacataataaaataataataaaattaatgataaagttattattttttatattttaataaaaaatttaattaaataataaattttgtatcaagatttgtaattttatattagaacacaatgttaagtttaatgcaagtatattataaaattattttttaatatcaaatataacacaatttttgtatctttcatctttaatgatcttagtatatgtaattttttaaaaataatttaatagttaatagttatacagcaaatgatttgtcaatttttttttcaaataatttggaatgtgaatgaaaattcatgtatataattcagacttgtatgtatatttatttcatgatgagaatttatattataataaagagtaatttacagtgtaaatacttaattttgactcttttttagttgtagataaatatttaagtttaatttttgaccgtaataatacctaagttatatttctggaacctccttaggtatctgatcgttatagtgttaaagtcaatattatccatgtattatttttcttattggtgtatatttaaattaatttttaaataaaaatttaatgacttagactaattaaagattgttacgtggaaatttacttgatacttaacggtcaaaaattaaatttaagtatttatttttcaactgagatttgaatttttaagtatttgtgctacaaattattttataaaaaattaaaaaaaaaataatgagattaatataaaaaatcatatgaaggacaataaaaatattacatatacataaacgtaaataaataaataaaaagttatatgaaagataaaaaaataaaataaaatttatcataaaggacaaaaacaagtccttagggcatatccattcatggggcatgatttagtatatatcaaagtttaaggggcatgatttggtagatatcaaagtccgaggagcatgatttag

SEQ ID NO: 39476 - DNA, 1997 bp, Cannabis sativa
  modified_base (27)..(61): a, c, t, g, unknown or other
  modified_base (595)..(598): a, c, t, g, unknown or other
cattttagaagttcatatttaggttgnnnnnnnnnnnnnnnnnnnnnnnnnnnnnnnnnnntggtaaaataattccaacagtccaatgttcttcagtggcgatttccagctgcaagaatcgagctccaccacctcctacgaaacactaaaatttgagaacccacgactctacgaaaccacagatctgcttctaagaagcccccaaatctgtgaacccccaactctacgaaatcccaacctcctgcctctacgaaacccccacctttgcgaaatcccaacctcctacctctaagaacccccaaattcaagagctacccacgggcgagacaaagcctatctctgcctcgtacatcactgtcttcccaaaaaaaaaaataatgaaaacaccgttcatgactataccatcacgccgttcacgagccgtcgaagccacatgccgttcacgagccgtcgaagccgagtcaccgtccacaagccattgaagcctagtcgtcgtccaaatgagaagagaagagaaggtttgaagatgaggaggctagggttttttttgtttgaagagagaagagatatgaactataagagagagagagagagnnnnagagagagagagagagagttgatactttattagtgggtacagttttcataccgtattgctgttttttaaaaaataaaaaaatcaatagtcagatataggcatttaatttctatatgccttttttatgctaagtcacgtccagcatagttggttggacgaaaattattcaaaatttaacccaaaaattaaaaaaatatagattttattaaatttttagacatttaatgtctttctagtttttttttttgtctaatattgatggaaatggtacaaaagtttttctagtccattatggttggacttgaaatttacttaaaaaaattcaatgtccaagattatttttgttggactataaaaagagacataaaaaaggttatttgtggtagtgggaaatgaatttgttaaaaacaagctcctaaagcaaacccagcaatgtttcaacaagtactgtttccacgagaattgataactcgggggcttctagttcgaagagaaaggatggtacaaaggaaccgttgaaggataaagagaaatagaagaagcatgataagtacgtgccagtgtatactatttatgccgaggttaatgaaaatcgggagagtatttacctctcacatgagcaaaaggttactttcggcaagcccgagcccatgagaaatgcgaggagcaaaagagatcctaataggtattgtaaattccataagaatattcggcatacgaccgatgaatgtttcccattgaaagatgagatagaaggtctcatcgctcgaggccattttaaacagtacatgaaaagacagggccatggatacaaccagcccagtctacccaataacccaaacaaccaggggttgcaccctcttcctgttgaaggagaggacatcctggttattttgggagggccacatatcacaggggaaagcaatagcactcaaaaaagatatatgaaagagataaagaacgagcagtcgcatttgccccagaaccttccaagaaggtgaaaatcgaggaacctcccattatattcatggaagaatactagaaaaatgtgagatatcctcacatcgatccattggtgattaccattcaacttgccaataaaaggatcaagagagtgttaatagacaatggacgctcggtaaatatcctttaaaaggacactctacagaagatggggctcgaaaaagccaaattaaggtcttgtatggtgaatctttgtggattcactatagacaacatttctagtcttggtacaattgagctcgcattaaccttagaccaggcacccctatttgccactgctatgcaagactaattagttgttgacttgccatcggcttataacatattgttgggtcgtccagcactgatcgggctaggggcagtgagttcgatcaag

SEQ ID NO: 39477 - DNA, 2003 bp, Cannabis sativa
ataaataaataaaaattggagttttttaataacattaatacagaaagattctttgccaaaaacatgtactgattgagtgagattagataataatagtaataaattagtattaaaatttgggttagctaagatgcaccattcacaatgtctaagagtttgagctttattctgaatgagttagagtgagctaagttacaaaaaggcactaataactcgtttagggtgtcaatgtctgcaaattgcagtgctattattttatcatttctcttgggagttagtaggtcattcgagtttgagcctcctagcctatctgtatttaattagtccttttcatgtttgaatttaataacaacattttctttttctttctttacaattttattgcattgaaactgaaaggactgccgtcgatctattattaagaccatggttacattaatttagcattaatctcccgtggaatttacttattagtgtataatcttttattttttagtgcaacaactttaatgattcgcgctaaatatcataccatatattctacgaaataaatatattttacttaaaaaatttcgcattttatattatttacattaataattcaaaataattaatttacgagtaactaagtattttaaaaataaaatacattgaataaatttgtctctactcgatgtagaccatctatagagaatgttttgattattttgattgaaacaatgtataattcaaagcgcatctatttttggtatatagagcgttcaatgtaatcaggagtacaattctaaatctatagtggagtaatgatgaattattaagttaaaatttaattggtaaatttcaaatctacttattgggagcttgtttacaaagggccatggttctcttaactgggataatatgtcttgtacactcaattaattgattttaattattcaatcagaattctaaataagactatgacttgtttttgaattttcactaaacttttgagaagaaaagaggatttagagtttatttattaattaagagactttgtaaggtttaataaataaaataagttacatgaaaatttcatttaataattaattacaattattaaatagatagaattgacatttatagagttagaattaaaagatgacatttgtgaaaagaaagataaatttctacaaaatggcaaaattgaaatccaccaagcccatatagggttcgaccatgatggactaaataaagctatttttatctcttttttattctattttaatcttaaacctaaccctaatagctaccctataaatagaaaagtataacttttattttcaaataatgatcaaactcctttgtgagataaaatagaaaatagaaaagagtcaacatctatttcaaaatcctcttctgcttccttttttttttcaaagccttagtgaattgaggagttaaccacacaattcaagtcaatacctagcatagtgagatagactatgtctaactaaatcgaaggaaagaagatccaggttcatatatctttataatgctctgctatagacaagaatcgagggctagaaatttgaatggaattagtcactatattaactgccatcaatgtaaggattttttaatcttttatgtggttattttactgttttaggaaattcatatttaggatattagattatagaattataatcaacatacatgttagtaaatctaaattctggtaaaataagttccaataattggcctcaaagctatggtaatgatttattttcatgaaatatgaatttaaaatgatgtttttgttgatttggatgtgctcatgttggtttatgtgttatttgatgattgaatatgaattacgaaatttttctacaatttttttttttcattatgcaaattgtaatccttgtgaaattttaagcaattaagtttctatgaatcttaatcttgatatggttaggttcagcttagttgtattatttatggtcttcaagttgttcgtg

SEQ ID NO: 39478 - DNA, 3063 bp, Cannabis sativa
ctttggtggtgagttgaggttacaatgaagaagaaaaagacaacagttcatgtaaggattcaaatgaagaaaaacaaatggttacttttatggcaaaaagcaatcgctttgtttgcttagaggaagatggagattttgttagttcaaatgatgatagtgtgggtagatagaatgcttatgaagaaatgtatgctcaatggtaatacatggaaaaaaaaaagatcaaggggattaactgaggcaaaccagcaagtttaatctaaaagatctggtctaaaagatactgttaaaatgttcaccaagtagttggataaaaaaggaaagtaagatttacaaattgaatgttgacttggtcagagccaaacgagctcttgagtttaatccactagggataacatcaatcaaccagacattgaaactccgaaaaccttaatggatagtgaacttcaattgggtataaaatgttgtataagaaaggagaaaatcttagcatagatgaattctcttcctcaaaaattagtgttgaacagtcactttagaatcctttacttagtggttcttctgctacagacatagatgtcactaggaagattgtagttccacttggtcctacaaaattgctttgtaaggggagaaagacagcacttgaaggtcaactacaaagggagaggtttgtaccagtttgtcacttttgcaataaaagagggcatattcgtcctagattaatgggaagcattcacaagttgagtggaagagcaaaaactagtgacactatgggattggttgctcacactggtattttgacagttgttgctctcatcacacgatgggaaagaaagaattgttggtgaattataaagaaggttagatggggttggtcacttttggtgatggaaataagggttagattattgggaaaggagacttggtgatgaatggagttgcaccttttttaggagtattgtatgtgaaaaggctcaaggaaaatcttataagcattaatcaactttgtgatccaaattacactaaaactcattgtttagtttcatctaatgggtgctcagtcttaacagggaagatattcgatgatagtagttatttgttggacaatgttgtcttatgtaatagtgcaatactagataaatcaaatattggggggttatacttctattctaaaagttttattgacgattactctagatatgctcatatttatctaatgcatataaaatatgaaacatttgagaagtttaaaaattccatgctatggctcaaaactaattggaaaatacattaaagatcttgcaaagtaatagaggtggagaatatttggatatgcagttcaaagatcgttcaattgaacttggagttgtttcccagctaactgttccatccactccacaacaaaatggtgttgcagaacatcaaaattgcactcttatggaaatagttaggtctattcttagctattcaactttattagtgtcctatggggatatgccttataaatggcgattgacattctaaatatttccccatctaagtctatctccaatggtcgtatgcctgccttatataattacaaaatttaggggtgctttgctcgtgtcttaagaaagaaagaaggaaagctagaacagtgaattagagtttgcatgtttgttggaaagtccaaagagactagaggtggactattctatagtcatgaagataagaaagtgtttgtttctactaatactacttttcttgaaaatgattatatcaagtatttacaacctcgtagcaaaatagtgttagaagaaattctttaaagatttatctccaaagatgttccctcatcttctacaaattgatacaattgaagaggatactatcacaaaatttattgttcaaaaagtcatagtacctcgtcgtagtgggagagtttcaaggaaaccaccccgtttaattatggcctaaatggtgaaatcaacatggtttttggtgatactggtgatgacgatccgttgacattaaacatgaaatggctagttttgactggagactatagttagaagccatgtatgaagaaatgaattctattagaaaaaataatgtttgggatcaagttatgcttgcaccaaatgactttagggccatcaggtgtaagtggatcttcaaaaagaaaagaggagctgatggacaagttgaaacttacaaacatagacttgtagcaaagggatataactaaagagaaggtgtgggctatgagaaaagttttagtccaattgccatgctcaaatgaatcagaatactcttatctgtaaccgttgctctcgattataagatttcatagatggacgtcaagtccacttcccttaacagaaaccgtagactatctatatggaacaactagaagagttcaagatcccaggatacgaaggaaaagtatgcaaatttaacagttccatttatagatttaagtaggcttctcgatcctgaaatagaaggtttgatgaaatcatcaaaatctacggctttaaacaaaatgaagatgaaccttgcgtttaccaattcaaggataatcaagtggtattatttttagttttctatgtggatgtcatcttaatcattggaaacaatatcatgaagttattagatgtgaaggaatggctatacactcagttcaaaatgaagactcataactgccctagactacaactaccattttctattttcaatttaattgtacataattagaaatttagtaaaagatacgcacagttataaataacaatacctctaacagaaaaagcctaacttgaaaaattctagagtgagagagttctgaatctgaaagaaaatagagaatgaaagaggtagagagagagaccgtgagttgtactcttgtgtaaaataccaaaaatttaatcagggagagagagagagaaattaaagagattatctggaattgctgtaactggaattttcattggtggttgtatatataatagttgatcttataaacgagctgatctgttttatggtactttagtcttagggtcatcaagtgcaagtaagtgc

SEQ ID NO: 39479 - DNA, 1601 bp, Cannabis sativa
taggactgtgttttacttgtttttatttttgctttgctgatgtggatatatattgtaaagggactggttataagtggattttaaccaacacaatctctagtgagatagttcactaataaattagggataagtaatttgacttattcacatctaaattatgaatgtatccatattatgcaagaagacattgcttttagtaattcgaatcgaagggtgatataaaattgtctatttctggcatcatatctatagttaatgcattcatcatagttagaagctccatctttgcactcttgctcccgtgaggataaatcttgaaagtgaattgttatacccgattttcgaggaatcaaaaaagttacgcctaagaatttgaccaagacttaagagaaccaaatggagttgagatatcctacttaagggcaccatgacacatttaggaaaactatgaaaacactagccaaccatttggtaccacgacccacacccaagggtgcatagcctagggtttcatggtttcacgcaagagttttcatcctaaagacctcaattcgagaaggaaattagtaagaacttgactcattatggtataaagaggctaatacttgaacataaagccaaaattgcacaagaacctcttcccatatggcttgggtgacatgtgccatcttttggcacaaaaagatggcacatgtcaccacatttaaaataccaaagaggacttgtgtaaatatgtttctcaaataccaaggagtataaaataattaaaagaagctattctcaagtttattcctatgccatgcgactattgcaaaaattctaacacgcaagtgcacatatcatttccaagtaatactcactagagtgaggtcgatcccacttacacccgtatttcgagcgttaaataaggacatgacacgtgtcaataaattaaagtctaaaagaatgaagtgaatgataaatatgaggaaagaataaatgcccggcccgagataagttacggttaaaagatgtgataacctcgcgtggaactatcaatacaatgattcacaaggataactagattacaagtaaaatcctcagaacttgactaagatgaatgaggcaggtgaaaagcaggaaagaataggttgagtgaaaagggtagataacaagttcttcaaaagcttgcaactcattgacttagtatgttgattttaactataaaatcacgtaaaaactcttggtgtttgatatatatttaattataaatagctaattttatttacaaggcttcatttattgttacaactgatcaaagatcaaagatcttaattgatcttagatcaaagatcttaatcttgagataattatgttatggcttaaatgtattacacgagttctttaacttgttcgttatagctgaccacttggatcgacccaatacttacatcttgggaacacgataatgcaatgtgggagcgctaatcatagatatagaagctataacttctataagtacataaaagtgaaacgatggtttccttagagcttggctaaatgcgtttaaatgattgaggcctcatttcagtaattacattagtttcttaaaatatcattta

SEQ ID NO: 39480 - DNA, 1752 bp, Cannabis sativa
aaatatgccaatggataataataatttccgttgcacgatcacctctttcagctcccacgtggcctataagaaacaaatttaacggtagaatggtccaaatcctgaaatgacgaaaataccctcccgtcttcaatgccctccaaacttccaactgacaaaatgccatacatagtcacgcggaattaacgcctcaactgccggtgggacccattatagaatggcagtttctgtaaataaaatcaaacaccgaggctcaaatcgacaaaccgtattttcccaacagttatttatttttatattattagttaagctccgctatacattatatatactaatactggcacactcgcacccagaccaagaaaagaaaagaacaactcaaaaagcttcttagattaaggggctcactccagtctataaacactattagaccttttgcctattgactctaaataactgtcggcaagccattctttctgactgttcacccttatagtataaggagtcagaaattggtggtagcgccgcctagattaaccggagacaaacgacaatgcagttggtacggtcagtttgttttggtgcactaacacttctcttggtcttcaagtatagtttgttggtcgatgcggctaagcctcagtcccacagtcacctcaccgacactcgttggaaacccgccaccgccacctggtacggaagccctgaaggcgacggcagtgacggtaagagtcccattacattgctcaaaaaatgtccaagccaaacccatttatttttaacaaattgttcaccctgtattctcctacgccaaaaacatgttttttttttttcccttaccgagttgggtatttttaactgcttctcttctctccgtctctttctttttttcactgcttaggaaaaaagggtttaatttggcttttcaaagaaaatgccaggaaaactagccggctgaactctgtttccactcattttgcaatgcttctttaattttagtggccattggctctttttctacttacggcaaacaaaagcaaagtttcccgagttgggtttgttttctttttctttttttactctttttttctcagtgtttctataaaaaaaaaaaaaatcatcctggtcaactctggtttgaccgactttttactaccttggtctggtccaattttggtgacacgttatgttgttaaaaaaagggatgaatattttgtcaatttccaggtggagcttgtgggtatggatcaatggtggacgtaaagccgtttcgggctcgagtgggggcagtgagcccagtgctgttcaagaacggggaaggatgtggagcttgctataaggtgaagtgcctcgaccacagcatctgctctcggcgggcagtgaccataatcgtgactgacgagtgtcccggtgggtactgctccaatggccgaacccactttgaccttagcggcgccgcttttggccgcatggccgtgaccggtgacggtggtcagctcaggaaccggggcgaaatctcggttgtttaccgaaggtatgtttgggcttttcatttgtaccatgttggtcggatctccttcattccctctatcgagattatagttttatttttattttattcaactgtcactttttttgtcacttccaaatttcgtttccttccattccttttactttcctttctctttttgtttttttttttactaaactctaggtattggtattgtttttgcaaccaaaaaagttacataa

SEQ ID NO: 39481 - DNA, 2118 bp, Cannabis sativa
attaagcaatactaacaattactcatttataccctttcatctaacaccttatccaaaattctagcaccttttttttttttgttcagcaaaaaataatttgtttcattgggaattttattttactttttcttaagaaaaaaaaaataatggaacattttgaaaaataaaaattgtcttttaatagtatattaataattttggaaccaataaacttatataataatttaaataatgctacaagttactactgtgtctaacaccactttacaatttacatggtatactgctatttaaaaagatggtgttgaataccatggataaataattaaaagtgtgagagcaaatgtgagatggtaattcttttcgttctcttttgcattgtatagttttcacatttcattagcaataattttattttattggccatattttgatcagtcacagccaaagtaattaataatcattgatgcgaaagaatcataaaatcatactcgtgcacacaagattcgcttctagttattaattatatgtagctatattagtttagtatctaaatgtattgctagaataagagggagaatgacatgatgtatatgcctgataaattggtaactaaattctttttttgtattaataaaattcagtaaatgaaagttacatagataaccttcttatttagttatgactactaatttgtcactataacaggaaattatcatatgaataattattaagtagtactagtagcacggaggctattacaagatcatatggcagcatcgttttagcttatatctaattgttgtcataccaaaactgcttttgaagatggtcgataatgttcttgtcaacttggaaggccttagcaaggacatcagggttgatgggagggtccgaaccgaacacagcatttgcaatggtgatcactccagcattttggctgctgagagcagcaaaggcaactgctggtgtgtgtcctttgttgaattggaaatgaatcaaaccaatggggaacacgaacacatctcccttgttcaaaaccttcgtgaagaggcggtttttgccatctttttggttggatgtcacaaacccaacgtagagtgttccctgatttcagtgccacgagggtgagtgtgaggtgggttttggccatatggcgcaaagtcaatgcaagctaatgttattccaagagtgttgagtcctcgaatcatgtcaacattcagttgtgtcacattggatccaatagggttgtgtgtgtctcttggagtgtccagtgtccaccccagtgaagaaaaaagtcttctgccttgacctgcattggatccttacagaattttccattcacaaacactgccaaagaaacacttgttagttagcactaaagaattgcactctatacaacgagtaaagagaattagtagtgagtttacttacaagctttttcagggtcatctactgctacacagaaatcctgaagaggactaggatcataggcagaggcaataaatgatgccaaagcaaatatggcaagtgtgacaaggaaatgagcactcttcatttttggttaagtggctaaggtattctaaatattattttgtagttataagtgagtttttgtgatatatatatataagctagcatgaaactaagtctgtttatagagttattttctaacctgaatctactccatcttttcttatcgaagacctgagtaatacttgggaaaatgtagtcttggttgttatatatatttaataatgaaacaaagaatcattcttcaaccactatgaagaagtttatttcatttaacttgatccgcaatcgtttgcttcatacaatgaccaattgataaggaagtggtcatctttctctctagtagtattacttatacctatattaattatgtacttttctcttagagcctagtttaatacgtagttagaaagcaaaactaatctaatgatttttttaagtgatataatgcaaatattttaattagctcaatatcttaaagcttttagtgtattttgacccacctttagaatttagatgtgaaaataagaattcttatgttttttaatctttaactagaatcagaataataataaaaaaaaaata

SEQ ID NO: 39482 - DNA, 1534 bp, Cannabis sativa
  modified_base (907)..(910): a, c, t, g, unknown or other
tagcgttgaatttaaaaatagaaaggcaagtcattaattgatggtggctttgatagaagaaaatgaggaggagatggaagatttggatcctagaatccatgacgaatataaccaactcaaacctatcaaagaattagaaaaggtgaatttagatccaaacaatcctactaaatgtgtaaacattggaaagggtttggagtgtaagttatcccacaactcgcttccagctgttgaaaggttggttgtgaaccctgcttgaagagcagtaagttgaatactgtcattcaagtccctaacctttgcagtagcagtgctgaagcgactcaggtaagccttaagtgactcgcctagttgctgctttatgttagttagggatgatgttttaggtcgcctatctctagctacctaaaattgtttcttaaaatccctggacagctattcccaagaagttatcgaatggtgagtgaatttattgaaatagctactcattgccccagtcaacgagcttgggaataaaatgcatcgcagattattcgagacgttgctagctcgcattatggtattgaagttatttagatgagcgacttggtccgaagtcccatcatactgcgagacgtgtgggttttggaattcctgcaggaattcaaagttcataatataaggatggaaaggctcggcctcctcgtccgagtcatagccaggtaatttctcgtatttcccatcttgttattttctaaacttatcctccaactcaatgatttgcagctgaatggaatccccttgttgtttttttggattacgttgatggcgcaagtcaggtgtaaatggatttaatcgcttgtgaagatcgggttgtcttcgattcaaatgctcacaaagatcaggttgtcttcgttcataattactnnnngatctcgtatctgagtaactctcagattgataactcctcgtattgctcatactttcttaatcagcataacgctgaggtctgcttccttctcgtgttttccttcctgatcgactttgcctttgagacctcgagtgtcccaagctagaacttgcctcgtcttgcacaggccttctccttcaacaaaggttagatacatgccctctgtttaagtatgtgtatgcctcctccctctcagattgagaaggacggtgggggtgtctcggtggtaacccacttgttctaggttgagtcccaggatttctctcattattacgagggatttcctattccctagttcggggttgccttatgttttcattcctataataagcctctaatacatcatcatgttcattccccttactcgtaaatccttggggtctttgaggtacttcttgatgatattcttggttattctgttgttcgtcaactagaacatccccagttcccataggtttttcctccttggtgttttgggcatttccttgatttgcttcctacctcctggttcttgaaccttgagttctgcctcgtggccttcttactccaagatcaggttgattttgtgtattatttccttgagtc

SEQ ID NO: 39483 - DNA, 3758 bp, Cannabis sativa
  modified_base (142)..(142): a, c, t, g, unknown or other
  modified_base (260)..(261): a, c, t, g, unknown or other
ttgcgttggtaaaatagaatttacttttgatgtgttggcaaaagggagttggcaaatcaatgttggtattagaactattgccagcaaaaaatgaaatacgctggccaaaatgagttttcccagcgcgtaaatgcactggtanaagttagattttagccactacaaatgtacgctggtaaaactttgatcttcttgccagtgcagtttgcgaaatgcgttggtaaaagttacgtttaccaacgcagtagcgaactgtgctnntaaaagtgacatttcttgtagttaccatggaatcccttcttgaattctctgacagcttcgctcacgttgaaacttgatcgtatgaattgctttccaagaaaagccaagtcatacctactgtaataggttgtgatcttgatgagttactctttagtaaaaatgctcccccgtcaaagctcatcaatggcaatgacaatcctccgttcttgcaatggcgacgtaaagatcaactactgttgtcttagctccgatcttcaatgactgaaggaatcttggccactgtgccttgctacaacacatcgaactctgtctagaaagctttggaacagaaatttacaagtcaatctaaggcaagactctttcaacttaaaagccaattaacaaaaatctgcaaaaaggtaatatgtccattttagattatgttgacaagatcaaatctatatgcgattctttggctattgctagtcaccctgtaaatgattttgatctgattttacacctgcttaatggacttggtcttgagtttgattccattgtgtccagcattacctctcgaagtaaaactctttcacttgaagaagttcaagctctcttgatgtctcatgagtcaagactagagagacactcaaccatcttggatctttcaacaaaaatggcagccaaccttactttaggttcaagaaatggcacatacagaccttttaatagctcaagaaaaggtcaaggttctgaaaatgtaccaacattctcaaatcgtggcaacggatcccgacctatcaataataacagaccttttatgtcaagtatgcatgaaatttgggtgtactgttgttacttgccactacaggtttgattgaaattgggttaccccaaaggcttctagctcagcctcaagccaacctcatagaacacactcttgactatgatcctcaggcttttattgctcaatctgtgccagactttggtgatgatgttgggtggtatgtggattctggtgcaaccaatcatatagctcactctttagacaatcttgagtctgtcactccctatactggtcaagaaatagtagttgttgctaaatgtaagaaattggtgatttataacattggcacaacaactatttcctcaaactctcactccttaaatctaaattcagttttgtaaattccttcaataactaaaaatctagttagtgtatccaaacttaataatgacaatgatgttttcttggaatttcatgaaacttgttgttttgttatggacaaggaaacgggggtagtcttgcttaaagggaaaatcaaagatagctctatcaccttggagatgataacttgagtctttcaaacagcgctctgcaggtgcatcttgccacttcagacattcaatccaagtatatgttgagtcattctaaatgttgtaatcattgttgtattaggttgagtcttcaacctcttcttgtactgaacaaaataataaaagaacatcttttgtctactctgatgtttataatcctactgtcttactttcacaaactgctcatgacattaataattggcacaaagcacaataaacttggacatccagcttctcatactctcaacaaaattttaaacaaagctaatataccttgttctcctaaaaatttgaaattttgtaaagcatgtcagttaggtaaaagtcataggtttccatatcctttgtctcaatccagagccaagcaacttcttgctctggtgcacactgatttgtggggtccttcccatgtctcatccaaagaaaactataaatactacattatgtttgtagatgattatagtcgattttcttggatctttcctatcactatgaagtcccaagcttttgaaactttcatcaagtttaaaagtcttgtggaaaaatagtttaatttacctattaaagttgttcaagcagatgggggaggggactataggcctttagaaaaacttttaagtgatcaagacatagttttctaacaaccttgtcctcatagtcatgaacaaaatggtagggttgaaagaaaacatagacacataactgaaactggtttaacacttttagctcaagctggtcttgatctttcttactggtggtttgcatttcaatgtgccactcactcaactaatcgaatgcctacacctgttcttgctaatctaagtccctatgagtgtttgtttaaagaaactcctcagtatcatgttctcaaaccatttggctgtgcttgtaatcctcatttaagaccatataatcatcacaaacgtgagtacaggtctgaagaatgcttgtttctgggatattctccaaaacacaaaggatacttgtgtgaaaatgttgatggaggaatctttgttgccaagaatgttatcttttatgagttgtcttttcctacttccaagattggtactgcttcatcaaaggtaaattttaaaaaccacaacttgccctataattcagttctgtactgggtttcagaatatttcacctaacttcactgttgagccatttggttcaacatctagtgcccctaatataattcctggtgcaaatgtttctgctgataactcacctattgctacagctgctagagtagctattgacacccatgatacaccaactaattcaaatgcatcaacagcaattgtgcgtgttgcacctgcacaaacagtttctgctactgcagatgttcctgcaacacaaattggttcaccttgttcagcttcctctgttacacatgttgaattcttgaatcaagttacttcaaatattcattcatctacaacaggtcctcatgtcacaaacaatgctgaaccaattattgcatcatctctgcaacctcttgcaccagttactttgtcacacttcctcaaagtcattctatggttactagatctatgagaggtatttacaagcctacagcttatgttgttactaagcataggctgccagaatatttgttgcctcgtgagtagaaatcagtgaaatctgcttttaaaaatccaatttggaatggttccatgtcaactgaaattcatgttcttaaagctcagggtacttggactttagttccctgtgaaccacacatggtatgaatagacaataaatgggtatatatggtgaagttaaatgcatatgggacccttgataaatgcaaatctagacttgttgctcgaggatatctacaacaaccaggtatagattttgaggacaatttaagtcctgttgtgaaaccagtcacagtaagattggttctcacttttgctgtcacatttaattgggaagcaaggcaattggatgtctcaaatgcctttatttatggtgatcttattgagacagtttacatgactcaacctaaaggctttgaagaccctcaacatcctaatcatgtctgcaaatttaacaaagcgatctatggattgtagaaggcacctagggcttgggatggcaaactcaaaacgactttattcagttggggatttaag

SEQ ID NO: 39484 - DNA, 5792 bp, Cannabis sativa
  modified_base (170)..(175): a, c, t, g, unknown or other
tattattattattttacattattgctaactatttcatatcactaccaacaaaaactcacacgagtggcccttaaaccacgctgatcaggggctgcatgcactcctaataaccccacctacataggccctctgccatacaaacatgcataattctctctctctctctctcnnnnnntctctctctctctctcctattatttatttattttttaaatgttacatactgttaatcactcaaaaaacatgcatgaaatatccatggtttttattagttactagtatcatcattaataattggtaatatacaatatattgttagggaacctgcaatagtgaactcatatttaatgttaaattaacaccaaaataaccaaaatatactatttatactattttattttaacacatttaacacaatttttttttttttttacatttcaatcacaacattaattttttttttttttttttttgataaatcaaagaaattaagtcatattgctcaaaacattctttacatcctatccgtgcttacataaagcttgacaaatttttaaactatatcttatcctcatgtttaactttttctggcataaagagtctaattctatgcttagcttattctttcacttttctcactattacatataatatggaactaaactattccagtatatatcgtatcattcctatttagtcttaatctgtacactaaagctgcaagagttgctgccattaccatattctcttgaatttgcttgatcttgagcactccagccatcttatatgccttgtaaattttcaatttgattcccccatccaagtcactgtttcaccactttcgttgactacatagacactcaaagaaatgtgctcaattattttctccttattacctcaaatcaaacatgaagcatcaatgctaatttgaaacttgaataatctcccttttgtttgaagtatatttactgttaacgcatatttttgttaagcctttatgtaataaatatatcacaaaaatgataataaataattaaataactccagataattttatgtgattttgcagttaaatctgcatacttcaggattctatcttatttatgattttttctgaatacagaatacaatatttaaatgataatatttttcctctcaattttcggtccttttttctatggaatctgcccctatttataggaatataggttggaagttattttattggaatcaatttaaatgtcaccgttcatgaaacgtggacaatttccacgttttatttattcgcatataggataatatctaataactgcagaattgtcttttgattttatatttttcgatggttagtatttggacgattgtatctcgcttaacatgaattatcctccttgtccaccgtgatgtggaaaaaatactaagtgttggcagataattcgcctcgacacatctcttcatctgggttaatattgcgaggtgactgtctcgctatatgtaaccccaggtagtgagtaaatgtatttcagagcaggtgtatgtcttgtcaacataagtttaatagtttctcatccttatctcgcttaatattatatagtcagcgagttgtaaatattttctatcaaacttttataaaagttattttattttgcatttaatgatataacttttttatatcaggtggttcatcttccaccgcaggacacgtattaacttctgaagtacttctagtgcagctgaactttgggtataataattgttccttaaaaaattcttttttaattaaaaagagatttttaaatgattataaggatatttttgtcttaacccaaatttaataattgcatgttttaagtttttggcgtctcaagatttcgaggcacatcattatcattaaatgcccatcttttcaaatcttgctgcattcccatctattagatcttattgcttttgatctaacagtgttcacttccaaggtataaaattcgaaagtaaacattcatttttcatttatgcctttcaaaccttcaagccattctgcaaaaaaccttctctgacttccaatcaccttattgcatgcccttactatctttgacttattttttgtgcgtttcatcagacttcctcctcaacctcagagattctcaaaagtcatttcttcagccatcaaattctcaatcgaaaagttcttcattacccaggaaccttcgtcaaaacagtaagtggtttacttctttttctttgttattcccttttcttgggttagtaatatcttatttttgtaattgattgcatcattatttactttgtttggtttagataattttcaatttagttttctagataatttctaggattcacgaaaaattttaggttcattagatttgtaggtttctggtttaagtagaatttaacatttctacaaattgggtttattctttgtttgaaaatatgtcccaatctggttctaagattccaaccccagatttcccagaaatagaatgtcctagaaaattattccttccatttgaatctaaaatccaaaaacctaaatctaaacttgaaataaatgatgctaaagttagggatcactacagagggtaaataccattttctgcgagatatagcctggccagaatctgaaattataacttcaatcccttcagcaggatttttgtttttacctagagtcattgttgctttttcaccacgtgacctagattttgaatcatgtctacttaagctcgtaattaataaaacccccaagatcccactgtcacttttaaagccgagctcattaaatccaaagtaagagctattggggactatgtcggtagtgtattaaaatcctgtggcatcaagaaagagcgaggatgtcacattagattcgttgctaaaagggagtttagctgcttcccaccagattgggttattcgagaagaatgtggtgaaggtagcactagtgccttgtcagaaattggcgcttggagcctcgagctcatcaaggctgaatccgtacttcccttgagggaatactttaaggagttctgtaattatctctaaattgctctttttcaattaattttgatatcttacagaattttggcctgcctaaagatcctataccacattttaggttgggagtgtcctactccccgcgaaattgtgtacttttattctgtaaaagccgttcccgcagggaagcagtgttcaggaggtttttactaccttagtacacacacaagtgatcgcaagatcattgtgagtttaccaaacaagatcgagttcaaggataactccttctggactactggtctctcccccatcaacacaacaacattttgaatcatacaaaagtatcaccttttctcaaaagcttagttttgagtttttgaatttataaagttgaacacttacttattttacttgttgtattgacagcgattactaaaagatagattctcactcccgagatggtcgagtgacatataactctattaggtcttcctttcgaactgtgattagtagattttcttctcaacgagaccaacttgaagaacgtcaacctcctcggaactgaccaattcacttgcgactacaagaacccaaaatattttaagtggcagagtgtcccagttccatctgatgaggaggatagaggctatgtggctcgcatccattatctaaaaaacatcaaccctcgaagctgaagaagaagcatcccgaggtaatcaatatggatggtcaccaactgtaattagcaccgcaagtacctcgctagtaacttttaaagatagccaatacaacttttacacctaagataatttttgtatagatcgcataacccataggttttatagttggtatccaaagtttcatgtccaacttagttttaatagttcatactttagaattgtcgagcaatatggtaccgatttggatagggcgagtcattttgattcaagttgggacttatctccaataaactcctatgacatatacatggtcactggctttagggagtttagtaattaccatagttcttcctcttcatcatctgatgattatggtaacttttattttaagtgggagcttattccccacctttttataatcttttttgaacaagtgttgatatattttttttacctcacagatatggatcttgacttagaagatatgctcaacagccccactcttatcaacaaaaaatctaaaaactgtacagctctagaaaatgaagccttgagttctattaaagaacccaaaagaacaaaaacaactgctaataagaagcgatcttcaaactcactattgagcctgcgaaatctctaaaaaaggctgcacctactgtggcaagagccagtgaaccaacccttgggtctgtacaccaggtgaaattctctagctctcgtctagagatgggcttccttgagccctcctgccccttgcctatcaaagctggtatagaaggttcgcaactctgctcactacatgccaccaacaattagcggcattaccaaacttttgagtccagtgactgggacttacttaataaagggcgctttgaaaattttgtttagaggagttacgatcttatacagcaggttagtcttttttctgccccctttttcttttatttccattgtttttatactctcttactttctcatttcatttctcgtaggcatctcttttgtcttttgctgctcaatacagggggcttcaacgagttgagatgctcgagatagaatttcaccagactagagagcatcgtgatgccatggccaagaagtggaatgattcagagtctgaactaactcgggttgaaaaggaagccaaagagtaacaaaggactctaaaaattgaccttgaattttctcaaaagagaaatcaagaactcgaggaggctaacaaggttatacaggctgacactgatcaaaagcttgaagaggctaaggttgacgcaaaaatagggtcaacaaaatttctaggcgatcaatatatcaaccttggtttgccaatctcgagatggatttcatctttttgagcaaaaaggctggagagatgcttgcgtactgcaagaagaccaagaaggaggaggctggggatgcagccaagtttgaagcagatcaagccaactaagtctcctactatgtaggcctagtctttttatctcttttttttttttagtttaatggccatccgaccaagacaatattttccctttgtggcatttataagatacttttgctatgttggacgaccaacatagtttatttatatatttacttttatgcctcatatcttgctttttgagttcttttttttaaaaaaatgtttgtccattgcgttttgtttcacaatttaaacttcccttttctcgaatttagcttaagatttttttgagttgaatgtgtatttaataatcttgaggatatttaactagttatttatctaccatgtatatacgcgagcagttgtaatctgtgttattttatgcgagcaattttaatctgccctgttatgcgagaaaccattccgcgtgaaaggacataaccgtaaggatgatatcgacaatacatagcgaggcatcaacctcgcaatatgtagaaaggcattgacgaggtgaactagctgttagaacacttagcatataatatacaatatactaactaagtgttatagcttgaaggacgtagataataaatagcgagacatccatctcgctataggaaggcatactccttgtgataccctagaattatgagattggattagcaaaaccctaatta

SEQ ID NO: 39485 - DNA, 1819 bp, Cannabis sativa
atattttaaaattattacaattaaccaaaaatgtatagagataatatcaaaaaaacaaggtgcatgaactatatagtatatcattacatacgttacctttaatggaagaaaaaaaaggtgcaatattttcacatctattttttaattatttaaatatatatatataatgacaaatttaataatgacagcaaattaacacctgctaatattatatatatatatttatttaaaaaaaaaaaatcaaagtaacggttgttaattttttttcacctcttctatgaaacgatacatacgtagacacatacatggtaatattacattaacaccaaataccatttatacacatacaagtggccatatatatatatatatatatatatatataacactcttgtactcactcatttcactcattgttttttctctttctctctagatatctttgtttttgtctctttttcatcttcttcttttttcttagccctagctagtaatggagatagttgagataatttacatatatattgataagatttttccaccaaaacccaaaccaaaagagctaacaaataatttgtttggacagatttttgtgcctgatgatgatgatgaagagaagaagaaaaatgggttttgtattaatcgaaacaagtttttatcggtcacttatttaagacaaataagtgttggggtaatttttatttatttatttatttttttcattgttttaattgataatatattgtgtcacacactcacacatagatctatatatacatctcatgagttggtttgattttgtttttggatgaaattttttatggttgatgattattattatatatgttagataatcgatttaatttgtatagatctatatgtttttatgtgtataatatcgaaattattagtacaagatggaaaatcgtatatgagttaaggagtgtgtttgcttgtacatgagctagggcttactttatggacattaagaaaaattatattatattagagaaaaattatgatgaaattataataatatggatcgatataatcaattgatgttgagtttgctagtgtgttatttgtgtgtgtggttaattacttcgagttattggattttacttgatacatatttagagagaaagagagagtaattaagattaatcttgagtttttattttgtaaaatataactcaaaaaatgatcatggtaatgtaaaagtgaaaacaaagtaccttataatcgatattttttaaaatctctcataagtctttctcgacacatgtacatttgggggtgtttattattattacaacaattatcagatattttttatacatatattatcacaattatccaagtataagtcaattataacttttagatagaaaagggttcgtatagaagagagtagtgattttctctaagtgagagagagagagtagtgactaataatatgtgacattttttcaccattgcaaaaattatatataataccacaaaaaaatctcttttaattataagttttttttttgactaaaagtgaaaaaattgtgacaaattaaaaaaaaaaataattaatttgttgtgattaaaaagtctgtagctaaaagtattagtcacaaaaatcataatgtgtttttagtcacaattgtgactaatactaaattatgacaacttgtatcttaatactgtattttagtcatattgtggctaaaaagtcacatttagtcacaaaaaatttatgactaaaatgtaattattaaatataatttttttttgatagtgtatatcggaaataattagagcaaacagaatt

SEQ ID NO: 39486 - DNA, 2665 bp, Cannabis sativa
tatcttctttataatataatgcaaaaatacacatcaatcaataaagactttctcagttaattacaaagtggaaacttggagataaaactagaaaaatcttactagttattgtgattaattattattttcacagttaatattatatgatttgtaataataatgtgtaatatataattgataagattattgataatatgtatgatgtgttacatatctatacgagtatttaattatttttataataattattgaattaaaatataattatattgggatagaaaatttaacccgtaggtatagagctctacgactacgagtattcgctttcaatagggcaaggattttccacctaaataaaaaatgaagttgagacgggaacaactttctatccacgaatgttttttctaaataagagctcaaatttgtttttttttttttttatagtcctacggttgtgtgtatgggtatattttttatttatttattttttttataatttgttgatatcatacgtacttgaacaaaaaaaaagtgatgagaagggtcattattatgggcaacattctatgcaacttggattaagaagatcattcacgtaatgatatgacatacataaactaaagaaagtgcataaagattttatggctatctagctacatataaatccatgcatatattcttagctatataagtatatttataaataattatatcaactagtataatagacaataacagagagggtgtcatggcccccctaatttttttcttcaaaaattacatataaaaattaattaaaaattaaaataaataatttttgaagaaacaataagagcatgtagtgaatggctttttgaagaaatgtgacgtctttgaaaagtatgggattttattttattataatatgggattctctaacttcaaaatgtgacatataagttgaaatccaaaatgatgccaaaaagccaccaaaataatatataatgtataaatatttatttatttattcaaataactcttttgtagtgagcatgcctttagagtttagtggtcctccatactatatagagcttaaattactaatttcattgtattaaaattttaattgtatatataattttttaattttttttataaatatatgtgaattggattggatcggttatttttacatgtcaatcaactttcaatctgcacaagtacgaattttgaatttttcaatccaattcaatcagtactagtacagatatcagcacttcgcaaattgaattggattgaatcgtgcagattgaattgaatcaactattttatgaacatacgtattttaaaatatagtgtaattattattagtatacaggtacttctaaaatggaatatttttcatttacctttttaaaaaaatatactttaaaaatgaaataattaaatattaaatatatatttatattgcaacatgtgggggcagatttttcttataaattatcttgattgaaaacatttttgtaataatttgtctcctttataggaaaataacaaaatatgtaccattcaatatccatcactagttattttcattttcttcaaatgctaataatttcaaatgaattttctttttactgcccttaatttaatttttcctaaattagaaacttaattatgccattcatctatttctcataattaataatagtaacaatggcattcaaaatttcaaaatatactaataataatggtaaattaataagcaaaaccttgctaataaatagtatagaatttatttggtcaaacctttaaaataattttctaattatatacacaattaatagccattaaaagaggaaataaagtttgtataaatagtttagaaatattatttttataattaagagcttatataatattgtgattttgaaaaatggacaagaatggtgcaactttgcagttttaccatttcttgtccattttcattatcatcaatctaagcttttcttactgcaaagccattgaagatcataaagaggtatatatatatataaagtttcttctttattaatttttttttttttttttgataaaattaatttttattatttttttacattggttttggaatattttttaattatgaaaaataaaaaaaataaaaaattgtattccattggattttcaagttttcttttatcattctcttaagaaataaatattatagataattttgttttgaaataaaattattgagcttggatttgcattatttgagtttcaagttctattttttaatcttgaatattaaattatttattatttaaattcatattcttcttcttcttaattttcatcttccattttccttttaccacacaattattttttcttttttccaagaagatagtggtggaagaagtaaaaaaaaaaggaaaaaagaaaaaagagatatattttttatttattaattttaaaataatttatattatattagaataattaaattagttagattgccacatgtccacataaatattccttgtaaaaaataaggatttagcacaaaaaaatattcattttaatgtcctaaattctttagcttctaaataataatattgcataaatccctacaaaataaataaattaataatataacatatatattagggtaaataccatt

SEQ ID NO: 39487 - DNA, 4819 bp, Cannabis sativa
  modified_base (4770)..(4780): a, c, t, g, unknown or other
ggctactcttacatttttatctttcatattgttttaatcacactaatatctcttacacgtgttataccaacttcacacattatctatttctctaataaaataatagaattataataccaaatattgtatataaagaatgtgttagatatcatattaagttattcaaaatcaggatttattactcttttattgataattaaaaattaacttttaactttgtaagatttactttttagctaaattaagccttttcatggatcagtagttgttgtagttttctagtacacagtaaattttcgtacatgcacattttctatatttttttttataattattgacaacaaaattatgagagattaaaatacaaacaaaacaaaaatccaaaaaaaatagtggagtttcgtttcagttttcattgtagctttctgtttgaaaactcctcccacaatcaaaaacattttttatccaaaaaaaaaaaaaaatgatttcatccatcttccttaattgccttcttccatcaactgaccaacttttttctaattttttcttctttcttctgctttgtaaatgaccattactcgatcttcatcttccctatcaccattgctgaaaaacttcaaaaataagtgttaaatctcttgccaacaaatctaaaagcaaacgacccgttgttgaagatgatgattcatactttgctctgcctaccaaaaaaagtgattgtcggcctattaaaaagaaatcgaaggttaatgttgctgaaaatattttcctccctaaagttaagaaagagaagttgatgagagttcgaaagtttttttatcgttttgccctaacattgctctaacttttcttattactagtttctttaggagtcaataatcttatttattctatttttaaatatctctaaggattataagttttttttttttgcaaaagtactgattattttttattttttaaatgactgattaattgtaccaccgagtgtgtggtgtagttggctggaatgctttgcataaggttcctcatttggttgttcttcggagtttgatttcccgtggtaacacctatcttaggccttaaaaattatgctattttagtaataagacacttttgaagattcaacaaaatagtcaatgtaataagaaaagaaccaagcgtaattttagttgcagttgagtattttcttggttgcattctagtacatgtgtcagcttgtgtactagttcttcatatttgtaatctattaaaaatgtattggtcagtagcttcataatttacataattcgttccttaatcaaactgtctattgtaaaatatgagaaacgaaattgcgtcttttttctgacagtttgaaaatttaagtattgtaagtcaactatggaataactgtcataaaactgtaatgcaacagttatatttgctgtgaggcagctaatattaaaccttaaaacagctaatattgctcatatgtaatacaaacaaaacttaccacaatcgagttttctctgtataagtcgtgttttgccaattctgagtcctatttcttaaaaaattataatattgtagtagcacaactattattcaactaatataaaacttaattgcaactagaaatagaaaatttgaatggccatcgtcatgaaaaaatttgtaagtgttatttttatccctggtcaacaatcaattgtatcttaataatattatatggagaaacaactcttagaattttgtaaactaactttataacaaccaaatgaatatattaataaaataaccatgttataatttttttaaagagctttgtgttagattgtcgatatgaaacacctgcaaatatcataaaaaccattgtatcattatcattttgaaattattgatatgtctagtttccgagcgttagtaaaatgttaatgtaactgcaatgcaactacgcagaatcttaaaaactagaacaatgtttctatgtacgtggctctagatgaatttaaattttctttattattcgtgatttgatatgaataaattcactattgaaaatttagaaaacaacgttaatgcaacgggagaaatattagctagtgtattaatacattttttttatttatacctgatttagattgatcaggaacttcagatctattcacacatatctacattttatgaatctaaaaattgatattaggagtattaattttctgtaattttaatcataattcagggttgaattttagtttcggactagttttctgcccgactttgcataaatctaaaattgtatgtgtttgaatttcttacggtcttcttctcaggtgaagtcgctagagtttatggtaattctctgtctagcttggtttcttttcatttgggctactagtttggttgctgaaagatgtcattgttgaagaaggtggtttgtgtgactgaatggttagagtaagaggtatttttataaatttttgttgttaggctgtataaatacttatagggcatgtccaatatatttgtattattgtaattgagatttactaagttatttttgtaaataatttttgttttaagtatattattaaaaaaattccaaataaaattgtcacgtatgatagattttatttaagtccaattagtattgagcttattcaatgaataataattgtttaattaaggttaaattcctctctttaatatatttgagtccaattagtattgagcttattcaattaatactcaattgtttaattaaggttaaattcctctctttaataatagtattgcgcttattattgtcacatatgatagatttttctttttatttgggattataatattttattatttaaaatatatttgagtaacctttaaatttattttattgtagaaagagtagaaattaattacaaattaagttttttttaatatataatataatttaatagtaaccaatcagtatataattggtatcatgggtacctcaatattttattttatttttgaaataataaaaaaaataatgttctcatatcttaaaataatcacattaaagagtagatcatgatgatattttttttttaacttaagtgagcaacgatatggtcagaaaagtaattttaaaaatctggttacttttttggttaactaaatgaaaaaaaaaaaaaaactacttttcaatgtagtcattttgacatgtaagaaaaatatgtattttctcaatcgtcgccataattaaaagtaactatttagttgcttatgataccgaaagtgaaacctatatagaagtaactatgaagttaatttttcacacaacataaaatgattcattcttttattaatatgtattttttttattgataaaaaaatattttttagttgtttacgatgtcaataaaaaatattgtgatgtcggggtttttggtggtgactgatgatattttaattgctaaattaacataatactaattggttacttgtttataaaaattttaattttataattataaattggtgaaatgtaactgataagtatataattgatatagtaagtaactaaatagtgactttaattttagaaaatgtgaaaatatatacactttctacatcttaaaataatcatattaaaaaagtaaatggcaatgataatatttttgaaattaatgatgtaataaaaaattatttttaaagttagaaaagaaatagaaattgataaagatggagagagagacagaaacaagtgaaagataaaagaaataaaaattaatagaaatgcaacatgtatgtgtatgctatagtaaagtcaaatcaacagcaaaaaaattaaaggaaaaaaacaaactcatgatcaaattaacggtaaatcacggtactctataataagttatttgtgtaatttaattgtaaaatacgtgtatacatgtaaattatctattttattttagcaatctaattcattttaattttcaaaattaaataggctcgtatatgcatctaagtccaaagtaaacatataagcacatgcacacactgatttggatggatcctatcatgttactaggtttatacacaaatgaaaaaaaaaatgtaacatttacctgttacaaattatttatttgactattgacaattgaactattggttaaaattagatctttggatctatcaacaagttaaccataacaatttagatcaaacaataataggttttataaaacaagttttaataattaaacaagaacatcgtattaggttgtattatattatattgtattatattgaattagattaaatatcatagttttatataatactatgtcaaattttaatttatactaaaatattatatatttaggtgtcaataaaggttaataccacatataattttacatgaaaatattgcataaaatacaattcaatataatacaatacaatacaatatgacctaatacggcgttccaaacgagcccatataaaacacacacatgcaacaaactggattgttggatataagatttatttaatttaaattaatcaaataattaaattaatttcaaaaaatctaaatattaaaatattattttcaaaaaattaattaaagttaaattaaataattaatttaaaattaaacgtataaatttgaaaaattaggttttcaacaaacctaaatatctattcaaaaatatcaaccaacttttcgaaatttatgttatttttaaaagagactaaaattaaatgtctaataaaataaaatgataaataaatatcatttatctaatnnnnnnnnnnnatttaaataaaataacaaaaatttgaaagttgacaaaat

SEQ ID NO: 39488 - DNA, 1968 bp, Cannabis sativa
atttaatagctataatagctcatttaatagagcaacaatttttatcatgttttacctcttaactaaataatttagctattagctattttagctactctattgtgagttctctaaagctaacctatgaatacaaaatgtaatttagaaagaattattgttagtgtaacaacaactttgggaagatgaagggcataagctcatttggctaatgcatgaaaagattcacactttaggacaaagtacatggagtgaaggcacaacatagaatagaacttagttgtgatacggagtgggaaggattgtgaaaaaatatgaacaaagatgtgatgcttttgatgtgaaaaaatatcttataatatgaaagtcatagacgtttcgttaatcaattagcctaagtagcttactttgactcaaattgtatttgtatctcgtttgagtatgaatgaggtggttaagtttattctacttgagtatgaattcattaccatttctactttccttctattattgttattaccttttaagaatgtcgtaagttaaattattggttgtcagagtaaagaaatagaaacattgccatctcaattatcgatatgaatggtgggccacatgtagaaaggaggaacacactagcaagctagccctctgctttcactttaaaatagttggattcgatcggatgccaacccttaaaaaatatgtatatatatatatcaatactagatagaaggtttgcttgtcactacgactaagatacatgtcaaatactagatagaaggtttgcttgtcactgcaattaactctaatatgtatgttgtttaataactaatgataatttgaagcttccctaaagtgaatttctagaaacttgaaaggggtcatacaatattgtactcttgccaattaaaatgctgatagtaccattttttttttttcatttgaggaatgatagacgctctgaatttgtacattcaaaaattacacaaatgttgtgtaattaatcctaagccgggatatttcgaaagtaaagatcacaagtgtatggttgagattaattacatatcataacgtaagtactagcagtgctagatctaatacacttgaaacaacataatttcattttcaaggctgaattggtagacgtgttagtaaagatctattccatgtagaacccaaaaataaagatgcttagcttcacatatcgagccattgaaggaaagaaagaaagtgaattaaaccagaaaagacagtgtccaattagctttcaattcatatcacaaatatagaggaatccatctacatgtttttcgcttcattgtactattaaatagaataaacacttctctattatgcaagtgtcaacaaacagtcaagtacaaaatacaaaatgacccctggtgaacagcttgtgtcaaacaacataacaatggtatacacgaaaaaacaaactaaccttgcttatttccccatatgagacaatattttactgatcagagcttccttcttaccagcaacaggaatgttgtttgctgttagatagtactttaactctgttacagtcaaatctttcaactgcaagacaaaaatcatgaaatatttattttctgaaatctatagttagcctttatacattttctacatgctcaaagattcttttaaaaagccaccaaaaagccaccataacggtataaactatgcaaacttttaatatgtctaagttctttgtttccttgtattattaagaataaaatatttcccagaaaactgatcatatgctctttgcaagatagaagaatagaatactgaagcaaaacaattctctaacctctccattgtctgcaagtttactccaatcatactttgcatactcctgaactgcaatttcggaagtagcttttctctttttggaggcttcactttccttcttgtctccagcattttcgatttcctcatcataatggtccccat

SEQ ID NO: 39489 - DNA, 2644 bp, Cannabis sativa
ctccaaaatagccttgtcaaaatctcaatccctttctctctcttccactcaaactctctctcggtccctctttccttcgcccgatcccagtcgcctcacacaaccacgcccagtggactcgacttcgcccgatcccagccacctcacacaaccatgcccagtcaactccaaccgagacacacccactatccgaccgtcatcaccgccgcatggaggaggagacccacccaggagaaccgcaccatgtctaaggtaattttttaaatttctcttttaaaatttcatggatttgtttgtttttgcactatgattcattgatttagggtatattttagtttgtgatgcctgatctgtgatttgtgtgagttttgattatattttagaattttttttggttgtctgtgttggaagtcgatatactatttaggtccgatggtggaccgatgtaggtccgatggtattgggtataggttgatgatgaagtcccgatgtatggtccgatagaggccgatgtatggtccgatggtctcggtccgatagttgttaatagggtccgaatggggtccgattgtatgcccgattatgggggtcgaattctcgtaattttttatttttcattgggtccgattgagtctgatggttaggctgatgcatgttaaatttttttgtcatagtcattttggtccgatgggttcgattattgttcgatctgtgttattttcaagtgggtcggatgggttccgattgggtctgatggttaggccgatgcacgttagattttttgtgatatggtctcattgaagttcgatgggtctgatttgtgttattttcaagtgggtctgattgggcccgatgggatccgatgcccctgttcatatattatagtttttttttattttaattgtttttttgagtttggtccgatatatgtctgatattggtccaatataggtccgatatatatatatatttttttttaaaatttttattttaacttgtatttttttcttgtgtcatttttccagaatacaagaccgccacgccttataattctagtctcagagcattacacagggagtgtcacttggtgtggtggaagttattactatccgaaaatcaaggcaaagtttgacgaattctaattatgggaccaagtgaaggaatccccttttaaacaattctttgaaaggacttcgataaatttttctcggtcgttgatccatcagttattcatgcacaagaccaaatctgagaaggcagatcaggtacacttttttttgggaaagaagagatgcagattcagtcgggtggagtttgcattggtgacggggttgaacttattacctgggcctacggaagaagatattcaagaaaaaggaaattcggaaaggttgatcgtcgagtacttcaacggtgattcatccatcagctttggccaactgcgcaaagtttttgagagttgcacagaagcggttgatgtgtacaagttggggatggcgatgtttgttatgggcgtcctcaccggtaaggaggagaagactgttgttcctccatttgagataaaaatggttgataacttggatttcttctatgagtatccgtggggaaagatctccttcaacaagttgatggaaacttgcaacaaagattttgtagaggtgaagactcggatgcacaagaagatcgagaagggagtttctcagaaggaggcaaaatactcatcatacgactatactgcagcgttgcagtattgggcctatgaggccatcttggagttgggcaatgaatatgcaatgaggaaatcgcatcgctttccaagaatggttaattgggagaataaggagaagaccacactcgggaaggatgaagttacaagtttattttcctaaatgtaagttttttttacgctttgcagtcatatatattttattttaaattctatctaataagacattagtttatttttcagttgacagtgtactccatgttatgtcctcggaaaaatgaagaggagttcgtgaggactatcaccggcggtgagggggatttgttgactttgaagaactagtgttgggcgacgatgggcaaccaactcaagatgctttgcccagccaagcccaaaagcttgcctcaacattagaagagcatgcaaatgaagcccaaatatttagatagacttcaccacctgtaccatctcctagatcagatgatcctcctgttggcccgtcaacatctattcccagcacttcacagcctaaggaaccaatctcttctgccatactggcaagattggagcgtgttgagagggaacaacttgctttgaagcaaggccagacggatattctgagagggctgacagagataatgggttatttgaagaccctattggcactagtgggagatccgaaaaggcctagtgtagaggcagagccacagccagaccccgtctctccaagagatgagttcattcttcccaatgattacagacctaatgatgtggaagatgtactccatacacctcacaacatgtcgatcacatccattggagatacccaagattcagaggtacaggttttagagaccgttccaacaccggtggagaagagaccgaagaaaaggtcaaggtggtttgacgagtacaccg

SEQ ID NO: 39490 - DNA, 2826 bp, Cannabis sativa
aatgtgaataaagtaaatttttttggttaagaaaaaaggaaaaatataataatgatgattgtaaatagttacagttaagtcaacgatatgtattgacatgatttgaagtgatactaactaaaaaaattgaaaaaataaaacaattatttacatttaagagaaaaaaattatatacaaaacttatcactaacaaatgaattattattttatatatttgtcttttgaaatctgataagataaaaagtggatttagtaaaaaagaggtatggggcaaaaatcttattactgttttgcatgaaaagtggtaaagtaaaaagagtggttggaaaagaaaagtatggtgattggatttgttttttttttccctgaaaaccaaaatagaagaaaagtatggtgattaggataagagtaagggcaaaagattttacagcaagtgtaatttggaagattttttttaaagttagtatacatatctttacttgaaccaaaatacttttaacaatttacaattctagttgaaatataactaagaatagtaacaattttttatatagttgaagttttgggtgaataataaatttattggttaggatgtaggatctagaatatatataaaggattttatatatgtaagtaagatgtaaggatatatgtagaatgtacggtatatatgtatatcctgtataaaaaaatatatatatataatgataaaatgactaagttaaaaagttgaaacttaagaatattgattaataacatacatctttaccaaattactaattgatattcctagaaagcaacaaatcaatatatatcataaatcataaaaaaataaaaagaacttacatacatgactatttagggttgatttcctcgtctttatatgctaccatcacaatatattttcaaatctccaccaattgagaaaacttgacttgttatccaaatatttttaaatttaaaccagctgataacaatgattaataattatttagaaattccttataaagtctcctcagccaatttagagtatatcatgagcaatatacaataaataagtataatcaatgtgcaattggtacaaaattaaagatactcacaataagtgtgcaagggattccaataaagtctaaattattatatgacttgccatgaaaagagctcaacaaagcttatgaagaaaaaagaatataagagttaataaggaactatcaagctacactaaaataatttctacttgaaaactataagattgaaactaaaatttagagtgtattaatctaaaagatatctacaaatataaatgggcatagtacttacatggttgccgaaaagattaataaaaataatagtaatactcttaacataaagcgcatcattattaagaaaatatgtttcaagagcaattaactaaagataaaatttcattgtaaacaacattctttgtacaaccatcatgaattgtattatcaaaaattggtttcacaagaattttgatagcatcacttgtttttgctctaaataaagcaacatataattgtccgtgtgaaaatactggttcataaagatatagtccaacaaactataaagtttgtccttgagatttattattgtcattgtaaaacatggtcggatcagaaattgaattcttttaaatggaaatgaacctttgtcattttttagtggcacaaaaggaattctgggcaagaaaacttttttaccactatactctccaatagcaatttctgcataaataacattgcgttcaaagcttcaacaaattaatcttgttctattacataatccctcagagggattaatatttctaagcaacataacaggacaattcaattttaatacaagctcatgtggtggtataccatttggtgtcaaagtatttaaaaaatcttcttgaatgttcagttttatctaagagctcatcaaagttaaaatatctaaaactatcacctggaaagcgttcaattagtatactattaatgtggtcaacatgctcatttttaggggttaaaattacacagttaatcatggagtctaaattttcaacataattatttaagtttggaaagacagcattaaataaattattcaatgataaagtgttgtctacaaacggtataatcatgttgggttgaagcttaaccatattacaaaaataagatttttcagttccgttacctattcgaagtaaataatttgaaaatgtttgatctaatatagctctcatattatgaactaattttaattttgtaaaatatggctcttgaccaaggttttcgacaaccacttaaataatatgtaggaagagctatagaaagtttaatgcatgagatttttacgtggttagggcattaatgagccttagtccacaagtctttttttttttattagtgagagtatttattacagagaatgttcatggtggatttctctcctattttctctctttgattcctttaaacccagaatgttcccaccctttttcagtctgtttgtggggtatttatagtgtttttctgaggtgatccctaggaatggatcacttgtctttcggtgttagctccataggggcacatattcccagcatatacaaaataagaaatacatgacctacaccgtaggtatcttaggagttaggtggatataatattttatcccctcttgattgatgtgattcctcataaagtagccgtcactagccttattgattatagtgtaatagtccaaaaagggggcttacgccatctgtcatgtcgtttatggagatttcaatatgtcttccctcatgcggcattaaatgcgaagtga

SEQ ID NO: 39491 - DNA, 1388 bp, Cannabis sativa
aataggaacatattcataacgtatttcaccttactaaataatcacactgtcagacagtacaatagcaattattttatttcatatatattatttagtatatatatctaccaatctgccattgttcctttgacgttagttaatattgaatctgaaccaaatgcaaattatgcaatatgttaaaaaaaaaaaaaacccacaaaacacccatcactgtcgtccaaagtaccacaattaagaaaataaaaccgttgagtagctgagattatgccacttgtaattttgacaaacgacagaagaaatcaacggctaagatgaaaagtaaacgcataccttataaatgataattcttaattacatatttttcctactaattttccttaactcattcattccccaacggtaacccctttactcaagtctccttatatataatacaactctgccagcttctttttccattctgtgccctctcaacaatccaaaatctcataacctttccaattaagcttctttctgattcattactccttttctctatttctatatataaatatacgaaaactctgcatatatatactaatacataataataaggttaagctatacccaatcttcatcttttccatggcgtttcagagctttcttcctcacttactcctactggtttcactacttccatgctttatttattcttctggagcttacaaattcacagtaggaggaagacaaggttgggtttcaaaaccttccgagaattacaatcaatgggctgggagaaatcgatttaaagtcaatgacactatttgtaagtttaaacctttttttttattattttttaattttatttttacgttcttttttattttctctctgatcattctttttttttcttctttgagtgaagattttaagtacaagaaagggtcggactctgttttggtggtgaacaaagacgattacgaaaagtgtaacactcaaaatcctattaagaaatatgaagatggggattctgaaatcaagtttgatcgttctggtcctttttatttcattagtgggaaaaactgtaacgagggacagaaactaatcgtcgtcgttttggccataagaccaaaaccaggtactactcctcttccctctcccggacccggagctcgtcctccggtggcttctcccccagccgggtcaacacccatttccccttttccttctccgtccacaactccggcttccgctccgtcacccaagtcgcaggcacctacgttagctccttcatcaccttcaccaacctcacaagctccggcaggttctcccgcgcaaactccatcgacctcgccgtctccggtttacgaatctccaactggctctccgacaaaatctccggctggagc

SEQ ID NO: 39492 - DNA, 1453 bp, Cannabis sativa
ataagattcgattttgtctcatcctaagcttgatactagcatggaaaagagcagtattgcaatccccatcttgaatccaagctactttagctttctttgcaagaaggagacacagtcattctgtactcaaaccaatctctctcttgtctgtttctcctgcaaatgtaagttaggatcaagtggatgctgctgaatttggctctgcaaagtatccaattccattttaaccctgctgacaactatctgtaggttagaaaagccctccctatttatctccttaagcctactcttgaattgttacattttagcagtaacttgaaacatcttggaagccgttattgtcaaagactagacttcttttaagcatttgtcatgcataggatgtgatttccacattctaaagtatttgaaaggctatttcccactcaacaaaccacggtacaaagttcgaattctaggagaatgatcgaataagccttcattaagaaaaactacttcaccaaaatgaaacttattgatcaaggattagttggtcattattctatcaatcttggaaaatattctatcctccccaggctgcttatttgtccaagtaaaaaaatttacacttgctttggcatcttctaattggcagtagttgacacagttcaagaagttagtatctggataaaactttaccctttgcccgatcctctcatctttagctaatatatcattaaagtctcccataagaaaccaatttttagtactagcaatttcacacaagttcttccataatagtctcctttcaattcgatcattggaagcataaactacagctcgaaagctattaaaaccttctactattgatatttttaaatgcattaattggctagtgcatctaatgatatcaatagtaaacctccaagggttccaagcaataacaatcttctctccctgcatgccatgctatgttagaaaaaaaaaccaacccgcaaacacattagagtacaagattctaagctttggagccttcaccctagtctcgagaagtccaacaaaattaaccttttgaaaaattaataaactgctttattaattgttgtttatgttgactgttagctcctcgtacattctagcataacaatttatccctttgaaagagagggtttcccccctctcctgtcttgttcccttcatctagcacattctcccatgcttcattagtcaaagtctccatatcaagagctttaattgaattgctatagtgtcagcaattgatttttcttttccatccactttcttggtttttgtcaccttcataaagccctcttcatcaatctgcatttgtttcatgttgtcttctttaatgactcattcctgtggtatttttcttacaatttgcagcaacacgacctaaaccagagcaatatatatgtattatacttatattgagtgatatatctaaaatata

SEQ ID NO: 39493 - DNA, 2834 bp, Cannabis sativa
  modified_base (1758)..(1760): a, c, t, g, unknown or other
acattgttaggagattattttccttcattgacagagcttcaaattgatggttgtgagcaactaacaccattattactcccaagagctcagctcatgcatgcccttttgatcagtttaaagaagattataatcgaaggttgtcacttcttgacgcacttagatgaggcggcctttcagcacctcaccttccttgaggagttgacgattagtatgtgtcaaaacctccaacggttgccaaaagaactacccacttctctttctgagctaatcatttactgttgtccattgctaagaccacgagtcgagagggacacaaggagaagtggccaattattgctcacatcccaaatatcactcttgatcggaagaaaatataggtatgatagtttgactctttttttttgggttatatattttgtgatgtgtaactttatttatgtgtatgtattgtatatagcagatttattggaagaagctatctcctatacttgttctgctcattttaattattttacttatatattttgctaaaaatatataataataatggttgtgagatgtttgacacaatcaatttatgtttttattgacatactttgaaaatacaagaaaatgagagtagacttgataaaatctgctaagtttgtgactgtggtctcttgttttaaatccatttattgaacaataacttcaatcactttggttgcttcagcccttttgactaataaggaggctgcctgcttggaaattcggattgactaattggttgcagtactaaatagatagaagaataatcctattcaattaaggtacaagcttctgttttgactgtgttctcttctcttgtttaaaatcaaaccattagtgaagaatggtctatgtagctttttatgtcctcttttcattttcatttttcgttttcgtgcaggagcttcattgttcccattgcagtatattaaagatgtgaagttgatgaaactacacatataaacatgtaaggctattctgtctgtccttgttgtgattgtaataatgaaagtcctcttaactaaggcagtgtgatctatttgaaaaaattaatgtcaacccatttgaatgatggagagaaatatcaaattataatgataataacattagttggtggcattcgaagaagcttaattttctattatttgtgtgagcattgttttggttttgagtgaaattacatgtaaatatgtaatcacaacagaagcaataaattactctgattttgcagggtccaaccaaccataaatgagtagtggaattaatgcttctaattggattgagttgaacaatgcaacaactcagtagtcaccaccaaataaacacataagatttgcttacttttagtttgagtgtggtgtgtgtgtgtgtgattgtgaataataatagtagaagtgattagagtagtgttgtgagatttgggttttgattgtagaagaggccgacatgacaccattgttaatgtttttctacttgtgatgagacttaagctgtgcgtaaagtaaaagggtgtcgcctctcttaatttgcttatcgttgcttgtcactcttattgtaatgtaaccaaagaccaagaaagtgatagaataatcctagagtagaaatattctataattatttccgaattcctctaatgatctttattttgaaaaaagccacgaagttacaatattgggctttcgagaggctcatctcttcgagtctactcttatctaattccaagctaatctnnntgaggttgctccctctctatttataagcatgagtttcaaaaagacttaggctatgtacgttagagactaaatatttcatttcaatcattttgtgatacacaagataagtcttaggcttatcaggaagtttgagtgcggtgtgtgattttgaataatgataataattagctatagagtgagtgattagagttactgttgtaagaaatctctccttaatataaataaatcttggtcacatgtcaatggtactgcattaagtctttcttttgcaatattaatctttgaagagtattctgcatttatacatgtcattttatgattaacttccaatttatgattgaagctttggtatgcacttgctaaaatactactgcttagaatgtgtttttgtggatttttatctttaaataaaagactaatgattatgtagttaaagaccacatattaatggtgctccaagttctattttgctacgcaaatatttcactcttaattacattaatcctttctgaggtgtcactcactgtgtagcactaaatatgcatgtaattttaattaaagatttactttacaaaaagaaggattccaatgaattattgctttgatgaataatgatattacaatcaatgaattgttctgcttttactattatatatatatataacaacagtaaaattgtgataacgtaggtcccatatatgatagtttgacccttcttctttttttatatattttttttctatttgtatttgtatttgtatttgtattttatattttggtatgttctgatgcaaacacaacacaagctattaattattgtgtttttgcaggatccaagtccaacaatcaatgagtagtggaatgaatgcttctaaatgatttcgattgagttgaagaatgcaagaagtcagctaccaccaaataaacacttatgatgacttaatttgcttatatttagtttgagtgttgtgtgtgattttgaataataatagctatactatagagtgagtgattagactactattgtgaaattgtagaagaggttgacaccattgttaatgttctgtatgtact

SEQ ID NO: 39494 - DNA, 1909 bp, Cannabis sativa
gattaattgttaaggactctagacctttgtttaattgtttgagtgaagtctttttttttttttttgtttattaacagagttaattacttatagttttgttagagtttcacgttatcttcttcatcaaatctttagtaagaggtctgttcgtactaaatttatgtctattattttagacaattcatcttgttaataaaattttgtttctattaaaaaaaagtcacattcgttcaatttaattataaaacataattatcttatattctaattattaatgttataaaaattcaaaccaacattctattataaaactacacttttactattcttttctaataattacaggaaagttataaatttgatgggattttactatttatacaaaaatatgatttcttttctaaaaaaagctattttaggtgaaaccaaaaaagtaactagttactttatattattatgtttttcatattttttatttttttaactttcttataagatagcttttataataataagttatatttttacaaccttataccttaaaatcgataaatatgaaaattcccctaattacatatagtctagagattctgagagaaccaaattcataataggacgagctttacacatagcttccaaaggaacagctttaggcatagtgacacctttaccttcactcatatcaagttgttcatcactaatcctttcccaatcaaagcattggattaaacaccctaaagtcaagcccactaaacgttgggctaggcccgatccaggacaagcccttcttccaagcccaaatgacattaacttgttgactagtttaccactttcctcactctcaagctcaaaccttgtagggttaaaactctcgacatcatctccccatattttaggatctctgtgtatagcccatgcattaaccaataaaattgtatcatgtggaatgttgtatccttgaatagtacaatcttgtgatgaatagtgaggtacgagcagtggtgctgcagggtagagtcgtaaggtttctgagataatattctggagataaggaagtttcaaaagatctgattcgtccatcaagtaattttgtccaatttgatcatcaatttcagatttagcccttttgagaatatgaggattgttaagtaaatttgatattgcccattctaatgtcactgatgacgtgtcagttccagctgtcaacaacacctgaaaaattagaactaattattatgaaaattaccttaaattatcaatcataaagttaagatttacatcaacaatctataaatataaagcaagattctccttgtatagcctacaattttattttatattaaaaaaaaaatagttttatattcgtaaaaaaactacactatacttttgttttattttcattttgtcacactactgtagttacaataaattaggattattagcagaaaaataaactataaagtaaacaaatattatgcatgaattaatcataatatatataaataggtggacccaggatttcaatcaagtgtaggcaaaatgttcgtttcttatgctgtattctatcgtattgtattgtatagtattatattaaattatattttatttaatatttttatgtaaaactatatgtgatattaacttttataggcacctaaatatataatattttagtataaattaaaacttaacatagtattatataaaagtataatatataattcaattcaatataatataatacaatacaatacgacttaatacaatgtaccaaacgagtcctaaaacaacataatatactaatataattatatatgtttcaaacacctattttattctatataattaatttttttatatattatgaaaaaaaaaatgagcatagacaaggtccccaccgtgatgggtc

SEQ ID NO: 39495 - DNA, 1803 bp, Cannabis sativa
tacgtatgtcacaacgtattaaattcgaaaaagataaaaccttttatatgcatttgtggtacctgacattagctatgtgaaatctcataataacgtcccctttcaaaaattaaataaaaataaaaaaatctcttaacaaataatgagagaaatggaatttttgacatggcaattttgttgtgcttaatatacttgaccaataaaataataataattttgaaattaaaaatttctactagaaacaaaatcagaatctcaaaggttgagaagaaacatggatcaaaattttctaaaaaaaaaattaaaaagtgtagataattttagaaaactaataagaaatctcaaaagcaatcctacacagatttggagcttaaaaattgaataatgtttttgggtatcttatttatatgcataataatgtggctccttcaaaatgcaacctctgtgcgctacctactgttgtgtagtagtgtatttaattatagggattcctgaaactttttaatagctcaggaatgtcatagccaagcatgtcatcgacggcttgtatcattttcggtttcagcttctcaaatttgtcaatgttgtacccctttaatgtctccttgaactgctctacatttgggaaatctcctggtggtaaatgaaactctctttggacctataataagtaatagatgaaggagttcagttcagctaacaaaatgtaatgagtttcaaattagacaagatagagtgatttttcaaaccttggcaaatgcatcacccaaattatcaattagtttctgttgagcttttgcttttcccatcatagcaggcatctctttctttagatggctaataatataagcgtgtatcttagcagctctggcgcgtttcacaaattcattgatctataaaaaaaggaaaataggtgataataatccaaatcagcaactaataagtttactaggccagaaaacagtgccatgttgaactgtatgaccgagctattcaaaagacacgaaaaacaagaaattcaacttacacgacgatcacaagccttctttggaatatcttttagatcagcaagaagatcctcctgctccctttcaaaaagctctttcccaagtggaccagttgcagcttcatttactggtttgtcattgaatgagctgttacagtatccaaattattagcactaaaattactgtacagagggaaaattaacttgctaaagacacaacaaagaattatacaaatatgctcccaaaagaaagggctaaacaaagaaaatttctagatgttcgtcttaattgctcaattcttgttattcctttgaacacgaaaaaattaattgtattgaaagataaatatataaagaaaggctaacccaatatatacacgcatgacctcaggtgtattaataaccttgccgagagaccacattaatgctccataaaccctcattagctgcagtatagtacaacagatattagatttccacaacaacctcccaaaaatagaaaaatgaaaaatatagaaataataaaatggtagagaagtacttgttgagtatcaacttgatcagccttgttcagcaccacacgaatcttatcatcatgtccccgtaaagatgatattacacgtttaaattcatcactaacatcaagcttatgaggatcaaataaaagtagtatgaggtcacactttgaagcaaaccatgatgttacaccagtaaagtcatatgctcgttgtgttcgttgcttctcccctgataaaactccaggagtatccacaaatgtaatgtgctccaacagcttt

SEQ ID NO: 39496 - DNA, 1826 bp, Cannabis sativa
  modified_base (1760)..(1762): a, c, t, g, unknown or other
acctctataaaattcatatgtcttattattgctttatcatatatctgttactacatatcgtttatcgctgataaaatagactcattgtcattggctaaaagcgaagtcaacagtctctaagctagaaaccatcctctatctctccgccaggaggacctccaccttagaattgactttttcctttgccacaaaagaattctccaaggtcttcacgtgctcctaaaaagcatttgaagatctctgagagcaatcacgagttgagctcagtttcatcacgacctgaaaacataccaaaacaacatcagtgttaaagaccacaacactggccgaccagtcccccctcgagactgctatggttagccagccccccacataagcttccaaggcttaccagccacatgcaagaagccacatggctatccagcctatatagtgccaagaggatgaatagagctgaaagtataacttaccagagaaagatcccaaagcccggtagagtaaagcctgttaggtccaccgtcacctagctcctttacatcctcatccatgaaatgaagggccctctctatgcaccggttggctgcttcagtagccttctatccagtaactgacccctctcctctactgggcctcggagtaccttggccgacaggtcgtgtcataggctatctggctggtgcaggcctctgtggagggggaggcagtgatggcccgacaacatcctcaccatgggaagtcttagccaccttggccctcacccgtctagtaggctcattcgaagttcctcctgtaagaccgacctctcaacttggaagacatgtctgcataaagaaagtagcaaagtcataatgcgatcataaacattcaatacaagaacaaaagcatgatgttatcaactatcaaataccatcatcatcagaaaaaggactatcagagtcctcaattatagcctttcccttgcccctagatgcatgcacggggcgtgtaggtctcctagaaatctggcctctaggcccaatatgaagagaagcatcacctactagacccccgctagccaggcagcgatgaagagccttctctctcctctctaaatttcgtgctatacgagacaaaggtacttcatcatcatccaagccagcgccttatccatcaatagggtaggccccatctgtagttggtactcttacaacgccaggagctggaggatacaagccatacctccaaaaattgtctacattggtcaactggataatatttctttgctcggccgataaagaaaggatgtgatttgccttatctcttatttgcgaagtagggatgaaacatctaacgagtggcacatacttaagttgtggtgcccaatcctatgaagaccatgtgcaataaaatactttttgaagtacccaccaaccttcgacatggatatgcaattagtgtcaccaagccattaatgacaaatctagctgaaataaaaatatccagtcctgctctactttagatgaaaatagtactcaatctcgtaaggggtaggcggaggccagcctagctccctatacaagacgaaaatcatcgagagatactttatgctctttgacatgagctgtgttaggcacatttgaaagtaaatagcgacgtcgagaaaatactggtgaagcagcaacactggcccatgtttagtgtggcaccaagaccacgccaacaacctcgaagggggcctgtgttggaattattttacctggatctagatttactaccatgtnnnttatttaacatcctaatatgaattctctaaaacaatgaaataaacacatataagtttaagaaac

SEQ ID NO: 39497 - DNA, 1127 bp, Cannabis sativa
taattaaatttggataaacgacatgtcgtttattcgagactatatgtcgtttcttcttgttcttcaataaacgacatgtcgtttaaatcgtcatcattctatttttcttcttgggaaaactctcgatctctttctctgtaccttttcacttctgcaacgattaccagtcccattccacttaaattagggttattcttcctacacaaaattacagacaataaaccatgtaagtacacttaaagatgtaataatcattagcttctttgtttaattccataaaaaataatttttaggttttgaaaatttcatattttttattgagtaaaagttattgtgttgaaggaggaaatcagtgaatcgtccaccaacaccagatgtagtggaaattcaggacaaagaacccacgcttcaagaacttcttaacataaaggtgagttttttttttcattattattattgaaattgattaattccttcctttttttttagaagaaattttttgaatttataccaaagtttggggttcttttatttatgacagttgattgagagtggtgagaaggaaagactaatggatcttcttagagaaaggcttactgaatgtggttggaaagatgatatgaaatatctttgcaggtacttactttaaagttctgttttttaagttaatcttttgggttattaagttattttttagattattaggatcaattaataaactagattccaaatgttaggtgtggagattagtaactggctgaatctggatgtgaatttttttctttttcttttcccttaaatccatttgagtttcaaaatctaagtgtatatgtatactatatacataagcctctcatctatttttgattagaaatctttattggtttaatgaattagaacacaaactaggatggtattgactattatttagtttatatatggaatagttgatgaccctatcaagtcttttttagtttctgcaaattaatatttctgatgtattgatccaaatcattataacaaaagtttgagacagaaattgagtaattaagatattttgagcaatggattgtttttctaattccaccttactttgtgttcaaatgctgataaaagtgccaattttt

SEQ ID NO: 39498 - DNA, 1994 bp, Cannabis sativa
ccatgctccttctcagtctgtgccatatgcttccttgatcgttttcagaattacaggataatttgttatgggtgcattaacggggtccaagtaatatacgtggtatgtctcaggtaccaatatagcacacacccaatgcacattctataagaaaaataaattatatacaagtaaagaagaagcgaaagggctgttaatttgggattttttttattattatttttaagagacatggaagaaacaacttgtctcatgcaagttcagcctcttttttatgcttctacttttgctactaccactctattaaacaaaatactagactacaagtcgaaaactactactataacattcaaccataaatctaaacaaagccttggactttgattaactcattttacgaagaaaaaaaatctcagtataatctctattgatatatgtacaaagattatgttgttcaaggcttcctaaacaatcagcaatctcaaataaactttcacctaaaacacacttaaataaactcaattgaatttttttctttttcttttttcattaaatatggctgaaaaatatttttagacaattagtaaattgtcaaaagcatccttgtttgagctatcacttaaaagttattttaggtgccattaccaacttggtaaagggtgattcttagatataactcatctagttcaagtaataaataaatagaaatttagactatattgccttcatatcaagcttatacaaaatagaatcaattagatacgagacttccaagtttaacattaccatatcaaaccaatataaattctaaatggaaatccaaatgaaaaaacattgaatatcaaaagttgcaaaaaatatttagtttcaacttaactgtgttgtaatacatcataacgcatttcaagttgccaatctgtcataatgaaacaatgaaatatttagcaaaataaacattactacctcaatctcggtagccttaaaatcctcctgaagaattgattgcaaggcagaagttgcagtctgcaaaatttcaataattagacacaatacaattctataaatataagaacatgataattttcttgataaactgcataatcaaagttgctacatgccctttattcaaaaacaaaaaagttgctacattccctacagaaaacactacatctaccatggactgcgcagtttggaaaagaataaagaattcacaactttttatagccaacattgcactaaagtcctaaaattagaatttaaatatctctattgtgaaatcatagctgaaatgatcagcgtgtggtttgctaggctaggaattatcatacacaaagtagatttgggctaggaacccaatttcaagaaagttaattatgcacaaattaataatttgaagccaaaacaatccacctcttttcaagcccgaattccttaacttctccacctcttttcaaggaagaagtcaaagcaattgaattttctctagtgttatatagaaatagataatttgaactttcttctttcttacgggaaaatcattcaaccagatcttaacttatttatcaaaataaaacacaaaatcaacaatattcatagttcaaataaaaccctataaaaattgagaaaaaaaattacctcttggtgactgaaatcggctccatgcagcttgaaatgaatagtggtataaaattaacccctatcctaaaaggatatctaattttgcatattcgattctcgttgtatactgttattcacaaatattgtttgtatctatatagtagtgttcctaatagtgagttcttatcatacacgattccatatgtaggtaaagaattgatttttatgaattaaagcacagaaaaccaaaattccatggatgaattcgaagagaaaatagagaaagagaataaaggtgataggataggaataccttctgttgcccctgattttgtccaatatacgtggaccaaccggacagggacatgtggatcaaa

SEQ ID NO: 39499 - DNA, 1613 bp, Cannabis sativa
gttaaaccaagaaatgccgttagataagcacttttaatatataaagatacaattaactcaaaatatactaaaatattgctattaggtcttaataatgtatgatactataatatggtagcattttacgagtgagtacttattttttattataattataaaattaaaatatgtaaaagcgcgaaactagatataaaattaatcaccttagcaataccttttaatgtttggttctgtttgcaaattcaaagtgtcgtctaaacaatatccactaaatgccaaattggaataacatatgaacacgtgtcatattttgattgatctcatttatttaattatttagatatttaaaaattaaaaaatactaatagacatcagtagtgcctagtatattcctatatgtcaatattgttattggtccaaataattatcgaatctcatatcatttaataacttttaaagagtatcgctagcaaatcgcaaaacgacatatctagaggtgctagacatcactggtgtccaataacaatgctcttaaagattatataaaatcatttcaaatgttttaaaatttaaataaattaataaaattattataaaatgaaacatattatacatttcctttctttttttattttttatttttttctttcttcctcttcatcgacatcaaccccgaccatctccattactagcacaaccaccaccatctccagtcctgaacccctctctttcttcctcggtcacatcgacacactaagcgagcttggccactaccctccaggacaattacaaaactaggaagaacatggcaaaggggcactgcctcctagtttaggcaaaagcacgtgatcatgctagagcgagaacttcaacaattttttatcttctaaactctttttcgatcaatggttgggtgcttaagacaataacatggacccatggttgagttttatgactctagatgacatgacaaagtactgtactatagagaatcaaatcaaggtaaatgttgatgtaacaatttttgaaaatcgactctatcatagtttttgttgggtcttccctgggaacaaagcattgctgcttggggccatttcaagatgtcgcaatggattttgcaacttgaattggtggaagagctatgatttaaggaagcatttagttggatcaaaagaaatgcttggcataaggtcaccattgagacgaattgtcttgttgtggtggaggttgttcgtatagttaggtgtcaatggagtcttattttggctaaataagttattgctcaatgttagtctttgattcttagagtggttgaggaatttttttaaatttttttgttaaaggttctcctaataaattggctcactttcttgttagtgtctcttatttttctctagtctagagttttacattatttattgctcggcatttaagaatatagtgatgattgatactatcaaatgaagtattttttttataataataataataaaaaaaattgtatccattgattaatgtattaaaaatgttaattaaaccataattaagttttcctactatttggttatgtcttgacttttgtggggtctatatatcgatatgaacaacgccaa

SEQ ID NO: 39500 - DNA, 2664 bp, Cannabis sativa
aaatatatttaaaatgttcattataaagaaaatttagacttcaccggcattacataatatgttcttaggaatggcgaaggtagaaggttgaccctggttgtgggtaaacgcccacttagttacattatgggccataaaattacatgttctaaaaatattacaaaacatatatgctagtaaaagaggacatgactctaatacaaaaagaggagtagtttttaatttcccacctagagtccaccctagtgatggaattgactacttccttggagtcactctcgacaataataaatttacattcttgttccaaagtcacctctaaagccaagcaaactgccgccgcctcaccgcaaagagcgtcagagtaatccaattttgccgaggtcacccaaatcacctcaccaaggtgatttctacaatgcacatgtgttgtgagcctactttgatgtcacagttcagtttgagccaatcttgaggaggcgggtagcaagtaagagataggctcggaggaggaggctggataaagaaaaatctataatatgcaaaagagtgagaaactgagtgaatacattgcttcacattatctattttatgattatgtaccttatcattctgaactctccgtccataacaacaaaagcatataggaacacttcgtccgggtttacacctttgtgctgaagattctagatgaacttaacccaatcccatactctaattccagtgtcagacattggaaagattccccacgaagacgagcgccacaggtgataagcaatgcttgaaaaaatattaatagaaaaaaaaataaaacaatgcttccataccagcgtcgttcttttcccttcgtctccctctatcactctatggcttcagatgatttcctctctttgtcttcctctatggtttctgagatttcgatccatgacgcgtcctcccaaggcaaagcccgagccatgacgacaaccaccgaagcccacaactactccaccgttgggttcttcaccacctaatttcccactgacttccttctctctctgtctctcaactatggtgcctagctaactttgacagaaatcagcaatccaaatcaacccgccctgatagctccggccaaccctacgtccaaatggatcacacaccttcacgcaaaatcagacggagactagaggagaacctctcctccttctaagaagaagcagatcgaagaaatagaaaaagaaaaaagagaaaaaaaaagaaagaaaaaaaaaagaaaaaaaaaggaaaaagagaaaaaaaaaattattgtttttaatttttctgattttttaaatgtttttaattttttaattttgttatttttaaattttttaaatattttaatttatttttttaataattaatattaatattaagtagctcaataatattttaccatgtgtacacagtgtacacagtgtacacaatggcaggtctatttggcacttaacagtcaaaaactaacataatgagtgatgaccaaagcgattgtagagattagagagtttaaccataattttttcagtctaagggttaaaccgtgtcaaactttaaagttcaggcaatttgaccacaaattaccttgttttctcaaaaaaaaaaaaaaaaaaaaaagacgtgatacatttacattaatcatatcactatatctactgtttcacattggaacacacaaaaaaaattggttagttgcagggatgaacctataggatcaaacctaggagaaaatattattaagttgcctttatatctataataactatataaaaagagggaatgtgttttaggctttttacaataaattgatcattttgtaattaaatattcaatatgtgaaatgtgtgttatgcgtgtagaggacgtggttgtggtcatcaacccatcttgtacaacctatgagcctataagtataaggctaaaggcttcattattttctaagcccactttgatgatcataagctctttcttatacacaattttttttcctattagacttgtatttgggaaactcaatatggcacattaatatggctcatatattcattgaccttaatcattatgacatagacatagacatgatttgaatgagtctaagtagggcatatttagaatttaatcgttgggtttaaatgatattatagatttgctaacaaaatagatgttaggttttgtcaccacaaagccagaatgggggattaagtattacaaaagaagaagaaaataggattaggacgccaattacacctaattaaatattcatttacacacaccttttttgttttcttgtttaataaattaagcattgttttctctattaacgagtgttgcaaatttacaaattacagagggtttccattttggctgcatgatatacccaatatcacttttcgaactgataatgaaccatttaaggtatgtatctatcacttacctgtaaaagatatagttgatcaaatggtaaaattagatgatcaccattagaatgaaacaataatattagcaaattaataaaattaacatgttgtaataatgtatgatctatatttattaaattatatattcatttttttttgagtaatttgcggcgtaaatacttaagtttaactctgagttgcaaataaatacctaacttatttttttagc

SEQ ID NO: 39501 - DNA, 1268 bp, Cannabis sativa
tttaagtcctagtaataacatcgcatgagttcaaaatcaacaactctatactaaggttcgattcaaatgacagtttcataattggccattaacatagaaaaatcttaactaagataagcaggaattttgatgcgaataaagagcatactcatgatataagcaatgacgagtgaggagatcccggctgaggcatacgagaccttcacgctcttcgctcgattgcgatcgagggagagatccatgaacacaatccccactccacccagcacaaacatgaaacccgaagacaaaccctcgattatgtactgcccgttcactcgcccagggaggaacaccacgggtcggactgcccctgtggctctgtcctgggtcgatccgatccctgggggctccacaatgacgtcgtacacgatgcccgagaccaccataaagtaagtcagaaggactacggcgtagactgtcatgggagaaggtaaggtcaaggtgggaagcttcaggcggagacgcggtgtccggagaaagctgtacgggatcagacggagtgcgtgaaagaggggatctatagaggaagaggaagaagagtcgccggcgccggtgacggaagaatgggtatcggatttaggagccattttggagaagcaaatgttgtttgaatctcaactccactcttttttcttttaaataataatacaaaacaatttcaagtttttttttttttttaatttgggagagattctaatttgggatctctttttctaaacataaaactattcaatcatcatatttctcaaaaattttaataataataataataactagtaatttgtagagtaaataggtagaataatttacagtgtaaatgtataataacttagcaattattgccacgaaaaattaaacttagctatttatttacaactgggagttaaacttaggtatttatgccacaaattactctttcagaaatacctttaatccatttcgtcaaaaaaaaaaaaaaaacttacgcggattgtcagtgttgcgatattttgcacacgcaagtgcatgtatcgtaacaagtagtaaactcaccaagagtgaggtcgatcctacaagaattgtagttaagtacgttaaaattaaacttttacttctatttagttgaataaaaattcaaggaaggattaaaactagaaaataaaaatagtgcaagaataaacaattaaactaataaggaaattaacagttaataaaaactaggacttcgacttcaattgtttctattg

SEQ ID NO: 39502 - DNA, 3002 bp, Cannabis sativa
cgctaatactattaatagcggccacgcattaacgacggaccaatagcggccgaattccgtcgctaataccctatagctgccaagagagagagtattagcggcggagttgtccgccgctaattctatcaaatgttgtaatgaattgtcagcagactctcatgtttaaagcaacatgataaatgaatcaccaaagaattcagctaagaagcagcactgaacttaccttcataaccataattgaagctcaagttatcattgcttccattcattaccaccttctttattagcattattatgctacaaaaccaaaaattagagaacatgataaattttagatgagcatacaaataaattggaaagaatttttaagtaccctaaaattgtacgatacaagatcatatagtgtgaaactattatgagcaattacaaaattagcgttctgataaggtttgcattttctaacttgacaaatgaacaacaatagataaatacatcttataataattttttaacaatgacaataagacaaaacacaaatgggttcaaaaagtacagccacttagacaagaagaccacccagggaaatcaaaaatgagattaaggtaaaattaaaaagaaagagaaaagcatgaaatgagtataaacaacaaaaaaaatggagcatgccaatactatctcgtctatatctctggacgacattaatgtacaaatcaatttccttctaatttcaaaataaatctagtaaaaagtttctaaccaatatatttataattagctgtgtaccacaaattcataactgacacaaactaatctgtacacatgcaaccattttgtgtttgagtaaacacaataaaatatgatctactgttacctcattgtgcaccttgattaattaatattgcttttaccaatcaaagaaaaagaatttgcagacatccaaattgaaagatcaggaaatacaaaaaaaaaactaaaaaattaggagaatcaacacaaatttttgaagatatacgtaacaaatgatacatattaatttatccatttacaaataatatttatttaccatgtgatctttagggttcggtcgcctctaaagttctagctcatcaaattcaaaaactggcagcagctataccgaattgacaccaagctcttgaagatgtggaatctttaattgaagaaagcaagggagaggttagaaaaattaaacacaaaaattaatgacaatcacaattacaaaataattatcagacaagatgatatctcaaacttagagcaatgagtgactaacttcaatacaataaagatttaccttttcaatcacaccaaggtagcttccgcgtatgtctggctccaacacgctagattcatcagccgtaaatgcacaaacattcatttcacagacaacaagatctttctaaaaagcaacaaaacatataagagacaagttaacatatattcactatcatcttgatatgcatgaaagatgttgtatgtaaattctatttgtaagacaaagtggtgagagtgagagagacaaaaagaaaggttatcaaatttccataatatttatcatttttcgaaatcaaaacaacaaatagggtgacaaagtacctcaaaaatatctacaaacttataattatctctccagtcaaaaggtaagctatcaaaatcataagttccaagaaatttagagaatttttcgttgacatccccaaagtatctgcgaccatcaactagctttgcctaaggatctactaggacaatgctactatcaaaacgatggccttgatgacaattttgtgtgccgtcaatgcgataaccatagtgaacattgctcttcgggtaatcctgtaaagatgatcattcttattcttgtgatacattatgtcaaaaccaatataagttaataataaatattttaattatttacacaacttttatatgctttctagttttatataaaattcttacaaaaaaaattagaaaagcatgcatattatttagggaaatttatatatatatatatattatatataaaacaacaaataatgctaaaagaagtattataatgcgttaaaaatcaagagagtctgcaaaaagatcaacattaaagttattagacaagataatatctcaaacttagagcaataacagttctcaatttgatgaatttgtaacttaaaaaataaaactatatagattcttctaattagttcactagaataatgagtgactaacttcaatacaataaagagttaccttctcaatcacaccaaggtagcttccgcgtatgtctggttccaacccgctggattcatcagccgtaaatgcacgaacattcatttcatagacaacaagatctttctaagaaacaacaaaacatataagagacaagttaacatatattcattatcatgttggtatgcatgaaagatgttgtatgtaaattccatttgtaagacaaagtggtgagagtgagagagacaaacagaaaggttatcaaatttccataatatttatcatttttcaaaatcaaaacaccaaatagggtaataaagtacctcaaaaatatctggaaacttatagttgtctcccgagtcaaaaggtaacactatgtttggtaggacggggatatgggtggatggagaggggtggagggagagtgatggaaggagagactaaatcacttgtttggcaagaaggagagaatgagggagaggagagatagagggagacattctccctccaaaccttcaaaatttaatccctccaaatttagaaggtttgtaaaaaaagacaaaatatattttgcaaaatacaataacgacccttaaaataataataaaattttatttataaaaggataattttgtaattttactaatcaattttttctctatctttcccacctcacacctaataccaaataatacaaaagagattaacaatcctcttggtatgcatgaaagatgttcaaattctatttgtaagacaaagtg

SEQ ID NO: 39503 - DNA, 1399 bp, Cannabis sativa
gtttatttgggttaggcggtttgtaaattttattgaacacccctagtcgaaaccaaagctaaatgtctaaaaatattgaagttaaagggccattttataatagtgatataagcagatttaatttaagaatataacataattaattatcaataatcattaatattaaaataggagctttgatattaattaagattatatgcacaatctattcactctcttgttcgacagaacaatctgaatctacaagattgctaattgtagttgacacaaaatggattgtataggacttgagacataatgaaagattaaaacttctaataatctctgctgaaatatagaagttcatcattcatcatacgatgattgtttgagacttgatcttaatcttgaagtgagcaatggactcctatttataatcttgtaacttttaacttattgtccaaattcttgatatcttggagttttgagattatcgatacttgagaacatattgcacagatatggaatccgtccttctttgattgagagtaaattaaatatttcttttagtattgatagcaatacttaaacatagagcactcaatttgtattaatttcttttgtatatggcttacagaaatgttaattagagtatcgaggtactaattgataaacaaagaattagagaggttaatagacgaatatacatcgctctattagttataattatttaatggaggatctcaactcatgccatgccatgactatatcaaaacatataaattattgtgattaattgcttctaatttctaaaatatagaaattatacgttttgagtgtgaaactatgatttattagtgggataatatagttaaatttgttcaaccaagcgaaataattaatttattagagcttagaaatacaaattcatttgtccccaaactatagtttgataacaaagacaaagtatttggtaaaatagaaaaatactaatgattattttctttgtaaaaataaattaaaaaagtattaatttatttattacaataaaataataaagtattattttatataaattatttttaagaaaaaaataatataaattattatttataaaacaataaaatataataatattttatagaaaattaattatataattatttatttgataaataaaagatgatataaaataaaaggagagaaacaaagtatagttggactgcataaagagaagcccatcacagtctatggactgtgttgtggttggcgacccagtaatagtatatggactatgataggcgtctaagcccaaccctaacacaagcaaaaagttttcttgcttttcagtcaataggtttttatattgaaaacttacaaaaatactgaaatttaatttaatttttacaaaaatactgtc

SEQ ID NO: 39504 - DNA, 2610 bp, Cannabis sativa
cttggaattaggaatttttggatgagcaccttcattattccttcgaaagtcgtggctgccatagacaaaagttgtagagacttcctttggggaactaaaggcaacaagggcaagcttcaccgtgcttcttgggaaaaagtttgcctccctaagaatcttggtggagttggattccgtgaagggaaaaaatggatcaaggccctaatcgcgaaatatctttgggctttgtctaacaaacaagattatttgtgggttaagtggataaactccatccatctgaaaggaatggacatatggaacttcccaaagaatagagatactagttggtactttaaaaaggtgctaaatcattgggatagtacaaatgaaaccatgttgaggcttgctgtgacaggtacgaatctcagagctaagaagttctacaacctgctgttagagatgcctaaagttaagtatgctcgggctatttaggacaacttggtgctgcccaagcacagattcgtgttctagcagattgtaaatacccaactgctcactagagactttctttacaagttggtgccgttgcagaatactatgtgcccggtttgtgaaactgagtttgaaacttattaccatatctttttcagttgtattttttctaagcaggtatgtgaggaggtgaactcttggctgggagtttatcattggcctagtttgattgctgatctaaatagcaggagcagaatcaaggtgaaggacctccaaaatcaggttcttaacatagtgacagcggccactttataccagctgtagaaaaataggaaccgatgtatctttgagttgacttgtgcttatcctagaagtcttagtttggaagtgaggaatgttgttgaacttagaatcatgagtaaaggtccctttaaatttttccaaagagacttgtatttactcaatgtaattaagaataaatgaatttaatctataaatatataaaacttagtttatctattaaattatcaataaatttgattattgtcatgaaaaaatattaataataaattataaattattatgtagacaaaagtacattgatcaattaccaataaataaaatactttttggatagataaaaataacacagtaaacatattatttataaaagatgtgagacttttatatttaatatatttttaaaataaattgttatacactattttaaatatattatttaagaactcggatacttttcctaatgatgtggacatcaatattagacacgtggcatgaaggatgacgtcacggagttaagtagacccgagtcatagtagtcaacctaggagggaaccctagccctgtgcccaggttgactccaggatggaagtttagaattcaataatttgaatccaacccactatttttcagtattttgtaccatgaagatatgaagtagcctaatccaagtcctgggagataaaattacacaaacttgtaactcgaaaaccaacctaggcacctagggttttcacccggtgccccagttgacattttcaactagggtttcagttttagggatcgccttagtgcgaagtggacaaaacttgtattggaacatcaactagacataccacatacataattgaggaatcaaaatcagaatcaaagtaagtggatttttaagcacctgggccccggggctcgagcacctagtgcccatatcaatctgggcaccttttgagtatctgatcggagattaaactttttcatcgtattcatttcatcaaaaactaggaaataggtcctttaagaggaaaaacaacaatttctgggcacaaataacagggcccaacacccaggttgacatttcctaaacttgggccatttaacatgaggttttttaggaattctttcgagcatcttatccatctttagaaattattaagattcaactatttttggggaccaaacagaatttttgaaggggaaaaagtaggacccagcgcccacgttgacattttgtcaacttaggctgtttccgatcaagttcagtaaaaagtgttttgggtattttttttgtcataaaaaataataaagattcaagtaaactcaatgagaaaatcacagtgccgagtccctaaaaatagggcccaagacctaggttaacctagggctaggcctagcgcccaagttgacctaaggctgggcccagcacctaggttgacaatcaacctaggacgctgccttcaattgctcaaatgccaaatctaatgcaaccattcaatctagaatagtcaaaaacagggtaggagacattgtcctcaagtttagaagccttggaagtatcaaaaacaaaatcctagaagctcggttgaaagggcctagtacctaggtcaacaaatggcttggcgcgctgggttcttcttatctaaatctgatgttattttgaccgtctatctagttttccaaaaattaccatgatctatgaagttagaggaatcaaattcacaactttacatttctcatttccagcacacccagaaatgatgagtttcgagtttgtcatttctgcaaaaccgcaacatcttcgagaaccattgaccaactttgctaaaacatataaatggactaagt

SEQ ID NO: 39505 - DNA, 3714 bp, Cannabis sativa
ttgtcaactaacctaacttgtctaacttgtcaaaaaaaaaaaaaaactttacatattattattgcaaagggttgtaatctgtacttcttctactgttgtaatcttgatgctatacattttgtatgtatttggttgtaatgaagaaatctccaacaataaataccaccaatcatataaataccgtcttttacctaaacttttaaaaattaaatacacacaaattaatactttatgtaccatcacttacatacaaatgtcaattacaagcaagatagagaaaactatttggaagcaaacgaaataccataattaagagatagtgatgattggaatcattgatgttcaattatgagagagagagagtacagatttgattaaagaggagatatcttctatgtgtgacacatgcttttcgcgaatagctagatggggatattaatagaccgatcgattctatatttgatatctcaaaaatagcaatcacattttgctaaagacaaatatgattgttgcacggttgaggcgcaaacacgtaagaatcttattgatgcgaatcctacattataaactgaaatttcggtacttagagagctaacattataaactgaaattttggtatttagagagctaacaatttcttttaccaatattctatgggattaagacctacaagttactaccacacaagtgacttgttagatataaggtcaataattaataatgtgaatgtagaatgaaaattttgggaaataactttgtgacatgttagaattcatataacatgtgaatgttcaaatttataaacacacaggcttatacaagtgtataaacaaagaattttaatatttaaagaaaatatttgttaatttaaaaagaagtacttaaataacagaagcgtacgtaccttaatttatagaaagtgttgatcttaatccatcttgtagagataatctttgtggtgattttagataatgatattccaagaaaataagactttaaattttctaattttatctcttgaaggaaaaaataagaatataattactcatgtttcttgggaaccactaccagcatataaccttatagttaggttattaattttaggtatttctaatttaactcatcaattaattagaaatattttttaaagtatataaatatttaacccatgacactttaatacttaatgatccacaattattaaaataattattttatttgggtcaaacttcaaatagaaatacaccattccatattgaagactttaatctaacatgaaaagctttccaacttcatttattttaaaaaaaaaaaataaaaaaattattggcttaaaactattaattggtcccccaaagcaacaccaaaattaggtgctcccattgttgatttttagtatatttatatttatttttgtatttatatataaaaaatattgttatctaatagaatatattaatctaatgaattttgttattattttttttttttttgctaaaattaactcttaaaactaatattgttaaaagagtcaattaatactaaaatatttaaattaaattttttatttattacttattaaaatgtaattatgtatatatatatagcatataatcatttatgttatagtgcgaattttttacctacaaactcgagatcaagctcctgtaagaatgaaacgtggattcacatctcttgagaattgttaaactgctaggggagacctctcgagtttaaacctcgcttgaaccaaactcagcgagatgatgtgatcttgacagagtcttgcattgttatgccgcgcatgatgcaggactaagaaggaattgttcaagtctcgaatataccaagatatatgcgatgtctataaagacttctcccacgacttagtaaagatcgtttctttacatagcgagttggtccataagacttaaatacgctcgatgactcgataagaactcgcacgttctaggtcatcgacactgaaaaggtatccacatacgtaactcgataaggacgcagatacctaagtacgaggcttgttagtctcgtttcaacagatcgcatcctaaggatgcgagcttgtgcaagtagatgaatagaaaacttacactatgaaggtcgcatacgttgttgtatttattaaaacgaatttaaaatgttcttcatttatttcatttacattttcctcaatttaatgttgatatttaatgtaaaacggtttaataatcaatttagttctgtgtaatcaaaggatacttgctttgtatataaaggactaatctaacatgaataaaagaggatggagaaatcgttgctatagtggactaagcagaccgcgatctgactgaaccactatacttccttgtgttcttcatttatattactatttgtttgtgtagcttcatttgaatactcaccgttctaggttcagtactcgctcttttttttattagaaatcaaatctttattttatttggtcttgtctaaattcctccaacgattatatgcaccgtctgtgggaacttcttatttttaatttggaggaaaatcaagatggttgcaaatcagacaaatggaaatactagatctttcaatgttggaacaatgcctgttccactcccaggcgatggaacaaatccaactgacatggttaatggaggtgtgggggcaaaccaacgtcactccactcaatgtgtttccagaaactactggccatgtaggagaaacatcaacaccaacagccactgtaggctacttctgacctattacaccagtcgtagtttctgggggaattacacagctgacaacggctcagtatacagccatgcaagaacaaatacagacgttgtaagccaaagtttatgggagtgccaggactcaacatccaccccgagtcctgaacacaggttcgagcaacccttagttaactaccacgaatagacgataaaacaaatgtcttaacagtaaccgtgttcgcatttcaaaatcattgttagccaaatcgaagatgtagattcaaaagagtaagactaaatttgagctctcaatgaaagcactaaactattgaccacgcttttagacaatgacattgaatctttaaagtgatgataatgattactcaaataaaaaaataatgcaataagaacacactagatttatagaagtttgacccttgataatagtaatggcttattctcctttttattttattacttatagaaaattattaagatcacatgatcgggccaagtgagtttcttaataatctcgagaaaagcttacaagtattttctctaaagtaactgatttttggatgcctaaaaaaggatccctcaacagtgaaatgacctcattatttataggaaaaatacgttacaattatcccaagttattaggagaaaaattaagggaacttaaatgtcaaattctgttattttctcaatcgtataaaataaatgtaacaatgatagggattttaaatggactataagtgtagagatttttagggaaaatatctctaacaatctttactctcgacgtgtttctatccaaagaatggcacttgcacgatctactcagagtagctggaagatttatgtcacatcaccgcttcaagcctctattgggtcctcacacccatagaatgaatggctcttatgcacgagtacgtcactctggctgcttcatggactgactactgaccctacagac

SEQ ID NO: 39506 - DNA, 1840 bp, Cannabis sativa
tccaatcaacccaagttttaataaaaccaataaaagttaatgtaagcccaaataaaaaagtctaacagtaaccacctaaatttcaggtggaaggaaaggagttgaattagtgtgtaagcttaatagatccctttatggtttaaaacgatccccaaggcaatagaataagagattcgatacgtatatgcatcaaatcgggttcaaacgatctgcatacaatcactgcttatatttcaagaatctgaagcaatttacagttgtgttcttattgctgtatgtggaagatatgctcatcatgagcaaagataaatctgtgatcaaaagtatcaaagccaagcttaaaagagaatttgagatgaaagagcttggaccagttcaaaagatacttggtgtcgaagtctcacagaactagaaggaagggatgattagcttaaaacaatctaggtacatcaagaaaattacttagaagttcaacatggaagatggaatgagtacatccgttctgttagagggattagtttgttttgtcaaaggaacaatgtcataacaatacaaaataaaaagaagaaatgaaggatgtaccctatgttgtgaatttggttgtttaatttacatattaatggtgagcacgagaccaaatatagtttacgctttaagcatcctaagccggtgcatgttcaatctgggcatgagacattggaaagcccttaaatagttattgagatatttgaaggacacttgggattatggtttgacctatgagaaagctaaagaatacttaaaattgaaagggtttgtggatgtggactatgcctcaaataaagataaagaaaatcaaccacttcctttgtattcttgacaaaatagaactgtataagtctgaaaggcccaattacagtccgtggtttctctttctaccacggaagcagaatttatggcgactacggaagcattcaaggaagcattatggcttcgaggagttctttatgagttgaaacaaattaaagggggtgactgtgttctcgaataaccagtcatctattcatatttgtaggaacttgattttttatgaaaagagcaaacatatagatataatactttactgaattagagagaagatagaagaatggctagttgatttagagaagataatcctgctgatgttgggactaagatcttaacctcaaacaagttcaagcattgcttaaacttgatcaatcgcagaagttagtatactgagattcctagaacaccaactaatgacgactctattctttcttcatcatcgtcattattttaatttgaagttactaggtggaatttgttgtatagttcctccaaatgaaaaggtctccgcaaatgtcatttttaaaaagttgttcactcgcagaagccaatctcggaaggagtcttgtggaatgatagtcgagttcgaaagggtgttcccatatgactatcatgtcgtctccgggttcagtcttcaagatagctagccctcctttgaaaaggagttcaagttggctagttgtccctcctggaatggtagttccaaatagtcgactatagcagactatatcctattcggaagcgtcatcagtgagtgtctttggttcgtgattccagaagctcgtatatgttctcggaggctctgacacttagctaacgtggagacttcgctcaaagatgagttggttaagttagttatttctaactaatttaacaacctcgtttcttacagccagagactttagaatcttgattctaagcctataaatgcaaccttgtctagttattttagtgaacgcaaaattgagaagagttttgagagagagagagagag

SEQ ID NO: 39507 - DNA, 1145 bp, Cannabis sativa
gaacccaactttctcagacaataagaaagccaagtctccactcccacaacacaaatctaaaacacaatctcccagttttgctctgttccataaatcaatacattaaattaaacataaatttatttatgataattaaaaaataataataattgtgagcttgtacagttacatacccactccaggaaacagccattcttttccaaattcggtgctgacccaaactcaacaaatcatttaactgtaattatgaaaatggaaataagattaggtagtttgaacttgaagcgagaagaagcaaaaaaaaaaaggaaggtgaaaagggtacgttatcgtaaacaggggcgatgcgattgaacagatctcgacgacgttctgtagtacatcgaatggagcggtggatgagagtgagagaggaagaggacgacaatggagaaggtgaaggtgttactgtacaaatcattttctgtctatctcttctatctttttttctttcatttttatgaaaggaacaatctatctcttaacaggcgcaaatcataaatgggccgtgggctgggctggactttaaaaccccaaaaaggaactttaaaaccccaaaaaggatggggtaagttgaaaaataccacttttattaatcaataaatcaaatttatctctttttatatgtattgtacctaaaatactctgatataagagagtcaaatagagagtatcttgaagtgacaggggcaaaattggtacaatatttaaaaaaaagatgtaaaaatgatagactttaaaaaagagaataaaaataaaagaggacaatataaaaaggtatagagtgtaattttttcaaaaatgatagagaaacttacaaaaatattgacttttctctaatctttacaaaaatactaccacacggtagaaatttcttttatactgtataggcccatttttttttcttttatactgcctaggcttattattttttttcttttgtactgtgaacagtaacaagggacaaacgacgcctccttcctcattaggaacggatagagcaacaacacaacacttgctgcaatcccaaatatcacatccacaacaacaccatatcaagaaaatgtgacaatgcttgaaaacaacacaacaacaacagaatcata

SEQ ID NO: 39508 - DNA, 1603 bp, Cannabis sativa
  modified_base (67)..(69): a, c, t, g, unknown or other
gatggttggaaggctgaccttggcttagagaagtcaaggtgccgcacgggtgttccgctgcctgaannngtgagcccgtgacaccaagcaaggttggagattcttaactcatctgaactctttggtcactagaatctacaaaactcgctatttcccgcatgatgactatctgtcgactgagcttgggaggaatccaagctttgtttagaggagtatctggagcgctcaatccttagttcgttaggggcgagacgaactattggtacaggtttcaccgtcaacatcttacatcaaccttggctgccccataccactaacctgtatgtcacttcctctcatgtgggtctagttggtcatactgtgagctctcttttctctgttgatgatagaacctgggacattgaacttgttcgggataagttcaaccaacgtgacgctgatcttattcttaatatcccattgatcttcttgacttcatgtgacttttggtcttggtctggtgaacattctggggatttctctgtcaaaagtgcttactgtttgctccaggacagtaaggatccaaggtcaggcaacaacaattcggggttttggcagaacctctggcaccaaaggttaagaacttcctctggcaagctgcatctgaggttttaccaacctgtttaaatctcagaacaaaacatgtggacatcccctccacttgtccagtttgcattctgcttcagaaactatatctcatgctcttatttcgtgcaactttgcttcatgctgttggattaatatgggtctacctgctggaatttctcttgaagactccttcccaagctggtgagataatatttttcaaagccttgatactaatcgtgtctgtcagattgttatggtttgttggtccctatggaaagcaagaaactctatcgtctggaaggacaaagttctcactattgcaaatgtcttagcttcagcacgtatatctcttgatcattggcttaaagctcaggatacttcttccttatcttctattaatttccataataatggagatggggctgagctatggactaaaccggatacaaacacaatcaagattaatgttgatgctgctacgtttgcaagtgaaaacaaacatggttacgacatggtcgcaagaaacaactcaggcattcttattgacgccaaagctggctgtagcctcgacacttttacacctaaagttgcagaaattgttggtatcaaagaagcattaagttggataaaaagtcatgactgccagactgtcgagttagagtccgataacctggtttctgtccaagccattcgaagcaagattcctctcagttcggtttttggggttcttgtccatgattgtcaatctcttttatcatttattccttttcttaaaattcattttgtaaaacgttcagcaatccgactagcacatgttgttgctaggatgtctcggtttttatctgaacgtagcatttgtgtgtccagcgctccagctgctatgctggatatcatgtattccgaatcctaattttaatgaagttctcatttcatcaaaaaaaaaagtgtgttctaatggtgtgtcaaaaagtgatat

SEQ ID NO: 39509 - DNA, 2480 bp, Cannabis sativa
  modified_base (1836)..(1842): a, c, t, g, unknown or other
tcagctcttctttgctcctacaatggactacaaatggtttcatggtaaagttgtttctgggcgtgtctacatgtataaccattaatgtatggattattattactagctacttgagtaggaaactagattattatgtgcaagatagatagggttctctcccttggtttatatagggaatataaaatgctaattaattaaagagaaatattgtataagaaaagaataatatacattagactataatttaacaattattataaagttgggaggagtgctgccttaattagttctttgagcactaattaaagtagctgtatggaaatcaataacagattaatagataggtgcggctttgagagcctctagaagtttctcgttttggtacctttaaacaaagagcattgctataaagcattagtggtgcctagcaccttctcgacatgtcacgttgcgattgattagcgatattccttaaaaactattatattaaattacatggctaccgatacttagttggaccaatagcgatactgacacataggagggtgctaaacaccactggtgctctttagcatttatcttaaattaacaaattatatcaattgtttgtcttaaacttctatttacttgcattaatctaaatattactatcaacaatgacttgtcacaactaacaaaatcaggtgtcttaaaagtgtgtcatatttatacaaaatatatataacagagaatatatcttataatcctacttttgatgtggtggtaaaaaggattggtaaattaatattggtattagaatttttgccagtacaaaataaaaaatgctggcaaaaatgacttttctcagcacgtaaatgtactaataaaaataagacttttacaattgtaaatgtgtgctggtaaaactttgacttttttgacagcacaatttgttttttaccagcatagtagtaactgcactgtcaaaaataacatttcttctagttaatataaattgtttgaatcttgacttagatcggcatcctgaattattcataatcttttaaaaaattacaaaaatctcatgtcatttacggttacatgtcaaaaatgttttagtgcctatgttacataataaatatatacatggttcatttgacaagccctataaagaatgatattgtaataaataaaaaaaaaatttttttctgatagaactttatatatattgtatttattttaatatttaatacataagacataattcgtattagcttgtgttataatagagatgatctcgaaattggggtttgaggtctaaggatttgaagtttggggctgggggctggggccaggggctagggttcaggtctggggtcagggtttgggttcgggtccgagacagggattgagatctgaggatggggtttaggttaaggttaggggtcgtggttaaggctgagtctgggtccgggctcagggttgggggttggctccggagtcagggtgggggtcgaaggccgatccaatgatgggatgggagttgggtggagtctgtgtcggatctagggctgtgatttgggtatggagctgacatctgggcatgtgtatgggtccggggttagagattaatattctcctgatatctataactaactgagtctttagtcattagttatatacattagatttatattcacttttttataattagatatgactacggtctttctaattttatgggaattgttttacaaatacataaaaataataaaaaaaatatgattttatttataaaaaatatagtcttttgatatatttttatgttgtatttttgttaatttattgttgattttnnnnnnnttgtatgttattttttgttgtttagatgttattttcttgttacttttatatagttttcatattatttttgtgttgtttttataaaacactataaaatgtaaaaaatgatttaaatttaaaaatatagtttttttacaaaaattaataatttattataattattacactcgattggaataaaattcatataatctcggattctaaagtagcagtccaaactttggatcagaggaagcgcattatttactggcaacttttagatttatctttatctatcttagatcttatcaatagttttcattgttgtaatcttttctttgttaagcgtgtactagtctttctttttagcagaaagagctagattctctagagattttgctagtacgtttttttgggaaaatggttaaggtaataaaataggtgagtgtatggtaaggtgcatgaagttctatctcaaatccaattaataatgagaggagtagctcatacatcttatatatagtatttaatttcaatacattatcaatatgagactctcaaataaagagaaaattttccctctgatcattcccatctttctttcctagtatttgaacttgggttctttcaaaaagaaaattattacacgcgataacatc

SEQ ID NO: 39510 - DNA, 3558 bp, Cannabis sativa
  modified_base (315)..(321): a, c, t, g, unknown or other
gaatctggacctagaaccttaaatccagacccgatcccggactcagaccagactcctgggtttgtgtccggtttctgaattttggttagggtttgggatttgtgttgcggttcgagtctaggatccgtgtttgggtctgggtccaaattcgagatttagggtccaagtctcggtttgggtccggggcatgttctgggtccagagtttgggtcgcagtccagaccgtggtcgaaatcgggatcgagtttattgtaagaaatttataattttgcacaatttattagtacaatttaataccaaacatagtattgtatnnnnnnntactaatacaatacaatacaatatttcacaattaatatatatcgatgcaccttcgtgtttttttatacttaaagatttatagtctcaatttttttatatgatatatattatagttagttaagatattttttaagttttaaaaaaatttaaaataatttatataatatgaaaaagtagtgtacaatataatttaatttataggcacataaatatttttaacatattaaattatttaaaatttcgtataaatattttcaataaccacaataaatgttcatataaaaaattaagatttaagactatttagagcagctgcagcaaagtagagaatatataaaatggaataaagtaaaagtagtgtaaattgatggaaggcataattaagagtagtgattattaagcccaccaaaatctactcacatttttctgcgtgtaataaaaaatattcaaagccaaaccgagtgtggtccactggaacgcacttaataatgttaattaaatttaagatatagttaataatcttaatgataattatattaagtaagagattgacattaattattaattaattagttagtatctgaaaatgaaaattgtgtgagataaggtgtttagcgtgtccccgaccaaatatattccacctctgtcctcctgtccccctaacacaataccatttataattattcatcctttttttggtttttttgaaaggaaaattttattcaaggttaataaaaaaacgttggagctctataagtttggcagaaaaaatattgcacaaattttacaaggaaataactcaactgtcagccagccccactgataatgaaaggagtaatgaactcatggctcacgcaagagcatctaaagggaccaacaccgctaagaatatatggtgcacaacaccaaaaaaaaattaaacaaactaaacaaacaaagaaaatgatagaacaagttcaaaaaggtcttcgcctaacacacaagaggaaccacgaaagcctgaaacaagcagaccaatcaaaggagcactaatatcttccaacaagaaaaacccacactcgtcctctattgtagttctgaaaggaagcacatccctttgggtaaaactctaagtctctccctttacatttacaaaattatgaaagctcaccactagccattgtgtactggagtcatgatgcttgaatagtaacctaaaggcacacactaacactatgtttggtagaggggagagaaggagagggagggagaaggatggagggattggaaaatccttttgtttgtcagaagggaacacattatttttaatccctcttaccatggaggaattcaagaaaagacaaaaaaaaattatacaaaatatctttcttactcttgaaaaaataatatataattgtattaatgataaaatagtaattttaatatttattttactctctatcctttctcatatactcctaacatcaaacaacacaaatgagaacaaatatcctctccatcactcctactccccatcatttctacactctccatccatcctactctctctccttcctaccaaacatagcctaagatctttaaaaaaggaataatgacaccattccacaaccccacatttgaaaatagcctttgaaaatttcatcccctaaaacaagagaatgagagccacaagaagcccaccatcgtcactatctcgctatccaagaggacgactctaaccgcaacccctaaccaaaggcatgacacatctcagcagagatgcccaaccaccatggtcggtgcccactcgctagccctaaagaacgaagcccaacacccactcgaaccaaccatcactgtaaacagccactagaggggacctttgccttttgctcggagacaacctactgaaaggatcctgggcgccactaacccaaattcgatcggcagcgcccataggagcatctaaaaccctagaagaaactaagggtggagagaggggaaaaccttatgtttcttttacatatgacaaaagatatatattgttcaccttaattagcaaaaaaaaaatactatacttctaaaaaattgaacgtggtaccaaattaaattgaaaaactaaaaaaatgtggtaccaaaattaaaaaactaaaatttgttatttaaacacaaatagaagtgtttggcattattttcacaaaattatttttttaaaaaaaaaaaacatatttacgtaatagatgaattattatagctaaaaagtttagctcatcataaataatatgtttataggccactgaagattctttgatgttttatagcatctacagtagttgtattttttaaaggtattaaaaactttcacaacatttaaaattataatattttattttatatctcttctatatttttttagcactcttattttttaaaatactcaaataataagtattattcacgtcctattacaacatcttagttaatttctacgtctgaaatcatatgttagatttttttcaaatttttttcatagcggtattcattaatgttgcaatattatcactgtaaatttttgaaattttttaaatagtttacagtaccgaaaatagagattctgatattctagtttacaccatgcgtgtttaaaaaatttcaaatatatttttagcactgtaaactattcacaaaatttaaaaatttatgggcatgatgttgtaagcacaacaaacaccgctatatgaaataaaattttttaaaaaaatattctgaaatgtgttttcggggacggaagttgactaagagattgtaatagcagattgacatatcactcctcaaaatataatatttgattttaaatctcttccacatcttttttagtactcttacttctaaaaatacgtactcttataataatgtattatccaaaaatactattatagtctcacctattattatttatgttaattataaatattgtcacactaaattttaaaaattcatatattaatatatttcatgaaatttaaatatcttaccaaaaattaaaattacactaaatttaaaaataacttgtaaaataacataattataattaaaatctaacatgatggcgttaaactgaatttaaaagtaattcataaaataacataattatataagcattatgacataataattaaaagaatactaattaaaataatttctaaatttagaatacaataaatttgaattttgagaattagtatatgagaaattttt

SEQ ID NO: 39511 - DNA, 2495 bp, Cannabis sativa
atattttttgttttttcaactgttaagatttttataacccttgcgttacactaagggggacaagagttcaagtcgaaaattttgtatatttgtaaatatatatgcccactattttggtgttgttatgttcttctttatgatagcgtgttgtttgtggttgattgaagattgtaaaatagattagttctataaacatgctcggtataaatctgcagtaatataaaatataaaggccaaattattatctaaaagttgttgaccacaaaactctaacaaacttagataggaaattttatttcatttaactacctatccaattttctttagcctcacccatgttttttttttgttttttaaatttaattccttttcctaccaagatttaagcagcagcaagcaaaaaaaatggtagaatattttattttatttttggttgaagagtcaagggaatatgtggaatacaagttatgggcaaagaaaatcgtcaaaatgataatgcatgagcatgagagtaaagataatgatgtggagctatatattgtagtatttattaatttattagattaatctaaaatagatatttgatggtccaaagtccaaactatacattgtttccttgcatatccacatccacgtccctaccctacctttaaaccaccgtcgtagtagtgactgtggatataaatagtaatacaattatacaactcgcagtcgaagttgactcatttatttgttaactatatttattaactatttgttgggggaaaacaaatatattttaacttctttttataacatgtttttagttaaaattattgattctaaaccaacttctactaaaatataagctaaaataaaaacatttcaatctttataaccaacttagccagcgtttataaaattatccatatatacgcaaaataagagccaaattttcatatccaatactcaagagacaaataataaattcacttgattaatataataaattataaagattattatcatataactttaatatacattatgtttaatacatacatgtatcattaatttatacatatttctttttgaaaagaagttgattaagagcaaatgggaaatcattaatcaacaattacaaaaaggcctaaaagtgtgcagaaataccaggccaccagacacaattcttatccttaataaataaaactagttgaggaagctcattacttaattctattagcactcttagcaccttttttttatgagaaataatcagaaatgtaaatatatacaagagttaaaaatgacactattgccatagcacactttgattcaagaataacatttgcgtaaccgagttatcattaaaaataaataaataaataaataaaacaaacaaacaaaccagcataaccgaattgcttgtagagatggctatataaatagaaccatttaacttttgtgaccttccaattaacaaaatttaaaatactgaattttcattaaaaaatgtatctcgtgattgagcatataatgacaatcccaaagttggaattggattacgcttatagcctaagctaagctgactgatagcaacaccaacatgtgactatttcatcttttttttttttaattttttttttctttaaatacaatatagaatttatgaaatgtttgtacctttaagaatattgtagtagacacctctatttattttggaattaagaaaaaaaaaatagttcaattttttgaaaaaaatcacatagtaactatttaaaattatttgtaaattttttaaaaaattaaaataatttatattactaaaaataaaatataatattataattataaactaaaaagtttttttaaagaccaaaatatatatctctatccaattaattttttaaaaaattacacagtatgcttattttttattatttattttaatttttatgttttttattactttttaatttatacttaatattataaattatatttctataatgttattgaagactctaattttaataaattatataaaattatatttaataatttaattataaaaaaatatatatctatcaattaaaattattttaatattaatatgtaataaaaaataataattctcatgtaatataaacttaagagtaatttgcggaaaacccccttaactatcaatttacttgcaaaaaactatcgaaccttatattttggtgggaaaaccctccaaagtactgttccgtttacatttttaaggtgtcgtctgttcagcttcgttaagtcttaattttgcccacgtggcaatgacaggttactaaaaaaattttctacgtggccatattttacaaaataaaaataaaaaatttaagagtaatttgcggcaaaactcccccaactatcaatttacttgcatgcaaccatccaaccttaaagtttttttgatggctttttgcaagtaaattgatagttgggggttttaccgcaaattactcttaaattttttattt

SEQ ID NO: 39512 - DNA, 1287 bp, Cannabis sativa
  modified_base (1257)..(1261): a, c, t, g, unknown or other
tatttataatagttaatatcaaaacatatatagttaatattatacttacctcagaaaccatgtcattcaaggctcttcccacaatctctaaaatatgtttaggattattatttagaacacttcccaagattgtaagtaccatacaaccaccaatcaccatttcctcagaacgacacttcaaaaaggttgtgaaatcctcttgaaattgagtcaagtgggctttcagaaccatatcagaacttgtctttgtgatataaatatttcctttgttgtaagcttcacctgtttcgctaaccaatccattcggaacctttgaaaaaacacacacacatatatataaatatatagattatcaagtcataaaaattgatgaagttatgtattttcttatatatatagacttagggggggatgaaaataccttagacaaccattgcaaactataagaagaatgaattaagtgcatggaattattagggaaaagcctttgatagaaactcccaggcatggccatgacaaagcataaaggatgatcatcaaacttctcattcaacctctcatacaagcttggaagagattgttgaaaaatattgttgaaatcatttccaggaagatcattaaggaacacttggaatgtcatcaatggcttcttaatattctctttcatttggttggagctataataagacataataacatccaaagtgtaagaagcagcagtgagtgcagttgggcctgaagagcagcccaattcagctattctcatacaatctgggatatgcttacaataaatctccaaggctttctcttctattatgccttttactttggatatcacttttttctgtgtaaacaaattaatttaattaattaattcaccccatcacataatatataaacaaattaatgaataatattataagctatatatatatgtataagaaattgtttattgtgtacatacttgaagtgatgagttatttgcatagctagctttgcccacaccactattcattgggaaaacttgttctgcttccattgtttttttttctctttctataattgtgacttgtggagatgttgaagagataattatatagagcagataagattggggactatttataaaggagcaatattatatgcctgattaattattattgttcattcacatgcttaagttcatagtacaaaacattatattcagatttgacaatttttaatgggattatttcacaaaaacataaaaacaacaannnnnttacaaaaatacggtttcacagaatt

SEQ ID NO: 39513 - DNA, 2371 bp, Cannabis sativa
atttatctacaattatcattgtcgttggctaaaagcaaggtcaacaagtatgtttacccactattatggccccctaattctcacacgagacccaaaagagatgaatttaacttttaattaaattattgttattaatttaataggtacaatattaattgggcctaaataaaactatcatggtgattattttatttttgaggaaattaccttcattgttattaattgaatggtcacctactactcttcagtcttgtttccatgttcctcgttctggttctcttctctgttgacgtccggtgctgtgtgatttctttaccttagagtgttttctctactgtctttttgtgtccatctcttcactgttttccaatgccccttgtctctctttctctttttctttctttcttcttttttttttgtttctcctgtgtcgtgccgtgtcgtatccctttttgcttttccttttcttttgttggtctattgtgggtcttgtgttgatctctgtgttgatgcgtggtgttttgtgggtgtggtgagtttgtggtgtgtgttgtatcttggccttgtgaggtgtgggtgttttgtgctttattccttttccttgttgtcccctccctttttgttggagactttatctttttttgtttgttttaatggagttggttaatgctaccaccccctgttaagggtaaatgcttttcttgcaatgaagcctctgtcactttaactccttgtgcatcctctctcaagtcattatctaccttttatctctatggaaaagttgtggccccaatgcttgtggatgaagccacagtcattgactttgtggctaaaacttggcataaacctgtgtttgttgtgaccttatctgaggagtccaataactctaactgctttgaatttagatttgaccttactaaggatagaaacttggcattggagaatggtccctggtgcacaagaggttatactcatgttcttaaggcttggtctccgagagatgaagagaaaatatactttgctagtttgaaactgtagttttaggttcacaacctcccacatgaatatttctccatggaaaatggaaatttcttgggaggcctagctggtaaggtattgattgtgaatttaaaggaagacaaacctacctcctggagcaagcatcttaaaatattggtggagattgatattgctaaacctctgttcttgggttgctgttttaacttggtgtccggtgtcaagaaatgacttcagttcaagtttgagaaattaggtatcttctgctataattatggttgtaacctctcttctccagtcacggttcagaaagaaaatggtgtcccctttaccctatttggatcgtggttgtctacttcatcatcgtatctagatgtgttctcgagtgtgaattctttttttcctagtcgtgcttcttccttatttcttgttcattattgaagtcatggctctgcccctccagcggtgactggcaatggtgttggtggttcgttaagaacgggatccaaggtttctcaatcctcgaggcatggcaagaaagtgacaggatgatctcctgttactgtggggaagtcaaagcatgtcgtgtggattcccatgccgcagtctggtggtaccacgtctctggttgccatttatgctaatgtggttcgatttgaggatggaggtacggttaaaggcccagtttttcctactggtttggggttgcatgcttttgatcgttcattggacaatgcaatttgttcaaaaatttcaaatccttttaaggcgatcaaagacacggtgcctttgtctattaaatgtgaatggtgagaatgagcatgtgcaaggccctcccctagttggttcgaaggatgaggatgttgacttaagatatttggttggtgtaggcctgagtctttgttctaaaggttcgttttggcttcgacgggctattgataatgctaactctaacggtacatctgggccaaaaattttgaatgtggagcatgttatggttaataatttgggccaagggccagctggtgtagtgctgattgtttcacttatagggcctaaatctatttctgatggtgctataaggccggaggatttaatctgtgtggataaaaatctagattgtggtgatgcatatgtgagcgggtctcttgctaaggccaaatcatgtcaggggcagagtgatttaaatggctctaaaggcactaatattgaatctgtttgtgaacaagcaatccattcgcgtcttgatgagaatagggccatatctagtttttttcaagcccaagaaaccttgctggaagaacttaaataatttgggagcttggatctatatgagatacgacggttagggggt

SEQ ID NO: 39514 - DNA, 2331 bp, Cannabis sativa
tacatatttaatatacaattctattaaactagttttacttcttatttttttttatttgaaatctcaattattcattgttttattttattataatttgatgtatttacgaaatatatacatacattcataaaataatacgagtttttaatataactcattaccaattagtagcacaaataatttgagcaaatttttaaaaaaaattacatatttatttcactaaaaaaaaagttttgttcttaaattatatgatatttgatacaatactttaatttttttagttttcaaataattatagcaaatttaaaaacttatttttttttaaaacgatcggttttttaaaatttatataatagtcggtcggtttggttataaccaaacgaaaactgaattttgaattttttgtgtgtaaaaaatcgatcgttgctcatccctaggattatgaatccaaccattatccacaatagaatcactattaataatagagatactgaaactaaattgatgtgcaagagtcaaccccagtctaattgcaagcagttctgccacattaacggaaaattacctaacacaccatttgaccaaaccagccaaaccacactcgcagcatcccgtatcactccacccagcccgataaagctcctcccaagaaccactgaagcatcacttgcaagagcaaaggactcagaaggtggtggcaaccaccgagtaggttgctggccaacttggtttaggatgcacagtcccagctgaagactctgccaaacatgctctttgaattccaacaagtgattatgggttaaatttggaacaatatctaactttgacttcatattaccaaataacactgagtgttgatcatacaacaggcaccataaagtaaccatcattaattcaaaagcctctcgaaataacttttcaaatagaaaaaagagaatttttgacatcggtccatggacacaccaatgaaggaccaaccatacccccaatcgatgccatattggaatcaagccaaagtagtaaaataaagcatgttccagagtttcaaattcttctctgcatcgtgaacaacaaagaggtacctaaaccttccgtgagataagctgtgtagctactcgcaacgccaaatggaacatacgccagacaaaaactttcacctttggtggcatagcaagattccatacacccttccaccaatgaaccagttgggttgagcctgatactccctcattagcctgaagcgaccacgccaatgaataaccactcttaatactataaatcccatcttgatcatagtgtcagcaccaaccatcctctgtctctcaccttgctaatggaatagacataataatgtccacatccatggttagaaatacatgtctaagtttccctacatcccacataccagatggaaggataaatttactcatccaacgatcatcattaggcctcctcgtgatcgactgaaaaaacctcggatgtgggatccatgggtctttgaatgcccaaacttgcgttccatctccaatggatctctcaatactacatttaagcagatctaatccccaaaacaaacttgaccaaagatgagatgaaccatccttttcagtggcttttaggatagaacgatttggaaaataattatatttcaaaatcttggtaggtaatgattctgggtatagaagtaatctccacacttatttagccaaaagagagcttgattaaaaaggtaaaaatctcaaaacccaagatcgcccatctccttaggctgacacactttttcccatttcacttaaggaatcttccttttatcaccattcgaaccccaccagaactgtttgacaatagacttcaattattcacaagttgccactggatgcttaaagacactcatcatataagatggaatagcttgaagaatcgatttaataagaacctccctcccaccagcagaaaagaaactcaatttccaccctcaaacatgcttcctgaccttctaacagatcccctcaaacatccactttttgtttctaccaaccaccatagccaatcccatatacttactatgagtaggtacaaatgtcaaacccaatacgtgtaaaaccccatctcaatccacttgttgcttattcagactaaaagtgatagcaaacttttcaaagttaatcttctaacccgaggcatgcagccccataagttagtaggatttgcttaatagtttcagttgattttgagaaaacgttccttgtgcaaccttggctgtcgcgacttctcgctccaattcagtgtttcttcggtttgattcaaccaggcgttgtcgaagttgcctat

SEQ ID NO: 39515 - DNA, 2337 bp, Cannabis sativa
  modified_base (51)..(51): a, c, t, g, unknown or other
aatcccgtttaggggattagggctttataagtatcttgggtagcgtgcctnattatttagggcgttacactaacagtgttatgttgtcacgtatagtcctgacttacaattatataacacattttgtgctttgtcaattgtagcttgattatctcaatatatacatattgcaggcatatgcttaagccaattaaaaatatcctctaggaaattacataaccaccctctctcttcactacatctatccagagcaaaaaactcaaatttcattgtagatctagtgattacactttgttttgaggatttctataaattagtcataccacctaaagtgaacatgtattcactagtaccttttgagtcttagatgtcaaatatccaacttgcatcactatatccctctagaatagatgtatatcgagggtagtataacccatagtcttgagtatgcctcaagtatcttagtactctgacgtttgcattctagtgttatacaattggataactcatgtaccgacttatagtactcacaatataggcaatgtctgatcttgtacatcttatcaagtaaattagactacctatatctagcatattcaacttgagatatgctattgcctttattcttagataaatgtttactaatggaaatcgttgttctggatgtgccagaatcatcttcaccaatttcgtcaactatcttgtccacatagtgcgactgactcaaactgagcccatctagtttccttgtaatttttatccctaaaattatatcagccagtcccatatccttcatgtcaaatcttgagtttaacattattttggtggatttaaccattcgtgcttgctcccaacaatgagtatgtcatctacatacaaacatagaatgatgtatccctcatttgtggttttgatatacacatattttttacactcattgattttaaatctatttgtcatcatgacactatcaattttttttgtgtcattgctttggtgcttgcttaagtccatacagttacttaacaagtttgcaaactttcattatttttcttgaaactacaaaactcttaggttgttctatgtatatttcttcatcaagatctccatctataaaggcaatatttacatccatttgatggacttctacatttcgcaatgcgataactgccaaaaatatcttgacagaatttattctcatcatcggagaataagtatcaaagtagtcatggccttcttgttgtttgtaacattttattacaaatcatgccttttgcttatcatttcttccatccgttttttatttttctactggcacacacatcacaaagaagattttagagtatgttcactctgatctatggggcccagagaaaattagtactcgtggtggttgtgtctattttctatccattgttgatgacttttcaagaaaagtctggatatttctcttaaaacataaaaatgaggcatttactaaatttacacagtggaaaacctttgttaaaaatttaacaaatgaaaacttaaaaacactaagagctgacaatgggttagaattttgtaatgatgaatttaaccactattgtaaagaaaatggtatacagagacacatgacagtgaagattacaccccaataaaatggagtggcagaaagaatgagtaggacaatcctcaacaaggtgagatgcttactgttacaatcaagattatctcaaggtttttggggagaagcaaccttaattgttgtctacctaataaatagaagcccatccaatgcaaatggattcaaaactcttgaagaaaaatggtctagtaaatttcctgacttatctaatcttagagtatttgactgtgtagcttatgcacatcaaagcatagggaaattggaacctagggctatgaaatgtgtactcttagggtatcatgagtgctaaaaggatatagactatgggtttgggaacaatggggttttaagataattaatagcagagatgtaatatttaaggaagatacttttccttgtttgcctattacatctaaccctagtgtaggtgcaaaagaaactgaccatgtagttacaagcattgaggtcaggcctaaatctgttcaggtggaacaagcagagaacacaccagatcaataccagggaggacagattcaggtggaacctagggaccagattcaggtggaacctgaagaagaaattactgggatcactgatgaggggactcaagaagatttgggtgactatcaattgaccagggacagaaacagaagagtaccaaaaccaaatcctatgtacagctttaatatttgggatgaagacattgcata

SEQ ID NO: 39516 - DNA, 3309 bp, Cannabis sativa
ggaaccgattggctctagcactactaaaggagctgaagtgctcctactcctcactaagggatccgaatggcaccaacagtcgttaaaggagttgaatggctccattaccttatcaaagaggacttgattggcattctaaaaaaaattgaacctagttgcatgaggtatatatatgtgaaaaaaatggagacctcataaatgcctactttcttattttacttttattttttgttccctggagcctaaatagcgacaaacacaattttacccccaattttgattttttttaatcaaattatggattttaaatgttcatcaccatcttcatcaagtttatcatatttctcccaagtatattggagagactattctaaatctattttgcaagtctcaaaagaagttcaaaattattactcattgacttacgagcaaacttttaaggggcaaatattataccctgattttgcacataagtttcaagcatgttaatggagaagaagttataagatatacctccttaccatgggagcacattgcaccacctcctacgtactaagagagtacattgcgccacctcctaccaagaagtacattgcacctccaactaaaggagcacattgcacctccaaccagaggagcacattgcacgtactaagctccctgctcaactactaaggcacaaagagctccttagctaccaaatcacctcaaggacctgattggcacgaactactaagggacccaattggctccccatgtgtgcccatgatgatccgagcctgctaaatgcaaaagacacgtgctcttagagctattctaagaatatagtcaaaaaatgataattgaagatatatttattttttgaatgattattttattattattttgtattttaaacctaacccgactatagttacgggaaggtggacctatggttaagggattttaaatcctagataaaaatgtatataaggggagtaaaattattataaagggaccctgaatttgatactcacgaaatcattctcttgagctttcactctctaactctaacaactcacttgaagaatgagctcttggagaacataactctggagaactatcctcaagcattgagatcaataatactccaagtggactgacctattaccgccgaaagagggtgaaccactataaaattctcgtattcgtctttgttgaatttacttttacaaaccagtttactctgattaattattgcttgtcttcatcttatttgtttacgatcttcttagatctgctgacgaaaaaccgcatcaacactaatattttgggttgaaaaaataactgcatacaaaaaaaattgaagaataaggtaccaatatatatataatgatggatgatttttaaatactgatatatataaatatatttatatactgatgttatgtaaaagttgatttcattttttcaatatcaaaagatatattgttaaagaagattcagtacaccatccttcatttgtaactaatttcacttgatcaaatgaaaaatcaggtatggactattaattcagttactatttgcacaaaatagtaactcgatcaacaagactttaaaattttaaagcaaaacaaaatcaataattcactagtaaaattttagagaaataattttttaaatataataatattaattatatataagtttatcaatattagattatttaatattttttaaaaaatatttaaaaaatattaaataagttaattttaaataatattaacatatatatatattcgattttaaaataataatatcaactattcatgaaaaatattacataatataatatatattatatgaccatatactttttatatgtgttgaaagattataagcatatatatttcattaaatttattggtttagttatatgtttatatacaattaggtaagtatttaggtttagttatatatttttatataagtaaggtatgtttatagataattaggtgaatgttacaaaaaaaaaaaaaataaataaataaatagttgatcgggtcaacctgttgactcgcccaacctaaacctgccagcccgtgacacataattgggcgtcggatttattctttcacgcgaaacttgtgaacccaaaattcgatcaacctgcccgctgcttagtcctagtatgtacacatgtgattttgtttgattaaaaaaattgttaaaaaaggaaaaaaaaaaatggctgctttatatatatatcatgtgtatgtatacattaatgagcttgttctttttcgtctttaagttaataggctttgtttttttatattttttttttattaaaaaataaatatgtttaaaaaaatatatattagaatgtgtcataaaaattatattatgtttataagaatgtgttagaatgtgtaatttagagcatttggttaaactaaaatttgtgtataaatgagaaaaagtatataaatctgagttgtatagatagtagcattaaagaaagcctcaaaagtagatttaatcttgtaaaaaaagaaagttgtctagcataaataaaattgtttttaaaattgtaaaaaaattgtaagagcactcacaacaaatgaggtataataactaaaaggtaaaataaaaatagctaagagtttaaaattgagctccatcaaatgctttaaactcttattatacatatttccaaattccaaaaaactattctctacatatatctcaatgaatagtggacaggtaaatatattttatattttttctttttcttttttgtttctttaattaattttttattctttttttactcatttgtgtattttttttatttttattaataaaatatatgtaaagatataatatttaaatgatatagaaaaaaatataaagaagctggtgtatagtgtaatgtaaatgtgtgaggtaaagtaaaaaaaaaatgaagttttagtaaagtgttttaaagaatagagtagagaagctcttgggagtgctctgtttcttttttgaaggggaattcgcttatgagtgtaattgactcggtttgattaatagaaattatctttcttgattaaaaaaattaataaaatattttaaataaaaatattaaagcaaattaatttaagaaataattatggtagaactatgtataaacaaatacaaaaatacttaaataatcaattctattataattaattattaatataaaaaatgataataaagttcgtaagtaaaattatttttttaaaataaatacctatataaaaataattcaaattaactttaaaaataataataataatt

SEQ ID NO: 39517 - DNA, 1678 bp, Cannabis sativa
ccaacacacatattgcccgccttgccacatttcctaaggcagaataggcccgccccgctaacgaagaggaggatgcggtgggggacgttaaagtccaaaaagtgaaggaccagggcgaggtccgtcctgctactccttctgatgctaaagtagatgaggaagaaggagtagctcagatgctgccattcgtggctataatgaggaaggagagccaattttcgaggcaggtgatgttctgtagaccgctgaggactacgtcgtcgaggaatacactgaggccatacctttgaggaggagaagttcagcaagagatcaatggatttccccaccatccgtggtaaccatgaagaagatgacaaatctgctcgatcgtggtctcctcgagaatgttgagtgcttcattccctctcccgatcagcttgatactgacccaggaaaaggttactgtgcttggtcgggagctcacaccaagcagggcgcaatgctatccttgctcccatacttcaagaaaatagccaactactaccatataagtctgacccaattcactcctaagggtcttaaacatttgtccgccctgttcgtactctaggccttgtaaggatggggtgagtcatcttccaacgataccaactggcttttcaatctaaagtcaagccccaagtaaaataggtcagggtatttctacttctctgagatcgagaagtcatgattgacaggcataatggccaccgaggtgacaaagataggaggcttcgttgatgagtactatttttatcaaagggatggataccacatatactagctttcaacagatgtcgtccttttactgccctccatcacactagaactcaggaaaagggcccaaaaaattctacaactctctcctgctgaccggaatatctctctcttggctacaaatgctaacttcaccaagtacaaactccatctggctgactttgtaccaaaggttgaggcaccagaagagacggggtccaaacaggaggctccgagcaaggagaagaagaagaggaaagcccctcccaaaatccaagtacctactgagtgatctatcaggatcagaaaaaaccctgagaggattactcaaccttccaccccagtggcaggaaagggaaaggtcgtcctggtggagcaggaacaggagtattcttcagatgatgatcttccttctctacttgtttgggaaaatgatcttgccttcatgcagggtactttaacttgctctcaaatttcatttgcacttgctcatattgtacttgtttttaaccttcttattttactcatatgcagatatgtctcaaaagttttttcaagctttgaagaagagatcaggggatacctttggccaggtacctccgaccaaaaggttaaacgttgatgaagtaccgctcaaggagaagagttcggttgagtcacccattaacctctccgaggaggtggtgtcggaggtggagctactagacaattagaactctaagtccaagagtgtcaaggggggaagcacagagggatccaaactgtccaagtcctcaggtgctcttatcgtactgaaccttgtgactaagaagggcaaagaaatgctttaatttaatcaggatcggttgctccctgaggtgaacgatcagctgtctggaggggacgccatgtctgtgaagtt

SEQ ID NO: 39518 - DNA, 2492 bp, Cannabis sativa
caggatcttatttttactatttttgaaaatatagggtccattttgtcatataacaaaacagagagtccaatcggtaatttttgcaaaacacaaagtccaaaattcttaatgcagatttatttgaagaatgccttggattactttggggggtttggaatgcatttatttttgggaaaagaaggcttgtaaaggataaaatgtatggctagctaggttagggatttcttaccggattaaaagtaagcataacataagagaataaaggctcatcctaatgacctgttaggaagtcatactaaaaggcagcaggttgtctccaacgcttttaaattgaacactgatgcgactctcaatcaaccttattataaaatcggacaaagaacagtggtggactaatagtttaggaggtgtggttgctgggtttggttgttccctagtgttaaaatttgtcatgtgaatagaaatgataatacattagctcataatttggctaagttagcgctagggatagacaataaagttttgtgaaatggtaatattccagagtttcttaaatcttgtaattctgtaatcttcgttcttttaatgacagttacagaatttaaaaaaaaaaaaaaaaacatatatgatagagcaatttttacattttttattttccagcatgatataattcttaccatttcctttagttaaccttttaaacattcgtaagtttgataataattcttaggtaattcacgaatttaattacatgtatataggattttgttattgtataatagaataatgaagttatatatgattatgtaaatagatattgatatctaagaagagacgtaattaatattgactttaagtgcaaataaattaatgtatgaaaaagccaaaaaacctactttactagtcaggctctgaaagcaatggaagtataaaaacttcggtatatatatatttacagttacagatatatttgtttttgtaaattaattaactataccactgtgattttggctctcatgatctcatgtgataacttttctttattattatattcttatctcatgtacattgtaatatttctcatctcatctaacaaattaaaaatgttgtaacattatttcaaaaaaattaaaaaaattaaaaatgttgtaacttgatctcatttcactttgagtggtcacgttccaatattattttctttatttcttttatgtacttatcctcttctacaaattaaataaataaaccatactcaccaaaatatatagggtaattttatagtacatctcttaaaagaatgttttagtatatcatttttatttttagtggtattcatgaattaacgattcagatatctataattgttggttgaacctttttgaactaggatagttcatcagttaggcgtgtttttatggctgtagaatttttatcgcgagtttcatgagacaaaattgcttccaaaaatttagacaataatattataacatccataaataactacccaactcattaaaaaacactcttcctttattgatagctgggaccacataaaacaaatttaaaatatgacaaaaacaacacaaactagtattaaaaaatataatcttttaactaaaaatagatttaaacacacaaattaagtaaactcaaactcaacaaaactaaacaaaataaaattccaattaaaatttaagaaatctagccaaaggtgataccgtttgactagaagcaacattccaaaaactcaaaaacaatacacaaatctcaagaagataaaacatcacccaaagcaccaattcaaaatcgaatgccttaattatcaaaactactatcaatatatggtaaacacatatgaaataggtataataattcctaaaatggaaccataatcacttgaacattggagaaaacattttagtgtaattatatatatatataataatatatattataattatttagatcacttgtaaatttgtaattttttttaacagctttatagtatacaaaataaagtttaaattttttgttgtaaatatgattattatttttatatgtgtgacataataaattatttagtaaattttttataataagtagttttaaataattataaaatgcacatttatttaaataaataataaataaaagacatataaagatatataaaaatgaggcttttgagattgtacaataagttttttaaaaaaaatatacatacataaaagtttaaaagtaaaaagattatcgattatttggaattgtaagatactagaagaacagtgttacagtggttactgtttaagggtgtaaacttaaattgtttttctcgatttaaaaattcaacaattttactgaatccgaaacttttatataagaaacgagaaatgctatgtgttcgaaacgtttcgccgagaaatgcggctacttgccgcctctttactttcccatcacttgtttttcaaaaatgactttcataaagttttttt

SEQ ID NO: 39519 - DNA, 1769 bp, Cannabis sativa
ggttgattacatctcctgtgttagctttggcatgagaccatgctaagtttgttgtttactatgacacctgtagacaaggttttgagtgtgttctaatgtaagatgacatgttcattgcttatgcccctcgtcatttgaaggagtatgagaaacgttaaccaactcatgatttagaactcactacagtagtgtttgcactgaagaattggtgacattatctttatggggagaaatgtgaaatccatactaaccacaagagtctcaattattatttttactcaaaaaaatttgaatatgagacaaagaaggtggttagagttagtcaaagattatgattatgagattttatatcaccccaaaaaagccaatatggtagcaaacaccttgagtaggaaaggtcgtgcaggtttttagtaccaaaataatctctcctcagttagaaatagacatggtcaaggctggtattgagtttctagaggcaaatttcataatttaatgcttctgtttgatttgctagagagaatcatatgtgtacaattagaagactctgagttaatcaagttttgagaggaagtgttagctggtcgggctaaggacttctcaatcttagatagtggaatgttactttacaagactcaagtttgtgttttgagtagtgttgaactcagaaaaaatatattggatgaagctcacactactcgctattcgttgcatccatgtaccgccaagaagtattaagatttgaaaccctaatattagaggtgcaatatgaagaaagacgtagtggattatgtatccaagtgcttaacttgtcaaaaaatcaaaactaaacatcagaaacccgtgggttattgcaatctttgacactagcatctgagtggaaataggaggatgttaccatggatttcgtggttggtttgcctaggaccacagaaatgtatgattcagtatgggttatagtggattgtttcatgaagtcatccaatttttttccaattaagacaacatatacagtggaacaatgaacgaagttgtatgtaaatgagatagttcgtctccatggggctctaaaatctattattttggatagggatccaaagtttacttctatgttttggaaaattctctagagggccatgggcatgaagttgaaatttagtacagctttccatcgttagatagatggacagtctgagaaaataattcaaatactaaaagacatgttacaagcctgtgtaatggactttgaaggttcatggaataaatattttccttagttagatttttcctacaacaacaactatcagagtatgatagggatggatccttatgagatattatacgatagaaaatgtcgttccccgatacattgggatgaaaccagggaaaaaaaagtatttgggtctagagttatttcagcgaaccagtgaggaaatagaaaagatcaaggcacagatgcttactttgcaaagcaggcagaaaagttattctgatcctaagcatagagacatagagttttaggtaggagaacatgttttcctacgggtcttaccaatgaagggtgttaggcgcttcagaaagagggaaaagttaaaccctaggttcatagagtcatttaaaaatactcgagaaggtcgtgtaggtagcgtatcggctagccttacccccaacattatcagttgcacacaatgtttttcatgtgtgacagtcagtagtctcgtgatccgtaaggggaaacaccgggtaagctgtgcaatcccacaccgcct

SEQ ID NO: 39520 - DNA, 1817 bp, Cannabis sativa
ttttttttttttttttgtgatgaagaacacttggtacagtttattgatgcttcataataatttttatccctatttatagagtttgacttcatattggtctcttgccttttttttttaacaaaacacaattgacatatagtgatccacacacacactaggttatatctctctctttgtattttcttgaagagacgtgcgctttgattttttttttttaactatatataatgtgtacctaccgattatcactctgttctttcttgtactatgatactatcttcaacttctatatagggaaataattaatgcttgaaatggtatattaatatctggtctctcttgatatgtagattttatgcattattactttaatacatttcaagatttttttgttttccacaaaattaattggtttcaggatgtggtttgtcctgctcaaagccaactgcagtcaattggtgacaatgtgaaacaagtttattcaaaactcatggaagagagtgatgataataatgatgaggtcaatccatctccaccacatgaggcttcatcttctcaaagccaattgcacttaactggtacttgtgctcaacaagattgttctgaggaccataaagatgaggcacagccctctccacagggtaaggtaactgaaaaccacagggaaataagcccacaactgcctccgtctctgccgccacccaccccagcactagcattagaaaccaaaactcccaatgatgattctgaaatttcaaccccatcttttgattggaattcgatcaataaatctgaaaagaatacaaaagatcgctctgattcctctgcttatcttcaaggtatcaatcaaaacaccactccaaatctattttgctggttatgtttatgtattattgacaagtaaatatgcatgtttaccatgttacggtatatatatattgtaatgttttctgtcccttcagcaaggaatattttgtttaaagagttcgaggatattgatcgtgctgaatcaagattagaaactcatcaatcaattgttgataacgtggaacttcatgaaagctgggttgttgtaaacgattgtgagctaagtagcccaatctctgttgaatcaccaaaaactttgtcatacatggtactgatttattgacttttatttctattagttgcgattgtaatttgagctgcacttaattactttaatattgttgcttctgtttttcatttttcagagaaagatccaatatccaaccacaaaaaagacggttctagagaaagtgaaagtgaataggaaggctgatgtagttgtaccttctgactacaaaagtgaaattaagttggcccttgagaattttgaagggcctgattctgatcaagagttacatcacaaccctaattgggaaatcatttaaggaagaataattggaatgaagaatttcataaaattaccaattttttgatttttcgtgtttctatttttattagaaaataatatgcattggaataccttccgattttgattttttccatttgaattgagaagttatatgtgctcttactttaggggtcgaaaattttttgtccacactaaaaaaaaattgtcgttcattaacaatattctactcacaacaaatataaaaaagaaaaattgttgaaatttttgtgaaattatataaaaattgaaaagtgaagtgtgtgaatgattgaagtctcatatgggatatgaacactgcattaaaagtgtataaataatgcatgtttgagaattggatttgtacccagttttgcacgtctgggtgaggacttatacactggac

SEQ ID NO: 39521 - DNA, 2492 bp, Cannabis sativa
gtacaacctcataaatcaatggttctgcctacttcatagttgcgaccataaccgcaaccagtaaattagtcgcgactatggtgtagcttggtcgtgactaccttataattttcagcatcaactttcttcaacgttcagctcgtcccgtcctttcgtcacttgatagaatttgtactttaataccttgggaacctgaatcaaggaagcaaggcataaaaccattccgaaaagggatattaaagaataaaacaactctaaaatcgacccaaaacttaggctaaaaatagcctaataaattctcccaaactaaatccttactcgccttcgagtgagactaaaaaactaaaactcaaaattctgactaacagacaattaactaagtgtttgaacaatcaaactactactgccacatgtgaaacttcaatcaattaattaaaccagaatttcaatctcaaaactctaacaattaattcggatgcttactttaaaaaacaatgtatagatgtagattatttcaatattaaaaaacatcataattattttactctatccaatctctccatagcccaatgatcaatatacttgcatgactacctctctccgctaatgttaccaatccttgtttggaatcaaaaaaacttcccgggttataatgtcatggcttaggtaatcggtagatgaaaagtcatttaggctatattatactataagcacactataaactatcaagcacctaaaataaattgcatatcccaaaatgtgctcaaaaatttcaatgattgagaattttacaactatgagttccaacatcactttttttttcactaaatatttacttttttttttcaagaaagaagaaatatacttcgtcttttttttttctttcttttttccttttcttaatgatgttggaagacactttcactttttttttcaaactcatctcatcaatcacctacttttccaaaaaaaaaaaaaaaatcacccacacagcttttcactccctcaaacttattcctaagcttatctcataatgtaaggtgcaccaggaatagaagcagtgaatggatatattttaggtttaatcaagtgatacattttttttttcaaaaacaaaaggcttaggctcaatttggtacactaaggataatcacatgaaggtgggcttgaaaggctcaaactgtccaagaaaactgtctaaatcatattcctaacgaacattaatgtcaaggacttcgcctcaagataataaatcatgcaagttctacatcattcaagcaatcattccacaaaattaagcaaaacaattatgatacaattcaaacattgacaatttacatcgatacatttttttttcacaagcatccaaattaattcaaagagccaaagaatcaagcacacaattttaaatttcaatcaattccacaaataacaacaacaacaaaatcgacaattgacttaattaattaacaactaaaacaaacaaacaaaactaaatatttaacaatgaaaataataaaaaaaaaataaactaagccccacccttaaacttaaaatattacattgtccccaatgtgacataaaatccaaaggaagaaagatttacctgagacacccatcaaaagggggttggtggtggcggctgatcatatggatgaaattaggatgggtacgccaagtagttggagtcctcgatcccaatgttcatgcgagtgataagagagttaagttgagtaacctgactctcattaaaaagactcttttgtgccatataattctccacatgattattctgtttgataatataattgagctaggtatgcatgtattgcattcccaaatcaataggaccaagaaattgttgtggcatctcctcgtcctcattctcttcttgccagtagggcgcctcctttcttgttgttaggctttaggtggaggttgcccatagggacgtggattcttgagtcaattcaccatgcttacatcaattttccactgaggttgcactttattgtcatagggaagttgcttaacgccataagttccacaaagattggtgatgactccagccaaaccaattccaccacccgtggcaccttgaaccatcaaatcaaagctttgatgaacgatttttaccacgttaagattgtagcccttcatgatggcatacacatatttgaggcggtcaatttgcacatcagaaaagtgcttacttggtactaaccgagcacttacaaagtatagtcacgccttggctacgagattaatttcacatagatacaacaagtttggcaatccatctaattcgtgaaatctcagccccaaaaaacccattgttttagcaatatcatcataagcaagctcttcatcatctttaattattctcaatcttttctcctcttgagtatactcaagcatttcataaagttagttgattgcataagaagtagtatggatgtcctttgatcaaaccttaaccatcacattctttc

SEQ ID NO: 39522 - DNA, 1188 bp, Cannabis sativa
ataattattttaattgcccataatgaaaatgtttttactatttgtaaatttttggtacataatttaaattaagaaaattattttatatgttattttttatttttatttttcaaatttacggtttagattgctctagttgtttttttcgtaatttccatataaattgctatgcggattttgattgcaatttaaattattctgttaatacgaatttatatgtgaaatttcataaaaatgcaaatatatatatattttacagttgaaaaatgaaaaaatctctttaaattataagttacctatcattaattatgttaaaaagagtattttataccaataataatataaaacttaatatttattttaatttaaataaatttgattggttaaaaaaattataccacttaatgtgtgtaaatttttagtatattttttttaaaaggaaaattttagtataatttgaatcaacatatcattactcatattataatatagtattattgtacacctcaaaatttgcttttaacatttgtttattataaaacattaataattatttaaaagggttttgattccatttctccttcctcttcacacctcccattttcaatcttaattattcttctctctctttctcactcatcccaaattaattaataaatttacctttcctcttttttcttcatatatcatctttacctcttcttcttcttccttcctacacaaaaaaattctctatatacttctctctcatatatatatatatatctatatatgtgtcagaattgaaagtactgaatcctgtaccatataggacccaactcatatgttgtcagaagaaaatctctcaaaaacatctttttacataacggttcctaaatttgtagtctttccattcccaaaaagaaaccctaatttttcaatatgaattcccaaataaactcacctaatccaaaccctaattcactcaaaaacaggtttgccaagggattcattagagccttgatgagaatacataaatctccttcaaataataacaactcaccaagagagatctcgaaacgccgccgcagaatcaagaccgccgccaatgctgccatggcctcggccgttgggtccagaaaagtactatggagccaggcagtgttgcggaagatccgcaacaaccgacctggcagtcacggcggcagc

SEQ ID NO: 39523 - DNA, 4569 bp, Cannabis sativa
aacagttcgagctgcatgcctattgagaaggacactttattaaattcaagtagagtcgtaagggtatatttagactggactgaaaaagaacataacttgtatgatatcagctttctcaaggatcttcccgaggttcataaggctgggtttacggtgaagaaaactcgaccggaagctatttctttgtttacatgcttggaggcgtttttgaaggaagaacctttggggcctgatgacatgtggtgagatacctaatccaaactcgtaactcttttatatttttacctttcgatatatattgccattaacagatgtattgctcattttcttttcaataggtactgccccgggtgcaaggaacatagacaagcgaccaagaaactagacttatggaagttgcccgagattcttgttttccacttgaaaagattctcgtatagcagatacctaaagaacaaattagacacttacgtgaattttcctattcacgatcttgatttgagcaaatacgtgataagcgaggatggaaaacaccacatgtatgaattgtacgccattagtaaccattacggcggtcttggtggtggtcactacactgcatatgccaaggtgaaaataaatctattctttttcgcctttctagtaattagttgtttaaactggatgatgatcgcttaattcttctgtcaaattgttcgtgcagttgatcatcgacgaagacaattggtaccatttcgatgatagtcatgtttctgccgtcaatgaagctgacatcaggacttcggccgcctatgtattattctatagaagagtaaggactgctgaacccaattcaggaacagcaggcgagagcgagacatctcaggctcattcaggcacttgagaacgtaagtcaaagtccatctttgctattttaacgctcccgagttgtttttcttgtctttcgaaagctaacttggtataggcatcatcatcaatcaatcaagagcaaaaaccctactgcattttgaacattatatttcgggtcgggtcgggtattatttcaaccttcaagctgaacaaaaagttggttaaatcggtaaaactactaggagctatatatatattcattgcagcttggagccccttttttggattggacattctgttattattatattcttttatatttgatctactacttataagaattattattgttgttgttgtttactggctacttagatttttagtcatttttacttctggtagattttactattgttatttcaaaattattgagtctgtaatgtaatcaatagtaataatggtcctttaaatagagattataatttgacttaatacattttttgcaatgaccaactgagtttcatgtttaaaagagtcctaggaagttaaagcaatatctgaaatatttattgatgcagtgactaacactgttcactataaaatgaataataacaataataatggtacaaaatacaatcattaatttaagagatgaaaataaagaaaatagcaaatcatctaagctaacactaaattatgaatctgtgatcaatgtctctcttaacaaaagctcctcagcagcaagaacagctaataatcttaatattattattattattgctattattcctattaagatatcctgcaaaagtaaaaaataatgaacatgttaacattttagttattaaaagcacacaagttattttaaaatattacttctttttttctcatccacataaaatttagcatctttccttataaaaaaattactataatggctggtaattctaaaagttatctaccataatctcacttcacatgtagtcaacttatattgaccgactctaaaatttagtatatcagtaaaaaagaaaaaattattttgcctctgaactagatgagcctaaagtacaacattagtaacattttatataaaagtgatctcaagaattaaaccacacatatgggaagcaaagaccactcaagggcaactccaatttgagatggtcttatagagatggatattttggtaactctatgccaaaaaaatatgcagtttgtcggatgaagcatatgcctaagcctaaagatcatcgtcatcatgataatgataatgattccaaaaaataataatggcgtacaaagaaaggaatataaacttttctttctttatattattacctttccctacttcccaagtcgcctctgttttatcacactattttttccacagctccatacttttctaacgcccactacctaataatcaaattcaagcctttgttgccacacttcttcaaagtaaaccaatgaaaaacatcaacaaagtcaccatcatcatcttcaccaaaatcaacctctctttgtcctgaaaatagtgtcaaaatttatcactactacttttagtctctgataaagatagccatgaaaatgattcataaatcttattatatcaacaagaattcgggtaacaacattaggcctattaaatttctaaaatgtcttaaaccaaacactgtaaaagctaaaaatgacaaaataatatagtttagtttgataacgacggtggccatgaaatgatcataacaatataatacaaatcttatcaatatgacgataataagacaaagaaaaaaaaattggtaatgtcactaaagttgaatttttggaaatttatattaactttcaatatatgcaaaaatggcaaaaacaatattttattaattttagtgaggggaaacaatatttgtattaaattttataaacattcatagtaaccactagtggtatatagtacttttaagaggtaatatattttccaaaaattattatactaaataatattgatataatattggtattagacagcactcaaaaaaaaattataaaaataattttatatttttttaaaaaatagtctttaatctatttttcaggtatgaaactaaaaatgtaaaaaaaaaaatcaatttaacttaaaatataaaaaattaaaaaaagagtgctcagtgctctatctaaatatccccacaaaaattctgtaatgtcacaaaattgaaaacttatatgataattcaactaataaatttcaaaaaatggcaaaaaaaaaaaaaaaaactcaccggaaccggagcagaggaaatggacaaatacccagcactagaagagttggaactcgacggaaaataaccagagctaatcggagagtacccaccggaaccagaaccggagctatttcccgaggaagaagaagtactactactcttagtaatcccaagtgaataaacgggagtcccatcaggtttaaacagtccataattcctctccgaagtcggaccaggtttcatattctcattaaacaaagcaaaaacataaatattaagatcacaacttggtctcatgggagttccttttttctgactaataatcttcaaaagattcccattatactttttagcattttccggcgtagctccggcttcatcttcatcacctttagaaggccaacccgtttcagaaatatgtacggacaatttcttatacccaacagccgttagagcagagtaaactgcatcgatctgagcaaacaacatgttatcataatgaagattggtatcaggatcaacaatcccctgattcgattggaaaagaacgaattctaatgggatttgttttgggtcacctttgtaagcgaaatatgggtaagcattgattaaaaatggcgaatttattttaacatgaaagtttaagatcggagtaatgaccggaataagatctttacggaatattccggcggatggtgggtacgaggattctaatacggctaaggaatgagttgttgtgactgttacttgtttatcgaggtttagatctgtaacagctgagtgaacactctccattgccggaagtaagttgtttgtgagtgaagaatcgttaaaggtgagaacttcattaccgacaaaaatggctgtgattttagtggccggaagataacattggacatttgatttgacccaatctttagcaaagtttggatcttgaacttttgttaagtactcattgcctaatccgaccatgatttcgattcctgagtttgcgaaagctttaaggactcttgaatctgcgtcgtagagtttgattttggttgctccgagggatttgaccagtggaacgacgtcgtttggggatgggaggttgtttgcgatttggccgtagtttactcccagtgaatttgccggtaatgggataaagatgagaactttgaacagaaaagatgttaattagaaaaacccaaaaacagaaaatggaaaaaagatgagatttttagatacttacttgagattatgaagctgagtttgtgatgaagatccatttttttaattctcattttgttggttgaaatgaagtttttttggccggagatggaagtaagtgagtggttgaaaggttgaagcttttttcagtttcaggttagagagagaaagaggagagagagagagagtaaatgcactagtgattctttttaaagaaaaaggacaattaagagagagagagagagag

SEQ ID NO: 39524 - DNA, 2425 bp, Cannabis sativa
ttattttattataattaatttattataaatatttttttatttttttaatatataataaataaacaaatatagttttagtacaaaaaaaagttattatagtcttttaatcaaaatatcattttttaaaaattgggttggagcagctttagcttttagctgtaccttctcaaaaaaatttcaaaaaactgtttttcgactgcttaccaaacacattcttatcacagtttttttaaaaagcagcttttggtttttccaaaagttttgccaaacgggccctagcaagaggttgaagtccctcttatttttatttatttttcaaaaataaatatttatagaacattgaaattttattaataaataaaattaacccctctctaaaaatttgataaaacataatcataaaaatgaaaattttcaacattgcattaacaattaagacaaactcaacaacaacaatgtcaaattatttgtagtttggaaaatataaaataaaaataagaaaattactttaaccataacaaattaaaattaaagatagtttgagcacaattataatgaattcataattaagctctaatctcttcttattccataattaaaattatcgaagctctgatacttaattaatcactgtcaccaccttctgcttttctctcttctagcttccgaaacttgattccacaagcattacacaaagtctaaaataaataaaaaataaacaaaaattaattagtaattatatatgtatctatatcttagaagaaatattaatacacaataaataattggtaagctatgcacgtgaaaagagcacataattaatcaaattaattgaataacaatccaataataataattaatgatggacaaattcacaacttcataacgtaaatatgaacattaattaatattcaacatactaaataaattaataaaataattaaaatgaaaaataaaataaaaaataaaccttggggccaagaggacctctgcgccacatgggagtagagtgagtaccacagttacggttggagcacctcgtgcgattagcatcacgatcttcctcatcaacctgctcctctatatcaagaccgcgttttctatagttccttcgagtaatagtatcgttgttcaactcttgtacgactactccaagactagtagcgttagcagcaccactatcagcatcgacgacaccagtagaagcagaattagcactaacaatagtagcactacctttaccatcaccgtcaccaataccaaaaacaaagtcaatgccagagccaaagctagagccagagccaacaccgctagtaataggaatactagcattggcaccaacattgccaatgctaacaccatgagcaagagtaggagcaggagcaggagcaacatcagtagtattattactaggaaaaaaactaataaagaaggggacatagtctggttttggttttggtacttgtggttgtggttgtggctacgaaatagagaagagaaaaatacattattgttagtataattattataaggaatattattacgagtataaggagcagtgaaacaatcgtaagaaaaatgagctaataataatactcttcgaccatattataatatataaaaatgcaaattttactatactacaattttgacatgagaagtcgattatgagaggtcagttctgcttaactgacctaacacatatctgtagactggcttacataaaaccgacctgtaatgatatgtctaaagtaaccaaatttacagcgataatactcaaattttttcaactactgtacttttgtaagtaaacttagcagtaacaatacattttgtttatattttgttactactcagatattaaaactttatattaaacattaatatgagagcatatatatatatgaagaaaaatatatttaaaattcgctaaacactagtgaataattttaaaaaaataaaatacttttaactattttttgttagtatttaacgacgagggactaaaatgcacaaatatactaacgaaagaaaatattatcacaaaaacaaaattaaaaggcaaatactttaatatcaaaagaacaagtactttagccgtcaatttctttttattatttttataaaatatacatatttatttgaccgacttcgtctttttatgtgtaatgtataaattatatataattaattttttaccaaaaatgccaaaagttatactatcataaacatacaaatattgctgttttcaaaataaataaataaataaataaatacacatacaaatattgaaccatagacatacctaaaatgagtatatgaataaaatacaaacaaacattaaaatcaaaaaacaactattatggaaatcacaataataaacaagagaacaaaaataattaatatatttcaatattaatatata

SEQ ID NO: 39525 - DNA, 1591 bp, Cannabis sativa
  modified_base (1520)..(1546): a, c, t, g, unknown or other
gtaaaatattcccaacacaagcttacactcttgattacatagaacactctatataccaaatacaaatacactattattatccattgtttcaatctaaacaatcaatgatcctctatagacgatttacatcgagcaaggaaaaatttaccgtttttatctttcaatgtattttatccttaaaacacttaacaatttataaatgatattccagtaaactaatataattactgaatgagtacttcaccatttaaactcgtttagccaagatatacagaaatcatcgtttcacttttaagagtttatagaagctgtaaattctatatttacgattagcgctccactcaattacattaccatgttcccaagatgtaagtatgagctagtcctacaggtaagcaggtaaagaacaagtcaaagaacctgaatagtacaattggcctagaacctaatcatttcaggatttagaccatcaatctaagatcaactaagtgacattgacttagaaaagacattacgataagtttatgataaattttccactattaatatcagttcagttcgatgtataactaatacatctgatacaagcttactttgctaatgccctgaaaaagacattccacttatacaagtgtaagcaaactacatcgctgattatcatgtcagtgtaaatctaatgcactaataaatcatgagaccaatatagtttatatcatatagtcccaattaaatcatgaataataatacgataacgatttactagaatttatatatcaaacatacgatcatgaaagtaacatgtgaaccaagcaatatacgaaataataatgaaatagcatctatttttttttaatgataatgaaattaaattacattaaaattaggtttatttggggcataaaatttcaacaactactagtttaaaatttcattccgtcattcatagtccttcaactagggtttcatctaactactcaaaccgctcaaactgctcgcaccataaaaaaatatcgtttaaaattctttgcggtgcggtcgcggtttgaattttttctaaactgcatggcgtggtacgatgcagtttgtagttttgaattgttaatatgcagttcaaactgcaccgcatcacatattataaaaataaatttttttatatttatttaggtccatatgtgaagactcaacccaaaatctactaattattgtattgttgaaacttgaaactttttttcatatttgttttcaagccttattgtatttttgacaagtgttgctcaaactttgttgtatttatgatactttaattatttggtggtagtccaaaccgcacaaactgcagaaaccgcaccacaacagtttttgtagtttttttagtttcgcggtgaggatgtagtttggaaaatttgaaaaatcacatgcacaggttagtttgaaaaaatagtcaaaaaccacaccacccacaccgcgaacactcctaccttcaactgagcatgaagcacgtgttggaatttattttaccnnnnnnnnnnnnnnnnnnnnnnnnnnntttattaacaccctaaatatgaaccttctaaaacgatgaaataaa

SEQ ID NO: 39526 - DNA, 2259 bp, Cannabis sativa
taaatagattgcatgcttcgtggatctattgcttagtaaagagatttaatattattgagtattttgccttgattaattgtaataaggagattgaaaaaattggccgcttcagcgttttttacaaaattaataatttaattgagaaattagaataatttttattattattgatcttgaatgattgttaaggatggagattgacgcttaactatttttaatagcgtattatctatctttatttgctttctatttatgatatttaatcttaatattaaaagcttcgtttttaattgttcgttataattcttgaataataaattaataatagttctcgtgggttcaacctttatttattattatattgaagtaattggtcatttagaaataaaaaaagaatagctacaaaaatgttaccgaaaaaatattgagttgggcgaaatgacttagtgcagattgcttttctcgatgagttgattctaatggtaaagacagatcgtcaaacgaacaccggaggtgatcaaaaaatgtgttcaaagtttaaagttctaaactttgactcacgatctctccctaacagtgacgaatgaggaggcgccgcttcagagttgacaattctggaggttgggggtctgaatggtgcaacttgtggcttaggtggtggtcggaataaggtcgccggcaataggggtggtggttatagttttttgattgtttgaagaaagagaaagtgtgtgtagtgggtacgggaaagaaattgaataaataaaaaaattatgagtaccacatcctttatttttatcttttttatatttttttttttcgttttttctattcatctacacataattataaatcaattatatttatttaaaatgactttacttatcaaaattaagaatttattttttattacattttaaaaataatttaatctcaataattgatcagtacagattcaattaaattatcttaaattttttaataatataattatccgcattccgcatgttaaatataactaattgaaacagaataaaaaatacacagatgctttcaaaactaataaaatttaagtatttttaattaattgtagtgtagtttactttaagtttagaagaatgacgaataatttcacattttcacataaaaataatcatttgagacgtctaatctctctacacgaatgacacgttcactaattgtttggtgactcaatacctgcttccttaataatagtgatgaaagatacatgttcagcggaaaagattattataggaatttataaagaagaacatatttactataatttattgcaagactctgttttccagagtttgagagcagaggaattgagaggaagaataaaaagatgagaaaggaatgaatatgaatgaattgctctacccaagcaataagaacaaccaaactttataaagaaaatacacagaaaaacaggctcaagttgagctggcaaagctaaacaactaaccataagcaagaagtcaactcagagctaggtggttcacatgatgcaatcccattaaaatttcatttcagtccacccatggccaatgtacggacgaaacaagcacaagagccactactgcaacccagaagctactggcgatggtccaagcgagacttcttcccggagccttctttcgagagcttctcatcatacagagcagccgtctccaacacctgctctcgcctaaaagaccgccttcttcaccgcaccaccgaaaccactgagcttgtccacctccgcagagagagtggtcatgacatgaaccgttgccttacatggtgggacctcatctggctcagcttcggtgccgttgttggcacatccgtattcactatcacaggccaagaagctcacgaccatgccggacccgctattgttctttcctatgctatctcaggcttctctgctatgctctctgttttctgctacaccgaatttgcagtcgaaattcccatcgctggaggctccttctcctatttgaggatcgagttaggggacttcatagccttcactgccgccggtaaccttatattggaagccatcatcggcacagccgcagtgggtcggtcctggtcatcttactttgccagtttgttaacaaacgacactgattatcttcgaattcgggtcaattttttgcctaaaggatttgatctattggacccagttgcgttttttgttattgttctcacgaatgccatagcaataagtgggacgaaaaggacctctgt

SEQ ID NO: 39527 - DNA, 1396 bp, Cannabis sativa
tctgaagctctctctttactacaacacaagtcattaaaacaattaacataatctaaaaataaccattctaattagccataatttgttgggttttatttatatgcaccttccaactattttggcaagtaagtgatgatgggaatcagtgatcaaatcaggatcctggtgctgcttttctcccatataaacaatgtgaacctgtctcataaaatgaaaaatttgaagagtttattataagaaactcagatggaagacttacttcagaaatgatataatttatgaaagatgaatagaaacgaacattgttagtgttggcctccaccaatattgttgtgatcataaggcagtacaataaaagaagcggcagagtagtaaatagtgggaaattcatattcatattgtctctgcttcttctctaaattagagatgtcaaattttcattgttataacacactatttttatatagacaacggtctctggcgaaaagttgaatgttcaatatgaataaagttctagctaattaagagatttgaaaagtcaggcattaatttcagatggactaatgcacattttgattaatcaaaagaaagtatcgtgtaccatttccctaagataataacttttaacggtaaccaatcgtagctactaatataattggtgtccaattatctcatataagtcataagacgacattattcaacttttggtaaaatatgccaatttcctatcctaaaataataataatgggaactttcaaaactcaacttccctctttcttaaagtactcttcagtttttactttattttttaaaatattttataatatatattttttattttatttttgtactaacaattaaataaaatatattgtaaaaataataaaaaattataattaaatactaaaattaaaataacgtttaactacatttaactaaacactatacataaaataaaaatttaaattattttagctcatttattaaatattgactttttttaattcttagctagctattttatatgaattattgtgacatataattgatggacttgttatgcaagtttcagtgttggtttgccgagaccaactctatcttgtaataaaggtcttccttcgtagtactagtctttttattaatagcaattttgccattgattttctccttagtattgttataattaatagacaccatttcaaacaaatatggtgtcacctcatgtaaatagttaataattataaattaaaatatgtagaattcaagtgtatacgtgttttatataaatcaagggaaatttcaatttttgcccttaataatataacctatatcaaaatttatacccctttataatttgtacaaatttattcctataattttaaaagtttcctaaaat

SEQ ID NO: 39528 - DNA, 2554 bp, Cannabis sativa
  modified_base (40)..(60): a, c, t, g, unknown or other
ttttagaagttcatatgtagggtgttaatcaacatacttnnnnnnnnnnnnnnnnnnnnngtaaaataatttccaacattgtcaactaagtgtcaggagaataccaaactcggggagaaaaaatggctgcttatgtggcggttgtcagggaattgctccacaaatttaaaggatacaaagtggagcaagtcctgcaagaaaagaatgctcaggcagattgcttagctaagctagcttcggacggcgagatagaaaggtaaggtggtacctgtcgaacaccttatggaacctagcatcaaaaccaaagagacagtggctactaataagcaagagccgaactagatggaccccatcatcaagtacataacaaaaggagagttgccccaagaaagggctatgttcagaaagctatagtattaggctaatcgatatgtgatgatggacagtgtcttttatcggagggggctcagcatgtcgtacttaaggtgtgagtcagatcctgaaactagacggatcatgcaggaggtccatgaggggttctgtggtgaccacaccggaggtctgagtctctcaaagaaattactgagacaaggatatttttggcctacaatgaagaaggattgtgtacactacgtccttcagtgtgatccatgccaatgattcgcgaacataccaagagctccaccctatgaaattactttgatgactagcccctggcccttcccagtttggggaatagatctcattggctccttaccaatgggaaagggttaggtaaagtatgccacaatagcggtggattattacacaaagtggacagaggctgagcccatgaagaccataacgaccaagaaagccttggattttatgggaaaaaaaacatcgtgtcgatacgggctaccccacaagatagtctcaaacaatggaaagcagtttgaatgcgatgaattcacaaacttctgcaaccaacacagagtaatcaagagtttctctgcggttgcaaggccacaaacaaatggataggcagaggcggtcaataaaatactaaaggtcaccctaaagaaaaaattgttggcctgaagaattggcacgaatgttatgggcctaccggaccaccataaggaccacaaccggatactcctcattctcaattgtgtacgaatgtgaagccatggtacaattataaaccttgatcccgtccacagagaggaccacgtatgatccagtaacgaaccaacccttgttgccagaggtgttggatcaaatagacgagctctgagaggaatctcaaatacggatggcagcgtaccaaagaaaggtagcaaaatacttcaattccaaagtcaaagataagaaatttgccattggggacctagtcctaggaagggtcttcccggccacccaagagccaggagtgcgggtacttgggcaaaattgggaaggagcatacaattgaagatgaaataggctctaggacctataagctaaaaaggatggacggatccacagtacctcgggcctggaatgctaaccacctctgcaagtactatcaatagttaggagaatgttagtttatattctataaaataatctgtgccagacaaatatatgcgatatcctatgcgacttcaagctaagtgatccaaaatacacttttatgtcacttaggggggtagtgaggcataacatacacgcaaaaataggacgaatatataaaaaagaaaataaaatagatataaacttatataagtggtctagaatgtaaatagaaaaaggcctggggccgggccattaaaaatctcccctcacttaaaacacaaaaataaatagaattgtcttaaaagtggggggaaaggcaaaacaaaagaaccaaaagataagaacttaattaatcaatcaatctaaggaggaagacggggacccctacgctcatccaggacaacatccagcttcttgttcttctcccgaaacttagctagaacaaccttgggattggaatagaagggaagacggggctcgaaattgttagctttcgagcacatgaacaccctgtcatcaaaacgcttttcgtaatgctggcaagtgattgaggccagaagggcatccctcttggcctcggtaccctctttatgagtctgatcccagaattcacgaagctcttttagttcaacagtcaaaatggttgttgcctccaaattggtttggtgcagctcctctaaagacttaagcttcgcaataagttcctggatctactccttggagtctcaaagatccctcctagccgaagctatgatgtcatccctggccttcagcacctcctgatggttccgctccatgagggcctctttctcttgggcttcatttcgaatcgcctccttctattcctctgattctcagagcttcttcatcacctcctccatgccatcaaattcagacatggtaaacacatggtcgatcaaagtcttggaaagacaatcgacctcggcaataatcgtgcaaccaacaggaaaaagttagaactgcgaaagtgaaaacgtaaaagaaacttagaaga

SEQ ID NO: 39529 - DNA, 1974 bp, Cannabis sativa
  modified_base (1306)..(1310): a, c, t, g, unknown or other
agtgagtgagtgagtgagtgagattggaagaagaagaggatgatgatgatgacaaagatacgaggcaaaaaagatgcggaggcatacattgaaaagacatggaatcgtttacaaaattgagttcttccatcacagggcaaaggaaactatcatttgtagaaacccacaaagcattgaaaggaaaaagaacagtaagatcaactttacagatattattgttacctactaatcatggattaacttcagtaagacattaaatatggttggtttttcaatagtattagagtgtacagaaaagagtatgaatgcaaatatccagacatgcatgaaacaaaaggacactacacaagtaagacaagtaaaaatccaccaaatgcaacagatgtattactattagaaagccctcagatctcatagctatattggatcattaacaatattaaccacagatttttcatcaaaacccatttacatcttcacacacctcttagaataggtagagagagagagtagaaaagaaagaaagtggtaatggtaatgataatgataatgaggtagcaaagatgtaaaggacaaagatgaaaagcaaggagaatttgtttccaaaaatgagtttttccatcacagggcaagatcactataatacaagctttaacaacagtaaaaacacaactaaagcagaaaacaacctgaaaatgaacagaagctccacactcactttgggctcgtttggaacgcgtattaagtcgtattgtattgtattatattgaattagattatatattatatttttatataatattatgttaaactttaatttatattaaaatattatatatttaggtgtccataaaatttaatactatagttttacatacaaatattgcataaaatacaattcaatataatacaataaaatacaataacacctaataccacgttacaaacgagccctctaagattaagagtgtggattcggatgaagctttctgggctgcatgtccatcaatcaactgctcagagctcactgcattcatcatcatcatctcactctagacactattaaatggttcaaaataagcaatagcaagaatctaaattaatatccattaaagaaaaaatgaaacaaaatatttggagctacacattataaaatatgaaattaaaaataaaatgaaaaagccctcagatctcatagcttgagaagactcgtctgcggaagaagctaatgggtgttcttcagaagccctaacacgcaaccaccgaaccacctttagtaaatatgtatgtatgtgtgtgtatatannnnnatatatgtgtgtgtatatatattgtatgtatgtatgaagaagaagaagaagtagtagtagtagtagtaatagcagtagctaccaaagatggtggcaatggcgagttaaagctggtgaaaaaacacgaaccacgctccctctcattttgatttgagcatttccatcttcggaccaaaaaaaaaaacacgaagaagaagaagatgacgaaacagaacagggagagaatattagggcttgaaatacgtcaaatgtggactactttgggcccaaaactagaatgatgaacagcccatgtacaagtttgaaaaggcccatacataacattttacaacattttacaacttgctaaactaaacatattgtcaacttgttaaagatttgtagcatagagcccattacaaaattggataccttttcaataattatagttagaacttaaaaaggtattttccaaaatttggaagccttttgtataagagaaaaagagataatatttacgtatagaatgaattttgtactataaatttgttttatgtacttttattaaagttttttttttttttttttaagggaaatcgatataggttaaaataacaaaggtaacaaagttatgcaagcagaggaggattttcttccatctataacagttcattgtctatcctaa

SEQ ID NO: 39530 - DNA, 2151 bp, Cannabis sativa
aatagaatgaaaagtgcatgtgtcgttttgttaggaacaaaaagtcgtacttgttggatacggaaatattttgtgtcaaaatcttccactaaaggttattaggctataattttttgtctttgatatatactaaatcatcttttttgaactttaaagaccgtaaaaaacttatcttgaactattgagattgtttgatttaaggatttttggttaactttaataagaaaagtctaacataaatgatagttcaagggcatcatttgacaaatatcaaaattcgaggggtatgatttggtagatatcaaaatttggagaggacaaaattaaataaaattagacaaaagtctttatatttaacaattttaatagtttaagagaatttttaacaattatgagaatataatttgatacatgtaaaaattaggacaaaaatccaaaatagtcaagttcttaatcaatatatgatatatattgcataggaaaaaaaattctaaaaatttcataatgttaatgactaaataaatatataatatttttttttgaaatgggactaaataaataattcaagtatatttaaattaaaccattatggcactgtagcggcatcttttgtattcacatattatacatatgctttgtttttctaatttgttgtttgtcaacactagcttagtatttattgcacatagttctcatgttcaagtggactacatatacgacaaagaaataaaaagagtcaaataaggatagtaataatattattaggatcgaataataactaataatatatagcatggttatatcgatctcgtacataaatttgtatagattatatgtttttgatattaattaatattgaaattttgcaggttgcaaggccagaattgttcaggaaatcgatgaagaagttccacgtgacatggtgggcctactcgtttccgttgagtttgctggcattagctgcaattaagtatgcagaagaagtaaagggagggatagcacacgcattaatggtagttttatcggcactctcagtcttggtgtgtgtggtcttaatagctgtcactgcagttaattcaaacattttgttaccaccatcatcaacttcttctactactagaagtaatactaaaacttcaagtataagtagtactagtagatgtgactcaagatagcaaatacatattatgggtacttactagctaatactaagtagtaacatatttagtataactaattaattaatcttttgttcaaatatttgttcgtaaatatgtataaattttattgggtttgattatgactttattagttattaagatcttgacatcaataatgtagaattttcttttttcttttttttttttctcaaaaagtgttatttcaaagaaacaaaaacggttacgtaaactgagctgtccaattgatttctttctttctttcattctttctttttcgccaactttccacgcacgttcgaaggaaagttcgtagcctttttaagatatatgaaaatgaaataattgatataggctaaaattttggaacattatataataaatccctttaaaagaatgtaccgatatatttctatccgtttaattatttaaaataattttttagttaaattatttttcatagtcatgtaaattataattatttaagacatcctgcaaaattttagaaaatttgaaaaagtttaatacgctaaaaattacgttcaaatactgtgttgtacgctttactattttattttataagcatgtaaaatagactgtttgaacattattttctaaattattctgaatttcttaaaattttatataatatcttaaatagttataacgtacatgaatataaaaaaaaaattaaataaatagaaggtataataatacattcttttcaaaaaaaaatacattttagaatcactctaaaatttatatatgctttcaattaaagtagcaattcatatattttgttttgtttcaaatttcaaatcaatgtgtaacagttaactattaagaatatagggatatgaatttgtcccatgatgtattttcattgtattccgtggtacattagataagtctcagggtacattaaatgattgtcagggtacgtttctactttttaaccctaactacccctaga

SEQ ID NO: 39531 - DNA, 2204 bp, Cannabis sativa
tgtttgcatttcaaagtactttatgtgtgcttggggatcttttctcccagtatacatcttccataccgcatcttaaacttaggtaggggagcattaatgtatgcagagaatggagaccccattgaccggtctagctctatgtcttgcgattttgggctgcctaggcccattatcatgtctctaattttatctaatgatgcttgcacagagggatctaatgcggtggatgtttgtctgaatggccttccttggctgagctggagcccttggctggtcaaaccttgcctgagtaattgttcttggccggttaccccttggctaggtagctggccttggtcggctaatcctaggttgggaaattggctatggtcggccaacactaggctgggtaacctttggctggttgttcacccttggccacctagaatggtttgcgagttaacaggaggttaatcgtaccaattcgttgggtttggcaaatctatctatctaaaatcattgttcaatggcagatcaaagtcacttcagtttttggtccttgagtttatgttgtcctgtgggtttttgctcatcagaggacctagtctgtcaaagataggccttagaataacctattcctgactattctgtggaggaacatcaatatgctgaccggccagaggctgaccgattggtgatgcctttgctccaagaatgcatggctgtcactcaacacctcgttgtgccaggtataggctactcctgccgtatggtttgtttagtaagatataatcgtctttaggcaagggaaggtctgtcctcatgcttgagggacttggttggatagttttcccattgtcaacctgctcgtaggctctacctgaactgttgatgagccttcctttcaaaggatctcttattagatcctttcctcctttagtagttctctcattgaactgccttatcaagtcaccaacctccttgttacggtggttttgctccacctgatgggcctagaggatggcctcctggtcatctatccaccgtagaaattcgcttctctgttgggggaaagcatcacaaccaacaacgcgtggttcttctgtttgggtgacctggcctacaacttttctaagcctgaccagttttatatcctctcccaagtccacatggggctcgccagtaactggttcgccaattccttgccttgtttcccctgtataatactagggaataatccaagttgcactctgtagaggttgttttgtgttgataggaccttttgtttaaagtgttgttggtggatctagtctgggtggcagggctgatcattaggattcaccgggttagtaggatcaatgggagtagtggtattggctagatttcaaggttttctagattgacggtatgagtcaaatcagtgaggcccttgtggtttgaggaactcaaatattgggatcaaccgttataggatcttgagaaagacccaagaaagtggcgggtgttgttctcctagttacaaccatgatgatcgatcaggatgacaaataatgctctcaatgaaagcacataaatattgaccttaaatttggtcaactcacaacaaagctttatttatgactgacaatcacaacttgtaaattgtgaaagtaataataaagttgacacaacagtttatagaggtttggcccccttattgagcgggtaatgacccactccccttttagttgaattaattctagagattataccacacatattacaggattttaccttgtaatttctagctatggctctctttgaatgttacaatggtgagaactaaatgttacagaatctcaacaagtgagatgagagaatagactaagtttctattgactggggaatcacatgagtgagagagatttagagtgctctaggatttcagagatcaaaattcaggtctcttttcactttgcctaatgcctatagttttagggcttacaaatgatcaatctttaagtaagtaaatatcccttaaaaatagagaaaaccactcttttatcatatgttttaggttacaaaaataatatatccctaaaagataggtagataacttggggttgaatctctactttcgtgggttgttggagttgtcttgtaactgaaatcgagttgtgacccatcccgaaagatggctttgaactccaccattcaattgggcttccatttgatgctctttatct

SEQ ID NO: 39532 - DNA, 1900 bp, Cannabis sativa
  modified_base (1839)..(1851): a, c, t, g, unknown or other
ttttttttttttataaaatcacaccaaacatagtatttatttaaatactaaaattttattatagggttaaactataaacaccacacacatgcaagtttcgtttttatacatataaaaaaaaacttatactacatagcatttattaaattactaaaattctattaagatttttcatgaaattttttgatgttgtaattagaatgaataaacaaattatagttgtaataaagctttaaatatttaatgtgggtaaatatgatagtgtggttggaaagtaaccaatctgtgaccaaataataacgctggcatgtttgagttaaaggtcggccgcttgatgagaaatatatgtcccaaaatagaaaggaatgggtaaaataagaaacaaacaaccaaagggaaaacctactcattaatgactttcagtttttttttattttctgttaattatatataaaaatatatatattatttattatatggcctcccactaggtgataggaagaaaaaaacacggactgcaaaacaagggccacaagcttgaaggcttcctctttttctttttttccttttcttgaaaaagatgtaaagaaaagagggtttatttgagaaagaacatttttcttaagtaatttaaggtatctaatactatattgatgtaacacattgtgaatggttaatactttttatattatttattagattaaaaaaataaaatatataattacatataattttaaatattttataggttttaaaattttatttataaaaagtacgatattttgatatttttattatttttatgttatatttttttattttattttgttattatttgtatatttttttaatgttatttttttttactatttttatataatttttgtgttgtgttttatagaaaaatgtaaaaatataaaaaagaaaattgaagtttaaaatgtataaatattatatctaaaataatagtataggtaaattttttaaagagtaatttgtggttaaaccctcccaactattatttcatttatacttaatctttcaacctcaaattttggtggtaaaatcttccaaactgttaaattgttagcaaatttaaggcgtcatccatttatctcagttaattgctgacatagactcactatgtgtaccatcatatacacgtggcacatttatattggtccacctaatataattatttaaaaattataaattttttttgagaatttattttaaaattaaaaacttaatttaaatttataaaattattaacaaataaataaataattttttcttatattttttattatctcctgactctctctctctctctcatcgatctctctttctcactctctctccatgagtcttcttattccttaccaaatctgaaagctcaaatctccttcaagctcttatctccttcccttctcggcggcgactggtccaacagagaccaaactctcttccacgctctccctctccctctgcaactacctctctctccaacagtttccaatgcagaatcaaacccatcagatcagatccctttttctcccatcaccagatcttcctcagagccacgcttttctctcaaccggagtcaaaaaagctcaatctacaaagaaagagaccaccatacactacaagaaatgtcacttttgccagcacatttttgtactgacaaaagttagtattgcgctggtaaaatagaatttacttgtgatgtgttggcaaaaagggactggcaaattaatgttggtattagaacttttgccagcataaaataaaaagtgctggcaaaaattgactttccagcgcgtaaatgtgctggtaaannnnnnnnnnnnnccactgcaaatgtacgctggtaaaactttgacctctttgccagtgcagt

SEQ ID NO: 39533 - DNA, 2658 bp, Cannabis sativa
ctacatccctttcaattggtttacgatggtccaatattctccttagagaccacttacgtatctcaggccattagagtataaatacccattcacagatggagaaatgggttggaaaattattgtaaggataagcacctgaaagcaatacaagacttattcttctctttattgttgtcctcaacattcattcttcttgaggctttataaccttcatcattttttcttcgtgaacactttccataacaaacatgataatttttattttattttatttttttattttccccctatattctccttacttttttttttcttaccaaaattcaacttccaactatagccttaatatattagttcattctcttcctaaataggctagcgatgcttcataccaagacttggtggctggatctacccatagtaatctagctttcttgtttgaactttgcttgtattggctttatcatttatgttcatcttttaatgaagtttctatttatttcaaaaaataattaaaataaaggaacatcttttatcaaataaccagaaacaaacttagggacagaagtaatgttagaaccttttaacaaaagtaatacccaaatacatttattaatttgcatagaaaagaccaacaaaactgaaatggaatacactaattattaacacaactcatgcattgtcattttctcatactattcattaaaatatttgaagaaaagaattaaatttcctacaaactcatgggcgttacgtgtagtcaagaagcatattatatgtaaaaataaaatccttccatttccataattaataacctcaaaaaaccactttgactcgtcttctttcttttgttgactattaatttccatatatacaatacaaacaaacatttctctttctccatttgacactaggcgaaacgcatgcacacactttgaatcaaaaacaactatatatatatatacatatatgtatatgcatatacgcagtttctccacactgaaatgggttcctcgaagaaaatggatgaaaattcggaaatacagaaacctgttcgacaaaatgcctcaacaaaaaagcatctcaaccctaaacccgcaaaagaccggcacactaagatcgacggccgagactgcaggatccgcctcccggcgacttgcgcggcgcgtgtgtttcagctaacacgtgagctgggtcacaaaactgaaggccagaccatcgcgtggctgttggagcatgccggtgcatcggttaatgtgacagggacggaggagaaggatggtgtttcaagcgcaaaagatgttcctagtgacaatattgagagtagtttggtaaagaatgagagcagtgggttttcgagggctcaacaagcgccgaatttcgagattgatcatcttttgagcaactttgattttgagatgggtattctgcaaccgctgttgatggccgaagccaaggacgaagagactcgtgagaacatcaccaaaatgtaaacagtccacataataattttccaaactctagaagtgatttttttttttttttaggaaaatctgaacaattaatttgtatgttgggatatgctttgttaaaaaagaattgttatgtgggagtgggatatcttttctaatgactggaggttttattttgtatggtttttgagaaataacattacaaatcacctgtcctatttagtatttttcctatttcactcctgttccgaccaattatgttttgccacatcatttaaaatgccaccaataccaaatagatattgaacaaactaagatgctgctaactcagtttgttttcttttatttattaaaataatcattaatttgaataaagatttttctattgaaaaatggtatatcttaatatataaaagcaatctaaatatgacacatcaatttatttgagagtattttaaggaaaaaaaaaagccttttttatttttatacttttaaatatttgtttttgcatttttacagaattctatataaaaattcttattgcaaatagcgctgcaacttaaatcgcaacaaaaaatcgtatagaaacacaaaccgtaaatttgaaaaaaaaaattaaaaaaaatagtatatgaaataataatatttaagaaaagtagttagttgagttgacacatttaaattagtttaataacactaatttttccatgtgatcttaatttttaattcaagaactttaattctctttctaaagtcaaacgttataataatttttttaaaaggaatatttatttgattagaacacatagtttttcttgagagaaaaaataacacatattttaaaagatttatatatatatatgcagtaaaaatttaaaagactctgaggctaaaaaaataagtaataaatctataaaaaaatgatcatgattttaaaattattgtatcattgtcttatagtcgagattacgttaatttataaccgttttcatcaccgtatctcacttatatattcaaagtcattattatcatcatcatcgtatctcactccactacttataaacaagttacatgggtcgtatttggatttaatttttgagtaaattgcggtataaatacctaatgttttcgattttatacacttaaatacttaatatttatttttggtggcaaaaatacctaatgt

SEQ ID NO: 39534 - DNA, 1660 bp, Cannabis sativa
ggcattgaacacatggactccagatcagcattcaagacccatcagtgggaccctcattaaaggaaaaatgggccaagcccatctggatgttaccttccaagaacgtgttatggttccgccctcgaaaagcctttcgccttcagcaaaccatgcccgaaagacttgtttggtaccacgagatcagagagacaagagaacacattcctagaagacccttccggtttccctttttattcttgcacacaaataaagaaactccagttgtcagatcacgacagagtatcgtattaagattaaaggggaaacttcttataacaaatgttatacaaataattcagattaattaattgtccacaatcagtacacatgataccaaatcaatccaaatccgatctgcctagtcagcagatcgtcttctctatgacctagacttcatgagaaagcacaagtgtattatttattgtaaactccccaatagagggaaatgagtaacctaatgaaatttttaaattaatataaatacctcactaattttatggattaaggattggactctcttgtaaactttactcttgcaaactttgcttatgcaaacttgagaacatacaattttgtgtatttcttaagacatttacaagcaaaagacttattgaataatattaattcgtggactaagacttaacgccccaactacattaaaaaatgtttgtctcattttatactttattttttgattatttattcttcagttctcattatttttattcaatttctaaaaattttggtaaacaagtactgattagttacctttctaaaaaaatattattttagttattagttgactcaaatttatgtttatgttatgtatattaaatagaattatactgtatatgcaaactatttatagtatatgacaattcatgaatttttaaaataaatttaaaagttcctaaaatgtatcttaaacataaactatacagtgacacttaataaaataaactatatgaataactgaaaaaaatctattaatatgttatatacttaatagtaacctttttaacttttcatatttaaattattaatttttttttttagaaaaattattcctaaataatttattttattattttttttttctaacaaaaatatatattttaatatattagattatgtatatataagtaatcaatatacatatttatttaaaactaacttttttatataaaaaaataattaattagtatattattactattattaataactaaaaggtttactgtaaaataatacttagaaaaaaaatattagaaattattttttttttttaattttttcttgtataattaagtatatatgcttatgtgacacgatattttttaatatttattttttttgaaacatttttataattattttaaatttaatgtatatttatttaaaattccctttttaaaatacatgtcgtgcctaccggatcaaaccggccattacagcttagctatctggaatgaaaaaaaaaataataataataaaaaaagaaagaataaccttattgttataggcataaatttaccctccccgcaaaaaagacttgtctatagaaaactcgctgtattgaaggtggctcgcaatattatagtactcgcagtaccgaaagaaa

SEQ ID NO: 39535 - DNA, 1440 bp, Cannabis sativa
  modified_base (26)..(29): a, c, t, g, unknown or other
ctagtgcttgggttccccgaaccagnnnnaataacatctactaaatccaaaagattcgtactacaatctccaattcacacttaggaatttaatacaatctttacagcaattagtaatgaattaccaacaacaaccaagattcttgattgtatgcacacaatcccttgtgctgcagctaagttcgtcttcgacacttctcttcaacctgaaatttcttcagatgtgatgtcgaagatgatactaaactcccttcagtcagaactcagtgatactaggctttgatctttttgctatagaacttcatctccaagctatggaatcaaacctgaaaaacaatcaacgagcaatacaaaataccacacaaactctcacgatataatagaactaacccaaaaatatcaattagctaactcactcatttacagacgaaattagctatttataggcaatagttcaaccgacctaataaacaaataaaccaactgttaaaacataacagacccacacagactttaacagaaagctggtaggcagttatatcagattagaaacaccagatacgactggacttactattaatataatctgtcaaaataatgacacttacacactttgtgaaatgaaaactactgtatatatatatgtgtgtgtagagtagaagtacatagagagtagggtagaatctaattatgtatatatatgtgtgtagagtggcgctttggctcatttatttctcacttaatgtatagtatagagtggaaactctagtaagaattttaatagcatgtagagtgtgagttaattgaatatatatatatatatgcatcttttttttagattgaaaaagtccttttgtgtagggtggaacatgtttcaattttttttttatgtaggccgaaagtagattatataatatttttctcactcatatgtagtgtagattgaaatcttgtatttcatttgcttaagtattgtagatcgaaatgttgtgggtcattatctaagtagtatagatcaaaatattgtaggccatttatctaagtagtgtagactgaaagtagcgtataatttgatgagtgattcacatatgtatgttctttttgcctctttgcatgagtttatttgttgctcacttgtgatgtaggtagtaggaaattatccttttacctttggattagtgttgtgtagactgaagcaaaggggtgtagcctggaagctgctgctttcattttcttgctcgtagtttgatcatctagtaagatctagccacatggaggtaggtaactcacctttggaccctatataagaggagacatttttactttaatacttgggtaaaggggaggaggtaaagggagcataggagagcaaggaagagctaagaattctaaggtaatttctatctattttttattttttctccttaaagtgttcttggtg

SEQ ID NO: 39536 - DNA, 1625 bp, Cannabis sativa
  modified_base (945)..(958): a, c, t, g, unknown or other
tggtttttaaccatgtgaaaaattccaaaggtagtttttgacctgaggcatatgtatgtattcaattatacatttaatacaaggttgatatttttgtgtcttgtttatttgttcattccattataaccaattactatcacaaaatattccaaaagtgaagagtgaaactccagatggaaaaatagagagaatatctgttagacagagagaaaaagagagttcttacaaaattgtgagaaatattttgtaaaaatggtgaaactaccacaccagtaaatgagggttttgagtgcattcctcaaatatttgacaaaatttgagaatataatattatgtgcctattattattatcatagtggaaaatttagggtagtttttatttttcacatgatcattttttggtgtgaaagatttaccgtggtttttattgtcacagatttactgtaattttttttgtgtttctcttttctcaaattctcatggtatgctttgtattttattacaagttatataaatacttagtagttaaatgagaagaagattatatattaattaggatatatataaaaccaaatcattaactagtttttactgtcttggagcaaagaactgagtttaatttggttttatatatcacctaattaatataatatcttcttttatttcaagctataattgaaggtcttgtaccaaaaaaattaattggatttttttatatgaaatcatttatgtttttttaatatataatagtaaaatttttaaatttagtattttgaaaatataattgagtcttttttttaacaaaatattaaatgtaacatcttaaaaaataaattgagtattttttttaaaaaataatatattttttaataaattatagtaaaataaaaaaaattatattttaaaaaattaaatttaaaatgtactaaatcatgccccttgaannnnnnnnnnnnnnagaattttttttactaaaattagaaaaaattccttaaatctaaccatctcaatagttcagggagaatttttaacggccaaaaaagttaggggacatgatttagtacatgttaaagttcagaagaaaaaattactaattaaccttatggataaaataattgaatttaaaaactaattgtagataatcccattgataaagttacattaataattattgtattagcatattaccaatatgttagtaaaaataaatattcaagtaaaacattttcttttgcaagcaattattaaagtacttaatggtcattaatgggagatgcccactcaaaattaaacctaattaatggaagatgagatggttataaaaggaagcttgacaactatacaattggacccctacagaaatgtcaatatatacagaattatatagcacttaaatctttgtagaaagatccattcaaataaagaaatctttgtagaaagataaaaaaaataatcgtgagaagttaaaagggatttaatcaataatttttacaaaatacacgattcaaaataatatttattttatattttattttgtaaagtaccctacattaacctcatacaccttatcccactatgaaaaataacacttttgcataggtattgtaaacaataaacattgatag

SEQ ID NO: 39537 - DNA, 1973 bp, Cannabis sativa
tgctagttagggtgttacactaatgctccatggatcccaagcaagttagtgaactcttccacgatgcggtccaaatagcaagtgatgacatcacattctccctcaacccgggtgaagtcgatgagcctcaagaatcaaaccaggttctcatagggaaaatactcagccggtataagctaggcaaagtagctatacaaggctctttgcggttgtcttggagtgccattaagggatggaagtggaaagaaatcgaagatggactcatgaaattcatgtttgccaatagaagtgatgccatgaatgtcctggcacgaaggccttggtttgtttgtgggtcactcatggttataatgccttggccatcttggctaactccttctgaaattagatttgacaaaacaccaatgtgggtgaggatagaaagcatcccaccattttattggaatctctctaacctcaaagagctagcttcaagggcatcaccagtctatgaactgcctcaaggcattgaggatgctattgggatgagcaatttaaagtgatgagccaccatagaccttaacaaaccagttttctctggtttcttccttcggcggcaaagactcaaggatctatggatccaatacaagtatgaaagacttccaaaaatgtgcttcaaatgtggactcctcactcacgatcaaagcatttgcttcaaacctcccacagtggttaaagatgacaaaggaaacttctacccaatgtatgggatttggcttaaggcagatgccaaggagaagtcgacttttaccacccctcttgccaaatggttccaagattgggtctttcaaaagcagttgttcctagaccctacccttcatggtgagttggatgaactcagggagaatcgcaaacaactcccatctaagaaacgcatagtttccgacgaagaacacgatcaggagtctccactccaaggagcggttattacccaaatccctctagtttacctaccgggcattggggaagttgccccttttggcaataactcaaaaacagtttcgctcctagacatgcaagaactcaaagaggccgcttcagggtgtacggggaaaaggcccaatcgcaactcttcttctgcactcaacacaaacacaggggaggcacgccagatgagtccaaaggccaatagagcgcagatagtgacccctgaggaacttcccatctcaggcaagcaggaaatagccgttggtgataccagtcaaaccaattcccatttggagaaggaggaatcatcgtatgcatccaccacacctgcctttgggggtcataagacagcaaatgaacaaggaaacccttgtactaagcccacgtccccatctattccctatagctcatctatattgggttctcaagcccatataatggaatgcccttctaaggagtgttgggcccaacccaaagcccgtgaactttttaagggtggcctcacagttgacaagttttttcgtgagcccactttatttaatcctctattgggcattgatgacttcagagtgtatgaacatctccaaggcccacgaaaaaggaaagccatggatggcatcctcttcaacacctcccctgaagctaaaatcctcacatcaaccacttcggatactaattccactttccatcaccaagcctcaatctcaatcccacaccctcactctgaggacctaaagctcccatctctcaatgaaggtttcacgaatggacaagggacctccagtggtacggtcaggaggcgtggtaggccgagaaagagtgggagccctgctacaatggataactattctccaaggagaaggggaagaccaccaaaagctcaccatagcctctcggccacacctaaatcttttaagttgagaaaaacacccatgaagatggcaccagagtccacgtccatgcaactccacaaggatggaaagctgtttgacttgaaggtggatttg

SEQ ID NO: 39538 - DNA, 1991 bp, Cannabis sativa
  modified_base (42)..(43): a, c, t, g, unknown or other
ttaataaatatgataaatgacaacattatttaataattattnntagttattaaatagttagaatggctccttatgagcgtaccccatgtacatcgcataaaacccaagggctatgcaatagctgtttcgggttaattgaaagggggatacgtcatattgcttaagaatagcaacgatgaataggtgaaaaggaagagataccccacagcagagaatgggtatagaaacaacaacattctctgtaggtattatcgcagggttggtgaaaggtagatgcggtctgtgggtaggacgaggatgcatggtgctgaggcgtagcaggtttaggcttgtaaaagcagtttggtcggacttggtgactcgcgaaactgagtcttcacatatggctcgtccagttgagtgttgtccaacgagtcagtcccactcccttctgcgtcctccccttcctctgactcgcggttcggagcctcccagtcctcacccatctcctcaacttcagcatcaggagcatgcctagaatgaacaaggtgttcacgagctgacaccatagactcgctatcacaaatctcgatggttcctggttcagtgagctcctcaaccatcctctctatatctatggacgacaacgggcccagctccgcatctctggcagttggggtctcctcttcagacatcgaggttcggataaagctatcctccttgtcctgggcgccatcgaaagcattgccttcagagccaagcatttggctgtccgaaaaatccctcatgtgaaagatagaagatctgtttagtgtggtgaatgtgcgaagataatacaagtgacctcacccgcataaaaaagtaaattcaagattttcttggagggctaattggaattctcgcaaaaacccaatcatcccaccaaggcgtaaaatcgcaagtgtgcgactagacgaatatttaaaaaaacggctgggagttacccagtgacccaagggacatgggttttcgagcatgaccctgaagttactaggaaacacccacccttttaagaaatctaaccaatcacaacctgcgagcgtgtcacacatatccaactagcggtatatctcaagaaacagttgaggaatctcctatatctcaaagggcatgcctctctcgcataaaccttgggctaacagaaacacctcactatttcgagcaaacctactagtcgaaatacacggttatatgggaacagggaacactggcaaatgtcgcaaatggctgggtgtatcgcagtacctcaaggaacatgcgatcgcacgcatgagcattggaatacggcaacacacccaccatttgaaagacttatccaatattcccacaaaaaaatatacagagaatataaaagccctaagttctaaacaatgggtaaaattgataaagtctctagaaaatcctaaagcaagcagatatgcgagtattcgagatgttcatccaaatactcgcgagtattccagagatgagtaatcaaaaagatgcgaatattcaaagtattcttccttaattgacggttatgcaaattacaggtccgttttttcctgcggattatccaattttaacaaaggagtaaaactctatgtgtattccctacaactaaacgtgcattttcaaacttctcaaagtgtcaaaaacccagaaatgcaattttctgtctcaaaatcagaaaccaaatacgcaagtagtttcgaaactaacctttagttttgacgattctctgtgtggttggttttgatcacttgtgaaacgtaagagattcgagaagaaaaggcaaaaatctgaatgaaggatgtgaaaattcagagaaaaaagaaaaagaggaagttggaaatgagaaaatcatttcgtatcagggggcttaaataccaatacacctcataaattgggattgtgacacgtggcaacaggaatgcctaaggtcattccatccaacggtcagccatgggcatgcctacacaaaaaccgaagag

SEQ ID NO: 39539 - DNA, 1766 bp, Cannabis sativa
actacctcccctactaaagcctgaggtaggaggagtaggagccccaccaacgacctgagtccctcgagactcttggatgcactcaatttcgccctcaactcgtaatgcttttcccaccatgtcagcataagtggtgttattgtcggttgtgatcatcaggtcgtgtttgattttgagattcaatttaattatcactaaaaaaatacaaccgcacgcgaaacgcgatttgtttcctaattaatataatagaagagaataatctaatcccaccttttttttacgatatcaacattatcttcaaggatagttttattactaaagaaataacattacaatattaaacccttaaaacaaagataatgtttaacattactatttccatgctagtattaacttattccaaagattttagggaatagagtaagctattaaagtataaccaatagggcagaaatgcaaatttccgtatctacatagtagggaccaaacttcaagcaatagcaatcagtattgaaagataaaagtcagaaaaaccaaaacaatgagaccaatgtcaaaatccgcagagagagaaaatatatatcatgctggctgaagtctaaagcatataaaggtaaaattgcatctggaagaggtcattctgtctctaaaactaattatgtaagcaaggctcttcttccgtcaacattaagaccctatcaaattactagatcaaagttaatatggtgggatggggggcatcgtaaatttctacaaaaattttattgtccaatcactggcaaccggtacattaggtttgcggattgtgatgaaacttgagctttcctttgatttaaggagtaacggtcccatttcaacttctacgttcctatcttctggttcgatgatggcatttttcggtctagcagagtgtcccaacaatatgatcctctcaataacacattcagaagaaaattgtgctccgccaggagcagatgccacattgtgagatgtaagcttgccgtttgagaaaacaaagcgacggtggatgtaagcaccgttttcaaatgaaaagcttttgccatcgtcgatatagagctctccttcagccttttgggaactattaagagcaattacctacaagaatggcacaagacgatatcaataatctatagatcataggtcaaacaaacaagaactactgaaaaatgtcagtgacagtaaccggcaattcaccataatatccagaaacacatgctctaaacttctttacatctgcctaaacagatgccagagaactgacagtatatgtatctaagtatatattaacaagttctatgtatataaaatttccgtgcaaacatacatgttatttttgctctttttcatttttaattctaaatgtataatacaaaaaataaagttgacttgacgtccaataagtttttagaattttagagacatgctcaagttttaccagagtgtatggatcgtttatcatttgagtagagcttcgtcgcaacctgtccttccgtggtatgattgttcctgctttctggaatgcaggaacactctcttcagaaacatcaagcttatgagtcacacctcccttgtatacagctccagttctcaaatcataccaagattctttcccaggcaaataaacagatgtatgctttgctctctggtagaaggcattgaaaaaacagattttatcaccagaataatattagcggtaagggaatgaaaaaaggggagcatcagcaaagggaatagcggtggaattc

SEQ ID NO: 39540 - DNA, 3395 bp, Cannabis sativa
gtcttatacaagactgaacccccatcaatgttggggaacatagtccctcagactacggtcgggtggaatacgaccgtttgcctggtcttcaatgacacctctgttattaccgttattgctgccattattaccgccattaacattatcagccatgacttcttctgtttcagctcttgctgcacttctttcttgccgtttgtttcttctacaagtcttttcaattttaggatgaaccggcagtattacactttgtccttgacgtcgcatgcacctttaattcctgaaaaataataagataatttgaaagaaactggttaggaattagcagaaagaattaaccaaagtagaatttaatctaatcttatgtaatatcaacttttaattaaacaattctccagcaatggcgccaaaaacttgttgttaattttaatacgcaagtgcacgtatcgttgttcaagtaataaactcacacgagtgagttcgaaccacaggaaattgaactgaatatcactaaattagacttatgattctatttggtagacaaacaattttcgatagagtttaaaataaaaaaaaattaaagagagcaaggtgtttaatcaaggatgaaaattagggaaacgaatcatgttgtttcaattacccaattgtttaatgcctaattatttctttctttatgtgaatgacagatcataaaattaacctaactcttcttagatcttttaggtcctagatcatatgctatctattgcatctctgagatatactaacatacaatttgtaagcaataatctcaatgtcgacacataggccatgcaaatactttcgtttcacaacaaaacctagtttatttaattttagcattctcaatactcactgtttagattttgtattgagatcataaagcatgtataaggcgatcaatctcaaacatggaattaagtacaaacatgaataaatacacaatcaagaaagaaaaaatagcaattaacattaagtcatggcataaaatcaatcaacatgcatcatctccttaaattagagtttagtttataacatccataatcaaatttaaaatagaaattaacatagaaatcaagagtttaagaaagaactagttggtgattgcgctttggatcgccacaatatcttcttctcctccctctttcacttttcgggtccaatttctgatgatttttgttctaaaacgtgagtcccttaaataaaaattagggttgttacctctggatggcgaaaattcaaaactatccaaaattctcgtgttttgcccatagtcgcgactacataaagcctagtcgcgaccataggcaaaataaaaaatccatgctttctgccaaacctcatagccacgaccatagtcgagaccatagaatagggtcgcgactatggatgtggtggtcgcgactactgaaggtttttttgtcagcttcagcagatttatctgcagaatgccccgtcttttcaatattgatagaatttgagctctaatgcctcgaggatctgaaacaaggaaaatcaagcatataaccattccaaaatataaaattaatagagaaaacaactataaaatcaactcagaacttaggctaaaaatagcctaacaccgagcaagggtaagctccccagatgggtcaataggcacccctactggaatggtgatctcactagaaaggagtgcatacgtccactcgcagggcaagtaagatcgttcctagctcccagatatgcctattgtacgcttcaccatctatcacctctcaataaaggtagataggcgtctcaaacccgttactagaccactcatccccagatgagttgtgcagaggcgacacgtgacaatcttcaaacaaaagttgaagaagatcgttgtatactcggtgttcaactccctaataatcgccataatgcatctgtaaaaaaagaaagagaggggagatgagtacacccagtaatgctagtaggctatccatgatggactcacctactagtttgcagatataaaaaaaaaagaggcgaggaaatgaaacatgcataacattcatagtgcacaaccgaaaaattttacaacgaaggaacaaccattcatgtagctaaatggaggaagcaacaatgacaattacacactaaaaatttttactaagtgtgaaaagcaaaaacaagcacatggaagcacatacataagaccacgagaggtaagcaaaaaacaatcatctccaagtcatgaagctgcactacgattgtcacagaaaatcacactccaatcacccatgaaggggtctcggggtagtaaaccccgaccccccatggggtggtctcagggagatacaccccgacccccacatggtggtcacgggggtggtgtaacccccaacctcggtaaaaaaaaaagagagagaaggcatgcttcgaactcggggtgtacctcgagacccccaaatttgggggcaaaccttccatctcggggtgtacctccaccccaactcagtgccacaaaatcggggtgacaacgaacgaacgagacaagccccatctcagggtatggtagcctcagggtgtgtgctaaaataaataaaataataaagggggtgtcatctcgaggtgtaccccgacccccaagtcaaggcctcatgtcggggtgagaccaaagcttggtctcaagtaaccactaagaccctcttcaaggtatacccgttgtgccaacttgaaaaagaggctattaatttgggtttaggggattttgtgagcctcaggtggtgtaccccgacccccaagtggtggtctcggggtaccgcccccgacccaacctcaaacttaaaaaaaataaaaataaaaacttttctcgaggtgtgccttaacccccaaatctcggggtatcccgaaaccacttatgagaacccatctaagggtggtgtgacattcaagcttagggtggatgtataggccatcttaaggaagcgagatgttccaaccaactcaaggtaggcgtaccccgacaccctacaagcatacttggggtgatctcaaagtgtgggggtacatggtggccagaaatccacactccacacacaaagcatagttaaatatttttcccaaggtatatataccatcttcacaaacacactttttttaattttatgagaatcaaaattggaaaaatagaagaaaaatgaattttttttttcatgtcatggtgttcttcaatattcaagaacacaaccaacctaaagtttcaaatttattcattttccaccaaattacactaaatcaaagccaaaaacacattacccaccatttatactacaaaatccaaacattaagggtgtgtttggaagtagtgtaattactaagtagggtaattactagggtggtaataa

SEQ ID NO: 39541 - DNA, 2673 bp, Cannabis sativa
tgggcatattttctataacaaaaaaataaaaaatacacatttaacatcaataaaacctgcaaaaaaaatctaatagaggatgagatgaacagagaaggagggagtaagatcaggagcgacagcgaagttcatgagagagagagagaggggagcagtcgggggttttgatgggttgttgccgtcggagttacggtgggctagggttgggatctttgggtagttggggctgggacaagagagaatggttcaaagtctctatctcgcgacaattgcgagagcgtttttagggattcgccaaattgcgacgatcgccggagatagcacctggtttggcagatggaggagagagagaaagagagagggaggagacaacttggtttggctgtagatggcaccactcgactggattttcattgatagtagaggggaagagagagaatgtgatagattagatagaaccaaacttataattaattacatacatagacctggggaaatatattattgaaaacataaagtggaatcggtttggaggaagaaactcttatttatttaattttttttttttttgaaaacaataaatgattttaaattatttttttattattttaaattagaatataataatttcaattaaaagagaggttggactagttatatattgatatgtgtcactttaataatcatagtcagcatttaacaaaatagtagtaacggaaatggatagaaacttacatttggtatttaatctgccgaaaaaaatatggtatttaagtgtataaaattgaaaaatacgatgtttatgatgcaaatttccaaaaaaaaaaaatatatgtataaaaagaagttatttatttaattaaaatctgtgtccctttcaaaaaaaaaaattaattaaaatgtgtgagaggtaatgtcaagtgttggagtgcttggtactattggtcgcatttcttattaagaaagcattttgagaagtacagcagtacttgttgtataataaatagtgtacttttacaacacaaaaaaggacgtacgtagttataatgaacagtaacgaatctatgacaaccaacccacaaatgcgtctaccttcatctgtatcgttacatatatatatatatatcccatagttctgaactgatcgaactaaggactggaaaatggcccctacatcagaagtattatttcaatctgccaacgatctctagctaccttctctatttttttttttttaggtgattctaatcagagtgctgaagactaaaaaataccaaagtaatcaaacttccccccgtttgacacgtacgggttttttctttttatcttttaaggtgtttaacacgttttgctgatatatattgaaagaattttatgttggccaaataattgaataacaaaatagaatttaccaaaatattcaattttacgttttgtttttgtatcatgccaaaaataaagtgatttagtgagtataatagggaaatgtatgtaccacacataagttacacataatattgcatctattatgaatagttcaaatatataattcttctatacatatccgattgcatggcacattttccataaaagtgaagatggaatacttctatcaccaaaattgcaaccagtcatggaaaatccaaaacctagtagtactagaacataaaaagcacattaattattccaacaacatgataagataaaaagaacaaacccttaagagctgttctcttacaaattataactacatcaccaatcatcataataaaactagtaaattataaaaacatcaaatgcgctgatattttcacttaataagacactactcttaataataagagattaacggccgtgcgaggaaaaagaaaactaatactatattaattttctctttcttattatatatgccattattggcagggcatatagttaattaattgcttcttcttgatctagcagcagtttctctttgtgcattgaagtatacaatagccacggggagacccagattgttgtcttgagaaaatgtccttgtgttaaaacagtctctcaaagctggtgctctcacagtttgtcttcctctttgcttgaataagatgaatacaaacctatgaatccccaccaccggttttggagcttcataactcacaatttcttttcctgttttcgttttgtatatatatatacacgtacaaagctccattaagatatttattttggtaatataatagtcttatatttatctaaaagatgactaccaaaaaaaaacataatggttcattgtgtcacacacacacatatatatacatatagatatgtatagtgaggacatgaaatactcaccaaatgatacattagttgtacctggaatgtctgtgactatcctggaaagaatatacgtattataattataatatccaatattaatggaaaggatcacatatatatatatacaagaagaggttacaaaaaaaaatgtaaaaatatataatgagtattatttctttaaactaatatatattacaaaccagtgaaggtgttcttttaagtagggatcactagggcttggagcatctggatctaccataatcttcaagaaataagtggaaaaaaaggtaaaataaatatatgttgcttctagagacagtatataaaagttagagaatatat

SEQ ID NO: 39542 - DNA, 1550 bp, Cannabis sativa
  modified_base (734)..(739): a, c, t, g, unknown or other
  modified_base (944)..(948): a, c, t, g, unknown or other
  modified_base (1090)..(1092): a, c, t, g, unknown or other
tggcaagtttttaactatctactctggtctttgcatacaattcagaagtaatatttctcaaaacaaatacaattcttagtggaacctttgattaaaacacatggatatatcaagaaacagcatcactggtagtatgaactcaagaaatagaaactaaaaataaaagcacttagaaggacgcataagttgagaaggattttgaggcaaaaaaaaatttggaccatttctcgatttgtgcgtgtcatccttgcgcaggggccatgctaatcttctctgtatcgttccaattttatcggatgtccccgaagggacaggctatatcactaaggtaagaatatataaagactccaaagaaattgtataggggcaatgtgggacaatataacttggtgaaacggcgaaaataaggaaattgagagagaggcaaagttactgtggattgggcctggcctggaccatgacaaaatctattaacataaaatattggtatatttctaacatattatattcttttaactatatatatggataaaaaaaataagaattactccatatattattcttttaacttttttatttcaaatttacggtttggattttaatgtagtttcttcaatgatttctatgtgggttgctatacgatcttttattgcgatttaggttatagtgcttgttacgatagggagttttatgtagaatttcgtaaaactacaaaaaaaaaaaattgttttgannnnnnaaaataaaaaaacccctaaaaaaactatgtaaattaaaaaaacgagttcaaaaaaaaatattaaaaaaatgaataatacaacataagtattcaaaattttgacttcttaatcggcatgaatttaataagatacatgtaagacctatattttaaagggattatttcacaaatataaaaaaataacaaaaaaaaaattacaaaaatnnnnntcactgaattttaaatatttttacgattttttttattttattcacagaaaatacgatatttttatgttgtactcttgttaatttattattgattttttgttatttgtatgttattttttattgttatttagatgttattttnnngttacttttatgtagttttcttaaaatgtaaaaaaaaaaaatttatttaaatgtaaaaatataattgttttacaaaaaataatgtcttatgtaattattattattttaaatcattgagtttgaatgtgtaatataagttactacaaaatcctctttcaacaaattcaacaaacaagtttatacaaacaaacaatttaagtacttataccgctaaaaattttattaaaattatgtcaattacaaagtcaaatttttaagtgcttatgctacaaatatcaaattatatatttatgaatttaattagtacgccatgatttcatgccaatataattactttcgtaccatacttaactcatatttttctcgtgttgtgtgttgtgaaaaattgtatacgcaagtgcacgtaatcgtaacaagtaataaagtgataaatcgagtatcgtctccacatggattga

SEQ ID NO: 39543 - DNA, 1552 bp, Cannabis sativa
ctctgttacgagcttacacatgaattgatggaaagtctttcttgtatgtatatataaattgtaattaatagtagattcgatctctgactattttctttaattgtgtttctaatccaaaataggaaaaagaaaaacacatctataaatggaaggttttcatgttcattagtaataatgaactgctatgttttgatagtcaagctacccaaaaatatattaaagtttatgtaagatatatttgagtttctatacttaaaaatcctttagggaaattttggtggtgtaccttttaaaaataaaaataattgtaagctatactccattagtattttttatattcaaatagtatatattatatatatttaatacaacacgtaattatctaacaaatttttgaaaaatttaaaataatatatactttaaaaataatgttcaaataattagttacacgcataactctcttataatttatatgtgtaaaataaatagttttaaccttagttttgtattgtaaatttattacaaaaagcaagtttttaccaacacatttttgtgttggtaaaagttgggtattgcggtagaaaataaaattctttttaccaatgcatttttacgctcacaaaagaagtttataaatcagcgttggtactaaaaatgttacacgcgcaaaaagaaaagcgccagtaaaaatgattattattactgatgtactattgcgttaggcagtggcggaactatgttgatggatgctggggccatggcacccctaatttcaactttgtggtttatatacaattaaatgtataatattcttttcagtaaaaaaatatatatggcattaattattgtacatatatttaaaagttaattatttgaagtttttatattattctttctaaaaatttattacttggcaaatttgaataggtcagcaattatttaaattatcttagactagtccattttgttatgtaatataactttaaatactattttttaaatactattgtttgttttatttttttttaaaaataataaaaaataaagattctttttttttttaattttaattttaagtatttaaaacaaatcaaaaccaaaaattactactatataattataagaagaaatacgaaatcttttaggaagaatcaatgagaaattcttaaaggggtattttggtagaccccttatctatttaggtattcacgagagctttttaagtctattttttttttatgatagtgtacattgtagatatttaggatcacttgtaaatttttaaaaattttaaattgtttgtattgtcgaaaataaagttcaaacagttatttactaagtatataagaaaaaatagtcatgattgtaataaaatttttaaaacttatttttgacattgtaaacagtaaactattcaaagttttctaaaaatttaccagtgagcctaagtaactacaacgtacacgatcattaaaaaaatagattgaaaaataatctaaaatgtcgaacaaatagagaaccaacaaaaatataagtaggggtgttcatccga

SEQ ID NO: 39544 - DNA, 2140 bp, Cannabis sativa
agtaaagattacttacaaagacgatcttcaagtaacttctgattgttagttccgacatctagcataacagggagtacctgccacacacacacacaacaaaaaaaaaaattaaagaaaaggaaaagggaatagctgcatcactacgatgtccaagaaattatgtgaaaggaacactagtcagaattatatactccatttcataaaacagtgaactaattcaccaagcagtcatgtgtattacgacaaacacttatagaaaacaaacacatagactggagaaaatgaagcagctcaaacacaatgcagcacatactctctgtgggttgaaaccggctgcagcaacatacatatcaagtttcccgataggtattccaatcccctgaacaccaaggtcacccaggccaaggatacggctaccatcagtcaggactatcatgtctacctgcaagataatgagcaaacagaataaactatttcaaaaagataggtagtgatatacatatatatataaatatatatttatatatatatctatatatagtttagctaaaacaggaaacagtggctattcaagatttcttttagaggaagaggaaacgaagctagcatatgatcactgtacctcctgagctggccaattatagatcattgacatcatctcccctttgtccttcgcactgaagtacattccacgtggtcttctaaataaccctgagtaattttgacatactaatcctacagtgggagtgtatataatcggagcaaaatctttgatgttgtcgataaggacctgaagagagaaaggcaccagcatcccattgaataaaataaaagtcatgtaatgtctttaacatttgaaaatgggattttgtaacttactcggtaatataaagtctcatttctgtcatgcagtctatttaagatcctccatttagacaaggaaacaacactgttcttttgaccctgagtatttttctccagcgaccgatacgactccactgacaattaaacaatcatccaaagacattagatagaaaattcaccacacgattattggacaaagtctcatcagaggctaatagtcatgaacaagcaaaacaagtatttataaaaagcaagtatcgggtcatttttgaactcccagcagacacatattgataagcttttacggtttttttaaaagtctaattcaatcttgtaattctgagatacgggcaatgcatatgagtaacagtggatatgtgcaaagatcagatgaaggaaaaaaaaaaaaaaagagtcagtgacacatttgatttcttttaatagttctctaatcagctttaagccttaaattcacaatcttttctatctgctaattgacttttattgggaactgctctgctggtcctaaagaatattctgtttccatttgttgcttcttacgggtaaatcaatttatcttgcaaaactcataaatggtggaaatagagtaccaagcaaagaacaccaactctgcactactaataaggatgtttaatgccttttgtaaaagggatttctagagagatgttctacaagaagtattattatttaaaacggtattgttttgaagtactaccagaacagatgacatcgtcattctcttaaaaatatgttgatgctaaaccttcagatataattttttttttttttggtagaaaaaccttcagatataatgaaaagggtaaagtacagccaaaaatgatgacatcagttaactgtttaaaaatgctgacactaaaccttgtcacaacaactcaacgagtgaagcctacatgaataaacaacaaaacataacggtaaccagttctcacatcacacgccataagttggttattttttaagtaaatattatttggggtagcattttaaaaataaatatttaagcatgcacaattgatcaattagttagaacaatcaaacccctagaagttcaaattaaagagcatggttataggttataggcaaagtctagtaaggagaggaggtctcaagttccccctcccaatgtaaaagaaaaaacacaagtgaaaaaggtaatgcaagaagtagttttcttgttacaaagggattgatacgtagaatatttctcacacaatatgtaaaccatacaacataa

SEQ ID NO: 39545 - DNA, 1741 bp, Cannabis sativa
ttaagaagattcattcagcaaagaagatttctatgtcttgtttaattcaattactttgtactagttgaaatttaactaatgaatcttatctctaagcgtggccccgtagactagtagcaatttacaaatattgttgatacccacgtataaatatcgtgcatttttttaatttcttcaattgtactttttgtacttttattttgttctatcaggtttgacttttgatagagaaaattttgattttattcaaaaaaaatttataacagatccgcattaattaaattatttgttatttcacttgtaatcataaaaatagaattttaattggtattagagcagttcactacttggtgaaatcttatggttatttctgtttaattagttttgtgtaaaatttctttctttgtagaaaatgaaggtggtgatgaaatggagattcttgcaatgaagtttcaaaaatatatgaagaagattgggaataaaaaatttaatgttaagccttctaaacataattcttcttctctgaaaccttttcaaactaataataaggttattcaatgcagagaacgtgagggttttggctacattcaatttgcgtaaataccattaaaaagaacaagaaaagtatgattgctacttgttgtgataattactctgaaagtagtgaagatgaagaaggtcaaagaagtcatgtgggacttgttgctgtaagcactcaaaattcaaagaaaactacctttgtgtccgctagaatgctttcatctaatgttcatgtgttatcttctctaaaatatgttgcatcaagtgctctagttgtttcaatagatatgttacaaccatccggtaaatctaaaggtaagtgttatacccatatttcgagcagtaatatggtgttgacatgtgtaatataactagaatatgaaccataaattatgcaataataaatgcattcagacaactcacctcgagaaatacagttggtagaaatatttaaaactcgccctcttaaagacaatgtcgaggcatgaataataactactgatttatgagaccagcgagacgaacaaagaaagtcaatctcgagatgcacacaatacacaataaaattgtttgaaggatagataatgaattatctaaagagcttgtagctcattgacccatatacacgagagtatgttgaaagactaaatacaacaccttcggaacaattcacctcgcaattttcatgttgtgacaaacatcttgcgtatgcctaactcaatattaatagagaaatgcaaggagtactacatcacatacttagatgctagtttaatacaaagtgtcatacagaattgttacgctgtgaggcagctgaagcacagtcaacatcgatgcctatagataaaattaaaagtgtagttatgggaagttatttgtaattatctcatgtgtgtaaatatgaaacgtgaggatttttcatgtttcatgaatggttacaagtgataagatcccaaaagaataattatcatcctagactcttataaataggcacagaatacaagatacaagagatggccattttggagaaaaggagagaattatatctattattcatcctataaaacaataaattgtattctgtatataattcatcaatccttgaataagatggactcgtaaactatgaagaattaactttaaaaccacgtaaaaatcctcttatcattttgttgacttcgcttttagccaacgacaatga

SEQ ID NO: 39546 - DNA, 2600 bp, Cannabis sativa
agagggaatagatgagtgtacctttgttggctgattttgggatgtggcagggaacacttgctcattgaaaattacatggcgtgcaataaagattcttccttccatactttcacacaaataacctttgtgagatgatgagtacccaagaaaaacacattgttgtgtccgaaattccattttgtgtctgttgtacggtctgaggtgagggtaacatgcacaaccaaagggttttagtattgtgtaatctggtacctgaccaagaagactttcagtaggatttgaatagttgagaacaggagtaggtaacctatttattaggaatacagctgtgtgaaaagcatgccaccagtaagagaagtcgaggccagaatgagcaagtaaagtgagtcccatttctgtgatatgacgatgtttgcgctcagctcttccattttgttcacttgttttgggacaaggatgttgaaagtgaatcccttgatcactaagaaatgtagagaaaggtctatactcccctccccaatcggcttgaactttcttgatgggtagattaaattgtttttctaccatggccttgaacttaacaaacatgtcaagagcttgagacttttgagttaaaggataaatccatgtgtagcggctatcatcaagaaagtgaatgtagtaaaagtacccatctttggacttgatgtgagaaggaccccacaaatctgtgtgtatgagctcaaggggttgtgaggctttggaatttgtgctagagaatggttgtttatggcttttgccaagttggcaggcatgacaaaattcgagttgttgggtggtgccactgtgggaaacatgagacaggattttgcgtaatatggtagatgaaaagtgtcctagcctatggtgccaagtgttaatatcagttttgacactagtttgcaaggcaatggggtgataaagagatagttgagcaaaattgtctttattgatatgtattgaattacaggaatcagtattcattacatttggaaattggaaagaagtagaacaattcatagcagtaggtttgtaactagtggacacacttgtctttaagccttctttgtgtgatgggtttgaacattcttctagcacatataagccatctttaagagtccccttgagcaacactgtcccggtttgcttgtccttgacgaagcaacatgttttgtgaaattcaagaaacacaagattgtcattagtgagttgagaaacactaactaaattcttggtcattgcaggaacatgaaggatagattgtaaatttagatgagtatttttactagtaggtaaggtagctaaaccaatgttagagataagaagcttcttaccgtctccaacagctaggccttctgaaccaggataggcaacagcagagtcaagattttcaaggccatttgtgacatgattggtggcgccagtatcaacaaaccatcctgagtcatctccgaaatcaggaatgaaggaagtggcaaaggcttgaggatcataatcaaattcatgttcagccatgtaagcacggggaggattattgttattagtggcagatgaattattggatccttgtttgggggtaacccagtttctgtcataacgatagtggcatactggtgcggtatgaccataccgaagacatagttgacacaaaggacgactttgtgaagtaggaccacgatagttgcctctgcctccaggtttggacatttgaggaggacgataagtgttgttcctaggaccagtgaaggcaacattggcttgaagtttcattgtgtggtctgtgacagaggagtgatgttctagccgactttcatgggagagtaacaaggcttgaacttcttcaaaggaaagaacatcacttcttgctgtgatcccagacacgactggatcatactcaggtccaagaccattaagcaactggaggatgagatcttgatcgtcaatttgagaacctacaacagcaagagaatcagcaataaactggatcttgtcaacataatcggagatggtttggctgccttttcgaattgtagaaaactgattcttgagttgaagcaaccgtgctttagattgacttgagaacttttgttcaagagcacgctagaccgaatgggaggaggaaaagcttgcaacggaggcaagaactccttcggtcatggaagatcgtagccaagacaacaagagctgatccttgcgtttccatcgggtgtattcaggatttggttctccattgactaatcgctgcagaggtggagtaccagcaagcaagatcttgtccagttcatgtccaataacagtggggatcacctgagatttccaagaaggaagttagttctatcaagtttaacagttgaacaaaggttaaagagtttgagaaggggttccagttggagtgcagctggggtggattcggattggcagcagccgtcgaggttctgggagctggagcaggatcggaagatgtggactccatgaacgacgttagtctagggcgactgataccatgtgagatcttcagagtatgaagaaaagaagaaacagaaaaaagcagagtatgcaagagagagagtaaacccagaaca

SEQ ID NO: 39547 - DNA, 1289 bp, Cannabis sativa
aatatataaagatatattttaaaatttttagttttgtgtttcaattttttttaattattattttaggtcttatatctttgtttaaactttttagttagttgtaaaaaacttatttttgtgattaattctaaatatctaattatcattatcaaaatattattaaaattctaattttatcttatgtagagaaagaaaattaaaataattatagagcatagattttgtttattatactctcactttaatattaatattcaataataatactataacatttaaaataataatattgtattagagtcaataattttgtaagatgagatttcaactactctctttcaaaattaaagtattttcgatgcgtttcatttggatcatttgtattgtcaactctatctatcttcaaatgctataccttttaaactttcactatccataaatttatatataaatatttgtaaatagattatagatatatgataatgattactagttttaaaatgaaaaattatactttttatttttttttatttttaggaaaagttacttgttattataaattaaacaggaatgtcatttacaataacagagtaaaaagttagaggtaaatcgtctaaccaagagcaagtctcatccacccctaaagcaaacttagctaaacagtgagcaaccatattggctgagcgtttagcatggacaacattcacttgtgggagaaaggaaagaagactagaaacatcaagtaaaatatcacgataggaagaaattgcaatagatccatattgcaaggcgttagcaactagaagcgcatcagtctccacaattgcaattggtaattgcagctgaataacccaattacggctatgaaacatagcctttgcttccatttcatgagatgcaaaattaccgataattggtttcgccaatgcagcaagaacacgaccagctgaattacgaacaacagccccaactccaataatatttcggttagcatcaagggtggcatccacattcagtttcagatccaaaccagttggcggagtccattttgtagcagctggtgctggtgcaggaagtgtagtagtgttggttgctgcagcatgatatttccctgttgctgttcgaaagttagataagtaattgacagcaaaagaggcaagtattggtgctggttttgcagaagagccatgaaccactcgatttctttctgtccaaattgaccaaagtgtgcaaataatttgttccatctcttgtttgttataaattgtagagagatgtaccaaatagtc

SEQ ID NO: 39548 - DNA, 1954 bp, Cannabis sativa
aaaaaaaatataaccttaaataattttttaaaaagtattcctaatcagacatatcaaaggtccggttaaaagtggaggagaagagaggaggtccggttcaaactcatcaaaggtcttcttttcactctccaacaaatcattcccttggttaatcgatgaaacatttaccccagggagattcaatttccattaatcagagaaaagatattgctggcagtccctcctctaagaacaatcatgaagacaataatggagaaaggatgattccattgatcaatactggaagtcccatattaacacaagaagataagggtaagtccatcattacagaagccactggatgtaatttaaaaggtcaacatctttattctaaagagaatggtaatcttgggagccgattgaatatgacaaagatgaatgaaagtagctatgaagcccaaagaagtggtatatggagtaaggtggagccgaacattactgggaataagcataaattatctgaaacagcagttctttcaactgatcaacaatctttgcttgttataccacaattgaatcaagaatatctttttgatgtgcctattgaatttgttaataaccaggaagttttcaagaggcaggaagggcaatccaaacgaagaaaagtggtacctaaaagaaacaagaataaagaataagaagggaaattgctatattgagacaactttgagggactctgcagtggaagggacgacggaggatgctaaggaaatttcagttattaatgatttgaccttagcaatgaacattgaagcggcgcactcagcaaggctgggtcgccgagagccatgaatgccttattttggaatgtccaaggacttgggaacccttggactctaaactctcttaaatcccacgttaaggattatcatcccgggatgatattcttgtctgaaacttggctaactagtgctcgtatggagtttgttcaaattcaacttggttttgatggctgttttacagtggatgctaagggcaaaagtggtggcttggctctactttggtcccatgattatagagttcagataaagtcatttacgatctctcacattgacacccttgttgaaaataatctcggttttacttggagattcacaggcttttatggcagccctgatccgggaggaagagtggaaagttggaagcttttaaatcgcctcaaaaacatgttctatggtgcgtgggtttgcggtggagactttaacgagatcacaaacagcaaagagaaacaaggaggaggccccaaaccagattatttaatgaagaactttcgattggccatatctaattgtctccttaaagaaataaaaactgatgatgatgggttcacttggtgcaatggtcggacagcgaacttagtttttgaaaaacttgatcgaattctttgcaactcagattggaataagaaattcaaaaagaacaaggtgacactcctaaattgtggaattcggatcatagacccttacttttacaagctcactttgagaataaagatgaggctttcactaaaaaatggggcactagattccatttcgaacaagcatgggctgaaactgaagaatgccacaagattattgaggaggtttggagggaagcggatacaattcagccgatcacaaagcttactcgaaagattaataggtgtggtgagaaacttaaatcctggaatactcagtagaaaaaagtctcggctgctagaactaaagatataaaagatcaacttggaagcttagcaaattcagttaaagtggaagattggatagttaaaaaccgtcttgaacaagacctcaattgtttggaagcaaaacgtgaaatgtattggaagcaacgaagtcgggcactttggttaaaacacggggataaaaataccaagtactttcactttaaagcttctaatagacgaaagaagaataca

SEQ ID NO: 39549 - DNA, 1848 bp, Cannabis sativa
gacgatattgggacatgtttcgtgacgagattcacacatgttggaagtgaacctgctatagctcgccacagaaaattcaacactttcggaggtatcttcaaatgccagaatttgcgccaaaaaccagagttgtttggtcttgaagttgctggtttttggttctgtagaagttgatatgcacttttaacagtaaagttacccgtgttgtctgcagtccaagaccagcagtcgggtctggcagtggagcccagggggatgtcgaggattaaagctgcttcttgtggggagaataagtctcttactacttcatcatcccagcacatcatatcagtttttaaaagagagcttactgtatgtgtatgaagcccaggatgagtagaagtgacaactttgctacttgttgatggaagccaaggataatcaagtattgtagtgctcttaccatctccaataacacgaagagcacctagccgcaccaaatctttggcaccccatatacttcgccatacataacttgggttattcccaagatcagacaaaagaaagtcagaattagggaaataccttgctttgtaaactcggccagcaagggaattaggcttacaaagtaatcgccaaccttgtttggcaagcatggcaagattgaagtcatgtagatgtctaaatcccattccaccttcatctttaggagttgctaagcgatcccacgacatccagataatacctcgtcctgaactagaatttgttttccaccaaaaactggccatcaatttttcaagctcattacaagtaccaagtggaataagaaaaacactcatagcatatgtgggcaacgattgaacaactgttttgagtaagatttcttttccagcacgagaaagaaacttaccatcccagctattaatacgagctatgactttatttttgatgaaaccaagcactgcatttttgttgcggcctatgatgtttggaagccctagatagagacttccttcaagggcttcagtcatatggagagtagcacaaatcagactgcgcattgcagtgtcagtgttggggctgaaaaagatagaagactttgtgtagttgactttctgaccagatgcattttcgaatagctgcaagagagtggatatactatctgctgcactttgtgtggcttggcaaaacaagtagctgtcatccgcgaaaaacatatgagttatagaaggtgcccgttgggcaacacggcaaccttgaatgagtctatttgcttcaaatttttggataagagctgagagaccttcagcacaggatgataaatagataggtaagaaaagaggatctccctgacgaatgcctctggaaggagagatagaatcaattacatgcccattatgaacaactttgtattgaactgtggatacacaacccatgatgagatcaatccatttactagcaaagcccatacgagtcataatcgcttttagaaatctccactctactcgatcataagctttactcatatcaagtttaagcgccataaagccttttttacctcttcttttccgttttaagtaatgcatgacctcaaaagctaccatgatgttgtccgagatgagacggccagggataaaagcactttgggtttcagaaatgatgctatcaatcatatctcgcatacggttcgccaaaactttcgatatgaccttataaaggacattacacaaagctattggtctgaggtcactcataacagtgaagtttttcttctttgggatcaaaactagattggtggcattaagaccctcaggcataatctcagtatcaaaatattccttgacagttttgataacatcagtaccaata

SEQ ID NO: 39550 - DNA, 1461 bp, Cannabis sativa
gtgctcaatagtatagtattgtaatcatattaattagtatagtatattttaaattatatggacatagaatcccaaccttgacccagaccccacactcgcaacctgacccaaatctcagacctagacccataacccgacccaaatcccaggactcctgacttagaacctgaccccgacccgcaccacagtatcgacccaagtcttggcacagaccctatcttggaccctgacccgaatcctagtcccgaactagatcgactttggtctggacccagaccctagaccctgactcgaacctagatttcaaacccaacaatgactttggaccaaccttaattacttggatcctagatcccaaacccgaactcaaactcaaaaacttggcctggtgccaaacccgggcctaagcttcgacttggtccatgaccaggtctctaacccaaaacccaatttctgctcatcctgagctggacctagactctatcctcgaccttgaccccaacctagacttaggacccccactcggacttggattgaacctcgacctggaccctcgaccctgactcccagccaaacccaggctcgtcttgaactttaccatacataatataacttaagtacgttcttatatattataatattatataataatacatgttatattataataaaatttatgattattacaatacaaaattaacccaatcttaatacgctacttatttaatacaatacaaacgaaccctaacccttagtaagagatacatactataattattatatattaagacagaataataagattaataaactattcatttattaatttttcttgcttgtaatatatgtaacttgatcatctctgcgtataaaccacgtagtgcacacgtaccactccggtcttatgaccaaactaattaattaattaaaatgccatgatataaatatacataaacacacagtactatatattagtttataagtaggggaaaattaatgctatatcaccgactattaattcatatatatcatccatcataaaacaaaacaaatctgattattgagcccttttctttctcatacatctacttaacaaatttaatttgttttgttttgttttgtttgtttctatagtaaaggactcgttgacctaagtatttctggctccattaaattaagcactcctttctctattctcaatctttcttttcttccctctcatatctcttcatcttcttcttattccaaatttccaatatatagtagtataaatacatatatgcttggatgtccaggtaattaactacatatatattcatttaaaattatatacctttttgttttggattcttattctaaagcttgatacaatctatttttctttaattgttaattatatatagtagcagggatgaattggatgaaataggaaagaggatcagaagtagtaatagtactact

SEQ ID NO: 39551 - DNA, 2045 bp, Cannabis sativa
tgttctgcaaatagcctataatttggggatcgataataattttgacatagattaagtgtgacttttttgccgtaaaagacttaaaaaccctcggtgtaggtctttttcaggtatcactgagttcgggttttgggttttagctccgtcggaagagagaagaagaaggaagatggggagaagaatactgaatgaagcactcagatcaatggtgaatgccgagaagagagggaaatccatggtggagttgaagcctatctccactgtaatgtcttctttcctcaatatcatgaaaaatcgaggtaaaaccctttatgtagtttttttctttcttcaactattgctgaaagatttcccattgtttaattgtatcggtatctcgatttggatttggatactcgatgattttgtgtgcataaattttgttgttttgcaaattacaagatgaataacaacaggacgaaaatttcaacaaattagccttttgtatatctgaacatagccattactttctatcagttggtttagtaatgggattagaagggggtgcatattttcttaacttcaaatgaatgatctggaaaaccctttttatgacactagcggctggattgatcatattgatttttcttcttcttgagtgaattaatgccactcttagaaggttggtaattggacttggaaattggtagctgggttaagcctgaatagtaattctcaagagtttttgcagaaatagatttgattatgaactatgaagagcttatagttttcttatttgattgagttgttttgcaatgcaactttagatatctaatggggttcactatctgtcaagtacgcattgccagcccgatgtgtttaggggccgggtgtgtggtgcaggaaattttgctgcttttcttggtaacaaagcttgtccttgttgtgctgattctttgagaacctatgactctcatcatttgctatatctgtttaatatgatctcggaattacttgacagcatgtctttgaaatctttatgaaattattgatattttattaaaatgcatgaataggttatgttttgaaacttgaagctctttgcattcacctgttcaattactagttttaaatttgagaaaaggctttgctgcaggcttggatgctttgtctttcacttcatttttttttttatcagaataatccttttgataagagtaatgcttgtttgttagtttgttgttgtatctaacagcgtccctaactcacattttaatttataggctatattaaggattttcaagtttatgatccacatagagtggggaagataacagttcaactacaggggaggattaatgattgtaaagcacttactcacaggcaggacatcaaggctatcgaaattgaggagtacaaaacacgtactcttccaacgcgacaggtttgtagacctgttacatatggcatgtctgatatgatttaacctagcttgtttcttttccttgctgaaagatacttgttttcatggtttagcttagtttgtttcatttcctgttggaaagagaatgttaaggatacaagtcatactgccagtgtttgttttggttacaatttgattacaaagttcaaagaattggaaccctttaactcacttggcatctctttcttccttacagtggggttatgtcgtgattacaactccagatggcgttttggatcatgaagaggctcttagacgcaacgttggcggtcaagttctgggatattttcactaatcaacattgtatgtatgacagttttcaccggcaaaagggtgttatggtcataagataattagggacataaattcatttttcctcaactgaaacaggccaagtttaagtttgtattaccttctataatgtcttggtcggtattgctgcatgaagtgttttctctagttaaattgaggacatgggacgttttaatcagcatccaaacttgttgttacccctttccttgtgtagaaatagtttttgatctgcatctaaatctgatcccaaaggacaggatcattttacaga

SEQ ID NO: 39552 - DNA, 1454 bp, Cannabis sativa
aatagtataaggggaacatgggcgtagcccaaatgtcttaagcccaagccgggttctctttctcaagttaagcccgcaattaagcaaaatgccttttccacgccattgtgttgtgtccaaatctaaaaggaaaacttacagaacatttcttctcttttttttttcacccaatttttatgtcccaaatatatttatagaaggtggaaagaaaagagagctaagttgaaccctaaaaatgaataaaataagcaatccacctccttatttgaaaaataataagagtccttcctactcatcccttgattcagtcttccttagtctttttctttttgcatagaagtgtagtctatttgctttcaactatgaaatttcatggttattgtttacattgtacaactctattcacttttaattccttacctaaaacaaatggcattatcctttagataaaacaataaaataaaccaataaatgttattgtattttttttttaattggaaaagactagaaaatgttgattaactggagtgaggtaatctttgcaaaggatgatataaatatatttacgcatatgtagatactgagtgggagtggaccaatgtccacactagtatttgtattagtttgggcaagttataatgtataatgtataatatgttaaaattagaaagaatactggtaactgaaagttattaacatcccaacaattattatgtggaaaacataggtctttactctttacttactacaagaaattttactggtgattataaataaataaattctgactaaatataaattattatttttattttattattaaaaagttttgactaaaagtattaatcacaataaattatgtttttagccacaatgtttcttatgattaaaactaaatttgtaataactttcgtgtaaatactaatttttagtgacaaataatttttgtgatagctaaaagtaatatttaattaatcatacaaaaattatgttataattaaaaaattattactaaaaatattgtaacatttttggtagcgtactcaagtactaaatgcattggcacaacacaaaccaaccatattgagttctaagaaggtgttttgttctcaaatcctatatattttataattccttactaatatttatatgtattaatcagtcaagaaaggcccaataattcattactacagcctcataccgcatggccattaggcctataaatggtccaatttgaatagcacctcaaccatatattccaaaacaaattgcaaaaattgttgattaaaaaatgaattgatgcaaaatatcattattccttttgcctaatgtttaaaagtagaagattttgctgagttatgcatgttgctatatttttaaacactacgcaagtatacgcaatcaagtagtaaatctcacacaggtgaggtcgatcccacagggaattggattaa

SEQ ID NO: 39553 - DNA, 2131 bp, Cannabis sativa
attggatctaaaaaatgaaatccgcacttagtgcggattggatgcactatgagcaaaatagtgcggattggattggattggatgaacacctctagacttaaactatcttagggttataaacatgtgatgtggtttggaaatagaaaatgaaaaataaaaatattttaatatttttattattatcttatagctgaatgaataacaaagtgcaaaatgtgggacaaaaaagttaattaatttttgtatattttattttagttaattatatatagagagagaaagaggttaacctatttcacaatatatatttaaagtttttgttggaagcaaaattgagaaaacgtatagttggcaaccaaaatcaaaatttggaacaacaaaatggagacaagtttgagtaattatgaggtgtaaatggatggaaagagtgtgacatttggggaaatgaaacgctataaaacggttttcatgcaaagttccaaataaaaatatgtactgttatgtatttctaaagactgtctagatagatcagaaaaaagaatctgaatacataatctgggttacacgacttacaccgactttggactactaaacccatcttttcctaaatgaaacaaacttttggttcaacaaaagcatcattaaaaaaaagaggaaattacactgaattttagaagttgtttagttaaatatgacacttttaagtttaactaatttatatggtattttttttttttaattttaagtatttatatagcatttaatataccatatatatacaaataggttttcaaatctcatatttaatgtatgttcaaaaataaaaaaaaaaaaatctcatattttatggctttatttgtttaagtagttttatttgtcattgatgtcagaaaagttagagtttactgttggtgctagaaaaatcaccgaagtagctgctgttggtgttggaaaagtcgtcggagttgctgccgacgctgaaaaagtcgtcggaattggtattgtcgccagaaacatcaccgaaaaatcactaagaaacaggtttcttgatgaagaaaccgattacttgatgaagaaatcggtctcttgatgaagaaaacactttttttggcgatttttctggcgagaatgctaattccgacgactttttcgacaccgacagctacttcgacgacttttcaggcaccgacagcaaactttagaaaattcgtcggaattggcatagtcgctggaaaaaccaccaagaaaccagtttcttggtgaattttttcggtaatattttcaaagacaatgattttgttggcgccggcagcaactcatacaacttttctaacaccggcagctactccaacgaattttctggtaacaacagcaaactccggaaaaattatcggaatagtagaaaatttatgggaaaaattaccaagaaactttcttgatgaagaaaccagtttctttgtgatttttccagcgataataccaattctgatgacttttctagtgccagcagcgactccagcgacttttctagcgccgacagctactccaatgactttttcggtgcctgcagcaaactccggcacttttttcagcattggtgacaactccggcgatcactgtagttttatttgttttatttagaagaaaatatgaagggaattttaatatttttatggtacttcaatcctatatatgttctgttttattttaaataccgtattgtttcctattaaatttttttaccatatttatctaaactaattttatttttcccatatttatatttatgtaaatacccctttaaaaattaacacacagaagaaaaaaaaaattacttaattaacctaaaatataaaattttataagaatacaaatggtgggcccatacgaatggacaatttttaaaatattgttaaattgttttgacgtcgtttttataaaatatatatagtgaaaattttaaaagtacttatgttttatttacaattttataatttaaaatttttaattacaaaaatacttttataaaattttaaaattataaaaatacactttgttcagcaaaaattaataaaaaattaactaaaaaggacgtgaaatcaaccccataactataaatcaactataaaac

SEQ ID NO: 39554 - DNA, 1166 bp, Cannabis sativa
tggataataaaaatagttcgtgtgcgtgtggagtaattctcaatttaaaaaaggcctctgtgattttgtgcatgtaccgagaaaggacttttttttcccttttcatctaatgatgaaacaaaagacatgttcatcatcaatacaaagctaatcttacactcattggagctttctcctttccctaacacagtcgggttgcaaaaagaatccaatgtttctaagttagcatatcctataattttacataaaacacaaaaatccccattcaagacaatactatattcttgtacgaaagcttgcatatgctattgctatatacttggcaccttctcagaaaaaacagattaatacttggtgccaatatcttccctatagcttcccactagaccgaaataagagttgaaacctaaccctccttttgtcataattaaaaattctttgattacgaactttcattttcctaatggtaaaaaatagcttgaaagaagaaaggaatttgtagagaaatttggatttaatatgtacttttttataagtaacgaaaatagtatcattgataacaatttggttgtgaattgatgagttgatctagtattttttttttttttgaaaaaagaggagaggccaaagatttgaccaccctcaagaatagattaaaaccctcactgcatctagtattcatttctactgcatctacttgaatgcaaatattgcttaaatgcttgcaagtaaaattagagaaaaagtagtaattgcagcaaaaaaccatacctaagcttgtgagtagctttagcaaaagcttccggcggatgaattcccacttcatatctatagcattgacaatcaaaccattctttgtaccctccaaatgaacacagtgccagcacctcattttgttgcaaaagctgtcttcgttcccaaaagcattcttattagatttaatttccaacatcaaatccctctcactaaaagtgccagaactatcactttcacaaccaacttgtacgttgctggatatatttttgttctgagaggattgatacttggaacgagtagacctaaaagctttctcaggtattacatcttcatccttcaacagaacttttgttgaattccgtgtccttctacagtttttaacttcgttttttacttttgccccctttcta

SEQ ID NO: 39555 - DNA, 2480 bp, Cannabis sativa
  modified_base (1998)..(2005): a, c, t, g, unknown or other
tttgaatttagatcccttgacagattggtttaagctctttgtgggacctagcctagctccttttcctttggcgatgatgagccattttgctgccgacctgacccaacttcccatgaagagatatgcagcctgtgcttctaccaaccccatgtatcaagtcaaggacatgagcgtggcccttactgcagtaagttctcacctttcgaacttcttatgcctcttttcttttttatacaaggctctaacatttccctgttggctgctagattggtgtagaggtcggtcatcttccaaagactctgatcgaccacaggtttaccatgtccgagtttggtggcacataggaggtgatgaagagtctccgggagtgggaggagcagaagcaagcgattcgggacgaagcccaaaggaaggaggccctcatggagcaaaaccatcgggaggtgttggcggccagggacgagatcattgttacggccaggaaggatctttgagattccaaagaagaagtccaagaactcactgccaagttgcgatcttttgaggagctgtaccaaaatgatttaaatacgacaactagtttaactgtcgaagtgaaggagcttcgtgagttcaagaaacaggtccgcaaggaggtagccaaggcaaaaagggatgccctcctgactcccgtcacttgtcagcactgctccaagcgctttgatgatggagtttttatgtgctggaaggctaataactttgaccttcgtcttcctttttaacacaagtctgaagaagttctggcccgttttgggaaaaaaaacaaaaggcttgatgcggtattggaggagcgtagggatcctcgtcatcctccccaggctaactaagtaatgcttgtttttattttttcttattttgtccttcccctcactcataagacaattctattttctttaaaggggagacttttttatggtccggccccagaactttactgttttttcttttgaacaatttgtgcaacttttgaatttatttagccttttactttcttatattcatcctgttttttgcccatatgttatgccttaataccccctaagtgacatgaaaagaaatttttaggtcatttagcttttaaaaattacataggagattgcatatattttttctggcacaggttattttacagaatataaactatgtttttaactactgatagtattttcggaggtggtcggcattccaggccctaggcattgtggatccatccattctttttagcttataggtgccagagtagatttcatcctcgatttcgtatggctcttcctaatttggcccaagtacccccactctgggttcttgggtggccagaaagaccaatggtaggactagttcgctaatggtgaattttttatctttgaccttggcgttgaagtatttagccacctttcgttgataagctgccatccgtatctgagactcatcccggagctcgtctattttgatccagcgcttcttgtagtaaggctttgtttgttgccagatcatacgttgcccttctatgagatgggagcaaggtttccaccggtaccatagcttcacatctgtacaccattgagaatggggagtgttcggttgtggttcttggagtggtccggtaggcccataatactcgtggcagtttttccggctagttatttttgcaggccagcagctttttctttagggtgacctttattattttgttgacggcctttgtctatccatttgtttacggccttgcaaccgcggagaagcttttgatgactccatgttggttgcagaagtttttgaattcttcacagtcaaactactttccattgtctgagactattttgtgaggcaagccatatcgagacacaatgtttttgataacaaagactaaggctttcttagcagttatgctctttataggctcgacctctgtccattttgtgaagtaatctactgccactatggcatactttacccctnnnnnnnncgttggtaaggatccaatgagatctatcccccacaccgcaaagggccaggggctagtcatcaaggtaatttcgttgggcagggctcttggtatgtttgcaaatctttggcacgaatcacattttaggacatagtctacacaatccttcttcattgttggccaaaaatatccttgtctcaatatttttttcaagagactcggaccttcggtgtggtcttcacagaacccttcatggacctcttgaatgatccgtctagcttcaggttgcgacacacaccttaagtatggcatgctgagccctctccgataaaggaaattgtccatccttacgtatcaatgcgcctgatactgtaacgtcctggatacaaccctttcctgaggcaattctcctttcgttacgtatttaatgatggggtccatccaacttgatccttgctcattagtagctattgtttctttggctttgatgcttggc

SEQ ID NO: 39556 - DNA, 2232 bp, Cannabis sativa
aaagtttgttgagatatatttggtatttatatgaaattttttgtattatatcgaaataataatgataatgtataacttatgttattattgtttatccattttttttcggaaatcgaattaataaaagaataatttaaagaaagaatgattttaaagtacaaaagacaaaattttatgtgattgtggcgttaatgaatattagtacacgagttactaatattgaaattattttactagtattttacacaagtctttcttgccaaattttaataaagtttctagtcaaaattcacaagtctttacatgaagggataaagttttatttataagttaaaatcggaatctcaggtaaaccaaaatttgttagggttttagacatgaaataagcacacaggtgggagaaaatatattgttatattgatattgggttggttaagtgagacccattttgtgagataaccatctttcatataaaacagtacaattaattatggcaagtggacatgccccgtcgagggtgtacagtaaatgtaagggtagttaacgttggaaaaatgtagaagataaacctctaattctataaaatttagcgttaaaacgatgccccacaagacaacacccggacctctctttgaatgcatgtttcagattaccccgtgagagcatttgaatacgtcctattaagtatttctttctttagacgagttgtccttccaagtctaaaatggttcgaccttataaaaataagagctaatttgctgttaaatttggagttgtggttggacttcgtcgttggctgacttcactggcttaattgggcctgtgattaggcttgtttgagttgattttgggaccttaaaagtacatgagtcacatatctagaaagatggataacaattattattttgattaattactcgtaatgtcttgataagttttattaaaaaatatatcaatattaaaatttggaatctaaagtagaaatagttgtatggattagaaattttggctacaatggatgaaaagataaactaatgaatagagtttttttttttttttttcaaaaattatcaaaattgagtacattaaggaagaaaagataaattctacctattaaatgttatttatatttttacttattttacaataaaattaaataaaatacaataaaagaattatgatattataaaatggtagtattaacaagttgtagtgtaaaaatattaggacgaaaatattattatttcattaacttgttggaaattaaaatgcaaaaatattaagattagggatctaaatgtaaacaaaatgattagattgggatttttgctgcaaatataacttaataaaaaaacaaagaaaaaaagggaagaataaagtgataataaaaccataaaattggcttcgtctccctcattttctgtttatgggtatcgcctctttctctctccctcttcctcgtgcttcttgcccctttctctcccactacgactcttctctctctcgccaacgaagacccttttctcctctggtctcgtcgaagagagagattgtgttttgatcttcttattgtttatctttttttaacagatttttttttatttgagaaaatgaaaatggagatttcaagggttttgttcttcgttttgggggttgattctttattttttacgattagggctcaatcttctgctccagcttccgctctcaccatcgatggtgagttctcaggattgaatttcattataattgtcaatgcagcaccatacgcgatatgtatatgtgtgattggggattttttttttttttttctgtcttgttatttgattttatccactattaatacatatgttaatgttttgtacggattcaagactagcataacctttttcattgcatttttctcatcattcgaagttttgatttcgttctaattttccttttgacctgcttttccagtgaggttttttttttttttttttaattacttgggtctgtattctgcttctgtcttgttgttgaatctgaacaatagaaggtcaaagaatttaatctgaacttttgaattacaacttagaaagagaaagagagagaaatcgaaatacataagaagatcgacgaacagattacataaaaaaccaaccaaacccctcaaaatttcttttttcatctttgggcaggttaggggttgggtgggtttggctgcccccaacccgattatgacaatggagg

SEQ ID NO: 39557 - DNA, 1373 bp, Cannabis sativa
  modified_base (143)..(149): a, c, t, g, unknown or other
gtaaatttccctaataataataattgagtgtagcattgaaagatctattgttaaactccaagtagacacagggctggccctgagattaaatgggccataggaaaaaaaaaattgagcttttactataaagataaatggtattnnnnnnnattattaaaaaaaaatatgtatattttttaaaagatattttttttatttgggttcctaaaatgagtaggcattaggcatggcctagcccgcctatgctcaaaccagccctgggtagacgtgagaaagaataaccaataatagtgaatatttaatttcatgatgggactctgcaaagacttgctagagtagggatttccatttaaaaggaaaataaatataatttttttttttaatattaggattcatttaatatttatctattatttttattgtaatttttagtgtattaataattgttagttagatgtttgttaatattctgtcctcgtatacaaggtcacttagttgattggttaagtggttgttagtgttagtttagttcgataatttattttacttagcctatgtgtataaataggttcaatccccaattgtaacgacaaatttatcatatttgtataggatacacagattaataaatttaatattttctctttaatttacctaagtgttattgaattttggtgagaaggttcaaactagttaaactagttttgttctagattaaaaaaagtttggtgtgttgtatctgtgatcgagtagtttggatcaacaactggtatcagaactaagagattgatctgagacgagtcttgattcaaagattctggtaatcaattgtctgaaggtgattcttgaattcaagattccagtgatcaatcaaaagaaatgggaaatgccaaatttgatcgggaaaaattcaatggtaagaatgattttggtctttggagggtaaagatgagagcatagcaggatttacaagaagctttgctcaaagatagaaaagaagaaattcgatatcatgatcaaggctcacaatactaccattattagcctatgatataaggttcttcgagaagtttcaaaagagacaactgcgcgactcactggcggacctaggatttcattcaagtaagggcacattaatattaaataaaaaatgtaactatatatatttatttaggagaggcccacacctattttattctacataattaatttttattttaatatatatatattaagaaaagaaaagaaaaatgatcatagtcatgagccccaccttgtccttcattgggtccgccactagctggacattggctcaagttacagcatctttacatggtaaaatccctggccaatagattattcttgaaacatat

SEQ ID NO: 39558 - DNA, 1763 bp, Cannabis sativa
ctgagttcgccgcttccaaattcaccccagagatcaaatccgaaacactagaaattttctctggttttaccactttagctgtcttctctatgcttccaatcggttttccttcctggttcgttggtgggagattattcttatcatcacccttgtttttcctcttagccatcacccttggttttcgtccacttttctttcctgaattggcatttccatctgttgtcccaaagttgattggaatgtctttccaatagttcccagtttcagagttatccatcggttctttcaattttgaattatggttctccctgtgaattcttttcccgttttccttctttggctcatcttcatttcttccaaaatcccaacaatcagcccttcttttaatgcctgaactacttccccccacagattttcctttggttctatcttcattaatcaattccataaggttagtataatcaaaaggtaggaaggagttagaaattggtacctccacaagattggaattcttgttagtgattctcggcactggtttagctctttgaatattcgaagtagaagtcccagccgtttcctttgatatattagtcgcaggatcctggttcttcttggataaattaccgtcttctttgccactctccatatcgtgtctgtggttgaattcagagttcatagtgaccttctttatctccttctccttattgatttggggtttatcttcaaatttcagccatgctccataggctgggaagcaattcccctctccatcgataacattcacttgtttcttggcacatgacttgtagtcgtgacccacaatcccacagctgaaacacatgaagggtaatcgctcgtaccggaacggtagccaaaccttgtcccctgaattaggaaaaagaaacccagggcacaatggtttatctatcgaaacccagaccttgaaccagaaaaagccattcaacgttatctttgggacatcttctttctgaatttcaatgacctcgcctgccattgaagccaatcgacgcatattcctcgcagatattgatcgggtaggaagattcaacaccctcccagttagtgggaatcgattcaattcgatttcccatttcgtcggaatctttgtgagcctttgtagaatcaagattccattgttcaagagccaaggtgatttattaacaattctgaataaatccccctctttcttgaacgagaataccataaaagtggcctctgttgtactcttcttaatcttcactccccaatcaacttccgataaaccccatactctacccagaattgttctaatgagagtcatattcatggttttgttggagcagaacctccccatgagacaggacgtttccttctcctgagcttcgtttatctctcatccatcttcgtcctccatccgaaggttattcgttcgatcaagcagatcatccatgggcaattcaggcgtttgaggcattcctacaagaaaggctcttctccaggagagagcaaaaaaattatattttgtctccaattttcaattatatctaaattagtgcatttttttttcttttctttgtagaaaggaaatgagggaaaattataagagattacttttatatgtataaataaacggaaattttcccaattgcactaaaatagaaaaaatttaacaaaaatacggttacaccctaaatacaatttatatacggtaagtctaatctaaattacagacaatacgaattcagcttcttcaacaccttaag

SEQ ID NO: 39559 - DNA, 2157 bp, Cannabis sativa
aaataaaagaacgtttgcaatttatttaattaattagttaattagttttttcaatgttgaccgacaaaacattatggtttttgatactaattattaattagtaatatatatccaaacgccgcttcacactataatatggataacttaatttgatcaaagggggcttttttttatttattttttatttttttttaatatatataaataagaaaattttatggtgcaagtattaaaaataggtgtactgatgcacttcttttgtaaatttttgagaaattcagattagtttaatgcgttgaaaataaaattcaaacagttctgtgtacacgtggtttttattttatatgcatgtgaaatagataatataaattttacttttataactggtttggtacctcgtgttgtataatattgtattgtaataatatattatttaatacaatattatgtttgatattaatttgtattaatagtttatgtaaaattatattatttttacgggaccggggacaggtcgaggacgggtcggggtccaagtttggggccaggtcaaggtttaggttcgggttcggagttgaggctgggtcggggtttgggttcgaagtccgagttcggggttgggtcgggatttgggtccgaggcagggtcgtgatccgaggttcaacattcgacactcagggtttgggattgggtcaaggtcttagtctagggttcgtggtctgggactgatcttaagccttagacttcaaccaccaggacagagtttggggccggattggggtctgggcttttggttcggggttcgagaccggcccaaccctttgtgaatattacaatacaaggtaatacaaatcatttgctagtgttaaataatacgattcacatgtataacaatttatagtcgtaataattagtacaatacaatattttatccaaacatcttgttccttgttatttaatacaatacgatccttatacaacaaattaaccaaacgagctcttagtattgtaaattattttaaattttttaaaattttacatagtgtcttaaatgatacaaatacactgtttataaaaaaaaaaattgagattacaactattcaaatatcaaaaacacataaaaaagtgtatcggtacatctatttcaggagtgcactgtaaaaatacctacttaataattttccattttctataaactattagaaaaaaaaaacaatacttatttaaattctttagtacgaatatttttgcccatcgtagtagtactttttagttttgatatttgaaaaagttataattcaattttattttatatatatgagtgtatatttagattgtttttaagaaattttaaataatttatatagtgttaaaaataaagtttaaacaattaattgcatacatatttttatatatgcttataattatttaattattttaatttttatttttaacacagtaaattatataaaattttatttaaagttaaatctaatataaatataatatacaccatcaatattattttatttatctaaaatattgaagataaaaaaataccctatgtacaataagtgcataaaagtgatggcccaatcctataaaaattttcatacttatttatttgtaatgtgtatatgcatgatctaataatagtcaatattgtaataagtacatttgatttttccattaaataagttgaatatgattagtactgtccaaaagtggaagcatttattatttttaatcaaaacatttaattagtggcttcttaaattttactcaaatattgtacttaattagtgcccataccatattaaaaatattgtatgatcacttactaatgtgatatattttggattagttgttggaaattaattaagtatatatgtttttttttaactaccccgcttcaaatttttattgaacttttcttcacgaagtaatgactcttatacacagatacgttaattttagctgcttcatagaatgacgactaaccttgcaaaccaacacaaatctttcgagcgtgctttattctcattcgcccgttttcttaaaaaacttctcaaaaggtcacccatcttgaaattatcccaaatcaagcatacttaacttttgagttctttcatgatgggctaccgaaaaaaagataca

SEQ ID NO: 39560 - DNA, 1588 bp, Cannabis sativa
  modified_base (1542)..(1542): a, c, t, g, unknown or other
ttttttttacaaaaatatggcataaaaaaaaaactcatataaatgtaaaaaaaaaataaaaaaaaaatccataactttatagtgttatttatttatggcataaacaagtatactatactttcaatttccatgaaaattccccttttaaatatcaaatggtgtaaaatatataactaaaaaattgagcttgtggcctgctggtagtacgaagaatgagctagctatagtattaattcaataactacttaatatttaagctaatatatctaataattaagtttattcaataagtacaaaatagtactatatatctatacacataagaagccttcattaaaatttaaggctattatttctatatatggatctatgcatgacgacattatatactaaaggtttaggagctgtcgatggagagtaactggcatggatgcaatattattgggttagttgagaattattaacagccttcgagaacacacttactactacttccttcaggttaaacagcaaaacaaaaaacaaagtaatatacacatatatttatatgaggatgaagtcatatcatttcatatatagctggtcattaaaatatgcccacattgaattttggggttattaataagggtaatgattcttatcatgtagatatacgtgtgtgtatgaatcaaaatgttggctggctccacacagctagctaggtagatagtgtaagtttcaagaaaataatgtgataacgatggacagatggtaattgtcgggtttaaacatctcatcacatatatttcaaatgatgtaattgatgttataaattatctggtggaaccccatttataagttatattaaccttttgtatattgcttttggagtactttaaagtgcatgtaagatacaagaagatctgacgtataattattggaccttacttattttgattaaatagataataacttacaacattcatatcaataataatttacaatacctcatgttaaaactttaaaatgtgcaataaaatgttctaatcctttcctatataatattatggataattttattacaggatctctcataaagacacccattaataagttatgagaaatgttaaaatgcactagtggtgccaagcatcttcctacgtatcaatatgactattggtctaattaactatcggatcccatataatttaatataatagcttttaggaagtatcgctaaccaatcacaaagtgatacgtcttaagggtgctaagcactgctggtgcccaatagtaatgctcataagttattggtgagccaataaaaatggaacacatcagttaatgagtatggattttataaagtcgagaaaattatttcttatttttatttcagatttgttttggatttatacactaaaaaaactgttatttttagtcacaacataaattttttgtgactaaatataatttttaatcacaactaaaagttatacttgtgactaaaacatagtatttagttacaagttatcactaatttagttttagtcacaacaaattgtnatttttgtgactaatacctttatctatgaaccttttagtcacaaca

SEQ ID NO: 39561 - DNA, 3043 bp, Cannabis sativa
  modified_base (2994)..(3018): a, c, t, g, unknown or other
tagagctaaatgcccctgctcttttccctcgactcaccactgactgctgcatcttagtggacggctctttccaggatgggaaatttgggtgtgccatgttaggtctctccaaagactccatggactggtggaagtgcacctccagtggttcttgcaatttggctcttgaagctgagacgcaggctttgttgttgggtctgcaatgggcggctgagaatcagtggaacaatgtgtcttttgtgacggattccaaatctctggtggatggcatctgcacgaggcattctccagattggaagctcactgcctccttctctttaattctgcatttactttcttctttttcctgctgtaatgttgtttttgctaaaagagaatgtctctcttatgttgatgttttggctaagtccactcgtatttcccaagatggctggcagaactttaaaggggagggattgccccctgtgaatcccacttccttttggtattattctttcgaactgaggttctttcaaaaaaaaaaaaaaaatagtgttagtaaacaattaagagggtttgaacaaaaaaaatagaagaaaaagagagtcactcggtggttaaaaaaaaaaaaaaatctcggtataggcatacaatgttattaattaaaattcgttatactcttaccatttaaatattaaggtatatttctataaatgatttagaaaatgaatattctcttttagttaaactactatcttttttttttttctcaataataataataataattacaacaattatacgctttcatttcagttcataaacattccaagtttcttagcttaagtacaaagtttaaaacataatgcttttattaaaatcattaattagtatgagagtgacactcataattggagaaagatgttgagtcaagtgggtccattttcgaaagaaatagcctatggaaaactcctactcacaaatagttgaattaactgcaaggttttttaatgtaaaattaggcgttaaattcgattttggtccatgacttaacagtgacccatcatttatttatatttctatttctagatagaacaaaaacaagagtcgtagtaagagataagcgatattctagaatttgactttatcaacgatagtgaccaatcgatactaccatgatatttttatacagcaccactacatgtgtcgtcttgttattacttactatcttttttaaaattattttattaaattatatgaaatacaatatttatttagactaatagcactattaacatataagaagatgctatgcaccactattatcttttaacattttttttatataattttagaaagaaaataaaatgaattatagaaagaaaataaaataaattatattaaagaaagttaattgtaatgtatgttcttagattatataggttttgggtcttcattttttttaaaaaaaattagtttctaaattatataagttttgataaattagtctttaaattttattcttttaacaaattagtccttaaacttttattttttttaaagaaaaatataaagtcctcaatcttaaatgatagtattttatttatttagtcttttatgaattttaaatatttttatattaatatacgttatcaatttaaaacaaatacatattgttttatttatgtatacttttttaatcaaagatatattttgaatattacaaaattatatatacatgtgaatcaatattttttttaatgaacaacacttataacaaaatatttctgctaccaaatgatttatctacacttcaagcaaatattcattctcatcaaatagttgatgtgcatgcaccaaaaaaattacatataagtgaataaaagtttttcaattctctaactattttttctaccattagaggaagatcatttcttaaatatataaaagaatttaatataaaatttatttatatatgtagtaagatattattttgtagccaaaataataaatatttttttataaactaccaagtaaattatattataaaaattatttttaacttttatttgttgactggagaattttataactgactcaaagtctaataaacagtaattagtcaccaataaatagttagaaataataaataaatagaaagaacaccaaaaattatagaggttcagcctcttagatattgataataacctacttctcttttagttgtattgatattgagataatgtcgtgcagattactaaggaagacaaagtgaattataagctacaactctcaagatgcttacgagaataatgttcgccaaggtgctcttagagtcgcgataataattttcggccccttccctatgtgaattcactaactatttataggagaaagattgttacaattaattccttaaagttagcaacaaatagtaaatatctctatattttagagtgcagttacaatctgtttgaaactcctatatttttgggctgaagagtcaaactcgtatttacaggattctattgtagatattcttagagtttgttgaggaagaaaattgaagcccggacttaatgagatctatttccctggccggtgtgttgacaactcggctagtttgagacttgtctttttgaagagatgcaatcttgaagggtatgttgatattctctctcaatggctatcatattggtgatctggctagatactttataaaaggtaatatgcaataaaataatgatattagccttatgtgggaacttcccggaacgctcctgctcaaaagtcccatgttatgccaagtgtcagctaaatgagaccgcatgtgattgtcacatcatgtgggtaaaacttaggataatatttttccccatgtcctcgtgcgaacacctatccggatggagacttttggtattttcccaaatgttgatacacgtgtgagtcccacgtgatcgactctacctatcttgtgcagggttgacgggtctattggattttatgccctaaatnnnnnnnnnnnnnnnnnnnnnnnnnttactaattaataaaagatcagaaa

SEQ ID NO: 39562 - DNA, 1567 bp, Cannabis sativa
  modified_base (1005)..(1005): a, c, t, g, unknown or other
ataagaggggcatgatttggtagatatgttatactatatttaatgtattttttattatctaagagaaaaatgttaaaacacacaaaaatataaataaataaataaatattatgcaatatatttataaatacatttttttcctaatatataaagaaatattaaaacgcactagtaaattaatacatttaaaagtattatatttttattagtgtaattaagtagcgtgttttatataatttaatataataattttttaaaagtatagttaatataataacaatactcatatataaatatatatttgataagtaattgtagtaaatttttctaaaaaattactctaatgtatataatagcatttacagataattgggtcttcaaaaaaaaaaaaaaaagaaagaaaattatgtcaagatttaattaattaataccctaatttcaaataattgtatcaattatattaatgtaatattataatattattggcttattcatgtaatattataatattaagttagagttcaacaaacgcaaatttattttcaaatttttcactaatatatttataatgtatatttttttaaaaaaaaagataaaaagaaaaaaaaaaaactcattacaaaatttagtcaacaaattaaaagtaatgtaattccaaattaaagtgcataaacttttttaggaaaataattttgtttagatatttttttattattattttaattaattattgaccaaaatatttttctctaaatatttttttaaactcttaacatataaaatagaaagatgtacacataaataagtatatatatattattttatttcagccattttcattattttagcttaaacaataaataaaacaaaataagtggtatggccaaagggacataacaatgactagtttatatatataaaaagaaaaaagaaaaaaaaaaaggacgtcatcaacgcccactattgttactatcattcttattctttttattttttatttttttntattttttttattttttttatttccaaaaacctaaatagccacaaacacacttttactcttaaattcaaatttttttagatcaaactagagacctcaaatattcatcaccatcatcattatgttcttcatttttttcaaaaaaattacctaaatcacaccaaatatataaacctctaccattttcaaaaaaaaaaaactagatatagataacccatagactatattactaagttccattcttagattctaaaaattacaaatcaaatttcacaacattagcaaaaatcaaataagcaaaaagaggatttttaatgaaaaagtttgaagaacactaaacattcatggtttatatgcattttaacatggaaaataaaattgattaggaaaagggtgagaataacttactcaatgatgatcttcaagcttgaatcatcgccaacaatctttggttttctctttaagctttcctttgaaatgtgttttgaagctctttgagagcgtttttggaagggctcgatggttatgttggaaggaaaaggcttacttaaagactagagggat

SEQ ID NO: 39563 - DNA, 4047 bp, Cannabis sativa
ttaaagctaagcggtctttacatgctagtacgaaacagacatttaataaattgggtgagaatcctagtcatatatccaggataggcagttgcacatggatagcttttcgttccaagacagtataattccataaatcctccttagggagtaggccatccacaagttcttggaatacaagctccgaatgtgctagcccttcagggggggccaaaacactcttgcagcgatagttgttatagcatctggtcctagaaattcgcaccatcctagagctgcattaccagctttagatggacatgcagcgaaaattttaggtggacctcatactgccagaagcactcagaatgcacagaagaatgagttgaatcaaggcaaagcttgcaacttggtgcaatcacttacccagtgtccaagaatgatgaatttgcccatgacttttacaaaagacgacgccatgcacgtgcacttcccttataatgacttgttggtaatagaagctcaaatagtaaacaaaagagtttccaaaattctcgtggataatcgaagctttgaaaacatcattttcaaaagaaccttccacaccattggtctggtagaagccaatctataaccatgtctaattcaactacaaggcttcaatagatctattcccatgggaaagatacaacttccaatgactgtaaatggggaagtggcaggaagtaacgtagtatcatccttcgagtacaacacatttgtgatagttgagtgccctactgcttataatgctatcttgggtagaccgttgttaatggattttggaatggtgaagtccatccgacatatgtgcttaaaatttcccagcaataccggaagcatagaaactatcaaaggagatcaaagaagtgcgtgaagttattacagtgtttcaaccagaactgtacttatggtccataaaggaaataactctgaagccagaccatcttcccagccagcataggggtgatcccgaaagatgagcttaatccataaattggtgtggagcgtgtcatagaactaatggaggaagtggaggaagtatgcatagatgatggagaccccaccgaagttattcaagtggggaagaacctatctccagcagtgaaggaacaggttatttccacggtcaaggaaaatggtgatgtgctagcttggagtcattctgatatgactggcattagtccccatgttatttgccatgcactaacatagatcccaatgttgaaccagtctggcaaaagtgaagacctttagatctagcgagatcaaaagcagtaaaaatagaagtggacaagttgacaaacatcaacttcctcaaggaagctctatatctcgtatggctagccaatccaattttagttctaaagcctaacgggacatggaagatgtgtatagacttcacagacctaaacatggcttatccaaaagaacattttccactttgatcaaatggttgatgctactttggggtttcaattgttaaccttcatggatgcatccgccagctacaatcaaataaaaatgcacgtggctgatcaagagcacactagtttccaaactgacaaaggaatttactactacaaggtcatgccattcggattgaaaaatgatggagccacttaccaacaaatggtgaacaaaatgttcaagaatttcctggggaagaatatggagatttatgctgatgacatgctggtgaagtcaaaaacctttgagaaccactataaagatctaaaataggcctttaccattataagagaatacgaaatgaagttgaacccaaagaaatgcacttttggagtttcttcaaggaaatgcttgggtgtcatagtcagttcttgaggaatcaaggaaaaccaagagaaaatcaaagcttttgtagacatgccttcgccctaaaagcacaaagatgtttagaagttaacagggagaatagcagcacttagcagactcgtctcaaaatccacaaataaatgcatactactcttcaatgtactttaaggaaatcacaaatttgaatggacagcagaatgcaaaatagccctctagcaattaaaagaacacctagtgaaggctccaatattgtccaaaccaattgatggagagtcgtcgtttctgtacctggtagtgtcaaatcataccgtaagtgccgcattagtgtgagaagaaggaaaggtacaacttctagtatattatgtaagtatgagactgctaggcacgaagtccagatatctaatgatcgagaagctttccatttgcttactgattgcttcacggatgttaagaccatactttcatgctcatgccataagggtactaaccaaccaccctctacgtcaagtgttgtaaaaaccagagtcatcatgaagactcctaaagtgggcaaaggaattgagtcagtttgacatacaatatcagcacaaaattttgattaaaggtcaagctttagctgacttcattgtggagtgtacagtgataaatgacgatcctgaaatgttagtctcggagagagaagtcgggaagatttacgtagatggagcatcaaatgaaaaaggttctggagttgggatcattttaatacctccacggaacctctagatccaaagtgcactttgatttgagtttagagcttccaacaatgaagctgagcacgaggctatgatcacttgtttacaactggcaaaagaggttggcactcaaaacatcgaactctacagtgattcacagcttgtagttaacaagtgtctagagagtaccaggcaaaaggagagaaaatggctagttacgtagcaaagagtcagaagttgttgcaacattttaagcataattctataaaacaaatccctagggataaaaatacttttgcagatatgttggcaaaattagtaacaaatccataaatagagaaatacagactagtccccattgaacatctgataactccaagcacagaaataggtaaactccctaaagatagagctgcttcgaggaagatccagtatcaagcccccagatatgtgatcatggatggaaaactatacaggagaggattatcaatgtagtatctaaagtgcatagctggaacaaagataagtgcaatcatgcatgaaatacatgaaggtttttacggagatcacacatccagacccagtctttctaagaaaatcatttgtcaaggctatttctggcctactaggaagaaggattgtactaagtatgtccataaatgtgagcaatgccagcgctattcaagagttccaagggccccaccaacaaagataaccctcatgaatagtcattggccttttgtaatctagggaataaaattcgtgggatcactttcaaccaaaaagggaggagtcaagtttgtcattgtcgctattgactactttactaagtggatggaagttgaaaccatgaacatagtgacctctaagaaggccctggacttcgtaattaaaaacacagtgtgcagacacggacttccacacaagataatgtctaataacataaagtaatttgatagtgatcgattcactgatttttgtgtgaaacatggaatcatcaaaagcttttctactgcggctagacctcaagcaaacgagcaagtggaagtcatcaataaaattctaaagaccactctaaaaaagaagtttttggcttgtaaagcacaatggctgaaagaatttctaagagttctttggacctacagaataattaaaagaacttctacaggccacactccgtactccgtgacctatggatgcaaggccgtaatcccagttgaatccatagtgcctacatataggagggatacctatgacctaaattaaaaccatactctacttcaagaaaccttggatttaattgaggagctttgagagtagtcacaagtccaactccagatgtatcaaaacaaagtcgctaggaatttcaactctaaagtcaagagcagaagatttgaaattggagaccttgttttgagagtttcccacctcttaagaccccaaaatgggggtcttaggacca

SEQ ID NO: 39564 - DNA, 1360 bp, Cannabis sativa
taaactattcagaatttttcaaaagtttacagagatgatactgtaactataacgaatatcgttatgaaaaaaaatttaaaaaaaaatatttcagaatataatttcggacatagaaattgtaataggagtatctaattaacattcttctttgatatatatttattaaaacacgtgtggataaaaaaaatagtgtaaaatagaggaagttgttcattggcccaagtgggattattatacaaataatagattattttataaggtatgggtatgattttactgaccaaattccaattatacccttttattatataaagaaatattattgaaaaataatgtattttatccttcaaaaaattattagattatttgactcgtgaagtgaagtgtatagatacatagtgttgtcttatatttattgtagtggaaaatgaatttctaaatgtatttggcctatgattctctctatatgtagctcaagaagtatcatatatatccacttcttaattatgatgagttgtgccactaacaagttaggtggttttatttttgaactaattaatttcctagctacaattgataattaattgattagtacgtacatgtgatatttaactcaatagtcaattaatttaattccttattaaatcactttctccaaactttaaatgtatataatttttgcccggcagaattttctataatttttatttttatatgtaatatatcataataaagaaaaaataatatcacacctcttcgttttttttttcttagcatagacaaatatataaaatattatatataggtgaaaattaccaaataaattaataaataaatttcgaatgtgaaactgttgtaaaattatttgaaccaaattaaaatatgttttatcagaaactgaatttaatagatttgaattacactgaaatggtttgcaagttgggatacaacggggattacatcgctttcgtgttgaatcggattgtcaagctgctgtccatttgatccatgctaaggaggacggctgtcatgacagtgatggcattgtaagttgtattcatgagttaatattgcatgtttctgttgttggtatctcttttgtatttcgtgaggccaatgtagttgcatatggtttagccaattacgctttgattaacaaagtgagagctatgtggattgggattgtacccccttgtgtgagacttgcggttttgcaagacttgcctaatcctttgtattgatttgtgggaatgaagactttatgttaaaaaaaaaaaaaaaaaaaaattacactgcataaagtaaagttgtaaaattaaaatgatacacaatattctatacgtggtattagtctacgagg

SEQ ID NO: 39565 - DNA, 1753 bp, Cannabis sativa
ttgattcatgatgaaggatgctcaattgtagatggggcaacatcatcttgagagcatgtggaaagtctcgccatggatgttgtggacaagatttcttctgataccatatgaagaagagagagagagagattagaaagaaatgtatctcatttatttgacttgatctgaatacacaagacttttaataggaataaaatggatgagttagttagtcggaaaatataactaactagcccaacctaactgaattttccactaacttaattgaggtgaaaaactaactataactaacaatacaacttttgcatatatctcaattattgtctttaaaacttaaaactgcaaaactacttaaaacatatcaaatatatacaaaattttagaaataaacaaccttaaaatctctatattgaagatagccttacaaatgtgtcctttacctcacacaagttatctctgattgatatagtctttgactattgaaaataaatttaataaaattaagaaccactttcatcaattttagctaaatcaaatgatattagcaatgttgtcacttaactaattagataatttaagacttcattattttcttagaaatagctatatttgttctgaaaatttatttattctttggctttctcataaccaagctatgttttctaagaagatctctttgcatcaggattgtaacaaatgtgatggaggtaagatgtttgtcatgcctaattgagatgtaaagccaattccaagtactaaaagatggtgaatttctcaccattgctaaaaaaaaatacaaagagcatgatccccttatcttcatctctcatgtgcagagatgtctaggtaagaataattttaaattctttattttcttaacttggcaactctggtatgttagaaacaaaatgagagtagttctggaaaaagaaccaagaactgaaaacttggtggatttgtgctagacatactacgagtctgttaaagaattgcaccatgctacatctcagcatgaacaaagggcaagtgccaaatggactttcctagttgccggtgtgcttggaataaacgctgatgtcagccgaagagagtcgtgaggtatgtagtgtggcagcagctgtgagagactctagtggagattgtataggtgccaaaagttgaatctttcatagacctttaaacaatcttattattgaaattttggccattaaggtggggttattgctcagtagggatgtttatagaatgtgcaatccgtagtttcaaactccaactaatcctgaccaaaccttttgagactagaccaaatgaatccggtgtgaattttcttgtcaattcgaaccatttaaaattctctggttcggtcacggttttaaaagtttcggtaacggttcaaaccaaaccaatctatatagttattttattatacctaatatatatttttgaaaatatgttaatattttagaacaactttagatagaatattgatattgacttaatatgattatgatactaatattttattattatttatatattattaacagaacttagtcttctaagcttgttagttgggttcagttagtaattccgtttactgttgagtctgttatttcagttatacttcataactgtttcctgtttttctggtttttccttttcagtctttgtatcagtggctatataagccttctctccctattgtaatttcactcattcaataacaaaatacactttaatttcttccgcaata

SEQ ID NO: 39566 - DNA, 2264 bp, Cannabis sativa
atgaaagtgacatggttcattttgatgcttccattattgactttctctcgaatgaggcgacagtcgatctccacatgttaggtgcattcatggtagacgggatttctagagatgtgaattattgtatcatcatcgcaaaagagtgtgaatgggagcctaatttagttcacaagttgcattggccattgctcgatattctgcttcagtagaagagcgagacactgtttgctatttcttcgatttcaaagagctgagagattgactaaggaagacacaataacttgagttggatcgcttagtgtccaaacatgctccccaatctgcatctgcaaaagcttaaaaatgtattggatcgggtttagatgcatagaagaaaaagccttgtccaggggtgccttttagatattgcagaatgcgattcgctggttggaggtgtggttctcttggattttgaaggtattgacttaaatttttttactgaaaaagcaatgtcaggttttgttatggtgagatatattagcttgccaattaagctcctgtattgtgttgggttgtctaggagttttccagtctcattgttgagcttggtatttggttccattggggttaagactagtttgatgcctaggcagccaatctcttgtagtagtagtaaagtgaaaggcctttgtgtgatagaaattcctttactgaatctggctatttcaaggcctaggaagaagtttaaacttccaagatctttgagcttgaaacgggaatcaagtgtagatgaaaaatgttgcaactcttcaaggttgttggttgatactataatgtcatctacatagattaatagatcaaggaagatgcctgtttgtatctaataaacagtgagtgatcgtttttagattgaacaaatttttgttgtagtaatgtggtgcttaatttggcataccaatgtcatgaggcctgcttcagaccataaaggcttttctacagtttgcaaactacatttttggggattgattctttaggagtgtagtcttgaggtagcttcatgtagacatcttgatcaccatggacgaaaacattgttgatgttcatatggtggagatgccaatttttaatggcagcaagtgcaaacaacaacttaagggtattaaatttggccacaggcacataggttttaaagtagtccaccccttgttgttgagtataacttttggctactaatcgagctttgcagcactcgatagaaccatctgggttgtatttgattttatacacccatttattacttatgacatgttgccctgggggaagagggacaacaatccaggtgtcattggcctatagtgcatctatttcagtgtacattgcctagttccatatcttttctttacatgtttgggcataggatttaggttctgtcagatgagcagcaagtatggttgctcgaaattttggagaaagctttctgtatgataggtagttggtaatggggtaagatgtacttggggcctgagtttgaattttgcaggtatattcctacatatgtgcaagtttggttatggtactgccaattcttgtaggtgggatagttgctgatgatgttggttcagcaaagattgttgagtgttttgcagtaggtgcttttgggtaggatgcaaaggagataatgtcagctttaggagcatttggtggtgcagcaaaacctgctaaattatgtgtgacatctgaatgttgatgttgatgcaaatgttgagaaaagaaattgtcaatgtgactgtgattggtgttggtattctggaggagggggtagatgaattcatagaatattacatcccttgattgaaagatgttattggtttgaatgtcaaggagtgtgtaggcctttatgttgtcaaggtagcaaatgaaaatgcatactcaagctctaggagagaatttatttggattgttgagatgagaagcataggctaaacatctaaactttcttaaatggctataatgaggagctttattgtgcagtagcttatatgatgtctttgctaggaatattttaccatgatctagatttactaacaagtatgttaaactaatatcctaaatatgaatatctctaaaacaatgaaattaaacacataagggtttaagatctcgaatccttatgtgtttaatttcattgttcctttctgtcgccgagtattattaagatttgagcttggatctctttctctccttcaagtttggttacaactgtcttactcactataattgaatac

SEQ ID NO: 39567 - DNA, 2217 bp, Cannabis sativa
  modified_base (2162)..(2186): a, c, t, g, unknown or other
ttaaaaataaaaaacaaaaatgtattatgtaaattttattttcatttgttaattttatttaagtcgggtttgaggttgggtacgagatcaggattgagggagggtccaagtgtggggttgggtacggtttcggtttctaatgtctaagttggggtcggagttcaaaatattaattaaaaaagaattgtttaacaaaatttaaaagtgattttttttttttgtttttaaaatttaaattcttaattcatcaattgttttgtcatgatggttggtcaggttgaagcaatgagtatcacgtttgtttgtgggttgaatataggagaagagaggaaagatttgtgggctgctcttttgggtctcactccccctgctaagtcgtggctcataataggggattttaatgctttgtttgatttggaggacagggaagggggcaagaaagttactatggctgatatagaagacgctaccaaatggttggctcaaaaccatatggaagcgcttctaaagactggttctaaattcacttggactaataaccaagaggggagtaagagaatctcttctaagattgaccacttatttgtgaatgaagattggtttgatttttttcagttcggttaaggctaagtacagttgggaaagtatttctgatcattgtgcttgtgtgatttctttgaaggtgaatgagaagattggttacaaaccgttcagatattataattgttgggctgatcatcaagacttcactcatgcggttcttagtgactgggttaaaccagttagagctgatgggatgaaagctttatttttaaagctcatgagattaaagcacaaattgaagaaattcaacaagaagacaattggggatattgggaaaggttatcaggcagcaaaaactcattatatggaagctagaatggaagctcaagcgcatgggcaagatatgaattatcaaaagaaggagaaagaggcagcaactcattttcatgatcaggaacacgtgtatcatagcttcttgaaacaacgaagcaaagtgaactgactttgtaaaggagatcagaataatagttttttttcatgcctttttgaaaaaaaaaaaagaaggatggagaatagtatagttttttacactaatgattatggagaagtcatagagaaatttcctgaagtggtgaaacattatgaaccattttcagggatacatggggactagttgcatatataacttctcatagtttaaggaaggattgcatggagcaggggaaaaggttgaatgttgagcagcaattgaacatgatcaaaccgtttactgtcaaagagattaggagagctttctttagcaatcctgattcaaaatccccagggcctgatgggtatggagctggatttttaagaaaatgttggcagatttgggagccgatttcattaaagccatagaaagcttcttcaagaatggtgtcatgccaagggagcttcatgcaactatgataactcttatccccaaaactaacagctaacaattcagaattagataccaccccatgtgtaagagcctcaaaatcataaacttatgctttgctgatgatctgatattattttgcaaggggaatattcagtcaatccaggttcttaagaaatgtttggaggagttcaaagatacctcgggtcttgctattaatacaggtaaatctcagatgtactttggaggggttggagaagaggctaaacatgctatattgagagaattaactctcactaagagcacctttcccctaaagtatctgggagttcctttaagaccgacaaaatggaaagttgaagattgtggtgtgattatcaagaagatcaaacaaagacttctctgttgggcaagtagacatctctcttttgcaagaagagctcaactaatccattcagttttacttgggcttcggaactactggatgagcatttttgtcttgcctcaaaacatcaccaaggaaattgaaaagttatgtagaggattcctttgaggatggaatgggaatagaagtaagctccatgtggtcaattgggagaaagtttgccttcctaaacattatggagggctgggattcaaagaggggacaaagtagaatcaagcaatcatagccaaattgtgggaaattattttaccaggnnnnnnnnnnnnnnnnnnnnnnnnnttattaacatcctaaataagaactttctaaa

SEQ ID NO: 39568 - DNA, 1147 bp, Cannabis sativa
  modified_base (789)..(799): a, c, t, g, unknown or other
aatgtagagcatccaaaagtgttgtcggttttcgaaagcaaaccaaagaaactacatacaacccattcatggtcttttcttgatttggagcaaaatggtgttattcccaagagttcgttatggaaaaaggcgcgatatggtgaaaatacaattatcggaaacctagacacaggtgaatatctcacttttaagatttcttatgaaaaatctaccattattttttagtttctaaaatccatgaaatggatataactttaaatattgttttttgcttaaaattttggtaggtgcttggccagaatcaaagagttttagtgatgaagggattggacccatcccaaagaagtggaaaggaatttgccaagatgatgtcaaagatgggtttcgctgtaacaggttcatttctttgtttttcacattcaagtattttcagtggttagataaatattatgtttggtgtgattaaattatatataaaaaaaattgttaacaaattctcttgcaattaaaatttgatttttttgtaaaaaaaataaataataaaataatagtatcaaagaatacataatgttagaatggggaagaaaatatttgtgcagaagtacttttttatagcatatttgtagtttatgttatggaaaagtgcaatgagtcataaacagagtcggccctaggcataggtggccggccctaggcataggtgggttaggcctccgcctagggcccattcattttagggactcaaataaaaaaaaacattttaaaatatatatatattttaataatttnnnnnnnnnnnatttatctttatagtaaaggcttaaattttttttttcgcctatagcctatatcaactcagggccggccctggtcataaataattaaattttgaaaaactgagtttttgtaaatgttaataattatactaaattttagtttaaatactgttgtaacattctgcagcaacataatgtaattttgtcactgtagaatacagttttgcaaaaacaaaccagaaataaatagcgcagaatttaaaaatttgacacacgagaattgtacgtggtatcagtgctctttcaaacactactagtccacggggccacacccagagaatgaaattacttagtaaagtatcaaagattac

SEQ ID NO: 39569 - DNA, 1116 bp, Cannabis sativa
atattcttcactctatattgtttactaaaagccgagtaaccaatactaaaaaatgcatccagatgtaacaaaaaaagtcgtagtattttaatattcatatttaaataaaataacttattattcaaattgagatgtctaaatcttaagaaaagcaaatgcaccttaagagtgtatcctgtaactattatttaaattatttttatctatttattagaaaaataaaaatattttcaaaaaacatgtttcataaaaaaatttacttttttattttttttaaatgaaaataaaaattttaaaataaaaatagtttactttcaaaagttatttaaataatttttagttacatattctatttatattttctttcatcgatattttaaaccacaactccataattggacctaaacctcaacgagagtcaaacccgaacccaactcttagctccaatgttggatccatctccaaactcctagctcaacctagacttgaccccgacccagcctcggtgacaaactttgctgggaacgaaaattggacccaaacctagctctagcccaaaccccaacccctgaatcctaatttggacccaaaccttggctcgtacatggactccaaccccaaagtcagactcagaccccagcttgaatctctagtccgtgacccaaaacttagactccgacctattttctctcacataatttaaaatataaaataaaaataaaatttaggtaacacatttttattttttattattaaattaaaaaaaaataaaaatacttatcaaacatgtttttgtattttaagagcactacaaagctaaaaaaaattaaaattctacttttattttcgtaatttaaaaaattaataaataaaaccttccacattgcaccctaaaaacgaaagaagtagaccatcaacattaaccctttgtaataggatttttttttttttcatttttatgcttcaaaacagattttttttggtatttttatggaattccacaaaaaatctctattgcaattaattaacagagcaactgaaatcgcaacctaaatccgtatatcaacccacataaaaatcccctgaaaaactaccttagaaactcaaattgtaaat

SEQ ID NO: 39570 - DNA, 2977 bp, Cannabis sativa
tacaacatgtgagataaatgaattaactactgataactgctttttgtccttatcagaaagtagtttctttgttaagataatatactcaaattatggctcgcattcttaaattatatttgggaatgactggacgtattctgtgaaacgctacttgagatgttttcctcacttttgccatttatgacaaatcttgagacaccctttaagattgtatctttcgtgtcccttcaatctttttgcgtcgtctatgaacatttcgagatgggtcatactttcctcaattcttttagtctttcaacatactcatgaatatgtggatcaatgagctgcaagctcttaaagaactcgttatctaccatttctagtggttcatccttttgcactctattcatgtcatgtctatctcggtcaagtttgagacgaccttatgatgttgtgttcacactaaccgttgtatttataattttatcacttttattggacaaccattttataatacaacccgatgccaatacatcatttaattgtatcatatcccaatgtcaaacacttatttcattcctcacatttatagttttcctcaatttttgaaatttatatccacgtgcgtgtccatatttaatgctcgaaatatgggcataataattctcacattactagttctatttaaatattaaactatattataatataatcaaaaataaattcccatatttaataaaatttatgcctttattttatatttctaatttataatttttaggatattatagtagccaagtacaaactactttgatactatgctcttgtggaaaaatttaacacttggaaattattatttacctttaatattttaaaattattattgcccttgttgccattaaaaattggcacctacacatgaacacaaacaacgtctttctccatggcgacctacaaaaggatgttgaaactacctcaaggatacactctcaaatgagtgattccaactaatggagtttgcaaattaaataaaagtctttatggcttaacatagacttctagacaatggtataaaaaactcagtacctctcttctacaacaaggtttcactcaatctaaattttatcattcactgtttattaggtgttttctagccctactcatttatgttgataacacaattgttgcaactaacaacctttctaaactgactacatttaagtctactcttgatgctcaatttaaattgaaggatcttggtaacttacgatttttcttaggacttaaaacagcttgatgaaataaaggcatttctgtcacacatcaacctttcattctacaactccaggaagactcaagctaattagacaataaacctgcctccacaccaatagagctcaacagcaagcttcacgaagggtcaggacaatctttacaagatcctactcaatacataagccttgtaagaaaaatcagatatcttaccatcacaagacttgatatcagctttgttgtcaacaaactcaaccaatatgtccaatcacctaggcaacatcacctagctgctacatataaaatactacaataccttaaaggctcccctagacaaggcttatcgctacaactcaaaatctttgcatatgcagactagggtgcttgtattgacaccagaagatcaatctctggatattatgtttttttaggataatctctaatatcatggaagtttaaaaagcaacaaacagtctcatgttcttttgttgaagcagggtaccgagcaatggccaatgtcacttgtaagctaacttagttaacatcaatcccaaaagacttccacatcgacatttctcttccttccatcctctactgtgccaatagtactgcaattcacattttaaaaaatatagtttttcatgaaaggacaaaatatgtggacattgattggtacatagtttgagagaaaacaatctatggacagttgaggatgtttcatatgccatcaaagaataatctagctaacatccccaccaagcttcaatttcttagttctttcaatgaaattgtacccaagatggggttcaaactttttacactccatcttgaaggggtctactagagatagctagttagttaaatatttggttaagttagtgatctctagctaactctgttattactcatcagtaattttgcctatataaaggcaatacacttgcaaatgattcattctgttcaataatagttcagttaaattttcaccctattcaattgtctaatattattttgaacaatgaaacaacttagattggaagccacagtgctctctttgatttcaggatctccaatttggatgttttaccaatatgtttctttggtatgccacaggtgttcacaatgatcacaccatgctcgattatttactagcacccacaaataatgcttcaatacaatatcatgtcttcaagtgatgagagaaaatgtgtcgtacccttaatttcagattcgagccctttcaagtttgagcttattcttcttagcacaagtaacacaattatttattcgatattgtggatcatcttcaccaagagcagcaataacacaatcacacttctttggttataggtcaccataccacagattatgatcattctaaataatttgttccatccagtttctgtcgggtaatttgtagagaatgactctcaactagcagagagaataaggttttttgaaatattttggtagtggttgtagattgagggtagatgactcaatagagcttgtataagctttgtccaaccattgaaagaaagacgggctatgctgaaccttatcttcgataccactagcttgtattaatcactcaagtcttcctaaatctctacaataaatatgaaatcttccacactaaatttgtaacctctcaggccctagttaaaggttgcttaaaatcttactcaaaacactaataagggaaatcaacgtgaacaaatct

SEQ ID NO: 39571 - DNA, 2388 bp, Cannabis sativa
  modified_base (1696)..(1698): a, c, t, g, unknown or other
ggactaaatttgtacaaattatgggagggtataaattttgatatggggtatattattaagggaaaaaagtgaaatttcccaaaatcaattagggatatactataaatttcactaactaaaattaataattaactaaggaaatgaccaaaaacccttagcttagccattaaataaataacctatttaggagtaaaattgtcttaaactataaccctgatgataacccaaaattaaatgtctaactaaattgtcttgctatttctaaggtactaaaccataacaaagtgactctataggtcatacgtcgcattccactgttaccaggcataaaatatgaaaatcataaaattttacatacatcatgattaatacacctagaattcaatatatttccataatttcataaatagtaatcaaaagtctaattctaaacttaaacccaaattatctactaaatcttatattaaagctaagcggtcattacaatatgtataaaaatatagaattttttaaaaatattattttatcaaaaacaaagtcaacaaaaaattaaaaaatgcgaaccaattaactctaattattcttccccatattttttatatttattttaaactttcccaatttgaaaaaaaaaatgtttttgcaaattatttgttggaacttattttactaagatctagatttactaacatgtatgtttgattatattctataatctaacatcctaaacatgaatttcttaaaacaatgaaataaacacatataaagttctagaaaactttaaattgatagcagtagaatattatggctccttctgttcagatctctaacctttgtttgtttctgtcacatagtattgtcaagttccaaacctgaatctccttaagtgatgaaattcttcacaatcttctacactacgattgagtattgacttgaattgtgtgggcaagatactcttcactatagcgtttgaaattctagaagggaatagaagaggaattcgaaatcaatagagaggctcttaacttttcagttatctgacagaataatctgatgatgcatatcaaaataggagcctatcattatccatttatagaatttaatctagggttaggattcaaactacatataattaaaaaagataacataatagccaaataaacctttaagtggtcgaccatataagtggactccagtagttttaattttgtttatttaacagcttatttttttctttcacaaatgtcatattttaattttaatcctataaatgtaaaatctatataattaataattataattaattataaaataaaatttctatttaatttatttattaattagaccttataaaatatcttaattaataaataaaccctaaattttctctttcttctcaattaagtccttcttagagaaaatttataaataagacatagtctaatttaaaaattctaattggttaattaaaatcaattaactgagcctacaaactaatattatctcaactagtgtggagaccatgagcttatataatcaagctcccaatagcaattctagaattgaccaagtaaattctttaacttattaattcctcatactccactatagatttagaattgtacttctaattacataaaacactctatacgctattaattatctattattataatccaaataatcaaagatcctnnntagatgatttacatcgagtagagacaaatttatcgttctacccttcaatatattttatccttaaaacacttagcgtcctataaatgatattttagtaaactaatataattattgaaataagagctctttcatttatctctgttaagccaagctcaaaggaaatcatcatttcacgtctttgtcattatagaagctataaatttcatatctatgattagcgctcccacttaattgtactaccatgttcccaagatgtaagtattggaccgattcatttggtcagctttaacgaataactcaaagaacacaaataatacaattaagctagacttaacgatctcaagattaagatctattgatctaagatcaactaaataatattgacttagaaagatataacagtaagtttatgatattttatccaaacttaatatcggtccaatctgatgtatacttctcacatccgatactagtacactttaccaatgccctagaaaggacataccacttatctaagtgtaagtaaattttatcattaattatcacgtcagtataaatccagtgcaatgataaatgataggacttaaactttaaagaatacaatcacaattactttccactgtgatgacatcactgtaactgtggataactatatgttctggatatatcaaaatttttattttaacctat

SEQ ID NO: 39572 - DNA, 3286 bp, Cannabis sativa
  modified_base (1681)..(1684): a, c, t, g, unknown or other
atgattttcattaatctcgttgattagcaacgagctgcatagtatgtttaaaatcacgttaatacgcctatgctagttaaggtgttacatagtaactagtaattaaacacttacaagcaaacacacacccttataaataatttttgtattgtgtaatacccccaacaatttagtcttgaccccaccctaattgtatctttatcaaatgtgaatcagaggttaccaattcatttcaaatttgtaacctttcttatgttacaaaatcatgataacttgtcatacactcacttattagtatgttacacatattttatttataatttttcggcctaaaatttttatttataaaaatacacttataaaattttaaaattacaaaaatacactttgatcagcaaaaaataagaaaacaacgagaaataaacctcacgatgactataaatcagctacaaataaactataaaataaccaaacataacaagaaaaataacctcataacatctataatacaactataaataaattataaaacaaccaaacataacaagaaaaacaacctcatgacatctattatacaactatacataagggattatttcacaaatacacaaaagcaacaaaaaaattacaaaaatacggtttcacagaattttaaacaattttacttatagaaaatacggtcgttttacgttgtactcttgttaatttgttgttgattttttgttatctgtattttattttttgttgttgttttgatgttatttaaatattattgtcatgttacttttatttagtttcttgttgttttcgtattgtttttatggaaaaccgtaaaaatataaaaaaaaatctttaaatgtaaaaatatattttttttacaaaaaatagtgccttatataattattcctataaataaactataaaagaactatgaaaatagtttattgtttttactaaatatgtatttttgtaaatgaaattttttctgtgttgataaatttttgtaatttttctttgaaatttttgatatttgtaaattcttaatttaatcttacacaaatttaattaaaataatatgggtataattaaatagaatacaaattataaatgtttgttatttatattaattattattaaacttttagtatattaagatttatatcatgtgtggagatgtaatttttccactaaagcaatattaaaaattattaaatatattataaaattattttttatggtaaaaataacacaatttttactcatgaaaacataacaaaattcattaacataatttataggagaaatttcataaatatgggaattgagggtataatttatttttttatggcataaataaataacattataagattatgggttttttctattttttttttacatttatatgggtattccttatgccatatttttgtaaaaaaaatagaaatttcatatttgtaaaacaacaataagttttgccgaaaaagtcactgccaccaaaaaagtcgccagaaaaattactgtcgccggaaaagtctccggaaaagtcaccgtcaccggcaaagttactggaaaagttactagaataaaatatctcagatataactaaaaatatagccggttctattatgttacagaaccggttataattaaatctaaataacataaaataactcaaacnnnntataattaaaatagaactgattctataatagtgttacaatgaataaaaataaataacatgaaataactcaaaccggttataactaaaataaaaccagttatataatataatgaatacaaataagtaacacgcaataactcaaaccgattacaattaaaaacaaagaagaaattagttcctaaaacactgaaatataaattaaaaacaaaactagtttcacaataaaatatttcataacacataatccctcataaaaccggttataatttcttttttttaaaaaagtgaggaaatgtctcagatataataaaagtaaaaccgattttataacataataaataaaaataattagcacaaaataacgcaaatcgattataattaaaatataaccggttctgtaacatagtgaataaaaataaataacacaaaataacttaaagcagttatgattaaaatagaatatgttctataacagtgttataatgaaccagttttataacaatgttataattaataaaatcaaataacacaaaataactcaaaccggttataactaaaatagaactatctatatagacataatgaatgagtatttttgaggtagatatgatatgggtgtaattatttggtgggttggagcatgttgaatgaatgtttttgcttaagctattttatttaattggtttttgtgtgagtttttatcttagttgctttacggaactggtattttgtcttaaatttttaactagttgataaatataaacggtttctttatattatatttgagttattgtgtattattaattgtgtttatttattttgttatggaactagttcttttcatatttatgcctcaatattttttgaaattgatctccattatttttaaaaaaaattataatcggttttatgaggtattatgtgttatgaggttttttttttattatagaactaattttatttttaatttatgtttcagtgttttaggaaatgatttctcctttattttttaattgtaatcggtttgaattattgtatgttacttgtttgtattcattattttatataaccggttctattttagtaataaccggttctaatttaattataattagtttgagttattttgttttactttttttattctttgtgttacagaaccggttatatttcaatgataatcggttctatttttgtttatatttgagacatctacttctggtgactttttcagtaacttttttcggggacaatgacttttccggtgacttttccaacgacgataacttttctggcaacttttctgacggtggtaactttttcggcaaaacttattattgtttacaaatatggtatttccatctttttttacaaaaatatgacataaaaaaaacttatataaatatatatataaaaaaaaaaacaagaaaatccataacccttagctttatttatttatgccataaaaaaataaactcttaaaattttctcataatgtaattttgatggtttgagaataaatttgtattggtttagatttggaataggtggatatgtggttaatggtttgttgtggtaatgtagtgaagtagtgatgttgat

SEQ ID NO: 39573 - DNA, 1805 bp, Cannabis sativa
catctacctcaaccaactaaactatgaatatttgttgcttacaatacacttaaattttacttaaataaaagcttaataaattttttatttttttattttgggctcacgaaaagtgtggggcgtcctaggcacgggtctagcccgcctatgtctagggccggccctgatcatccctaattaactaatgttaatattaatagatgtataattaataattatgatatggaaactcttgttcttatgatggaattgatcctaaattccaagtgtttagtaccttattctagaaatcaatgtaaatggcctcattgcgtctattctttaatcaaagttaagcataatctaattatggataagcaaaatcattctctataatttttgtgctgttattatattttattccctaaatatatatatgaaattccccttcttaatgtggactctgagaagaaaaattccaaataataatataaataatccaataagtatattaattacccttttccaaaaccaatgaataatttcttgtagtattatagtataatggggaatatgttcctatacttaggagggaccaattgtgatatatatataataaaattaaatatataccaaaacctaaaattaggatcgatattattaatcataagcaagtatctacctttttgaaggaaaaattccctttttctctaaacgagtaaattaaattatttatctcaagcttctcatgtactgataatcaaaatgggtccatataaaacaacttcaccaaacaaatataaatatatatataattaattatttatataaaaactatacgtatctgatccaattcttggaggattaagtaggtactaaatatataaagatagtttgcataaaggcaatctttgcatctccaggctataattaacaatattcttttttgcatctaaaaaattcacacgtacgtaatattttaaatcaaattaatgtgaaaaatacaaaaccattattttcacgttattagacaaccttacggaactatatatatatatacataaatattaattattttctttagtgattaagatggatcgttgctttacttgagaaaaggagaggttgatatggaaaggcatacatactacacatgaagttgtacaatatattgtatttatatgtatatgtatgtatatataaataaggagttttttatatagttaagggcattacttttgcataagggtgttttctattatagttgtaagacatttttgataaattttttgaatgtttaacggtgtcgaaaataaagtttaaattagtatgttgcatgtatgtaaaataaaaaaggcacacataaaatttcaaaataaatagatgtgacaaatgatgaattcatttcttacttatattattctattttttattaggatcactttctatatataattataataattaatgaatcaaaaactttcaattactatttttatttatcttcgtattttttataaattttaagaagtgctttagaaacatatgtataattaattatttcggttttctactagcagctttaactataactatatattaatctgaataacaagacttatttgaaattaattgaacgaaacaatttataaaaacaataacatataaattacttagaatttcttgaaaaataaataggatgcctaatataattatactattatataaaaaaatggtttatagtttctcaatataccaaaagtaaaaaatgcttgctcctagcaaataatatttggaggcttggagctttttcatttttacacttc

SEQ ID NO: 39574 - DNA, 1620 bp, Cannabis sativa
tgcacctgagttagtgaactaaatgatggtacagatggaatggtattgcccaacccttttgaaagggtaacatatttaaaaacaagctgtttgtagttattaagcagatcctccacatcactgacagtcaggtccccagcattggcaaacaagtatggataattctggaatacttgcctcacctggtcttcctttaaaagcagtcctgcacctttattctccaaatctgagagggatgggatctttgtaaccgtcgactgatctttcccgtaagggttttcagctctggctctcatttcagatgctctgggtcctagtatagaatccttgctaacatttagggactgctgttttgattccttgaactctgatggagatatatgtcctacatgttgatcattttgattggactggttgtttaaatcagctgaaagtcccgaatgaagagctcgggcagtttccatgttcttttcaaactccgtttcttccattgaaagggcttttgcatcaatgtttgagatgaaagattcaacagatagcatgtttgtgaaataataggatgcttcacccactaatcgcgactgatgcctatacctctgtatgtacaacaagttcgagtgcagctgcggaggattggcctgcttaccatgtaagaaaatcaatttggttataatgggtagaaataatacgcaagaatattagaatgttgtcacttacacacacacatatacctttatagtgacataaattagaactggaaggaactcatcagctccaggggtattctcattcgaagcaatggaagcattaagcaacaagttactaataaccttgcagcaattaaggatacacacaagcttgtctcttggtgccttatacatattgatcttctgtagttctttctgtgcaagctgcataaatgaagtaaaagggtaggcataaaacttcaacaggaatttcaaagacaagttaaccaagttcacaaaagagagaaactagcattacgattattgtctattgcatattctcaagtaagaacttaagaggaaaaacaggaaaaggatagggaagagactgacaaaacaaagttaacttattggagaaattaggatagtgacattgaagaataaccctttgagtaatcaaaactaccaaaatcaaacgatattatgtttattataataaagattcagacaaacaagaactatgctcaactttcatttccacaaacattaatgcctaggatggatctgctaatagctctttctttacaatttgttaaacagttgccgagaattagaaactacaaaaatgagtcaataaaaatcatagaagccagcattttgtatctacaaaatcaatttcagattttgaagaaggtatattcttgacattctaataagcctaagacttatcttgtgtatcacaaaattattaaatgaaatacttagtcttagaacatctccaatggggatgctttacacacacacatataccaatagattattttatcaaatcggtacggtgagctgcagacatggtgcccaataaacaagcagaaaacggttattcttctatggttttggaggaagattgtgataggaattcacctatcaacaa

SEQ ID NO: 39575 - DNA, 1045 bp, Cannabis sativa
catcatcaaagaaataagattactaatctgaaaaatacttgtgtagagatgtagaagtaatatgatttgagttcagtttatttgtaaagatgttaattacagtatatttaattgagatatgttatgtgataaaagcatggacttggtcattcacaattttaatgagtaatgttatttcaatttaagtataatttttcaacttttatttaagctgtaactaataaggaatagagtcacaagttacaacacacatattgaacttttattgttttgctgctaaaatatgattagaaactgaagtattaagaaaaactcattaaacttatttaaaaataaaataaaagtgctaattacagatttcttataatatatgagttgtttagtttttatgatcccacattgacacttgatgttaattcatggacaaaattgtatcataaatataatctttattaacaattaaaccaccttaaacaattattataataacatatatttaatatttttatgtattttaataataacttttatattagacaaagctaaaaataactaacttcttcttgaattaaaataggaacaacaattgggttatacaatcaagtaataaatgagtgtagctcagtttaagaaaatatcaaaaaaatttacgtagttcgaggttaatatattttagtccacaaattaatattattgagctagaaaatcttcaaagtatttattgcaaatgtttttgccctatgagatgaaccctaatttttaagacttgaccctagaattgaattttcaagcctttgcattaagggctaatgttctatagggtagaaggtgtcaactaggcccactgatggggtaaaatataatatttattgactttgggccaattgggcgaggcccaattcacgaagagcatatgtacaagcggggaccatttgaggatgtaagatggcggttaaagtagggaacaaaccctgacaaggtggggccctttgtctggacggttacgtgtactcttgttaatttattgttgatttttttttttgtt

SEQ ID NO: 39576 - DNA, 1816 bp, Cannabis sativa
aacactccgtgacgtcatccttccttccacgtgtagaacattgatgttcacgtcacaagggaaagtttgcgagttaacacactctaactgtctactactctaacaatcttaaccaactctaaccgtgaggtgccaacttagctgacttagaatcgttaacaataccatttgttacaaaattcacagaacgattaataaaaactaaaatacatgacaaaaattcattcattaaattcattagcaaggagaaatttggaatcgactttccatatcgaagcacaagtttgtgttctgacttgcaactttggacagattgagactaaaaatattgttccaaataatgtgtagtaagtatagaaaattgaaagcatataatttttaagtgtcacttgagtttgttgcttgaagaaagttaaaagatgggtggtaaccacggttaattcaattgatactttattgaagaaattaccaaaggagaaatgaagtaggtttccaagacaagtttatactaccaggtatggttttatggaacttgaaactttatactacagattcaattgtaaaaaaagtcagtttgatgtaaagactagaatttaaggggtaattcctaaaaaaagtattacaaatagatttagcttggtttgaaaatatgtaattataagaggcccttgttgggtgctttagacttgtaaatgttttttcagtggtaatatagatttctggtttgaaaaaaaaaaatgaaatagaatgcactaaactaggaatgtcaatatttggaatctattcatatcaaatagccatcattccttcacattatgtgtttgcctctttggatttggaactttgtcggtggtgctatcttattattattattttaaaattattttccaaaagcactttatcacatagtgatgtattgttattcatattattatttaaaattactctctatttcataatactattactataacatattgacacaatattcttcttaattaataaggttatggaaccttaaactttcttcaacatattttttttttatttttttaaaaaaaacttaaaataaataattgaatggacaatagaccaaaaatgttcgtttgactattatatcatatggtgcttagactgtaggcaaagaatacggtgttgtatgatgcaatattttcaagtagtcaaaatttggttgatatgttcatatgattttgtcatcataataaaaaatattttacacaaaaaacaatgcacatttttcccgttcaacacggttatcattgcacatatacaattttcttttttgacaaaatatacaaattttatttaattaaactgatttttgttttttatttttttgttttttgaaatgtcaattgatgttattatatgtgaacaaaagaaaagttaccagataaatgttacaagttgtatataaagtttaaattaatgatagtaataacttccaacatgaaatgctcacctcaccacccttttgtttttattattttaattgatctgtcaactgtaactatctaatcttattaattctctcacctattatttcttttttttttttacccccaattctagagagagagagtcaataaatacataactatatcaattacccagcaaaagaaagaaaaaaatctcaataaataaataactataacaatttaatgagtgtgacatgatgtatactattgttgctcctaaaatcgcccaatatacgtggaccagtcaagaggggacacgtggatcaaattacttgggaagaactgctaagtctttttatgacaccaggaagcgttat

SEQ ID NO: 39577 - DNA, 1899 bp, Cannabis sativa
atggtaaagaattgagccatatataagaacatgggctactccactcattgtcaattgattttgatggaatctcataattctcaacatgaatggcctctaagcatggcttaaccggcattagcacagggtctagtatgacataaatcaattactgttaataaataaattaattaatagcagataataagttaataacatactatattacatgttgaaatcttttataacatatttatattatatctatatgtatatataaattagtcccatgcacactcctggcgtagattcgtataatcaaaaacaaaaggcttactttatccctttgtctgtgtttcctcaatgaaaagaaattggttcctttgatccttccccatctcctttatcaccttctcctctactacccattataaacttcttcattcacttttgtttttccttaatagattaccttcttctcttcatatattattacattataaataactaaaataataattaataaccttgtgtctgtgtttatgggggctggtttctcagtgttaggtgaatcgagagagagtagtggtaataatggaataaactttggttattcgaaaaaggcgaaaacggtgctggatgacttgccggagaattgtatctcaaccattataaaatacttgaatccacctgagatctgtaaactggctttgttgaacagagcttttcatggtgcttctttggctgattttgtttgggagtcaaagcttccatccaattacaactttcttctcgagaaattactacttcaatctcaaacctacgtgcctaagaaacatatatattctaaattgtgtcaaccaaatcggttcgatggtggtaccaaggtataaataaataaatatataattaattacctttcattttataacttacaattacaaatgtcatattattattatgtatataggaagcttggttggagaagagtagtgggaaactttgtttgtccatatcgtcaaaggcgttgagaataactggaatagatgatcgaagatattggaattacattccaactcaagaatcaaggtcagaaattcaattaagaactcatttgttaaagaaaattcgttttattaagcaatatgcaataggttggtttgttgactttgagtttttttgactacctctctgtgtgttcaaaaatacgttgtttcttttattcaatcatctttttcaatcgtactcatatcaaaagtctctctgtttcctttttagccatcaggaatgtatagtaaaatcttctttattaatatatttgaaagcacagaaagttcctggaaatttcctgattttggatttctttgaggctgaataactgtgccatcagatattcaatagtaatttaaaggaagctcataattgttttttcttgttgggatgtttagggttacacagttatgtacttaaaacttttcttttttagataattcgaattatggcattgttgaaattatgacaaaaaagaaatagataatccgataatttttaacttttagatcgatatatgcgaatgtgagtactgttcaatatatatacatgaacaaatcatcgtatatcaatattttttggtgtaagaaagtaaataaaaatatggtgattttttttttttttttgtatttttgatttaatacctctttgttaatgtgtaaacgtgtggatatgtgacatattttattagctcacctatacaacctacgtactttgtagtaatcttaatagtggaattcaattgacaccaaatttacaaacaaaaaaagaagttaattggtattatcacaaaaaaaaaaattaaaatatcaagagattgatttagcactaattactcatttttcttttaatacttaaaaaaaggggtaa

SEQ ID NO: 39578 - DNA, 1383 bp, Cannabis sativa
ttaataaatcatgttgttgtttgcaaaaaagtatatatgttgtagtgatctattattatgtgatttcatatttattttgaattctcaattgaactagaataagtatttttcattatctgcataaaaagaaacttatttattatattcattaataattatttgactcttttaaaaatcttaacaatttttttttttaaaaaaaaatagaaattttaacttattattataataatgtatttacatatacgaaggattgacagaacaaacaaagtatgccataattgcctccttgagaagatgatcagacctaaaaattttgaacttgtaaattttgcaattattaattagaggaattaaaaacaccctaatttatataaaatttgtacttttaatttatatactaattatttattttaatattttttcttccttctcacattgacatatacaagatacatatttaaagtaaaacaatatatattttaaaaatgaagaagaaaattaaaatgaaaagttttataaaatttcattagaaaaagaatgatttatttataaatataaaatacgaaagcaaaatttaaataattattgtaattaacaaaaaaataatgtaaaacgaaaaaatttaaattaaacaatattatgaaatattttcgaaattaatttaagtttttctttttctaattttagattgtgtaaatttgtgaggtgcaaaataaaattctcttattaattataagatttatttgctttgaaaattaatattttattttatgaacaaatgtacgtgaatttaatttaatgggccaattccaagtagtttgaagctatataataaagtagaaattacactataaatggaaaaattttaagattttatttttttatggcataaataaataaagctaaggggttatgggtttttttttattatttttttatatttatatgggttttttttatgccatatttttgtagtaaaagatggaaatcccatatttataaacaataataagttttgccggaaaagtcaccggaactggttctattttaattataattggtttaagttattttgtgttatttgtttttattcactatgttacagaaccgattatattttaattataaccggtttacgttattttgtgttatttatagagttggttctatttttattatccgagacatttccccactttttttaaaaaaaaaaaagaaaattataactgattttatgaggtattatgtgttatgaagtattttttgtgaaactagttttatttttaatttatatttctgtgttttaggagttgatttcttctttgtttttaattgtagtcggtttgagttattgcgtgttacttgtttgtattcattatg

SEQ ID NO: 39579 - DNA, 1050 bp, Cannabis sativa
ataaataaatagttaattataatgtataaatgtattatgtttgacttataagtaaataagcatattagtgggtaggtgacaaggatccaacatgaagcatgttcagtgacttcatacaagagataaaatataatttctatatttatatatttattgtcataatttgaaacaacaaagatgatgtgaatttgggttcaattattatatatatatatatataaaataatattatatgtaattatttgcttgtaatattataattattctagagattattaatgaattggaatttggaaggaagaggcatggggtggagagtgtttatattccactgttatctctgcctagtaggaatagggatacaatattataacattagttttttcaagtaatataattcaacaaaagacaaatttaatatataaaaaagtcaaagctaatatttaactggaccaaggttggattcaatgccatcaacaattattcaaatatttctgcaataatcgtggattttttttttttgaaatggaaataatcgtggatttaatttcaactcttttctcattttctaaatatatattagtatgtggaggagaaagtgttagctagatttataattttgtttcctgattaataagttatggtaattatatacataagtggtattataatagtgtttttcttttgtttttttttcttagaagaatctctcaagtttttgacatgagtctcacaaactaaccaacatattttaattaatagatcttataatttttattaaaaaaaaataaagatattttaagattaaaagaattatttataaaattgtaaattaaaatttaataaatcattataaaaatttatcaagattaaattgcacatatcaaaatattaatttatcaaaactgaattattttgagatcacactaaaatttataaaatatatataactactaaaaatattagtatttttatttttattggtttgttgtcttatggttggtgtacctaccctctctttttgttttgtttgaatctttgtaagtcttt

SEQ ID NO: 39580 - DNA, 1217 bp, Cannabis sativa
  modified_base (1083)..(1097): a, c, t, g, unknown or other
acaaaatatttgaatctatatttcgggattgtaaactattcgaatttataagtgagactaaataactacaatatacgcgttgttgtaaaaatttattttgcgcaagtatacgcagccacacaggtaatataatgataagtaagatcgtctccacataaattgcaagtcaaatttgatgtaaaaccaactcttctgaacaacttgatattttaagaaaattatcttggttgagtaatgaaactaaaataaacttgtaataatgagagtatgattaaaaaatatgattacaatcgattgctgaaaaattatgtgcaagaaaaagtatcaatggaaaaacaaatttgaataactaaattctatatgtttcaaattgcccagattgttacaacatcgcttcaacaaaacgcacagagtttactaaaattttcaatatgctcatgagatttttccaaatctcaagaataaagttctcccacctaattaaataaatttttatattaaagcggatctaagaacacaattcaagcacaaattctcacaagatatgcaagatagtaaaatatttctattttacttactaagaacaacctaaaaatgagtatatcttgcatcatatccaagtataaattactagatctaatcttttcaatactagatctagcttaataaactgtcattgagggccaaacaacaacaattaagggtaaatggcagcaaaaccccccaaattttcattttggtttcactaaacccccaaaacctaaatttaggcggtaaaaccctcaatactcgcgttctgttagcaatttaatatttctgtccattttaagtgttaagtgccatgttggactgtctacgtgtgtatctacgtggatacagtgtacacatgacacaattctattggtccacgtaaaaaattatttaaaaaattaaaataaaattagtttgaaataaaaaaaaaaaattgtaaatgaaaaaatattttctttttttttctttctttttttttcgtttctattttttttttcatttacagttctctctctcttctctctctccccccctaaatctctctctctctcnnnnnnnnnnnnnnnctctctctctctctctctcccgcagaaaccactatcacctaaccaaaaccactagcatctcaccaaaaccaccaccacagaaacccaatcaaaactcacctaaaaaaaaaaaaaaaaaaa

SEQ ID NO: 39581 - DNA, 3034 bp, Cannabis sativa
ttttattattattacataagaaaaattagaaaaaaccacaaatttagaaaattagaatcctaaaatattaaactgccacatcattgtacttaacaacagaattatgtatatatatagatggttcatgtttaaataaaaattataaaactttaaaaattcttaaaagaacctaaactttaaaagaacttgaaaaatgtatagataaaatagttgattgattataaatattgattgagaaattgactcgatgccattttgtacttgtatatatttacatctcacttttatatacaaatgacaactttgtaaaaatgttaataaaatattatattacaagtatcattgaactaaaattgaatttgaatttgaattgaaaaaataaattattaaattgaataaatttaatcaatacataattaaatttgattttctgttaaaaaaatataaataaaataatttgaactcaaatttaaattatatatatatttattaatcataaattagattaaacaaaataataataataaattaaatatctaaacaaatatttaattcaaagattcaattttattatatttgaatttatatgttcaaataaaaataattgttgaggtttgacctcttgaatttggtctcactgtcagttttgatagttagcaacttcctccaactaacttaatgttttgacagttaaggttagttagttgctaactgtatatatatatatatatgtatatattgaaggcctcttatttgagttgagttgagacagaaaatcagagggttgagttaggattgagagagtgttttttgagagctgtaattggcctctcttgagattgtaagagagagtcatttgagagacactttgtaaggagcaagactctattttttttcaagggttttatccctattttgtacctttgttcagatcaataaaactcatcaccacagccatgattaaggctgctttctcctgtggattaagctcatgatcacattgattgtgtagcccaaccacgtaagttctaattgtcttttagtgctttcattaagtttttttactggtttaagttctgttttatgttgctggttttatgttaaatgcgttcttgatctgtgtgtgttattcttgatgttgtgttggttcttgttgggagttcaagcctccacaaattggtatcagagctgaggtttatctcggaaattcaagaatcaaatttgttcttcaaagaactcaccaagaagatcaaggatgtcgagctcgaagttcgaaattgacaagttcaatggtaccaatgactttggtctatggagaattaaaatgaaagcattgttggttcatcaaagtattttagaggccttgtatatagaagctctagcagccattgatgacaagaaaaagaagtttgaaatagaaaccaaagcacacagtgcaattctgttaagtttgggtgatgaagtcttaagagaagtttcaagtgagggaaagccttgggattatgggacaaactttctgagatttacatgaagaaatctctggccaacaaattatacctcaagaagaaactctacactctgagaatggatgaatccaaagagttaagaagacatcttaatgactacaacaagattattctggatttatgtaacattggggttaagatcgatgatgaggatcaagcaattatcctactaagctccctgcctaaagcctgtgaacattttgttgacacgattctgtatggaaaagactctctcgccatgacagaagtcaaggctgcactaagttctaaagagattcaaaggaaagaagataacaagattgaatcgagtggtgaaggtctgtttacaataggcagaagcatgaaaagagagtataaaggaaacaagaatcatcatggaaaagggggacacaaagccaaatctggttcaagatatgctgcagggaaacaatgatattattgcaagaaagaaggcattttagggatgattgtcttgctctcaaagccaaactaaagagagagcaaaacaagaaaaacaagtttaaaggtgaagctgatctagctccacatggatatgaatctgttgatgtacttgttgcctcaagtatgaattctggtgaagagtggatattggattcgggttgctcatttcatatgactccaaacagaaagcttttcagcacactgtcagaagaacaaggtggaagtgtcctattaggcaacaacaaatcatgcaagattgaaggaatagactctgttcagatgaaaatgtatgatggagaaatcatagtcttgaaacagttaaggtatgtacctacactgaaaagaaatttactctcaattggtgtttttgataaaaatggttacactgttaagatagatgatggtacactgaaagttactaggggtttacttgttattgttaagggaaaacttagaaatggtatatattatcttgatggtcatactatcactgattctgcagcaccagtgatagaaaaatctcttgaaaatagcattaaaatgtggcatcttaggctgggacatgtgagtgaaagaggactggtagaacttgacaagcaaggggtattcaaaggtggtctaaaggacaagttagagttttgtgaatcttgtatattgggaaaaagttgcaaagtgatattcctaaagggcatgcatacaactactgagaaactgagctacatacattctgatctcttgggtccctctaagattcaaacattggggggtgcactttacttcctcagtatcattgatgactactccaggaaagtctgggtattcttgctgaaaataagaatatggcttttgaaacctttgttaattagagagccatgattgagaaacaaacaggttgttgtatcaaggttttgaggactaataatggccttgaattttgctcatatgagttcaagagttattgtacaagagaaggaattagaagacacaacacagttgtcaaaaatccacaacaaaatggattggctgaaagaatgaatagaactctt

SEQ ID NO: 39582 - DNA, 2191 bp, Cannabis sativa
ttgttgttgttgtactccatatgtgggcatgcgcagtgaagtaactccaactctatatgatttcttgaaggtgataatcgagttatcgggtattatattaagttaataatatataaagaatgggtggattgattatgttgtttgagatagaattaggtatttaagtttttttattaatgaaaattagaataaaaaagaaagaaaattggagaaaataaataagttttaagggatatataatatagtatagatatatagatttaattaagactacattgatagatattttcctaattatatttaaatttaaataataataaattatttaattagagccaatatcaaatagattaaaaaaatttaaaattaattaattagttaaaaaaataaaagtatttactatttaattagagccaatatcaaataacccaattagcggaataataagctggtgcaggccctatgtttcgccttccccgcattattttcagattgattatgagaagcagattttgttgctgcttgttttatcatagtggaggttgaaaaaggttggagaatgttggagtaaacctccattatagagctgacaagtggaacaaatcaatcaaatgtgaacaaaatttcattacccaacaaaaaacaaactaaacccaaaatagaaaaattaaacgaacaaataggagaaacaataggagaaggatacggagcttgtaagcgcgcttggtagtcatgactaccaaaacaatggaaaaccccacttcagataatcgtgtgaataaaaccctaatgggatcggcaaaaatctcaaaggcagcaccaaagtatttcccaaattttcaaatccaatccggcaatgactgcctcattctccttccctccatgaaaacagacatggatgaacaaagatttctttctagtgtcagattagatcagagagaaagtgggaagatcaaataaagagttggaaagcgaaccttaaagctacatttgttggaatgaaagtagttttgagagatgggtaagtttggttcaaattcaacctgctttgctttagatttctctctctctctctctccgaacttccgaaggccttgttcttgttcttcttcttcctccattatttatttttttattttgtttttgtttaaattcaaatgttgtagagactacagagaagagagacaaacgacgtgcagaagcaagtatctctatactactataccaaatagcaatccaaacaatgaactggaagattttttttaccatggaaaaatgtatacaaataaagaaaaatattttcctttattttcttttttattttaagggtaaatggcgtcaaaatccttaaaattttcaatttagtttcacttaatcccaaaacttaaatttgggctgtaaaatctccaatagtaatttaccctttccgtctattttgtgttggactgaacacagtgtacacgtggcataattttattggttcacgtaaaaaattattttgaaaaaattaaaaaataattataaataaaaaaaataatttttttcaccaagacttcattctcgaccgggacttcttcgaggcagaaaattccatcttttttgcggttctggagattggggatttttttttctttctttttttcctttctttaattttctttttctttctttttctttctttttttttcttttctttctttttcttcttcagtgcgactctctctctctctctctctctctaatatgcaaaagcaacatctgcccagactaccgcccacttcctccgcccagaccaccacatctacccaccaccaccaaagccacatctacacaccacaaccatcattgaaacctcttttttcagattcaaacaaaaccccacatctcatatccaaacacatcaaagagacctaaatacctaccgaaattcgggtcctgattccataaaaacaaacaaacacaaattaaatccacaagaaaaaaaacttcagattaaagagaaaaaaaatcgcaagggtgtgagagagagagcttactgaacacgaggctcgtgagatctgagatgtggggttttgttgatctcttccttggtgtcaggcggggctcgtgagggtggagaactgccggggtggctgcccaagggttttgaaaaccctagattgaaaatccaagagagacagagagaggagat

SEQ ID NO: 39583 - DNA, 1777 bp, Cannabis sativa
aaaagtcagggccggccctgcttaaaattaaattaaattttaaagtttatgtagaaacaatttaattattattaaaataatattttaatattgaaaaattgttttaagtttcttaaaaaaattaaagttaaaatataaaaattaaaaagtaaaaactgagaattgatcatttgatattcagacttgaaataaattttttagtcagtactattactctaaacatttttatttaatattttatctatatattcattttcttttcataattttgggtttggaaccgctaaacgttcagagattcaaatcacacatttttcttgtcttatcttaaggtcaaccctgagtcagaccattatagtatcgaacactattagtattaatacttaaatagttatttcttttgtttttcttaactaaatagtgactctttgtggcgtttggttgagggaaatgaaatataataaaattaaaaggaaacaacttttattttttttttctttggttttattttaaaaaattgaaatatcatttcatttcttccaaccaaacgctacttaatgaaatgtgtgttatgtgaatttgagttagagagagtagagttagaaggagtagacttggagagaatataaaactcatgcttttgaggggattaacattaccacaattttagtttaaaaagtgaaacttacttgaaaatacaaactctttgtcattcaaaatttaatttaaagtttacatatccattcctatcaagtctaaaattcataccaaataccccattaagtttagagaggttgtgaaacacagtgacaaatgtaagtaatacaatctgtaaatttaataccaaacaaatacgctatacagtttttttaagcattggaaaagagagattcacacatggaactaaactgtgattagaacatctagttttaaaaaagaaaaactctaaaatattttattgtttgattcaaataaaaaagtacacaaaataattggaaaataaaagagagtagttggattcaaataaaggagagtagttggggttggcagttgtcacatgtttaaaaggagggaattattatttcatacaaaatagtcaatagtctatataataactcaatatataatatgacattgttctcatgtggggaactatataataactcaatataataactcaaaatagtcaactatataataactcaatatatagttggatttcactgatgctttatgtggggaagcggcggcttgctgtttggctatctctgcagccttagaagtggaagcccggtatatcattgtggagagcgattcgagggtagttataagtgctctcaatgggaaggagtcccgttgggtcattagtaactatgtctctttttgtaacagtcactcttcacgtttttccagttgtatttattctaatataagcaggacttgtaattatgtagcccataatgtggccaagtgggctttttcccacaatttggttggtgatattccgctatctaccatcccttcgaacattttatgtaatgaccatgaggtctagtttgtcggttaatcaaagacgctttccttcaaaaaaagacattgttctcataaaaaggaaaagaaaaaaaaaactgtcttttacttgttaaatatttctccaacaaaaacgtggtcactcgcgactttgagaaaatatgacacgataccatgatactataaattaggtgttttcatcaaactgctcaaaccgtccgcaccatactgcatcgcaaaaaaaagt

SEQ ID NO: 39584 - DNA, 1584 bp, Cannabis sativa
  modified_base (413)..(418): a, c, t, g, unknown or other
tcatttttgaaagggtttaaggaatgagtttgaaaacccagatgaggggtttgggaggaatatatgagcgaagagtgagttagtgagatttgaacaagaggttgtcagagcccattttttagggaaagtgatggagaatggaggaaaggagtattaaataaatggagtttgagttgcgttctttctggtgtttctcttgtcccgttagagagagaaagagagagagtaagagagagtggcaagtaggggaagaaggaaggagtgaagtgttatatttatggcgtttcaatggtagacaaggtaataaaagcttcaagcttttagagtctttttggttggaaagctaaaagaaaacgaggtgaaaatattaattatatcaataaaatatcaaaattaagagagagagagagagnnnnnnagagagagagagagagagaggcaataagtaattctaattttgtaaaatactgtgggaaaaggccgaacagcatccaagaggaaaaagaatgtcttaacccaaacataaataaaaataataaaagaatggaacgaaatggagttccttaaaaagaaaatatatttctttggtagatgttcaaattatacatactttggttggttgtcaaccttttctttttctttcacaaattgattcctcaactttaaatttttggttgtattatttactcttaatcatcatgggctagcactcacattaactttctctattaaagaaaatttttgaaaaaattaaagaaccatgttaaaaatagttacactagatactaaagtcttttattttaaaattgttttaaaattttttatcatgctttatatttatagaatattacttattattttaaagatattttattaattattttaagttttaataattatttgtgtataaggatatgtgtatatattaatattatatatttaaaataaataaaatacattaaaatttaaaaaaaaaaaaaaaatagagttttggttatgtattctaaagaaattgatgtatggtgtaatatagaagtatgttgtaaaaaaattttaaaaaaaagttgaatttgtgtgatgtattttaaaagatagagtagagagatttttgaaagtgtttaagagtatctctaatcttgacaataattttttttttttttgacgcggtgatcaaaatcacaaatgattaaataaagcagcaatccacaattggcggagacacctcctcgaaccaaggtagctcatcgtctaaccgaagggcatgctttgccaaaccatgtgctgcagaattcttatcctgagccacataagacaaagccgcccccgaaaatttagtgtaagaaattctttcaatttcctactacaacaccataacttacaataaaaatatattctttattataatttatgtttttaataaaatattatattaatttactataatcatctcaattattatgcaccgatgcatccctagctgtttttggcatccagtaaaaaaaatttagtctattttttttatagtcatgtatgttaaaattatttaacacatattgtaaaattttgagaaatttggaataattt

SEQ ID NO: 39585 - DNA, 1625 bp, Cannabis sativa
tatatattatatatatatatataacaataacaattgtttgtttctttaatttattcttggggttttgcttctctttccacctgcaacaagttcctagacatgtatatattgtctccaagatgatgaccaaattaccatattgccctcccattatattatgataataattatatatttctagctagtctttctttctttcacatcattaattttgtacatctatatatctttgaattcaaaccattttcaggagttttctttgttggattttcgatctgtacatgcctacttttcttttattacattaatatatatgctagttaatctcatatatatattgctttgtataatataatatatatatgtgtgtatatatatattaataaagaaattaaaaaatcaataaaaatatataacacaacaagattggatatatatatgtatataatatgtctttgcataaaaaccgaatcataatattaagctatatgactctcaatttatacaaaaccctaaaattattatataagaaaaatatgtttattaacaatcttttactcgtaacaatttttttttataattaaatatgacaaaaaaactaaaaatatatttacccataataaattataatttttgtgactaatattttcagctacaaattttttaatcataatatatagaaattattaattattaattagtctcaaactttttcagttttatttgattttattataattaaaaataaaaccttttgtattaataaatataactatgggtgaaaagttactccatattataatcatttctcagcatccatatccatatacctatacttatggctaataatattagttatatacatataaaaatatagatataatatatatatatagtacgtactttcacctttattttacaatgttaaaattaattaagtgtatagctatatattattgttttgaataatattgatatatgtgttgcgcatacaaaaatttaccaaaaacagatatatatatatatagtatacaaaatatgcacacatatatcactaattatctctcttttattatacatctaacgattttttatttacgatgaaaattacacataattaataataagttcgaatataagaataacacatcctttaagtgaaggacataaattataaattatttttcagaaatttaaacaataaaacttctataacatatatcctcaaacagcattatcaacttattaaaaacactcttttttttttattaatatatcttaacatgatcgagtgaaataaaaagacacctttatataaaaaataaatatatataaaatttaattataaataaacaaactttaatttgcttaaaaagtactttttaaaattttaaaattaaattttgctgaattaatattatttaaaagtcgtaaattggtagtggtcttttcctactgaagaccaaatagtaatatataaatatatatatatatatatatatatataacctggcacacactatatatacatactctgccatatatatagttcttccttgaattcccaaaatcgaatctctgaattaactaagacaactctccaaaccaaagatggtgtagttcta

SEQ ID NO: 39586 - DNA, 2715 bp, Cannabis sativa
gttcaatagatttgattttgatctcaaattctgatttgaggaataaaaattagccaagacaagcctacacctgatgatcgcaatccacaagaaccaagaagattaaccactaaaaaaactaatattataaaagggaataacacctcagagtgacagtcgcaacagttttaacacaacaaagtgaacaatattttctctgagatattctccttttttttacttcaacaagcatacaactaaaaccacatacctttactatacatatcatatatagaagtacatacatattaacatgaacttgaatcaaaactcatcaaccaaatatatatctatattctttccagataaatgtgtccacgcatgtgtgtattcatatataaatagcaaataaatatgatatagataacacataaatatacatttgaaaattagatacacatacaacataaacaatagatctccataacaaaatacttatgattatatccttatatggtaagcaatacctgaaaactaactttccagcttgtcaaccagatttatgatcagtagttaatgtatacatttggaagcaaatgctgaatatatcagtccatgaaatgtaactaccgcacatcaaaacattatgcatataccaagaagatacagatttagggaactcaaacaaacaaaatttagttaagacatttctacaaacacaattcaccaaaatccctactagaaaaaaaggtcaccaattcaaaaaaaaagaaaaatctttacaacccataaagcctaaaaatgtaatttctagctaaaaggaaattcaaaaacatcaagagaaaagaaaagaggaataaagcaaaccttaatcaagattgtgtgtcaccacggaaaaattcaaacaaaaatcagaaaaacatatactgagaacgtgaagagtgagtcatgagattcggaatgggaattctacgcaacaaatttcaaaccctaaactacttattcacaagagagagagagagtaccttgggtgggagcagtaatggattgtggaagaaggggctgttatgttaaggtaaactagcagaccctaaaaattcaatttttattggttttttaataagggtttgtagccgatgatgactacacctattactaaaagaaaaaaaaaaatcacttaaataatttttaatatttttttacaatttttttatattaattttaattttattttttatatttttaaattatgtatatatatttttatttttttaagaaagttttatataattttttatttatttttttagtataatatttaaaatataatttatttatattttataagtatattttttaaaaatgtaaatttaaaaaaattaaaaaaaaaattagtacaattaaaaaaataaatttatataaaataaaaattattaaaatgaagtgtttttagaagtttttgagatgcaaataaaatttttttatgataatttttttaaacataccctctttgttttttttttttttaccatcaaaattcaatttcttttataataatgattaatgaatttgaaaataataatttgataaaagtttacaagggtaaatctgagttcattggtttgggtctcagggtccggatcgcagggtctgagtctaaggtttgggtttggatctggggttcgagtctcccgagtctcgattcaggttaggatttggggtacgggttgtgtcttggggtctgggtcggggtccaggtccaggtttgaggtttgggaccatgtccgagtcaggggtttggattcgggtcgggggtccaggtctagattggggttaagtaattggttcttgtgtttccatttatcttttgattgttttatgtgtcttatgtttttcttttaattttttagttagttatattaaaaatattactttctatgtttattttaaatgtttaataattattgttatccgtgtttttgtaatcatgacacatgaattttaatcaagaaaggttaaagagtcattagcttcccaacctcctcatttgatgctctgggaataaggccataactttgtaggaagaatcctcgagatagggagttccttgactgatagcaacacgaagggtatctgtaagccctccgtttcaggaaccaaagccgtctactcccaaagagtatggatttttccaaaggggccaaggcaggctatacgtgtcaggctacggacctagtgacaagggctttttcaagtacgacgtcagaagttgtctcccacaacacattattgtacagagcatgcgtgtccttgtgtacatgaccaaatgattcagcggctagagataaggaaaattcaaaaaaggagaagccctgggaagacacgagtccgaggcccagcttgtacgagctaacacccttaaatgccatatggaaaaaatgggcaccgcttagtgcctttttattataattattgggtgacttctttattttattttaataaaaaataattttattctaagatattttattataataattaaaatatatttttcaaattttgatatttgcagttagtttagagttatatgttatttttaagagtgttggcctgtgggtctcataattaatatattttaacctaactacccatgtatgatgcaaaaggaatacgcaggttcatacattccacttttctttatttcattgaaaaaaaataaacaaagaataagaaagt
